United States Patent Application Publication US 2005/0255487 A1 - sequence listing, part 89

SEQ ID NO: 2447367 - RNA, 19 nt, Homo sapiens
  misc_RNA (1)...(19): siRNA sense strand
aggcacugcacguggugaa

SEQ ID NO: 2447368 - RNA, 19 nt, Homo sapiens
  misc_RNA (1)...(19): siRNA sense strand
uggaggugaucuuuggcaa

SEQ ID NO: 2447369 - RNA, 19 nt, Homo sapiens
  misc_RNA (1)...(19): siRNA sense strand
aggccuaucuaauggacga

SEQ ID NO: 2447370 - RNA, 19 nt, Homo sapiens
  misc_RNA (1)...(19): siRNA sense strand
aggcugagguggugaggac

SEQ ID NO: 2447371 - RNA, 19 nt, Homo sapiens
  misc_RNA (1)...(19): siRNA sense strand
gggacauugccaagaacca

SEQ ID NO: 2447372 - RNA, 19 nt, Homo sapiens
  misc_RNA (1)...(19): siRNA sense strand
gaggagaagaaacuggaga

SEQ ID NO: 2447373 - RNA, 19 nt, Homo sapiens
  misc_RNA (1)...(19): siRNA sense strand
agaaggugaagcagcagaa

SEQ ID NO: 2447374 - RNA, 19 nt, Homo sapiens
  misc_RNA (1)...(19): siRNA sense strand
aagccauaccugaagaaca

SEQ ID NO: 2447375 - RNA, 19 nt, Homo sapiens
  misc_RNA (1)...(19): siRNA sense strand
cggagguggccaagaccau

SEQ ID NO: 2447376 - RNA, 19 nt, Homo sapiens
  misc_RNA (1)...(19): siRNA sense strand
gcauggagcgcaagaccca

SEQ ID NO: 2447377 - RNA, 19 nt, Homo sapiens
  misc_RNA (1)...(19): siRNA sense strand
ggcugagggagaaggugaa

SEQ ID NO: 2447378 - RNA, 19 nt, Homo sapiens
  misc_RNA (1)...(19): siRNA sense strand
ucgaaagucacaagaagca

SEQ ID NO: 2447379 - RNA, 19 nt, Homo sapiens
  misc_RNA (1)...(19): siRNA sense strand
agccaaacgaggagaggaa

SEQ ID NO: 2447380 - RNA, 19 nt, Homo sapiens
  misc_RNA (1)...(19): siRNA sense strand
ugucagaaguacagaaaau

SEQ ID NO: 2447381 - RNA, 19 nt, Homo sapiens
  misc_RNA (1)...(19): siRNA sense strand
ccaaacgaggagaggaauu

SEQ ID NO: 2447382 - RNA, 19 nt, Homo sapiens
  misc_RNA (1)...(19): siRNA sense strand
aaaaugacgccaagagaaa

SEQ ID NO: 2447383 - RNA, 19 nt, Homo sapiens
  misc_RNA (1)...(19): siRNA sense strand
aggaaauaucuguuggaga

SEQ ID NO: 2447384 - RNA, 19 nt, Homo sapiens
  misc_RNA (1)...(19): siRNA sense strand
agagaaaggaugcggcuga

SEQ ID NO: 2447385 - RNA, 19 nt, Homo sapiens
  misc_RNA (1)...(19): siRNA sense strand
gaagagagguggcaaggca

SEQ ID NO: 2447386 - RNA, 19 nt, Homo sapiens
  misc_RNA (1)...(19): siRNA sense strand
gagaggaauuaaagguacu

SEQ ID NO: 2447387 - RNA, 19 nt, Homo sapiens
  misc_RNA (1)...(19): siRNA sense strand
gcugaaauuccaagaggca

SEQ ID NO: 2447388 - RNA, 19 nt, Homo sapiens
  misc_RNA (1)...(19): siRNA sense strand
gagaaagccaggaagcuga

SEQ ID NO: 2447389 - RNA, 19 nt, Homo sapiens
  misc_RNA (1)...(19): siRNA sense strand
caagaaagccaaacgagga

SEQ ID NO: 2447390 - RNA, 19 nt, Homo sapiens
  misc_RNA (1)...(19): siRNA sense strand
acaccaaggcuaugacaca

SEQ ID NO: 2447391 - RNA, 19 nt, Homo sapiens
  misc_RNA (1)...(19): siRNA sense strand
aauaucuguuggagaacua

SEQ ID NO: 2447392 - RNA, 19 nt, Homo sapiens
  misc_RNA (1)...(19): siRNA sense strand
gcuaagugugugaguggau

SEQ ID NO: 2447393 - RNA, 19 nt, Homo sapiens
  misc_RNA (1)...(19): siRNA sense strand
ggaggauacuucaucgaga

SEQ ID NO: 2447394 - RNA, 19 nt, Homo sapiens
  misc_RNA (1)...(19): siRNA sense strand
aggagaggaauuaaaggua

SEQ ID NO: 2447395 - RNA, 19 nt, Homo sapiens
  misc_RNA (1)...(19): siRNA sense strand
ggagaggaauuaaagguac

SEQ ID NO: 2447396 - RNA, 19 nt, Homo sapiens
  misc_RNA (1)...(19): siRNA sense strand
augaaacuguacaggccaa

SEQ ID NO: 2447397 - RNA, 19 nt, Homo sapiens
  misc_RNA (1)...(19): siRNA sense strand
ucugaaacaccaaggcuau

SEQ ID NO: 2447398 - RNA, 19 nt, Homo sapiens
  misc_RNA (1)...(19): siRNA sense strand
caaaagaacuaaaugccau

SEQ ID NO: 2447399 - RNA, 19 nt, Homo sapiens
  misc_RNA (1)...(19): siRNA sense strand
guacagaaaaugacgccaa

SEQ ID NO: 2447400 - RNA, 19 nt, Homo sapiens
  misc_RNA (1)...(19): siRNA sense strand
gagauauccaaaagaacua

SEQ ID NO: 2447401 - RNA, 19 nt, Homo sapiens
  misc_RNA (1)...(19): siRNA sense strand
gaagaaaauagcaaacgaa

SEQ ID NO: 2447402 - RNA, 19 nt, Homo sapiens
  misc_RNA (1)...(19): siRNA sense strand
gugugugaguggaucaaca

SEQ ID NO: 2447403 - RNA, 19 nt, Homo sapiens
  misc_RNA (1)...(19): siRNA sense strand
ggacgaggaugaagagagg

SEQ ID NO: 2447404 - RNA, 19 nt, Homo sapiens
  misc_RNA (1)...(19): siRNA sense strand
gggcacugucagaaguaca

SEQ ID NO: 2447405 - RNA, 19 nt, Homo sapiens
  misc_RNA (1)...(19): siRNA sense strand
ggaugaagagagguggcaa

SEQ ID NO: 2447406 - RNA, 19 nt, Homo sapiens
  misc_RNA (1)...(19): siRNA sense strand
augcaugagaggaggauac

SEQ ID NO: 2447407 - RNA, 19 nt, Homo sapiens
  misc_RNA (1)...(19): siRNA sense strand
gcucauauaauuaaugcca

SEQ ID NO: 2447408 - RNA, 19 nt, Homo sapiens
  misc_RNA (1)...(19): siRNA sense strand
uggaagaaaaggaggagca

SEQ ID NO: 2447409 - RNA, 19 nt, Homo sapiens
  misc_RNA (1)...(19): siRNA sense strand
ggaauauaaacaagcugga

SEQ ID NO: 2447410 - RNA, 19 nt, Homo sapiens
  misc_RNA (1)...(19): siRNA sense strand
agccaaacgaggagaggaa

SEQ ID NO: 2447411 - RNA, 19 nt, Homo sapiens
  misc_RNA (1)...(19): siRNA sense strand
ugucagaaguacagaaaau

SEQ ID NO: 2447412 - RNA, 19 nt, Homo sapiens
  misc_RNA (1)...(19): siRNA sense strand
ccaaacgaggagaggaauu

SEQ ID NO: 2447413 - RNA, 19 nt, Homo sapiens
  misc_RNA (1)...(19): siRNA sense strand
aaaaugacgccaagagaaa

SEQ ID NO: 2447414 - RNA, 19 nt, Homo sapiens
  misc_RNA (1)...(19): siRNA sense strand
aggaaauaucuguuggaga

SEQ ID NO: 2447415 - RNA, 19 nt, Homo sapiens
  misc_RNA (1)...(19): siRNA sense strand
agagaaaggaugcggcuga

SEQ ID NO: 2447416 - RNA, 19 nt, Homo sapiens
  misc_RNA (1)...(19): siRNA sense strand
gaagagagguggcaaggca

SEQ ID NO: 2447417 - RNA, 19 nt, Homo sapiens
  misc_RNA (1)...(19): siRNA sense strand
gagaggaauuaaagguacu

SEQ ID NO: 2447418 - RNA, 19 nt, Homo sapiens
  misc_RNA (1)...(19): siRNA sense strand
gcugaaauuccaagaggca

SEQ ID NO: 2447419 - RNA, 19 nt, Homo sapiens
  misc_RNA (1)...(19): siRNA sense strand
gagaaagccaggaagcuga

SEQ ID NO: 2447420 - RNA, 19 nt, Homo sapiens
  misc_RNA (1)...(19): siRNA sense strand
caagaaagccaaacgagga

SEQ ID NO: 2447421 - RNA, 19 nt, Homo sapiens
  misc_RNA (1)...(19): siRNA sense strand
acaccaaggcuaugacaca

SEQ ID NO: 2447422 - RNA, 19 nt, Homo sapiens
  misc_RNA (1)...(19): siRNA sense strand
aauaucuguuggagaacua

SEQ ID NO: 2447423 - RNA, 19 nt, Homo sapiens
  misc_RNA (1)...(19): siRNA sense strand
gcuaagugugugaguggau

SEQ ID NO: 2447424 - RNA, 19 nt, Homo sapiens
  misc_RNA (1)...(19): siRNA sense strand
ggaggauacuucaucgaga

SEQ ID NO: 2447425 - RNA, 19 nt, Homo sapiens
  misc_RNA (1)...(19): siRNA sense strand
aggagaggaauuaaaggua

SEQ ID NO: 2447426 - RNA, 19 nt, Homo sapiens
  misc_RNA (1)...(19): siRNA sense strand
ggagaggaauuaaagguac

SEQ ID NO: 2447427 - RNA, 19 nt, Homo sapiens
  misc_RNA (1)...(19): siRNA sense strand
augaaacuguacaggccaa

SEQ ID NO: 2447428 - RNA, 19 nt, Homo sapiens
  misc_RNA (1)...(19): siRNA sense strand
ucugaaacaccaaggcuau

SEQ ID NO: 2447429 - RNA, 19 nt, Homo sapiens
  misc_RNA (1)...(19): siRNA sense strand
caaaagaacuaaaugccau

SEQ ID NO: 2447430 - RNA, 19 nt, Homo sapiens
  misc_RNA (1)...(19): siRNA sense strand
guacagaaaaugacgccaa

SEQ ID NO: 2447431 - RNA, 19 nt, Homo sapiens
  misc_RNA (1)...(19): siRNA sense strand
gagauauccaaaagaacua

SEQ ID NO: 2447432 - RNA, 19 nt, Homo sapiens
  misc_RNA (1)...(19): siRNA sense strand
gaagaaaauagcaaacgaa

SEQ ID NO: 2447433 - RNA, 19 nt, Homo sapiens
  misc_RNA (1)...(19): siRNA sense strand
gugugugaguggaucaaca

SEQ ID NO: 2447434 - RNA, 19 nt, Homo sapiens
  misc_RNA (1)...(19): siRNA sense strand
ggacgaggaugaagagagg

SEQ ID NO: 2447435 - RNA, 19 nt, Homo sapiens
  misc_RNA (1)...(19): siRNA sense strand
gggcacugucagaaguaca

SEQ ID NO: 2447436 - RNA, 19 nt, Homo sapiens
  misc_RNA (1)...(19): siRNA sense strand
ggaugaagagagguggcaa

SEQ ID NO: 2447437 - RNA, 19 nt, Homo sapiens
  misc_RNA (1)...(19): siRNA sense strand
augcaugagaggaggauac

SEQ ID NO: 2447438 - RNA, 19 nt, Homo sapiens
  misc_RNA (1)...(19): siRNA sense strand
gcucauauaauuaaugcca

SEQ ID NO: 2447439 - RNA, 19 nt, Homo sapiens
  misc_RNA (1)...(19): siRNA sense strand
uggaagaaaaggaggagca

SEQ ID NO: 2447440 - RNA, 19 nt, Homo sapiens
  misc_RNA (1)...(19): siRNA sense strand
ggaauauaaacaagcugga

SEQ ID NO: 2447441 - RNA, 19 nt, Homo sapiens
  misc_RNA (1)...(19): siRNA sense strand
ccaagaaguuugaguggaa

SEQ ID NO: 2447442 - RNA, 19 nt, Homo sapiens
  misc_RNA (1)...(19): siRNA sense strand
gguauaacgaggaggagaa

SEQ ID NO: 2447443 - RNA, 19 nt, Homo sapiens
  misc_RNA (1)...(19): siRNA sense strand
cuacguaauuggcggcaaa

SEQ ID NO: 2447444 - RNA, 19 nt, Homo sapiens
  misc_RNA (1)...(19): siRNA sense strand
ccacagagcucaaugacau

SEQ ID NO: 2447445 - RNA, 19 nt, Homo sapiens
  misc_RNA (1)...(19): siRNA sense strand
auaacgaggaggagaagaa

SEQ ID NO: 2447446 - RNA, 19 nt, Homo sapiens
  misc_RNA (1)...(19): siRNA sense strand
aaugacaucuggagguaua

SEQ ID NO: 2447447 - RNA, 19 nt, Homo sapiens
  misc_RNA (1)...(19): siRNA sense strand
gcaaaggcagugacaggaa

SEQ ID NO: 2447448 - RNA, 19 nt, Homo sapiens
  misc_RNA (1)...(19): siRNA sense strand
agaagaaaugggagggugu

SEQ ID NO: 2447449 - RNA, 19 nt, Homo sapiens
  misc_RNA (1)...(19): siRNA sense strand
ucaaagacaugcuggacca

SEQ ID NO: 2447450 - RNA, 19 nt, Homo sapiens
  misc_RNA (1)...(19): siRNA sense strand
aggaagugccugaacaaga

SEQ ID NO: 2447451 - RNA, 19 nt, Homo sapiens
  misc_RNA (1)...(19): siRNA sense strand
aagccaaagcagaggagga

SEQ ID NO: 2447452 - RNA, 19 nt, Homo sapiens
  misc_RNA (1)...(19): siRNA sense strand
uggagaaggaggaggcagu

SEQ ID NO: 2447453 - RNA, 19 nt, Homo sapiens
  misc_RNA (1)...(19): siRNA sense strand
ucuacaacgaagacaacaa

SEQ ID NO: 2447454 - RNA, 19 nt, Homo sapiens
  misc_RNA (1)...(19): siRNA sense strand
ggaagugccugaacaagau

SEQ ID NO: 2447455 - RNA, 19 nt, Homo sapiens
  misc_RNA (1)...(19): siRNA sense strand
cugccgaaguguacagcau

SEQ ID NO: 2447456 - RNA, 19 nt, Homo sapiens
  misc_RNA (1)...(19): siRNA sense strand
ggucgguggcagagagauc

SEQ ID NO: 2447457 - RNA, 19 nt, Homo sapiens
  misc_RNA (1)...(19): siRNA sense strand
ggagguauaacgaggagga

SEQ ID NO: 2447458 - RNA, 19 nt, Homo sapiens
  misc_RNA (1)...(19): siRNA sense strand
caucagagaucgcgcugga

SEQ ID NO: 2447459 - RNA, 19 nt, Homo sapiens
  misc_RNA (1)...(19): siRNA sense strand
gaacaagaugugcgucuau

SEQ ID NO: 2447460 - RNA, 19 nt, Homo sapiens
  misc_RNA (1)...(19): siRNA sense strand
aagcagaggaggaugagga

SEQ ID NO: 2447461 - RNA, 19 nt, Homo sapiens
  misc_RNA (1)...(19): siRNA sense strand
cggcaaaggcagugacagg

SEQ ID NO: 2447462 - RNA, 19 nt, Homo sapiens
  misc_RNA (1)...(19): siRNA sense strand
cugauaagggcacaagcaa

SEQ ID NO: 2447463 - RNA, 19 nt, Homo sapiens
  misc_RNA (1)...(19): siRNA sense strand
ggaaggagcuggcacccau

SEQ ID NO: 2447464 - RNA, 19 nt, Homo sapiens
  misc_RNA (1)...(19): siRNA sense strand
augaggaggccgaacguau

SEQ ID NO: 2447465 - RNA, 19 nt, Homo sapiens
  misc_RNA (1)...(19): siRNA sense strand
guguacagcaucacagaca

SEQ ID NO: 2447466 - RNA, 19 nt, Homo sapiens
  misc_RNA (1)...(19): siRNA sense strand
cagagaucgcgcuggauga

SEQ ID NO: 2447467 - RNA, 19 nt, Homo sapiens
  misc_RNA (1)...(19): siRNA sense strand
caagcaaagccaaagcaga

SEQ ID NO: 2447468 - RNA, 19 nt, Homo sapiens
  misc_RNA (1)...(19): siRNA sense strand
cuacguggucgguggcaga

SEQ ID NO: 2447469 - RNA, 19 nt, Homo sapiens
  misc_RNA (1)...(19): siRNA sense strand
ucaaugacaucuggaggua

SEQ ID NO: 2447470 - RNA, 19 nt, Homo sapiens
  misc_RNA (1)...(19): siRNA sense strand
ggaccuugucuacguaauu

SEQ ID NO: 2447471 - RNA, 19 nt, Homo sapiens
  misc_RNA (1)...(19): siRNA sense strand
agacaaagauguuggcaga

SEQ ID NO: 2447472 - RNA, 19 nt, Homo sapiens
  misc_RNA (1)...(19): siRNA sense strand
ccaccugguuggacggcaa

SEQ ID NO: 2447473 - RNA, 19 nt, Homo sapiens
  misc_RNA (1)...(19): siRNA sense strand
ccaagcaacugaugggcau

SEQ ID NO: 2447474 - RNA, 19 nt, Homo sapiens
  misc_RNA (1)...(19): siRNA sense strand
gaugagaacuucaagcuga

SEQ ID NO: 2447475 - RNA, 19 nt, Homo sapiens
  misc_RNA (1)...(19): siRNA sense strand
uggcaagauagacgugaaa

SEQ ID NO: 2447476 - RNA, 19 nt, Homo sapiens
  misc_RNA (1)...(19): siRNA sense strand
ccauagagcuccaagcaac

SEQ ID NO: 2447477 - RNA, 19 nt, Homo sapiens
  misc_RNA (1)...(19): siRNA sense strand
ugcccaagacaguggaaaa

SEQ ID NO: 2447478 - RNA, 19 nt, Homo sapiens
  misc_RNA (1)...(19): siRNA sense strand
gauucaaggaggugacauc

SEQ ID NO: 2447479 - RNA, 19 nt, Homo sapiens
  misc_RNA (1)...(19): siRNA sense strand
gaaaagucauugaugggau

SEQ ID NO: 2447480 - RNA, 19 nt, Homo sapiens
  misc_RNA (1)...(19): siRNA sense strand
acgcugagcacgaaggcaa

SEQ ID NO: 2447481 - RNA, 19 nt, Homo sapiens
  misc_RNA (1)...(19): siRNA sense strand
cugccugaagugcgagaaa

SEQ ID NO: 2447482 - RNA, 19 nt, Homo sapiens
  misc_RNA (1)...(19): siRNA sense strand
agugcaacaaggaggugua

SEQ ID NO: 2447483 - RNA, 19 nt, Homo sapiens
  misc_RNA (1)...(19): siRNA sense strand
gggugaccucucugggcaa

SEQ ID NO: 2447484 - RNA, 19 nt, Homo sapiens
  misc_RNA (1)...(19): siRNA sense strand
gggaaaagguaaugcgaga

SEQ ID NO: 2447485 - RNA, 19 nt, Homo sapiens
  misc_RNA (1)...(19): siRNA sense strand
gguaaugcgagaaguuaaa

SEQ ID NO: 2447486 - RNA, 19 nt, Homo sapiens
  misc_RNA (1)...(19): siRNA sense strand
ggcaaugagaaguggaauu

SEQ ID NO: 2447487 - RNA, 19 nt, Homo sapiens
  misc_RNA (1)...(19): siRNA sense strand
uuacacugguggaaagaaa

SEQ ID NO: 2447488 - RNA, 19 nt, Homo sapiens
  misc_RNA (1)...(19): siRNA sense strand
aguggaaaggugagguaua

SEQ ID NO: 2447489 - RNA, 19 nt, Homo sapiens
  misc_RNA (1)...(19): siRNA sense strand
guaccauagaggagagaga

SEQ ID NO: 2447490 - RNA, 19 nt, Homo sapiens
  misc_RNA (1)...(19): siRNA sense strand
gcauauaguggaaagguga

SEQ ID NO: 2447491 - RNA, 19 nt, Homo sapiens
  misc_RNA (1)...(19): siRNA sense strand
gcugaaagaugaaagcaca

SEQ ID NO: 2447492 - RNA, 19 nt, Homo sapiens
  misc_RNA (1)...(19): siRNA sense strand
uauguaaggucaagggaga

SEQ ID NO: 2447493 - RNA, 19 nt, Homo sapiens
  misc_RNA (1)...(19): siRNA sense strand
aaauggaacaagaggaaga

SEQ ID NO: 2447494 - RNA, 19 nt, Homo sapiens
  misc_RNA (1)...(19): siRNA sense strand
agguaaugcgagaaguuaa

SEQ ID NO: 2447495 - RNA, 19 nt, Homo sapiens
  misc_RNA (1)...(19): siRNA sense strand
ggaaagaaauaguugcaac

SEQ ID NO: 2447496 - RNA, 19 nt, Homo sapiens
  misc_RNA (1)...(19): siRNA sense strand
cugcaauggaccaggauga

SEQ ID NO: 2447497 - RNA, 19 nt, Homo sapiens
  misc_RNA (1)...(19): siRNA sense strand
ccauacuacaagagggaga

SEQ ID NO: 2447498 - RNA, 19 nt, Homo sapiens
  misc_RNA (1)...(19): siRNA sense strand
gguugucgccaaugggaua

SEQ ID NO: 2447499 - RNA, 19 nt, Homo sapiens
  misc_RNA (1)...(19): siRNA sense strand
ucgcagaggcaguggaguu

SEQ ID NO: 2447500 - RNA, 19 nt, Homo sapiens
  misc_RNA (1)...(19): siRNA sense strand
caguaagaagggaggacau

SEQ ID NO: 2447501 - RNA, 19 nt, Homo sapiens
  misc_RNA (1)...(19): siRNA sense strand
ccaguaaagaagagccgaa

SEQ ID NO: 2447502 - RNA, 19 nt, Homo sapiens
  misc_RNA (1)...(19): siRNA sense strand
ccuuuaagcccaaugagaa

SEQ ID NO: 2447503 - RNA, 19 nt, Homo sapiens
  misc_RNA (1)...(19): siRNA sense strand
uguaaguggugaagccaau

SEQ ID NO: 2447504 - RNA, 19 nt, Homo sapiens
  misc_RNA (1)...(19): siRNA sense strand
caaacgaagcacacagauu

SEQ ID NO: 2447505 - RNA, 19 nt, Homo sapiens
  misc_RNA (1)...(19): siRNA sense strand
ggauagugacgaaauggaa

SEQ ID NO: 2447506 - RNA, 19 nt, Homo sapiens
  misc_RNA (1)...(19): siRNA sense strand
gugacgaaauggaacaaga

SEQ ID NO: 2447507 - RNA, 19 nt, Homo sapiens
  misc_RNA (1)...(19): siRNA sense strand
uuucagauguggaagaaca

SEQ ID NO: 2447508 - RNA, 19 nt, Homo sapiens
  misc_RNA (1)...(19): siRNA sense strand
guuacuuaaggaugggaaa

SEQ ID NO: 2447509 - RNA, 19 nt, Homo sapiens
  misc_RNA (1)...(19): siRNA sense strand
acaaaguagaugacugcaa

SEQ ID NO: 2447510 - RNA, 19 nt, Homo sapiens
  misc_RNA (1)...(19): siRNA sense strand
ggaaccagacgaugagaca

SEQ ID NO: 2447511 - RNA, 19 nt, Homo sapiens
  misc_RNA (1)...(19): siRNA sense strand
caauggaugauguggucaa

SEQ ID NO: 2447512 - RNA, 19 nt, Homo sapiens
  misc_RNA (1)...(19): siRNA sense strand
acuggaaaguuauggcauu

SEQ ID NO: 2447513 - RNA, 19 nt, Homo sapiens
  misc_RNA (1)...(19): siRNA sense strand
gugaguacgugaugguuca

SEQ ID NO: 2447514 - RNA, 19 nt, Homo sapiens
  misc_RNA (1)...(19): siRNA sense strand
aaccagagguauuugggaa

SEQ ID NO: 2447515 - RNA, 19 nt, Homo sapiens
  misc_RNA (1)...(19): siRNA sense strand
agaagaugaagaagacauu

SEQ ID NO: 2447516 - RNA, 19 nt, Homo sapiens
  misc_RNA (1)...(19): siRNA sense strand
agggaauuggcucgggaaa

SEQ ID NO: 2447517 - RNA, 19 nt, Homo sapiens
  misc_RNA (1)...(19): siRNA sense strand
gggaauuggcucgggaaaa

SEQ ID NO: 2447518 - RNA, 19 nt, Homo sapiens
  misc_RNA (1)...(19): siRNA sense strand
uuagcaaaccagagguauu

SEQ ID NO: 2447519 - RNA, 19 nt, Homo sapiens
  misc_RNA (1)...(19): siRNA sense strand
aaguuauggcauucaguaa

SEQ ID NO: 2447520 - RNA, 19 nt, Homo sapiens
  misc_RNA (1)...(19): siRNA sense strand
gcacuuuagaugggagaau

SEQ ID NO: 2447521 - RNA, 19 nt, Homo sapiens
  misc_RNA (1)...(19): siRNA sense strand
aagaagagccgaaaacuaa

SEQ ID NO: 2447522 - RNA, 19 nt, Homo sapiens
  misc_RNA (1)...(19): siRNA sense strand
cagaaauauccuugugagu

SEQ ID NO: 2447523 - RNA, 19 nt, Homo sapiens
  misc_RNA (1)...(19): siRNA sense strand
gggauuuggaugugggauc

SEQ ID NO: 2447524 - RNA, 19 nt, Homo sapiens
  misc_RNA (1)...(19): siRNA sense strand
acacugguggaaagaaaua

SEQ ID NO: 2447525 - RNA, 19 nt, Homo sapiens
  misc_RNA (1)...(19): siRNA sense strand
ccucauccucacaggcaaa

SEQ ID NO: 2447526 - RNA, 19 nt, Homo sapiens
  misc_RNA (1)...(19): siRNA sense strand
cagagaaguggcaagaaaa

SEQ ID NO: 2447527 - RNA, 19 nt, Homo sapiens
  misc_RNA (1)...(19): siRNA sense strand
aguaaaggacugaugcaca

SEQ ID NO: 2447528 - RNA, 19 nt, Homo sapiens
  misc_RNA (1)...(19): siRNA sense strand
ccuuagcaaaccagaggua

SEQ ID NO: 2447529 - RNA, 19 nt, Homo sapiens
  misc_RNA (1)...(19): siRNA sense strand
agaacacagaagagucuaa

SEQ ID NO: 2447530 - RNA, 19 nt, Homo sapiens
  misc_RNA (1)...(19): siRNA sense strand
cuucaagucccaaggcuuu

SEQ ID NO: 2447531 - RNA, 19 nt, Homo sapiens
  misc_RNA (1)...(19): siRNA sense strand
ugguaggaucugaugaauu

SEQ ID NO: 2447532 - RNA, 19 nt, Homo sapiens
  misc_RNA (1)...(19): siRNA sense strand
ccugggacgugguggcuuu

SEQ ID NO: 2447533 - RNA, 19 nt, Homo sapiens
  misc_RNA (1)...(19): siRNA sense strand
ccucaaagacuggaugaau

SEQ ID NO: 2447534 - RNA, 19 nt, Homo sapiens
  misc_RNA (1)...(19): siRNA sense strand
uggaccaggaugaggaaga

SEQ ID NO: 2447535 - RNA, 19 nt, Homo sapiens
  misc_RNA (1)...(19): siRNA sense strand
gugaaagcauggaaacagu

SEQ ID NO: 2447536 - RNA, 19 nt, Homo sapiens
  misc_RNA (1)...(19): siRNA sense strand
uggaacaagaggaagacau

SEQ ID NO: 2447537 - RNA, 19 nt, Homo sapiens
  misc_RNA (1)...(19): siRNA sense strand
uagaagaugaagaagacau

SEQ ID NO: 2447538 - RNA, 19 nt, Homo sapiens
  misc_RNA (1)...(19): siRNA sense strand
auauaguaauggugcacuu

SEQ ID NO: 2447539 - RNA, 19 nt, Homo sapiens
  misc_RNA (1)...(19): siRNA sense strand
gggcauuguuagauauuuc

SEQ ID NO: 2447540 - RNA, 19 nt, Homo sapiens
  misc_RNA (1)...(19): siRNA sense strand
caguaaagaagagccgaaa

SEQ ID NO: 2447541 - RNA, 19 nt, Homo sapiens
  misc_RNA (1)...(19): siRNA sense strand
gagagagagaggagcgugu

SEQ ID NO: 2447542 - RNA, 19 nt, Homo sapiens
  misc_RNA (1)...(19): siRNA sense strand
agggagaggcacaaacgaa

SEQ ID NO: 2447543 - RNA, 19 nt, Homo sapiens
  misc_RNA (1)...(19): siRNA sense strand
gaugagaggcagagccaga

SEQ ID NO: 2447544 - RNA, 19 nt, Homo sapiens
  misc_RNA (1)...(19): siRNA sense strand
agcaggagcuggugcgaga

SEQ ID NO: 2447545 - RNA, 19 nt, Homo sapiens
  misc_RNA (1)...(19): siRNA sense strand
gggaugagaggcagagcca

SEQ ID NO: 2447546 - RNA, 19 nt, Homo sapiens
  misc_RNA (1)...(19): siRNA sense strand
aggagaaccagauguggaa

SEQ ID NO: 2447547 - RNA, 19 nt, Homo sapiens
  misc_RNA (1)...(19): siRNA sense strand
gagacuaccuggagcugga

SEQ ID NO: 2447548 - RNA, 19 nt, Homo sapiens
  misc_RNA (1)...(19): siRNA sense strand
acucagaggaugaagaucu

SEQ ID NO: 2447549 - RNA, 19 nt, Homo sapiens
  misc_RNA (1)...(19): siRNA sense strand
ugagcugggcugagaaaca

SEQ ID NO: 2447550 - RNA, 19 nt, Homo sapiens
  misc_RNA (1)...(19): siRNA sense strand
cugagaaacaacagcggga

SEQ ID NO: 2447551 - RNA, 19 nt, Homo sapiens
  misc_RNA (1)...(19): siRNA sense strand
cgccuguaaugcagaguca

SEQ ID NO: 2447552 - RNA, 19 nt, Homo sapiens
  misc_RNA (1)...(19): siRNA sense strand
auucuaaggcccaggaaga

SEQ ID NO: 2447553 - RNA, 19 nt, Homo sapiens
  misc_RNA (1)...(19): siRNA sense strand
acaacauaucccuggagua

SEQ ID NO: 2447554 - RNA, 19 nt, Homo sapiens
  misc_RNA (1)...(19): siRNA sense strand
gaagaaugucucagccaca

SEQ ID NO: 2447555 - RNA, 19 nt, Homo sapiens
  misc_RNA (1)...(19): siRNA sense strand
gcauugggcuuuugggcau

SEQ ID NO: 2447556 - RNA, 19 nt, Homo sapiens
  misc_RNA (1)...(19): siRNA sense strand
cuauaagcacaguagcauu

SEQ ID NO: 2447557 - RNA, 19 nt, Homo sapiens
  misc_RNA (1)...(19): siRNA sense strand
gggcauuucccuaggagcu

SEQ ID NO: 2447558 - RNA, 19 nt, Homo sapiens
  misc_RNA (1)...(19): siRNA sense strand
cgaagaagccguaugcuac

SEQ ID NO: 2447559 - RNA, 19 nt, Homo sapiens
  misc_RNA (1)...(19): siRNA sense strand
aggagaagcgcgagggcua

SEQ ID NO: 2447560 - RNA, 19 nt, Homo sapiens
  misc_RNA (1)...(19): siRNA sense strand
gaagaugagugggguaaaa

SEQ ID NO: 2447561 - RNA, 19 nt, Homo sapiens
  misc_RNA (1)...(19): siRNA sense strand
cugccauggcccuggagaa

SEQ ID NO: 2447562 - RNA, 19 nt, Homo sapiens
  misc_RNA (1)...(19): siRNA sense strand
gcugaagaugaguggggua

SEQ ID NO: 2447563 - RNA, 19 nt, Homo sapiens
  misc_RNA (1)...(19): siRNA sense strand
uuaucaagaagauggguga

SEQ ID NO: 2447564 - RNA, 19 nt, Homo sapiens
  misc_RNA (1)...(19): siRNA sense strand
ugccauggcccuggagaaa

SEQ ID NO: 2447565 - RNA, 19 nt, Homo sapiens
  misc_RNA (1)...(19): siRNA sense strand
gcaaaguucuagagggcau

SEQ ID NO: 2447566 - RNA, 19 nt, Homo sapiens
  misc_RNA (1)...(19): siRNA sense strand
gcauggagguggugcggaa

SEQ ID NO: 2447567 - RNA, 19 nt, Homo sapiens
  misc_RNA (1)...(19): siRNA sense strand
gcaagaucgagguggagaa

SEQ ID NO: 2447568 - RNA, 19 nt, Homo sapiens
  misc_RNA (1)...(19): siRNA sense strand
gagagaaaggauuuggcua

SEQ ID NO: 2447569 - RNA, 19 nt, Homo sapiens
  misc_RNA (1)...(19): siRNA sense strand
cuuagcuacaggagagaaa

SEQ ID NO: 2447570 - RNA, 19 nt, Homo sapiens
  misc_RNA (1)...(19): siRNA sense strand
cggccgaugagaagaagaa

SEQ ID NO: 2447571 - RNA, 19 nt, Homo sapiens
  misc_RNA (1)...(19): siRNA sense strand
gaaagagcaucuacgguga

SEQ ID NO: 2447572 - RNA, 19 nt, Homo sapiens
  misc_RNA (1)...(19): siRNA sense strand
gcggcaagaucgaggugga

SEQ ID NO: 2447573 - RNA, 19 nt, Homo sapiens
  misc_RNA (1)...(19): siRNA sense strand
gggagauggcacaggagga

SEQ ID NO: 2447574 - RNA, 19 nt, Homo sapiens
  misc_RNA (1)...(19): siRNA sense strand
acgaauuggagaugaagau

SEQ ID NO: 2447575 - RNA, 19 nt, Homo sapiens
  misc_RNA (1)...(19): siRNA sense strand
aagacagacagccgggaua

SEQ ID NO: 2447576 - RNA, 19 nt, Homo sapiens
  misc_RNA (1)...(19): siRNA sense strand
gcaucuacggugagcgcuu

SEQ ID NO: 2447577 - RNA, 19 nt, Homo sapiens
  misc_RNA (1)...(19): siRNA sense strand
agagaaaggauuuggcuac

SEQ ID NO: 2447578 - RNA, 19 nt, Homo sapiens
  misc_RNA (1)...(19): siRNA sense strand
uggcaaaguucuagagggc

SEQ ID NO: 2447579 - RNA, 19 nt, Homo sapiens
  misc_RNA (1)...(19): siRNA sense strand
agcaaauuccaucguguaa

SEQ ID NO: 2447580 - RNA, 19 nt, Homo sapiens
  misc_RNA (1)...(19): siRNA sense strand
ugaccuacgaauuggagau

SEQ ID NO: 2447581 - RNA, 19 nt, Homo sapiens
  misc_RNA (1)...(19): siRNA sense strand
gggagaaagucgaagccua

SEQ ID NO: 2447582 - RNA, 19 nt, Homo sapiens
  misc_RNA (1)...(19): siRNA sense strand
agugaagggagguggauaa

SEQ ID NO: 2447583 - RNA, 19 nt, Homo sapiens
  misc_RNA (1)...(19): siRNA sense strand
aguauuagaagguggcaaa

SEQ ID NO: 2447584 - RNA, 19 nt, Homo sapiens
  misc_RNA (1)...(19): siRNA sense strand
uggcauuauuagaguguuu

SEQ ID NO: 2447585 - RNA, 19 nt, Homo sapiens
  misc_RNA (1)...(19): siRNA sense strand
gggcaugaagacuguguaa

SEQ ID NO: 2447586 - RNA, 19 nt, Homo sapiens
  misc_RNA (1)...(19): siRNA sense strand
ccugaagagaagaaguuaa

SEQ ID NO: 2447587 - RNA, 19 nt, Homo sapiens
  misc_RNA (1)...(19): siRNA sense strand
agugaugacccuugguuaa

SEQ ID NO: 2447588 - RNA, 19 nt, Homo sapiens
  misc_RNA (1)...(19): siRNA sense strand
ggaagaugugagaggacuu

SEQ ID NO: 2447589 - RNA, 19 nt, Homo sapiens
  misc_RNA (1)...(19): siRNA sense strand
agaaguuaacugaggauga

SEQ ID NO: 2447590 - RNA, 19 nt, Homo sapiens
  misc_RNA (1)...(19): siRNA sense strand
aaucagagauggggagaaa

SEQ ID NO: 2447591 - RNA, 19 nt, Homo sapiens
  misc_RNA (1)...(19): siRNA sense strand
guguaagagguuuggcaau

SEQ ID NO: 2447592 - RNA, 19 nt, Homo sapiens
  misc_RNA (1)...(19): siRNA sense strand
cugaaugacaagugcauga

SEQ ID NO: 2447593 - RNA, 19 nt, Homo sapiens
  misc_RNA (1)...(19): siRNA sense strand
gugcaaaugaugcuaguau

SEQ ID NO: 2447594 - RNA, 19 nt, Homo sapiens
  misc_RNA (1)...(19): siRNA sense strand
ccuaaaggaaagccagcaa

SEQ ID NO: 2447595 - RNA, 19 nt, Homo sapiens
  misc_RNA (1)...(19): siRNA sense strand
cuucugaacccuaaaggaa

SEQ ID NO: 2447596 - RNA, 19 nt, Homo sapiens
  misc_RNA (1)...(19): siRNA sense strand
cuuagugguucaugggaca

SEQ ID NO: 2447597 - RNA, 19 nt, Homo sapiens
  misc_RNA (1)...(19): siRNA sense strand
cugcagugugggcgguaaa

SEQ ID NO: 2447598 - RNA, 19 nt, Homo sapiens
  misc_RNA (1)...(19): siRNA sense strand
accauaacauugaagggaa

SEQ ID NO: 2447599 - RNA, 19 nt, Homo sapiens
  misc_RNA (1)...(19): siRNA sense strand
uccaaauuguagagacuuu

SEQ ID NO: 2447600 - RNA, 19 nt, Homo sapiens
  misc_RNA (1)...(19): siRNA sense strand
ccauauaauaccagugaug

SEQ ID NO: 2447601 - RNA, 19 nt, Homo sapiens
  misc_RNA (1)...(19): siRNA sense strand
ucagaagaucgaacagcaa

SEQ ID NO: 2447602 - RNA, 19 nt, Homo sapiens
  misc_RNA (1)...(19): siRNA sense strand
ugucaaugaagguggacca

SEQ ID NO: 2447603 - RNA, 19 nt, Homo sapiens
  misc_RNA (1)...(19): siRNA sense strand
uagguaaacugaaggaacu

SEQ ID NO: 2447604 - RNA, 19 nt, Homo sapiens
  misc_RNA (1)...(19): siRNA sense strand
ucuuguggcucuuggaaca

SEQ ID NO: 2447605 - RNA, 19 nt, Homo sapiens
  misc_RNA (1)...(19): siRNA sense strand
uuuccaaauuguagagacu

SEQ ID NO: 2447606 - RNA, 19 nt, Homo sapiens
  misc_RNA (1)...(19): siRNA sense strand
cauugaagggaaagcccaa

SEQ ID NO: 2447607 - RNA, 19 nt, Homo sapiens
  misc_RNA (1)...(19): siRNA sense strand
cugaaggaacuuaauggaa

SEQ ID NO: 2447608 - RNA, 19 nt, Homo sapiens
  misc_RNA (1)...(19): siRNA sense strand
acugaugucccaugcaaua

SEQ ID NO: 2447609 - RNA, 19 nt, Homo sapiens
  misc_RNA (1)...(19): siRNA sense strand
cagugaugacccuugguua

SEQ ID NO: 2447610 - RNA, 19 nt, Homo sapiens
  misc_RNA (1)...(19): siRNA sense strand
ccagcuaaaguaagugaau

SEQ ID NO: 2447611 - RNA, 19 nt, Homo sapiens
  misc_RNA (1)...(19): siRNA sense strand
gacauuacuuagugguuca

SEQ ID NO: 2447612 - RNA, 19 nt, Homo sapiens
  misc_RNA (1)...(19): siRNA sense strand
uuguagagacuuugugaca

SEQ ID NO: 2447613 - RNA, 19 nt, Homo sapiens
  misc_RNA (1)...(19): siRNA sense strand
ucagcaaacaucuggaaaa

SEQ ID NO: 2447614 - RNA, 19 nt, Homo sapiens
  misc_RNA (1)...(19): siRNA sense strand
guuuacagaaucagaagau

SEQ ID NO: 2447615 - RNA, 19 nt, Homo sapiens
  misc_RNA (1)...(19): siRNA sense strand
ugaaggaacuuaauggaac

SEQ ID NO: 2447616 - RNA, 19 nt, Homo sapiens
  misc_RNA (1)...(19): siRNA sense strand
aguaucagaaccagcuaaa

SEQ ID NO: 2447617 - RNA, 19 nt, Homo sapiens
  misc_RNA (1)...(19): siRNA sense strand
gugaagggagguggauaaa

SEQ ID NO: 2447618 - RNA, 19 nt, Homo sapiens
  misc_RNA (1)...(19): siRNA sense strand
gaagaaguuaacugaggau

SEQ ID NO: 2447619 - RNA, 19 nt, Homo sapiens
  misc_RNA (1)...(19): siRNA sense strand
aagugaaugcuguagauuu

SEQ ID NO: 2447620 - RNA, 19 nt, Homo sapiens
  misc_RNA (1)...(19): siRNA sense strand
cuaaaggaaagccagcaaa

SEQ ID NO: 2447621 - RNA, 19 nt, Homo sapiens
  misc_RNA (1)...(19): siRNA sense strand
ugauucaaaugcuguacaa

SEQ ID NO: 2447622 - RNA, 19 nt, Homo sapiens
  misc_RNA (1)...(19): siRNA sense strand
gcugaagaaaucaaggcuu

SEQ ID NO: 2447623 - RNA, 19 nt, Homo sapiens
  misc_RNA (1)...(19): siRNA sense strand
ugauccauuuacagggaau

SEQ ID NO: 2447624 - RNA, 19 nt, Homo sapiens
  misc_RNA (1)...(19): siRNA sense strand
cagauuuuguggaaagcua

SEQ ID NO: 2447625 - RNA, 19 nt, Homo sapiens
  misc_RNA (1)...(19): siRNA sense strand
aagucuggcugaaugacaa

SEQ ID NO: 2447626 - RNA, 19 nt, Homo sapiens
  misc_RNA (1)...(19): siRNA sense strand
cagacaagacuguuaaacu

SEQ ID NO: 2447627 - RNA, 19 nt, Homo sapiens
  misc_RNA (1)...(19): siRNA sense strand
agguggaccaucauauaaa

SEQ ID NO: 2447628 - RNA, 19 nt, Homo sapiens
  misc_RNA (1)...(19): siRNA sense strand
ccagugugaaugagaacuu

SEQ ID NO: 2447629 - RNA, 19 nt, Homo sapiens
  misc_RNA (1)...(19): siRNA sense strand
cugcuaaagucuggcugaa

SEQ ID NO: 2447630 - RNA, 19 nt, Homo sapiens
  misc_RNA (1)...(19): siRNA sense strand
ccaugcaauagaacugaaa

SEQ ID NO: 2447631 - RNA, 19 nt, Homo sapiens
  misc_RNA (1)...(19): siRNA sense strand
aauguugggacuugggaau

SEQ ID NO: 2447632 - RNA, 19 nt, Homo sapiens
  misc_RNA (1)...(19): siRNA sense strand
gcaucauacccucaaguga

SEQ ID NO: 2447633 - RNA, 19 nt, Homo sapiens
  misc_RNA (1)...(19): siRNA sense strand
gaaccugguacuagagaag

SEQ ID NO: 2447634 - RNA, 19 nt, Homo sapiens
  misc_RNA (1)...(19): siRNA sense strand
aaucuuggaaguaguacaa

SEQ ID NO: 2447635 - RNA, 19 nt, Homo sapiens
  misc_RNA (1)...(19): siRNA sense strand
cugcagagggagagagaca

SEQ ID NO: 2447636 - RNA, 19 nt, Homo sapiens
  misc_RNA (1)...(19): siRNA sense strand
cuuaauaucugcaaggaga

SEQ ID NO: 2447637 - RNA, 19 nt, Homo sapiens
  misc_RNA (1)...(19): siRNA sense strand
aggacaagcugcagaggga

SEQ ID NO: 2447638 - RNA, 19 nt, Homo sapiens
  misc_RNA (1)...(19): siRNA sense strand
uagccaagcaggagcgcaa

SEQ ID NO: 2447639 - RNA, 19 nt, Homo sapiens
  misc_RNA (1)...(19): siRNA sense strand
ugucagaagaggagaagca

SEQ ID NO: 2447640 - RNA, 19 nt, Homo sapiens
  misc_RNA (1)...(19): siRNA sense strand
aggaggaggaagaagagaa

SEQ ID NO: 2447641 - RNA, 19 nt, Homo sapiens
  misc_RNA (1)...(19): siRNA sense strand
aggaugaagcagaugagaa

SEQ ID NO: 2447642 - RNA, 19 nt, Homo sapiens
  misc_RNA (1)...(19): siRNA sense strand
aggaggaggaggaagaaga

SEQ ID NO: 2447643 - RNA, 19 nt, Homo sapiens
  misc_RNA (1)...(19): siRNA sense strand
augaagaggaugaagcaga

SEQ ID NO: 2447644 - RNA, 19 nt, Homo sapiens
  misc_RNA (1)...(19): siRNA sense strand
cccgaaaacuggagcgaga

SEQ ID NO: 2447645 - RNA, 19 nt, Homo sapiens
  misc_RNA (1)...(19): siRNA sense strand
cccaaaggaagaaggaaca

SEQ ID NO: 2447646 - RNA, 19 nt, Homo sapiens
  misc_RNA (1)...(19): siRNA sense strand
aagaugaaguacaggccau

SEQ ID NO: 2447647 - RNA, 19 nt, Homo sapiens
  misc_RNA (1)...(19): siRNA sense strand
cugcaaggagauuguggaa

SEQ ID NO: 2447648 - RNA, 19 nt, Homo sapiens
  misc_RNA (1)...(19): siRNA sense strand
gguuggaggcacugggagu

SEQ ID NO: 2447649 - RNA, 19 nt, Homo sapiens
  misc_RNA (1)...(19): siRNA sense strand
ugcaggaggaggaggaaga

SEQ ID NO: 2447650 - RNA, 19 nt, Homo sapiens
  misc_RNA (1)...(19): siRNA sense strand
gcaaggagauuguggaacg

SEQ ID NO: 2447651 - RNA, 19 nt, Homo sapiens
  misc_RNA (1)...(19): siRNA sense strand
aggaagaagagaagcugga

SEQ ID NO: 2447652 - RNA, 19 nt, Homo sapiens
  misc_RNA (1)...(19): siRNA sense strand
aggaagaaggaacaggaca

SEQ ID NO: 2447653 - RNA, 19 nt, Homo sapiens
  misc_RNA (1)...(19): siRNA sense strand
gaggagaagcagagaaaag

SEQ ID NO: 2447654 - RNA, 19 nt, Homo sapiens
  misc_RNA (1)...(19): siRNA sense strand
gacaagcugcagagggaga

SEQ ID NO: 2447655 - RNA, 19 nt, Homo sapiens
  misc_RNA (1)...(19): siRNA sense strand
uggugucagaagaggagaa

SEQ ID NO: 2447656 - RNA, 19 nt, Homo sapiens
  misc_RNA (1)...(19): siRNA sense strand
gaacaggacaagcugcaga

SEQ ID NO: 2447657 - RNA, 19 nt, Homo sapiens
  misc_RNA (1)...(19): siRNA sense strand
gcaaacagccagaaggcau

SEQ ID NO: 2447658 - RNA, 19 nt, Homo sapiens
  misc_RNA (1)...(19): siRNA sense strand
gagaggagcugaaggccuu

SEQ ID NO: 2447659 - RNA, 19 nt, Homo sapiens
  misc_RNA (1)...(19): siRNA sense strand
ccuggaagcugcugcguca

SEQ ID NO: 2447660 - RNA, 19 nt, Homo sapiens
  misc_RNA (1)...(19): siRNA sense strand
cagacgacgagauggaaau

SEQ ID NO: 2447661 - RNA, 19 nt, Homo sapiens
  misc_RNA (1)...(19): siRNA sense strand
ccagacgacgagauggaaa

SEQ ID NO: 2447662 - RNA, 19 nt, Homo sapiens
  misc_RNA (1)...(19): siRNA sense strand
gcaguaagcucaaccgcca

SEQ ID NO: 2447663 - RNA, 19 nt, Homo sapiens
  misc_RNA (1)...(19): siRNA sense strand
cagaacgagaggagcugaa

SEQ ID NO: 2447664 - RNA, 19 nt, Homo sapiens
  misc_RNA (1)...(19): siRNA sense strand
gcagcaagcucaaccgcca

SEQ ID NO: 2447665 - RNA, 19 nt, Homo sapiens
  misc_RNA (1)...(19): siRNA sense strand
ggaacaaagaacugacccu

SEQ ID NO: 2447666 - RNA, 19 nt, Homo sapiens
  misc_RNA (1)...(19): siRNA sense strand
gcaaagacuuggagggaga

SEQ ID NO: 2447667 - RNA, 19 nt, Homo sapiens
  misc_RNA (1)...(19): siRNA sense strand
cugagauauuugugggaaa

SEQ ID NO: 2447668 - RNA, 19 nt, Homo sapiens
  misc_RNA (1)...(19): siRNA sense strand
acuuacaggcagagagaaa

SEQ ID NO: 2447669 - RNA, 19 nt, Homo sapiens
  misc_RNA (1)...(19): siRNA sense strand
gcgcaaagcugauggguac

SEQ ID NO: 2447670 - RNA, 19 nt, Homo sapiens
  misc_RNA (1)...(19): siRNA sense strand
uggaagaaaugaauggcaa

SEQ ID NO: 2447671 - RNA, 19 nt, Homo sapiens
  misc_RNA (1)...(19): siRNA sense strand
caggcaaggcguagguuaa

SEQ ID NO: 2447672 - RNA, 19 nt, Homo sapiens
  misc_RNA (1)...(19): siRNA sense strand
gcaaaguaacagagggucu

SEQ ID NO: 2447673 - RNA, 19 nt, Homo sapiens
  misc_RNA (1)...(19): siRNA sense strand
agguuauggcaaagguaaa

SEQ ID NO: 2447674 - RNA, 19 nt, Homo sapiens
  misc_RNA (1)...(19): siRNA sense strand
cgguggaaauguaggagga

SEQ ID NO: 2447675 - RNA, 19 nt, Homo sapiens
  misc_RNA (1)...(19): siRNA sense strand
acugaagagcccauggaua

SEQ ID NO: 2447676 - RNA, 19 nt, Homo sapiens
  misc_RNA (1)...(19): siRNA sense strand
gaggaaguauggaggacca

SEQ ID NO: 2447677 - RNA, 19 nt, Homo sapiens
  misc_RNA (1)...(19): siRNA sense strand
cugucaaggcuauggaaga

SEQ ID NO: 2447678 - RNA, 19 nt, Homo sapiens
  misc_RNA (1)...(19): siRNA sense strand
gauuuagaugaaagagcua

SEQ ID NO: 2447679 - RNA, 19 nt, Homo sapiens
  misc_RNA (1)...(19): siRNA sense strand
augaagacuuacaggcaga

SEQ ID NO: 2447680 - RNA, 19 nt, Homo sapiens
  misc_RNA (1)...(19): siRNA sense strand
ggguacaaccagccagauu

SEQ ID NO: 2447681 - RNA, 19 nt, Homo sapiens
  misc_RNA (1)...(19): siRNA sense strand
aacaagaggucgagggcgu

SEQ ID NO: 2447682 - RNA, 19 nt, Homo sapiens
  misc_RNA (1)...(19): siRNA sense strand
uggaaauguaggaggaaag

SEQ ID NO: 2447683 - RNA, 19 nt, Homo sapiens
  misc_RNA (1)...(19): siRNA sense strand
gaggaaagcgcaaagcuga

SEQ ID NO: 2447684 - RNA, 19 nt, Homo sapiens
  misc_RNA (1)...(19): siRNA sense strand
aguugcacauagugauuua

SEQ ID NO: 2447685 - RNA, 19 nt, Homo sapiens
  misc_RNA (1)...(19): siRNA sense strand
agacuuacaggcagagaga

SEQ ID NO: 2447686 - RNA, 19 nt, Homo sapiens
  misc_RNA (1)...(19): siRNA sense strand
uagguuaaugagugguaaa

SEQ ID NO: 2447687 - RNA, 19 nt, Homo sapiens
  misc_RNA (1)...(19): siRNA sense strand
agguagaggugguuaugga

SEQ ID NO: 2447688 - RNA, 19 nt, Homo sapiens
  misc_RNA (1)...(19): siRNA sense strand
auccugagguuauggcaaa

SEQ ID NO: 2447689 - RNA, 19 nt, Homo sapiens
  misc_RNA (1)...(19): siRNA sense strand
gcucagaggcaagcagcaa

SEQ ID NO: 2447690 - RNA, 19 nt, Homo sapiens
  misc_RNA (1)...(19): siRNA sense strand
auuuagucaguuugggaaa

SEQ ID NO: 2447691 - RNA, 19 nt, Homo sapiens
  misc_RNA (1)...(19): siRNA sense strand
ucagaaaaggaaagaaaga

SEQ ID NO: 2447692 - RNA, 19 nt, Homo sapiens
  misc_RNA (1)...(19): siRNA sense strand
gcguggagguagagguggu

SEQ ID NO: 2447693 - RNA, 19 nt, Homo sapiens
  misc_RNA (1)...(19): siRNA sense strand
aauuuacguugcagggcua

SEQ ID NO: 2447694 - RNA, 19 nt, Homo sapiens
  misc_RNA (1)...(19): siRNA sense strand
aggcuauggaagaaaugaa

SEQ ID NO: 2447695 - RNA, 19 nt, Homo sapiens
  misc_RNA (1)...(19): siRNA sense strand
cacagaaaguugcugaaaa

SEQ ID NO: 2447696 - RNA, 19 nt, Homo sapiens
  misc_RNA (1)...(19): siRNA sense strand
ccaggcaaggcguagguua

SEQ ID NO: 2447697 - RNA, 19 nt, Homo sapiens
  misc_RNA (1)...(19): siRNA sense strand
ucgagggcguggagguaga

SEQ ID NO: 2447698 - RNA, 19 nt, Homo sapiens
  misc_RNA (1)...(19): siRNA sense strand
caagagaucuauuugagga

SEQ ID NO: 2447699 - RNA, 19 nt, Homo sapiens
  misc_RNA (1)...(19): siRNA sense strand
guuuaaagacagugaucuc

SEQ ID NO: 2447700 - RNA, 19 nt, Homo sapiens
  misc_RNA (1)...(19): siRNA sense strand
guuaaaagauuaugcguuc

SEQ ID NO: 2447701 - RNA, 19 nt, Homo sapiens
  misc_RNA (1)...(19): siRNA sense strand
aagaaaagcucagaggcaa

SEQ ID NO: 2447702 - RNA, 19 nt, Homo sapiens
  misc_RNA (1)...(19): siRNA sense strand
uagcaaaguaacagagggu

SEQ ID NO: 2447703 - RNA, 19 nt, Homo sapiens
  misc_RNA (1)...(19): siRNA sense strand
ggcugauccuauagaagau

SEQ ID NO: 2447704 - RNA, 19 nt, Homo sapiens
  misc_RNA (1)...(19): siRNA sense strand
ccauaacuaucguggugga

SEQ ID NO: 2447705 - RNA, 19 nt, Homo sapiens
  misc_RNA (1)...(19): siRNA sense strand
gauccugagguuauggcaa

SEQ ID NO: 2447706 - RNA, 19 nt, Homo sapiens
  misc_RNA (1)...(19): siRNA sense strand
uagaaaaggcauuuaguca

SEQ ID NO: 2447707 - RNA, 19 nt, Homo sapiens
  misc_RNA (1)...(19): siRNA sense strand
aggaggugcccaacaacaa

SEQ ID NO: 2447708 - RNA, 19 nt, Homo sapiens
  misc_RNA (1)...(19): siRNA sense strand
ucaggauacuuuugggcaa

SEQ ID NO: 2447709 - RNA, 19 nt, Homo sapiens
  misc_RNA (1)...(19): siRNA sense strand
cguagguuaaugaguggua

SEQ ID NO: 2447710 - RNA, 19 nt, Homo sapiens
  misc_RNA (1)...(19): siRNA sense strand
uggagguagaggugguuau

SEQ ID NO: 2447711 - RNA, 19 nt, Homo sapiens
  misc_RNA (1)...(19): siRNA sense strand
auguaggaggaaagcgcaa

SEQ ID NO: 2447712 - RNA, 19 nt, Homo sapiens
  misc_RNA (1)...(19): siRNA sense strand
auuaaggcacucuuggaaa

SEQ ID NO: 2447713 - RNA, 19 nt, Homo sapiens
  misc_RNA (1)...(19): siRNA sense strand
uggaaaugguacugaagag

SEQ ID NO: 2447714 - RNA, 19 nt, Homo sapiens
  misc_RNA (1)...(19): siRNA sense strand
agaguaaaaccaaggaaca

SEQ ID NO: 2447715 - RNA, 19 nt, Homo sapiens
  misc_RNA (1)...(19): siRNA sense strand
gggaaacuggaacgaguga

SEQ ID NO: 2447716 - RNA, 19 nt, Homo sapiens
  misc_RNA (1)...(19): siRNA sense strand
aaagaaaagcucagaggca

SEQ ID NO: 2447717 - RNA, 19 nt, Homo sapiens
  misc_RNA (1)...(19): siRNA sense strand
augaaauucguucuggaaa

SEQ ID NO: 2447718 - RNA, 19 nt, Homo sapiens
  misc_RNA (1)...(19): siRNA sense strand
cuugaagaauuuagcaaag

SEQ ID NO: 2447719 - RNA, 19 nt, Homo sapiens
  misc_RNA (1)...(19): siRNA sense strand
uggcaaagacuuggaggga

SEQ ID NO: 2447720 - RNA, 19 nt, Homo sapiens
  misc_RNA (1)...(19): siRNA sense strand
gucugaaggaggaugauaa

SEQ ID NO: 2447721 - RNA, 19 nt, Homo sapiens
  misc_RNA (1)...(19): siRNA sense strand
guugaaagugugaugaaca

SEQ ID NO: 2447722 - RNA, 19 nt, Homo sapiens
  misc_RNA (1)...(19): siRNA sense strand
augaacagaauauggcaaa

SEQ ID NO: 2447723 - RNA, 19 nt, Homo sapiens
  misc_RNA (1)...(19): siRNA sense strand
uugaucagacccagagaaa

SEQ ID NO: 2447724 - RNA, 19 nt, Homo sapiens
  misc_RNA (1)...(19): siRNA sense strand
agcaagaagcuuugauuga

SEQ ID NO: 2447725 - RNA, 19 nt, Homo sapiens
  misc_RNA (1)...(19): siRNA sense strand
ucugaaggaggaugauaaa

SEQ ID NO: 2447726 - RNA, 19 nt, Homo sapiens
  misc_RNA (1)...(19): siRNA sense strand
ugggaauggcaguagaaaa

SEQ ID NO: 2447727 - RNA, 19 nt, Homo sapiens
  misc_RNA (1)...(19): siRNA sense strand
caucgacaucagugaagaa

SEQ ID NO: 2447728 - RNA, 19 nt, Homo sapiens
  misc_RNA (1)...(19): siRNA sense strand
gcaguagaaaauaaggaaa

SEQ ID NO: 2447729 - RNA, 19 nt, Homo sapiens
  misc_RNA (1)...(19): siRNA sense strand
cuucaaaagucauggugga

SEQ ID NO: 2447730 - RNA, 19 nt, Homo sapiens
  misc_RNA (1)...(19): siRNA sense strand
ggaugauaaagauguugaa

SEQ ID NO: 2447731 - RNA, 19 nt, Homo sapiens
  misc_RNA (1)...(19): siRNA sense strand
ugugaugaacaguguggua

SEQ ID NO: 2447732 - RNA, 19 nt, Homo sapiens
  misc_RNA (1)...(19): siRNA sense strand
ucaaauuucgcgaagguga

SEQ ID NO: 2447733 - RNA, 19 nt, Homo sapiens
  misc_RNA (1)...(19): siRNA sense strand
caugaacagaauauggcaa

SEQ ID NO: 2447734 - RNA, 19 nt, Homo sapiens
  misc_RNA (1)...(19): siRNA sense strand
gauuguaagaagagugaug

SEQ ID NO: 2447735 - RNA, 19 nt, Homo sapiens
  misc_RNA (1)...(19): siRNA sense strand
acacaaugcagcaagaacu

SEQ ID NO: 2447736 - RNA, 19 nt, Homo sapiens
  misc_RNA (1)...(19): siRNA sense strand
guugaugcccacaggugua

SEQ ID NO: 2447737 - RNA, 19 nt, Homo sapiens
  misc_RNA (1)...(19): siRNA sense strand
gagccaaggaccaggacau

SEQ ID NO: 2447738 - RNA, 19 nt, Homo sapiens
  misc_RNA (1)...(19): siRNA sense strand
cagcaggaguucagugcca

SEQ ID NO: 2447739 - RNA, 19 nt, Homo sapiens
  misc_RNA (1)...(19): siRNA sense strand
agcccaaagaugagaguga

SEQ ID NO: 2447740 - RNA, 19 nt, Homo sapiens
  misc_RNA (1)...(19): siRNA sense strand
cugcaacggcggaagaaaa

SEQ ID NO: 2447741 - RNA, 19 nt, Homo sapiens
  misc_RNA (1)...(19): siRNA sense strand
caagagaccaugcaggcua

SEQ ID NO: 2447742 - RNA, 19 nt, Homo sapiens
  misc_RNA (1)...(19): siRNA sense strand
cccaaagaugagagugauu

SEQ ID NO: 2447743 - RNA, 19 nt, Homo sapiens
  misc_RNA (1)...(19): siRNA sense strand
agaagaguguggugggaac

SEQ ID NO: 2447744 - RNA, 19 nt, Homo sapiens
  misc_RNA (1)...(19): siRNA sense strand
ugaagauggcccugaggau

SEQ ID NO: 2447745 - RNA, 19 nt, Homo sapiens
  misc_RNA (1)...(19): siRNA sense strand
ggagaagaaugaaguggac

SEQ ID NO: 2447746 - RNA, 19 nt, Homo sapiens
  misc_RNA (1)...(19): siRNA sense strand
gagaagaguguggugggaa

SEQ ID NO: 2447747 - RNA, 19 nt, Homo sapiens
  misc_RNA (1)...(19): siRNA sense strand
uggacgagcagcaggaguu

SEQ ID NO: 2447748 - RNA, 19 nt, Homo sapiens
  misc_RNA (1)...(19): siRNA sense strand
uggugaauuuccacagaau

SEQ ID NO: 2447749 - RNA, 19 nt, Homo sapiens
  misc_RNA (1)...(19): siRNA sense strand
agaaacaagacgaccuaca

SEQ ID NO: 2447750 - RNA, 19 nt, Homo sapiens
  misc_RNA (1)...(19): siRNA sense strand
gcuagaaacaagacgaccu

SEQ ID NO: 2447751 - RNA, 19 nt, Homo sapiens
  misc_RNA (1)...(19): siRNA sense strand
gacaagaagugguacccau

SEQ ID NO: 2447752 - RNA, 19 nt, Homo sapiens
  misc_RNA (1)...(19): siRNA sense strand
cagucacagcugaagacaa

SEQ ID NO: 2447753 - RNA, 19 nt, Homo sapiens
  misc_RNA (1)...(19): siRNA sense strand
cuacagaagaguaugccca

SEQ ID NO: 2447754 - RNA, 19 nt, Homo sapiens
  misc_RNA (1)...(19): siRNA sense strand
cuuguauaagcuagaagaa

SEQ ID NO: 2447755 - RNA, 19 nt, Homo sapiens
  misc_RNA (1)...(19): siRNA sense strand
acgacaaggcuaaggacaa

SEQ ID NO: 2447756 - RNA, 19 nt, Homo sapiens
  misc_RNA (1)...(19): siRNA sense strand
gcaauuauuucguggccuu

SEQ ID NO: 2447757 - RNA, 19 nt, Homo sapiens
  misc_RNA (1)...(19): siRNA sense strand
augaaaacguugacagcaa

SEQ ID NO: 2447758 - RNA, 19 nt, Homo sapiens
  misc_RNA (1)...(19): siRNA sense strand
caucaaugcugaagagcuc

SEQ ID NO: 2447759 - RNA, 19 nt, Homo sapiens
  misc_RNA (1)...(19): siRNA sense strand
augacaaaguucagaguac

SEQ ID NO: 2447760 - RNA, 19 nt, Homo sapiens
  misc_RNA (1)...(19): siRNA sense strand
gucaaagaaaucugagaga

SEQ ID NO: 2447761 - RNA, 19 nt, Homo sapiens
  misc_RNA (1)...(19): siRNA sense strand
cugaagagcucguuggccu

SEQ ID NO: 2447762 - RNA, 19 nt, Homo sapiens
  misc_RNA (1)...(19): siRNA sense strand
gagaagauguacacccuca

SEQ ID NO: 2447763 - RNA, 19 nt, Homo sapiens
  misc_RNA (1)...(19): siRNA sense strand
gaucugaacagcuuggaga

SEQ ID NO: 2447764 - RNA, 19 nt, Homo sapiens
  misc_RNA (1)...(19): siRNA sense strand
agaaggaacgagaggccga

SEQ ID NO: 2447765 - RNA, 19 nt, Homo sapiens
  misc_RNA (1)...(19): siRNA sense strand
gauccaaagguuccuguua

SEQ ID NO: 2447766 - RNA, 19 nt, Homo sapiens
  misc_RNA (1)...(19): siRNA sense strand
guucaggcucggauggaga

SEQ ID NO: 2447767 - RNA, 19 nt, Homo sapiens
  misc_RNA (1)...(19): siRNA sense strand
aagaaaucugagagagacu

SEQ ID NO: 2447768 - RNA, 19 nt, Homo sapiens
  misc_RNA (1)...(19): siRNA sense strand
uuugagaaacagcgggaga

SEQ ID NO: 2447769 - RNA, 19 nt, Homo sapiens
  misc_RNA (1)...(19): siRNA sense strand
gagucaaagaaaucugaga

SEQ ID NO: 2447770 - RNA, 19 nt, Homo sapiens
  misc_RNA (1)...(19): siRNA sense strand
acuaaagagcaaagggaaa

SEQ ID NO: 2447771 - RNA, 19 nt, Homo sapiens
  misc_RNA (1)...(19): siRNA sense strand
gagaagaagcuaaaagaaa

SEQ ID NO: 2447772 - RNA, 19 nt, Homo sapiens
  misc_RNA (1)...(19): siRNA sense strand
ucuucaaauuccugagaaa

SEQ ID NO: 2447773 - RNA, 19 nt, Homo sapiens
  misc_RNA (1)...(19): siRNA sense strand
agaaagaagaagaggagga

SEQ ID NO: 2447774 - RNA, 19 nt, Homo sapiens
  misc_RNA (1)...(19): siRNA sense strand
ccaaaauauuucugagcua

SEQ ID NO: 2447775 - RNA, 19 nt, Homo sapiens
  misc_RNA (1)...(19): siRNA sense strand
ucucaugggcagaagaaua

SEQ ID NO: 2447776 - RNA, 19 nt, Homo sapiens
  misc_RNA (1)...(19): siRNA sense strand
cagaaauaguccaugguga

SEQ ID NO: 2447777 - RNA, 19 nt, Homo sapiens
  misc_RNA (1)...(19): siRNA sense strand
augaaugggaacugaguaa

SEQ ID NO: 2447778 - RNA, 19 nt, Homo sapiens
  misc_RNA (1)...(19): siRNA sense strand
acuaaugagacuucagaaa

SEQ ID NO: 2447779 - RNA, 19 nt, Homo sapiens
  misc_RNA (1)...(19): siRNA sense strand
cuggaaaggaagaaggaga

SEQ ID NO: 2447780 - RNA, 19 nt, Homo sapiens
  misc_RNA (1)...(19): siRNA sense strand
aagaagaagaggaggaagu

SEQ ID NO: 2447781 - RNA, 19 nt, Homo sapiens
  misc_RNA (1)...(19): siRNA sense strand
gaacaaagccuuauggaag

SEQ ID NO: 2447782 - RNA, 19 nt, Homo sapiens
  misc_RNA (1)...(19): siRNA sense strand
ggaacugaguaaagaaaau

SEQ ID NO: 2447783 - RNA, 19 nt, Homo sapiens
  misc_RNA (1)...(19): siRNA sense strand
acacaggccucguggcaau

SEQ ID NO: 2447784 - RNA, 19 nt, Homo sapiens
  misc_RNA (1)...(19): siRNA sense strand
aggagaagaaagagaagau

SEQ ID NO: 2447785 - RNA, 19 nt, Homo sapiens
  misc_RNA (1)...(19): siRNA sense strand
gcaagaaagaacaggugau

SEQ ID NO: 2447786 - RNA, 19 nt, Homo sapiens
  misc_RNA (1)...(19): siRNA sense strand
ggagggagaugaaugggaa

SEQ ID NO: 2447787 - RNA, 19 nt, Homo sapiens
  misc_RNA (1)...(19): siRNA sense strand
uggaaauugagaaggaaau

SEQ ID NO: 2447788 - RNA, 19 nt, Homo sapiens
  misc_RNA (1)...(19): siRNA sense strand
cuuugaagauaguggacuu

SEQ ID NO: 2447789 - RNA, 19 nt, Homo sapiens
  misc_RNA (1)...(19): siRNA sense strand
gcacacuagcugaacuaaa

SEQ ID NO: 2447790 - RNA, 19 nt, Homo sapiens
  misc_RNA (1)...(19): siRNA sense strand
caaacuacucagcaagaaa

SEQ ID NO: 2447791 - RNA, 19 nt, Homo sapiens
  misc_RNA (1)...(19): siRNA sense strand
ccuacaaaggagacaacua

SEQ ID NO: 2447792 - RNA, 19 nt, Homo sapiens
  misc_RNA (1)...(19): siRNA sense strand
gaauugaacccuugagcga

SEQ ID NO: 2447793 - RNA, 19 nt, Homo sapiens
  misc_RNA (1)...(19): siRNA sense strand
gcuacacaaagcagaaaua

SEQ ID NO: 2447794 - RNA, 19 nt, Homo sapiens
  misc_RNA (1)...(19): siRNA sense strand
agauugaagagauggagaa

SEQ ID NO: 2447795 - RNA, 19 nt, Homo sapiens
  misc_RNA (1)...(19): siRNA sense strand
agauggagaagaagcuaaa

SEQ ID NO: 2447796 - RNA, 19 nt, Homo sapiens
  misc_RNA (1)...(19): siRNA sense strand
gaguaauaugucaacguua

SEQ ID NO: 2447797 - RNA, 19 nt, Homo sapiens
  misc_RNA (1)...(19): siRNA sense strand
agaagaaagagaagaugau

SEQ ID NO: 2447798 - RNA, 19 nt, Homo sapiens
  misc_RNA (1)...(19): siRNA sense strand
gagauggagaagaagcuaa

SEQ ID NO: 2447799 - RNA, 19 nt, Homo sapiens
  misc_RNA (1)...(19): siRNA sense strand
agaaacgggcauuugaaua

SEQ ID NO: 2447800 - RNA, 19 nt, Homo sapiens
  misc_RNA (1)...(19): siRNA sense strand
ccaaagagaaugagcugca

SEQ ID NO: 2447801 - RNA, 19 nt, Homo sapiens
  misc_RNA (1)...(19): siRNA sense strand
ggagaagauuuaugcagga

SEQ ID NO: 2447802 - RNA, 19 nt, Homo sapiens
  misc_RNA (1)...(19): siRNA sense strand
aauccaaacuacucagcaa

SEQ ID NO: 2447803 - RNA, 19 nt, Homo sapiens
  misc_RNA (1)...(19): siRNA sense strand
ccucuggauguuugggaua

SEQ ID NO: 2447804 - RNA, 19 nt, Homo sapiens
  misc_RNA (1)...(19): siRNA sense strand
guuauuagaaagagcugua

SEQ ID NO: 2447805 - RNA, 19 nt, Homo sapiens
  misc_RNA (1)...(19): siRNA sense strand
aguuggaaauugagaagga

SEQ ID NO: 2447806 - RNA, 19 nt, Homo sapiens
  misc_RNA (1)...(19): siRNA sense strand
gcagagaagagagcagaaa

SEQ ID NO: 2447807 - RNA, 19 nt, Homo sapiens
  misc_RNA (1)...(19): siRNA sense strand
caaguaaacuguugugcca

SEQ ID NO: 2447808 - RNA, 19 nt, Homo sapiens
  misc_RNA (1)...(19): siRNA sense strand
gccaagaaacucugcagaa

SEQ ID NO: 2447809 - RNA, 19 nt, Homo sapiens
  misc_RNA (1)...(19): siRNA sense strand
aggaagggauucaacagaa

SEQ ID NO: 2447810 - RNA, 19 nt, Homo sapiens
  misc_RNA (1)...(19): siRNA sense strand
gaacuaaagagcaaaggga

SEQ ID NO: 2447811 - RNA, 19 nt, Homo sapiens
  misc_RNA (1)...(19): siRNA sense strand
aguuaugacaccauguaaa

SEQ ID NO: 2447812 - RNA, 19 nt, Homo sapiens
  misc_RNA (1)...(19): siRNA sense strand
uggaaaggaagaaggagau

SEQ ID NO: 2447813 - RNA, 19 nt, Homo sapiens
  misc_RNA (1)...(19): siRNA sense strand
caagaagagacgaugccua

SEQ ID NO: 2447814 - RNA, 19 nt, Homo sapiens
  misc_RNA (1)...(19): siRNA sense strand
gcagacagcuuguggcacu

SEQ ID NO: 2447815 - RNA, 19 nt, Homo sapiens
  misc_RNA (1)...(19): siRNA sense strand
uuggaaauugagaaggaaa

SEQ ID NO: 2447816 - RNA, 19 nt, Homo sapiens
  misc_RNA (1)...(19): siRNA sense strand
ggacaaaagauccuggcua

SEQ ID NO: 2447817 - RNA, 19 nt, Homo sapiens
  misc_RNA (1)...(19): siRNA sense strand
gauguuugggauagguaua

SEQ ID NO: 2447818 - RNA, 19 nt, Homo sapiens
  misc_RNA (1)...(19): siRNA sense strand
ggcugaaccacuagaaaga

SEQ ID NO: 2447819 - RNA, 19 nt, Homo sapiens
  misc_RNA (1)...(19): siRNA sense strand
gcagaguugucuaagccua

SEQ ID NO: 2447820 - RNA, 19 nt, Homo sapiens
  misc_RNA (1)...(19): siRNA sense strand
gugaugaauuuacaggaau

SEQ ID NO: 2447821 - RNA, 19 nt, Homo sapiens
  misc_RNA (1)...(19): siRNA sense strand
ugugaugaauuuacaggaa

SEQ ID NO: 2447822 - RNA, 19 nt, Homo sapiens
  misc_RNA (1)...(19): siRNA sense strand
cauuaaacgagaauaccua

SEQ ID NO: 2447823 - RNA, 19 nt, Homo sapiens
  misc_RNA (1)...(19): siRNA sense strand
ugacaauaguggagaugcu

SEQ ID NO: 2447824 - RNA, 19 nt, Homo sapiens
  misc_RNA (1)...(19): siRNA sense strand
ucuguuggcacuugagaaa

SEQ ID NO: 2447825 - RNA, 19 nt, Homo sapiens
  misc_RNA (1)...(19): siRNA sense strand
ugaacaaagccuuauggaa

SEQ ID NO: 2447826 - RNA, 19 nt, Homo sapiens
  misc_RNA (1)...(19): siRNA sense strand
gggaauucuccuuugaaga

SEQ ID NO: 2447827 - RNA, 19 nt, Homo sapiens
  misc_RNA (1)...(19): siRNA sense strand
cuaaagagcaaagggaaaa

SEQ ID NO: 2447828 - RNA, 19 nt, Homo sapiens
  misc_RNA (1)...(19): siRNA sense strand
ugcaaugagccuuuggaua

SEQ ID NO: 2447829 - RNA, 19 nt, Homo sapiens
  misc_RNA (1)...(19): siRNA sense strand
ucuuauuagucaaggacaa

SEQ ID NO: 2447830 - RNA, 19 nt, Homo sapiens
  misc_RNA (1)...(19): siRNA sense strand
cuguggagaugaugggcaa

SEQ ID NO: 2447831 - RNA, 19 nt, Homo sapiens
  misc_RNA (1)...(19): siRNA sense strand
ggugagaaugugauggaga

SEQ ID NO: 2447832 - RNA, 19 nt, Homo sapiens
  misc_RNA (1)...(19): siRNA sense strand
gcaagaaggugaaggucuc

SEQ ID NO: 2447833 - RNA, 19 nt, Homo sapiens
  misc_RNA (1)...(19): siRNA sense strand
gcacagggcaggaugagga

SEQ ID NO: 2447834 - RNA, 19 nt, Homo sapiens
  misc_RNA (1)...(19): siRNA sense strand
cccaaaagcaagaagguga

SEQ ID NO: 2447835 - RNA, 19 nt, Homo sapiens
  misc_RNA (1)...(19): siRNA sense strand
gcaaaaguggccaggucua

SEQ ID NO: 2447836 - RNA, 19 nt, Homo sapiens
  misc_RNA (1)...(19): siRNA sense strand
acccaagcgcauagcuaaa

SEQ ID NO: 2447837 - RNA, 19 nt, Homo sapiens
  misc_RNA (1)...(19): siRNA sense strand
ccaaaagcaagaaggugaa

SEQ ID NO: 2447838 - RNA, 19 nt, Homo sapiens
  misc_RNA (1)...(19): siRNA sense strand
ugcaagagaaggugguaca

SEQ ID NO: 2447839 - RNA, 19 nt, Homo sapiens
  misc_RNA (1)...(19): siRNA sense strand
acacaucaguggagggcuc

SEQ ID NO: 2447840 - RNA, 19 nt, Homo sapiens
  misc_RNA (1)...(19): siRNA sense strand
ggacaaagaacagagcuga

SEQ ID NO: 2447841 - RNA, 19 nt, Homo sapiens
  misc_RNA (1)...(19): siRNA sense strand
augcugaaauccaggggaa

SEQ ID NO: 2447842 - RNA, 19 nt, Homo sapiens
  misc_RNA (1)...(19): siRNA sense strand
cuuauuagucaaggacaaa

SEQ ID NO: 2447843 - RNA, 19 nt, Homo sapiens
  misc_RNA (1)...(19): siRNA sense strand
cugggaaaguggagcugca

SEQ ID NO: 2447844 - RNA, 19 nt, Homo sapiens
  misc_RNA (1)...(19): siRNA sense strand
uagucaaggacaaagaaca

SEQ ID NO: 2447845 - RNA, 19 nt, Homo sapiens
  misc_RNA (1)...(19): siRNA sense strand
cugaacagcaucugacaca

SEQ ID NO: 2447846 - RNA, 19 nt, Homo sapiens
  misc_RNA (1)...(19): siRNA sense strand
cggcuaaagaagauguugu

SEQ ID NO: 2447847 - RNA, 19 nt, Homo sapiens
  misc_RNA (1)...(19): siRNA sense strand
ccaacaugaccuucaccaa

SEQ ID NO: 2447848 - RNA, 19 nt, Homo sapiens
  misc_RNA (1)...(19): siRNA sense strand
caggcuggccagggagaaa

SEQ ID NO: 2447849 - RNA, 19 nt, Homo sapiens
  misc_RNA (1)...(19): siRNA sense strand
augcggaguuggagcacca

SEQ ID NO: 2447850 - RNA, 19 nt, Homo sapiens
  misc_RNA (1)...(19): siRNA sense strand
ucgcacugcaggacagcaa

SEQ ID NO: 2447851 - RNA, 19 nt, Homo sapiens
  misc_RNA (1)...(19): siRNA sense strand
gggaaauccuacaccgcua

SEQ ID NO: 2447852 - RNA, 19 nt, Homo sapiens
  misc_RNA (1)...(19): siRNA sense strand
cguggaaauaugaagggaa

SEQ ID NO: 2447853 - RNA, 19 nt, Homo sapiens
  misc_RNA (1)...(19): siRNA sense strand
guggaaauaugaagggaag

SEQ ID NO: 2447854 - RNA, 19 nt, Homo sapiens
  misc_RNA (1)...(19): siRNA sense strand
aggaggaagaauuugacua

SEQ ID NO: 2447855 - RNA, 19 nt, Homo sapiens
  misc_RNA (1)...(19): siRNA sense strand
cccgaagaccucuggguau

SEQ ID NO: 2447856 - RNA, 19 nt, Homo sapiens
  misc_RNA (1)...(19): siRNA sense strand
augcaaaggaaguuaguaa

SEQ ID NO: 2447857 - RNA, 19 nt, Homo sapiens
  misc_RNA (1)...(19): siRNA sense strand
acagaaauacgcagagcaa

SEQ ID NO: 2447858 - RNA, 19 nt, Homo sapiens
  misc_RNA (1)...(19): siRNA sense strand
agacaauacgcgugugaau

SEQ ID NO: 2447859 - RNA, 19 nt, Homo sapiens
  misc_RNA (1)...(19): siRNA sense strand
agaaauacgcagagcaagu

SEQ ID NO: 2447860 - RNA, 19 nt, Homo sapiens
  misc_RNA (1)...(19): siRNA sense strand
gugugaauuaugcgggaaa

SEQ ID NO: 2447861 - RNA, 19 nt, Homo sapiens
  misc_RNA (1)...(19): siRNA sense strand
cuuuaaagcgcauaagaau

SEQ ID NO: 2447862 - RNA, 19 nt, Homo sapiens
  misc_RNA (1)...(19): siRNA sense strand
cagcagaugcacagcagaa

SEQ ID NO: 2447863 - RNA, 19 nt, Homo sapiens
  misc_RNA (1)...(19): siRNA sense strand
acuguauguuggugguaaa

SEQ ID NO: 2447864 - RNA, 19 nt, Homo sapiens
  misc_RNA (1)...(19): siRNA sense strand
guaauuugaaggagcacaa

SEQ ID NO: 2447865 - RNA, 19 nt, Homo sapiens
  misc_RNA (1)...(19): siRNA sense strand
agucgucaguugugagaau

SEQ ID NO: 2447866 - RNA, 19 nt, Homo sapiens
  misc_RNA (1)...(19): siRNA sense strand
ggagagaguuguugagcag

SEQ ID NO: 2447867 - RNA, 19 nt, Homo sapiens
  misc_RNA (1)...(19): siRNA sense strand
uccugaagucacagaaaua

SEQ ID NO: 2447868 - RNA, 19 nt, Homo sapiens
  misc_RNA (1)...(19): siRNA sense strand
cuucagucccagagacaau

SEQ ID NO: 2447869 - RNA, 19 nt, Homo sapiens
  misc_RNA (1)...(19): siRNA sense strand
cagaauucuucaagccaga

SEQ ID NO: 2447870 - RNA, 19 nt, Homo sapiens
  misc_RNA (1)...(19): siRNA sense strand
gaguuagugaccaggagaa

SEQ ID NO: 2447871 - RNA, 19 nt, Homo sapiens
  misc_RNA (1)...(19): siRNA sense strand
cugcaaagcuggugacgag

SEQ ID NO: 2447872 - RNA, 19 nt, Homo sapiens
  misc_RNA (1)...(19): siRNA sense strand
gccaaagugcugaagaaaa

SEQ ID NO: 2447873 - RNA, 19 nt, Homo sapiens
  misc_RNA (1)...(19): siRNA sense strand
gaaccauacaucugcgaga

SEQ ID NO: 2447874 - RNA, 19 nt, Homo sapiens
  misc_RNA (1)...(19): siRNA sense strand
gguuuaguaacuucaguaa

SEQ ID NO: 2447875 - RNA, 19 nt, Homo sapiens
  misc_RNA (1)...(19): siRNA sense strand
uugacaaagagguuggaau

SEQ ID NO: 2447876 - RNA, 19 nt, Homo sapiens
  misc_RNA (1)...(19): siRNA sense strand
cagaugcacagcagaacaa

SEQ ID NO: 2447877 - RNA, 19 nt, Homo sapiens
  misc_RNA (1)...(19): siRNA sense strand
agaacaaaacguuggauga

SEQ ID NO: 2447878 - RNA, 19 nt, Homo sapiens
  misc_RNA (1)...(19): siRNA sense strand
ugcaaaggaaguuaguaaa

SEQ ID NO: 2447879 - RNA, 19 nt, Homo sapiens
  misc_RNA (1)...(19): siRNA sense strand
cuuucaaacagccaaauua

SEQ ID NO: 2447880 - RNA, 19 nt, Homo sapiens
  misc_RNA (1)...(19): siRNA sense strand
uauuauucacucaggagaa

SEQ ID NO: 2447881 - RNA, 19 nt, Homo sapiens
  misc_RNA (1)...(19): siRNA sense strand
cugcucugccugcgggaaa

SEQ ID NO: 2447882 - RNA, 19 nt, Homo sapiens
  misc_RNA (1)...(19): siRNA sense strand
auaggaacucagaggguca

SEQ ID NO: 2447883 - RNA, 19 nt, Homo sapiens
  misc_RNA (1)...(19): siRNA sense strand
ccucauuuacugcaggaau

SEQ ID NO: 2447884 - RNA, 19 nt, Homo sapiens
  misc_RNA (1)...(19): siRNA sense strand
aguuaguaaagcacagaau

SEQ ID NO: 2447885 - RNA, 19 nt, Homo sapiens
  misc_RNA (1)...(19): siRNA sense strand
caggacaauauacaaguaa

SEQ ID NO: 2447886 - RNA, 19 nt, Homo sapiens
  misc_RNA (1)...(19): siRNA sense strand
ggaaagagguuugcagccu

SEQ ID NO: 2447887 - RNA, 19 nt, Homo sapiens
  misc_RNA (1)...(19): siRNA sense strand
cagaugugcuggaggagcu

SEQ ID NO: 2447888 - RNA, 19 nt, Homo sapiens
  misc_RNA (1)...(19): siRNA sense strand
uggcccagccugugaauga

SEQ ID NO: 2447889 - RNA, 19 nt, Homo sapiens
  misc_RNA (1)...(19): siRNA sense strand
ggguuuaguaacuucagua

SEQ ID NO: 2447890 - RNA, 19 nt, Homo sapiens
  misc_RNA (1)...(19): siRNA sense strand
ggaaguuaguaaagcacag

SEQ ID NO: 2447891 - RNA, 19 nt, Homo sapiens
  misc_RNA (1)...(19): siRNA sense strand
gaacaaagugccugcagga

SEQ ID NO: 2447892 - RNA, 19 nt, Homo sapiens
  misc_RNA (1)...(19): siRNA sense strand
ggcccaaggucaaagccaa

SEQ ID NO: 2447893 - RNA, 19 nt, Homo sapiens
  misc_RNA (1)...(19): siRNA sense strand
gcuuuggauacaagaacaa

SEQ ID NO: 2447894 - RNA, 19 nt, Homo sapiens
  misc_RNA (1)...(19): siRNA sense strand
ccuucaucauccugcguaa

SEQ ID NO: 2447895 - RNA, 19 nt, Homo sapiens
  misc_RNA (1)...(19): siRNA sense strand
ugaaggaacgcaagggcuu

SEQ ID NO: 2447896 - RNA, 19 nt, Homo sapiens
  misc_RNA (1)...(19): siRNA sense strand
acaucaggcccaaggucaa

SEQ ID NO: 2447897 - RNA, 19 nt, Homo sapiens
  misc_RNA (1)...(19): siRNA sense strand
aagccaagaccaagagcca

SEQ ID NO: 2447898 - RNA, 19 nt, Homo sapiens
  misc_RNA (1)...(19): siRNA sense strand
gcaggaggcugguucguca

SEQ ID NO: 2447899 - RNA, 19 nt, Homo sapiens
  misc_RNA (1)...(19): siRNA sense strand
gggucuuucuucucagcaa

SEQ ID NO: 2447900 - RNA, 19 nt, Homo sapiens
  misc_RNA (1)...(19): siRNA sense strand
gggcagaacuacaugaagg

SEQ ID NO: 2447901 - RNA, 19 nt, Homo sapiens
  misc_RNA (1)...(19): siRNA sense strand
cagcaaggucauagaacuc

SEQ ID NO: 2447902 - RNA, 19 nt, Homo sapiens
  misc_RNA (1)...(19): siRNA sense strand
ggucauagaacucggagac

SEQ ID NO: 2447903 - RNA, 19 nt, Homo sapiens
  misc_RNA (1)...(19): siRNA sense strand
cguugauggaucugaagaa

SEQ ID NO: 2447904 - RNA, 19 nt, Homo sapiens
  misc_RNA (1)...(19): siRNA sense strand
acuaauugcaggagccauu

SEQ ID NO: 2447905 - RNA, 19 nt, Homo sapiens
  misc_RNA (1)...(19): siRNA sense strand
ccaaagagccguacgucca

SEQ ID NO: 2447906 - RNA, 19 nt, Homo sapiens
  misc_RNA (1)...(19): siRNA sense strand
uuacaguaugaguggcaaa

SEQ ID NO: 2447907 - RNA, 19 nt, Homo sapiens
  misc_RNA (1)...(19): siRNA sense strand
ccaugcaaauuuacgcuua

SEQ ID NO: 2447908 - RNA, 19 nt, Homo sapiens
  misc_RNA (1)...(19): siRNA sense strand
auaucagugcaaagugaaa

SEQ ID NO: 2447909 - RNA, 19 nt, Homo sapiens
  misc_RNA (1)...(19): siRNA sense strand
ugugcggaguaguggauuu

SEQ ID NO: 2447910 - RNA, 19 nt, Homo sapiens
  misc_RNA (1)...(19): siRNA sense strand
cgacaaugccuggugggua

SEQ ID NO: 2447911 - RNA, 19 nt, Homo sapiens
  misc_RNA (1)...(19): siRNA sense strand
gagaaggcagcuacggcua

SEQ ID NO: 2447912 - RNA, 19 nt, Homo sapiens
  misc_RNA (1)...(19): siRNA sense strand
gcgaaauucuaucccguga

SEQ ID NO: 2447913 - RNA, 19 nt, Homo sapiens
  misc_RNA (1)...(19): siRNA sense strand
auacugaggaagcgcaaau

SEQ ID NO: 2447914 - RNA, 19 nt, Homo sapiens
  misc_RNA (1)...(19): siRNA sense strand
gacaaugccugguggguag

SEQ ID NO: 2447915 - RNA, 19 nt, Homo sapiens
  misc_RNA (1)...(19): siRNA sense strand
ugaagcagggagagagguu

SEQ ID NO: 2447916 - RNA, 19 nt, Homo sapiens
  misc_RNA (1)...(19): siRNA sense strand
ccuccaucauccagcuaau

SEQ ID NO: 2447917 - RNA, 19 nt, Homo sapiens
  misc_RNA (1)...(19): siRNA sense strand
aggaaagaucaaaggaauu

SEQ ID NO: 2447918 - RNA, 19 nt, Homo sapiens
  misc_RNA (1)...(19): siRNA sense strand
uggacaaaaugaaggaaaa

SEQ ID NO: 2447919 - RNA, 19 nt, Homo sapiens
  misc_RNA (1)...(19): siRNA sense strand
ggaagagaagucaagggaa

SEQ ID NO: 2447920 - RNA, 19 nt, Homo sapiens
  misc_RNA (1)...(19): siRNA sense strand
agaaaagagccaugaucua

SEQ ID NO: 2447921 - RNA, 19 nt, Homo sapiens
  misc_RNA (1)...(19): siRNA sense strand
acauaaaggaagcagggau

SEQ ID NO: 2447922 - RNA, 19 nt, Homo sapiens
  misc_RNA (1)...(19): siRNA sense strand
caagggaauucauuggcaa

SEQ ID NO: 2447923 - RNA, 19 nt, Homo sapiens
  misc_RNA (1)...(19): siRNA sense strand
gggaagagaagucaaggga

SEQ ID NO: 2447924 - RNA, 19 nt, Homo sapiens
  misc_RNA (1)...(19): siRNA sense strand
agauugacuuuguggcuca

SEQ ID NO: 2447925 - RNA, 19 nt, Homo sapiens
  misc_RNA (1)...(19): siRNA sense strand
gcagagaacagaaggcauc

SEQ ID NO: 2447926 - RNA, 19 nt, Homo sapiens
  misc_RNA (1)...(19): siRNA sense strand
cauaaaggaagcagggaug

SEQ ID NO: 2447927 - RNA, 19 nt, Homo sapiens
  misc_RNA (1)...(19): siRNA sense strand
cagagaggguauacagcca

SEQ ID NO: 2447928 - RNA, 19 nt, Homo sapiens
  misc_RNA (1)...(19): siRNA sense strand
aagcagauguuccaggaga

SEQ ID NO: 2447929 - RNA, 19 nt, Homo sapiens
  misc_RNA (1)...(19): siRNA sense strand
guggacaaaaugaaggaaa

SEQ ID NO: 2447930 - RNA, 19 nt, Homo sapiens
  misc_RNA (1)...(19): siRNA sense strand
aggaauuugugaacagagu

SEQ ID NO: 2447931 - RNA, 19 nt, Homo sapiens
  misc_RNA (1)...(19): siRNA sense strand
gguauacagccaaggaacu

SEQ ID NO: 2447932 - RNA, 19 nt, Homo sapiens
  misc_RNA (1)...(19): siRNA sense strand
gcuacguagacgaaguuau

SEQ ID NO: 2447933 - RNA, 19 nt, Homo sapiens
  misc_RNA (1)...(19): siRNA sense strand
cagagaugcucccuggaca

SEQ ID NO: 2447934 - RNA, 19 nt, Homo sapiens
  misc_RNA (1)...(19): siRNA sense strand
agaaccaaguggacaaaau

SEQ ID NO: 2447935 - RNA, 19 nt, Homo sapiens
  misc_RNA (1)...(19): siRNA sense strand
aagucaagaauguggagga

SEQ ID NO: 2447936 - RNA, 19 nt, Homo sapiens
  misc_RNA (1)...(19): siRNA sense strand
aaaccauggaggaaauaga

SEQ ID NO: 2447937 - RNA, 19 nt, Homo sapiens
  misc_RNA (1)...(19): siRNA sense strand
gcaucauugaaguggagaa

SEQ ID NO: 2447938 - RNA, 19 nt, Homo sapiens
  misc_RNA (1)...(19): siRNA sense strand
cagcugaagaucaaggcua

SEQ ID NO: 2447939 - RNA, 19 nt, Homo sapiens
  misc_RNA (1)...(19): siRNA sense strand
agaucaaggcuaugaagau

SEQ ID NO: 2447940 - RNA, 19 nt, Homo sapiens
  misc_RNA (1)...(19): siRNA sense strand
ucauagaggagaagggugu

SEQ ID NO: 2447941 - RNA, 19 nt, Homo sapiens
  misc_RNA (1)...(19): siRNA sense strand
ugaccauggaggagcgaga

SEQ ID NO: 2447942 - RNA, 19 nt, Homo sapiens
  misc_RNA (1)...(19): siRNA sense strand
agucaaacccaccgggcuu

SEQ ID NO: 2447943 - RNA, 19 nt, Homo sapiens
  misc_RNA (1)...(19): siRNA sense strand
agcugaagaucaaggcuau

SEQ ID NO: 2447944 - RNA, 19 nt, Homo sapiens
  misc_RNA (1)...(19): siRNA sense strand
cuccaagaccugaaggaca

SEQ ID NO: 2447945 - RNA, 19 nt, Homo sapiens
  misc_RNA (1)...(19): siRNA sense strand
cccaugucauagaggagaa

SEQ ID NO: 2447946 - RNA, 19 nt, Homo sapiens
  misc_RNA (1)...(19): siRNA sense strand
gggcuacaucaacgagcaa

SEQ ID NO: 2447947 - RNA, 19 nt, Homo sapiens
  misc_RNA (1)...(19): siRNA sense strand
gcauugaggcugugcugga

SEQ ID NO: 2447948 - RNA, 19 nt, Homo sapiens
  misc_RNA (1)...(19): siRNA sense strand
gagaagggugugaagcuga

SEQ ID NO: 2447949 - RNA, 19 nt, Homo sapiens
  misc_RNA (1)...(19): siRNA sense strand
cggaagaccaaguggggca

SEQ ID NO: 2447950 - RNA, 19 nt, Homo sapiens
  misc_RNA (1)...(19): siRNA sense strand
acgagcaauacgagcagua

SEQ ID NO: 2447951 - RNA, 19 nt, Homo sapiens
  misc_RNA (1)...(19): siRNA sense strand
uggaggagcgagaggccuu

SEQ ID NO: 2447952 - RNA, 19 nt, Homo sapiens
  misc_RNA (1)...(19): siRNA sense strand
acauccacuaugagaacua

SEQ ID NO: 2447953 - RNA, 19 nt, Homo sapiens
  misc_RNA (1)...(19): siRNA sense strand
uaugagaacuaccgcguca

SEQ ID NO: 2447954 - RNA, 19 nt, Homo sapiens
  misc_RNA (1)...(19): siRNA sense strand
ugguagaugacaugagcaa

SEQ ID NO: 2447955 - RNA, 19 nt, Homo sapiens
  misc_RNA (1)...(19): siRNA sense strand
aggacauaucaguaagaaa

SEQ ID NO: 2447956 - RNA, 19 nt, Homo sapiens
  misc_RNA (1)...(19): siRNA sense strand
gcaaauuaucuauggcuca

SEQ ID NO: 2447957 - RNA, 19 nt, Homo sapiens
  misc_RNA (1)...(19): siRNA sense strand
cugaugaagauaaagcaaa

SEQ ID NO: 2447958 - RNA, 19 nt, Homo sapiens
  misc_RNA (1)...(19): siRNA sense strand
cuggauguguggaggccaa

SEQ ID NO: 2447959 - RNA, 19 nt, Homo sapiens
  misc_RNA (1)...(19): siRNA sense strand
cggaaauauucgcgagcgu

SEQ ID NO: 2447960 - RNA, 19 nt, Homo sapiens
  misc_RNA (1)...(19): siRNA sense strand
gcguguugaguuaaggaaa

SEQ ID NO: 2447961 - RNA, 19 nt, Homo sapiens
  misc_RNA (1)...(19): siRNA sense strand
augacaaggauauggauuu

SEQ ID NO: 2447962 - RNA, 19 nt, Homo sapiens
  misc_RNA (1)...(19): siRNA sense strand
aguaagaaacaaacuggaa

SEQ ID NO: 2447963 - RNA, 19 nt, Homo sapiens
  misc_RNA (1)...(19): siRNA sense strand
ucgaaagagaagugccaga

SEQ ID NO: 2447964 - RNA, 19 nt, Homo sapiens
  misc_RNA (1)...(19): siRNA sense strand
gugccagauaccaggagua

SEQ ID NO: 2447965 - RNA, 19 nt, Homo sapiens
  misc_RNA (1)...(19): siRNA sense strand
cggggaaagguuaaaauaa

SEQ ID NO: 2447966 - RNA, 19 nt, Homo sapiens
  misc_RNA (1)...(19): siRNA sense strand
caucgaaagagaagugcca

SEQ ID NO: 2447967 - RNA, 19 nt, Homo sapiens
  misc_RNA (1)...(19): siRNA sense strand
augaauauaaggagcaguu

SEQ ID NO: 2447968 - RNA, 19 nt, Homo sapiens
  misc_RNA (1)...(19): siRNA sense strand
gguacagauuuuaaccaua

SEQ ID NO: 2447969 - RNA, 19 nt, Homo sapiens
  misc_RNA (1)...(19): siRNA sense strand
ccuacaauuuaaaugggau

SEQ ID NO: 2447970 - RNA, 19 nt, Homo sapiens
  misc_RNA (1)...(19): siRNA sense strand
ucuacaaucaucagugcua

SEQ ID NO: 2447971 - RNA, 19 nt, Homo sapiens
  misc_RNA (1)...(19): siRNA sense strand
ucaaaaggacugaugaaga

SEQ ID NO: 2447972 - RNA, 19 nt, Homo sapiens
  misc_RNA (1)...(19): siRNA sense strand
cguguugaguuaaggaaac

SEQ ID NO: 2447973 - RNA, 19 nt, Homo sapiens
  misc_RNA (1)...(19): siRNA sense strand
gggaagagaaaauuuggaa

SEQ ID NO: 2447974 - RNA, 19 nt, Homo sapiens
  misc_RNA (1)...(19): siRNA sense strand
aauaugucaccuacggaaa

SEQ ID NO: 2447975 - RNA, 19 nt, Homo sapiens
  misc_RNA (1)...(19): siRNA sense strand
acugaugaagauaaagcaa

SEQ ID NO: 2447976 - RNA, 19 nt, Homo sapiens
  misc_RNA (1)...(19): siRNA sense strand
ugacaugagcaaaguugau

SEQ ID NO: 2447977 - RNA, 19 nt, Homo sapiens
  misc_RNA (1)...(19): siRNA sense strand
ccugcaaugucuggaggaa

SEQ ID NO: 2447978 - RNA, 19 nt, Homo sapiens
  misc_RNA (1)...(19): siRNA sense strand
gagaagaaccgacagguga

SEQ ID NO: 2447979 - RNA, 19 nt, Homo sapiens
  misc_RNA (1)...(19): siRNA sense strand
aggagaacccagccagcaa

SEQ ID NO: 2447980 - RNA, 19 nt, Homo sapiens
  misc_RNA (1)...(19): siRNA sense strand
gcaccaacaaccacggaca

SEQ ID NO: 2447981 - RNA, 19 nt, Homo sapiens
  misc_RNA (1)...(19): siRNA sense strand
ccauugugcaacuggugaa

SEQ ID NO: 2447982 - RNA, 19 nt, Homo sapiens
  misc_RNA (1)...(19): siRNA sense strand
gcaaagauaaggaacccga

SEQ ID NO: 2447983 - RNA, 19 nt, Homo sapiens
  misc_RNA (1)...(19): siRNA sense strand
gaagaauguuugaagguga

SEQ ID NO: 2447984 - RNA, 19 nt, Homo sapiens
  misc_RNA (1)...(19): siRNA sense strand
cggaauaugagcuggcaau

SEQ ID NO: 2447985 - RNA, 19 nt, Homo sapiens
  misc_RNA (1)...(19): siRNA sense strand
cgacacggaucaaggacga

SEQ ID NO: 2447986 - RNA, 19 nt, Homo sapiens
  misc_RNA (1)...(19): siRNA sense strand
uggacaugguggagaagga

SEQ ID NO: 2447987 - RNA, 19 nt, Homo sapiens
  misc_RNA (1)...(19): siRNA sense strand
ggaauaugagcuggcaaua

SEQ ID NO: 2447988 - RNA, 19 nt, Homo sapiens
  misc_RNA (1)...(19): siRNA sense strand
ugauggagcacauggacau

SEQ ID NO: 2447989 - RNA, 19 nt, Homo sapiens
  misc_RNA (1)...(19): siRNA sense strand
guggaaacguagcagagga

SEQ ID NO: 2447990 - RNA, 19 nt, Homo sapiens
  misc_RNA (1)...(19): siRNA sense strand
cagucaugcugcaaagcuu

SEQ ID NO: 2447991 - RNA, 19 nt, Homo sapiens
  misc_RNA (1)...(19): siRNA sense strand
uggaaacguagcagaggau

SEQ ID NO: 2447992 - RNA, 19 nt, Homo sapiens
  misc_RNA (1)...(19): siRNA sense strand
ugaaagugcccaagcccau

SEQ ID NO: 2447993 - RNA, 19 nt, Homo sapiens
  misc_RNA (1)...(19): siRNA sense strand
gagaaggagucuggggaca

SEQ ID NO: 2447994 - RNA, 19 nt, Homo sapiens
  misc_RNA (1)...(19): siRNA sense strand
ggaucgggguacagaggau

SEQ ID NO: 2447995 - RNA, 19 nt, Homo sapiens
  misc_RNA (1)...(19): siRNA sense strand
aggcuagacgagauggaga

SEQ ID NO: 2447996 - RNA, 19 nt, Homo sapiens
  misc_RNA (1)...(19): siRNA sense strand
caagaggguuggaggacug

SEQ ID NO: 2447997 - RNA, 19 nt, Homo sapiens
  misc_RNA (1)...(19): siRNA sense strand
caguaaaacaugagcagaa

SEQ ID NO: 2447998 - RNA, 19 nt, Homo sapiens
  misc_RNA (1)...(19): siRNA sense strand
gguguaagguugauggcuu

SEQ ID NO: 2447999 - RNA, 19 nt, Homo sapiens
  misc_RNA (1)...(19): siRNA sense strand
aggaauuucuagacggaga

SEQ ID NO: 2448000 - RNA, 19 nt, Homo sapiens
  misc_RNA (1)...(19): siRNA sense strand
gcuucaaaccguucagcaa

SEQ ID NO: 2448001 - RNA, 19 nt, Homo sapiens
  misc_RNA (1)...(19): siRNA sense strand
acggagagcauuggagaaa

SEQ ID NO: 2448002 - RNA, 19 nt, Homo sapiens
  misc_RNA (1)...(19): siRNA sense strand
aggauugggaacagacuaa

SEQ ID NO: 2448003 - RNA, 19 nt, Homo sapiens
  misc_RNA (1)...(19): siRNA sense strand
gccugaaaccagaagguau

SEQ ID NO: 2448004 - RNA, 19 nt, Homo sapiens
  misc_RNA (1)...(19): siRNA sense strand
aggccaaggaggaaaugaa

SEQ ID NO: 2448005 - RNA, 19 nt, Homo sapiens
  misc_RNA (1)...(19): siRNA sense strand
ccauacaggccaaggagga

SEQ ID NO: 2448006 - RNA, 19 nt, Homo sapiens
  misc_RNA (1)...(19): siRNA sense strand
cagacauugaccagaagaa

SEQ ID NO: 2448007 - RNA, 19 nt, Homo sapiens
  misc_RNA (1)...(19): siRNA sense strand
ccagaaagggagauggaug

SEQ ID NO: 2448008 - RNA, 19 nt, Homo sapiens
  misc_RNA (1)...(19): siRNA sense strand
auuucuagacggagagcau

SEQ ID NO: 2448009 - RNA, 19 nt, Homo sapiens
  misc_RNA (1)...(19): siRNA sense strand
agagaaagauaaaggucug

SEQ ID NO: 2448010 - RNA, 19 nt, Homo sapiens
  misc_RNA (1)...(19): siRNA sense strand
ccauaugcaugcugcgagu

SEQ ID NO: 2448011 - RNA, 19 nt, Homo sapiens
  misc_RNA (1)...(19): siRNA sense strand
acccgauauuuguggauuu

SEQ ID NO: 2448012 - RNA, 19 nt, Homo sapiens
  misc_RNA (1)...(19): siRNA sense strand
acgucuggcuccaccguaa

SEQ ID NO: 2448013 - RNA, 19 nt, Homo sapiens
  misc_RNA (1)...(19): siRNA sense strand
ucaauuucacagaaggaau

SEQ ID NO: 2448014 - RNA, 19 nt, Homo sapiens
  misc_RNA (1)...(19): siRNA sense strand
acaucacucaagaaggaaa

SEQ ID NO: 2448015 - RNA, 19 nt, Homo sapiens
  misc_RNA (1)...(19): siRNA sense strand
aggaagaggaggaagagcu

SEQ ID NO: 2448016 - RNA, 19 nt, Homo sapiens
  misc_RNA (1)...(19): siRNA sense strand
gggcaaguuuuauggucau

SEQ ID NO: 2448017 - RNA, 19 nt, Homo sapiens
  misc_RNA (1)...(19): siRNA sense strand
aggacugggagaagcauuu

SEQ ID NO: 2448018 - RNA, 19 nt, Homo sapiens
  misc_RNA (1)...(19): siRNA sense strand
guguaagguugauggcuuc

SEQ ID NO: 2448019 - RNA, 19 nt, Homo sapiens
  misc_RNA (1)...(19): siRNA sense strand
uaacaaauguaguaggaca

SEQ ID NO: 2448020 - RNA, 19 nt, Homo sapiens
  misc_RNA (1)...(19): siRNA sense strand
gugaaauugccaaggaaca

SEQ ID NO: 2448021 - RNA, 19 nt, Homo sapiens
  misc_RNA (1)...(19): siRNA sense strand
gcuuaauccuauugguuca

SEQ ID NO: 2448022 - RNA, 19 nt, Homo sapiens
  misc_RNA (1)...(19): siRNA sense strand
acauagagcugcagaggcu

SEQ ID NO: 2448023 - RNA, 19 nt, Homo sapiens
  misc_RNA (1)...(19): siRNA sense strand
cauuacaggaauuggcuau

SEQ ID NO: 2448024 - RNA, 19 nt, Homo sapiens
  misc_RNA (1)...(19): siRNA sense strand
caaguaagaagcuggcgaa

SEQ ID NO: 2448025 - RNA, 19 nt, Homo sapiens
  misc_RNA (1)...(19): siRNA sense strand
cgguaucuccuguggcaau

SEQ ID NO: 2448026 - RNA, 19 nt, Homo sapiens
  misc_RNA (1)...(19): siRNA sense strand
ccaguuuaugaaugugaaa

SEQ ID NO: 2448027 - RNA, 19 nt, Homo sapiens
  misc_RNA (1)...(19): siRNA sense strand
gaugauaacagcuaagcca

SEQ ID NO: 2448028 - RNA, 19 nt, Homo sapiens
  misc_RNA (1)...(19): siRNA sense strand
auaucaaugucuugcugaa

SEQ ID NO: 2448029 - RNA, 19 nt, Homo sapiens
  misc_RNA (1)...(19): siRNA sense strand
cauuuauggaaacuggaaa

SEQ ID NO: 2448030 - RNA, 19 nt, Homo sapiens
  misc_RNA (1)...(19): siRNA sense strand
cgccaauggacaauaucaa

SEQ ID NO: 2448031 - RNA, 19 nt, Homo sapiens
  misc_RNA (1)...(19): siRNA sense strand
ggcaugaagaccaagaaca

SEQ ID NO: 2448032 - RNA, 19 nt, Homo sapiens
  misc_RNA (1)...(19): siRNA sense strand
ccuccuuaguauuccaaau

SEQ ID NO: 2448033 - RNA, 19 nt, Homo sapiens
  misc_RNA (1)...(19): siRNA sense strand
ggauauagaugaacugagc

SEQ ID NO: 2448034 - RNA, 19 nt, Homo sapiens
  misc_RNA (1)...(19): siRNA sense strand
ggcgaaacauagagcugca

SEQ ID NO: 2448035 - RNA, 19 nt, Homo sapiens
  misc_RNA (1)...(19): siRNA sense strand
aaguaagaagcuggcgaaa

SEQ ID NO: 2448036 - RNA, 19 nt, Homo sapiens
  misc_RNA (1)...(19): siRNA sense strand
gggccaacaaggagcacau

SEQ ID NO: 2448037 - RNA, 19 nt, Homo sapiens
  misc_RNA (1)...(19): siRNA sense strand
cggaauuccaggagaccca

SEQ ID NO: 2448038 - RNA, 19 nt, Homo sapiens
  misc_RNA (1)...(19): siRNA sense strand
gccaagacgccaaggagca

SEQ ID NO: 2448039 - RNA, 19 nt, Homo sapiens
  misc_RNA (1)...(19): siRNA sense strand
caaugaaagcagaaaccaa

SEQ ID NO: 2448040 - RNA, 19 nt, Homo sapiens
  misc_RNA (1)...(19): siRNA sense strand
caauaggaaacuuggagaa

SEQ ID NO: 2448041 - RNA, 19 nt, Homo sapiens
  misc_RNA (1)...(19): siRNA sense strand
uccagaaauuaauggcaaa

SEQ ID NO: 2448042 - RNA, 19 nt, Homo sapiens
  misc_RNA (1)...(19): siRNA sense strand
cauuuauguuugucaggaa

SEQ ID NO: 2448043 - RNA, 19 nt, Homo sapiens
  misc_RNA (1)...(19): siRNA sense strand
ugaugaaacccuaacguau

SEQ ID NO: 2448044 - RNA, 19 nt, Homo sapiens
  misc_RNA (1)...(19): siRNA sense strand
agugaaacuccaugaugaa

SEQ ID NO: 2448045 - RNA, 19 nt, Homo sapiens
  misc_RNA (1)...(19): siRNA sense strand
agcaagaagagucgaguuu

SEQ ID NO: 2448046 - RNA, 19 nt, Homo sapiens
  misc_RNA (1)...(19): siRNA sense strand
cuagagggcuggaggugga

SEQ ID NO: 2448047 - RNA, 19 nt, Homo sapiens
  misc_RNA (1)...(19): siRNA sense strand
cuccugauaaugagaauaa

SEQ ID NO: 2448048 - RNA, 19 nt, Homo sapiens
  misc_RNA (1)...(19): siRNA sense strand
gugcagacagaaagcaaaa

SEQ ID NO: 2448049 - RNA, 19 nt, Homo sapiens
  misc_RNA (1)...(19): siRNA sense strand
ggcaaauuggugaagagua

SEQ ID NO: 2448050 - RNA, 19 nt, Homo sapiens
  misc_RNA (1)...(19): siRNA sense strand
gaaacaugguggagaaaag

SEQ ID NO: 2448051 - RNA, 19 nt, Homo sapiens
  misc_RNA (1)...(19): siRNA sense strand
ggugcagacagaaagcaaa

SEQ ID NO: 2448052 - RNA, 19 nt, Homo sapiens
  misc_RNA (1)...(19): siRNA sense strand
cagaguucacuaugaggaa

SEQ ID NO: 2448053 - RNA, 19 nt, Homo sapiens
  misc_RNA (1)...(19): siRNA sense strand
aaugcuagacaauaggaaa

SEQ ID NO: 2448054 - RNA, 19 nt, Homo sapiens
  misc_RNA (1)...(19): siRNA sense strand
aggaaacaugguggagaaa

SEQ ID NO: 2448055 - RNA, 19 nt, Homo sapiens
  misc_RNA (1)...(19): siRNA sense strand
augagaugauacagaacuu

SEQ ID NO: 2448056 - RNA, 19 nt, Homo sapiens
  misc_RNA (1)...(19): siRNA sense strand
cucaugaaaaggagaaaua

SEQ ID NO: 2448057 - RNA, 19 nt, Homo sapiens
  misc_RNA (1)...(19): siRNA sense strand
ccggguuggugcaggacuu

SEQ ID NO: 2448058 - RNA, 19 nt, Homo sapiens
  misc_RNA (1)...(19): siRNA sense strand
uuccagaaauuaauggcaa

SEQ ID NO: 2448059 - RNA, 19 nt, Homo sapiens
  misc_RNA (1)...(19): siRNA sense strand
gccuauagcaugagugaug

SEQ ID NO: 2448060 - RNA, 19 nt, Homo sapiens
  misc_RNA (1)...(19): siRNA sense strand
ggagaaugaaaacggggaa

SEQ ID NO: 2448061 - RNA, 19 nt, Homo sapiens
  misc_RNA (1)...(19): siRNA sense strand
aggugcagacagaaagcaa

SEQ ID NO: 2448062 - RNA, 19 nt, Homo sapiens
  misc_RNA (1)...(19): siRNA sense strand
aaugaaagcagaaaccaau

SEQ ID NO: 2448063 - RNA, 19 nt, Homo sapiens
  misc_RNA (1)...(19): siRNA sense strand
agagaugaugugauccaaa

SEQ ID NO: 2448064 - RNA, 19 nt, Homo sapiens
  misc_RNA (1)...(19): siRNA sense strand
agaaugaaaacggggaaua

SEQ ID NO: 2448065 - RNA, 19 nt, Homo sapiens
  misc_RNA (1)...(19): siRNA sense strand
auacagaacuuucaggaag

SEQ ID NO: 2448066 - RNA, 19 nt, Homo sapiens
  misc_RNA (1)...(19): siRNA sense strand
ggagaaacgaacaccucau

SEQ ID NO: 2448067 - RNA, 19 nt, Homo sapiens
  misc_RNA (1)...(19): siRNA sense strand
agaucacguaugucaauaa

SEQ ID NO: 2448068 - RNA, 19 nt, Homo sapiens
  misc_RNA (1)...(19): siRNA sense strand
gggcaucauugcuagcaca

SEQ ID NO: 2448069 - RNA, 19 nt, Homo sapiens
  misc_RNA (1)...(19): siRNA sense strand
gagcagaacuccagcgacu

SEQ ID NO: 2448070 - RNA, 19 nt, Homo sapiens
  misc_RNA (1)...(19): siRNA sense strand
aagaagagccugaggacga

SEQ ID NO: 2448071 - RNA, 19 nt, Homo sapiens
  misc_RNA (1)...(19): siRNA sense strand
auacacagguggugggaca

SEQ ID NO: 2448072 - RNA, 19 nt, Homo sapiens
  misc_RNA (1)...(19): siRNA sense strand
ucaucaaccugcagggcaa

SEQ ID NO: 2448073 - RNA, 19 nt, Homo sapiens
  misc_RNA (1)...(19): siRNA sense strand
gggcagugagaaagaagaa

SEQ ID NO: 2448074 - RNA, 19 nt, Homo sapiens
  misc_RNA (1)...(19): siRNA sense strand
agaaagaagaagagccuga

SEQ ID NO: 2448075 - RNA, 19 nt, Homo sapiens
  misc_RNA (1)...(19): siRNA sense strand
gagaagaagaacugggcga

SEQ ID NO: 2448076 - RNA, 19 nt, Homo sapiens
  misc_RNA (1)...(19): siRNA sense strand
uggaaaaguuugaggacca

SEQ ID NO: 2448077 - RNA, 19 nt, Homo sapiens
  misc_RNA (1)...(19): siRNA sense strand
acaucuacguggaggccua

SEQ ID NO: 2448078 - RNA, 19 nt, Homo sapiens
  misc_RNA (1)...(19): siRNA sense strand
cgucacgggcugaggaaga

SEQ ID NO: 2448079 - RNA, 19 nt, Homo sapiens
  misc_RNA (1)...(19): siRNA sense strand
uagagaaagaagagauuga

SEQ ID NO: 2448080 - RNA, 19 nt, Homo sapiens
  misc_RNA (1)...(19): siRNA sense strand
aggccgagguagacgaaga

SEQ ID NO: 2448081 - RNA, 19 nt, Homo sapiens
  misc_RNA (1)...(19): siRNA sense strand
cagagcaugugaagggcua

SEQ ID NO: 2448082 - RNA, 19 nt, Homo sapiens
  misc_RNA (1)...(19): siRNA sense strand
gccaaaaggaagaaguuua

SEQ ID NO: 2448083 - RNA, 19 nt, Homo sapiens
  misc_RNA (1)...(19): siRNA sense strand
uggugaaggagguggccaa

SEQ ID NO: 2448084 - RNA, 19 nt, Homo sapiens
  misc_RNA (1)...(19): siRNA sense strand
ugaaagugauccugggcga

SEQ ID NO: 2448085 - RNA, 19 nt, Homo sapiens
  misc_RNA (1)...(19): siRNA sense strand
ggaagaaggacaaccgcuu

SEQ ID NO: 2448086 - RNA, 19 nt, Homo sapiens
  misc_RNA (1)...(19): siRNA sense strand
aguaugaggacgaggacca

SEQ ID NO: 2448087 - RNA, 19 nt, Homo sapiens
  misc_RNA (1)...(19): siRNA sense strand
aggaggaggaagaggagga

SEQ ID NO: 2448088 - RNA, 19 nt, Homo sapiens
  misc_RNA (1)...(19): siRNA sense strand
aggaggaagaggaggagga

SEQ ID NO: 2448089 - RNA, 19 nt, Homo sapiens
  misc_RNA (1)...(19): siRNA sense strand
agaagaacugggcgaguau

SEQ ID NO: 2448090 - RNA, 19 nt, Homo sapiens
  misc_RNA (1)...(19): siRNA sense strand
cggacagcgaggacagcaa

SEQ ID NO: 2448091 - RNA, 19 nt, Homo sapiens
  misc_RNA (1)...(19): siRNA sense strand
ucuagagaaagaagagauu

SEQ ID NO: 2448092 - RNA, 19 nt, Homo sapiens
  misc_RNA (1)...(19): siRNA sense strand
ccaagucaucugugggaga

SEQ ID NO: 2448093 - RNA, 19 nt, Homo sapiens
  misc_RNA (1)...(19): siRNA sense strand
aggauggagcagaggacau

SEQ ID NO: 2448094 - RNA, 19 nt, Homo sapiens
  misc_RNA (1)...(19): siRNA sense strand
aggacgaagaggaggagga

SEQ ID NO: 2448095 - RNA, 19 nt, Homo sapiens
  misc_RNA (1)...(19): siRNA sense strand
acgaugaguaugaggacga

SEQ ID NO: 2448096 - RNA, 19 nt, Homo sapiens
  misc_RNA (1)...(19): siRNA sense strand
ccuuggacucagagcagaa

SEQ ID NO: 2448097 - RNA, 19 nt, Homo sapiens
  misc_RNA (1)...(19): siRNA sense strand
cugaggaagaauaugagua

SEQ ID NO: 2448098 - RNA, 19 nt, Homo sapiens
  misc_RNA (1)...(19): siRNA sense strand
agaacaacaaggugaaagu

SEQ ID NO: 2448099 - RNA, 19 nt, Homo sapiens
  misc_RNA (1)...(19): siRNA sense strand
acucagagcagaacaacau

SEQ ID NO: 2448100 - RNA, 19 nt, Homo sapiens
  misc_RNA (1)...(19): siRNA sense strand
gggacaacguggaggucug

SEQ ID NO: 2448101 - RNA, 19 nt, Homo sapiens
  misc_RNA (1)...(19): siRNA sense strand
acaucgguguggugaaaga

SEQ ID NO: 2448102 - RNA, 19 nt, Homo sapiens
  misc_RNA (1)...(19): siRNA sense strand
ucaaaguggugaaggaggu

SEQ ID NO: 2448103 - RNA, 19 nt, Homo sapiens
  misc_RNA (1)...(19): siRNA sense strand
aggaccagccagagggcau

SEQ ID NO: 2448104 - RNA, 19 nt, Homo sapiens
  misc_RNA (1)...(19): siRNA sense strand
ugauguugacgaugaguau

SEQ ID NO: 2448105 - RNA, 19 nt, Homo sapiens
  misc_RNA (1)...(19): siRNA sense strand
gggaccagcgagaagaaga

SEQ ID NO: 2448106 - RNA, 19 nt, Homo sapiens
  misc_RNA (1)...(19): siRNA sense strand
acaugaagaaauacgccaa

SEQ ID NO: 2448107 - RNA, 19 nt, Homo sapiens
  misc_RNA (1)...(19): siRNA sense strand
gacuagaacgggagaccuu

SEQ ID NO: 2448108 - RNA, 19 nt, Homo sapiens
  misc_RNA (1)...(19): siRNA sense strand
ugagaaagaagaagagccu

SEQ ID NO: 2448109 - RNA, 19 nt, Homo sapiens
  misc_RNA (1)...(19): siRNA sense strand
ccugaaggacagugagaag

SEQ ID NO: 2448110 - RNA, 19 nt, Homo sapiens
  misc_RNA (1)...(19): siRNA sense strand
gcuacaucgguguggugaa

SEQ ID NO: 2448111 - RNA, 19 nt, Homo sapiens
  misc_RNA (1)...(19): siRNA sense strand
aguaguggcaccagagcau

SEQ ID NO: 2448112 - RNA, 19 nt, Homo sapiens
  misc_RNA (1)...(19): siRNA sense strand
cagcccaggaacuuagaaa

SEQ ID NO: 2448113 - RNA, 19 nt, Homo sapiens
  misc_RNA (1)...(19): siRNA sense strand
guggaggagaauuucguua

SEQ ID NO: 2448114 - RNA, 19 nt, Homo sapiens
  misc_RNA (1)...(19): siRNA sense strand
gaucaagucaguaguggca

SEQ ID NO: 2448115 - RNA, 19 nt, Homo sapiens
  misc_RNA (1)...(19): siRNA sense strand
ucaccaugcaugagcugaa

SEQ ID NO: 2448116 - RNA, 19 nt, Homo sapiens
  misc_RNA (1)...(19): siRNA sense strand
acgggaagguggugacugu

SEQ ID NO: 2448117 - RNA, 19 nt, Homo sapiens
  misc_RNA (1)...(19): siRNA sense strand
uguuugaugcugagaagau

SEQ ID NO: 2448118 - RNA, 19 nt, Homo sapiens
  misc_RNA (1)...(19): siRNA sense strand
cgauaauguuguccuggau

SEQ ID NO: 2448119 - RNA, 19 nt, Homo sapiens
  misc_RNA (1)...(19): siRNA sense strand
cugaggacgaagaggagga

SEQ ID NO: 2448120 - RNA, 19 nt, Homo sapiens
  misc_RNA (1)...(19): siRNA sense strand
gggaccacgugaaggugau

SEQ ID NO: 2448121 - RNA, 19 nt, Homo sapiens
  misc_RNA (1)...(19): siRNA sense strand
guauggaccuugaugagca

SEQ ID NO: 2448122 - RNA, 19 nt, Homo sapiens
  misc_RNA (1)...(19): siRNA sense strand
ccuuccaggugcugaacau

SEQ ID NO: 2448123 - RNA, 19 nt, Homo sapiens
  misc_RNA (1)...(19): siRNA sense strand
ugcucaaaguggugaagga

SEQ ID NO: 2448124 - RNA, 19 nt, Homo sapiens
  misc_RNA (1)...(19): siRNA sense strand
gcccaggaacuuagaaaau

SEQ ID NO: 2448125 - RNA, 19 nt, Homo sapiens
  misc_RNA (1)...(19): siRNA sense strand
cuggguaaccacugacauu

SEQ ID NO: 2448126 - RNA, 19 nt, Homo sapiens
  misc_RNA (1)...(19): siRNA sense strand
accaagaacaacaagguga

SEQ ID NO: 2448127 - RNA, 19 nt, Homo sapiens
  misc_RNA (1)...(19): siRNA sense strand
acaacgaacucaucggcca

SEQ ID NO: 2448128 - RNA, 19 nt, Homo sapiens
  misc_RNA (1)...(19): siRNA sense strand
caggugaaggugcgggaca

SEQ ID NO: 2448129 - RNA, 19 nt, Homo sapiens
  misc_RNA (1)...(19): siRNA sense strand
ggaagaagcuccuggaugc

SEQ ID NO: 2448130 - RNA, 19 nt, Homo sapiens
  misc_RNA (1)...(19): siRNA sense strand
agugaugagcugaaggaga

SEQ ID NO: 2448131 - RNA, 19 nt, Homo sapiens
  misc_RNA (1)...(19): siRNA sense strand
ccgucgacuccgaggauca

SEQ ID NO: 2448132 - RNA, 19 nt, Homo sapiens
  misc_RNA (1)...(19): siRNA sense strand
ccugugaugccgugcgcaa

SEQ ID NO: 2448133 - RNA, 19 nt, Homo sapiens
  misc_RNA (1)...(19): siRNA sense strand
ccaaggaggccauccgaga

SEQ ID NO: 2448134 - RNA, 19 nt, Homo sapiens
  misc_RNA (1)...(19): siRNA sense strand
cgcaacaagugccgcgaga

SEQ ID NO: 2448135 - RNA, 19 nt, Homo sapiens
  misc_RNA (1)...(19): siRNA sense strand
ggaagaagcuccuggaugc

SEQ ID NO: 2448136 - RNA, 19 nt, Homo sapiens
  misc_RNA (1)...(19): siRNA sense strand
agugaugagcugaaggaga

SEQ ID NO: 2448137 - RNA, 19 nt, Homo sapiens
  misc_RNA (1)...(19): siRNA sense strand
ccgucgacuccgaggauca

SEQ ID NO: 2448138 - RNA, 19 nt, Homo sapiens
  misc_RNA (1)...(19): siRNA sense strand
ccugugaugccgugcgcaa

SEQ ID NO: 2448139 - RNA, 19 nt, Homo sapiens
  misc_RNA (1)...(19): siRNA sense strand
ccaaggaggccauccgaga

SEQ ID NO: 2448140 - RNA, 19 nt, Homo sapiens
  misc_RNA (1)...(19): siRNA sense strand
cgcaacaagugccgcgaga

SEQ ID NO: 2448141 - RNA, 19 nt, Homo sapiens
  misc_RNA (1)...(19): siRNA sense strand
gggagaaacuugaccgcaa

SEQ ID NO: 2448142 - RNA, 19 nt, Homo sapiens
  misc_RNA (1)...(19): siRNA sense strand
aagaagaaacagaaggaga

SEQ ID NO: 2448143 - RNA, 19 nt, Homo sapiens
  misc_RNA (1)...(19): siRNA sense strand
ggugaagagcaaagcagaa

SEQ ID NO: 2448144 - RNA, 19 nt, Homo sapiens
  misc_RNA (1)...(19): siRNA sense strand
ucagaagagcagaaguaaa

SEQ ID NO: 2448145 - RNA, 19 nt, Homo sapiens
  misc_RNA (1)...(19): siRNA sense strand
cagcagaagccauggcaca

SEQ ID NO: 2448146 - RNA, 19 nt, Homo sapiens
  misc_RNA (1)...(19): siRNA sense strand
uuucagaagagcagaagua

SEQ ID NO: 2448147 - RNA, 19 nt, Homo sapiens
  misc_RNA (1)...(19): siRNA sense strand
agaaagcaguagugagagu

SEQ ID NO: 2448148 - RNA, 19 nt, Homo sapiens
  misc_RNA (1)...(19): siRNA sense strand
agagcaaagcagaagaaau

SEQ ID NO: 2448149 - RNA, 19 nt, Homo sapiens
  misc_RNA (1)...(19): siRNA sense strand
auagauugcuuaugggaga

SEQ ID NO: 2448150 - RNA, 19 nt, Homo sapiens
  misc_RNA (1)...(19): siRNA sense strand
aguuacaagcaaagggaga

SEQ ID NO: 2448151 - RNA, 19 nt, Homo sapiens
  misc_RNA (1)...(19): siRNA sense strand
ccugguaguuacaagcaaa

SEQ ID NO: 2448152 - RNA, 19 nt, Homo sapiens
  misc_RNA (1)...(19): siRNA sense strand
agaagaaaugacagcagaa

SEQ ID NO: 2448153 - RNA, 19 nt, Homo sapiens
  misc_RNA (1)...(19): siRNA sense strand
guucuagggaggacagcaa

SEQ ID NO: 2448154 - RNA, 19 nt, Homo sapiens
  misc_RNA (1)...(19): siRNA sense strand
aaacagaaggagagaccga

SEQ ID NO: 2448155 - RNA, 19 nt, Homo sapiens
  misc_RNA (1)...(19): siRNA sense strand
cuaaagugacacaaagaga

SEQ ID NO: 2448156 - RNA, 19 nt, Homo sapiens
  misc_RNA (1)...(19): siRNA sense strand
cagaagaaaugacagcaga

SEQ ID NO: 2448157 - RNA, 19 nt, Homo sapiens
  misc_RNA (1)...(19): siRNA sense strand
acaaagagaaagaagaaac

SEQ ID NO: 2448158 - RNA, 19 nt, Homo sapiens
  misc_RNA (1)...(19): siRNA sense strand
aagagaaagaagaaacaga

SEQ ID NO: 2448159 - RNA, 19 nt, Homo sapiens
  misc_RNA (1)...(19): siRNA sense strand
aggagagaccgaauacaaa

SEQ ID NO: 2448160 - RNA, 19 nt, Homo sapiens
  misc_RNA (1)...(19): siRNA sense strand
caaaggaagaaaagaaaga

SEQ ID NO: 2448161 - RNA, 19 nt, Homo sapiens
  misc_RNA (1)...(19): siRNA sense strand
aagaagaauugaugcagca

SEQ ID NO: 2448162 - RNA, 19 nt, Homo sapiens
  misc_RNA (1)...(19): siRNA sense strand
auggauggcagaacagaaa

SEQ ID NO: 2448163 - RNA, 19 nt, Homo sapiens
  misc_RNA (1)...(19): siRNA sense strand
aagugagggugaagaagau

SEQ ID NO: 2448164 - RNA, 19 nt, Homo sapiens
  misc_RNA (1)...(19): siRNA sense strand
aagcaaagggagacaagga

SEQ ID NO: 2448165 - RNA, 19 nt, Homo sapiens
  misc_RNA (1)...(19): siRNA sense strand
ucgccaacuucaugugcaa

SEQ ID NO: 2448166 - RNA, 19 nt, Homo sapiens
  misc_RNA (1)...(19): siRNA sense strand
agugagagugagaguaaca

SEQ ID NO: 2448167 - RNA, 19 nt, Homo sapiens
  misc_RNA (1)...(19): siRNA sense strand
acaagucuaagaagagaaa

SEQ ID NO: 2448168 - RNA, 19 nt, Homo sapiens
  misc_RNA (1)...(19): siRNA sense strand
ccuccaaauccaauaucaa

SEQ ID NO: 2448169 - RNA, 19 nt, Homo sapiens
  misc_RNA (1)...(19): siRNA sense strand
aaagugacacaaagagaau

SEQ ID NO: 2448170 - RNA, 19 nt, Homo sapiens
  misc_RNA (1)...(19): siRNA sense strand
gggugaagaagauccagaa

SEQ ID NO: 2448171 - RNA, 19 nt, Homo sapiens
  misc_RNA (1)...(19): siRNA sense strand
aauuagaucgacuggagaa

SEQ ID NO: 2448172 - RNA, 19 nt, Homo sapiens
  misc_RNA (1)...(19): siRNA sense strand
aaauccuggugaagagcaa

SEQ ID NO: 2448173 - RNA, 19 nt, Homo sapiens
  misc_RNA (1)...(19): siRNA sense strand
ggaggaaaggagccggaga

SEQ ID NO: 2448174 - RNA, 19 nt, Homo sapiens
  misc_RNA (1)...(19): siRNA sense strand
aaguauggauggcagaaca

SEQ ID NO: 2448175 - RNA, 19 nt, Homo sapiens
  misc_RNA (1)...(19): siRNA sense strand
acagcgaaauccuggugaa

SEQ ID NO: 2448176 - RNA, 19 nt, Homo sapiens
  misc_RNA (1)...(19): siRNA sense strand
caguagugagagugagagu

SEQ ID NO: 2448177 - RNA, 19 nt, Homo sapiens
  misc_RNA (1)...(19): siRNA sense strand
gcauaacaacagugauucu

SEQ ID NO: 2448178 - RNA, 19 nt, Homo sapiens
  misc_RNA (1)...(19): siRNA sense strand
caaauuugaauggcagaaa

SEQ ID NO: 2448179 - RNA, 19 nt, Homo sapiens
  misc_RNA (1)...(19): siRNA sense strand
augccaaagaugacaugaa

SEQ ID NO: 2448180 - RNA, 19 nt, Homo sapiens
  misc_RNA (1)...(19): siRNA sense strand
guguaaagaauggccuuaa

SEQ ID NO: 2448181 - RNA, 19 nt, Homo sapiens
  misc_RNA (1)...(19): siRNA sense strand
acagaaggagagaccgaau

SEQ ID NO: 2448182 - RNA, 19 nt, Homo sapiens
  misc_RNA (1)...(19): siRNA sense strand
agugacacaaagagaauga

SEQ ID NO: 2448183 - RNA, 19 nt, Homo sapiens
  misc_RNA (1)...(19): siRNA sense strand
agaucagcccuuugguauu

SEQ ID NO: 2448184 - RNA, 19 nt, Homo sapiens
  misc_RNA (1)...(19): siRNA sense strand
cuaauagcggagaugagaa

SEQ ID NO: 2448185 - RNA, 19 nt, Homo sapiens
  misc_RNA (1)...(19): siRNA sense strand
ucuuaaaacacgagaguuc

SEQ ID NO: 2448186 - RNA, 19 nt, Homo sapiens
  misc_RNA (1)...(19): siRNA sense strand
guucgaaaugugaggugca

SEQ ID NO: 2448187 - RNA, 19 nt, Homo sapiens
  misc_RNA (1)...(19): siRNA sense strand
ugcaagugagggugaagaa

SEQ ID NO: 2448188 - RNA, 19 nt, Homo sapiens
  misc_RNA (1)...(19): siRNA sense strand
gggagaaacuugaccgcaa

SEQ ID NO: 2448189 - RNA, 19 nt, Homo sapiens
  misc_RNA (1)...(19): siRNA sense strand
aagaagaaacagaaggaga

SEQ ID NO: 2448190 - RNA, 19 nt, Homo sapiens
  misc_RNA (1)...(19): siRNA sense strand
auagauugcuuaugggaga

SEQ ID NO: 2448191 - RNA, 19 nt, Homo sapiens
  misc_RNA (1)...(19): siRNA sense strand
aaacagaaggagagaccga

SEQ ID NO: 2448192 - RNA, 19 nt, Homo sapiens
  misc_RNA (1)...(19): siRNA sense strand
acaaagagaaagaagaaac

SEQ ID NO: 2448193 - RNA, 19 nt, Homo sapiens
  misc_RNA (1)...(19): siRNA sense strand
aagagaaagaagaaacaga

SEQ ID NO: 2448194 - RNA, 19 nt, Homo sapiens
  misc_RNA (1)...(19): siRNA sense strand
aggagagaccgaauacaaa

SEQ ID NO: 2448195 - RNA, 19 nt, Homo sapiens
  misc_RNA (1)...(19): siRNA sense strand
aagaagaauugaugcagca

SEQ ID NO: 2448196 - RNA, 19 nt, Homo sapiens
  misc_RNA (1)...(19): siRNA sense strand
auggauggcagaacagaaa

SEQ ID NO: 2448197 - RNA, 19 nt, Homo sapiens
  misc_RNA (1)...(19): siRNA sense strand
ucgccaacuucaugugcaa

SEQ ID NO: 2448198 - RNA, 19 nt, Homo sapiens
  misc_RNA (1)...(19): siRNA sense strand
ccuccaaauccaauaucaa

SEQ ID NO: 2448199 - RNA, 19 nt, Homo sapiens
  misc_RNA (1)...(19): siRNA sense strand
aaguauggauggcagaaca

SEQ ID NO: 2448200 - RNA, 19 nt, Homo sapiens
  misc_RNA (1)...(19): siRNA sense strand
caaauuugaauggcagaaa

SEQ ID NO: 2448201 - RNA, 19 nt, Homo sapiens
  misc_RNA (1)...(19): siRNA sense strand
augccaaagaugacaugaa

SEQ ID NO: 2448202 - RNA, 19 nt, Homo sapiens
  misc_RNA (1)...(19): siRNA sense strand
guguaaagaauggccuuaa

SEQ ID NO: 2448203 - RNA, 19 nt, Homo sapiens
  misc_RNA (1)...(19): siRNA sense strand
acagaaggagagaccgaau

SEQ ID NO: 2448204 - RNA, 19 nt, Homo sapiens
  misc_RNA (1)...(19): siRNA sense strand
agaucagcccuuugguauu

SEQ ID NO: 2448205 - RNA, 19 nt, Homo sapiens
  misc_RNA (1)...(19): siRNA sense strand
cuaauagcggagaugagaa

SEQ ID NO: 2448206 - RNA, 19 nt, Homo sapiens
  misc_RNA (1)...(19): siRNA sense strand
gcuuaugggagaugaacgu

SEQ ID NO: 2448207 - RNA, 19 nt, Homo sapiens
  misc_RNA (1)...(19): siRNA sense strand
guucgaaaugugaggugca

SEQ ID NO: 2448208 - RNA, 19 nt, Homo sapiens
  misc_RNA (1)...(19): siRNA sense strand
acccaggacacgcgggaua

SEQ ID NO: 2448209 - RNA, 19 nt, Homo sapiens
  misc_RNA (1)...(19): siRNA sense strand
cagcccuggugcagaucaa

SEQ ID NO: 2448210 - RNA, 19 nt, Homo sapiens
  misc_RNA (1)...(19): siRNA sense strand
auacccaguuucagugcaa

SEQ ID NO: 2448211 - RNA, 19 nt, Homo sapiens
  misc_RNA (1)...(19): siRNA sense strand
gguggcugguggagaacga

SEQ ID NO: 2448212 - RNA, 19 nt, Homo sapiens
  misc_RNA (1)...(19): siRNA sense strand
acccaggacacgcgggaua

SEQ ID NO: 2448213 - RNA, 19 nt, Homo sapiens
  misc_RNA (1)...(19): siRNA sense strand
cagcccuggugcagaucaa

SEQ ID NO: 2448214 - RNA, 19 nt, Homo sapiens
  misc_RNA (1)...(19): siRNA sense strand
auacccaguuucagugcaa

SEQ ID NO: 2448215 - RNA, 19 nt, Homo sapiens
  misc_RNA (1)...(19): siRNA sense strand
gguggcugguggagaacga

SEQ ID NO: 2448216 - RNA, 19 nt, Homo sapiens
  misc_RNA (1)...(19): siRNA sense strand
acccaggacacgcgggaua

SEQ ID NO: 2448217 - RNA, 19 nt, Homo sapiens
  misc_RNA (1)...(19): siRNA sense strand
cagcccuggugcagaucaa

SEQ ID NO: 2448218 - RNA, 19 nt, Homo sapiens
  misc_RNA (1)...(19): siRNA sense strand
auacccaguuucagugcaa

SEQ ID NO: 2448219 - RNA, 19 nt, Homo sapiens
  misc_RNA (1)...(19): siRNA sense strand
gguggcugguggagaacga

SEQ ID NO: 2448220 - RNA, 19 nt, Homo sapiens
  misc_RNA (1)...(19): siRNA sense strand
gagaagaucugguuccaca

SEQ ID NO: 2448221 - RNA, 19 nt, Homo sapiens
  misc_RNA (1)...(19): siRNA sense strand
ugauauugccagagccaga

SEQ ID NO: 2448222 - RNA, 19 nt, Homo sapiens
  misc_RNA (1)...(19): siRNA sense strand
gauucuacgaacagaugaa

SEQ ID NO: 2448223 - RNA, 19 nt, Homo sapiens
  misc_RNA (1)...(19): siRNA sense strand
caaacuuucuaguagguga

SEQ ID NO: 2448224 - RNA, 19 nt, Homo sapiens
  misc_RNA (1)...(19): siRNA sense strand
ugccagagccagagagaac

SEQ ID NO: 2448225 - RNA, 19 nt, Homo sapiens
  misc_RNA (1)...(19): siRNA sense strand
ucaaauauggcgaugcaga

SEQ ID NO: 2448226 - RNA, 19 nt, Homo sapiens
  misc_RNA (1)...(19): siRNA sense strand
cagagagaacaucccgaaa

SEQ ID NO: 2448227 - RNA, 19 nt, Homo sapiens
  misc_RNA (1)...(19): siRNA sense strand
ccuccaugauauugccaga

SEQ ID NO: 2448228 - RNA, 19 nt, Homo sapiens
  misc_RNA (1)...(19): siRNA sense strand
gaaaggagauucuacgaac

SEQ ID NO: 2448229 - RNA, 19 nt, Homo sapiens
  misc_RNA (1)...(19): siRNA sense strand
aaguggacaaccagagaga

SEQ ID NO: 2448230 - RNA, 19 nt, Homo sapiens
  misc_RNA (1)...(19): siRNA sense strand
gcaaagacauggaggagcu

SEQ ID NO: 2448231 - RNA, 19 nt, Homo sapiens
  misc_RNA (1)...(19): siRNA sense strand
ggguauacaggcagagcau

SEQ ID NO: 2448232 - RNA, 19 nt, Homo sapiens
  misc_RNA (1)...(19): siRNA sense strand
accagaagcagguggagaa

SEQ ID NO: 2448233 - RNA, 19 nt, Homo sapiens
  misc_RNA (1)...(19): siRNA sense strand
ggaagaaguaugaggccgu

SEQ ID NO: 2448234 - RNA, 19 nt, Homo sapiens
  misc_RNA (1)...(19): siRNA sense strand
ucgcagugcaggagauaca

SEQ ID NO: 2448235 - RNA, 19 nt, Homo sapiens
  misc_RNA (1)...(19): siRNA sense strand
uggaggagcuacugaggca

SEQ ID NO: 2448236 - RNA, 19 nt, Homo sapiens
  misc_RNA (1)...(19): siRNA sense strand
ccaagaagacauacgagca

SEQ ID NO: 2448237 - RNA, 19 nt, Homo sapiens
  misc_RNA (1)...(19): siRNA sense strand
agaagacauacgagcagaa

SEQ ID NO: 2448238 - RNA, 19 nt, Homo sapiens
  misc_RNA (1)...(19): siRNA sense strand
gaggauggcugguggacug

SEQ ID NO: 2448239 - RNA, 19 nt, Homo sapiens
  misc_RNA (1)...(19): siRNA sense strand
guggagaagagucagaaca

SEQ ID NO: 2448240 - RNA, 19 nt, Homo sapiens
  misc_RNA (1)...(19): siRNA sense strand
gugcaggagauacagggaa

SEQ ID NO: 2448241 - RNA, 19 nt, Homo sapiens
  misc_RNA (1)...(19): siRNA sense strand
gugagaggcagaaggagca

SEQ ID NO: 2448242 - RNA, 19 nt, Homo sapiens
  misc_RNA (1)...(19): siRNA sense strand
ccucaccagcccaggagua

SEQ ID NO: 2448243 - RNA, 19 nt, Homo sapiens
  misc_RNA (1)...(19): siRNA sense strand
caacaaacguggagcgucu

SEQ ID NO: 2448244 - RNA, 19 nt, Homo sapiens
  misc_RNA (1)...(19): siRNA sense strand
agggaaacuggaaggauaa

SEQ ID NO: 2448245 - RNA, 19 nt, Homo sapiens
  misc_RNA (1)...(19): siRNA sense strand
cggaugacauugaggacga

SEQ ID NO: 2448246 - RNA, 19 nt, Homo sapiens
  misc_RNA (1)...(19): siRNA sense strand
ggaagugaaugaagaggga

SEQ ID NO: 2448247 - RNA, 19 nt, Homo sapiens
  misc_RNA (1)...(19): siRNA sense strand
aaggacagacagaaggaaa

SEQ ID NO: 2448248 - RNA, 19 nt, Homo sapiens
  misc_RNA (1)...(19): siRNA sense strand
ccugaagaagauugaggaa

SEQ ID NO: 2448249 - RNA, 19 nt, Homo sapiens
  misc_RNA (1)...(19): siRNA sense strand
gggucaaaggacagacaga

SEQ ID NO: 2448250 - RNA, 19 nt, Homo sapiens
  misc_RNA (1)...(19): siRNA sense strand
ccauaaaccagugggucaa

SEQ ID NO: 2448251 - RNA, 19 nt, Homo sapiens
  misc_RNA (1)...(19): siRNA sense strand
aggacagacagaaggaaaa

SEQ ID NO: 2448252 - RNA, 19 nt, Homo sapiens
  misc_RNA (1)...(19): siRNA sense strand
uggcguugagugagaacaa

SEQ ID NO: 2448253 - RNA, 19 nt, Homo sapiens
  misc_RNA (1)...(19): siRNA sense strand
accauaaaccaguggguca

SEQ ID NO: 2448254 - RNA, 19 nt, Homo sapiens
  misc_RNA (1)...(19): siRNA sense strand
auucaagauuccagagucu

SEQ ID NO: 2448255 - RNA, 19 nt, Homo sapiens
  misc_RNA (1)...(19): siRNA sense strand
cgggcaugguugauaacau

SEQ ID NO: 2448256 - RNA, 19 nt, Homo sapiens
  misc_RNA (1)...(19): siRNA sense strand
augucaggagccagagaua

SEQ ID NO: 2448257 - RNA, 19 nt, Homo sapiens
  misc_RNA (1)...(19): siRNA sense strand
uguugaugcccgaagaaaa

SEQ ID NO: 2448258 - RNA, 19 nt, Homo sapiens
  misc_RNA (1)...(19): siRNA sense strand
gcuacaucgaggaccuuaa

SEQ ID NO: 2448259 - RNA, 19 nt, Homo sapiens
  misc_RNA (1)...(19): siRNA sense strand
ucugaagaugcaaggaaga

SEQ ID NO: 2448260 - RNA, 19 nt, Homo sapiens
  misc_RNA (1)...(19): siRNA sense strand
gggaaacuggaaggauaaa

SEQ ID NO: 2448261 - RNA, 19 nt, Homo sapiens
  misc_RNA (1)...(19): siRNA sense strand
uuguggaagugaaugaaga

SEQ ID NO: 2448262 - RNA, 19 nt, Homo sapiens
  misc_RNA (1)...(19): siRNA sense strand
aagugaaugaagagggaac

SEQ ID NO: 2448263 - RNA, 19 nt, Homo sapiens
  misc_RNA (1)...(19): siRNA sense strand
cuuuaucuucagagaguua

SEQ ID NO: 2448264 - RNA, 19 nt, Homo sapiens
  misc_RNA (1)...(19): siRNA sense strand
aucuaaaggaguugaguau

SEQ ID NO: 2448265 - RNA, 19 nt, Homo sapiens
  misc_RNA (1)...(19): siRNA sense strand
guggguugcaggaggacaa

SEQ ID NO: 2448266 - RNA, 19 nt, Homo sapiens
  misc_RNA (1)...(19): siRNA sense strand
ggaguugaguauuuggaca

SEQ ID NO: 2448267 - RNA, 19 nt, Homo sapiens
  misc_RNA (1)...(19): siRNA sense strand
uggaaaagcaaaaggagau

SEQ ID NO: 2448268 - RNA, 19 nt, Homo sapiens
  misc_RNA (1)...(19): siRNA sense strand
cagaaauaucuuuggugga

SEQ ID NO: 2448269 - RNA, 19 nt, Homo sapiens
  misc_RNA (1)...(19): siRNA sense strand
gagaguuauucaugggauc

SEQ ID NO: 2448270 - RNA, 19 nt, Homo sapiens
  misc_RNA (1)...(19): siRNA sense strand
cuacauucggacauacaaa

SEQ ID NO: 2448271 - RNA, 19 nt, Homo sapiens
  misc_RNA (1)...(19): siRNA sense strand
ccuuuauccaugugauuau

SEQ ID NO: 2448272 - RNA, 19 nt, Homo sapiens
  misc_RNA (1)...(19): siRNA sense strand
agaaagaaauuuagggcuc

SEQ ID NO: 2448273 - RNA, 19 nt, Homo sapiens
  misc_RNA (1)...(19): siRNA sense strand
agauaaggggucugagaaa

SEQ ID NO: 2448274 - RNA, 19 nt, Homo sapiens
  misc_RNA (1)...(19): siRNA sense strand
ugccaaagagggaggaaaa

SEQ ID NO: 2448275 - RNA, 19 nt, Homo sapiens
  misc_RNA (1)...(19): siRNA sense strand
uggaaagguguuuggaaga

SEQ ID NO: 2448276 - RNA, 19 nt, Homo sapiens
  misc_RNA (1)...(19): siRNA sense strand
cauucuaaccauaggcauu

SEQ ID NO: 2448277 - RNA, 19 nt, Homo sapiens
  misc_RNA (1)...(19): siRNA sense strand
gugccaaagagggaggaaa

SEQ ID NO: 2448278 - RNA, 19 nt, Homo sapiens
  misc_RNA (1)...(19): siRNA sense strand
ucgaagaauuuaaagagga

SEQ ID NO: 2448279 - RNA, 19 nt, Homo sapiens
  misc_RNA (1)...(19): siRNA sense strand
gagggagaugagauggaaa

SEQ ID NO: 2448280 - RNA, 19 nt, Homo sapiens
  misc_RNA (1)...(19): siRNA sense strand
cgaagaauuuaaagaggac

SEQ ID NO: 2448281 - RNA, 19 nt, Homo sapiens
  misc_RNA (1)...(19): siRNA sense strand
gggagggagaugagaugga

SEQ ID NO: 2448282 - RNA, 19 nt, Homo sapiens
  misc_RNA (1)...(19): siRNA sense strand
gagaugagauggaaaggug

SEQ ID NO: 2448283 - RNA, 19 nt, Homo sapiens
  misc_RNA (1)...(19): siRNA sense strand
agaauuugaacgccagcaa

SEQ ID NO: 2448284 - RNA, 19 nt, Homo sapiens
  misc_RNA (1)...(19): siRNA sense strand
auggaaagguguuuggaag

SEQ ID NO: 2448285 - RNA, 19 nt, Homo sapiens
  misc_RNA (1)...(19): siRNA sense strand
aggaauugaacgagaggaa

SEQ ID NO: 2448286 - RNA, 19 nt, Homo sapiens
  misc_RNA (1)...(19): siRNA sense strand
auucagagaucgaggagcu

SEQ ID NO: 2448287 - RNA, 19 nt, Homo sapiens
  misc_RNA (1)...(19): siRNA sense strand
gcgcagaaaucccagucca

SEQ ID NO: 2448288 - RNA, 19 nt, Homo sapiens
  misc_RNA (1)...(19): siRNA sense strand
aggucaauauucagagauc

SEQ ID NO: 2448289 - RNA, 19 nt, Homo sapiens
  misc_RNA (1)...(19): siRNA sense strand
ccagcggcuuugugugcaa

SEQ ID NO: 2448290 - RNA, 19 nt, Homo sapiens
  misc_RNA (1)...(19): siRNA sense strand
cggaacgucucucaaguuu

SEQ ID NO: 2448291 - RNA, 19 nt, Homo sapiens
  misc_RNA (1)...(19): siRNA sense strand
gucaauauucagagaucga

SEQ ID NO: 2448292 - RNA, 19 nt, Homo sapiens
  misc_RNA (1)...(19): siRNA sense strand
gugacgacauggaagggca

SEQ ID NO: 2448293 - RNA, 19 nt, Homo sapiens
  misc_RNA (1)...(19): siRNA sense strand
caucagaggagguggcgaa

SEQ ID NO: 2448294 - RNA, 19 nt, Homo sapiens
  misc_RNA (1)...(19): siRNA sense strand
cugaagagucuaaguggaa

SEQ ID NO: 2448295 - RNA, 19 nt, Homo sapiens
  misc_RNA (1)...(19): siRNA sense strand
agccaaagugauagaggaa

SEQ ID NO: 2448296 - RNA, 19 nt, Homo sapiens
  misc_RNA (1)...(19): siRNA sense strand
gcucagacugggugacaau

SEQ ID NO: 2448297 - RNA, 19 nt, Homo sapiens
  misc_RNA (1)...(19): siRNA sense strand
uuguggaggcccagaauaa

SEQ ID NO: 2448298 - RNA, 19 nt, Homo sapiens
  misc_RNA (1)...(19): siRNA sense strand
uugcagaaccagcgaguau

SEQ ID NO: 2448299 - RNA, 19 nt, Homo sapiens
  misc_RNA (1)...(19): siRNA sense strand
gauuaugggugcucggaca

SEQ ID NO: 2448300 - RNA, 19 nt, Homo sapiens
  misc_RNA (1)...(19): siRNA sense strand
gaauaagauuacugugcca

SEQ ID NO: 2448301 - RNA, 19 nt, Homo sapiens
  misc_RNA (1)...(19): siRNA sense strand
agagagaaugacugaacua

SEQ ID NO: 2448302 - RNA, 19 nt, Homo sapiens
  misc_RNA (1)...(19): siRNA sense strand
ccaacuaucgcgugaucaa

SEQ ID NO: 2448303 - RNA, 19 nt, Homo sapiens
  misc_RNA (1)...(19): siRNA sense strand
gaguaauggacaugcugaa

SEQ ID NO: 2448304 - RNA, 19 nt, Homo sapiens
  misc_RNA (1)...(19): siRNA sense strand
gacuauuaauggagguuca

SEQ ID NO: 2448305 - RNA, 19 nt, Homo sapiens
  misc_RNA (1)...(19): siRNA sense strand
gguacagcggucagaagaa

SEQ ID NO: 2448306 - RNA, 19 nt, Homo sapiens
  misc_RNA (1)...(19): siRNA sense strand
ccgacagugaacagacuaa

SEQ ID NO: 2448307 - RNA, 19 nt, Homo sapiens
  misc_RNA (1)...(19): siRNA sense strand
agguuuauacaaagagaga

SEQ ID NO: 2448308 - RNA, 19 nt, Homo sapiens
  misc_RNA (1)...(19): siRNA sense strand
caagaaaggaaaacgguau

SEQ ID NO: 2448309 - RNA, 19 nt, Homo sapiens
  misc_RNA (1)...(19): siRNA sense strand
ggaauccugaaguggguaa

SEQ ID NO: 2448310 - RNA, 19 nt, Homo sapiens
  misc_RNA (1)...(19): siRNA sense strand
cagccaaagugauagagga

SEQ ID NO: 2448311 - RNA, 19 nt, Homo sapiens
  misc_RNA (1)...(19): siRNA sense strand
gguuaugcguucagcgaag

SEQ ID NO: 2448312 - RNA, 19 nt, Homo sapiens
  misc_RNA (1)...(19): siRNA sense strand
ccgaucagucagaagauau

SEQ ID NO: 2448313 - RNA, 19 nt, Homo sapiens
  misc_RNA (1)...(19): siRNA sense strand
cggcagcauuguaggguac

SEQ ID NO: 2448314 - RNA, 19 nt, Homo sapiens
  misc_RNA (1)...(19): siRNA sense strand
aagugauggcacagagaca

SEQ ID NO: 2448315 - RNA, 19 nt, Homo sapiens
  misc_RNA (1)...(19): siRNA sense strand
cgaucagucagaagauauu

SEQ ID NO: 2448316 - RNA, 19 nt, Homo sapiens
  misc_RNA (1)...(19): siRNA sense strand
cagcaggaauccaguggca

SEQ ID NO: 2448317 - RNA, 19 nt, Homo sapiens
  misc_RNA (1)...(19): siRNA sense strand
cagcuuucuuauauggcua

SEQ ID NO: 2448318 - RNA, 19 nt, Homo sapiens
  misc_RNA (1)...(19): siRNA sense strand
cugcugaguaucugaucaa

SEQ ID NO: 2448319 - RNA, 19 nt, Homo sapiens
  misc_RNA (1)...(19): siRNA sense strand
gugaacagacuaaggccuu

SEQ ID NO: 2448320 - RNA, 19 nt, Homo sapiens
  misc_RNA (1)...(19): siRNA sense strand
ccaguggcaucgcgggaau

SEQ ID NO: 2448321 - RNA, 19 nt, Homo sapiens
  misc_RNA (1)...(19): siRNA sense strand
gcagcaggaagcaaagcaa

SEQ ID NO: 2448322 - RNA, 19 nt, Homo sapiens
  misc_RNA (1)...(19): siRNA sense strand
ccugaagagucuaagugga

SEQ ID NO: 2448323 - RNA, 19 nt, Homo sapiens
  misc_RNA (1)...(19): siRNA sense strand
aguacuuguuccugagcau

SEQ ID NO: 2448324 - RNA, 19 nt, Homo sapiens
  misc_RNA (1)...(19): siRNA sense strand
aauaugacuacgugaccaa

SEQ ID NO: 2448325 - RNA, 19 nt, Homo sapiens
  misc_RNA (1)...(19): siRNA sense strand
gcauaaaauuggauggcuc

SEQ ID NO: 2448326 - RNA, 19 nt, Homo sapiens
  misc_RNA (1)...(19): siRNA sense strand
ggggaagcccacagccaaa

SEQ ID NO: 2448327 - RNA, 19 nt, Homo sapiens
  misc_RNA (1)...(19): siRNA sense strand
gggaagggaauguucuaca

SEQ ID NO: 2448328 - RNA, 19 nt, Homo sapiens
  misc_RNA (1)...(19): siRNA sense strand
ugacaacuuugaaggggaa

SEQ ID NO: 2448329 - RNA, 19 nt, Homo sapiens
  misc_RNA (1)...(19): siRNA sense strand
ggccgcagcaggaagcaaa

SEQ ID NO: 2448330 - RNA, 19 nt, Homo sapiens
  misc_RNA (1)...(19): siRNA sense strand
cgcuaugucuuguuaucaa

SEQ ID NO: 2448331 - RNA, 19 nt, Homo sapiens
  misc_RNA (1)...(19): siRNA sense strand
ccacagccaaagugauaga

SEQ ID NO: 2448332 - RNA, 19 nt, Homo sapiens
  misc_RNA (1)...(19): siRNA sense strand
gggugaggccagaguguuc

SEQ ID NO: 2448333 - RNA, 19 nt, Homo sapiens
  misc_RNA (1)...(19): siRNA sense strand
caguaaaccgacucuggua

SEQ ID NO: 2448334 - RNA, 19 nt, Homo sapiens
  misc_RNA (1)...(19): siRNA sense strand
ggguacagcggucagaaga

SEQ ID NO: 2448335 - RNA, 19 nt, Homo sapiens
  misc_RNA (1)...(19): siRNA sense strand
ugaaguuaccagaagcaga

SEQ ID NO: 2448336 - RNA, 19 nt, Homo sapiens
  misc_RNA (1)...(19): siRNA sense strand
ugauagaggaagucucaga

SEQ ID NO: 2448337 - RNA, 19 nt, Homo sapiens
  misc_RNA (1)...(19): siRNA sense strand
auacaaagagagaaugacu

SEQ ID NO: 2448338 - RNA, 19 nt, Homo sapiens
  misc_RNA (1)...(19): siRNA sense strand
caacauugacuucagggau

SEQ ID NO: 2448339 - RNA, 19 nt, Homo sapiens
  misc_RNA (1)...(19): siRNA sense strand
aaguuggaguaauggacau

SEQ ID NO: 2448340 - RNA, 19 nt, Homo sapiens
  misc_RNA (1)...(19): siRNA sense strand
ggaaaauggggaugacaaa

SEQ ID NO: 2448341 - RNA, 19 nt, Homo sapiens
  misc_RNA (1)...(19): siRNA sense strand
acucagaagacuuaguaaa

SEQ ID NO: 2448342 - RNA, 19 nt, Homo sapiens
  misc_RNA (1)...(19): siRNA sense strand
ggaaagaguuagcugcaca

SEQ ID NO: 2448343 - RNA, 19 nt, Homo sapiens
  misc_RNA (1)...(19): siRNA sense strand
ugaagcaaguggagagcau

SEQ ID NO: 2448344 - RNA, 19 nt, Homo sapiens
  misc_RNA (1)...(19): siRNA sense strand
uggaaagaggugauguuaa

SEQ ID NO: 2448345 - RNA, 19 nt, Homo sapiens
  misc_RNA (1)...(19): siRNA sense strand
cgaugaaacaagaagacuu

SEQ ID NO: 2448346 - RNA, 19 nt, Homo sapiens
  misc_RNA (1)...(19): siRNA sense strand
agggauugacagagccaaa

SEQ ID NO: 2448347 - RNA, 19 nt, Homo sapiens
  misc_RNA (1)...(19): siRNA sense strand
aaagaugacuggagggauc

SEQ ID NO: 2448348 - RNA, 19 nt, Homo sapiens
  misc_RNA (1)...(19): siRNA sense strand
cggaaaauggggaugacaa

SEQ ID NO: 2448349 - RNA, 19 nt, Homo sapiens
  misc_RNA (1)...(19): siRNA sense strand
ccugaaaggaauacuaaga

SEQ ID NO: 2448350 - RNA, 19 nt, Homo sapiens
  misc_RNA (1)...(19): siRNA sense strand
gggagauaaagaagcugaa

SEQ ID NO: 2448351 - RNA, 19 nt, Homo sapiens
  misc_RNA (1)...(19): siRNA sense strand
cugacagacucaacagaga

SEQ ID NO: 2448352 - RNA, 19 nt, Homo sapiens
  misc_RNA (1)...(19): siRNA sense strand
gguuacagcaaguacaaaa

SEQ ID NO: 2448353 - RNA, 19 nt, Homo sapiens
  misc_RNA (1)...(19): siRNA sense strand
cuacagacaugucagguca

SEQ ID NO: 2448354 - RNA, 19 nt, Homo sapiens
  misc_RNA (1)...(19): siRNA sense strand
ucgucgacuuaaagaagaa

SEQ ID NO: 2448355 - RNA, 19 nt, Homo sapiens
  misc_RNA (1)...(19): siRNA sense strand
gcuggaaagaggugauguu

SEQ ID NO: 2448356 - RNA, 19 nt, Homo sapiens
  misc_RNA (1)...(19): siRNA sense strand
acuuaugcaagaagaagaa

SEQ ID NO: 2448357 - RNA, 19 nt, Homo sapiens
  misc_RNA (1)...(19): siRNA sense strand
gucuagugccacagagauu

SEQ ID NO: 2448358 - RNA, 19 nt, Homo sapiens
  misc_RNA (1)...(19): siRNA sense strand
auacuaagaugcuugguga

SEQ ID NO: 2448359 - RNA, 19 nt, Homo sapiens
  misc_RNA (1)...(19): siRNA sense strand
aagcuuuagaaguugguua

SEQ ID NO: 2448360 - RNA, 19 nt, Homo sapiens
  misc_RNA (1)...(19): siRNA sense strand
ugcaagaagaagaaaugaa

SEQ ID NO: 2448361 - RNA, 19 nt, Homo sapiens
  misc_RNA (1)...(19): siRNA sense strand
guggaaagaauguaccgaa

SEQ ID NO: 2448362 - RNA, 19 nt, Homo sapiens
  misc_RNA (1)...(19): siRNA sense strand
cugcauuaucgguggacca

SEQ ID NO: 2448363 - RNA, 19 nt, Homo sapiens
  misc_RNA (1)...(19): siRNA sense strand
gauaaauggucuuucgaug

SEQ ID NO: 2448364 - RNA, 19 nt, Homo sapiens
  misc_RNA (1)...(19): siRNA sense strand
cucagaagacuuaguaaau

SEQ ID NO: 2448365 - RNA, 19 nt, Homo sapiens
  misc_RNA (1)...(19): siRNA sense strand
agacuuaguaaaugcugaa

SEQ ID NO: 2448366 - RNA, 19 nt, Homo sapiens
  misc_RNA (1)...(19): siRNA sense strand
acaggagaacagacugaaa

SEQ ID NO: 2448367 - RNA, 19 nt, Homo sapiens
  misc_RNA (1)...(19): siRNA sense strand
gggucuagugccacagaga

SEQ ID NO: 2448368 - RNA, 19 nt, Homo sapiens
  misc_RNA (1)...(19): siRNA sense strand
acaucauucagcagaacaa

SEQ ID NO: 2448369 - RNA, 19 nt, Homo sapiens
  misc_RNA (1)...(19): siRNA sense strand
uggacaucauucagcagaa

SEQ ID NO: 2448370 - RNA, 19 nt, Homo sapiens
  misc_RNA (1)...(19): siRNA sense strand
acuaagacgaucaaauaca

SEQ ID NO: 2448371 - RNA, 19 nt, Homo sapiens
  misc_RNA (1)...(19): siRNA sense strand
aaacaugaugagacacauu

SEQ ID NO: 2448372 - RNA, 19 nt, Homo sapiens
  misc_RNA (1)...(19): siRNA sense strand
agaugagcucagugacauu

SEQ ID NO: 2448373 - RNA, 19 nt, Homo sapiens
  misc_RNA (1)...(19): siRNA sense strand
ugacagacucaacagagaa

SEQ ID NO: 2448374 - RNA, 19 nt, Homo sapiens
  misc_RNA (1)...(19): siRNA sense strand
cagaacaaagagaggugga

SEQ ID NO: 2448375 - RNA, 19 nt, Homo sapiens
  misc_RNA (1)...(19): siRNA sense strand
gcgccugaaaggaauacua

SEQ ID NO: 2448376 - RNA, 19 nt, Homo sapiens
  misc_RNA (1)...(19): siRNA sense strand
cauacagggacaacaaaca

SEQ ID NO: 2448377 - RNA, 19 nt, Homo sapiens
  misc_RNA (1)...(19): siRNA sense strand
auaagaacucagaagacuu

SEQ ID NO: 2448378 - RNA, 19 nt, Homo sapiens
  misc_RNA (1)...(19): siRNA sense strand
uggcagaguugaaggcugu

SEQ ID NO: 2448379 - RNA, 19 nt, Homo sapiens
  misc_RNA (1)...(19): siRNA sense strand
ggguauuagggcauuuaaa

SEQ ID NO: 2448380 - RNA, 19 nt, Homo sapiens
  misc_RNA (1)...(19): siRNA sense strand
ccuaguagaagaaagccaa

SEQ ID NO: 2448381 - RNA, 19 nt, Homo sapiens
  misc_RNA (1)...(19): siRNA sense strand
ggauaauacaauaccucuu

SEQ ID NO: 2448382 - RNA, 19 nt, Homo sapiens
  misc_RNA (1)...(19): siRNA sense strand
accuaagaaaggaggaaca

SEQ ID NO: 2448383 - RNA, 19 nt, Homo sapiens
  misc_RNA (1)...(19): siRNA sense strand
ccaccuaagaaaggaggaa

SEQ ID NO: 2448384 - RNA, 19 nt, Homo sapiens
  misc_RNA (1)...(19): siRNA sense strand
uuucaaugcccuagaugau

SEQ ID NO: 2448385 - RNA, 19 nt, Homo sapiens
  misc_RNA (1)...(19): siRNA sense strand
agaagaaagccaauggaug

SEQ ID NO: 2448386 - RNA, 19 nt, Homo sapiens
  misc_RNA (1)...(19): siRNA sense strand
uguuagagaacuacaguaa

SEQ ID NO: 2448387 - RNA, 19 nt, Homo sapiens
  misc_RNA (1)...(19): siRNA sense strand
augugauguuagagaacua

SEQ ID NO: 2448388 - RNA, 19 nt, Homo sapiens
  misc_RNA (1)...(19): siRNA sense strand
cggaauuuauauaggaaug

SEQ ID NO: 2448389 - RNA, 19 nt, Homo sapiens
  misc_RNA (1)...(19): siRNA sense strand
aggaaugugauguuagaga

SEQ ID NO: 2448390 - RNA, 19 nt, Homo sapiens
  misc_RNA (1)...(19): siRNA sense strand
gcggaauuuauauaggaau

SEQ ID NO: 2448391 - RNA, 19 nt, Homo sapiens
  misc_RNA (1)...(19): siRNA sense strand
ccacaggaaagaaggggaa

SEQ ID NO: 2448392 - RNA, 19 nt, Homo sapiens
  misc_RNA (1)...(19): siRNA sense strand
cuucaaagaaaaugcagaa

SEQ ID NO: 2448393 - RNA, 19 nt, Homo sapiens
  misc_RNA (1)...(19): siRNA sense strand
uguuguugauggagaaaau

SEQ ID NO: 2448394 - RNA, 19 nt, Homo sapiens
  misc_RNA (1)...(19): siRNA sense strand
uggcguuucagguggagaa

SEQ ID NO: 2448395 - RNA, 19 nt, Homo sapiens
  misc_RNA (1)...(19): siRNA sense strand
ccggaaaggaggagaccca

SEQ ID NO: 2448396 - RNA, 19 nt, Homo sapiens
  misc_RNA (1)...(19): siRNA sense strand
gggagaagaugaagccgga

SEQ ID NO: 2448397 - RNA, 19 nt, Homo sapiens
  misc_RNA (1)...(19): siRNA sense strand
agagagaagcagagaccca

SEQ ID NO: 2448398 - RNA, 19 nt, Homo sapiens
  misc_RNA (1)...(19): siRNA sense strand
cgucagagguggaaguggu

SEQ ID NO: 2448399 - RNA, 19 nt, Homo sapiens
  misc_RNA (1)...(19): siRNA sense strand
gagcacauguucagcccau

SEQ ID NO: 2448400 - RNA, 19 nt, Homo sapiens
  misc_RNA (1)...(19): siRNA sense strand
uggagaggcugguggacgu

SEQ ID NO: 2448401 - RNA, 19 nt, Homo sapiens
  misc_RNA (1)...(19): siRNA sense strand
ggagagagaagcagagacc

SEQ ID NO: 2448402 - RNA, 19 nt, Homo sapiens
  misc_RNA (1)...(19): siRNA sense strand
ucacaaaagaagagaguau

SEQ ID NO: 2448403 - RNA, 19 nt, Homo sapiens
  misc_RNA (1)...(19): siRNA sense strand
gagacauuaaagugggaua

SEQ ID NO: 2448404 - RNA, 19 nt, Homo sapiens
  misc_RNA (1)...(19): siRNA sense strand
accauaugcuggagagaca

SEQ ID NO: 2448405 - RNA, 19 nt, Homo sapiens
  misc_RNA (1)...(19): siRNA sense strand
auggagagaacauggaaau

SEQ ID NO: 2448406 - RNA, 19 nt, Homo sapiens
  misc_RNA (1)...(19): siRNA sense strand
augcagaaggcuuuacaaa

SEQ ID NO: 2448407 - RNA, 19 nt, Homo sapiens
  misc_RNA (1)...(19): siRNA sense strand
cauuaaagugggauaucau

SEQ ID NO: 2448408 - RNA, 19 nt, Homo sapiens
  misc_RNA (1)...(19): siRNA sense strand
ggauguaaaugaagacccu

SEQ ID NO: 2448409 - RNA, 19 nt, Homo sapiens
  misc_RNA (1)...(19): siRNA sense strand
auggaaaugaaauggccaa

SEQ ID NO: 2448410 - RNA, 19 nt, Homo sapiens
  misc_RNA (1)...(19): siRNA sense strand
agacauuaaagugggauau

SEQ ID NO: 2448411 - RNA, 19 nt, Homo sapiens
  misc_RNA (1)...(19): siRNA sense strand
aguacgugauucaagggua

SEQ ID NO: 2448412 - RNA, 19 nt, Homo sapiens
  misc_RNA (1)...(19): siRNA sense strand
gaaauggccaaaagagcaa

SEQ ID NO: 2448413 - RNA, 19 nt, Homo sapiens
  misc_RNA (1)...(19): siRNA sense strand
uguuugaauaccagacauu

SEQ ID NO: 2448414 - RNA, 19 nt, Homo sapiens
  misc_RNA (1)...(19): siRNA sense strand
gcgugguccggaauggaaa

SEQ ID NO: 2448415 - RNA, 19 nt, Homo sapiens
  misc_RNA (1)...(19): siRNA sense strand
cgauuuuaucuuuggagaa

SEQ ID NO: 2448416 - RNA, 19 nt, Homo sapiens
  misc_RNA (1)...(19): siRNA sense strand
uggaaaugaaauggccaaa

SEQ ID NO: 2448417 - RNA, 19 nt, Homo sapiens
  misc_RNA (1)...(19): siRNA sense strand
ucacaaaagaagagaguau

SEQ ID NO: 2448418 - RNA, 19 nt, Homo sapiens
  misc_RNA (1)...(19): siRNA sense strand
gagacauuaaagugggaua

SEQ ID NO: 2448419 - RNA, 19 nt, Homo sapiens
  misc_RNA (1)...(19): siRNA sense strand
accauaugcuggagagaca

SEQ ID NO: 2448420 - RNA, 19 nt, Homo sapiens
  misc_RNA (1)...(19): siRNA sense strand
auggagagaacauggaaau

SEQ ID NO: 2448421 - RNA, 19 nt, Homo sapiens
  misc_RNA (1)...(19): siRNA sense strand
augcagaaggcuuuacaaa

SEQ ID NO: 2448422 - RNA, 19 nt, Homo sapiens
  misc_RNA (1)...(19): siRNA sense strand
cauuaaagugggauaucau

SEQ ID NO: 2448423 - RNA, 19 nt, Homo sapiens
  misc_RNA (1)...(19): siRNA sense strand
ggauguaaaugaagacccu

SEQ ID NO: 2448424 - RNA, 19 nt, Homo sapiens
  misc_RNA (1)...(19): siRNA sense strand
auggaaaugaaauggccaa

SEQ ID NO: 2448425 - RNA, 19 nt, Homo sapiens
  misc_RNA (1)...(19): siRNA sense strand
agacauuaaagugggauau

SEQ ID NO: 2448426 - RNA, 19 nt, Homo sapiens
  misc_RNA (1)...(19): siRNA sense strand
aguacgugauucaagggua

SEQ ID NO: 2448427 - RNA, 19 nt, Homo sapiens
  misc_RNA (1)...(19): siRNA sense strand
gaaauggccaaaagagcaa

SEQ ID NO: 2448428 - RNA, 19 nt, Homo sapiens
  misc_RNA (1)...(19): siRNA sense strand
uguuugaauaccagacauu

SEQ ID NO: 2448429 - RNA, 19 nt, Homo sapiens
  misc_RNA (1)...(19): siRNA sense strand
gcgugguccggaauggaaa

SEQ ID NO: 2448430 - RNA, 19 nt, Homo sapiens
  misc_RNA (1)...(19): siRNA sense strand
cgauuuuaucuuuggagaa

SEQ ID NO: 2448431 - RNA, 19 nt, Homo sapiens
  misc_RNA (1)...(19): siRNA sense strand
uggaaaugaaauggccaaa

SEQ ID NO: 2448432 - RNA, 19 nt, Homo sapiens
  misc_RNA (1)...(19): siRNA sense strand
ucacaaaagaagagaguau

SEQ ID NO: 2448433 - RNA, 19 nt, Homo sapiens
  misc_RNA (1)...(19): siRNA sense strand
gagacauuaaagugggaua

SEQ ID NO: 2448434 - RNA, 19 nt, Homo sapiens
  misc_RNA (1)...(19): siRNA sense strand
accauaugcuggagagaca

SEQ ID NO: 2448435 - RNA, 19 nt, Homo sapiens
  misc_RNA (1)...(19): siRNA sense strand
auggagagaacauggaaau

SEQ ID NO: 2448436 - RNA, 19 nt, Homo sapiens
  misc_RNA (1)...(19): siRNA sense strand
augcagaaggcuuuacaaa

SEQ ID NO: 2448437 - RNA, 19 nt, Homo sapiens
  misc_RNA (1)...(19): siRNA sense strand
cauuaaagugggauaucau

SEQ ID NO: 2448438 - RNA, 19 nt, Homo sapiens
  misc_RNA (1)...(19): siRNA sense strand
ggauguaaaugaagacccu

SEQ ID NO: 2448439 - RNA, 19 nt, Homo sapiens
  misc_RNA (1)...(19): siRNA sense strand
auggaaaugaaauggccaa

SEQ ID NO: 2448440 - RNA, 19 nt, Homo sapiens
  misc_RNA (1)...(19): siRNA sense strand
agacauuaaagugggauau

SEQ ID NO: 2448441 - RNA, 19 nt, Homo sapiens
  misc_RNA (1)...(19): siRNA sense strand
aguacgugauucaagggua

SEQ ID NO: 2448442 - RNA, 19 nt, Homo sapiens
  misc_RNA (1)...(19): siRNA sense strand
gaaauggccaaaagagcaa

SEQ ID NO: 2448443 - RNA, 19 nt, Homo sapiens
  misc_RNA (1)...(19): siRNA sense strand
uguuugaauaccagacauu

SEQ ID NO: 2448444 - RNA, 19 nt, Homo sapiens
  misc_RNA (1)...(19): siRNA sense strand
gcgugguccggaauggaaa

SEQ ID NO: 2448445 - RNA, 19 nt, Homo sapiens
  misc_RNA (1)...(19): siRNA sense strand
cgauuuuaucuuuggagaa

SEQ ID NO: 2448446 - RNA, 19 nt, Homo sapiens
  misc_RNA (1)...(19): siRNA sense strand
uggaaaugaaauggccaaa

SEQ ID NO: 2448447 - RNA, 19 nt, Homo sapiens
  misc_RNA (1)...(19): siRNA sense strand
ucacaaaagaagagaguau

SEQ ID NO: 2448448 - RNA, 19 nt, Homo sapiens
  misc_RNA (1)...(19): siRNA sense strand
gagacauuaaagugggaua

SEQ ID NO: 2448449 - RNA, 19 nt, Homo sapiens
  misc_RNA (1)...(19): siRNA sense strand
accauaugcuggagagaca

SEQ ID NO: 2448450 - RNA, 19 nt, Homo sapiens
  misc_RNA (1)...(19): siRNA sense strand
auggagagaacauggaaau

SEQ ID NO: 2448451 - RNA, 19 nt, Homo sapiens
  misc_RNA (1)...(19): siRNA sense strand
augcagaaggcuuuacaaa

SEQ ID NO: 2448452 - RNA, 19 nt, Homo sapiens
  misc_RNA (1)...(19): siRNA sense strand
cauuaaagugggauaucau

SEQ ID NO: 2448453 - RNA, 19 nt, Homo sapiens
  misc_RNA (1)...(19): siRNA sense strand
ggauguaaaugaagacccu

SEQ ID NO: 2448454 - RNA, 19 nt, Homo sapiens
  misc_RNA (1)...(19): siRNA sense strand
auggaaaugaaauggccaa

SEQ ID NO: 2448455 - RNA, 19 nt, Homo sapiens
  misc_RNA (1)...(19): siRNA sense strand
agacauuaaagugggauau

SEQ ID NO: 2448456 - RNA, 19 nt, Homo sapiens
  misc_RNA (1)...(19): siRNA sense strand
aguacgugauucaagggua

SEQ ID NO: 2448457 - RNA, 19 nt, Homo sapiens
  misc_RNA (1)...(19): siRNA sense strand
gaaauggccaaaagagcaa

SEQ ID NO: 2448458 - RNA, 19 nt, Homo sapiens
  misc_RNA (1)...(19): siRNA sense strand
uguuugaauaccagacauu

SEQ ID NO: 2448459 - RNA, 19 nt, Homo sapiens
  misc_RNA (1)...(19): siRNA sense strand
gcgugguccggaauggaaa

SEQ ID NO: 2448460 - RNA, 19 nt, Homo sapiens
  misc_RNA (1)...(19): siRNA sense strand
cgauuuuaucuuuggagaa

SEQ ID NO: 2448461 - RNA, 19 nt, Homo sapiens
  misc_RNA (1)...(19): siRNA sense strand
uggaaaugaaauggccaaa

SEQ ID NO: 2448462 - RNA, 19 nt, Homo sapiens
  misc_RNA (1)...(19): siRNA sense strand
ucacaaaagaagagaguau

SEQ ID NO: 2448463 - RNA, 19 nt, Homo sapiens
  misc_RNA (1)...(19): siRNA sense strand
gagacauuaaagugggaua

SEQ ID NO: 2448464 - RNA, 19 nt, Homo sapiens
  misc_RNA (1)...(19): siRNA sense strand
accauaugcuggagagaca

SEQ ID NO: 2448465 - RNA, 19 nt, Homo sapiens
  misc_RNA (1)...(19): siRNA sense strand
auggagagaacauggaaau

SEQ ID NO: 2448466 - RNA, 19 nt, Homo sapiens
  misc_RNA (1)...(19): siRNA sense strand
augcagaaggcuuuacaaa

SEQ ID NO: 2448467 - RNA, 19 nt, Homo sapiens
  misc_RNA (1)...(19): siRNA sense strand
cauuaaagugggauaucau

SEQ ID NO: 2448468 - RNA, 19 nt, Homo sapiens
  misc_RNA (1)...(19): siRNA sense strand
ggauguaaaugaagacccu

SEQ ID NO: 2448469 - RNA, 19 nt, Homo sapiens
  misc_RNA (1)...(19): siRNA sense strand
auggaaaugaaauggccaa

SEQ ID NO: 2448470 - RNA, 19 nt, Homo sapiens
  misc_RNA (1)...(19): siRNA sense strand
agacauuaaagugggauau

SEQ ID NO: 2448471 - RNA, 19 nt, Homo sapiens
  misc_RNA (1)...(19): siRNA sense strand
aguacgugauucaagggua

SEQ ID NO: 2448472 - RNA, 19 nt, Homo sapiens
  misc_RNA (1)...(19): siRNA sense strand
gaaauggccaaaagagcaa

SEQ ID NO: 2448473 - RNA, 19 nt, Homo sapiens
  misc_RNA (1)...(19): siRNA sense strand
uguuugaauaccagacauu

SEQ ID NO: 2448474 - RNA, 19 nt, Homo sapiens
  misc_RNA (1)...(19): siRNA sense strand
gcgugguccggaauggaaa

SEQ ID NO: 2448475 - RNA, 19 nt, Homo sapiens
  misc_RNA (1)...(19): siRNA sense strand
cgauuuuaucuuuggagaa

SEQ ID NO: 2448476 - RNA, 19 nt, Homo sapiens
  misc_RNA (1)...(19): siRNA sense strand
uggaaaugaaauggccaaa

SEQ ID NO: 2448477 - RNA, 19 nt, Homo sapiens
  misc_RNA (1)...(19): siRNA sense strand
aggaaauacauguggaaga

SEQ ID NO: 2448478 - RNA, 19 nt, Homo sapiens
  misc_RNA (1)...(19): siRNA sense strand
cgaaauaagaagaaggaag

SEQ ID NO: 2448479 - RNA, 19 nt, Homo sapiens
  misc_RNA (1)...(19): siRNA sense strand
aggaagagaagaaaggcaa

SEQ ID NO: 2448480 - RNA, 19 nt, Homo sapiens
  misc_RNA (1)...(19): siRNA sense strand
cuaaagagccucauggaga

SEQ ID NO: 2448481 - RNA, 19 nt, Homo sapiens
  misc_RNA (1)...(19): siRNA sense strand
uuuaacagccagagggcaa

SEQ ID NO: 2448482 - RNA, 19 nt, Homo sapiens
  misc_RNA (1)...(19): siRNA sense strand
ggaaagagauucaggaagg

SEQ ID NO: 2448483 - RNA, 19 nt, Homo sapiens
  misc_RNA (1)...(19): siRNA sense strand
ucuauggaguggagcaaaa

SEQ ID NO: 2448484 - RNA, 19 nt, Homo sapiens
  misc_RNA (1)...(19): siRNA sense strand
cuuacgaacgcaagcuaaa

SEQ ID NO: 2448485 - RNA, 19 nt, Homo sapiens
  misc_RNA (1)...(19): siRNA sense strand
gaguggagcaaaaggggaa

SEQ ID NO: 2448486 - RNA, 19 nt, Homo sapiens
  misc_RNA (1)...(19): siRNA sense strand
agaggaaauacauguggaa

SEQ ID NO: 2448487 - RNA, 19 nt, Homo sapiens
  misc_RNA (1)...(19): siRNA sense strand
gguuauccaaggagaacau

SEQ ID NO: 2448488 - RNA, 19 nt, Homo sapiens
  misc_RNA (1)...(19): siRNA sense strand
aggccuuaggaaagagauu

SEQ ID NO: 2448489 - RNA, 19 nt, Homo sapiens
  misc_RNA (1)...(19): siRNA sense strand
cccagcaggccuuaggaaa

SEQ ID NO: 2448490 - RNA, 19 nt, Homo sapiens
  misc_RNA (1)...(19): siRNA sense strand
ccauguuacaggaggguac

SEQ ID NO: 2448491 - RNA, 19 nt, Homo sapiens
  misc_RNA (1)...(19): siRNA sense strand
ccgagaagcaaaagcccaa

SEQ ID NO: 2448492 - RNA, 19 nt, Homo sapiens
  misc_RNA (1)...(19): siRNA sense strand
aauaagaagaaggaagaga

SEQ ID NO: 2448493 - RNA, 19 nt, Homo sapiens
  misc_RNA (1)...(19): siRNA sense strand
ugagguuauccaaggagaa

SEQ ID NO: 2448494 - RNA, 19 nt, Homo sapiens
  misc_RNA (1)...(19): siRNA sense strand
ccucuauggaguggagcaa

SEQ ID NO: 2448495 - RNA, 19 nt, Homo sapiens
  misc_RNA (1)...(19): siRNA sense strand
ccacauggucgaagaggac

SEQ ID NO: 2448496 - RNA, 19 nt, Homo sapiens
  misc_RNA (1)...(19): siRNA sense strand
cccacaaagaggaaauaca

SEQ ID NO: 2448497 - RNA, 19 nt, Homo sapiens
  misc_RNA (1)...(19): siRNA sense strand
agaaaagcaccgaaccuaa

SEQ ID NO: 2448498 - RNA, 19 nt, Homo sapiens
  misc_RNA (1)...(19): siRNA sense strand
acacaagaggaaagaggaa

SEQ ID NO: 2448499 - RNA, 19 nt, Homo sapiens
  misc_RNA (1)...(19): siRNA sense strand
gcaaggagcugaaaggagu

SEQ ID NO: 2448500 - RNA, 19 nt, Homo sapiens
  misc_RNA (1)...(19): siRNA sense strand
gcuuggaugaacagggaga

SEQ ID NO: 2448501 - RNA, 19 nt, Homo sapiens
  misc_RNA (1)...(19): siRNA sense strand
gugcggugguagaggcuca

SEQ ID NO: 2448502 - RNA, 19 nt, Homo sapiens
  misc_RNA (1)...(19): siRNA sense strand
guacagacagagaacguga

SEQ ID NO: 2448503 - RNA, 19 nt, Homo sapiens
  misc_RNA (1)...(19): siRNA sense strand
caggaaguacagacagaga

SEQ ID NO: 2448504 - RNA, 19 nt, Homo sapiens
  misc_RNA (1)...(19): siRNA sense strand
cagagaauccuguggugga

SEQ ID NO: 2448505 - RNA, 19 nt, Homo sapiens
  misc_RNA (1)...(19): siRNA sense strand
cugaaaggagugagcagca

SEQ ID NO: 2448506 - RNA, 19 nt, Homo sapiens
  misc_RNA (1)...(19): siRNA sense strand
ggaaugagucuuugccgga

SEQ ID NO: 2448507 - RNA, 19 nt, Homo sapiens
  misc_RNA (1)...(19): siRNA sense strand
ccucaauggcagcgacgga

SEQ ID NO: 2448508 - RNA, 19 nt, Homo sapiens
  misc_RNA (1)...(19): siRNA sense strand
aggaaguacagacagagaa

SEQ ID NO: 2448509 - RNA, 19 nt, Homo sapiens
  misc_RNA (1)...(19): siRNA sense strand
gguccauaguugucaucca

SEQ ID NO: 2448510 - RNA, 19 nt, Homo sapiens
  misc_RNA (1)...(19): siRNA sense strand
uggaagaagaagaggagga

SEQ ID NO: 2448511 - RNA, 19 nt, Homo sapiens
  misc_RNA (1)...(19): siRNA sense strand
aagaagaagaggaggagga

SEQ ID NO: 2448512 - RNA, 19 nt, Homo sapiens
  misc_RNA (1)...(19): siRNA sense strand
aagaagaggaggaggagga

SEQ ID NO: 2448513 - RNA, 19 nt, Homo sapiens
  misc_RNA (1)...(19): siRNA sense strand
cagugaagccaaagcguga

SEQ ID NO: 2448514 - RNA, 19 nt, Homo sapiens
  misc_RNA (1)...(19): siRNA sense strand
gggaagugaacugggagaa

SEQ ID NO: 2448515 - RNA, 19 nt, Homo sapiens
  misc_RNA (1)...(19): siRNA sense strand
aggaggaagaugaugauga

SEQ ID NO: 2448516 - RNA, 19 nt, Homo sapiens
  misc_RNA (1)...(19): siRNA sense strand
aggaggaggaagaugauga

SEQ ID NO: 2448517 - RNA, 19 nt, Homo sapiens
  misc_RNA (1)...(19): siRNA sense strand
caguggaucuucaugggaa

SEQ ID NO: 2448518 - RNA, 19 nt, Homo sapiens
  misc_RNA (1)...(19): siRNA sense strand
ccgaaagcuuccagagggu

SEQ ID NO: 2448519 - RNA, 19 nt, Homo sapiens
  misc_RNA (1)...(19): siRNA sense strand
ggagauaucaggaagcgga

SEQ ID NO: 2448520 - RNA, 19 nt, Homo sapiens
  misc_RNA (1)...(19): siRNA sense strand
gcucauuuauucagggcgu

SEQ ID NO: 2448521 - RNA, 19 nt, Homo sapiens
  misc_RNA (1)...(19): siRNA sense strand
agggaagugaacugggaga

SEQ ID NO: 2448522 - RNA, 19 nt, Homo sapiens
  misc_RNA (1)...(19): siRNA sense strand
gaaagcuuccagaggguga

SEQ ID NO: 2448523 - RNA, 19 nt, Homo sapiens
  misc_RNA (1)...(19): siRNA sense strand
aguggaucuucaugggaau

SEQ ID NO: 2448524 - RNA, 19 nt, Homo sapiens
  misc_RNA (1)...(19): siRNA sense strand
ugcaaauucagguggaaga

SEQ ID NO: 2448525 - RNA, 19 nt, Homo sapiens
  misc_RNA (1)...(19): siRNA sense strand
gagauaucaggaagcggaa

SEQ ID NO: 2448526 - RNA, 19 nt, Homo sapiens
  misc_RNA (1)...(19): siRNA sense strand
ggcucauaaagcaguguua

SEQ ID NO: 2448527 - RNA, 19 nt, Homo sapiens
  misc_RNA (1)...(19): siRNA sense strand
aggaacccuucgagccuaa

SEQ ID NO: 2448528 - RNA, 19 nt, Homo sapiens
  misc_RNA (1)...(19): siRNA sense strand
cuucaaauguggcagguag

SEQ ID NO: 2448529 - RNA, 19 nt, Homo sapiens
  misc_RNA (1)...(19): siRNA sense strand
gugcaaugaguguggcaaa

SEQ ID NO: 2448530 - RNA, 19 nt, Homo sapiens
  misc_RNA (1)...(19): siRNA sense strand
cugagaaagagaaggguga

SEQ ID NO: 2448531 - RNA, 19 nt, Homo sapiens
  misc_RNA (1)...(19): siRNA sense strand
gugcaaggaguguggaaaa

SEQ ID NO: 2448532 - RNA, 19 nt, Homo sapiens
  misc_RNA (1)...(19): siRNA sense strand
gugucaugagugugggaaa

SEQ ID NO: 2448533 - RNA, 19 nt, Homo sapiens
  misc_RNA (1)...(19): siRNA sense strand
guguagugaauguggagaa

SEQ ID NO: 2448534 - RNA, 19 nt, Homo sapiens
  misc_RNA (1)...(19): siRNA sense strand
aguuacaaagccugagaaa

SEQ ID NO: 2448535 - RNA, 19 nt, Homo sapiens
  misc_RNA (1)...(19): siRNA sense strand
aguagagucaucugggaaa

SEQ ID NO: 2448536 - RNA, 19 nt, Homo sapiens
  misc_RNA (1)...(19): siRNA sense strand
aggccaagcccaaagagaa

SEQ ID NO: 2448537 - RNA, 19 nt, Homo sapiens
  misc_RNA (1)...(19): siRNA sense strand
gaguagagucaucugggaa

SEQ ID NO: 2448538 - RNA, 19 nt, Homo sapiens
  misc_RNA (1)...(19): siRNA sense strand
uggaaagucaucaggccaa

SEQ ID NO: 2448539 - RNA, 19 nt, Homo sapiens
  misc_RNA (1)...(19): siRNA sense strand
ccucagaccuuauucgaca

SEQ ID NO: 2448540 - RNA, 19 nt, Homo sapiens
  misc_RNA (1)...(19): siRNA sense strand
guguaacauaugccagaaa

SEQ ID NO: 2448541 - RNA, 19 nt, Homo sapiens
  misc_RNA (1)...(19): siRNA sense strand
gcgaguacacacacgggaa

SEQ ID NO: 2448542 - RNA, 19 nt, Homo sapiens
  misc_RNA (1)...(19): siRNA sense strand
cccuaucaguguagugaau

SEQ ID NO: 2448543 - RNA, 19 nt, Homo sapiens
  misc_RNA (1)...(19): siRNA sense strand
cagaacgugagcagagauu

SEQ ID NO: 2448544 - RNA, 19 nt, Homo sapiens
  misc_RNA (1)...(19): siRNA sense strand
ccacagaauucauacugga

SEQ ID NO: 2448545 - RNA, 19 nt, Homo sapiens
  misc_RNA (1)...(19): siRNA sense strand
gggugaggagacaaggauu

SEQ ID NO: 2448546 - RNA, 19 nt, Homo sapiens
  misc_RNA (1)...(19): siRNA sense strand
ccuuaaucgacaucagaga

SEQ ID NO: 2448547 - RNA, 19 nt, Homo sapiens
  misc_RNA (1)...(19): siRNA sense strand
agauaucaccacaaagaca

SEQ ID NO: 2448548 - RNA, 19 nt, Homo sapiens
  misc_RNA (1)...(19): siRNA sense strand
uuguggaagaguagaguca

SEQ ID NO: 2448549 - RNA, 19 nt, Homo sapiens
  misc_RNA (1)...(19): siRNA sense strand
auugagaaugggaagcuua

SEQ ID NO: 2448550 - RNA, 19 nt, Homo sapiens
  misc_RNA (1)...(19): siRNA sense strand
caucagagauaucaccaca

SEQ ID NO: 2448551 - RNA, 19 nt, Homo sapiens
  misc_RNA (1)...(19): siRNA sense strand
ccucgucagacaucagaaa

SEQ ID NO: 2448552 - RNA, 19 nt, Homo sapiens
  misc_RNA (1)...(19): siRNA sense strand
gagugcaaggaguguggaa

SEQ ID NO: 2448553 - RNA, 19 nt, Homo sapiens
  misc_RNA (1)...(19): siRNA sense strand
cuaucaguguagugaaugu

SEQ ID NO: 2448554 - RNA, 19 nt, Homo sapiens
  misc_RNA (1)...(19): siRNA sense strand
ggagcaaaaccaaggauca

SEQ ID NO: 2448555 - RNA, 19 nt, Homo sapiens
  misc_RNA (1)...(19): siRNA sense strand
gaguguugucauaggguuu

SEQ ID NO: 2448556 - RNA, 19 nt, Homo sapiens
  misc_RNA (1)...(19): siRNA sense strand
ggaagaagugccugccaga

SEQ ID NO: 2448557 - RNA, 19 nt, Homo sapiens
  misc_RNA (1)...(19): siRNA sense strand
cuugacuuguggaggcaaa

SEQ ID NO: 2448558 - RNA, 19 nt, Homo sapiens
  misc_RNA (1)...(19): siRNA sense strand
gugcaaaaucuguuacaau

SEQ ID NO: 2448559 - RNA, 19 nt, Homo sapiens
  misc_RNA (1)...(19): siRNA sense strand
ugucauaggguuugugcca

SEQ ID NO: 2448560 - RNA, 19 nt, Homo sapiens
  misc_RNA (1)...(19): siRNA sense strand
auggaggugcagagagaga

SEQ ID NO: 2448561 - RNA, 19 nt, Homo sapiens
  misc_RNA (1)...(19): siRNA sense strand
cccaggagucuguggcaaa

SEQ ID NO: 2448562 - RNA, 19 nt, Homo sapiens
  misc_RNA (1)...(19): siRNA sense strand
uugaagagacaaagacaca

SEQ ID NO: 2448563 - RNA, 19 nt, Homo sapiens
  misc_RNA (1)...(19): siRNA sense strand
uauuagagcuagauggaac

SEQ ID NO: 2448564 - RNA, 19 nt, Homo sapiens
  misc_RNA (1)...(19): siRNA sense strand
accaaauauuagagcuaga

SEQ ID NO: 2448565 - RNA, 19 nt, Homo sapiens
  misc_RNA (1)...(19): siRNA sense strand
ggaacaacacucauggcua

SEQ ID NO: 2448566 - RNA, 19 nt, Homo sapiens
  misc_RNA (1)...(19): siRNA sense strand
acccaaaacuacuggcuaa

SEQ ID NO: 2448567 - RNA, 19 nt, Homo sapiens
  misc_RNA (1)...(19): siRNA sense strand
cuguggagcuguugggacu

SEQ ID NO: 2448568 - RNA, 19 nt, Homo sapiens
  misc_RNA (1)...(19): siRNA sense strand
uggccaaagaaguugagaa

SEQ ID NO: 2448569 - RNA, 19 nt, Homo sapiens
  misc_RNA (1)...(19): siRNA sense strand
caccaguaucaaugcaaua

SEQ ID NO: 2448570 - RNA, 19 nt, Homo sapiens
  misc_RNA (1)...(19): siRNA sense strand
guuuauggugggaggaguu

SEQ ID NO: 2448571 - RNA, 19 nt, Homo sapiens
  misc_RNA (1)...(19): siRNA sense strand
ugaauuugcugcugcccaa

SEQ ID NO: 2448572 - RNA, 19 nt, Homo sapiens
  misc_RNA (1)...(19): siRNA sense strand
gcaaagaguuucaagaugc

SEQ ID NO: 2448573 - RNA, 19 nt, Homo sapiens
  misc_RNA (1)...(19): siRNA sense strand
gcggcaaagaucugcaaca

SEQ ID NO: 2448574 - RNA, 19 nt, Homo sapiens
  misc_RNA (1)...(19): siRNA sense strand
ugaugugugcaaagggcua

SEQ ID NO: 2448575 - RNA, 19 nt, Homo sapiens
  misc_RNA (1)...(19): siRNA sense strand
uuucaaaagaauuggccaa

SEQ ID NO: 2448576 - RNA, 19 nt, Homo sapiens
  misc_RNA (1)...(19): siRNA sense strand
uggaaucagguuagggcuu

SEQ ID NO: 2448577 - RNA, 19 nt, Homo sapiens
  misc_RNA (1)...(19): siRNA sense strand
gcuaauaacuaucagggug

SEQ ID NO: 2448578 - RNA, 19 nt, Homo sapiens
  misc_RNA (1)...(19): siRNA sense strand
aagaauuggccaaagaagu

SEQ ID NO: 2448579 - RNA, 19 nt, Homo sapiens
  misc_RNA (1)...(19): siRNA sense strand
gaagaaauguggucagcga

SEQ ID NO: 2448580 - RNA, 19 nt, Homo sapiens
  misc_RNA (1)...(19): siRNA sense strand
gagacagagcagaggcuga

SEQ ID NO: 2448581 - RNA, 19 nt, Homo sapiens
  misc_RNA (1)...(19): siRNA sense strand
cggcuguggucgaugguga

SEQ ID NO: 2448582 - RNA, 19 nt, Homo sapiens
  misc_RNA (1)...(19): siRNA sense strand
ugaagaucucggaggguuu

SEQ ID NO: 2448583 - RNA, 19 nt, Homo sapiens
  misc_RNA (1)...(19): siRNA sense strand
gcaacuaucuggauggucu

SEQ ID NO: 2448584 - RNA, 19 nt, Homo sapiens
  misc_RNA (1)...(19): siRNA sense strand
caaaggaggagguggcagu

SEQ ID NO: 2448585 - RNA, 19 nt, Homo sapiens
  misc_RNA (1)...(19): siRNA sense strand
cgauggugaccgaggagga

SEQ ID NO: 2448586 - RNA, 19 nt, Homo sapiens
  misc_RNA (1)...(19): siRNA sense strand
caacgugguucguggcugu

SEQ ID NO: 2448587 - RNA, 19 nt, Homo sapiens
  misc_RNA (1)...(19): siRNA sense strand
gggccuggagacuggaaga

SEQ ID NO: 2448588 - RNA, 19 nt, Homo sapiens
  misc_RNA (1)...(19): siRNA sense strand
gugaagaucucggaggguu

SEQ ID NO: 2448589 - RNA, 19 nt, Homo sapiens
  misc_RNA (1)...(19): siRNA sense strand
gcagaugacuggauggcug

SEQ ID NO: 2448590 - RNA, 19 nt, Homo sapiens
  misc_RNA (1)...(19): siRNA sense strand
gggaaggaccggaaggaga

SEQ ID NO: 2448591 - RNA, 19 nt, Homo sapiens
  misc_RNA (1)...(19): siRNA sense strand
gcaaagaggccauugacca

SEQ ID NO: 2448592 - RNA, 19 nt, Homo sapiens
  misc_RNA (1)...(19): siRNA sense strand
gauaagagcaagcgggauc

SEQ ID NO: 2448593 - RNA, 19 nt, Homo sapiens
  misc_RNA (1)...(19): siRNA sense strand
gugacacaccagaggaaau

SEQ ID NO: 2448594 - RNA, 19 nt, Homo sapiens
  misc_RNA (1)...(19): siRNA sense strand
ugauggaagacgacggcaa

SEQ ID NO: 2448595 - RNA, 19 nt, Homo sapiens
  misc_RNA (1)...(19): siRNA sense strand
ccuuccagaccgagggcaa

SEQ ID NO: 2448596 - RNA, 19 nt, Homo sapiens
  misc_RNA (1)...(19): siRNA sense strand
cguccaaggaugagggcgu

SEQ ID NO: 2448597 - RNA, 19 nt, Homo sapiens
  misc_RNA (1)...(19): siRNA sense strand
agagagacauccuggcuga

SEQ ID NO: 2448598 - RNA, 19 nt, Homo sapiens
  misc_RNA (1)...(19): siRNA sense strand
cagaggaaaucaagcggca

SEQ ID NO: 2448599 - RNA, 19 nt, Homo sapiens
  misc_RNA (1)...(19): siRNA sense strand
acagagaccucaagccuga

SEQ ID NO: 2448600 - RNA, 19 nt, Homo sapiens
  misc_RNA (1)...(19): siRNA sense strand
gcacugaagcccagagccu

SEQ ID NO: 2448601 - RNA, 19 nt, Homo sapiens
  misc_RNA (1)...(19): siRNA sense strand
accaagauggagagagaca

SEQ ID NO: 2448602 - RNA, 19 nt, Homo sapiens
  misc_RNA (1)...(19): siRNA sense strand
gugacggcuacgugguaaa

SEQ ID NO: 2448603 - RNA, 19 nt, Homo sapiens
  misc_RNA (1)...(19): siRNA sense strand
cagugacacaccagaggaa

SEQ ID NO: 2448604 - RNA, 19 nt, Homo sapiens
  misc_RNA (1)...(19): siRNA sense strand
aggucauugauaagagcaa

SEQ ID NO: 2448605 - RNA, 19 nt, Homo sapiens
  misc_RNA (1)...(19): siRNA sense strand
gggcccuguucaagcggaa

SEQ ID NO: 2448606 - RNA, 19 nt, Homo sapiens
  misc_RNA (1)...(19): siRNA sense strand
guggggagcugcuggacaa

SEQ ID NO: 2448607 - RNA, 19 nt, Homo sapiens
  misc_RNA (1)...(19): siRNA sense strand
agaccgagggcaagcucua

SEQ ID NO: 2448608 - RNA, 19 nt, Homo sapiens
  misc_RNA (1)...(19): siRNA sense strand
cugauggggcagaggaaau

SEQ ID NO: 2448609 - RNA, 19 nt, Homo sapiens
  misc_RNA (1)...(19): siRNA sense strand
uggacaagauccugcggca

SEQ ID NO: 2448610 - RNA, 19 nt, Homo sapiens
  misc_RNA (1)...(19): siRNA sense strand
cugaagaaggcaacgcuga

SEQ ID NO: 2448611 - RNA, 19 nt, Homo sapiens
  misc_RNA (1)...(19): siRNA sense strand
ccaccauugacuggaauaa

SEQ ID NO: 2448612 - RNA, 19 nt, Homo sapiens
  misc_RNA (1)...(19): siRNA sense strand
ugcugaagcgccagggcua

SEQ ID NO: 2448613 - RNA, 19 nt, Homo sapiens
  misc_RNA (1)...(19): siRNA sense strand
ucucaaaagaggugauguu

SEQ ID NO: 2448614 - RNA, 19 nt, Homo sapiens
  misc_RNA (1)...(19): siRNA sense strand
ccugcacaccauuggcaaa

SEQ ID NO: 2448615 - RNA, 19 nt, Homo sapiens
  misc_RNA (1)...(19): siRNA sense strand
gaacaggagucaauggcaa

SEQ ID NO: 2448616 - RNA, 19 nt, Homo sapiens
  misc_RNA (1)...(19): siRNA sense strand
aguugaaguuggaugacaa

SEQ ID NO: 2448617 - RNA, 19 nt, Homo sapiens
  misc_RNA (1)...(19): siRNA sense strand
caguuuacguugcgagaca

SEQ ID NO: 2448618 - RNA, 19 nt, Homo sapiens
  misc_RNA (1)...(19): siRNA sense strand
gagacauguaugagcaauu

SEQ ID NO: 2448619 - RNA, 19 nt, Homo sapiens
  misc_RNA (1)...(19): siRNA sense strand
ggauaguaugaaugaucaa

SEQ ID NO: 2448620 - RNA, 19 nt, Homo sapiens
  misc_RNA (1)...(19): siRNA sense strand
ugaaggacugauagauaaa

SEQ ID NO: 2448621 - RNA, 19 nt, Homo sapiens
  misc_RNA (1)...(19): siRNA sense strand
cauauuauuaccagaggaa

SEQ ID NO: 2448622 - RNA, 19 nt, Homo sapiens
  misc_RNA (1)...(19): siRNA sense strand
auugaaggacugauagaua

SEQ ID NO: 2448623 - RNA, 19 nt, Homo sapiens
  misc_RNA (1)...(19): siRNA sense strand
gagucaauggcaaggcuaa

SEQ ID NO: 2448624 - RNA, 19 nt, Homo sapiens
  misc_RNA (1)...(19): siRNA sense strand
uaguaaacaaccaggaaga

SEQ ID NO: 2448625 - RNA, 19 nt, Homo sapiens
  misc_RNA (1)...(19): siRNA sense strand
ugacaaaacuugauggcca

SEQ ID NO: 2448626 - RNA, 19 nt, Homo sapiens
  misc_RNA (1)...(19): siRNA sense strand
cagaggaaagguuggaaga

SEQ ID NO: 2448627 - RNA, 19 nt, Homo sapiens
  misc_RNA (1)...(19): siRNA sense strand
ccaaagaguagcaagagga

SEQ ID NO: 2448628 - RNA, 19 nt, Homo sapiens
  misc_RNA (1)...(19): siRNA sense strand
aauccaaagaguagcaaga

SEQ ID NO: 2448629 - RNA, 19 nt, Homo sapiens
  misc_RNA (1)...(19): siRNA sense strand
uguuggaagcagauguuaa

SEQ ID NO: 2448630 - RNA, 19 nt, Homo sapiens
  misc_RNA (1)...(19): siRNA sense strand
uaaaguagauguagccuca

SEQ ID NO: 2448631 - RNA, 19 nt, Homo sapiens
  misc_RNA (1)...(19): siRNA sense strand
ccacuaaaggaaaacaaaa

SEQ ID NO: 2448632 - RNA, 19 nt, Homo sapiens
  misc_RNA (1)...(19): siRNA sense strand
auugcaagggagugguaaa

SEQ ID NO: 2448633 - RNA, 19 nt, Homo sapiens
  misc_RNA (1)...(19): siRNA sense strand
ugucuaagaaugugagcca

SEQ ID NO: 2448634 - RNA, 19 nt, Homo sapiens
  misc_RNA (1)...(19): siRNA sense strand
cuauacaaccugauaacau

SEQ ID NO: 2448635 - RNA, 19 nt, Homo sapiens
  misc_RNA (1)...(19): siRNA sense strand
ggaaaugaacaggagucaa

SEQ ID NO: 2448636 - RNA, 19 nt, Homo sapiens
  misc_RNA (1)...(19): siRNA sense strand
gggagguaucaaaggacuu

SEQ ID NO: 2448637 - RNA, 19 nt, Homo sapiens
  misc_RNA (1)...(19): siRNA sense strand
gaagcaacuaagagaaaau

SEQ ID NO: 2448638 - RNA, 19 nt, Homo sapiens
  misc_RNA (1)...(19): siRNA sense strand
gcuuguagacccuggaguu

SEQ ID NO: 2448639 - RNA, 19 nt, Homo sapiens
  misc_RNA (1)...(19): siRNA sense strand
caacuaaaacagaaugcua

SEQ ID NO: 2448640 - RNA, 19 nt, Homo sapiens
  misc_RNA (1)...(19): siRNA sense strand
gcgagacauguaugagcaa

SEQ ID NO: 2448641 - RNA, 19 nt, Homo sapiens
  misc_RNA (1)...(19): siRNA sense strand
uuucauugguacaggggaa

SEQ ID NO: 2448642 - RNA, 19 nt, Homo sapiens
  misc_RNA (1)...(19): siRNA sense strand
gcaaaggaaaugaacagga

SEQ ID NO: 2448643 - RNA, 19 nt, Homo sapiens
  misc_RNA (1)...(19): siRNA sense strand
augaaaggcaugaugggau

SEQ ID NO: 2448644 - RNA, 19 nt, Homo sapiens
  misc_RNA (1)...(19): siRNA sense strand
agucaauggcaaggcuaaa

SEQ ID NO: 2448645 - RNA, 19 nt, Homo sapiens
  misc_RNA (1)...(19): siRNA sense strand
uggcaaaauugaaccaaca

SEQ ID NO: 2448646 - RNA, 19 nt, Homo sapiens
  misc_RNA (1)...(19): siRNA sense strand
uauuauuaccagaggaaag

SEQ ID NO: 2448647 - RNA, 19 nt, Homo sapiens
  misc_RNA (1)...(19): siRNA sense strand
ucacaugggugguauggca

SEQ ID NO: 2448648 - RNA, 19 nt, Homo sapiens
  misc_RNA (1)...(19): siRNA sense strand
gcauauuauuaccagagga

SEQ ID NO: 2448649 - RNA, 19 nt, Homo sapiens
  misc_RNA (1)...(19): siRNA sense strand
augaagagguauugaaugc

SEQ ID NO: 2448650 - RNA, 19 nt, Homo sapiens
  misc_RNA (1)...(19): siRNA sense strand
agugaagcaacuaagagaa

SEQ ID NO: 2448651 - RNA, 19 nt, Homo sapiens
  misc_RNA (1)...(19): siRNA sense strand
aaguuugcacagaugguaa

SEQ ID NO: 2448652 - RNA, 19 nt, Homo sapiens
  misc_RNA (1)...(19): siRNA sense strand
acauugaaggacugauaga

SEQ ID NO: 2448653 - RNA, 19 nt, Homo sapiens
  misc_RNA (1)...(19): siRNA sense strand
acgaguugaaguuggauga

SEQ ID NO: 2448654 - RNA, 19 nt, Homo sapiens
  misc_RNA (1)...(19): siRNA sense strand
auggcaaggcuaaagaaau

SEQ ID NO: 2448655 - RNA, 19 nt, Homo sapiens
  misc_RNA (1)...(19): siRNA sense strand
ugaucaagaacuagacagu

SEQ ID NO: 2448656 - RNA, 19 nt, Homo sapiens
  misc_RNA (1)...(19): siRNA sense strand
gugaugagcuggagaccga

SEQ ID NO: 2448657 - RNA, 19 nt, Homo sapiens
  misc_RNA (1)...(19): siRNA sense strand
ccugaaacaaguggagaaa

SEQ ID NO: 2448658 - RNA, 19 nt, Homo sapiens
  misc_RNA (1)...(19): siRNA sense strand
cccugaaacaaguggagaa

SEQ ID NO: 2448659 - RNA, 19 nt, Homo sapiens
  misc_RNA (1)...(19): siRNA sense strand
gcuuugacugugagaccaa

SEQ ID NO: 2448660 - RNA, 19 nt, Homo sapiens
  misc_RNA (1)...(19): siRNA sense strand
cggaaggaguucagcgccu

SEQ ID NO: 2448661 - RNA, 19 nt, Homo sapiens
  misc_RNA (1)...(19): siRNA sense strand
ucggagaacagguggacga

SEQ ID NO: 2448662 - RNA, 19 nt, Homo sapiens
  misc_RNA (1)...(19): siRNA sense strand
gcaacaagcucuauguggu

SEQ ID NO: 2448663 - RNA, 19 nt, Homo sapiens
  misc_RNA (1)...(19): siRNA sense strand
ggguggucuucgaggccau

SEQ ID NO: 2448664 - RNA, 19 nt, Homo sapiens
  misc_RNA (1)...(19): siRNA sense strand
ucgccaucaacgaggagaa

SEQ ID NO: 2448665 - RNA, 19 nt, Homo sapiens
  misc_RNA (1)...(19): siRNA sense strand
agaucuaccagguggacca

SEQ ID NO: 2448666 - RNA, 19 nt, Homo sapiens
  misc_RNA (1)...(19): siRNA sense strand
gauacauggaacugcauca

SEQ ID NO: 2448667 - RNA, 19 nt, Homo sapiens
  misc_RNA (1)...(19): siRNA sense strand
ccggguuaaccgagagaua

SEQ ID NO: 2448668 - RNA, 19 nt, Homo sapiens
  misc_RNA (1)...(19): siRNA sense strand
cagaagagcauccaggaga

SEQ ID NO: 2448669 - RNA, 19 nt, Homo sapiens
  misc_RNA (1)...(19): siRNA sense strand
aagaaggacuggaaggacu

SEQ ID NO: 2448670 - RNA, 19 nt, Homo sapiens
  misc_RNA (1)...(19): siRNA sense strand
cagcggagaacgaggagga

SEQ ID NO: 2448671 - RNA, 19 nt, Homo sapiens
  misc_RNA (1)...(19): siRNA sense strand
aggaugagcacucggucaa

SEQ ID NO: 2448672 - RNA, 19 nt, Homo sapiens
  misc_RNA (1)...(19): siRNA sense strand
ggguuaaccgagagauagu

SEQ ID NO: 2448673 - RNA, 19 nt, Homo sapiens
  misc_RNA (1)...(19): siRNA sense strand
gagagauaguguccggcau

SEQ ID NO: 2448674 - RNA, 19 nt, Homo sapiens
  misc_RNA (1)...(19): siRNA sense strand
gcuucacagacgacgacaa

SEQ ID NO: 2448675 - RNA, 19 nt, Homo sapiens
  misc_RNA (1)...(19): siRNA sense strand
ugaaggaguacgugggcua

SEQ ID NO: 2448676 - RNA, 19 nt, Homo sapiens
  misc_RNA (1)...(19): siRNA sense strand
aguaaaguaccaaggccua

SEQ ID NO: 2448677 - RNA, 19 nt, Homo sapiens
  misc_RNA (1)...(19): siRNA sense strand
gggaaauggauucggguag

SEQ ID NO: 2448678 - RNA, 19 nt, Homo sapiens
  misc_RNA (1)...(19): siRNA sense strand
gauuugggcuggugggugu

SEQ ID NO: 2448679 - RNA, 19 nt, Homo sapiens
  misc_RNA (1)...(19): siRNA sense strand
gaggaagggaagaccguga

SEQ ID NO: 2448680 - RNA, 19 nt, Homo sapiens
  misc_RNA (1)...(19): siRNA sense strand
cuuccuuagcugagaacuu

SEQ ID NO: 2448681 - RNA, 19 nt, Homo sapiens
  misc_RNA (1)...(19): siRNA sense strand
gggcaauucacaaugcuga

SEQ ID NO: 2448682 - RNA, 19 nt, Homo sapiens
  misc_RNA (1)...(19): siRNA sense strand
cccagauguuccagagguu

SEQ ID NO: 2448683 - RNA, 19 nt, Homo sapiens
  misc_RNA (1)...(19): siRNA sense strand
gggugaaagaagugaggaa

SEQ ID NO: 2448684 - RNA, 19 nt, Homo sapiens
  misc_RNA (1)...(19): siRNA sense strand
gugaaagaagugaggaaaa

SEQ ID NO: 2448685 - RNA, 19 nt, Homo sapiens
  misc_RNA (1)...(19): siRNA sense strand
caguauauggugugucaaa

SEQ ID NO: 2448686 - RNA, 19 nt, Homo sapiens
  misc_RNA (1)...(19): siRNA sense strand
ggugaaagaagugaggaaa

SEQ ID NO: 2448687 - RNA, 19 nt, Homo sapiens
  misc_RNA (1)...(19): siRNA sense strand
ggguagaauauaacugcaa

SEQ ID NO: 2448688 - RNA, 19 nt, Homo sapiens
  misc_RNA (1)...(19): siRNA sense strand
gcauucaaacuuagagaca

SEQ ID NO: 2448689 - RNA, 19 nt, Homo sapiens
  misc_RNA (1)...(19): siRNA sense strand
ggguaacuguuuaggagga

SEQ ID NO: 2448690 - RNA, 19 nt, Homo sapiens
  misc_RNA (1)...(19): siRNA sense strand
cgggaagcgauguggccaa

SEQ ID NO: 2448691 - RNA, 19 nt, Homo sapiens
  misc_RNA (1)...(19): siRNA sense strand
aguaacugaaagauggaaa

SEQ ID NO: 2448692 - RNA, 19 nt, Homo sapiens
  misc_RNA (1)...(19): siRNA sense strand
uuacaauagccuugauaga

SEQ ID NO: 2448693 - RNA, 19 nt, Homo sapiens
  misc_RNA (1)...(19): siRNA sense strand
cguggaagaauuugcagaa

SEQ ID NO: 2448694 - RNA, 19 nt, Homo sapiens
  misc_RNA (1)...(19): siRNA sense strand
auucaaacuuagagacacu

SEQ ID NO: 2448695 - RNA, 19 nt, Homo sapiens
  misc_RNA (1)...(19): siRNA sense strand
caagacuggaagaaguaaa

SEQ ID NO: 2448696 - RNA, 19 nt, Homo sapiens
  misc_RNA (1)...(19): siRNA sense strand
ucuagcagguggagauaca

SEQ ID NO: 2448697 - RNA, 19 nt, Homo sapiens
  misc_RNA (1)...(19): siRNA sense strand
ugaaagaagugaggaaaau

SEQ ID NO: 2448698 - RNA, 19 nt, Homo sapiens
  misc_RNA (1)...(19): siRNA sense strand
aaagggacgcacagugaaa

SEQ ID NO: 2448699 - RNA, 19 nt, Homo sapiens
  misc_RNA (1)...(19): siRNA sense strand
cguauuagacagcgaaaau

SEQ ID NO: 2448700 - RNA, 19 nt, Homo sapiens
  misc_RNA (1)...(19): siRNA sense strand
gcaaauugguuaugcgguc

SEQ ID NO: 2448701 - RNA, 19 nt, Homo sapiens
  misc_RNA (1)...(19): siRNA sense strand
cuauacguaagaugggaaa

SEQ ID NO: 2448702 - RNA, 19 nt, Homo sapiens
  misc_RNA (1)...(19): siRNA sense strand
gguaacuguuuaggaggaa

SEQ ID NO: 2448703 - RNA, 19 nt, Homo sapiens
  misc_RNA (1)...(19): siRNA sense strand
cuauuuagccagaaucaau

SEQ ID NO: 2448704 - RNA, 19 nt, Homo sapiens
  misc_RNA (1)...(19): siRNA sense strand
ugcuauaugcuuaggucua

SEQ ID NO: 2448705 - RNA, 19 nt, Homo sapiens
  misc_RNA (1)...(19): siRNA sense strand
aaggagcagaguugauaaa

SEQ ID NO: 2448706 - RNA, 19 nt, Homo sapiens
  misc_RNA (1)...(19): siRNA sense strand
ccauaguguuaaggauauu

SEQ ID NO: 2448707 - RNA, 19 nt, Homo sapiens
  misc_RNA (1)...(19): siRNA sense strand
ggacacaggacaaggcuuc

SEQ ID NO: 2448708 - RNA, 19 nt, Homo sapiens
  misc_RNA (1)...(19): siRNA sense strand
aguaaauagagaagugaac

SEQ ID NO: 2448709 - RNA, 19 nt, Homo sapiens
  misc_RNA (1)...(19): siRNA sense strand
gcagccaacaaauggaauu

SEQ ID NO: 2448710 - RNA, 19 nt, Homo sapiens
  misc_RNA (1)...(19): siRNA sense strand
gaauauaacugcaacuccu

SEQ ID NO: 2448711 - RNA, 19 nt, Homo sapiens
  misc_RNA (1)...(19): siRNA sense strand
cugcauuugccaacgggaa

SEQ ID NO: 2448712 - RNA, 19 nt, Homo sapiens
  misc_RNA (1)...(19): siRNA sense strand
cuuuagucuucuugcaaca

SEQ ID NO: 2448713 - RNA, 19 nt, Homo sapiens
  misc_RNA (1)...(19): siRNA sense strand
ccaaauuaaaugacugcca

SEQ ID NO: 2448714 - RNA, 19 nt, Homo sapiens
  misc_RNA (1)...(19): siRNA sense strand
agaacauguacaggaguua

SEQ ID NO: 2448715 - RNA, 19 nt, Homo sapiens
  misc_RNA (1)...(19): siRNA sense strand
ggcucuagcagguggagau

SEQ ID NO: 2448716 - RNA, 19 nt, Homo sapiens
  misc_RNA (1)...(19): siRNA sense strand
aagaauuugcagaagacuu

SEQ ID NO: 2448717 - RNA, 19 nt, Homo sapiens
  misc_RNA (1)...(19): siRNA sense strand
ggaaaauuaaugaccagua

SEQ ID NO: 2448718 - RNA, 19 nt, Homo sapiens
  misc_RNA (1)...(19): siRNA sense strand
ccggcuuauuaucguauua

SEQ ID NO: 2448719 - RNA, 19 nt, Homo sapiens
  misc_RNA (1)...(19): siRNA sense strand
gaccuauggaugugacuau

SEQ ID NO: 2448720 - RNA, 19 nt, Homo sapiens
  misc_RNA (1)...(19): siRNA sense strand
ggauggacccagacaugau

SEQ ID NO: 2448721 - RNA, 19 nt, Homo sapiens
  misc_RNA (1)...(19): siRNA sense strand
acgcacagugaaagcagua

SEQ ID NO: 2448722 - RNA, 19 nt, Homo sapiens
  misc_RNA (1)...(19): siRNA sense strand
cagcaaagauacugggcaa

SEQ ID NO: 2448723 - RNA, 19 nt, Homo sapiens
  misc_RNA (1)...(19): siRNA sense strand
gggcaaugaaagaaagaaa

SEQ ID NO: 2448724 - RNA, 19 nt, Homo sapiens
  misc_RNA (1)...(19): siRNA sense strand
caacaaaagaaguggaaaa

SEQ ID NO: 2448725 - RNA, 19 nt, Homo sapiens
  misc_RNA (1)...(19): siRNA sense strand
guggauaggcacagagaaa

SEQ ID NO: 2448726 - RNA, 19 nt, Homo sapiens
  misc_RNA (1)...(19): siRNA sense strand
acagaagacugaugguaaa

SEQ ID NO: 2448727 - RNA, 19 nt, Homo sapiens
  misc_RNA (1)...(19): siRNA sense strand
aguaagauguagagcauau

SEQ ID NO: 2448728 - RNA, 19 nt, Homo sapiens
  misc_RNA (1)...(19): siRNA sense strand
agacaaaggcggaagcauu

SEQ ID NO: 2448729 - RNA, 19 nt, Homo sapiens
  misc_RNA (1)...(19): siRNA sense strand
cagagaaaauggagagcua

SEQ ID NO: 2448730 - RNA, 19 nt, Homo sapiens
  misc_RNA (1)...(19): siRNA sense strand
uggaaagcaugaaaggaua

SEQ ID NO: 2448731 - RNA, 19 nt, Homo sapiens
  misc_RNA (1)...(19): siRNA sense strand
ugauauagcagcugaguau

SEQ ID NO: 2448732 - RNA, 19 nt, Homo sapiens
  misc_RNA (1)...(19): siRNA sense strand
ccaucaggagagagagaaa

SEQ ID NO: 2448733 - RNA, 19 nt, Homo sapiens
  misc_RNA (1)...(19): siRNA sense strand
gagcauauuaucaagguaa

SEQ ID NO: 2448734 - RNA, 19 nt, Homo sapiens
  misc_RNA (1)...(19): siRNA sense strand
guauaaagcuucuggccuu

SEQ ID NO: 2448735 - RNA, 19 nt, Homo sapiens
  misc_RNA (1)...(19): siRNA sense strand
uggccaaagaggagagaau

SEQ ID NO: 2448736 - RNA, 19 nt, Homo sapiens
  misc_RNA (1)...(19): siRNA sense strand
gaaacagauuagaagggaa

SEQ ID NO: 2448737 - RNA, 19 nt, Homo sapiens
  misc_RNA (1)...(19): siRNA sense strand
aaagaaagcuagaagacau

SEQ ID NO: 2448738 - RNA, 19 nt, Homo sapiens
  misc_RNA (1)...(19): siRNA sense strand
gcuauguggaggagauaua

SEQ ID NO: 2448739 - RNA, 19 nt, Homo sapiens
  misc_RNA (1)...(19): siRNA sense strand
acaaagagcuccuagaaaa

SEQ ID NO: 2448740 - RNA, 19 nt, Homo sapiens
  misc_RNA (1)...(19): siRNA sense strand
caaguaagauguagagcau

SEQ ID NO: 2448741 - RNA, 19 nt, Homo sapiens
  misc_RNA (1)...(19): siRNA sense strand
cagcauuaucucagacaaa

SEQ ID NO: 2448742 - RNA, 19 nt, Homo sapiens
  misc_RNA (1)...(19): siRNA sense strand
ggaaagcaugaaaggauaa

SEQ ID NO: 2448743 - RNA, 19 nt, Homo sapiens
  misc_RNA (1)...(19): siRNA sense strand
cguauuagcaacagagaga

SEQ ID NO: 2448744 - RNA, 19 nt, Homo sapiens
  misc_RNA (1)...(19): siRNA sense strand
ucuuaaaucacgaggaauu

SEQ ID NO: 2448745 - RNA, 19 nt, Homo sapiens
  misc_RNA (1)...(19): siRNA sense strand
augcaucagucaagaauaa

SEQ ID NO: 2448746 - RNA, 19 nt, Homo sapiens
  misc_RNA (1)...(19): siRNA sense strand
gagucuuagcacagagaaa

SEQ ID NO: 2448747 - RNA, 19 nt, Homo sapiens
  misc_RNA (1)...(19): siRNA sense strand
ugaauuaagugaugagcau

SEQ ID NO: 2448748 - RNA, 19 nt, Homo sapiens
  misc_RNA (1)...(19): siRNA sense strand
agauauuccacuagacaaa

SEQ ID NO: 2448749 - RNA, 19 nt, Homo sapiens
  misc_RNA (1)...(19): siRNA sense strand
agaugagguuacaaagaaa

SEQ ID NO: 2448750 - RNA, 19 nt, Homo sapiens
  misc_RNA (1)...(19): siRNA sense strand
caaaagaaguggaaaauca

SEQ ID NO: 2448751 - RNA, 19 nt, Homo sapiens
  misc_RNA (1)...(19): siRNA sense strand
uuacaaaccaucagcauaa

SEQ ID NO: 2448752 - RNA, 19 nt, Homo sapiens
  misc_RNA (1)...(19): siRNA sense strand
gguaaaaugcagcgugaaa

SEQ ID NO: 2448753 - RNA, 19 nt, Homo sapiens
  misc_RNA (1)...(19): siRNA sense strand
cagaguagguuuagaucau

SEQ ID NO: 2448754 - RNA, 19 nt, Homo sapiens
  misc_RNA (1)...(19): siRNA sense strand
gagcaagauuacaagaaaa

SEQ ID NO: 2448755 - RNA, 19 nt, Homo sapiens
  misc_RNA (1)...(19): siRNA sense strand
cagagaugguuucgagcaa

SEQ ID NO: 2448756 - RNA, 19 nt, Homo sapiens
  misc_RNA (1)...(19): siRNA sense strand
caaacaacauggagaaaau

SEQ ID NO: 2448757 - RNA, 19 nt, Homo sapiens
  misc_RNA (1)...(19): siRNA sense strand
gagagaaagcugcaagaau

SEQ ID NO: 2448758 - RNA, 19 nt, Homo sapiens
  misc_RNA (1)...(19): siRNA sense strand
cagcaaaauuucagagcau

SEQ ID NO: 2448759 - RNA, 19 nt, Homo sapiens
  misc_RNA (1)...(19): siRNA sense strand
cagaagauacagacagcaa

SEQ ID NO: 2448760 - RNA, 19 nt, Homo sapiens
  misc_RNA (1)...(19): siRNA sense strand
aaacaguacagcaaagaua

SEQ ID NO: 2448761 - RNA, 19 nt, Homo sapiens
  misc_RNA (1)...(19): siRNA sense strand
agagacaacuuauggagaa

SEQ ID NO: 2448762 - RNA, 19 nt, Homo sapiens
  misc_RNA (1)...(19): siRNA sense strand
gagaaugagacaagacaga

SEQ ID NO: 2448763 - RNA, 19 nt, Homo sapiens
  misc_RNA (1)...(19): siRNA sense strand
caaucuauguggaagggaa

SEQ ID NO: 2448764 - RNA, 19 nt, Homo sapiens
  misc_RNA (1)...(19): siRNA sense strand
ugucugagccagcgaaaua

SEQ ID NO: 2448765 - RNA, 19 nt, Homo sapiens
  misc_RNA (1)...(19): siRNA sense strand
uguaaauguuaauggccaa

SEQ ID NO: 2448766 - RNA, 19 nt, Homo sapiens
  misc_RNA (1)...(19): siRNA sense strand
cauacaaagcacaggucaa

SEQ ID NO: 2448767 - RNA, 19 nt, Homo sapiens
  misc_RNA (1)...(19): siRNA sense strand
gugguaugaaagugagaaa

SEQ ID NO: 2448768 - RNA, 19 nt, Homo sapiens
  misc_RNA (1)...(19): siRNA sense strand
agcuagaaguaaaggauuu

SEQ ID NO: 2448769 - RNA, 19 nt, Homo sapiens
  misc_RNA (1)...(19): siRNA sense strand
gagaaaauggagagcuaua

SEQ ID NO: 2448770 - RNA, 19 nt, Homo sapiens
  misc_RNA (1)...(19): siRNA sense strand
guugcagccuaaagagaaa

SEQ ID NO: 2448771 - RNA, 19 nt, Homo sapiens
  misc_RNA (1)...(19): siRNA sense strand
auucaaggcuaguaaagaa

SEQ ID NO: 2448772 - RNA, 19 nt, Homo sapiens
  misc_RNA (1)...(19): siRNA sense strand
cagucaaacuacagaagau

SEQ ID NO: 2448773 - RNA, 19 nt, Homo sapiens
  misc_RNA (1)...(19): siRNA sense strand
gcaaugaaagaaagaaaca

SEQ ID NO: 2448774 - RNA, 19 nt, Homo sapiens
  misc_RNA (1)...(19): siRNA sense strand
ccugaaugcuguuagaauu

SEQ ID NO: 2448775 - RNA, 19 nt, Homo sapiens
  misc_RNA (1)...(19): siRNA sense strand
caucagauaugcugugcaa

SEQ ID NO: 2448776 - RNA, 19 nt, Homo sapiens
  misc_RNA (1)...(19): siRNA sense strand
auucaaauggugauggaua

SEQ ID NO: 2448777 - RNA, 19 nt, Homo sapiens
  misc_RNA (1)...(19): siRNA sense strand
ggaucuagaaucagaguca

SEQ ID NO: 2448778 - RNA, 19 nt, Homo sapiens
  misc_RNA (1)...(19): siRNA sense strand
cagagaugguaucgaggua

SEQ ID NO: 2448779 - RNA, 19 nt, Homo sapiens
  misc_RNA (1)...(19): siRNA sense strand
guucuuaaaucacgaggaa

SEQ ID NO: 2448780 - RNA, 19 nt, Homo sapiens
  misc_RNA (1)...(19): siRNA sense strand
caucacuuauucagggaua

SEQ ID NO: 2448781 - RNA, 19 nt, Homo sapiens
  misc_RNA (1)...(19): siRNA sense strand
acucuaaugaugagaagaa

SEQ ID NO: 2448782 - RNA, 19 nt, Homo sapiens
  misc_RNA (1)...(19): siRNA sense strand
agaaaagccugguaauaaa

SEQ ID NO: 2448783 - RNA, 19 nt, Homo sapiens
  misc_RNA (1)...(19): siRNA sense strand
ggcaauaagucgucuucaa

SEQ ID NO: 2448784 - RNA, 19 nt, Homo sapiens
  misc_RNA (1)...(19): siRNA sense strand
auacaaacaacauggagaa

SEQ ID NO: 2448785 - RNA, 19 nt, Homo sapiens
  misc_RNA (1)...(19): siRNA sense strand
uugcagauauaccgagaaa

SEQ ID NO: 2448786 - RNA, 19 nt, Homo sapiens
  misc_RNA (1)...(19): siRNA sense strand
aggccgaguaagagagauu

SEQ ID NO: 2448787 - RNA, 19 nt, Homo sapiens
  misc_RNA (1)...(19): siRNA sense strand
uauuagcaacagagagaaa

SEQ ID NO: 2448788 - RNA, 19 nt, Homo sapiens
  misc_RNA (1)...(19): siRNA sense strand
auucagaaauauuggcgaa

SEQ ID NO: 2448789 - RNA, 19 nt, Homo sapiens
  misc_RNA (1)...(19): siRNA sense strand
caaucuaggauaagaauga

SEQ ID NO: 2448790 - RNA, 19 nt, Homo sapiens
  misc_RNA (1)...(19): siRNA sense strand
acaucaacaacgacagaaa

SEQ ID NO: 2448791 - RNA, 19 nt, Homo sapiens
  misc_RNA (1)...(19): siRNA sense strand
cagaagaaggcgaggaaga

SEQ ID NO: 2448792 - RNA, 19 nt, Homo sapiens
  misc_RNA (1)...(19): siRNA sense strand
gcucggacgaagaggacaa

SEQ ID NO: 2448793 - RNA, 19 nt, Homo sapiens
  misc_RNA (1)...(19): siRNA sense strand
agaagaacguggagcggau

SEQ ID NO: 2448794 - RNA, 19 nt, Homo sapiens
  misc_RNA (1)...(19): siRNA sense strand
ggacaauucggcagacuau

SEQ ID NO: 2448795 - RNA, 19 nt, Homo sapiens
  misc_RNA (1)...(19): siRNA sense strand
aggaggaagcugaugagaa

SEQ ID NO: 2448796 - RNA, 19 nt, Homo sapiens
  misc_RNA (1)...(19): siRNA sense strand
aggaagcugaugagaacua

SEQ ID NO: 2448797 - RNA, 19 nt, Homo sapiens
  misc_RNA (1)...(19): siRNA sense strand
agaagaaggcgaggaagaa

SEQ ID NO: 2448798 - RNA, 19 nt, Homo sapiens
  misc_RNA (1)...(19): siRNA sense strand
gaugcuggacagugggcaa

SEQ ID NO: 2448799 - RNA, 19 nt, Homo sapiens
  misc_RNA (1)...(19): siRNA sense strand
gcgaggaagaagaaagucu

SEQ ID NO: 2448800 - RNA, 19 nt, Homo sapiens
  misc_RNA (1)...(19): siRNA sense strand
cggacaauucggcagacua

SEQ ID NO: 2448801 - RNA, 19 nt, Homo sapiens
  misc_RNA (1)...(19): siRNA sense strand
ucaacacaagaaugagaaa

SEQ ID NO: 2448802 - RNA, 19 nt, Homo sapiens
  misc_RNA (1)...(19): siRNA sense strand
aagaaggcgaggaagaaga

SEQ ID NO: 2448803 - RNA, 19 nt, Homo sapiens
  misc_RNA (1)...(19): siRNA sense strand
gggagaugaucaaucggau

SEQ ID NO: 2448804 - RNA, 19 nt, Homo sapiens
  misc_RNA (1)...(19): siRNA sense strand
ucggcagacuauugucaaa

SEQ ID NO: 2448805 - RNA, 19 nt, Homo sapiens
  misc_RNA (1)...(19): siRNA sense strand
gggaauaaaguccaggagu

SEQ ID NO: 2448806 - RNA, 19 nt, Homo sapiens
  misc_RNA (1)...(19): siRNA sense strand
cggacgaagaggacaagga

SEQ ID NO: 2448807 - RNA, 19 nt, Homo sapiens
  misc_RNA (1)...(19): siRNA sense strand
ggacccacgagcugagaca

SEQ ID NO: 2448808 - RNA, 19 nt, Homo sapiens
  misc_RNA (1)...(19): siRNA sense strand
accagaagaaggcgaggaa

SEQ ID NO: 2448809 - RNA, 19 nt, Homo sapiens
  misc_RNA (1)...(19): siRNA sense strand
cugaaggacacgcagguga

SEQ ID NO: 2448810 - RNA, 19 nt, Homo sapiens
  misc_RNA (1)...(19): siRNA sense strand
gaagaaggaaggaaggcaa

SEQ ID NO: 2448811 - RNA, 19 nt, Homo sapiens
  misc_RNA (1)...(19): siRNA sense strand
ccagaaagugaaauggcaa

SEQ ID NO: 2448812 - RNA, 19 nt, Homo sapiens
  misc_RNA (1)...(19): siRNA sense strand
aagaaggaaggaaggcaaa

SEQ ID NO: 2448813 - RNA, 19 nt, Homo sapiens
  misc_RNA (1)...(19): siRNA sense strand
aggaaagagaggaccagaa

SEQ ID NO: 2448814 - RNA, 19 nt, Homo sapiens
  misc_RNA (1)...(19): siRNA sense strand
gaaggaaggcaaaggagga

SEQ ID NO: 2448815 - RNA, 19 nt, Homo sapiens
  misc_RNA (1)...(19): siRNA sense strand
cggagauugaggagauaga

SEQ ID NO: 2448816 - RNA, 19 nt, Homo sapiens
  misc_RNA (1)...(19): siRNA sense strand
uaaaagaacuugagcagga

SEQ ID NO: 2448817 - RNA, 19 nt, Homo sapiens
  misc_RNA (1)...(19): siRNA sense strand
aggagauagaugaagaaaa

SEQ ID NO: 2448818 - RNA, 19 nt, Homo sapiens
  misc_RNA (1)...(19): siRNA sense strand
aaguaggagacaaguguau

SEQ ID NO: 2448819 - RNA, 19 nt, Homo sapiens
  misc_RNA (1)...(19): siRNA sense strand
ugagagugugacugguaaa

SEQ ID NO: 2448820 - RNA, 19 nt, Homo sapiens
  misc_RNA (1)...(19): siRNA sense strand
gcaaaggaggacaguggca

SEQ ID NO: 2448821 - RNA, 19 nt, Homo sapiens
  misc_RNA (1)...(19): siRNA sense strand
cuaaauacaaugucaggca

SEQ ID NO: 2448822 - RNA, 19 nt, Homo sapiens
  misc_RNA (1)...(19): siRNA sense strand
cuguagaagaaggaaggaa

SEQ ID NO: 2448823 - RNA, 19 nt, Homo sapiens
  misc_RNA (1)...(19): siRNA sense strand
auucauggaaaguaggaga

SEQ ID NO: 2448824 - RNA, 19 nt, Homo sapiens
  misc_RNA (1)...(19): siRNA sense strand
ugaggagauagaugaagaa

SEQ ID NO: 2448825 - RNA, 19 nt, Homo sapiens
  misc_RNA (1)...(19): siRNA sense strand
ggguagaaauugauccuga

SEQ ID NO: 2448826 - RNA, 19 nt, Homo sapiens
  misc_RNA (1)...(19): siRNA sense strand
cagucaaagcugcaggaau

SEQ ID NO: 2448827 - RNA, 19 nt, Homo sapiens
  misc_RNA (1)...(19): siRNA sense strand
auuucaacacagagagcaa

SEQ ID NO: 2448828 - RNA, 19 nt, Homo sapiens
  misc_RNA (1)...(19): siRNA sense strand
ggaacaagaaaacaggaaa

SEQ ID NO: 2448829 - RNA, 19 nt, Homo sapiens
  misc_RNA (1)...(19): siRNA sense strand
caguggaugaagagauauu

SEQ ID NO: 2448830 - RNA, 19 nt, Homo sapiens
  misc_RNA (1)...(19): siRNA sense strand
gauucaauuuguugccgua

SEQ ID NO: 2448831 - RNA, 19 nt, Homo sapiens
  misc_RNA (1)...(19): siRNA sense strand
uggcaagacuuaagagcug

SEQ ID NO: 2448832 - RNA, 19 nt, Homo sapiens
  misc_RNA (1)...(19): siRNA sense strand
aauuguuggucuuggcauu

SEQ ID NO: 2448833 - RNA, 19 nt, Homo sapiens
  misc_RNA (1)...(19): siRNA sense strand
aggcaguugaagaagaaaa

SEQ ID NO: 2448834 - RNA, 19 nt, Homo sapiens
  misc_RNA (1)...(19): siRNA sense strand
augaagagauauuuggugu

SEQ ID NO: 2448835 - RNA, 19 nt, Homo sapiens
  misc_RNA (1)...(19): siRNA sense strand
caagaaaacaggaaaucau

SEQ ID NO: 2448836 - RNA, 19 nt, Homo sapiens
  misc_RNA (1)...(19): siRNA sense strand
cggugaagcacuacgggaa

SEQ ID NO: 2448837 - RNA, 19 nt, Homo sapiens
  misc_RNA (1)...(19): siRNA sense strand
agaagaagugcuaccgcaa

SEQ ID NO: 2448838 - RNA, 19 nt, Homo sapiens
  misc_RNA (1)...(19): siRNA sense strand
gagcagugguggcagcuga

SEQ ID NO: 2448839 - RNA, 19 nt, Homo sapiens
  misc_RNA (1)...(19): siRNA sense strand
ucaagagagaagucgagaa

SEQ ID NO: 2448840 - RNA, 19 nt, Homo sapiens
  misc_RNA (1)...(19): siRNA sense strand
cagaagaagugcuaccgca

SEQ ID NO: 2448841 - RNA, 19 nt, Homo sapiens
  misc_RNA (1)...(19): siRNA sense strand
gggaauuggagcaggaaau

SEQ ID NO: 2448842 - RNA, 19 nt, Homo sapiens
  misc_RNA (1)...(19): siRNA sense strand
cgacacaccuggaagcaga

SEQ ID NO: 2448843 - RNA, 19 nt, Homo sapiens
  misc_RNA (1)...(19): siRNA sense strand
cagccugguguguggaaua

SEQ ID NO: 2448844 - RNA, 19 nt, Homo sapiens
  misc_RNA (1)...(19): siRNA sense strand
gcucguggauuguugggaa

SEQ ID NO: 2448845 - RNA, 19 nt, Homo sapiens
  misc_RNA (1)...(19): siRNA sense strand
uuauaagagccgauggaga

SEQ ID NO: 2448846 - RNA, 19 nt, Homo sapiens
  misc_RNA (1)...(19): siRNA sense strand
ggguugaagccguuguuau

SEQ ID NO: 2448847 - RNA, 19 nt, Homo sapiens
  misc_RNA (1)...(19): siRNA sense strand
acucaggaagacaguguaa

SEQ ID NO: 2448848 - RNA, 19 nt, Homo sapiens
  misc_RNA (1)...(19): siRNA sense strand
gaacaagccuggugccucu

SEQ ID NO: 2448849 - RNA, 19 nt, Homo sapiens
  misc_RNA (1)...(19): siRNA sense strand
cugcagauaaacauguaua

SEQ ID NO: 2448850 - RNA, 19 nt, Homo sapiens
  misc_RNA (1)...(19): siRNA sense strand
ggaagcagagaaugggaca

SEQ ID NO: 2448851 - RNA, 19 nt, Homo sapiens
  misc_RNA (1)...(19): siRNA sense strand
uuuagagacugaagagcau

SEQ ID NO: 2448852 - RNA, 19 nt, Homo sapiens
  misc_RNA (1)...(19): siRNA sense strand
acaccuggaagcagagaau

SEQ ID NO: 2448853 - RNA, 19 nt, Homo sapiens
  misc_RNA (1)...(19): siRNA sense strand
ucauauagucuuggccaaa

SEQ ID NO: 2448854 - RNA, 19 nt, Homo sapiens
  misc_RNA (1)...(19): siRNA sense strand
gagcauuauaagagccgau

SEQ ID NO: 2448855 - RNA, 19 nt, Homo sapiens
  misc_RNA (1)...(19): siRNA sense strand
cacaauaauucaaucccua

SEQ ID NO: 2448856 - RNA, 19 nt, Homo sapiens
  misc_RNA (1)...(19): siRNA sense strand
gggaaauuauuauuggucu

SEQ ID NO: 2448857 - RNA, 19 nt, Homo sapiens
  misc_RNA (1)...(19): siRNA sense strand
ucaggaagacaguguaaaa

SEQ ID NO: 2448858 - RNA, 19 nt, Homo sapiens
  misc_RNA (1)...(19): siRNA sense strand
uggagaucuauuaggauuu

SEQ ID NO: 2448859 - RNA, 19 nt, Homo sapiens
  misc_RNA (1)...(19): siRNA sense strand
gaacgaaagugaacaggag

SEQ ID NO: 2448860 - RNA, 19 nt, Homo sapiens
  misc_RNA (1)...(19): siRNA sense strand
ugccauacuaagagaacau

SEQ ID NO: 2448861 - RNA, 19 nt, Homo sapiens
  misc_RNA (1)...(19): siRNA sense strand
agugggaagauuugcacaa

SEQ ID NO: 2448862 - RNA, 19 nt, Homo sapiens
  misc_RNA (1)...(19): siRNA sense strand
gaugacaaugaaagaccaa

SEQ ID NO: 2448863 - RNA, 19 nt, Homo sapiens
  misc_RNA (1)...(19): siRNA sense strand
ccaaaagauugauccgaca

SEQ ID NO: 2448864 - RNA, 19 nt, Homo sapiens
  misc_RNA (1)...(19): siRNA sense strand
gcauaauacuugcugcucu

SEQ ID NO: 2448865 - RNA, 19 nt, Homo sapiens
  misc_RNA (1)...(19): siRNA sense strand
guugggaauuggagcagga

SEQ ID NO: 2448866 - RNA, 19 nt, Homo sapiens
  misc_RNA (1)...(19): siRNA sense strand
aggaaauauugaccagguu

SEQ ID NO: 2448867 - RNA, 19 nt, Homo sapiens
  misc_RNA (1)...(19): siRNA sense strand
ugggaauuggagcaggaaa

SEQ ID NO: 2448868 - RNA, 19 nt, Homo sapiens
  misc_RNA (1)...(19): siRNA sense strand
gugucaagcauuagguuuu

SEQ ID NO: 2448869 - RNA, 19 nt, Homo sapiens
  misc_RNA (1)...(19): siRNA sense strand
ccuuacaucagcugugcua

SEQ ID NO: 2448870 - RNA, 19 nt, Homo sapiens
  misc_RNA (1)...(19): siRNA sense strand
gcucaaaagaagagaaaug

SEQ ID NO: 2448871 - RNA, 19 nt, Homo sapiens
  misc_RNA (1)...(19): siRNA sense strand
guuuauggaucuugggucu

SEQ ID NO: 2448872 - RNA, 19 nt, Homo sapiens
  misc_RNA (1)...(19): siRNA sense strand
ugggcaaaccagugcaaau

SEQ ID NO: 2448873 - RNA, 19 nt, Homo sapiens
  misc_RNA (1)...(19): siRNA sense strand
uggcuaaagcaugggcaaa

SEQ ID NO: 2448874 - RNA, 19 nt, Homo sapiens
  misc_RNA (1)...(19): siRNA sense strand
acggcuugguauaaugaaa

SEQ ID NO: 2448875 - RNA, 19 nt, Homo sapiens
  misc_RNA (1)...(19): siRNA sense strand
cuaucaugcuccagagucu

SEQ ID NO: 2448876 - RNA, 19 nt, Homo sapiens
  misc_RNA (1)...(19): siRNA sense strand
acuacggaccugcaggaaa

SEQ ID NO: 2448877 - RNA, 19 nt, Homo sapiens
  misc_RNA (1)...(19): siRNA sense strand
agacaugccauuacggcuu

SEQ ID NO: 2448878 - RNA, 19 nt, Homo sapiens
  misc_RNA (1)...(19): siRNA sense strand
cugcucaaaagaagagaaa

SEQ ID NO: 2448879 - RNA, 19 nt, Homo sapiens
  misc_RNA (1)...(19): siRNA sense strand
cggagaaagagaagagcaa

SEQ ID NO: 2448880 - RNA, 19 nt, Homo sapiens
  misc_RNA (1)...(19): siRNA sense strand
gagaaagagaagagcaaca

SEQ ID NO: 2448881 - RNA, 19 nt, Homo sapiens
  misc_RNA (1)...(19): siRNA sense strand
agaggaaagcggagaaaga

SEQ ID NO: 2448882 - RNA, 19 nt, Homo sapiens
  misc_RNA (1)...(19): siRNA sense strand
agacgagaagaaagagaaa

SEQ ID NO: 2448883 - RNA, 19 nt, Homo sapiens
  misc_RNA (1)...(19): siRNA sense strand
caugaagagaacaaggaaa

SEQ ID NO: 2448884 - RNA, 19 nt, Homo sapiens
  misc_RNA (1)...(19): siRNA sense strand
aaagaaaggcagaggagga

SEQ ID NO: 2448885 - RNA, 19 nt, Homo sapiens
  misc_RNA (1)...(19): siRNA sense strand
augaagagaacaaggaaaa

SEQ ID NO: 2448886 - RNA, 19 nt, Homo sapiens
  misc_RNA (1)...(19): siRNA sense strand
ucugagaagaugugaguuu

SEQ ID NO: 2448887 - RNA, 19 nt, Homo sapiens
  misc_RNA (1)...(19): siRNA sense strand
agaagcauguaguggacaa

SEQ ID NO: 2448888 - RNA, 19 nt, Homo sapiens
  misc_RNA (1)...(19): siRNA sense strand
ccgaaagcaggaagaagaa

SEQ ID NO: 2448889 - RNA, 19 nt, Homo sapiens
  misc_RNA (1)...(19): siRNA sense strand
aggaacaggaggagcaaga

SEQ ID NO: 2448890 - RNA, 19 nt, Homo sapiens
  misc_RNA (1)...(19): siRNA sense strand
gcaacagauccuggagaaa

SEQ ID NO: 2448891 - RNA, 19 nt, Homo sapiens
  misc_RNA (1)...(19): siRNA sense strand
ccaacaaaauggaaaucaa

SEQ ID NO: 2448892 - RNA, 19 nt, Homo sapiens
  misc_RNA (1)...(19): siRNA sense strand
cugcgaagaucuuggcuga

SEQ ID NO: 2448893 - RNA, 19 nt, Homo sapiens
  misc_RNA (1)...(19): siRNA sense strand
agcaagaacgaguggagaa

SEQ ID NO: 2448894 - RNA, 19 nt, Homo sapiens
  misc_RNA (1)...(19): siRNA sense strand
uagaagaggaagcccgaaa

SEQ ID NO: 2448895 - RNA, 19 nt, Homo sapiens
  misc_RNA (1)...(19): siRNA sense strand
aagacaugcccaagaggaa

SEQ ID NO: 2448896 - RNA, 19 nt, Homo sapiens
  misc_RNA (1)...(19): siRNA sense strand
ccaagaggaaagcggagaa

SEQ ID NO: 2448897 - RNA, 19 nt, Homo sapiens
  misc_RNA (1)...(19): siRNA sense strand
cuggagagaaagaagagaa

SEQ ID NO: 2448898 - RNA, 19 nt, Homo sapiens
  misc_RNA (1)...(19): siRNA sense strand
uggagagaaagaagagaau

SEQ ID NO: 2448899 - RNA, 19 nt, Homo sapiens
  misc_RNA (1)...(19): siRNA sense strand
auugagaagaagaaagcua

SEQ ID NO: 2448900 - RNA, 19 nt, Homo sapiens
  misc_RNA (1)...(19): siRNA sense strand
agaaggaacaggaggagca

SEQ ID NO: 2448901 - RNA, 19 nt, Homo sapiens
  misc_RNA (1)...(19): siRNA sense strand
gaacaagauaggcuggaga

SEQ ID NO: 2448902 - RNA, 19 nt, Homo sapiens
  misc_RNA (1)...(19): siRNA sense strand
cucaaggcauggagggauu

SEQ ID NO: 2448903 - RNA, 19 nt, Homo sapiens
  misc_RNA (1)...(19): siRNA sense strand
agauugagcaggagagacu

SEQ ID NO: 2448904 - RNA, 19 nt, Homo sapiens
  misc_RNA (1)...(19): siRNA sense strand
gugcaggagauguugggaa

SEQ ID NO: 2448905 - RNA, 19 nt, Homo sapiens
  misc_RNA (1)...(19): siRNA sense strand
aggaaagcggagaaagaga

SEQ ID NO: 2448906 - RNA, 19 nt, Homo sapiens
  misc_RNA (1)...(19): siRNA sense strand
ugguaaugcccgagcacuu

SEQ ID NO: 2448907 - RNA, 19 nt, Homo sapiens
  misc_RNA (1)...(19): siRNA sense strand
cccgaaagcaggaagaaga

SEQ ID NO: 2448908 - RNA, 19 nt, Homo sapiens
  misc_RNA (1)...(19): siRNA sense strand
acaggaaggggaagagaaa

SEQ ID NO: 2448909 - RNA, 19 nt, Homo sapiens
  misc_RNA (1)...(19): siRNA sense strand
aagaagcagcagaaacaaa

SEQ ID NO: 2448910 - RNA, 19 nt, Homo sapiens
  misc_RNA (1)...(19): siRNA sense strand
gaguggagaaggaagaaca

SEQ ID NO: 2448911 - RNA, 19 nt, Homo sapiens
  misc_RNA (1)...(19): siRNA sense strand
uggagaaggaagaacaaga

SEQ ID NO: 2448912 - RNA, 19 nt, Homo sapiens
  misc_RNA (1)...(19): siRNA sense strand
ccaaaauggaacugguaau

SEQ ID NO: 2448913 - RNA, 19 nt, Homo sapiens
  misc_RNA (1)...(19): siRNA sense strand
cagagauuggccaaagaaa

SEQ ID NO: 2448914 - RNA, 19 nt, Homo sapiens
  misc_RNA (1)...(19): siRNA sense strand
agcaacagauccuggagaa

SEQ ID NO: 2448915 - RNA, 19 nt, Homo sapiens
  misc_RNA (1)...(19): siRNA sense strand
gcaaggagaggaagcccua

SEQ ID NO: 2448916 - RNA, 19 nt, Homo sapiens
  misc_RNA (1)...(19): siRNA sense strand
aagaacgaguggagaagga

SEQ ID NO: 2448917 - RNA, 19 nt, Homo sapiens
  misc_RNA (1)...(19): siRNA sense strand
cgaaacauugagaagaaga

SEQ ID NO: 2448918 - RNA, 19 nt, Homo sapiens
  misc_RNA (1)...(19): siRNA sense strand
ggcuggagagagaggaauu

SEQ ID NO: 2448919 - RNA, 19 nt, Homo sapiens
  misc_RNA (1)...(19): siRNA sense strand
cauuggacccggaggacau

SEQ ID NO: 2448920 - RNA, 19 nt, Homo sapiens
  misc_RNA (1)...(19): siRNA sense strand
ugaaaucagaugagaggca

SEQ ID NO: 2448921 - RNA, 19 nt, Homo sapiens
  misc_RNA (1)...(19): siRNA sense strand
gugauauccaagacagcua

SEQ ID NO: 2448922 - RNA, 19 nt, Homo sapiens
  misc_RNA (1)...(19): siRNA sense strand
agaggaagcccuagagaag

SEQ ID NO: 2448923 - RNA, 19 nt, Homo sapiens
  misc_RNA (1)...(19): siRNA sense strand
aagaaaagcaagaacaaga

SEQ ID NO: 2448924 - RNA, 19 nt, Homo sapiens
  misc_RNA (1)...(19): siRNA sense strand
aggaacggcuggaggcgau

SEQ ID NO: 2448925 - RNA, 19 nt, Homo sapiens
  misc_RNA (1)...(19): siRNA sense strand
gauccuggagaaacagaaa

SEQ ID NO: 2448926 - RNA, 19 nt, Homo sapiens
  misc_RNA (1)...(19): siRNA sense strand
gagcaacaaggaaagggaa

SEQ ID NO: 2448927 - RNA, 19 nt, Homo sapiens
  misc_RNA (1)...(19): siRNA sense strand
ggaugcccuugaugggaaa

SEQ ID NO: 2448928 - RNA, 19 nt, Homo sapiens
  misc_RNA (1)...(19): siRNA sense strand
caagaggaaagcggagaaa

SEQ ID NO: 2448929 - RNA, 19 nt, Homo sapiens
  misc_RNA (1)...(19): siRNA sense strand
agaaagaagcagcagaaac

SEQ ID NO: 2448930 - RNA, 19 nt, Homo sapiens
  misc_RNA (1)...(19): siRNA sense strand
aggaagcccuagagaagca

SEQ ID NO: 2448931 - RNA, 19 nt, Homo sapiens
  misc_RNA (1)...(19): siRNA sense strand
agagaggaauugaaaagaa

SEQ ID NO: 2448932 - RNA, 19 nt, Homo sapiens
  misc_RNA (1)...(19): siRNA sense strand
cugaaguggcaaagauuaa

SEQ ID NO: 2448933 - RNA, 19 nt, Homo sapiens
  misc_RNA (1)...(19): siRNA sense strand
uggcaaagauuaagggaac

SEQ ID NO: 2448934 - RNA, 19 nt, Homo sapiens
  misc_RNA (1)...(19): siRNA sense strand
agaccaaagaacucagaaa

SEQ ID NO: 2448935 - RNA, 19 nt, Homo sapiens
  misc_RNA (1)...(19): siRNA sense strand
agaccaaugugaaggcaga

SEQ ID NO: 2448936 - RNA, 19 nt, Homo sapiens
  misc_RNA (1)...(19): siRNA sense strand
ugaacuugguggaggcaca

SEQ ID NO: 2448937 - RNA, 19 nt, Homo sapiens
  misc_RNA (1)...(19): siRNA sense strand
aagugaaguacgaggccua

SEQ ID NO: 2448938 - RNA, 19 nt, Homo sapiens
  misc_RNA (1)...(19): siRNA sense strand
cccaaaugcucaagaccau

SEQ ID NO: 2448939 - RNA, 19 nt, Homo sapiens
  misc_RNA (1)...(19): siRNA sense strand
gagaggaaagggaggcuga

SEQ ID NO: 2448940 - RNA, 19 nt, Homo sapiens
  misc_RNA (1)...(19): siRNA sense strand
guaugaucagcgagaggaa

SEQ ID NO: 2448941 - RNA, 19 nt, Homo sapiens
  misc_RNA (1)...(19): siRNA sense strand
guggcaaagauuaagggaa

SEQ ID NO: 2448942 - RNA, 19 nt, Homo sapiens
  misc_RNA (1)...(19): siRNA sense strand
aggaaagggaggcugagaa

SEQ ID NO: 2448943 - RNA, 19 nt, Homo sapiens
  misc_RNA (1)...(19): siRNA sense strand
caucaaacccacaucaaaa

SEQ ID NO: 2448944 - RNA, 19 nt, Homo sapiens
  misc_RNA (1)...(19): siRNA sense strand
ccagaaagagccugagaac

SEQ ID NO: 2448945 - RNA, 19 nt, Homo sapiens
  misc_RNA (1)...(19): siRNA sense strand
aaacauaggccacagguca

SEQ ID NO: 2448946 - RNA, 19 nt, Homo sapiens
  misc_RNA (1)...(19): siRNA sense strand
gcacuuaggaugcugguca

SEQ ID NO: 2448947 - RNA, 19 nt, Homo sapiens
  misc_RNA (1)...(19): siRNA sense strand
ucugaugucuccaggucaa

SEQ ID NO: 2448948 - RNA, 19 nt, Homo sapiens
  misc_RNA (1)...(19): siRNA sense strand
agacaagaccaaagaacuc

SEQ ID NO: 2448949 - RNA, 19 nt, Homo sapiens
  misc_RNA (1)...(19): siRNA sense strand
gcugagaagauguugagga

SEQ ID NO: 2448950 - RNA, 19 nt, Homo sapiens
  misc_RNA (1)...(19): siRNA sense strand
gcucuuaacuccugggcug

SEQ ID NO: 2448951 - RNA, 19 nt, Homo sapiens
  misc_RNA (1)...(19): siRNA sense strand
gccaaggacucaagaccca

SEQ ID NO: 2448952 - RNA, 19 nt, Homo sapiens
  misc_RNA (1)...(19): siRNA sense strand
cugagaacccagaagaguu

SEQ ID NO: 2448953 - RNA, 19 nt, Homo sapiens
  misc_RNA (1)...(19): siRNA sense strand
uugcaaaguccaucaccaa

SEQ ID NO: 2448954 - RNA, 19 nt, Homo sapiens
  misc_RNA (1)...(19): siRNA sense strand
gcucaagaccauugggcug

SEQ ID NO: 2448955 - RNA, 19 nt, Homo sapiens
  misc_RNA (1)...(19): siRNA sense strand
aaacuguggaagagcucaa

SEQ ID NO: 2448956 - RNA, 19 nt, Homo sapiens
  misc_RNA (1)...(19): siRNA sense strand
uggcucaaacuguggaaga

SEQ ID NO: 2448957 - RNA, 19 nt, Homo sapiens
  misc_RNA (1)...(19): siRNA sense strand
cagacaagaccaaagaacu

SEQ ID NO: 2448958 - RNA, 19 nt, Homo sapiens
  misc_RNA (1)...(19): siRNA sense strand
agaaagagccugagaaccc

SEQ ID NO: 2448959 - RNA, 19 nt, Homo sapiens
  misc_RNA (1)...(19): siRNA sense strand
ggaugcuggucaaggugau

SEQ ID NO: 2448960 - RNA, 19 nt, Homo sapiens
  misc_RNA (1)...(19): siRNA sense strand
acaucaaagagguacauca

SEQ ID NO: 2448961 - RNA, 19 nt, Homo sapiens
  misc_RNA (1)...(19): siRNA sense strand
cucaggaggaagacgcaua

SEQ ID NO: 2448962 - RNA, 19 nt, Homo sapiens
  misc_RNA (1)...(19): siRNA sense strand
aaguugaagccuacgauga

SEQ ID NO: 2448963 - RNA, 19 nt, Homo sapiens
  misc_RNA (1)...(19): siRNA sense strand
gcccacaagguuccagaaa

SEQ ID NO: 2448964 - RNA, 19 nt, Homo sapiens
  misc_RNA (1)...(19): siRNA sense strand
ccaaaguaggccaaaagaa

SEQ ID NO: 2448965 - RNA, 19 nt, Homo sapiens
  misc_RNA (1)...(19): siRNA sense strand
ccugaguguuagaaagcua

SEQ ID NO: 2448966 - RNA, 19 nt, Homo sapiens
  misc_RNA (1)...(19): siRNA sense strand
cugcaaagaaagaagacau

SEQ ID NO: 2448967 - RNA, 19 nt, Homo sapiens
  misc_RNA (1)...(19): siRNA sense strand
cccaaauugaucagauuaa

SEQ ID NO: 2448968 - RNA, 19 nt, Homo sapiens
  misc_RNA (1)...(19): siRNA sense strand
ugguauacgauguggaagu

SEQ ID NO: 2448969 - RNA, 19 nt, Homo sapiens
  misc_RNA (1)...(19): siRNA sense strand
cuggaggaagagacagaaa

SEQ ID NO: 2448970 - RNA, 19 nt, Homo sapiens
  misc_RNA (1)...(19): siRNA sense strand
agcaguuugaagagagaaa

SEQ ID NO: 2448971 - RNA, 19 nt, Homo sapiens
  misc_RNA (1)...(19): siRNA sense strand
aagcguuagcccagaaauu

SEQ ID NO: 2448972 - RNA, 19 nt, Homo sapiens
  misc_RNA (1)...(19): siRNA sense strand
caguuugaagagagaaaga

SEQ ID NO: 2448973 - RNA, 19 nt, Homo sapiens
  misc_RNA (1)...(19): siRNA sense strand
guuuggaagaacugaugaa

SEQ ID NO: 2448974 - RNA, 19 nt, Homo sapiens
  misc_RNA (1)...(19): siRNA sense strand
aggaagagacagaaaacau

SEQ ID NO: 2448975 - RNA, 19 nt, Homo sapiens
  misc_RNA (1)...(19): siRNA sense strand
cuaacaucaccgagaagau

SEQ ID NO: 2448976 - RNA, 19 nt, Homo sapiens
  misc_RNA (1)...(19): siRNA sense strand
uggacagggcugacaucaa

SEQ ID NO: 2448977 - RNA, 19 nt, Homo sapiens
  misc_RNA (1)...(19): siRNA sense strand
uuucagaagauucaggauu

SEQ ID NO: 2448978 - RNA, 19 nt, Homo sapiens
  misc_RNA (1)...(19): siRNA sense strand
gaucagauuaaaaggcauu

SEQ ID NO: 2448979 - RNA, 19 nt, Homo sapiens
  misc_RNA (1)...(19): siRNA sense strand
agaaagaagacauaaaccu

SEQ ID NO: 2448980 - RNA, 19 nt, Homo sapiens
  misc_RNA (1)...(19): siRNA sense strand
acuaugaccucgugggcaa

SEQ ID NO: 2448981 - RNA, 19 nt, Homo sapiens
  misc_RNA (1)...(19): siRNA sense strand
ucgaggaguuuguggccua

SEQ ID NO: 2448982 - RNA, 19 nt, Homo sapiens
  misc_RNA (1)...(19): siRNA sense strand
augucaaauucgaggaguu

SEQ ID NO: 2448983 - RNA, 19 nt, Homo sapiens
  misc_RNA (1)...(19): siRNA sense strand
cuggaagugaugaggauga

SEQ ID NO: 2448984 - RNA, 19 nt, Homo sapiens
  misc_RNA (1)...(19): siRNA sense strand
gcuaccugaaauuggaaua

SEQ ID NO: 2448985 - RNA, 19 nt, Homo sapiens
  misc_RNA (1)...(19): siRNA sense strand
gcaaaggggacgaugucaa

SEQ ID NO: 2448986 - RNA, 19 nt, Homo sapiens
  misc_RNA (1)...(19): siRNA sense strand
ucaucaaacgccagcggaa

SEQ ID NO: 2448987 - RNA, 19 nt, Homo sapiens
  misc_RNA (1)...(19): siRNA sense strand
aguacgagacacuggaaga

SEQ ID NO: 2448988 - RNA, 19 nt, Homo sapiens
  misc_RNA (1)...(19): siRNA sense strand
agcacuuggugguggauga

SEQ ID NO: 2448989 - RNA, 19 nt, Homo sapiens
  misc_RNA (1)...(19): siRNA sense strand
augcaaagucuacgagaac

SEQ ID NO: 2448990 - RNA, 19 nt, Homo sapiens
  misc_RNA (1)...(19): siRNA sense strand
cagcaagagcaaagaccaa

SEQ ID NO: 2448991 - RNA, 19 nt, Homo sapiens
  misc_RNA (1)...(19): siRNA sense strand
cguaagagcagaagccgaa

SEQ ID NO: 2448992 - RNA, 19 nt, Homo sapiens
  misc_RNA (1)...(19): siRNA sense strand
agagcaaggacaagaggaa

SEQ ID NO: 2448993 - RNA, 19 nt, Homo sapiens
  misc_RNA (1)...(19): siRNA sense strand
ggaagauccuggaggugga

SEQ ID NO: 2448994 - RNA, 19 nt, Homo sapiens
  misc_RNA (1)...(19): siRNA sense strand
ccgaaguggcagcagcaaa

SEQ ID NO: 2448995 - RNA, 19 nt, Homo sapiens
  misc_RNA (1)...(19): siRNA sense strand
gcugaagagaagauccaaa

SEQ ID NO: 2448996 - RNA, 19 nt, Homo sapiens
  misc_RNA (1)...(19): siRNA sense strand
ucgaggagagagugagaau

SEQ ID NO: 2448997 - RNA, 19 nt, Homo sapiens
  misc_RNA (1)...(19): siRNA sense strand
ccggagcaagaaagagaaa

SEQ ID NO: 2448998 - RNA, 19 nt, Homo sapiens
  misc_RNA (1)...(19): siRNA sense strand
cgaaguggcagcagcaaaa

SEQ ID NO: 2448999 - RNA, 19 nt, Homo sapiens
  misc_RNA (1)...(19): siRNA sense strand
gaagagaagcagagaggag

SEQ ID NO: 2449000 - RNA, 19 nt, Homo sapiens
  misc_RNA (1)...(19): siRNA sense strand
uuuaugaacugaauggcaa

SEQ ID NO: 2449001 - RNA, 19 nt, Homo sapiens
  misc_RNA (1)...(19): siRNA sense strand
agaggagaguggaggagga

SEQ ID NO: 2449002 - RNA, 19 nt, Homo sapiens
  misc_RNA (1)...(19): siRNA sense strand
gagaagagccuccgccaga

SEQ ID NO: 2449003 - RNA, 19 nt, Homo sapiens
  misc_RNA (1)...(19): siRNA sense strand
ggucgaggagagagugaga

SEQ ID NO: 2449004 - RNA, 19 nt, Homo sapiens
  misc_RNA (1)...(19): siRNA sense strand
ggaaggucgaggagagagu

SEQ ID NO: 2449005 - RNA, 19 nt, Homo sapiens
  misc_RNA (1)...(19): siRNA sense strand
cugaagucaaugggagaaa

SEQ ID NO: 2449006 - RNA, 19 nt, Homo sapiens
  misc_RNA (1)...(19): siRNA sense strand
aagagugagaggagcagaa

SEQ ID NO: 2449007 - RNA, 19 nt, Homo sapiens
  misc_RNA (1)...(19): siRNA sense strand
aagaagaagaagaaggaag

SEQ ID NO: 2449008 - RNA, 19 nt, Homo sapiens
  misc_RNA (1)...(19): siRNA sense strand
gagggaaggucgaggagag

SEQ ID NO: 2449009 - RNA, 19 nt, Homo sapiens
  misc_RNA (1)...(19): siRNA sense strand
gagaaaagcaggagcccca

SEQ ID NO: 2449010 - RNA, 19 nt, Homo sapiens
  misc_RNA (1)...(19): siRNA sense strand
acgcaguggauaugguuau

SEQ ID NO: 2449011 - RNA, 19 nt, Homo sapiens
  misc_RNA (1)...(19): siRNA sense strand
uggaaaaguuggauggaac

SEQ ID NO: 2449012 - RNA, 19 nt, Homo sapiens
  misc_RNA (1)...(19): siRNA sense strand
ggaggagaagcgagggagu

SEQ ID NO: 2449013 - RNA, 19 nt, Homo sapiens
  misc_RNA (1)...(19): siRNA sense strand
agaccuuuguggugagcga

SEQ ID NO: 2449014 - RNA, 19 nt, Homo sapiens
  misc_RNA (1)...(19): siRNA sense strand
ccguaagagcagaagccga

SEQ ID NO: 2449015 - RNA, 19 nt, Homo sapiens
  misc_RNA (1)...(19): siRNA sense strand
ggcauaaaaguaagagcaa

SEQ ID NO: 2449016 - RNA, 19 nt, Homo sapiens
  misc_RNA (1)...(19): siRNA sense strand
ucuuuaagggcuacgggaa

SEQ ID NO: 2449017 - RNA, 19 nt, Homo sapiens
  misc_RNA (1)...(19): siRNA sense strand
uuauagaagaaguggccga

SEQ ID NO: 2449018 - RNA, 19 nt, Homo sapiens
  misc_RNA (1)...(19): siRNA sense strand
cagacuuauuguggagaau

SEQ ID NO: 2449019 - RNA, 19 nt, Homo sapiens
  misc_RNA (1)...(19): siRNA sense strand
uggagguggaucugaagaa

SEQ ID NO: 2449020 - RNA, 19 nt, Homo sapiens
  misc_RNA (1)...(19): siRNA sense strand
cuuuguggugagcgaguaa

SEQ ID NO: 2449021 - RNA, 19 nt, Homo sapiens
  misc_RNA (1)...(19): siRNA sense strand
cugaagagaagauccaaaa

SEQ ID NO: 2449022 - RNA, 19 nt, Homo sapiens
  misc_RNA (1)...(19): siRNA sense strand
aagaccaagcugaagagaa

SEQ ID NO: 2449023 - RNA, 19 nt, Homo sapiens
  misc_RNA (1)...(19): siRNA sense strand
aagaagaagaaggaagaca

SEQ ID NO: 2449024 - RNA, 19 nt, Homo sapiens
  misc_RNA (1)...(19): siRNA sense strand
gaauccagccagagggaag

SEQ ID NO: 2449025 - RNA, 19 nt, Homo sapiens
  misc_RNA (1)...(19): siRNA sense strand
cgguccaagucuagaucca

SEQ ID NO: 2449026 - RNA, 19 nt, Homo sapiens
  misc_RNA (1)...(19): siRNA sense strand
uuaugaacugaauggcaaa

SEQ ID NO: 2449027 - RNA, 19 nt, Homo sapiens
  misc_RNA (1)...(19): siRNA sense strand
gauccaaaacaaugacaau

SEQ ID NO: 2449028 - RNA, 19 nt, Homo sapiens
  misc_RNA (1)...(19): siRNA sense strand
ugagaggagcagaaagcga

SEQ ID NO: 2449029 - RNA, 19 nt, Homo sapiens
  misc_RNA (1)...(19): siRNA sense strand
cgaggcagcaagcgagaca

SEQ ID NO: 2449030 - RNA, 19 nt, Homo sapiens
  misc_RNA (1)...(19): siRNA sense strand
gaaggaaauugaaagggaa

SEQ ID NO: 2449031 - RNA, 19 nt, Homo sapiens
  misc_RNA (1)...(19): siRNA sense strand
aaggaaauugaaagggaaa

SEQ ID NO: 2449032 - RNA, 19 nt, Homo sapiens
  misc_RNA (1)...(19): siRNA sense strand
agaaggaaauugaaaggga

SEQ ID NO: 2449033 - RNA, 19 nt, Homo sapiens
  misc_RNA (1)...(19): siRNA sense strand
acucaauaaccaagacuau

SEQ ID NO: 2449034 - RNA, 19 nt, Homo sapiens
  misc_RNA (1)...(19): siRNA sense strand
acuaugaugagaaggaaau

SEQ ID NO: 2449035 - RNA, 19 nt, Homo sapiens
  misc_RNA (1)...(19): siRNA sense strand
cauaagaagucauccacca

SEQ ID NO: 2449036 - RNA, 19 nt, Homo sapiens
  misc_RNA (1)...(19): siRNA sense strand
acacaauagccaagcaacu

SEQ ID NO: 2449037 - RNA, 19 nt, Homo sapiens
  misc_RNA (1)...(19): siRNA sense strand
gaaaagaaauccaugggga

SEQ ID NO: 2449038 - RNA, 19 nt, Homo sapiens
  misc_RNA (1)...(19): siRNA sense strand
aaaagaaauccauggggaa

SEQ ID NO: 2449039 - RNA, 19 nt, Homo sapiens
  misc_RNA (1)...(19): siRNA sense strand
ccgcauaagaagucaucca

SEQ ID NO: 2449040 - RNA, 19 nt, Homo sapiens
  misc_RNA (1)...(19): siRNA sense strand
acaucaaggcccugagagu

SEQ ID NO: 2449041 - RNA, 19 nt, Homo sapiens
  misc_RNA (1)...(19): siRNA sense strand
uugaaugggacauggccaa

SEQ ID NO: 2449042 - RNA, 19 nt, Homo sapiens
  misc_RNA (1)...(19): siRNA sense strand
ugguggaagucauggagga

SEQ ID NO: 2449043 - RNA, 19 nt, Homo sapiens
  misc_RNA (1)...(19): siRNA sense strand
uggcaaacggaguugacuu

SEQ ID NO: 2449044 - RNA, 19 nt, Homo sapiens
  misc_RNA (1)...(19): siRNA sense strand
uacuaugaugagaaggaaa

SEQ ID NO: 2449045 - RNA, 19 nt, Homo sapiens
  misc_RNA (1)...(19): siRNA sense strand
cagugaacuuccaggcagu

SEQ ID NO: 2449046 - RNA, 19 nt, Homo sapiens
  misc_RNA (1)...(19): siRNA sense strand
ccauauugaccuuagucuu

SEQ ID NO: 2449047 - RNA, 19 nt, Homo sapiens
  misc_RNA (1)...(19): siRNA sense strand
ccgagaaccacguggaaaa

SEQ ID NO: 2449048 - RNA, 19 nt, Homo sapiens
  misc_RNA (1)...(19): siRNA sense strand
cugaaaaggccaagcugaa

SEQ ID NO: 2449049 - RNA, 19 nt, Homo sapiens
  misc_RNA (1)...(19): siRNA sense strand
guggcaaggcugaagaaaa

SEQ ID NO: 2449050 - RNA, 19 nt, Homo sapiens
  misc_RNA (1)...(19): siRNA sense strand
gcacagugaagaaggccau

SEQ ID NO: 2449051 - RNA, 19 nt, Homo sapiens
  misc_RNA (1)...(19): siRNA sense strand
uggaagacccucaggacca

SEQ ID NO: 2449052 - RNA, 19 nt, Homo sapiens
  misc_RNA (1)...(19): siRNA sense strand
acauggacucauuggacaa

SEQ ID NO: 2449053 - RNA, 19 nt, Homo sapiens
  misc_RNA (1)...(19): siRNA sense strand
ggguggugaagaagaaaca

SEQ ID NO: 2449054 - RNA, 19 nt, Homo sapiens
  misc_RNA (1)...(19): siRNA sense strand
ccugaggacuugaugcaga

SEQ ID NO: 2449055 - RNA, 19 nt, Homo sapiens
  misc_RNA (1)...(19): siRNA sense strand
acaucuacuuccugcacaa

SEQ ID NO: 2449056 - RNA, 19 nt, Homo sapiens
  misc_RNA (1)...(19): siRNA sense strand
uggcaaggcugaagaaaac

SEQ ID NO: 2449057 - RNA, 19 nt, Homo sapiens
  misc_RNA (1)...(19): siRNA sense strand
gguccaaggucaagacagc

SEQ ID NO: 2449058 - RNA, 19 nt, Homo sapiens
  misc_RNA (1)...(19): siRNA sense strand
gguucaacugccugagcau

SEQ ID NO: 2449059 - RNA, 19 nt, Homo sapiens
  misc_RNA (1)...(19): siRNA sense strand
cuuucgagaaggacaagaa

SEQ ID NO: 2449060 - RNA, 19 nt, Homo sapiens
  misc_RNA (1)...(19): siRNA sense strand
cagccaagaucgugcagcu

SEQ ID NO: 2449061 - RNA, 19 nt, Homo sapiens
  misc_RNA (1)...(19): siRNA sense strand
aguuugaugucuuggagca

SEQ ID NO: 2449062 - RNA, 19 nt, Homo sapiens
  misc_RNA (1)...(19): siRNA sense strand
ccaucaaaguagaggagga

SEQ ID NO: 2449063 - RNA, 19 nt, Homo sapiens
  misc_RNA (1)...(19): siRNA sense strand
aagaagaagaagaaggaca

SEQ ID NO: 2449064 - RNA, 19 nt, Homo sapiens
  misc_RNA (1)...(19): siRNA sense strand
ccaagaagaagaaaggaga

SEQ ID NO: 2449065 - RNA, 19 nt, Homo sapiens
  misc_RNA (1)...(19): siRNA sense strand
aaguagaggaggaugagaa

SEQ ID NO: 2449066 - RNA, 19 nt, Homo sapiens
  misc_RNA (1)...(19): siRNA sense strand
ucacagaagucccaggaga

SEQ ID NO: 2449067 - RNA, 19 nt, Homo sapiens
  misc_RNA (1)...(19): siRNA sense strand
augagaagaaugaggccaa

SEQ ID NO: 2449068 - RNA, 19 nt, Homo sapiens
  misc_RNA (1)...(19): siRNA sense strand
aagaagaagaaaggagaga

SEQ ID NO: 2449069 - RNA, 19 nt, Homo sapiens
  misc_RNA (1)...(19): siRNA sense strand
aagaaugaggccaagaaga

SEQ ID NO: 2449070 - RNA, 19 nt, Homo sapiens
  misc_RNA (1)...(19): siRNA sense strand
caucaaaguagaggaggau

SEQ ID NO: 2449071 - RNA, 19 nt, Homo sapiens
  misc_RNA (1)...(19): siRNA sense strand
ccaagauguacacagacaa

SEQ ID NO: 2449072 - RNA, 19 nt, Homo sapiens
  misc_RNA (1)...(19): siRNA sense strand
agaagaagaaaggagagaa

SEQ ID NO: 2449073 - RNA, 19 nt, Homo sapiens
  misc_RNA (1)...(19): siRNA sense strand
gugacugguacaagacaaa

SEQ ID NO: 2449074 - RNA, 19 nt, Homo sapiens
  misc_RNA (1)...(19): siRNA sense strand
agaucaagacaucggguuu

SEQ ID NO: 2449075 - RNA, 19 nt, Homo sapiens
  misc_RNA (1)...(19): siRNA sense strand
gcaagcagauagaaggcca

SEQ ID NO: 2449076 - RNA, 19 nt, Homo sapiens
  misc_RNA (1)...(19): siRNA sense strand
ccuugaaagaacugauuga

SEQ ID NO: 2449077 - RNA, 19 nt, Homo sapiens
  misc_RNA (1)...(19): siRNA sense strand
uggccaacguggagacagu

SEQ ID NO: 2449078 - RNA, 19 nt, Homo sapiens
  misc_RNA (1)...(19): siRNA sense strand
ucgaguccauugagggcaa

SEQ ID NO: 2449079 - RNA, 19 nt, Homo sapiens
  misc_RNA (1)...(19): siRNA sense strand
ugguacaagacaaaggaga

SEQ ID NO: 2449080 - RNA, 19 nt, Homo sapiens
  misc_RNA (1)...(19): siRNA sense strand
uugaaagaacugauugaga

SEQ ID NO: 2449081 - RNA, 19 nt, Homo sapiens
  misc_RNA (1)...(19): siRNA sense strand
guguggacuggaugaacaa

SEQ ID NO: 2449082 - RNA, 19 nt, Homo sapiens
  misc_RNA (1)...(19): siRNA sense strand
gaguacagcuccucggaca

SEQ ID NO: 2449083 - RNA, 19 nt, Homo sapiens
  misc_RNA (1)...(19): siRNA sense strand
agaccaucgagguggagaa

SEQ ID NO: 2449084 - RNA, 19 nt, Homo sapiens
  misc_RNA (1)...(19): siRNA sense strand
gcgcguuaucugagcauca

SEQ ID NO: 2449085 - RNA, 19 nt, Homo sapiens
  misc_RNA (1)...(19): siRNA sense strand
aguuugggauuucgggaau

SEQ ID NO: 2449086 - RNA, 19 nt, Homo sapiens
  misc_RNA (1)...(19): siRNA sense strand
ggaucugcuaagcuagaaa

SEQ ID NO: 2449087 - RNA, 19 nt, Homo sapiens
  misc_RNA (1)...(19): siRNA sense strand
gaguuugggauuucgggaa

SEQ ID NO: 2449088 - RNA, 19 nt, Homo sapiens
  misc_RNA (1)...(19): siRNA sense strand
aggagagugcggacgagaa

SEQ ID NO: 2449089 - RNA, 19 nt, Homo sapiens
  misc_RNA (1)...(19): siRNA sense strand
ggacugagggccauggaca

SEQ ID NO: 2449090 - RNA, 19 nt, Homo sapiens
  misc_RNA (1)...(19): siRNA sense strand
cagcuuugugugugaguau

SEQ ID NO: 2449091 - RNA, 19 nt, Homo sapiens
  misc_RNA (1)...(19): siRNA sense strand
aggcaaagccacugagguc

SEQ ID NO: 2449092 - RNA, 19 nt, Homo sapiens
  misc_RNA (1)...(19): siRNA sense strand
cagcuguuucuuugagcaa

SEQ ID NO: 2449093 - RNA, 19 nt, Homo sapiens
  misc_RNA (1)...(19): siRNA sense strand
aagcaaugcacguggccca

SEQ ID NO: 2449094 - RNA, 19 nt, Homo sapiens
  misc_RNA (1)...(19): siRNA sense strand
ucugcaagguggagcucau

SEQ ID NO: 2449095 - RNA, 19 nt, Homo sapiens
  misc_RNA (1)...(19): siRNA sense strand
cgccauacuaccugggcau

SEQ ID NO: 2449096 - RNA, 19 nt, Homo sapiens
  misc_RNA (1)...(19): siRNA sense strand
guggaaaucaagugaaccu

SEQ ID NO: 2449097 - RNA, 19 nt, Homo sapiens
  misc_RNA (1)...(19): siRNA sense strand
cauuaaagucacuggaaga

SEQ ID NO: 2449098 - RNA, 19 nt, Homo sapiens
  misc_RNA (1)...(19): siRNA sense strand
cugaaaagcacaagagaau

SEQ ID NO: 2449099 - RNA, 19 nt, Homo sapiens
  misc_RNA (1)...(19): siRNA sense strand
aggagagaguucaggaaau

SEQ ID NO: 2449100 - RNA, 19 nt, Homo sapiens
  misc_RNA (1)...(19): siRNA sense strand
cgacaaaggagaaggagac

SEQ ID NO: 2449101 - RNA, 19 nt, Homo sapiens
  misc_RNA (1)...(19): siRNA sense strand
aggaaaagucugcaauuaa

SEQ ID NO: 2449102 - RNA, 19 nt, Homo sapiens
  misc_RNA (1)...(19): siRNA sense strand
acgacaaaggagaaggaga

SEQ ID NO: 2449103 - RNA, 19 nt, Homo sapiens
  misc_RNA (1)...(19): siRNA sense strand
gugaugaggaagaggaaac

SEQ ID NO: 2449104 - RNA, 19 nt, Homo sapiens
  misc_RNA (1)...(19): siRNA sense strand
aacacaaagcaaagacuaa

SEQ ID NO: 2449105 - RNA, 19 nt, Homo sapiens
  misc_RNA (1)...(19): siRNA sense strand
aggaaauggaagacacaca

SEQ ID NO: 2449106 - RNA, 19 nt, Homo sapiens
  misc_RNA (1)...(19): siRNA sense strand
uagugaaggaaauggaaga

SEQ ID NO: 2449107 - RNA, 19 nt, Homo sapiens
  misc_RNA (1)...(19): siRNA sense strand
gaagauauauccaaggaac

SEQ ID NO: 2449108 - RNA, 19 nt, Homo sapiens
  misc_RNA (1)...(19): siRNA sense strand
cagugaugaggaagaggaa

SEQ ID NO: 2449109 - RNA, 19 nt, Homo sapiens
  misc_RNA (1)...(19): siRNA sense strand
ugaugaaacugauggcucu

SEQ ID NO: 2449110 - RNA, 19 nt, Homo sapiens
  misc_RNA (1)...(19): siRNA sense strand
uaccaggaauagugaccaa

SEQ ID NO: 2449111 - RNA, 19 nt, Homo sapiens
  misc_RNA (1)...(19): siRNA sense strand
uagacagugaugaggaaga

SEQ ID NO: 2449112 - RNA, 19 nt, Homo sapiens
  misc_RNA (1)...(19): siRNA sense strand
ccgcuagcuccacgacaaa

SEQ ID NO: 2449113 - RNA, 19 nt, Homo sapiens
  misc_RNA (1)...(19): siRNA sense strand
cacaaggaacacaaagcaa

SEQ ID NO: 2449114 - RNA, 19 nt, Homo sapiens
  misc_RNA (1)...(19): siRNA sense strand
augaggaagaggaaacauu

SEQ ID NO: 2449115 - RNA, 19 nt, Homo sapiens
  misc_RNA (1)...(19): siRNA sense strand
agauaaagccccuucagaa

SEQ ID NO: 2449116 - RNA, 19 nt, Homo sapiens
  misc_RNA (1)...(19): siRNA sense strand
ggagaaggagacaaaacua

SEQ ID NO: 2449117 - RNA, 19 nt, Homo sapiens
  misc_RNA (1)...(19): siRNA sense strand
ggaccuuugcgcucagaau

SEQ ID NO: 2449118 - RNA, 19 nt, Homo sapiens
  misc_RNA (1)...(19): siRNA sense strand
agagaaucuaugauaccaa

SEQ ID NO: 2449119 - RNA, 19 nt, Homo sapiens
  misc_RNA (1)...(19): siRNA sense strand
cauuaaagucacuggaaga

SEQ ID NO: 2449120 - RNA, 19 nt, Homo sapiens
  misc_RNA (1)...(19): siRNA sense strand
aggagagaguucaggaaau

SEQ ID NO: 2449121 - RNA, 19 nt, Homo sapiens
  misc_RNA (1)...(19): siRNA sense strand
cgacaaaggagaaggagac

SEQ ID NO: 2449122 - RNA, 19 nt, Homo sapiens
  misc_RNA (1)...(19): siRNA sense strand
aggaaaagucugcaauuaa

SEQ ID NO: 2449123 - RNA, 19 nt, Homo sapiens
  misc_RNA (1)...(19): siRNA sense strand
acgacaaaggagaaggaga

SEQ ID NO: 2449124 - RNA, 19 nt, Homo sapiens
  misc_RNA (1)...(19): siRNA sense strand
gugaugaggaagaggaaac

SEQ ID NO: 2449125 - RNA, 19 nt, Homo sapiens
  misc_RNA (1)...(19): siRNA sense strand
aacacaaagcaaagacuaa

SEQ ID NO: 2449126 - RNA, 19 nt, Homo sapiens
  misc_RNA (1)...(19): siRNA sense strand
aggaaauggaagacacaca

SEQ ID NO: 2449127 - RNA, 19 nt, Homo sapiens
  misc_RNA (1)...(19): siRNA sense strand
uagugaaggaaauggaaga

SEQ ID NO: 2449128 - RNA, 19 nt, Homo sapiens
  misc_RNA (1)...(19): siRNA sense strand
gaagauauauccaaggaac

SEQ ID NO: 2449129 - RNA, 19 nt, Homo sapiens
  misc_RNA (1)...(19): siRNA sense strand
cagugaugaggaagaggaa

SEQ ID NO: 2449130 - RNA, 19 nt, Homo sapiens
  misc_RNA (1)...(19): siRNA sense strand
ugaugaaacugauggcucu

SEQ ID NO: 2449131 - RNA, 19 nt, Homo sapiens
  misc_RNA (1)...(19): siRNA sense strand
uaccaggaauagugaccaa

SEQ ID NO: 2449132 - RNA, 19 nt, Homo sapiens
  misc_RNA (1)...(19): siRNA sense strand
uagacagugaugaggaaga

SEQ ID NO: 2449133 - RNA, 19 nt, Homo sapiens
  misc_RNA (1)...(19): siRNA sense strand
ccgcuagcuccacgacaaa

SEQ ID NO: 2449134 - RNA, 19 nt, Homo sapiens
  misc_RNA (1)...(19): siRNA sense strand
cacaaggaacacaaagcaa

SEQ ID NO: 2449135 - RNA, 19 nt, Homo sapiens
  misc_RNA (1)...(19): siRNA sense strand
augaggaagaggaaacauu

SEQ ID NO: 2449136 - RNA, 19 nt, Homo sapiens
  misc_RNA (1)...(19): siRNA sense strand
agauaaagccccuucagaa

SEQ ID NO: 2449137 - RNA, 19 nt, Homo sapiens
  misc_RNA (1)...(19): siRNA sense strand
ggagaaggagacaaaacua

SEQ ID NO: 2449138 - RNA, 19 nt, Homo sapiens
  misc_RNA (1)...(19): siRNA sense strand
ggaccuuugcgcucagaau

SEQ ID NO: 2449139 - RNA, 19 nt, Homo sapiens
  misc_RNA (1)...(19): siRNA sense strand
agagaaagaugcaggcuca

SEQ ID NO: 2449140 - RNA, 19 nt, Homo sapiens
  misc_RNA (1)...(19): siRNA sense strand
uggaauggauugacagcca

SEQ ID NO: 2449141 - RNA, 19 nt, Homo sapiens
  misc_RNA (1)...(19): siRNA sense strand
ggaauuauguuuagcaccu

SEQ ID NO: 2449142 - RNA, 19 nt, Homo sapiens
  misc_RNA (1)...(19): siRNA sense strand
gguugaucaugcagaacau

SEQ ID NO: 2449143 - RNA, 19 nt, Homo sapiens
  misc_RNA (1)...(19): siRNA sense strand
acacaguggaggaguagau

SEQ ID NO: 2449144 - RNA, 19 nt, Homo sapiens
  misc_RNA (1)...(19): siRNA sense strand
caggagucgaucagaguuu

SEQ ID NO: 2449145 - RNA, 19 nt, Homo sapiens
  misc_RNA (1)...(19): siRNA sense strand
ggaauggauugacagccaa

SEQ ID NO: 2449146 - RNA, 19 nt, Homo sapiens
  misc_RNA (1)...(19): siRNA sense strand
ucacagaugaccugggcca

SEQ ID NO: 2449147 - RNA, 19 nt, Homo sapiens
  misc_RNA (1)...(19): siRNA sense strand
ccgcaaauuuguugugcug

SEQ ID NO: 2449148 - RNA, 19 nt, Homo sapiens
  misc_RNA (1)...(19): siRNA sense strand
cugaaggaacugagugaaa

SEQ ID NO: 2449149 - RNA, 19 nt, Homo sapiens
  misc_RNA (1)...(19): siRNA sense strand
cagugaaagcacaggaaau

SEQ ID NO: 2449150 - RNA, 19 nt, Homo sapiens
  misc_RNA (1)...(19): siRNA sense strand
aggcagaccuguugggcau

SEQ ID NO: 2449151 - RNA, 19 nt, Homo sapiens
  misc_RNA (1)...(19): siRNA sense strand
uggaaaacuaaaagggaaa

SEQ ID NO: 2449152 - RNA, 19 nt, Homo sapiens
  misc_RNA (1)...(19): siRNA sense strand
agagaaaauucaugaggaa

SEQ ID NO: 2449153 - RNA, 19 nt, Homo sapiens
  misc_RNA (1)...(19): siRNA sense strand
augagaaauugaaggaaga

SEQ ID NO: 2449154 - RNA, 19 nt, Homo sapiens
  misc_RNA (1)...(19): siRNA sense strand
cugaaagagcagcgagaga

SEQ ID NO: 2449155 - RNA, 19 nt, Homo sapiens
  misc_RNA (1)...(19): siRNA sense strand
aggagaagcagaaggguca

SEQ ID NO: 2449156 - RNA, 19 nt, Homo sapiens
  misc_RNA (1)...(19): siRNA sense strand
aagagcagcgagagagaaa

SEQ ID NO: 2449157 - RNA, 19 nt, Homo sapiens
  misc_RNA (1)...(19): siRNA sense strand
ugaaagagcuccugaccga

SEQ ID NO: 2449158 - RNA, 19 nt, Homo sapiens
  misc_RNA (1)...(19): siRNA sense strand
gugccuaagggaagggaau

SEQ ID NO: 2449159 - RNA, 19 nt, Homo sapiens
  misc_RNA (1)...(19): siRNA sense strand
ccaaauuaacugugcuaca

SEQ ID NO: 2449160 - RNA, 19 nt, Homo sapiens
  misc_RNA (1)...(19): siRNA sense strand
cgucauggggcgagaacaa

SEQ ID NO: 2449161 - RNA, 19 nt, Homo sapiens
  misc_RNA (1)...(19): siRNA sense strand
caagaaaagagucagaaaa

SEQ ID NO: 2449162 - RNA, 19 nt, Homo sapiens
  misc_RNA (1)...(19): siRNA sense strand
aggcaguccuugauggaga

SEQ ID NO: 2449163 - RNA, 19 nt, Homo sapiens
  misc_RNA (1)...(19): siRNA sense strand
cggccuggacagagaaaca

SEQ ID NO: 2449164 - RNA, 19 nt, Homo sapiens
  misc_RNA (1)...(19): siRNA sense strand
cuaaaagggaaaucagaaa

SEQ ID NO: 2449165 - RNA, 19 nt, Homo sapiens
  misc_RNA (1)...(19): siRNA sense strand
aagagaaugaugaagagaa

SEQ ID NO: 2449166 - RNA, 19 nt, Homo sapiens
  misc_RNA (1)...(19): siRNA sense strand
ucaaaauggaacaggcuaa

SEQ ID NO: 2449167 - RNA, 19 nt, Homo sapiens
  misc_RNA (1)...(19): siRNA sense strand
cuaaaacagaggaugaaaa

SEQ ID NO: 2449168 - RNA, 19 nt, Homo sapiens
  misc_RNA (1)...(19): siRNA sense strand
ccgaagcggagcaggaaaa

SEQ ID NO: 2449169 - RNA, 19 nt, Homo sapiens
  misc_RNA (1)...(19): siRNA sense strand
aggaagaggaccuggaaac

SEQ ID NO: 2449170 - RNA, 19 nt, Homo sapiens
  misc_RNA (1)...(19): siRNA sense strand
ggcugaaggagaagcagaa

SEQ ID NO: 2449171 - RNA, 19 nt, Homo sapiens
  misc_RNA (1)...(19): siRNA sense strand
aagcagaagggucaguaaa

SEQ ID NO: 2449172 - RNA, 19 nt, Homo sapiens
  misc_RNA (1)...(19): siRNA sense strand
guggagagguucugccuga

SEQ ID NO: 2449173 - RNA, 19 nt, Homo sapiens
  misc_RNA (1)...(19): siRNA sense strand
ccgagaaccaccagcugaa

SEQ ID NO: 2449174 - RNA, 19 nt, Homo sapiens
  misc_RNA (1)...(19): siRNA sense strand
ggagacuguuggaagcgaa

SEQ ID NO: 2449175 - RNA, 19 nt, Homo sapiens
  misc_RNA (1)...(19): siRNA sense strand
acaagaaaagagucagaaa

SEQ ID NO: 2449176 - RNA, 19 nt, Homo sapiens
  misc_RNA (1)...(19): siRNA sense strand
gggaaaucagaaaggucau

SEQ ID NO: 2449177 - RNA, 19 nt, Homo sapiens
  misc_RNA (1)...(19): siRNA sense strand
aggcuaaaacagaggauga

SEQ ID NO: 2449178 - RNA, 19 nt, Homo sapiens
  misc_RNA (1)...(19): siRNA sense strand
cuuccaaacagcugcaaau

SEQ ID NO: 2449179 - RNA, 19 nt, Homo sapiens
  misc_RNA (1)...(19): siRNA sense strand
agauugaaacccagacaga

SEQ ID NO: 2449180 - RNA, 19 nt, Homo sapiens
  misc_RNA (1)...(19): siRNA sense strand
aucagaagguggagagacu

SEQ ID NO: 2449181 - RNA, 19 nt, Homo sapiens
  misc_RNA (1)...(19): siRNA sense strand
ucuaaauauaggagcagau

SEQ ID NO: 2449182 - RNA, 19 nt, Homo sapiens
  misc_RNA (1)...(19): siRNA sense strand
ugaaagaagccaugaagcu

SEQ ID NO: 2449183 - RNA, 19 nt, Homo sapiens
  misc_RNA (1)...(19): siRNA sense strand
uguuggaagcgaaguggaa

SEQ ID NO: 2449184 - RNA, 19 nt, Homo sapiens
  misc_RNA (1)...(19): siRNA sense strand
agggaaaucagaaagguca

SEQ ID NO: 2449185 - RNA, 19 nt, Homo sapiens
  misc_RNA (1)...(19): siRNA sense strand
uuggaaaacuaaaagggaa

SEQ ID NO: 2449186 - RNA, 19 nt, Homo sapiens
  misc_RNA (1)...(19): siRNA sense strand
ccaagaauuacuucgaaca

SEQ ID NO: 2449187 - RNA, 19 nt, Homo sapiens
  misc_RNA (1)...(19): siRNA sense strand
cucaaggaggccaaagaaa

SEQ ID NO: 2449188 - RNA, 19 nt, Homo sapiens
  misc_RNA (1)...(19): siRNA sense strand
aguuagagcuacaagugga

SEQ ID NO: 2449189 - RNA, 19 nt, Homo sapiens
  misc_RNA (1)...(19): siRNA sense strand
gauacagagcaaagaagca

SEQ ID NO: 2449190 - RNA, 19 nt, Homo sapiens
  misc_RNA (1)...(19): siRNA sense strand
aaugagaaauugaaggaag

SEQ ID NO: 2449191 - RNA, 19 nt, Homo sapiens
  misc_RNA (1)...(19): siRNA sense strand
gagaaaauucaugaggaaa

SEQ ID NO: 2449192 - RNA, 19 nt, Homo sapiens
  misc_RNA (1)...(19): siRNA sense strand
acuucgaacaugaggaguu

SEQ ID NO: 2449193 - RNA, 19 nt, Homo sapiens
  misc_RNA (1)...(19): siRNA sense strand
ccagugaaagcacaggaaa

SEQ ID NO: 2449194 - RNA, 19 nt, Homo sapiens
  misc_RNA (1)...(19): siRNA sense strand
ugaaaacaauugaggaacu

SEQ ID NO: 2449195 - RNA, 19 nt, Homo sapiens
  misc_RNA (1)...(19): siRNA sense strand
ggucaguaaaagaaaucaa

SEQ ID NO: 2449196 - RNA, 19 nt, Homo sapiens
  misc_RNA (1)...(19): siRNA sense strand
gggaagggaaucagaaggu

SEQ ID NO: 2449197 - RNA, 19 nt, Homo sapiens
  misc_RNA (1)...(19): siRNA sense strand
caugagaaugagaaauuga

SEQ ID NO: 2449198 - RNA, 19 nt, Homo sapiens
  misc_RNA (1)...(19): siRNA sense strand
acggcauugucuaaauaua

SEQ ID NO: 2449199 - RNA, 19 nt, Homo sapiens
  misc_RNA (1)...(19): siRNA sense strand
agcuacaaguggaaagcau

SEQ ID NO: 2449200 - RNA, 19 nt, Homo sapiens
  misc_RNA (1)...(19): siRNA sense strand
guucugagauugaaaccca

SEQ ID NO: 2449201 - RNA, 19 nt, Homo sapiens
  misc_RNA (1)...(19): siRNA sense strand
agaggggagcacagagaaa

SEQ ID NO: 2449202 - RNA, 19 nt, Homo sapiens
  misc_RNA (1)...(19): siRNA sense strand
guccaaauuaacugugcua

SEQ ID NO: 2449203 - RNA, 19 nt, Homo sapiens
  misc_RNA (1)...(19): siRNA sense strand
uucaagaggcucauacaaa

SEQ ID NO: 2449204 - RNA, 19 nt, Homo sapiens
  misc_RNA (1)...(19): siRNA sense strand
uggacagggcagugcugaa

SEQ ID NO: 2449205 - RNA, 19 nt, Homo sapiens
  misc_RNA (1)...(19): siRNA sense strand
gcaucaaagccuuagacca

SEQ ID NO: 2449206 - RNA, 19 nt, Homo sapiens
  misc_RNA (1)...(19): siRNA sense strand
caucaaagccuuagaccag

SEQ ID NO: 2449207 - RNA, 19 nt, Homo sapiens
  misc_RNA (1)...(19): siRNA sense strand
ggaaguggaucaaggacac

SEQ ID NO: 2449208 - RNA, 19 nt, Homo sapiens
  misc_RNA (1)...(19): siRNA sense strand
guacagucauggaugggca

SEQ ID NO: 2449209 - RNA, 19 nt, Homo sapiens
  misc_RNA (1)...(19): siRNA sense strand
cugaagcaucaaagccuua

SEQ ID NO: 2449210 - RNA, 19 nt, Homo sapiens
  misc_RNA (1)...(19): siRNA sense strand
uccaaugacaugugugcua

SEQ ID NO: 2449211 - RNA, 19 nt, Homo sapiens
  misc_RNA (1)...(19): siRNA sense strand
uggaacaguaugagcgaaa

SEQ ID NO: 2449212 - RNA, 19 nt, Homo sapiens
  misc_RNA (1)...(19): siRNA sense strand
cugaagaggaagaggaaac

SEQ ID NO: 2449213 - RNA, 19 nt, Homo sapiens
  misc_RNA (1)...(19): siRNA sense strand
cugagaaagagaagaugaa

SEQ ID NO: 2449214 - RNA, 19 nt, Homo sapiens
  misc_RNA (1)...(19): siRNA sense strand
cagaaggaacagaggcaca

SEQ ID NO: 2449215 - RNA, 19 nt, Homo sapiens
  misc_RNA (1)...(19): siRNA sense strand
gugcggagcagaaggaaca

SEQ ID NO: 2449216 - RNA, 19 nt, Homo sapiens
  misc_RNA (1)...(19): siRNA sense strand
ccgagaaggcacagcagau

SEQ ID NO: 2449217 - RNA, 19 nt, Homo sapiens
  misc_RNA (1)...(19): siRNA sense strand
caucggagauucagaggga

SEQ ID NO: 2449218 - RNA, 19 nt, Homo sapiens
  misc_RNA (1)...(19): siRNA sense strand
gugauugaggagaggguga

SEQ ID NO: 2449219 - RNA, 19 nt, Homo sapiens
  misc_RNA (1)...(19): siRNA sense strand
ggcugaagaggaagaggaa

SEQ ID NO: 2449220 - RNA, 19 nt, Homo sapiens
  misc_RNA (1)...(19): siRNA sense strand
caguaugagcgaaagguga

SEQ ID NO: 2449221 - RNA, 19 nt, Homo sapiens
  misc_RNA (1)...(19): siRNA sense strand
agaugaacccgcuggaaca

SEQ ID NO: 2449222 - RNA, 19 nt, Homo sapiens
  misc_RNA (1)...(19): siRNA sense strand
uuaaugaggugaugcguga

SEQ ID NO: 2449223 - RNA, 19 nt, Homo sapiens
  misc_RNA (1)...(19): siRNA sense strand
gggaaaucagugagcacga

SEQ ID NO: 2449224 - RNA, 19 nt, Homo sapiens
  misc_RNA (1)...(19): siRNA sense strand
aguaugagcgaaaggugaa

SEQ ID NO: 2449225 - RNA, 19 nt, Homo sapiens
  misc_RNA (1)...(19): siRNA sense strand
aggacgaggaagaggagga

SEQ ID NO: 2449226 - RNA, 19 nt, Homo sapiens
  misc_RNA (1)...(19): siRNA sense strand
aguccaagaaccugccuaa

SEQ ID NO: 2449227 - RNA, 19 nt, Homo sapiens
  misc_RNA (1)...(19): siRNA sense strand
gcaggugucuggugagcga

SEQ ID NO: 2449228 - RNA, 19 nt, Homo sapiens
  misc_RNA (1)...(19): siRNA sense strand
acgaggaagaggaggaauc

SEQ ID NO: 2449229 - RNA, 19 nt, Homo sapiens
  misc_RNA (1)...(19): siRNA sense strand
gaccaaugugagaguucaa

SEQ ID NO: 2449230 - RNA, 19 nt, Homo sapiens
  misc_RNA (1)...(19): siRNA sense strand
ccaagauggaccuggagga

SEQ ID NO: 2449231 - RNA, 19 nt, Homo sapiens
  misc_RNA (1)...(19): siRNA sense strand
gagcguaggaugcgccaga

SEQ ID NO: 2449232 - RNA, 19 nt, Homo sapiens
  misc_RNA (1)...(19): siRNA sense strand
uggcagacaaccaguccaa

SEQ ID NO: 2449233 - RNA, 19 nt, Homo sapiens
  misc_RNA (1)...(19): siRNA sense strand
gggccauggcagacaacca

SEQ ID NO: 2449234 - RNA, 19 nt, Homo sapiens
  misc_RNA (1)...(19): siRNA sense strand
gcugaagaggaagaggaaa

SEQ ID NO: 2449235 - RNA, 19 nt, Homo sapiens
  misc_RNA (1)...(19): siRNA sense strand
ugccuaaagccgacagaca

SEQ ID NO: 2449236 - RNA, 19 nt, Homo sapiens
  misc_RNA (1)...(19): siRNA sense strand
gcguaggaugcgccagauu

SEQ ID NO: 2449237 - RNA, 19 nt, Homo sapiens
  misc_RNA (1)...(19): siRNA sense strand
gcgaaaggugaaugcgucu

SEQ ID NO: 2449238 - RNA, 19 nt, Homo sapiens
  misc_RNA (1)...(19): siRNA sense strand
cguucgugcuacagaagaa

SEQ ID NO: 2449239 - RNA, 19 nt, Homo sapiens
  misc_RNA (1)...(19): siRNA sense strand
ccaaagucugagaguguga

SEQ ID NO: 2449240 - RNA, 19 nt, Homo sapiens
  misc_RNA (1)...(19): siRNA sense strand
agcucaacaucuugggcaa

SEQ ID NO: 2449241 - RNA, 19 nt, Homo sapiens
  misc_RNA (1)...(19): siRNA sense strand
gcgagguacuuccuauuua

SEQ ID NO: 2449242 - RNA, 19 nt, Homo sapiens
  misc_RNA (1)...(19): siRNA sense strand
cgagguacuuccuauuuaa

SEQ ID NO: 2449243 - RNA, 19 nt, Homo sapiens
  misc_RNA (1)...(19): siRNA sense strand
gcacaaucgcaauggcugu

SEQ ID NO: 2449244 - RNA, 19 nt, Homo sapiens
  misc_RNA (1)...(19): siRNA sense strand
ccccaaagucugagagugu

SEQ ID NO: 2449245 - RNA, 19 nt, Homo sapiens
  misc_RNA (1)...(19): siRNA sense strand
guguagaagacaagaauau

SEQ ID NO: 2449246 - RNA, 19 nt, Homo sapiens
  misc_RNA (1)...(19): siRNA sense strand
gagcaaaagaaguaggaau

SEQ ID NO: 2449247 - RNA, 19 nt, Homo sapiens
  misc_RNA (1)...(19): siRNA sense strand
gaauaacuggagugggcaa

SEQ ID NO: 2449248 - RNA, 19 nt, Homo sapiens
  misc_RNA (1)...(19): siRNA sense strand
agaacauguuucaaggauu

SEQ ID NO: 2449249 - RNA, 19 nt, Homo sapiens
  misc_RNA (1)...(19): siRNA sense strand
caugaagaccugaggaagu

SEQ ID NO: 2449250 - RNA, 19 nt, Homo sapiens
  misc_RNA (1)...(19): siRNA sense strand
uugcaauugaccuggaaua

SEQ ID NO: 2449251 - RNA, 19 nt, Homo sapiens
  misc_RNA (1)...(19): siRNA sense strand
agauuguaguggaggaguu

SEQ ID NO: 2449252 - RNA, 19 nt, Homo sapiens
  misc_RNA (1)...(19): siRNA sense strand
cauuaaguuuggagcagau

SEQ ID NO: 2449253 - RNA, 19 nt, Homo sapiens
  misc_RNA (1)...(19): siRNA sense strand
acgucaagaaagaggcaau

SEQ ID NO: 2449254 - RNA, 19 nt, Homo sapiens
  misc_RNA (1)...(19): siRNA sense strand
gaguaggaggcacaggaaa

SEQ ID NO: 2449255 - RNA, 19 nt, Homo sapiens
  misc_RNA (1)...(19): siRNA sense strand
cugaggaaguuguacaaaa

SEQ ID NO: 2449256 - RNA, 19 nt, Homo sapiens
  misc_RNA (1)...(19): siRNA sense strand
caugccugauauagagaaa

SEQ ID NO: 2449257 - RNA, 19 nt, Homo sapiens
  misc_RNA (1)...(19): siRNA sense strand
acaagagaucauugaguca

SEQ ID NO: 2449258 - RNA, 19 nt, Homo sapiens
  misc_RNA (1)...(19): siRNA sense strand
gucuuuaacuugagggacu

SEQ ID NO: 2449259 - RNA, 19 nt, Homo sapiens
  misc_RNA (1)...(19): siRNA sense strand
cagauaaagcugaucggau

SEQ ID NO: 2449260 - RNA, 19 nt, Homo sapiens
  misc_RNA (1)...(19): siRNA sense strand
agcaaaagaaguaggaauu

SEQ ID NO: 2449261 - RNA, 19 nt, Homo sapiens
  misc_RNA (1)...(19): siRNA sense strand
gguguagaagacaagaaua

SEQ ID NO: 2449262 - RNA, 19 nt, Homo sapiens
  misc_RNA (1)...(19): siRNA sense strand
cgagguaggaugugccaga

SEQ ID NO: 2449263 - RNA, 19 nt, Homo sapiens
  misc_RNA (1)...(19): siRNA sense strand
caccagaccaagagcaaaa

SEQ ID NO: 2449264 - RNA, 19 nt, Homo sapiens
  misc_RNA (1)...(19): siRNA sense strand
acacagugcgcuaugggua

SEQ ID NO: 2449265 - RNA, 19 nt, Homo sapiens
  misc_RNA (1)...(19): siRNA sense strand
uugaauaagcccaucauau

SEQ ID NO: 2449266 - RNA, 19 nt, Homo sapiens
  misc_RNA (1)...(19): siRNA sense strand
ggggauuuuaugacagaaa

SEQ ID NO: 2449267 - RNA, 19 nt, Homo sapiens
  misc_RNA (1)...(19): siRNA sense strand
uggcugguguagaagacaa

SEQ ID NO: 2449268 - RNA, 19 nt, Homo sapiens
  misc_RNA (1)...(19): siRNA sense strand
acucaggugaagugccuaa

SEQ ID NO: 2449269 - RNA, 19 nt, Homo sapiens
  misc_RNA (1)...(19): siRNA sense strand
aggaugaacuggagcaggu

SEQ ID NO: 2449270 - RNA, 19 nt, Homo sapiens
  misc_RNA (1)...(19): siRNA sense strand
ggguggaaaccuaacugaa

SEQ ID NO: 2449271 - RNA, 19 nt, Homo sapiens
  misc_RNA (1)...(19): siRNA sense strand
aggugaagugccuaauuua

SEQ ID NO: 2449272 - RNA, 19 nt, Homo sapiens
  misc_RNA (1)...(19): siRNA sense strand
cugcaaauguucuacagga

SEQ ID NO: 2449273 - RNA, 19 nt, Homo sapiens
  misc_RNA (1)...(19): siRNA sense strand
ugaggaaguuguacaaaau

SEQ ID NO: 2449274 - RNA, 19 nt, Homo sapiens
  misc_RNA (1)...(19): siRNA sense strand
gccaccagaccaagagcaa

SEQ ID NO: 2449275 - RNA, 19 nt, Homo sapiens
  misc_RNA (1)...(19): siRNA sense strand
cugcaaggacacaagagau

SEQ ID NO: 2449276 - RNA, 19 nt, Homo sapiens
  misc_RNA (1)...(19): siRNA sense strand
uguuggaguaggaggcaca

SEQ ID NO: 2449277 - RNA, 19 nt, Homo sapiens
  misc_RNA (1)...(19): siRNA sense strand
auggguaucuaauggaaaa

SEQ ID NO: 2449278 - RNA, 19 nt, Homo sapiens
  misc_RNA (1)...(19): siRNA sense strand
accaagagcaaaagaagua

SEQ ID NO: 2449279 - RNA, 19 nt, Homo sapiens
  misc_RNA (1)...(19): siRNA sense strand
cagaugacgaugauggaaa

SEQ ID NO: 2449280 - RNA, 19 nt, Homo sapiens
  misc_RNA (1)...(19): siRNA sense strand
gaauaauccuccaggcuga

SEQ ID NO: 2449281 - RNA, 19 nt, Homo sapiens
  misc_RNA (1)...(19): siRNA sense strand
gguucaaagcauucaggua

SEQ ID NO: 2449282 - RNA, 19 nt, Homo sapiens
  misc_RNA (1)...(19): siRNA sense strand
agguagaacuggaagccga

SEQ ID NO: 2449283 - RNA, 19 nt, Homo sapiens
  misc_RNA (1)...(19): siRNA sense strand
gaaaaugaagaguggauau

SEQ ID NO: 2449284 - RNA, 19 nt, Homo sapiens
  misc_RNA (1)...(19): siRNA sense strand
cugcaguacagaaagcaaa

SEQ ID NO: 2449285 - RNA, 19 nt, Homo sapiens
  misc_RNA (1)...(19): siRNA sense strand
aggagaaugagaaggugaa

SEQ ID NO: 2449286 - RNA, 19 nt, Homo sapiens
  misc_RNA (1)...(19): siRNA sense strand
uggcuaaacaguuggcaga

SEQ ID NO: 2449287 - RNA, 19 nt, Homo sapiens
  misc_RNA (1)...(19): siRNA sense strand
acagaaagcaaauggccau

SEQ ID NO: 2449288 - RNA, 19 nt, Homo sapiens
  misc_RNA (1)...(19): siRNA sense strand
gcagaaaggaaaaugaaga

SEQ ID NO: 2449289 - RNA, 19 nt, Homo sapiens
  misc_RNA (1)...(19): siRNA sense strand
cagacaugguucaaagcau

SEQ ID NO: 2449290 - RNA, 19 nt, Homo sapiens
  misc_RNA (1)...(19): siRNA sense strand
gaagaaucucugaguacau

SEQ ID NO: 2449291 - RNA, 19 nt, Homo sapiens
  misc_RNA (1)...(19): siRNA sense strand
augagaaggugaagaccga

SEQ ID NO: 2449292 - RNA, 19 nt, Homo sapiens
  misc_RNA (1)...(19): siRNA sense strand
acucaaguaucaagggcca

SEQ ID NO: 2449293 - RNA, 19 nt, Homo sapiens
  misc_RNA (1)...(19): siRNA sense strand
gggaucaauggcaguuaaa

SEQ ID NO: 2449294 - RNA, 19 nt, Homo sapiens
  misc_RNA (1)...(19): siRNA sense strand
agaguggauaugugcaaua

SEQ ID NO: 2449295 - RNA, 19 nt, Homo sapiens
  misc_RNA (1)...(19): siRNA sense strand
ugauagauccacagacuca

SEQ ID NO: 2449296 - RNA, 19 nt, Homo sapiens
  misc_RNA (1)...(19): siRNA sense strand
ggcugagagcagaaaggaa

SEQ ID NO: 2449297 - RNA, 19 nt, Homo sapiens
  misc_RNA (1)...(19): siRNA sense strand
ccgacaacccugaggcagu

SEQ ID NO: 2449298 - RNA, 19 nt, Homo sapiens
  misc_RNA (1)...(19): siRNA sense strand
ccaaagugguggaugagcu

SEQ ID NO: 2449299 - RNA, 19 nt, Homo sapiens
  misc_RNA (1)...(19): siRNA sense strand
auucagagauggaaaauga

SEQ ID NO: 2449300 - RNA, 19 nt, Homo sapiens
  misc_RNA (1)...(19): siRNA sense strand
uuuaugaagcgaugagaca

SEQ ID NO: 2449301 - RNA, 19 nt, Homo sapiens
  misc_RNA (1)...(19): siRNA sense strand
caugauaggcuuugcccau

SEQ ID NO: 2449302 - RNA, 19 nt, Homo sapiens
  misc_RNA (1)...(19): siRNA sense strand
aagugguggaugagcuuaa

SEQ ID NO: 2449303 - RNA, 19 nt, Homo sapiens
  misc_RNA (1)...(19): siRNA sense strand
aggaaaaugaagaguggau

SEQ ID NO: 2449304 - RNA, 19 nt, Homo sapiens
  misc_RNA (1)...(19): siRNA sense strand
aaggagaaugagaagguga

SEQ ID NO: 2449305 - RNA, 19 nt, Homo sapiens
  misc_RNA (1)...(19): siRNA sense strand
agaagggagcagagauguu

SEQ ID NO: 2449306 - RNA, 19 nt, Homo sapiens
  misc_RNA (1)...(19): siRNA sense strand
gaggaggcguugcaggaca

SEQ ID NO: 2449307 - RNA, 19 nt, Homo sapiens
  misc_RNA (1)...(19): siRNA sense strand
cagagauggaaaaugaaaa

SEQ ID NO: 2449308 - RNA, 19 nt, Homo sapiens
  misc_RNA (1)...(19): siRNA sense strand
guuaaaacagacagcacua

SEQ ID NO: 2449309 - RNA, 19 nt, Homo sapiens
  misc_RNA (1)...(19): siRNA sense strand
uggugaaacugaggaugaa

SEQ ID NO: 2449310 - RNA, 19 nt, Homo sapiens
  misc_RNA (1)...(19): siRNA sense strand
ggaaaaugaagaguggaua

SEQ ID NO: 2449311 - RNA, 19 nt, Homo sapiens
  misc_RNA (1)...(19): siRNA sense strand
aggugaugaagaaguaauu

SEQ ID NO: 2449312 - RNA, 19 nt, Homo sapiens
  misc_RNA (1)...(19): siRNA sense strand
agaucuaccugaccgacaa

SEQ ID NO: 2449313 - RNA, 19 nt, Homo sapiens
  misc_RNA (1)...(19): siRNA sense strand
cucagaaggcgaaaagaua

SEQ ID NO: 2449314 - RNA, 19 nt, Homo sapiens
  misc_RNA (1)...(19): siRNA sense strand
cgaucaaccagaugacgau

SEQ ID NO: 2449315 - RNA, 19 nt, Homo sapiens
  misc_RNA (1)...(19): siRNA sense strand
ucuauggagcccagaauga

SEQ ID NO: 2449316 - RNA, 19 nt, Homo sapiens
  misc_RNA (1)...(19): siRNA sense strand
gcggaaaagaugcgggugu

SEQ ID NO: 2449317 - RNA, 19 nt, Homo sapiens
  misc_RNA (1)...(19): siRNA sense strand
aggagaagguuguaggcau

SEQ ID NO: 2449318 - RNA, 19 nt, Homo sapiens
  misc_RNA (1)...(19): siRNA sense strand
cagcaaaccuggaggagcu

SEQ ID NO: 2449319 - RNA, 19 nt, Homo sapiens
  misc_RNA (1)...(19): siRNA sense strand
cugcagaggaacaggguca

SEQ ID NO: 2449320 - RNA, 19 nt, Homo sapiens
  misc_RNA (1)...(19): siRNA sense strand
gcaccaagcaugugaggca

SEQ ID NO: 2449321 - RNA, 19 nt, Homo sapiens
  misc_RNA (1)...(19): siRNA sense strand
ggagaagguuguaggcaug

SEQ ID NO: 2449322 - RNA, 19 nt, Homo sapiens
  misc_RNA (1)...(19): siRNA sense strand
cgugacgucuggugggcaa

SEQ ID NO: 2449323 - RNA, 19 nt, Homo sapiens
  misc_RNA (1)...(19): siRNA sense strand
ccagacagacuucgggcaa

SEQ ID NO: 2449324 - RNA, 19 nt, Homo sapiens
  misc_RNA (1)...(19): siRNA sense strand
gaaagaagagccugggcca

SEQ ID NO: 2449325 - RNA, 19 nt, Homo sapiens
  misc_RNA (1)...(19): siRNA sense strand
agguguacuuagauggaga

SEQ ID NO: 2449326 - RNA, 19 nt, Homo sapiens
  misc_RNA (1)...(19): siRNA sense strand
ccuuggagcuggagagcac

SEQ ID NO: 2449327 - RNA, 19 nt, Homo sapiens
  misc_RNA (1)...(19): siRNA sense strand
gugacaugccagaggucuu

SEQ ID NO: 2449328 - RNA, 19 nt, Homo sapiens
  misc_RNA (1)...(19): siRNA sense strand
cccagaagcaggaggagca

SEQ ID NO: 2449329 - RNA, 19 nt, Homo sapiens
  misc_RNA (1)...(19): siRNA sense strand
gccaugaagcaguacgaau

SEQ ID NO: 2449330 - RNA, 19 nt, Homo sapiens
  misc_RNA (1)...(19): siRNA sense strand
gaggagcugcagaggaaca

SEQ ID NO: 2449331 - RNA, 19 nt, Homo sapiens
  misc_RNA (1)...(19): siRNA sense strand
ggaaggagacgcaccgcuu

SEQ ID NO: 2449332 - RNA, 19 nt, Homo sapiens
  misc_RNA (1)...(19): siRNA sense strand
ggaaaguguuggaugucag

SEQ ID NO: 2449333 - RNA, 19 nt, Homo sapiens
  misc_RNA (1)...(19): siRNA sense strand
cagcaaaccuggaggagcu

SEQ ID NO: 2449334 - RNA, 19 nt, Homo sapiens
  misc_RNA (1)...(19): siRNA sense strand
cugcagaggaacaggguca

SEQ ID NO: 2449335 - RNA, 19 nt, Homo sapiens
  misc_RNA (1)...(19): siRNA sense strand
gcaccaagcaugugaggca

SEQ ID NO: 2449336 - RNA, 19 nt, Homo sapiens
  misc_RNA (1)...(19): siRNA sense strand
cgugacgucuggugggcaa

SEQ ID NO: 2449337 - RNA, 19 nt, Homo sapiens
  misc_RNA (1)...(19): siRNA sense strand
ccagacagacuucgggcaa

SEQ ID NO: 2449338 - RNA, 19 nt, Homo sapiens
  misc_RNA (1)...(19): siRNA sense strand
agguguacuuagauggaga

SEQ ID NO: 2449339 - RNA, 19 nt, Homo sapiens
  misc_RNA (1)...(19): siRNA sense strand
cccagaagcaggaggagca

SEQ ID NO: 2449340 - RNA, 19 nt, Homo sapiens
  misc_RNA (1)...(19): siRNA sense strand
gccaugaagcaguacgaau

SEQ ID NO: 2449341 - RNA, 19 nt, Homo sapiens
  misc_RNA (1)...(19): siRNA sense strand
gaggagcugcagaggaaca

SEQ ID NO: 2449342 - RNA, 19 nt, Homo sapiens
  misc_RNA (1)...(19): siRNA sense strand
ggaaggagacgcaccgcuu

SEQ ID NO: 2449343 - RNA, 19 nt, Homo sapiens
  misc_RNA (1)...(19): siRNA sense strand
ggaaaguguuggaugucag

SEQ ID NO: 2449344 - RNA, 19 nt, Homo sapiens
  misc_RNA (1)...(19): siRNA sense strand
gaguaugccuacagcgaca

SEQ ID NO: 2449345 - RNA, 19 nt, Homo sapiens
  misc_RNA (1)...(19): siRNA sense strand
agaucaugaaagugaacua

SEQ ID NO: 2449346 - RNA, 19 nt, Homo sapiens
  misc_RNA (1)...(19): siRNA sense strand
gagcagaagaggagggacg

SEQ ID NO: 2449347 - RNA, 19 nt, Homo sapiens
  misc_RNA (1)...(19): siRNA sense strand
gaguaugccuacagcgaca

SEQ ID NO: 2449348 - RNA, 19 nt, Homo sapiens
  misc_RNA (1)...(19): siRNA sense strand
agaucaugaaagugaacua

SEQ ID NO: 2449349 - RNA, 19 nt, Homo sapiens
  misc_RNA (1)...(19): siRNA sense strand
gagcagaagaggagggacg

SEQ ID NO: 2449350 - RNA, 19 nt, Homo sapiens
  misc_RNA (1)...(19): siRNA sense strand
gaguaugccuacagcgaca

SEQ ID NO: 2449351 - RNA, 19 nt, Homo sapiens
  misc_RNA (1)...(19): siRNA sense strand
agaucaugaaagugaacua

SEQ ID NO: 2449352 - RNA, 19 nt, Homo sapiens
  misc_RNA (1)...(19): siRNA sense strand
gagcagaagaggagggacg

SEQ ID NO: 2449353 - RNA, 19 nt, Homo sapiens
  misc_RNA (1)...(19): siRNA sense strand
gcauauauuuaaagggaga

SEQ ID NO: 2449354 - RNA, 19 nt, Homo sapiens
  misc_RNA (1)...(19): siRNA sense strand
ggaaaaugucgaugcaaaa

SEQ ID NO: 2449355 - RNA, 19 nt, Homo sapiens
  misc_RNA (1)...(19): siRNA sense strand
ggucaauuccagggagaua

SEQ ID NO: 2449356 - RNA, 19 nt, Homo sapiens
  misc_RNA (1)...(19): siRNA sense strand
cagaaauucaccacagaaa

SEQ ID NO: 2449357 - RNA, 19 nt, Homo sapiens
  misc_RNA (1)...(19): siRNA sense strand
cuacagaaauauagcacca

SEQ ID NO: 2449358 - RNA, 19 nt, Homo sapiens
  misc_RNA (1)...(19): siRNA sense strand
uggaaaaugucgaugcaaa

SEQ ID NO: 2449359 - RNA, 19 nt, Homo sapiens
  misc_RNA (1)...(19): siRNA sense strand
uagagauagcccagaauaa

SEQ ID NO: 2449360 - RNA, 19 nt, Homo sapiens
  misc_RNA (1)...(19): siRNA sense strand
ggguauuauugaugcuauu

SEQ ID NO: 2449361 - RNA, 19 nt, Homo sapiens
  misc_RNA (1)...(19): siRNA sense strand
gagaagacuuggaagcuca

SEQ ID NO: 2449362 - RNA, 19 nt, Homo sapiens
  misc_RNA (1)...(19): siRNA sense strand
ccugaugggaggaguuaua

SEQ ID NO: 2449363 - RNA, 19 nt, Homo sapiens
  misc_RNA (1)...(19): siRNA sense strand
ggugagaaaacaagauaaa

SEQ ID NO: 2449364 - RNA, 19 nt, Homo sapiens
  misc_RNA (1)...(19): siRNA sense strand
gaagaaagccacagccuga

SEQ ID NO: 2449365 - RNA, 19 nt, Homo sapiens
  misc_RNA (1)...(19): siRNA sense strand
caguagaggaagaugauga

SEQ ID NO: 2449366 - RNA, 19 nt, Homo sapiens
  misc_RNA (1)...(19): siRNA sense strand
gugguaagacugugccaaa

SEQ ID NO: 2449367 - RNA, 19 nt, Homo sapiens
  misc_RNA (1)...(19): siRNA sense strand
aagaaggcaaggagagaau

SEQ ID NO: 2449368 - RNA, 19 nt, Homo sapiens
  misc_RNA (1)...(19): siRNA sense strand
uugcaaaacucaugggaga

SEQ ID NO: 2449369 - RNA, 19 nt, Homo sapiens
  misc_RNA (1)...(19): siRNA sense strand
ugaugaaucgguuggcaaa

SEQ ID NO: 2449370 - RNA, 19 nt, Homo sapiens
  misc_RNA (1)...(19): siRNA sense strand
cauggaaaguauucagaca

SEQ ID NO: 2449371 - RNA, 19 nt, Homo sapiens
  misc_RNA (1)...(19): siRNA sense strand
ugaucuagcaaguggccaa

SEQ ID NO: 2449372 - RNA, 19 nt, Homo sapiens
  misc_RNA (1)...(19): siRNA sense strand
gggaauaucuuacagacca

SEQ ID NO: 2449373 - RNA, 19 nt, Homo sapiens
  misc_RNA (1)...(19): siRNA sense strand
ggaauaucuuacagaccau

SEQ ID NO: 2449374 - RNA, 19 nt, Homo sapiens
  misc_RNA (1)...(19): siRNA sense strand
ccuuagagauagcccagaa

SEQ ID NO: 2449375 - RNA, 19 nt, Homo sapiens
  misc_RNA (1)...(19): siRNA sense strand
uggacaaagugguaagacu

SEQ ID NO: 2449376 - RNA, 19 nt, Homo sapiens
  misc_RNA (1)...(19): siRNA sense strand
agagaauguaugaagaaca

SEQ ID NO: 2449377 - RNA, 19 nt, Homo sapiens
  misc_RNA (1)...(19): siRNA sense strand
cuccuugcauggugagaaa

SEQ ID NO: 2449378 - RNA, 19 nt, Homo sapiens
  misc_RNA (1)...(19): siRNA sense strand
cauugauagccuuaugaaa

SEQ ID NO: 2449379 - RNA, 19 nt, Homo sapiens
  misc_RNA (1)...(19): siRNA sense strand
aggagagaauguaugaaga

SEQ ID NO: 2449380 - RNA, 19 nt, Homo sapiens
  misc_RNA (1)...(19): siRNA sense strand
ugaugaaguuaaagcacga

SEQ ID NO: 2449381 - RNA, 19 nt, Homo sapiens
  misc_RNA (1)...(19): siRNA sense strand
auucagaaaggcauaguua

SEQ ID NO: 2449382 - RNA, 19 nt, Homo sapiens
  misc_RNA (1)...(19): siRNA sense strand
gcauagucucauugaacau

SEQ ID NO: 2449383 - RNA, 19 nt, Homo sapiens
  misc_RNA (1)...(19): siRNA sense strand
guucaaaugucaauggaag

SEQ ID NO: 2449384 - RNA, 19 nt, Homo sapiens
  misc_RNA (1)...(19): siRNA sense strand
ccuguucggucuugugaua

SEQ ID NO: 2449385 - RNA, 19 nt, Homo sapiens
  misc_RNA (1)...(19): siRNA sense strand
ccaccagacaauagacuga

SEQ ID NO: 2449386 - RNA, 19 nt, Homo sapiens
  misc_RNA (1)...(19): siRNA sense strand
cagaaacccugguggucga

SEQ ID NO: 2449387 - RNA, 19 nt, Homo sapiens
  misc_RNA (1)...(19): siRNA sense strand
agauuugugcagagaauga

SEQ ID NO: 2449388 - RNA, 19 nt, Homo sapiens
  misc_RNA (1)...(19): siRNA sense strand
acagaacaucacaggacua

SEQ ID NO: 2449389 - RNA, 19 nt, Homo sapiens
  misc_RNA (1)...(19): siRNA sense strand
aggcaaggagagaauguau

SEQ ID NO: 2449390 - RNA, 19 nt, Homo sapiens
  misc_RNA (1)...(19): siRNA sense strand
ucuaauucagaaaggcaua

SEQ ID NO: 2449391 - RNA, 19 nt, Homo sapiens
  misc_RNA (1)...(19): siRNA sense strand
gcucugacccagugcuuau

SEQ ID NO: 2449392 - RNA, 19 nt, Homo sapiens
  misc_RNA (1)...(19): siRNA sense strand
gaagaacagucacaggaca

SEQ ID NO: 2449393 - RNA, 19 nt, Homo sapiens
  misc_RNA (1)...(19): siRNA sense strand
agaccauaccucauaacaa

SEQ ID NO: 2449394 - RNA, 19 nt, Homo sapiens
  misc_RNA (1)...(19): siRNA sense strand
cuaaucagcuugugggaug

SEQ ID NO: 2449395 - RNA, 19 nt, Homo sapiens
  misc_RNA (1)...(19): siRNA sense strand
ggugaaaaugucaaaacua

SEQ ID NO: 2449396 - RNA, 19 nt, Homo sapiens
  misc_RNA (1)...(19): siRNA sense strand
ggacaaagugguaagacug

SEQ ID NO: 2449397 - RNA, 19 nt, Homo sapiens
  misc_RNA (1)...(19): siRNA sense strand
gagacccaguagaggaaga

SEQ ID NO: 2449398 - RNA, 19 nt, Homo sapiens
  misc_RNA (1)...(19): siRNA sense strand
acucaaugaauggcagaaa

SEQ ID NO: 2449399 - RNA, 19 nt, Homo sapiens
  misc_RNA (1)...(19): siRNA sense strand
agacaaaacuaucguacca

SEQ ID NO: 2449400 - RNA, 19 nt, Homo sapiens
  misc_RNA (1)...(19): siRNA sense strand
cgggauguguuugggacua

SEQ ID NO: 2449401 - RNA, 19 nt, Homo sapiens
  misc_RNA (1)...(19): siRNA sense strand
gauugauggcagcagggaa

SEQ ID NO: 2449402 - RNA, 19 nt, Homo sapiens
  misc_RNA (1)...(19): siRNA sense strand
augaugaaucgguuggcaa

SEQ ID NO: 2449403 - RNA, 19 nt, Homo sapiens
  misc_RNA (1)...(19): siRNA sense strand
ccugaaagaccuccaccaa

SEQ ID NO: 2449404 - RNA, 19 nt, Homo sapiens
  misc_RNA (1)...(19): siRNA sense strand
acccagugcuuaugcggaa

SEQ ID NO: 2449405 - RNA, 19 nt, Homo sapiens
  misc_RNA (1)...(19): siRNA sense strand
gcggaaacacagacgccau

SEQ ID NO: 2449406 - RNA, 19 nt, Homo sapiens
  misc_RNA (1)...(19): siRNA sense strand
caggacugcaccagaaauu

SEQ ID NO: 2449407 - RNA, 19 nt, Homo sapiens
  misc_RNA (1)...(19): siRNA sense strand
uaaagaaggcaaggagaga

SEQ ID NO: 2449408 - RNA, 19 nt, Homo sapiens
  misc_RNA (1)...(19): siRNA sense strand
uggaaaguauucagacagu

SEQ ID NO: 2449409 - RNA, 19 nt, Homo sapiens
  misc_RNA (1)...(19): siRNA sense strand
cgauugggacagugggcca

SEQ ID NO: 2449410 - RNA, 19 nt, Homo sapiens
  misc_RNA (1)...(19): siRNA sense strand
uagaggaagaugaugauga

SEQ ID NO: 2449411 - RNA, 19 nt, Homo sapiens
  misc_RNA (1)...(19): siRNA sense strand
caaccaucucauugucaua

SEQ ID NO: 2449412 - RNA, 19 nt, Homo sapiens
  misc_RNA (1)...(19): siRNA sense strand
ugucaaaacuaacagaaca

SEQ ID NO: 2449413 - RNA, 19 nt, Homo sapiens
  misc_RNA (1)...(19): siRNA sense strand
uugaagaggugaagagagc

SEQ ID NO: 2449414 - RNA, 19 nt, Homo sapiens
  misc_RNA (1)...(19): siRNA sense strand
gaucuaauucagaaaggca

SEQ ID NO: 2449415 - RNA, 19 nt, Homo sapiens
  misc_RNA (1)...(19): siRNA sense strand
uagaaggagcuaaggucuu

SEQ ID NO: 2449416 - RNA, 19 nt, Homo sapiens
  misc_RNA (1)...(19): siRNA sense strand
ucagagaagaaaucaaaca

SEQ ID NO: 2449417 - RNA, 19 nt, Homo sapiens
  misc_RNA (1)...(19): siRNA sense strand
ccucugaucccgugccauu

SEQ ID NO: 2449418 - RNA, 19 nt, Homo sapiens
  misc_RNA (1)...(19): siRNA sense strand
ccaaaaggagcaagagaaa

SEQ ID NO: 2449419 - RNA, 19 nt, Homo sapiens
  misc_RNA (1)...(19): siRNA sense strand
agagaugaacuuagggcaa

SEQ ID NO: 2449420 - RNA, 19 nt, Homo sapiens
  misc_RNA (1)...(19): siRNA sense strand
ggaaagaguaugagcugga

SEQ ID NO: 2449421 - RNA, 19 nt, Homo sapiens
  misc_RNA (1)...(19): siRNA sense strand
aaaggaaagacaagaacaa

SEQ ID NO: 2449422 - RNA, 19 nt, Homo sapiens
  misc_RNA (1)...(19): siRNA sense strand
agaacacaccagagaaaga

SEQ ID NO: 2449423 - RNA, 19 nt, Homo sapiens
  misc_RNA (1)...(19): siRNA sense strand
cagcaugcuacgugaugaa

SEQ ID NO: 2449424 - RNA, 19 nt, Homo sapiens
  misc_RNA (1)...(19): siRNA sense strand
ugacauacuuuggaggcaa

SEQ ID NO: 2449425 - RNA, 19 nt, Homo sapiens
  misc_RNA (1)...(19): siRNA sense strand
cauugauguuucugaucua

SEQ ID NO: 2449426 - RNA, 19 nt, Homo sapiens
  misc_RNA (1)...(19): siRNA sense strand
agaugaagagacaggugaa

SEQ ID NO: 2449427 - RNA, 19 nt, Homo sapiens
  misc_RNA (1)...(19): siRNA sense strand
cugaaguggaagagcuaga

SEQ ID NO: 2449428 - RNA, 19 nt, Homo sapiens
  misc_RNA (1)...(19): siRNA sense strand
cagugauucugaaguggaa

SEQ ID NO: 2449429 - RNA, 19 nt, Homo sapiens
  misc_RNA (1)...(19): siRNA sense strand
cguaggagggguaagaaua

SEQ ID NO: 2449430 - RNA, 19 nt, Homo sapiens
  misc_RNA (1)...(19): siRNA sense strand
cuucagucagcgacggaaa

SEQ ID NO: 2449431 - RNA, 19 nt, Homo sapiens
  misc_RNA (1)...(19): siRNA sense strand
ccuuauaucucgaaguuuu

SEQ ID NO: 2449432 - RNA, 19 nt, Homo sapiens
  misc_RNA (1)...(19): siRNA sense strand
gaguaagucgagaaguauu

SEQ ID NO: 2449433 - RNA, 19 nt, Homo sapiens
  misc_RNA (1)...(19): siRNA sense strand
uggaagugucaaacagaau

SEQ ID NO: 2449434 - RNA, 19 nt, Homo sapiens
  misc_RNA (1)...(19): siRNA sense strand
agaauaaaguggcugcuca

SEQ ID NO: 2449435 - RNA, 19 nt, Homo sapiens
  misc_RNA (1)...(19): siRNA sense strand
gggcaaaagcucuccauau

SEQ ID NO: 2449436 - RNA, 19 nt, Homo sapiens
  misc_RNA (1)...(19): siRNA sense strand
ugauuuagacgguaugcaa

SEQ ID NO: 2449437 - RNA, 19 nt, Homo sapiens
  misc_RNA (1)...(19): siRNA sense strand
ggguaagaauaaaguggcu

SEQ ID NO: 2449438 - RNA, 19 nt, Homo sapiens
  misc_RNA (1)...(19): siRNA sense strand
cuguugauuuagacgguau

SEQ ID NO: 2449439 - RNA, 19 nt, Homo sapiens
  misc_RNA (1)...(19): siRNA sense strand
ugaaaaggaaagacaagaa

SEQ ID NO: 2449440 - RNA, 19 nt, Homo sapiens
  misc_RNA (1)...(19): siRNA sense strand
guacauucuucuggggaua

SEQ ID NO: 2449441 - RNA, 19 nt, Homo sapiens
  misc_RNA (1)...(19): siRNA sense strand
ugacaaaagccuucaccua

SEQ ID NO: 2449442 - RNA, 19 nt, Homo sapiens
  misc_RNA (1)...(19): siRNA sense strand
auacuuuggaggcaagaua

SEQ ID NO: 2449443 - RNA, 19 nt, Homo sapiens
  misc_RNA (1)...(19): siRNA sense strand
cccugaaagcacagcagaa

SEQ ID NO: 2449444 - RNA, 19 nt, Homo sapiens
  misc_RNA (1)...(19): siRNA sense strand
cggaaaaccccauucacaa

SEQ ID NO: 2449445 - RNA, 19 nt, Homo sapiens
  misc_RNA (1)...(19): siRNA sense strand
uguccaaagagcaguucaa

SEQ ID NO: 2449446 - RNA, 19 nt, Homo sapiens
  misc_RNA (1)...(19): siRNA sense strand
acuuuggaggcaagauaua

SEQ ID NO: 2449447 - RNA, 19 nt, Homo sapiens
  misc_RNA (1)...(19): siRNA sense strand
aguaagucgagaaguauuu

SEQ ID NO: 2449448 - RNA, 19 nt, Homo sapiens
  misc_RNA (1)...(19): siRNA sense strand
aagaguaugagcuggaaaa

SEQ ID NO: 2449449 - RNA, 19 nt, Homo sapiens
  misc_RNA (1)...(19): siRNA sense strand
aggaaagacaagaacaacu

SEQ ID NO: 2449450 - RNA, 19 nt, Homo sapiens
  misc_RNA (1)...(19): siRNA sense strand
ucuuaaugcuuuugaggau

SEQ ID NO: 2449451 - RNA, 19 nt, Homo sapiens
  misc_RNA (1)...(19): siRNA sense strand
cugaaagcacagcagaauu

SEQ ID NO: 2449452 - RNA, 19 nt, Homo sapiens
  misc_RNA (1)...(19): siRNA sense strand
cuggaagugucaaacagaa

SEQ ID NO: 2449453 - RNA, 19 nt, Homo sapiens
  misc_RNA (1)...(19): siRNA sense strand
ugcauuaauucgggauaua

SEQ ID NO: 2449454 - RNA, 19 nt, Homo sapiens
  misc_RNA (1)...(19): siRNA sense strand
cggcauuucacuaaacaca

SEQ ID NO: 2449455 - RNA, 19 nt, Homo sapiens
  misc_RNA (1)...(19): siRNA sense strand
guaggagggguaagaauaa

SEQ ID NO: 2449456 - RNA, 19 nt, Homo sapiens
  misc_RNA (1)...(19): siRNA sense strand
aggacauggauuugauuga

SEQ ID NO: 2449457 - RNA, 19 nt, Homo sapiens
  misc_RNA (1)...(19): siRNA sense strand
agacaagaacaacuccaaa

SEQ ID NO: 2449458 - RNA, 19 nt, Homo sapiens
  misc_RNA (1)...(19): siRNA sense strand
gccuguaaguccuggucau

SEQ ID NO: 2449459 - RNA, 19 nt, Homo sapiens
  misc_RNA (1)...(19): siRNA sense strand
uggaagagcuagauagugc

SEQ ID NO: 2449460 - RNA, 19 nt, Homo sapiens
  misc_RNA (1)...(19): siRNA sense strand
gggauaugguacaacccuu

SEQ ID NO: 2449461 - RNA, 19 nt, Homo sapiens
  misc_RNA (1)...(19): siRNA sense strand
ccugaaagcacagcagaau

SEQ ID NO: 2449462 - RNA, 19 nt, Homo sapiens
  misc_RNA (1)...(19): siRNA sense strand
gugaauacucccugcagca

SEQ ID NO: 2449463 - RNA, 19 nt, Homo sapiens
  misc_RNA (1)...(19): siRNA sense strand
ggaugaaggaaguagggaa

SEQ ID NO: 2449464 - RNA, 19 nt, Homo sapiens
  misc_RNA (1)...(19): siRNA sense strand
acuaauugucccagauaua

SEQ ID NO: 2449465 - RNA, 19 nt, Homo sapiens
  misc_RNA (1)...(19): siRNA sense strand
aggaaaagacaguugaaaa

SEQ ID NO: 2449466 - RNA, 19 nt, Homo sapiens
  misc_RNA (1)...(19): siRNA sense strand
aggaggaggaggaggaaga

SEQ ID NO: 2449467 - RNA, 19 nt, Homo sapiens
  misc_RNA (1)...(19): siRNA sense strand
augaagaggaggaggagga

SEQ ID NO: 2449468 - RNA, 19 nt, Homo sapiens
  misc_RNA (1)...(19): siRNA sense strand
gaaccgaaguuuagcaaug

SEQ ID NO: 2449469 - RNA, 19 nt, Homo sapiens
  misc_RNA (1)...(19): siRNA sense strand
ggaccagaaacuagagaac

SEQ ID NO: 2449470 - RNA, 19 nt, Homo sapiens
  misc_RNA (1)...(19): siRNA sense strand
gaaguuuagcaauggaaaa

SEQ ID NO: 2449471 - RNA, 19 nt, Homo sapiens
  misc_RNA (1)...(19): siRNA sense strand
cgaaguuuagcaauggaaa

SEQ ID NO: 2449472 - RNA, 19 nt, Homo sapiens
  misc_RNA (1)...(19): siRNA sense strand
acggucaauuagugagauu

SEQ ID NO: 2449473 - RNA, 19 nt, Homo sapiens
  misc_RNA (1)...(19): siRNA sense strand
ggacaugugcuaugggaug

SEQ ID NO: 2449474 - RNA, 19 nt, Homo sapiens
  misc_RNA (1)...(19): siRNA sense strand
aagaggaggaggaggagga

SEQ ID NO: 2449475 - RNA, 19 nt, Homo sapiens
  misc_RNA (1)...(19): siRNA sense strand
uugacacacuguauggaaa

SEQ ID NO: 2449476 - RNA, 19 nt, Homo sapiens
  misc_RNA (1)...(19): siRNA sense strand
aagucgaugccuauggaaa

SEQ ID NO: 2449477 - RNA, 19 nt, Homo sapiens
  misc_RNA (1)...(19): siRNA sense strand
guuugugaaccgaaguuua

SEQ ID NO: 2449478 - RNA, 19 nt, Homo sapiens
  misc_RNA (1)...(19): siRNA sense strand
auguagucaaagauggaaa

SEQ ID NO: 2449479 - RNA, 19 nt, Homo sapiens
  misc_RNA (1)...(19): siRNA sense strand
cuugguggaugcacggaaa

SEQ ID NO: 2449480 - RNA, 19 nt, Homo sapiens
  misc_RNA (1)...(19): siRNA sense strand
cagauauaccaguugugaa

SEQ ID NO: 2449481 - RNA, 19 nt, Homo sapiens
  misc_RNA (1)...(19): siRNA sense strand
cagcgagaugauacugaaa

SEQ ID NO: 2449482 - RNA, 19 nt, Homo sapiens
  misc_RNA (1)...(19): siRNA sense strand
augaugaagaggaggagga

SEQ ID NO: 2449483 - RNA, 19 nt, Homo sapiens
  misc_RNA (1)...(19): siRNA sense strand
ugacacacuguauggaaau

SEQ ID NO: 2449484 - RNA, 19 nt, Homo sapiens
  misc_RNA (1)...(19): siRNA sense strand
agaaacuagagaacaguau

SEQ ID NO: 2449485 - RNA, 19 nt, Homo sapiens
  misc_RNA (1)...(19): siRNA sense strand
auauaccaguugugaaaca

SEQ ID NO: 2449486 - RNA, 19 nt, Homo sapiens
  misc_RNA (1)...(19): siRNA sense strand
guauguagucaaagaugga

SEQ ID NO: 2449487 - RNA, 19 nt, Homo sapiens
  misc_RNA (1)...(19): siRNA sense strand
aggaaguagggaaaguauu

SEQ ID NO: 2449488 - RNA, 19 nt, Homo sapiens
  misc_RNA (1)...(19): siRNA sense strand
agaaaguaacucaugacau

SEQ ID NO: 2449489 - RNA, 19 nt, Homo sapiens
  misc_RNA (1)...(19): siRNA sense strand
guuacagaaugcagcagau

SEQ ID NO: 2449490 - RNA, 19 nt, Homo sapiens
  misc_RNA (1)...(19): siRNA sense strand
caguugugaaacaggauuu

SEQ ID NO: 2449491 - RNA, 19 nt, Homo sapiens
  misc_RNA (1)...(19): siRNA sense strand
gcuaugggaugaugggaag

SEQ ID NO: 2449492 - RNA, 19 nt, Homo sapiens
  misc_RNA (1)...(19): siRNA sense strand
gagugaucgguuacagaau

SEQ ID NO: 2449493 - RNA, 19 nt, Homo sapiens
  misc_RNA (1)...(19): siRNA sense strand
gcagagaacccgagaggga

SEQ ID NO: 2449494 - RNA, 19 nt, Homo sapiens
  misc_RNA (1)...(19): siRNA sense strand
ccaacauccuggugggaga

SEQ ID NO: 2449495 - RNA, 19 nt, Homo sapiens
  misc_RNA (1)...(19): siRNA sense strand
ucaacaacacagagggaga

SEQ ID NO: 2449496 - RNA, 19 nt, Homo sapiens
  misc_RNA (1)...(19): siRNA sense strand
gcaacaagagcaagcccaa

SEQ ID NO: 2449497 - RNA, 19 nt, Homo sapiens
  misc_RNA (1)...(19): siRNA sense strand
gcacaggacagacaggcua

SEQ ID NO: 2449498 - RNA, 19 nt, Homo sapiens
  misc_RNA (1)...(19): siRNA sense strand
uggcguacguggagcggau

SEQ ID NO: 2449499 - RNA, 19 nt, Homo sapiens
  misc_RNA (1)...(19): siRNA sense strand
acguggagcggaugaacua

SEQ ID NO: 2449500 - RNA, 19 nt, Homo sapiens
  misc_RNA (1)...(19): siRNA sense strand
cgagaaagugagaccacga

SEQ ID NO: 2449501 - RNA, 19 nt, Homo sapiens
  misc_RNA (1)...(19): siRNA sense strand
augaagaagcugaggcaug

SEQ ID NO: 2449502 - RNA, 19 nt, Homo sapiens
  misc_RNA (1)...(19): siRNA sense strand
agaaagugagaccacgaaa

SEQ ID NO: 2449503 - RNA, 19 nt, Homo sapiens
  misc_RNA (1)...(19): siRNA sense strand
ucgaguaccugcaggccuu

SEQ ID NO: 2449504 - RNA, 19 nt, Homo sapiens
  misc_RNA (1)...(19): siRNA sense strand
acgugaagcacuacaagau

SEQ ID NO: 2449505 - RNA, 19 nt, Homo sapiens
  misc_RNA (1)...(19): siRNA sense strand
gccaaggaugccugggaga

SEQ ID NO: 2449506 - RNA, 19 nt, Homo sapiens
  misc_RNA (1)...(19): siRNA sense strand
gcagagaacccgagaggga

SEQ ID NO: 2449507 - RNA, 19 nt, Homo sapiens
  misc_RNA (1)...(19): siRNA sense strand
ccaacauccuggugggaga

SEQ ID NO: 2449508 - RNA, 19 nt, Homo sapiens
  misc_RNA (1)...(19): siRNA sense strand
ucaacaacacagagggaga

SEQ ID NO: 2449509 - RNA, 19 nt, Homo sapiens
  misc_RNA (1)...(19): siRNA sense strand
gcaacaagagcaagcccaa

SEQ ID NO: 2449510 - RNA, 19 nt, Homo sapiens
  misc_RNA (1)...(19): siRNA sense strand
gcacaggacagacaggcua

SEQ ID NO: 2449511 - RNA, 19 nt, Homo sapiens
  misc_RNA (1)...(19): siRNA sense strand
uggcguacguggagcggau

SEQ ID NO: 2449512 - RNA, 19 nt, Homo sapiens
  misc_RNA (1)...(19): siRNA sense strand
acguggagcggaugaacua

SEQ ID NO: 2449513 - RNA, 19 nt, Homo sapiens
  misc_RNA (1)...(19): siRNA sense strand
cgagaaagugagaccacga

SEQ ID NO: 2449514 - RNA, 19 nt, Homo sapiens
  misc_RNA (1)...(19): siRNA sense strand
augaagaagcugaggcaug

SEQ ID NO: 2449515 - RNA, 19 nt, Homo sapiens
  misc_RNA (1)...(19): siRNA sense strand
agaaagugagaccacgaaa

SEQ ID NO: 2449516 - RNA, 19 nt, Homo sapiens
  misc_RNA (1)...(19): siRNA sense strand
ucgaguaccugcaggccuu

SEQ ID NO: 2449517 - RNA, 19 nt, Homo sapiens
  misc_RNA (1)...(19): siRNA sense strand
acgugaagcacuacaagau

SEQ ID NO: 2449518 - RNA, 19 nt, Homo sapiens
  misc_RNA (1)...(19): siRNA sense strand
gccaaggaugccugggaga

SEQ ID NO: 2449519 - RNA, 19 nt, Homo sapiens
  misc_RNA (1)...(19): siRNA sense strand
ggagaauuccuaugggcaa

SEQ ID NO: 2449520 - RNA, 19 nt, Homo sapiens
  misc_RNA (1)...(19): siRNA sense strand
agagagagguacaggcagu

SEQ ID NO: 2449521 - RNA, 19 nt, Homo sapiens
  misc_RNA (1)...(19): siRNA sense strand
aaggaaagaagcuggcaga

SEQ ID NO: 2449522 - RNA, 19 nt, Homo sapiens
  misc_RNA (1)...(19): siRNA sense strand
agauagugacucuuggcaa

SEQ ID NO: 2449523 - RNA, 19 nt, Homo sapiens
  misc_RNA (1)...(19): siRNA sense strand
cuuccaagucauugagagu

SEQ ID NO: 2449524 - RNA, 19 nt, Homo sapiens
  misc_RNA (1)...(19): siRNA sense strand
acuuacagcaagauaguga

SEQ ID NO: 2449525 - RNA, 19 nt, Homo sapiens
  misc_RNA (1)...(19): siRNA sense strand
gcuacaggaagguggucau

SEQ ID NO: 2449526 - RNA, 19 nt, Homo sapiens
  misc_RNA (1)...(19): siRNA sense strand
auugagagucuguaccaaa

SEQ ID NO: 2449527 - RNA, 19 nt, Homo sapiens
  misc_RNA (1)...(19): siRNA sense strand
cuccagagagagagguaca

SEQ ID NO: 2449528 - RNA, 19 nt, Homo sapiens
  misc_RNA (1)...(19): siRNA sense strand
gaaagaagcuggcagaguc

SEQ ID NO: 2449529 - RNA, 19 nt, Homo sapiens
  misc_RNA (1)...(19): siRNA sense strand
ccuaaacguacgugggcau

SEQ ID NO: 2449530 - RNA, 19 nt, Homo sapiens
  misc_RNA (1)...(19): siRNA sense strand
ggaagacauaagaagccaa

SEQ ID NO: 2449531 - RNA, 19 nt, Homo sapiens
  misc_RNA (1)...(19): siRNA sense strand
aguaagaaagcuccagaau

SEQ ID NO: 2449532 - RNA, 19 nt, Homo sapiens
  misc_RNA (1)...(19): siRNA sense strand
cguacgugggcaugaagua

SEQ ID NO: 2449533 - RNA, 19 nt, Homo sapiens
  misc_RNA (1)...(19): siRNA sense strand
guucaaagccucagccuug

SEQ ID NO: 2449534 - RNA, 19 nt, Homo sapiens
  misc_RNA (1)...(19): siRNA sense strand
agaaaaggcaacaggaaga

SEQ ID NO: 2449535 - RNA, 19 nt, Homo sapiens
  misc_RNA (1)...(19): siRNA sense strand
uggccagggcacucagaaa

SEQ ID NO: 2449536 - RNA, 19 nt, Homo sapiens
  misc_RNA (1)...(19): siRNA sense strand
cagaaauuacggaagaagu

SEQ ID NO: 2449537 - RNA, 19 nt, Homo sapiens
  misc_RNA (1)...(19): siRNA sense strand
cuauaauuggagaacggua

SEQ ID NO: 2449538 - RNA, 19 nt, Homo sapiens
  misc_RNA (1)...(19): siRNA sense strand
gcaacauucaacuggagau

SEQ ID NO: 2449539 - RNA, 19 nt, Homo sapiens
  misc_RNA (1)...(19): siRNA sense strand
aaagaaaaggcaacaggaa

SEQ ID NO: 2449540 - RNA, 19 nt, Homo sapiens
  misc_RNA (1)...(19): siRNA sense strand
gaacuaagauuuaaugcga

SEQ ID NO: 2449541 - RNA, 19 nt, Homo sapiens
  misc_RNA (1)...(19): siRNA sense strand
aaauaaaaucucagggaca

SEQ ID NO: 2449542 - RNA, 19 nt, Homo sapiens
  misc_RNA (1)...(19): siRNA sense strand
accaaguauagaugagaaa

SEQ ID NO: 2449543 - RNA, 19 nt, Homo sapiens
  misc_RNA (1)...(19): siRNA sense strand
ucagaacagaagaggaaga

SEQ ID NO: 2449544 - RNA, 19 nt, Homo sapiens
  misc_RNA (1)...(19): siRNA sense strand
acaauaaagacaagaugca

SEQ ID NO: 2449545 - RNA, 19 nt, Homo sapiens
  misc_RNA (1)...(19): siRNA sense strand
ucguugauguauauggaau

SEQ ID NO: 2449546 - RNA, 19 nt, Homo sapiens
  misc_RNA (1)...(19): siRNA sense strand
uggaggaaucugugucaau

SEQ ID NO: 2449547 - RNA, 19 nt, Homo sapiens
  misc_RNA (1)...(19): siRNA sense strand
augagaaaguagaucuuca

SEQ ID NO: 2449548 - RNA, 19 nt, Homo sapiens
  misc_RNA (1)...(19): siRNA sense strand
agaaguuuauggagcgcga

SEQ ID NO: 2449549 - RNA, 19 nt, Homo sapiens
  misc_RNA (1)...(19): siRNA sense strand
uugcauuaguucauguaga

SEQ ID NO: 2449550 - RNA, 19 nt, Homo sapiens
  misc_RNA (1)...(19): siRNA sense strand
cauccaacaaggagaaaca

SEQ ID NO: 2449551 - RNA, 19 nt, Homo sapiens
  misc_RNA (1)...(19): siRNA sense strand
cuacaaaagugguggugga

SEQ ID NO: 2449552 - RNA, 19 nt, Homo sapiens
  misc_RNA (1)...(19): siRNA sense strand
gaaacagcuucaaaggaga

SEQ ID NO: 2449553 - RNA, 19 nt, Homo sapiens
  misc_RNA (1)...(19): siRNA sense strand
aggauuugcaggaguauau

SEQ ID NO: 2449554 - RNA, 19 nt, Homo sapiens
  misc_RNA (1)...(19): siRNA sense strand
agcaaauuacaguggguuu

SEQ ID NO: 2449555 - RNA, 19 nt, Homo sapiens
  misc_RNA (1)...(19): siRNA sense strand
gcucaggauuugcaggagu

SEQ ID NO: 2449556 - RNA, 19 nt, Homo sapiens
  misc_RNA (1)...(19): siRNA sense strand
ggagagaguuauuggugug

SEQ ID NO: 2449557 - RNA, 19 nt, Homo sapiens
  misc_RNA (1)...(19): siRNA sense strand
gagaaaaugucuuggggag

SEQ ID NO: 2449558 - RNA, 19 nt, Homo sapiens
  misc_RNA (1)...(19): siRNA sense strand
uuaagauacacaaggacau

SEQ ID NO: 2449559 - RNA, 19 nt, Homo sapiens
  misc_RNA (1)...(19): siRNA sense strand
gauacuucucuuuggguga

SEQ ID NO: 2449560 - RNA, 19 nt, Homo sapiens
  misc_RNA (1)...(19): siRNA sense strand
agacaagacacuacaucca

SEQ ID NO: 2449561 - RNA, 19 nt, Homo sapiens
  misc_RNA (1)...(19): siRNA sense strand
agauaguuguggugggaga

SEQ ID NO: 2449562 - RNA, 19 nt, Homo sapiens
  misc_RNA (1)...(19): siRNA sense strand
gaguugagccugugggaca

SEQ ID NO: 2449563 - RNA, 19 nt, Homo sapiens
  misc_RNA (1)...(19): siRNA sense strand
cggacuuacgaaaggacaa

SEQ ID NO: 2449564 - RNA, 19 nt, Homo sapiens
  misc_RNA (1)...(19): siRNA sense strand
agacagucaguguggaaaa

SEQ ID NO: 2449565 - RNA, 19 nt, Homo sapiens
  misc_RNA (1)...(19): siRNA sense strand
gauccuaaucagaacguga

SEQ ID NO: 2449566 - RNA, 19 nt, Homo sapiens
  misc_RNA (1)...(19): siRNA sense strand
gagagaagagccagccaga

SEQ ID NO: 2449567 - RNA, 19 nt, Homo sapiens
  misc_RNA (1)...(19): siRNA sense strand
agaauagaguugagccugu

SEQ ID NO: 2449568 - RNA, 19 nt, Homo sapiens
  misc_RNA (1)...(19): siRNA sense strand
ggaacaaaucacagagagc

SEQ ID NO: 2449569 - RNA, 19 nt, Homo sapiens
  misc_RNA (1)...(19): siRNA sense strand
cggaaaauagcgucagaga

SEQ ID NO: 2449570 - RNA, 19 nt, Homo sapiens
  misc_RNA (1)...(19): siRNA sense strand
guacauuaguagagcucuc

SEQ ID NO: 2449571 - RNA, 19 nt, Homo sapiens
  misc_RNA (1)...(19): siRNA sense strand
gcauguguaaauaagacaa

SEQ ID NO: 2449572 - RNA, 19 nt, Homo sapiens
  misc_RNA (1)...(19): siRNA sense strand
gaccagaacucucggcagu

SEQ ID NO: 2449573 - RNA, 19 nt, Homo sapiens
  misc_RNA (1)...(19): siRNA sense strand
cagcuuuacagucggaaaa

SEQ ID NO: 2449574 - RNA, 19 nt, Homo sapiens
  misc_RNA (1)...(19): siRNA sense strand
uggaacuaagggagagaaa

SEQ ID NO: 2449575 - RNA, 19 nt, Homo sapiens
  misc_RNA (1)...(19): siRNA sense strand
cugcaggugugaagggaga

SEQ ID NO: 2449576 - RNA, 19 nt, Homo sapiens
  misc_RNA (1)...(19): siRNA sense strand
acacaggacuucaaggaca

SEQ ID NO: 2449577 - RNA, 19 nt, Homo sapiens
  misc_RNA (1)...(19): siRNA sense strand
agcaaggaguaaagggaga

SEQ ID NO: 2449578 - RNA, 19 nt, Homo sapiens
  misc_RNA (1)...(19): siRNA sense strand
gcaaggaagaaaaggagaa

SEQ ID NO: 2449579 - RNA, 19 nt, Homo sapiens
  misc_RNA (1)...(19): siRNA sense strand
aggaagaaaaggagaauca

SEQ ID NO: 2449580 - RNA, 19 nt, Homo sapiens
  misc_RNA (1)...(19): siRNA sense strand
cuaaaggagaucaaggaca

SEQ ID NO: 2449581 - RNA, 19 nt, Homo sapiens
  misc_RNA (1)...(19): siRNA sense strand
cuucaaggacagcaaggaa

SEQ ID NO: 2449582 - RNA, 19 nt, Homo sapiens
  misc_RNA (1)...(19): siRNA sense strand
ggagcaaggaguaaaggga

SEQ ID NO: 2449583 - RNA, 19 nt, Homo sapiens
  misc_RNA (1)...(19): siRNA sense strand
aaacuggaacuaagggaga

SEQ ID NO: 2449584 - RNA, 19 nt, Homo sapiens
  misc_RNA (1)...(19): siRNA sense strand
caccgggagucaagggaga

SEQ ID NO: 2449585 - RNA, 19 nt, Homo sapiens
  misc_RNA (1)...(19): siRNA sense strand
aggccugaaaggaagcaaa

SEQ ID NO: 2449586 - RNA, 19 nt, Homo sapiens
  misc_RNA (1)...(19): siRNA sense strand
ggacaauuugcgaugacga

SEQ ID NO: 2449587 - RNA, 19 nt, Homo sapiens
  misc_RNA (1)...(19): siRNA sense strand
ccacaggccugaaaggaag

SEQ ID NO: 2449588 - RNA, 19 nt, Homo sapiens
  misc_RNA (1)...(19): siRNA sense strand
cuggguuacuccaaaggaa

SEQ ID NO: 2449589 - RNA, 19 nt, Homo sapiens
  misc_RNA (1)...(19): siRNA sense strand
ggcuaugggacgagaugga

SEQ ID NO: 2449590 - RNA, 19 nt, Homo sapiens
  misc_RNA (1)...(19): siRNA sense strand
cuggagaacaccuggcuca

SEQ ID NO: 2449591 - RNA, 19 nt, Homo sapiens
  misc_RNA (1)...(19): siRNA sense strand
ucgaaaucaauguuccaaa

SEQ ID NO: 2449592 - RNA, 19 nt, Homo sapiens
  misc_RNA (1)...(19): siRNA sense strand
cuaagggagagaaaggaga

SEQ ID NO: 2449593 - RNA, 19 nt, Homo sapiens
  misc_RNA (1)...(19): siRNA sense strand
cgucaggauugucggcagu

SEQ ID NO: 2449594 - RNA, 19 nt, Homo sapiens
  misc_RNA (1)...(19): siRNA sense strand
ggcagaucuggcuggauaa

SEQ ID NO: 2449595 - RNA, 19 nt, Homo sapiens
  misc_RNA (1)...(19): siRNA sense strand
ggguaaagaugguggaaaa

SEQ ID NO: 2449596 - RNA, 19 nt, Homo sapiens
  misc_RNA (1)...(19): siRNA sense strand
aaaagaaagucgagagaaa

SEQ ID NO: 2449597 - RNA, 19 nt, Homo sapiens
  misc_RNA (1)...(19): siRNA sense strand
aaguagaagcugagguuaa

SEQ ID NO: 2449598 - RNA, 19 nt, Homo sapiens
  misc_RNA (1)...(19): siRNA sense strand
gaacaagaauuaaaggaga

SEQ ID NO: 2449599 - RNA, 19 nt, Homo sapiens
  misc_RNA (1)...(19): siRNA sense strand
cggcauagugaacgagaaa

SEQ ID NO: 2449600 - RNA, 19 nt, Homo sapiens
  misc_RNA (1)...(19): siRNA sense strand
cauuuaaggauguuggaaa

SEQ ID NO: 2449601 - RNA, 19 nt, Homo sapiens
  misc_RNA (1)...(19): siRNA sense strand
gcguacagagaaagaaaua

SEQ ID NO: 2449602 - RNA, 19 nt, Homo sapiens
  misc_RNA (1)...(19): siRNA sense strand
ccuaagaaaaguuggaaaa

SEQ ID NO: 2449603 - RNA, 19 nt, Homo sapiens
  misc_RNA (1)...(19): siRNA sense strand
cugaagaagagguaaacaa

SEQ ID NO: 2449604 - RNA, 19 nt, Homo sapiens
  misc_RNA (1)...(19): siRNA sense strand
gauaaguuaaacaggguaa

SEQ ID NO: 2449605 - RNA, 19 nt, Homo sapiens
  misc_RNA (1)...(19): siRNA sense strand
ugaaaagucuugaggacaa

SEQ ID NO: 2449606 - RNA, 19 nt, Homo sapiens
  misc_RNA (1)...(19): siRNA sense strand
gaacgagaaaugaggaaca

SEQ ID NO: 2449607 - RNA, 19 nt, Homo sapiens
  misc_RNA (1)...(19): siRNA sense strand
gguuaaacgcuuacacaau

SEQ ID NO: 2449608 - RNA, 19 nt, Homo sapiens
  misc_RNA (1)...(19): siRNA sense strand
ugucuugcguacagagaaa

SEQ ID NO: 2449609 - RNA, 19 nt, Homo sapiens
  misc_RNA (1)...(19): siRNA sense strand
cugagaaagagguggauga

SEQ ID NO: 2449610 - RNA, 19 nt, Homo sapiens
  misc_RNA (1)...(19): siRNA sense strand
caugaagauaccaaagaaa

SEQ ID NO: 2449611 - RNA, 19 nt, Homo sapiens
  misc_RNA (1)...(19): siRNA sense strand
aguacaacuugaagaaaga

SEQ ID NO: 2449612 - RNA, 19 nt, Homo sapiens
  misc_RNA (1)...(19): siRNA sense strand
ggacaaagcagcagagguc

SEQ ID NO: 2449613 - RNA, 19 nt, Homo sapiens
  misc_RNA (1)...(19): siRNA sense strand
cggauagacuuauuggaau

SEQ ID NO: 2449614 - RNA, 19 nt, Homo sapiens
  misc_RNA (1)...(19): siRNA sense strand
gcagaaacgaauugcugaa

SEQ ID NO: 2449615 - RNA, 19 nt, Homo sapiens
  misc_RNA (1)...(19): siRNA sense strand
caaaguaaugaaaggaaga

SEQ ID NO: 2449616 - RNA, 19 nt, Homo sapiens
  misc_RNA (1)...(19): siRNA sense strand
cugaacacgaugaggguau

SEQ ID NO: 2449617 - RNA, 19 nt, Homo sapiens
  misc_RNA (1)...(19): siRNA sense strand
ggguagcagaauuggacaa

SEQ ID NO: 2449618 - RNA, 19 nt, Homo sapiens
  misc_RNA (1)...(19): siRNA sense strand
gcacaaagagauuucaaaa

SEQ ID NO: 2449619 - RNA, 19 nt, Homo sapiens
  misc_RNA (1)...(19): siRNA sense strand
acgaauugcugaaauggaa

SEQ ID NO: 2449620 - RNA, 19 nt, Homo sapiens
  misc_RNA (1)...(19): siRNA sense strand
aagaaagucgagagaaaga

SEQ ID NO: 2449621 - RNA, 19 nt, Homo sapiens
  misc_RNA (1)...(19): siRNA sense strand
gguucuaagcccagaggau

SEQ ID NO: 2449622 - RNA, 19 nt, Homo sapiens
  misc_RNA (1)...(19): siRNA sense strand
cugcaagcauccagcguuu

SEQ ID NO: 2449623 - RNA, 19 nt, Homo sapiens
  misc_RNA (1)...(19): siRNA sense strand
gugucggagaguugaaaua

SEQ ID NO: 2449624 - RNA, 19 nt, Homo sapiens
  misc_RNA (1)...(19): siRNA sense strand
gugccaucgcagaguauaa

SEQ ID NO: 2449625 - RNA, 19 nt, Homo sapiens
  misc_RNA (1)...(19): siRNA sense strand
gagaaagaacuuauggguu

SEQ ID NO: 2449626 - RNA, 19 nt, Homo sapiens
  misc_RNA (1)...(19): siRNA sense strand
ccaagaacagaaaguacaa

SEQ ID NO: 2449627 - RNA, 19 nt, Homo sapiens
  misc_RNA (1)...(19): siRNA sense strand
acuuauggguuucagcaaa

SEQ ID NO: 2449628 - RNA, 19 nt, Homo sapiens
  misc_RNA (1)...(19): siRNA sense strand
gcaaaguaaugaaaggaag

SEQ ID NO: 2449629 - RNA, 19 nt, Homo sapiens
  misc_RNA (1)...(19): siRNA sense strand
agggugaaguugaacaaau

SEQ ID NO: 2449630 - RNA, 19 nt, Homo sapiens
  misc_RNA (1)...(19): siRNA sense strand
cuuaggagccauugaugaa

SEQ ID NO: 2449631 - RNA, 19 nt, Homo sapiens
  misc_RNA (1)...(19): siRNA sense strand
gcauagugaacgagaaaug

SEQ ID NO: 2449632 - RNA, 19 nt, Homo sapiens
  misc_RNA (1)...(19): siRNA sense strand
acagaggagauaaguuaaa

SEQ ID NO: 2449633 - RNA, 19 nt, Homo sapiens
  misc_RNA (1)...(19): siRNA sense strand
cagagauauagaaggaaaa

SEQ ID NO: 2449634 - RNA, 19 nt, Homo sapiens
  misc_RNA (1)...(19): siRNA sense strand
uagaagauggagaguggua

SEQ ID NO: 2449635 - RNA, 19 nt, Homo sapiens
  misc_RNA (1)...(19): siRNA sense strand
acacaauaccaucguagaa

SEQ ID NO: 2449636 - RNA, 19 nt, Homo sapiens
  misc_RNA (1)...(19): siRNA sense strand
gagauuucggauagacuua

SEQ ID NO: 2449637 - RNA, 19 nt, Homo sapiens
  misc_RNA (1)...(19): siRNA sense strand
guuuaauagagcaagaaga

SEQ ID NO: 2449638 - RNA, 19 nt, Homo sapiens
  misc_RNA (1)...(19): siRNA sense strand
ccagaaagaacaucgcaau

SEQ ID NO: 2449639 - RNA, 19 nt, Homo sapiens
  misc_RNA (1)...(19): siRNA sense strand
aaauauuggcacaaagaga

SEQ ID NO: 2449640 - RNA, 19 nt, Homo sapiens
  misc_RNA (1)...(19): siRNA sense strand
uagcagaauuggacaaaau

SEQ ID NO: 2449641 - RNA, 19 nt, Homo sapiens
  misc_RNA (1)...(19): siRNA sense strand
gcuguaaauccaaaagaaa

SEQ ID NO: 2449642 - RNA, 19 nt, Homo sapiens
  misc_RNA (1)...(19): siRNA sense strand
cugaugaacacaaggacau

SEQ ID NO: 2449643 - RNA, 19 nt, Homo sapiens
  misc_RNA (1)...(19): siRNA sense strand
gugaacgagaaaugaggaa

SEQ ID NO: 2449644 - RNA, 19 nt, Homo sapiens
  misc_RNA (1)...(19): siRNA sense strand
ggaauuuacaagacauaca

SEQ ID NO: 2449645 - RNA, 19 nt, Homo sapiens
  misc_RNA (1)...(19): siRNA sense strand
uggcaaauccaauguuauu

SEQ ID NO: 2449646 - RNA, 19 nt, Homo sapiens
  misc_RNA (1)...(19): siRNA sense strand
agauauaauugguugugga

SEQ ID NO: 2449647 - RNA, 19 nt, Homo sapiens
  misc_RNA (1)...(19): siRNA sense strand
ggauagccuuaaacaggaa

SEQ ID NO: 2449648 - RNA, 19 nt, Homo sapiens
  misc_RNA (1)...(19): siRNA sense strand
gauagaagauggagagugg

SEQ ID NO: 2449649 - RNA, 19 nt, Homo sapiens
  misc_RNA (1)...(19): siRNA sense strand
acaggaaacacaagggcuu

SEQ ID NO: 2449650 - RNA, 19 nt, Homo sapiens
  misc_RNA (1)...(19): siRNA sense strand
gcaaggaaccagagagacc

SEQ ID NO: 2449651 - RNA, 19 nt, Homo sapiens
  misc_RNA (1)...(19): siRNA sense strand
aaauguagcuauugcagca

SEQ ID NO: 2449652 - RNA, 19 nt, Homo sapiens
  misc_RNA (1)...(19): siRNA sense strand
ugguaaaucucgugaaaag

SEQ ID NO: 2449653 - RNA, 19 nt, Homo sapiens
  misc_RNA (1)...(19): siRNA sense strand
aggaggaacaguagcacaa

SEQ ID NO: 2449654 - RNA, 19 nt, Homo sapiens
  misc_RNA (1)...(19): siRNA sense strand
cagggaaaggagagaaaca

SEQ ID NO: 2449655 - RNA, 19 nt, Homo sapiens
  misc_RNA (1)...(19): siRNA sense strand
uguuaaagagcgagcggga

SEQ ID NO: 2449656 - RNA, 19 nt, Homo sapiens
  misc_RNA (1)...(19): siRNA sense strand
aggcagagaggauggcaga

SEQ ID NO: 2449657 - RNA, 19 nt, Homo sapiens
  misc_RNA (1)...(19): siRNA sense strand
gcucaagacucaugacccu

SEQ ID NO: 2449658 - RNA, 19 nt, Homo sapiens
  misc_RNA (1)...(19): siRNA sense strand
aggaaaugauucagagguc

SEQ ID NO: 2449659 - RNA, 19 nt, Homo sapiens
  misc_RNA (1)...(19): siRNA sense strand
gaaaugauucagaggucca

SEQ ID NO: 2449660 - RNA, 19 nt, Homo sapiens
  misc_RNA (1)...(19): siRNA sense strand
uccagggaaaggagagaaa

SEQ ID NO: 2449661 - RNA, 19 nt, Homo sapiens
  misc_RNA (1)...(19): siRNA sense strand
agagaaacacccagggauc

SEQ ID NO: 2449662 - RNA, 19 nt, Homo sapiens
  misc_RNA (1)...(19): siRNA sense strand
gccuugugggugaaagaaa

SEQ ID NO: 2449663 - RNA, 19 nt, Homo sapiens
  misc_RNA (1)...(19): siRNA sense strand
gagagaaagcugcagagca

SEQ ID NO: 2449664 - RNA, 19 nt, Homo sapiens
  misc_RNA (1)...(19): siRNA sense strand
agagcauguuaaagagcga

SEQ ID NO: 2449665 - RNA, 19 nt, Homo sapiens
  misc_RNA (1)...(19): siRNA sense strand
cuaucagcaagaaggaaau

SEQ ID NO: 2449666 - RNA, 19 nt, Homo sapiens
  misc_RNA (1)...(19): siRNA sense strand
aggcccaggcagagaggau

SEQ ID NO: 2449667 - RNA, 19 nt, Homo sapiens
  misc_RNA (1)...(19): siRNA sense strand
gugccuugugggugaaaga

SEQ ID NO: 2449668 - RNA, 19 nt, Homo sapiens
  misc_RNA (1)...(19): siRNA sense strand
gagagaaacacccagggau

SEQ ID NO: 2449669 - RNA, 19 nt, Homo sapiens
  misc_RNA (1)...(19): siRNA sense strand
cacauuugggagcggauaa

SEQ ID NO: 2449670 - RNA, 19 nt, Homo sapiens
  misc_RNA (1)...(19): siRNA sense strand
aguuaauaguccaggagag

SEQ ID NO: 2449671 - RNA, 19 nt, Homo sapiens
  misc_RNA (1)...(19): siRNA sense strand
uggcuguccagaagaacaa

SEQ ID NO: 2449672 - RNA, 19 nt, Homo sapiens
  misc_RNA (1)...(19): siRNA sense strand
cggauaaagcgucugaagu

SEQ ID NO: 2449673 - RNA, 19 nt, Homo sapiens
  misc_RNA (1)...(19): siRNA sense strand
gggacaaggauguaaccau

SEQ ID NO: 2449674 - RNA, 19 nt, Homo sapiens
  misc_RNA (1)...(19): siRNA sense strand
cugacuucaacaaggacaa

SEQ ID NO: 2449675 - RNA, 19 nt, Homo sapiens
  misc_RNA (1)...(19): siRNA sense strand
aagaagaucuccaacacca

SEQ ID NO: 2449676 - RNA, 19 nt, Homo sapiens
  misc_RNA (1)...(19): siRNA sense strand
gagaauauccagagacuca

SEQ ID NO: 2449677 - RNA, 19 nt, Homo sapiens
  misc_RNA (1)...(19): siRNA sense strand
gagagaauauccagagacu

SEQ ID NO: 2449678 - RNA, 19 nt, Homo sapiens
  misc_RNA (1)...(19): siRNA sense strand
cuggccugccugagaaaua

SEQ ID NO: 2449679 - RNA, 19 nt, Homo sapiens
  misc_RNA (1)...(19): siRNA sense strand
ccagagacucacaggccau

SEQ ID NO: 2449680 - RNA, 19 nt, Homo sapiens
  misc_RNA (1)...(19): siRNA sense strand
cgggacauguggagagccu

SEQ ID NO: 2449681 - RNA, 19 nt, Homo sapiens
  misc_RNA (1)...(19): siRNA sense strand
ccagaaaugcccagccgaa

SEQ ID NO: 2449682 - RNA, 19 nt, Homo sapiens
  misc_RNA (1)...(19): siRNA sense strand
cacaccuucuggagggaaa

SEQ ID NO: 2449683 - RNA, 19 nt, Homo sapiens
  misc_RNA (1)...(19): siRNA sense strand
gggaaaguacuguggacac

SEQ ID NO: 2449684 - RNA, 19 nt, Homo sapiens
  misc_RNA (1)...(19): siRNA sense strand
acgcaguagccgagaucga

SEQ ID NO: 2449685 - RNA, 19 nt, Homo sapiens
  misc_RNA (1)...(19): siRNA sense strand
uggggaagcugcuggacaa

SEQ ID NO: 2449686 - RNA, 19 nt, Homo sapiens
  misc_RNA (1)...(19): siRNA sense strand
acagcuauaaggagcgcua

SEQ ID NO: 2449687 - RNA, 19 nt, Homo sapiens
  misc_RNA (1)...(19): siRNA sense strand
ggaucgugguugcagggau

SEQ ID NO: 2449688 - RNA, 19 nt, Homo sapiens
  misc_RNA (1)...(19): siRNA sense strand
gaucgugguugcagggaug

SEQ ID NO: 2449689 - RNA, 19 nt, Homo sapiens
  misc_RNA (1)...(19): siRNA sense strand
cggaacagcuauaaggagc

SEQ ID NO: 2449690 - RNA, 19 nt, Homo sapiens
  misc_RNA (1)...(19): siRNA sense strand
ggaaagagccauugggugu

SEQ ID NO: 2449691 - RNA, 19 nt, Homo sapiens
  misc_RNA (1)...(19): siRNA sense strand
cuuccaaagcgcugggaua

SEQ ID NO: 2449692 - RNA, 19 nt, Homo sapiens
  misc_RNA (1)...(19): siRNA sense strand
acauugaugaagauggaaa

SEQ ID NO: 2449693 - RNA, 19 nt, Homo sapiens
  misc_RNA (1)...(19): siRNA sense strand
gcggaagaggagacgacua

SEQ ID NO: 2449694 - RNA, 19 nt, Homo sapiens
  misc_RNA (1)...(19): siRNA sense strand
gagacgacuaauagaccaa

SEQ ID NO: 2449695 - RNA, 19 nt, Homo sapiens
  misc_RNA (1)...(19): siRNA sense strand
gacuaauagaccaagaaaa

SEQ ID NO: 2449696 - RNA, 19 nt, Homo sapiens
  misc_RNA (1)...(19): siRNA sense strand
guaaaguggcugagacggu

SEQ ID NO: 2449697 - RNA, 19 nt, Homo sapiens
  misc_RNA (1)...(19): siRNA sense strand
ggguguuugaaucuagaaa

SEQ ID NO: 2449698 - RNA, 19 nt, Homo sapiens
  misc_RNA (1)...(19): siRNA sense strand
cugaaagucuugggcucaa

SEQ ID NO: 2449699 - RNA, 19 nt, Homo sapiens
  misc_RNA (1)...(19): siRNA sense strand
acguauggccuuuggaaau

SEQ ID NO: 2449700 - RNA, 19 nt, Homo sapiens
  misc_RNA (1)...(19): siRNA sense strand
aggauaaacuguuacgcau

SEQ ID NO: 2449701 - RNA, 19 nt, Homo sapiens
  misc_RNA (1)...(19): siRNA sense strand
ugaacaaaccugaagcaga

SEQ ID NO: 2449702 - RNA, 19 nt, Homo sapiens
  misc_RNA (1)...(19): siRNA sense strand
gcaaacugugguaggaaaa

SEQ ID NO: 2449703 - RNA, 19 nt, Homo sapiens
  misc_RNA (1)...(19): siRNA sense strand
aauauauuccugagggaga

SEQ ID NO: 2449704 - RNA, 19 nt, Homo sapiens
  misc_RNA (1)...(19): siRNA sense strand
cagagaauucagagugcau

SEQ ID NO: 2449705 - RNA, 19 nt, Homo sapiens
  misc_RNA (1)...(19): siRNA sense strand
uugucaagacuguggauuu

SEQ ID NO: 2449706 - RNA, 19 nt, Homo sapiens
  misc_RNA (1)...(19): siRNA sense strand
auuuaguccugauggagaa

SEQ ID NO: 2449707 - RNA, 19 nt, Homo sapiens
  misc_RNA (1)...(19): siRNA sense strand
agggagagauuuugguuau

SEQ ID NO: 2449708 - RNA, 19 nt, Homo sapiens
  misc_RNA (1)...(19): siRNA sense strand
uacuaugacagaagugaaa

SEQ ID NO: 2449709 - RNA, 19 nt, Homo sapiens
  misc_RNA (1)...(19): siRNA sense strand
cuacuaugacagaagugaa

SEQ ID NO: 2449710 - RNA, 19 nt, Homo sapiens
  misc_RNA (1)...(19): siRNA sense strand
agaagauaguggugagcug

SEQ ID NO: 2449711 - RNA, 19 nt, Homo sapiens
  misc_RNA (1)...(19): siRNA sense strand
gauuuaguccugauggaga

SEQ ID NO: 2449712 - RNA, 19 nt, Homo sapiens
  misc_RNA (1)...(19): siRNA sense strand
cuguuaguaguauggaaua

SEQ ID NO: 2449713 - RNA, 19 nt, Homo sapiens
  misc_RNA (1)...(19): siRNA sense strand
gcaucacgccuuaugggua

SEQ ID NO: 2449714 - RNA, 19 nt, Homo sapiens
  misc_RNA (1)...(19): siRNA sense strand
cggugaagauuuuaaacuu

SEQ ID NO: 2449715 - RNA, 19 nt, Homo sapiens
  misc_RNA (1)...(19): siRNA sense strand
acucuaugccagugguuca

SEQ ID NO: 2449716 - RNA, 19 nt, Homo sapiens
  misc_RNA (1)...(19): siRNA sense strand
cuuaaucagcgcuugcaaa

SEQ ID NO: 2449717 - RNA, 19 nt, Homo sapiens
  misc_RNA (1)...(19): siRNA sense strand
aagaaauugcuucagagaa

SEQ ID NO: 2449718 - RNA, 19 nt, Homo sapiens
  misc_RNA (1)...(19): siRNA sense strand
cugcagauuucacagccaa

SEQ ID NO: 2449719 - RNA, 19 nt, Homo sapiens
  misc_RNA (1)...(19): siRNA sense strand
agaggagcuagaagaaauu

SEQ ID NO: 2449720 - RNA, 19 nt, Homo sapiens
  misc_RNA (1)...(19): siRNA sense strand
gcaaagagcagguggccaa

SEQ ID NO: 2449721 - RNA, 19 nt, Homo sapiens
  misc_RNA (1)...(19): siRNA sense strand
gugagaaagaagaggaaga

SEQ ID NO: 2449722 - RNA, 19 nt, Homo sapiens
  misc_RNA (1)...(19): siRNA sense strand
agaagauggaagagagcaa

SEQ ID NO: 2449723 - RNA, 19 nt, Homo sapiens
  misc_RNA (1)...(19): siRNA sense strand
uggcagaagacaaggagaa

SEQ ID NO: 2449724 - RNA, 19 nt, Homo sapiens
  misc_RNA (1)...(19): siRNA sense strand
aggaugaggaggagaagaa

SEQ ID NO: 2449725 - RNA, 19 nt, Homo sapiens
  misc_RNA (1)...(19): siRNA sense strand
uggaagagagcaaggcaaa

SEQ ID NO: 2449726 - RNA, 19 nt, Homo sapiens
  misc_RNA (1)...(19): siRNA sense strand
aagagaaaggugagaaaga

SEQ ID NO: 2449727 - RNA, 19 nt, Homo sapiens
  misc_RNA (1)...(19): siRNA sense strand
agguauugaugaagaugaa

SEQ ID NO: 2449728 - RNA, 19 nt, Homo sapiens
  misc_RNA (1)...(19): siRNA sense strand
aagaagaggaagauaaaga

SEQ ID NO: 2449729 - RNA, 19 nt, Homo sapiens
  misc_RNA (1)...(19): siRNA sense strand
gguaaggauaagaagaaga

SEQ ID NO: 2449730 - RNA, 19 nt, Homo sapiens
  misc_RNA (1)...(19): siRNA sense strand
gaaggaaauuagugaugau

SEQ ID NO: 2449731 - RNA, 19 nt, Homo sapiens
  misc_RNA (1)...(19): siRNA sense strand
aggucuagguauugaugaa

SEQ ID NO: 2449732 - RNA, 19 nt, Homo sapiens
  misc_RNA (1)...(19): siRNA sense strand
ggagaaggaacgagagaag

SEQ ID NO: 2449733 - RNA, 19 nt, Homo sapiens
  misc_RNA (1)...(19): siRNA sense strand
acuaagaagaucaaagaga

SEQ ID NO: 2449734 - RNA, 19 nt, Homo sapiens
  misc_RNA (1)...(19): siRNA sense strand
cuacuugguggcagagaaa

SEQ ID NO: 2449735 - RNA, 19 nt, Homo sapiens
  misc_RNA (1)...(19): siRNA sense strand
augaugaggcagaggaaga

SEQ ID NO: 2449736 - RNA, 19 nt, Homo sapiens
  misc_RNA (1)...(19): siRNA sense strand
ccagaaacccugaugacau

SEQ ID NO: 2449737 - RNA, 19 nt, Homo sapiens
  misc_RNA (1)...(19): siRNA sense strand
cgacaagaaugauaaggca

SEQ ID NO: 2449738 - RNA, 19 nt, Homo sapiens
  misc_RNA (1)...(19): siRNA sense strand
uuaaagaagaucagacaga

SEQ ID NO: 2449739 - RNA, 19 nt, Homo sapiens
  misc_RNA (1)...(19): siRNA sense strand
gggucaaagaaguagugaa

SEQ ID NO: 2449740 - RNA, 19 nt, Homo sapiens
  misc_RNA (1)...(19): siRNA sense strand
cugaggaugaggaggagaa

SEQ ID NO: 2449741 - RNA, 19 nt, Homo sapiens
  misc_RNA (1)...(19): siRNA sense strand
ggacagugguaaagagcug

SEQ ID NO: 2449742 - RNA, 19 nt, Homo sapiens
  misc_RNA (1)...(19): siRNA sense strand
cuugaaagucauucgcaaa

SEQ ID NO: 2449743 - RNA, 19 nt, Homo sapiens
  misc_RNA (1)...(19): siRNA sense strand
ugucugagcugcugcgcua

SEQ ID NO: 2449744 - RNA, 19 nt, Homo sapiens
  misc_RNA (1)...(19): siRNA sense strand
guagaaggucaguuggaau

SEQ ID NO: 2449745 - RNA, 19 nt, Homo sapiens
  misc_RNA (1)...(19): siRNA sense strand
gagaagaagaagauggaag

SEQ ID NO: 2449746 - RNA, 19 nt, Homo sapiens
  misc_RNA (1)...(19): siRNA sense strand
aggcugaggccgacaagaa

SEQ ID NO: 2449747 - RNA, 19 nt, Homo sapiens
  misc_RNA (1)...(19): siRNA sense strand
agacagaguaccuagaaga

SEQ ID NO: 2449748 - RNA, 19 nt, Homo sapiens
  misc_RNA (1)...(19): siRNA sense strand
gagagaaggaaauuaguga

SEQ ID NO: 2449749 - RNA, 19 nt, Homo sapiens
  misc_RNA (1)...(19): siRNA sense strand
ugaaguggcagcagaggaa

SEQ ID NO: 2449750 - RNA, 19 nt, Homo sapiens
  misc_RNA (1)...(19): siRNA sense strand
aagaaguagugaagaagca

SEQ ID NO: 2449751 - RNA, 19 nt, Homo sapiens
  misc_RNA (1)...(19): siRNA sense strand
gggaagaccacuuggcagu

SEQ ID NO: 2449752 - RNA, 19 nt, Homo sapiens
  misc_RNA (1)...(19): siRNA sense strand
augaggaggagaagaagaa

SEQ ID NO: 2449753 - RNA, 19 nt, Homo sapiens
  misc_RNA (1)...(19): siRNA sense strand
caagaggaguauggagaau

SEQ ID NO: 2449754 - RNA, 19 nt, Homo sapiens
  misc_RNA (1)...(19): siRNA sense strand
cagccaauauggagcggau

SEQ ID NO: 2449755 - RNA, 19 nt, Homo sapiens
  misc_RNA (1)...(19): siRNA sense strand
aggaacgagagaaggaaau

SEQ ID NO: 2449756 - RNA, 19 nt, Homo sapiens
  misc_RNA (1)...(19): siRNA sense strand
agaaauacauugaucagga

SEQ ID NO: 2449757 - RNA, 19 nt, Homo sapiens
  misc_RNA (1)...(19): siRNA sense strand
gaggaggagaagaagaaga

SEQ ID NO: 2449758 - RNA, 19 nt, Homo sapiens
  misc_RNA (1)...(19): siRNA sense strand
agaaggaacgagagaagga

SEQ ID NO: 2449759 - RNA, 19 nt, Homo sapiens
  misc_RNA (1)...(19): siRNA sense strand
cuucugaugccuuggacaa

SEQ ID NO: 2449760 - RNA, 19 nt, Homo sapiens
  misc_RNA (1)...(19): siRNA sense strand
aggugagaaagaagaggaa

SEQ ID NO: 2449761 - RNA, 19 nt, Homo sapiens
  misc_RNA (1)...(19): siRNA sense strand
cagaggaagagaaagguga

SEQ ID NO: 2449762 - RNA, 19 nt, Homo sapiens
  misc_RNA (1)...(19): siRNA sense strand
aggaagauaaagaugauga

SEQ ID NO: 2449763 - RNA, 19 nt, Homo sapiens
  misc_RNA (1)...(19): siRNA sense strand
agguugagaaggugacaau

SEQ ID NO: 2449764 - RNA, 19 nt, Homo sapiens
  misc_RNA (1)...(19): siRNA sense strand
gaacaguaugcuugggagu

SEQ ID NO: 2449765 - RNA, 19 nt, Homo sapiens
  misc_RNA (1)...(19): siRNA sense strand
cuagaagagaggcggguca

SEQ ID NO: 2449766 - RNA, 19 nt, Homo sapiens
  misc_RNA (1)...(19): siRNA sense strand
gcaucuaucgcaugaucaa

SEQ ID NO: 2449767 - RNA, 19 nt, Homo sapiens
  misc_RNA (1)...(19): siRNA sense strand
aaggaacgagagaaggaaa

SEQ ID NO: 2449768 - RNA, 19 nt, Homo sapiens
  misc_RNA (1)...(19): siRNA sense strand
gaacgagagaaggaaauua

SEQ ID NO: 2449769 - RNA, 19 nt, Homo sapiens
  misc_RNA (1)...(19): siRNA sense strand
agaacaacaucaaacucua

SEQ ID NO: 2449770 - RNA, 19 nt, Homo sapiens
  misc_RNA (1)...(19): siRNA sense strand
ugaugaagaugaaguggca

SEQ ID NO: 2449771 - RNA, 19 nt, Homo sapiens
  misc_RNA (1)...(19): siRNA sense strand
ccuacuugguggcagagaa

SEQ ID NO: 2449772 - RNA, 19 nt, Homo sapiens
  misc_RNA (1)...(19): siRNA sense strand
aggaagugcaccauggaga

SEQ ID NO: 2449773 - RNA, 19 nt, Homo sapiens
  misc_RNA (1)...(19): siRNA sense strand
caguuggaauucagggcau

SEQ ID NO: 2449774 - RNA, 19 nt, Homo sapiens
  misc_RNA (1)...(19): siRNA sense strand
ucuugaaagucauucgcaa

SEQ ID NO: 2449775 - RNA, 19 nt, Homo sapiens
  misc_RNA (1)...(19): siRNA sense strand
aggaggagaagaagaagau

SEQ ID NO: 2449776 - RNA, 19 nt, Homo sapiens
  misc_RNA (1)...(19): siRNA sense strand
agaaagugguugugaucac

SEQ ID NO: 2449777 - RNA, 19 nt, Homo sapiens
  misc_RNA (1)...(19): siRNA sense strand
ugaggcagaggaagagaaa

SEQ ID NO: 2449778 - RNA, 19 nt, Homo sapiens
  misc_RNA (1)...(19): siRNA sense strand
gagaaaggugagaaagaag

SEQ ID NO: 2449779 - RNA, 19 nt, Homo sapiens
  misc_RNA (1)...(19): siRNA sense strand
cuaaacaagaccaagccua

SEQ ID NO: 2449780 - RNA, 19 nt, Homo sapiens
  misc_RNA (1)...(19): siRNA sense strand
gaugaggaggagaagaaga

SEQ ID NO: 2449781 - RNA, 19 nt, Homo sapiens
  misc_RNA (1)...(19): siRNA sense strand
agaaaggugagaaagaaga

SEQ ID NO: 2449782 - RNA, 19 nt, Homo sapiens
  misc_RNA (1)...(19): siRNA sense strand
ugaugaugaggcagaggaa

SEQ ID NO: 2449783 - RNA, 19 nt, Homo sapiens
  misc_RNA (1)...(19): siRNA sense strand
ugauauuggaggugggcaa

SEQ ID NO: 2449784 - RNA, 19 nt, Homo sapiens
  misc_RNA (1)...(19): siRNA sense strand
uggcauaaacccagaugaa

SEQ ID NO: 2449785 - RNA, 19 nt, Homo sapiens
  misc_RNA (1)...(19): siRNA sense strand
agacaaggguacagggaac

SEQ ID NO: 2449786 - RNA, 19 nt, Homo sapiens
  misc_RNA (1)...(19): siRNA sense strand
agaagaaggaacuggaaga

SEQ ID NO: 2449787 - RNA, 19 nt, Homo sapiens
  misc_RNA (1)...(19): siRNA sense strand
ggucuaugaaggugaaaga

SEQ ID NO: 2449788 - RNA, 19 nt, Homo sapiens
  misc_RNA (1)...(19): siRNA sense strand
gguuaaugaugcugagaag

SEQ ID NO: 2449789 - RNA, 19 nt, Homo sapiens
  misc_RNA (1)...(19): siRNA sense strand
acuagaaaugaguuggaaa

SEQ ID NO: 2449790 - RNA, 19 nt, Homo sapiens
  misc_RNA (1)...(19): siRNA sense strand
ccgaggaggaggacaagaa

SEQ ID NO: 2449791 - RNA, 19 nt, Homo sapiens
  misc_RNA (1)...(19): siRNA sense strand
gugaaagaccccugacaaa

SEQ ID NO: 2449792 - RNA, 19 nt, Homo sapiens
  misc_RNA (1)...(19): siRNA sense strand
cagauuggagauaaagaaa

SEQ ID NO: 2449793 - RNA, 19 nt, Homo sapiens
  misc_RNA (1)...(19): siRNA sense strand
acaauagagcugugcagaa

SEQ ID NO: 2449794 - RNA, 19 nt, Homo sapiens
  misc_RNA (1)...(19): siRNA sense strand
cuaaauguuaugaggauca

SEQ ID NO: 2449795 - RNA, 19 nt, Homo sapiens
  misc_RNA (1)...(19): siRNA sense strand
cagcaaacucuauggaagu

SEQ ID NO: 2449796 - RNA, 19 nt, Homo sapiens
  misc_RNA (1)...(19): siRNA sense strand
agaaaagcugggagguaaa

SEQ ID NO: 2449797 - RNA, 19 nt, Homo sapiens
  misc_RNA (1)...(19): siRNA sense strand
ccuuugagauagaugugaa

SEQ ID NO: 2449798 - RNA, 19 nt, Homo sapiens
  misc_RNA (1)...(19): siRNA sense strand
agaaguuugcugaggaaga

SEQ ID NO: 2449799 - RNA, 19 nt, Homo sapiens
  misc_RNA (1)...(19): siRNA sense strand
ugguauucuucgagugaca

SEQ ID NO: 2449800 - RNA, 19 nt, Homo sapiens
  misc_RNA (1)...(19): siRNA sense strand
cgggcaaagaugucaggaa

SEQ ID NO: 2449801 - RNA, 19 nt, Homo sapiens
  misc_RNA (1)...(19): siRNA sense strand
cagaugaagcuguagcgua

SEQ ID NO: 2449802 - RNA, 19 nt, Homo sapiens
  misc_RNA (1)...(19): siRNA sense strand
cugaagauaaggagaccau

SEQ ID NO: 2449803 - RNA, 19 nt, Homo sapiens
  misc_RNA (1)...(19): siRNA sense strand
gaaagaaaccgcugaggcu

SEQ ID NO: 2449804 - RNA, 19 nt, Homo sapiens
  misc_RNA (1)...(19): siRNA sense strand
gagugacagcugaagacaa

SEQ ID NO: 2449805 - RNA, 19 nt, Homo sapiens
  misc_RNA (1)...(19): siRNA sense strand
auaaggagaccauggaaaa

SEQ ID NO: 2449806 - RNA, 19 nt, Homo sapiens
  misc_RNA (1)...(19): siRNA sense strand
gcguggagaucaucgccaa

SEQ ID NO: 2449807 - RNA, 19 nt, Homo sapiens
  misc_RNA (1)...(19): siRNA sense strand
gggccaaauuugaagagcu

SEQ ID NO: 2449808 - RNA, 19 nt, Homo sapiens
  misc_RNA (1)...(19): siRNA sense strand
agauucagcaacugguuaa

SEQ ID NO: 2449809 - RNA, 19 nt, Homo sapiens
  misc_RNA (1)...(19): siRNA sense strand
aggaggaggacaagaagga

SEQ ID NO: 2449810 - RNA, 19 nt, Homo sapiens
  misc_RNA (1)...(19): siRNA sense strand
aaaucgaaaggaugguuaa

SEQ ID NO: 2449811 - RNA, 19 nt, Homo sapiens
  misc_RNA (1)...(19): siRNA sense strand
aagaaggaacuggaagaaa

SEQ ID NO: 2449812 - RNA, 19 nt, Homo sapiens
  misc_RNA (1)...(19): siRNA sense strand
cugccaugguucucacuaa

SEQ ID NO: 2449813 - RNA, 19 nt, Homo sapiens
  misc_RNA (1)...(19): siRNA sense strand
gcugaggcuuauuugggaa

SEQ ID NO: 2449814 - RNA, 19 nt, Homo sapiens
  misc_RNA (1)...(19): siRNA sense strand
ggccaaauuugaagagcuc

SEQ ID NO: 2449815 - RNA, 19 nt, Homo sapiens
  misc_RNA (1)...(19): siRNA sense strand
gauagaugugaaugguauu

SEQ ID NO: 2449816 - RNA, 19 nt, Homo sapiens
  misc_RNA (1)...(19): siRNA sense strand
aagcuaagaagaaggaacu

SEQ ID NO: 2449817 - RNA, 19 nt, Homo sapiens
  misc_RNA (1)...(19): siRNA sense strand
cuguuacaaucaaggucua

SEQ ID NO: 2449818 - RNA, 19 nt, Homo sapiens
  misc_RNA (1)...(19): siRNA sense strand
cagcugaagacaaggguac

SEQ ID NO: 2449819 - RNA, 19 nt, Homo sapiens
  misc_RNA (1)...(19): siRNA sense strand
cuagaaaugaguuggaaag

SEQ ID NO: 2449820 - RNA, 19 nt, Homo sapiens
  misc_RNA (1)...(19): siRNA sense strand
gugaagaggauacagcaga

SEQ ID NO: 2449821 - RNA, 19 nt, Homo sapiens
  misc_RNA (1)...(19): siRNA sense strand
aggaaagacaauagagcug

SEQ ID NO: 2449822 - RNA, 19 nt, Homo sapiens
  misc_RNA (1)...(19): siRNA sense strand
ugggaggugucaugaccaa

SEQ ID NO: 2449823 - RNA, 19 nt, Homo sapiens
  misc_RNA (1)...(19): siRNA sense strand
aggacaagaaggaggacgu

SEQ ID NO: 2449824 - RNA, 19 nt, Homo sapiens
  misc_RNA (1)...(19): siRNA sense strand
cgucugugcagcaggacau

SEQ ID NO: 2449825 - RNA, 19 nt, Homo sapiens
  misc_RNA (1)...(19): siRNA sense strand
uggaacuauugcuggccua

SEQ ID NO: 2449826 - RNA, 19 nt, Homo sapiens
  misc_RNA (1)...(19): siRNA sense strand
uauuugggaaagaagguua

SEQ ID NO: 2449827 - RNA, 19 nt, Homo sapiens
  misc_RNA (1)...(19): siRNA sense strand
gcauaaacccagaugaagc

SEQ ID NO: 2449828 - RNA, 19 nt, Homo sapiens
  misc_RNA (1)...(19): siRNA sense strand
ugucaugaccaaacugauu

SEQ ID NO: 2449829 - RNA, 19 nt, Homo sapiens
  misc_RNA (1)...(19): siRNA sense strand
ucagauuggagauaaagaa

SEQ ID NO: 2449830 - RNA, 19 nt, Homo sapiens
  misc_RNA (1)...(19): siRNA sense strand
cccaacuggugaagaggau

SEQ ID NO: 2449831 - RNA, 19 nt, Homo sapiens
  misc_RNA (1)...(19): siRNA sense strand
aaagaaaagcugggaggua

SEQ ID NO: 2449832 - RNA, 19 nt, Homo sapiens
  misc_RNA (1)...(19): siRNA sense strand
cuguagaagaaaagauuga

SEQ ID NO: 2449833 - RNA, 19 nt, Homo sapiens
  misc_RNA (1)...(19): siRNA sense strand
agaaggaggacgugggcac

SEQ ID NO: 2449834 - RNA, 19 nt, Homo sapiens
  misc_RNA (1)...(19): siRNA sense strand
gggauaaagauuuguggga

SEQ ID NO: 2449835 - RNA, 19 nt, Homo sapiens
  misc_RNA (1)...(19): siRNA sense strand
gauaaagauuugugggagc

SEQ ID NO: 2449836 - RNA, 19 nt, Homo sapiens
  misc_RNA (1)...(19): siRNA sense strand
acaacagcccugcgagcaa

SEQ ID NO: 2449837 - RNA, 19 nt, Homo sapiens
  misc_RNA (1)...(19): siRNA sense strand
gcugagagcacuuggcagu

SEQ ID NO: 2449838 - RNA, 19 nt, Homo sapiens
  misc_RNA (1)...(19): siRNA sense strand
gaagaaacuuacaccgacu

SEQ ID NO: 2449839 - RNA, 19 nt, Homo sapiens
  misc_RNA (1)...(19): siRNA sense strand
gcagaaagaaucauccuga

SEQ ID NO: 2449840 - RNA, 19 nt, Homo sapiens
  misc_RNA (1)...(19): siRNA sense strand
gagccuuagacaagagacu

SEQ ID NO: 2449841 - RNA, 19 nt, Homo sapiens
  misc_RNA (1)...(19): siRNA sense strand
augaagacugggauaaaga

SEQ ID NO: 2449842 - RNA, 19 nt, Homo sapiens
  misc_RNA (1)...(19): siRNA sense strand
caguagcuuucuuggccaa

SEQ ID NO: 2449843 - RNA, 19 nt, Homo sapiens
  misc_RNA (1)...(19): siRNA sense strand
cuguaaggauggaagccaa

SEQ ID NO: 2449844 - RNA, 19 nt, Homo sapiens
  misc_RNA (1)...(19): siRNA sense strand
acgaugagccagagaccua

SEQ ID NO: 2449845 - RNA, 19 nt, Homo sapiens
  misc_RNA (1)...(19): siRNA sense strand
cauggaagaaauugggaau

SEQ ID NO: 2449846 - RNA, 19 nt, Homo sapiens
  misc_RNA (1)...(19): siRNA sense strand
uggacaugcucaagaguca

SEQ ID NO: 2449847 - RNA, 19 nt, Homo sapiens
  misc_RNA (1)...(19): siRNA sense strand
ggaaaaucuuaaacggcua

SEQ ID NO: 2449848 - RNA, 19 nt, Homo sapiens
  misc_RNA (1)...(19): siRNA sense strand
gagaguggccccaggaaaa

SEQ ID NO: 2449849 - RNA, 19 nt, Homo sapiens
  misc_RNA (1)...(19): siRNA sense strand
acacugagccugaggacga

SEQ ID NO: 2449850 - RNA, 19 nt, Homo sapiens
  misc_RNA (1)...(19): siRNA sense strand
gagucacauuaaagaggaa

SEQ ID NO: 2449851 - RNA, 19 nt, Homo sapiens
  misc_RNA (1)...(19): siRNA sense strand
cuacguggcagcugugaaa

SEQ ID NO: 2449852 - RNA, 19 nt, Homo sapiens
  misc_RNA (1)...(19): siRNA sense strand
ucaaagaguggcagcucaa

SEQ ID NO: 2449853 - RNA, 19 nt, Homo sapiens
  misc_RNA (1)...(19): siRNA sense strand
acccgaagacagagagaga

SEQ ID NO: 2449854 - RNA, 19 nt, Homo sapiens
  misc_RNA (1)...(19): siRNA sense strand
ggauggaagccaaggugga

SEQ ID NO: 2449855 - RNA, 19 nt, Homo sapiens
  misc_RNA (1)...(19): siRNA sense strand
ccgaagacagagagagaag

SEQ ID NO: 2449856 - RNA, 19 nt, Homo sapiens
  misc_RNA (1)...(19): siRNA sense strand
acgagaagguuguuuccua

SEQ ID NO: 2449857 - RNA, 19 nt, Homo sapiens
  misc_RNA (1)...(19): siRNA sense strand
acaccaucgcugagaaaca

SEQ ID NO: 2449858 - RNA, 19 nt, Homo sapiens
  misc_RNA (1)...(19): siRNA sense strand
aggaagaagauguuuauca

SEQ ID NO: 2449859 - RNA, 19 nt, Homo sapiens
  misc_RNA (1)...(19): siRNA sense strand
cggcuaagagacagcauca

SEQ ID NO: 2449860 - RNA, 19 nt, Homo sapiens
  misc_RNA (1)...(19): siRNA sense strand
gcagaggaccuaagccuuu

SEQ ID NO: 2449861 - RNA, 19 nt, Homo sapiens
  misc_RNA (1)...(19): siRNA sense strand
gccagaagauacugacuca

SEQ ID NO: 2449862 - RNA, 19 nt, Homo sapiens
  misc_RNA (1)...(19): siRNA sense strand
uggaagaagaagauaugau

SEQ ID NO: 2449863 - RNA, 19 nt, Homo sapiens
  misc_RNA (1)...(19): siRNA sense strand
ugucuauguuauugugaga

SEQ ID NO: 2449864 - RNA, 19 nt, Homo sapiens
  misc_RNA (1)...(19): siRNA sense strand
agacagacuuggagaucac

SEQ ID NO: 2449865 - RNA, 19 nt, Homo sapiens
  misc_RNA (1)...(19): siRNA sense strand
ccuuuaaaauugugcccua

SEQ ID NO: 2449866 - RNA, 19 nt, Homo sapiens
  misc_RNA (1)...(19): siRNA sense strand
cguacagcguggccaacaa

SEQ ID NO: 2449867 - RNA, 19 nt, Homo sapiens
  misc_RNA (1)...(19): siRNA sense strand
cagaagaaacgaucggagu

SEQ ID NO: 2449868 - RNA, 19 nt, Homo sapiens
  misc_RNA (1)...(19): siRNA sense strand
ggaaugaccaaucuggaga

SEQ ID NO: 2449869 - RNA, 19 nt, Homo sapiens
  misc_RNA (1)...(19): siRNA sense strand
cagcaaguagcacaaguaa

SEQ ID NO: 2449870 - RNA, 19 nt, Homo sapiens
  misc_RNA (1)...(19): siRNA sense strand
cuguggaauucauguguca

SEQ ID NO: 2449871 - RNA, 19 nt, Homo sapiens
  misc_RNA (1)...(19): siRNA sense strand
gugccaucuuggucaggaa

SEQ ID NO: 2449872 - RNA, 19 nt, Homo sapiens
  misc_RNA (1)...(19): siRNA sense strand
gcauugucaacguggauga

SEQ ID NO: 2449873 - RNA, 19 nt, Homo sapiens
  misc_RNA (1)...(19): siRNA sense strand
uaaugaagucccugagguu

SEQ ID NO: 2449874 - RNA, 19 nt, Homo sapiens
  misc_RNA (1)...(19): siRNA sense strand
caaccagcuggaagaagaa

SEQ ID NO: 2449875 - RNA, 19 nt, Homo sapiens
  misc_RNA (1)...(19): siRNA sense strand
gucaggaagaagauguuua

SEQ ID NO: 2449876 - RNA, 19 nt, Homo sapiens
  misc_RNA (1)...(19): siRNA sense strand
gcgacauccucaucgucua

SEQ ID NO: 2449877 - RNA, 19 nt, Homo sapiens
  misc_RNA (1)...(19): siRNA sense strand
cagcacagcaaguagcaca

SEQ ID NO: 2449878 - RNA, 19 nt, Homo sapiens
  misc_RNA (1)...(19): siRNA sense strand
acauggaagaaauugggaa

SEQ ID NO: 2449879 - RNA, 19 nt, Homo sapiens
  misc_RNA (1)...(19): siRNA sense strand
aggcguacagcguggccaa

SEQ ID NO: 2449880 - RNA, 19 nt, Homo sapiens
  misc_RNA (1)...(19): siRNA sense strand
uggaagccaagguggagaa

SEQ ID NO: 2449881 - RNA, 19 nt, Homo sapiens
  misc_RNA (1)...(19): siRNA sense strand
gaagauauauucuggagac

SEQ ID NO: 2449882 - RNA, 19 nt, Homo sapiens
  misc_RNA (1)...(19): siRNA sense strand
agacgaggagacuggaaaa

SEQ ID NO: 2449883 - RNA, 19 nt, Homo sapiens
  misc_RNA (1)...(19): siRNA sense strand
augacaaaucagagggaug

SEQ ID NO: 2449884 - RNA, 19 nt, Homo sapiens
  misc_RNA (1)...(19): siRNA sense strand
gggaggaggcugaugcugu

SEQ ID NO: 2449885 - RNA, 19 nt, Homo sapiens
  misc_RNA (1)...(19): siRNA sense strand
ucaagagcggccugggaau

SEQ ID NO: 2449886 - RNA, 19 nt, Homo sapiens
  misc_RNA (1)...(19): siRNA sense strand
gggcauugucaacguggau

SEQ ID NO: 2449887 - RNA, 19 nt, Homo sapiens
  misc_RNA (1)...(19): siRNA sense strand
aaucaggaaagcagacaga

SEQ ID NO: 2449888 - RNA, 19 nt, Homo sapiens
  misc_RNA (1)...(19): siRNA sense strand
cgguuuagcuggaggcuuc

SEQ ID NO: 2449889 - RNA, 19 nt, Homo sapiens
  misc_RNA (1)...(19): siRNA sense strand
cuuuauugcagguggaugu

SEQ ID NO: 2449890 - RNA, 19 nt, Homo sapiens
  misc_RNA (1)...(19): siRNA sense strand
ccuuagucacugugggcca

SEQ ID NO: 2449891 - RNA, 19 nt, Homo sapiens
  misc_RNA (1)...(19): siRNA sense strand
gaugaaagccacacaggga

SEQ ID NO: 2449892 - RNA, 19 nt, Homo sapiens
  misc_RNA (1)...(19): siRNA sense strand
auaacaaggaagcaggaau

SEQ ID NO: 2449893 - RNA, 19 nt, Homo sapiens
  misc_RNA (1)...(19): siRNA sense strand
gugggaucuaccugaauaa

SEQ ID NO: 2449894 - RNA, 19 nt, Homo sapiens
  misc_RNA (1)...(19): siRNA sense strand
agaaauuacaugagcagaa

SEQ ID NO: 2449895 - RNA, 19 nt, Homo sapiens
  misc_RNA (1)...(19): siRNA sense strand
gcucauuauuuguggacuu

SEQ ID NO: 2449896 - RNA, 19 nt, Homo sapiens
  misc_RNA (1)...(19): siRNA sense strand
ccucaaagacacugguuau

SEQ ID NO: 2449897 - RNA, 19 nt, Homo sapiens
  misc_RNA (1)...(19): siRNA sense strand
ccgaauaggcacaggagga

SEQ ID NO: 2449898 - RNA, 19 nt, Homo sapiens
  misc_RNA (1)...(19): siRNA sense strand
acuuaaaccaaauggcaaa

SEQ ID NO: 2449899 - RNA, 19 nt, Homo sapiens
  misc_RNA (1)...(19): siRNA sense strand
caucaauugugaagagcuu

SEQ ID NO: 2449900 - RNA, 19 nt, Homo sapiens
  misc_RNA (1)...(19): siRNA sense strand
ggcuaugaacagaggacaa

SEQ ID NO: 2449901 - RNA, 19 nt, Homo sapiens
  misc_RNA (1)...(19): siRNA sense strand
gguugauggaucugggcaa

SEQ ID NO: 2449902 - RNA, 19 nt, Homo sapiens
  misc_RNA (1)...(19): siRNA sense strand
gaugaagagcgacgagcaa

SEQ ID NO: 2449903 - RNA, 19 nt, Homo sapiens
  misc_RNA (1)...(19): siRNA sense strand
uggaacaaauggugcaaca

SEQ ID NO: 2449904 - RNA, 19 nt, Homo sapiens
  misc_RNA (1)...(19): siRNA sense strand
gggccaaaugacaaugaua

SEQ ID NO: 2449905 - RNA, 19 nt, Homo sapiens
  misc_RNA (1)...(19): siRNA sense strand
uugcuaagguggugguuga

SEQ ID NO: 2449906 - RNA, 19 nt, Homo sapiens
  misc_RNA (1)...(19): siRNA sense strand
ugaaagaccaacagcaaca

SEQ ID NO: 2449907 - RNA, 19 nt, Homo sapiens
  misc_RNA (1)...(19): siRNA sense strand
agaaggaguuagagcucau

SEQ ID NO: 2449908 - RNA, 19 nt, Homo sapiens
  misc_RNA (1)...(19): siRNA sense strand
uguggauacuugagaauga

SEQ ID NO: 2449909 - RNA, 19 nt, Homo sapiens
  misc_RNA (1)...(19): siRNA sense strand
uuguggacuuggaaagaua

SEQ ID NO: 2449910 - RNA, 19 nt, Homo sapiens
  misc_RNA (1)...(19): siRNA sense strand
cagcaugaacuuaaaccaa

SEQ ID NO: 2449911 - RNA, 19 nt, Homo sapiens
  misc_RNA (1)...(19): siRNA sense strand
ugucaaaugguucuggaaa

SEQ ID NO: 2449912 - RNA, 19 nt, Homo sapiens
  misc_RNA (1)...(19): siRNA sense strand
ggcagaaccaauugaaaga

SEQ ID NO: 2449913 - RNA, 19 nt, Homo sapiens
  misc_RNA (1)...(19): siRNA sense strand
cuucaaucgaauagacauu

SEQ ID NO: 2449914 - RNA, 19 nt, Homo sapiens
  misc_RNA (1)...(19): siRNA sense strand
auugaaagaccaacagcaa

SEQ ID NO: 2449915 - RNA, 19 nt, Homo sapiens
  misc_RNA (1)...(19): siRNA sense strand
gguuaucagagguuggauu

SEQ ID NO: 2449916 - RNA, 19 nt, Homo sapiens
  misc_RNA (1)...(19): siRNA sense strand
gaaccaauugaaagaccaa

SEQ ID NO: 2449917 - RNA, 19 nt, Homo sapiens
  misc_RNA (1)...(19): siRNA sense strand
agacauuugaugagaagga

SEQ ID NO: 2449918 - RNA, 19 nt, Homo sapiens
  misc_RNA (1)...(19): siRNA sense strand
agaagauccauaagaaaca

SEQ ID NO: 2449919 - RNA, 19 nt, Homo sapiens
  misc_RNA (1)...(19): siRNA sense strand
agucaauuaccuuggauga

SEQ ID NO: 2449920 - RNA, 19 nt, Homo sapiens
  misc_RNA (1)...(19): siRNA sense strand
ggcaacaggcagaguuuau

SEQ ID NO: 2449921 - RNA, 19 nt, Homo sapiens
  misc_RNA (1)...(19): siRNA sense strand
gaaugauauuacagguguu

SEQ ID NO: 2449922 - RNA, 19 nt, Homo sapiens
  misc_RNA (1)...(19): siRNA sense strand
aaaauuucguggagaagaa

SEQ ID NO: 2449923 - RNA, 19 nt, Homo sapiens
  misc_RNA (1)...(19): siRNA sense strand
cuggaagcgauuaaugaua

SEQ ID NO: 2449924 - RNA, 19 nt, Homo sapiens
  misc_RNA (1)...(19): siRNA sense strand
guguauggaaucacaagaa

SEQ ID NO: 2449925 - RNA, 19 nt, Homo sapiens
  misc_RNA (1)...(19): siRNA sense strand
gccaaaugacaaugauaca

SEQ ID NO: 2449926 - RNA, 19 nt, Homo sapiens
  misc_RNA (1)...(19): siRNA sense strand
ugaagagcgacgagcaaga

SEQ ID NO: 2449927 - RNA, 19 nt, Homo sapiens
  misc_RNA (1)...(19): siRNA sense strand
caugaaaaugagaccaaaa

SEQ ID NO: 2449928 - RNA, 19 nt, Homo sapiens
  misc_RNA (1)...(19): siRNA sense strand
gcacuaacaaccugccgaa

SEQ ID NO: 2449929 - RNA, 19 nt, Homo sapiens
  misc_RNA (1)...(19): siRNA sense strand
guauggaaucacaagaaga

SEQ ID NO: 2449930 - RNA, 19 nt, Homo sapiens
  misc_RNA (1)...(19): siRNA sense strand
ggacaacgcaacaaggcca

SEQ ID NO: 2449931 - RNA, 19 nt, Homo sapiens
  misc_RNA (1)...(19): siRNA sense strand
ccauaacaacagaacaaca

SEQ ID NO: 2449932 - RNA, 19 nt, Homo sapiens
  misc_RNA (1)...(19): siRNA sense strand
agaccuaccagaaggcuau

SEQ ID NO: 2449933 - RNA, 19 nt, Homo sapiens
  misc_RNA (1)...(19): siRNA sense strand
uuaaugacuggaagguaaa

SEQ ID NO: 2449934 - RNA, 19 nt, Homo sapiens
  misc_RNA (1)...(19): siRNA sense strand
cauagaaauuacaugagca

SEQ ID NO: 2449935 - RNA, 19 nt, Homo sapiens
  misc_RNA (1)...(19): siRNA sense strand
aagguaaacacccgguuaa

SEQ ID NO: 2449936 - RNA, 19 nt, Homo sapiens
  misc_RNA (1)...(19): siRNA sense strand
aaucacaagaagauccaua

SEQ ID NO: 2449937 - RNA, 19 nt, Homo sapiens
  misc_RNA (1)...(19): siRNA sense strand
agaaacaaggugcuggauu

SEQ ID NO: 2449938 - RNA, 19 nt, Homo sapiens
  misc_RNA (1)...(19): siRNA sense strand
gaagaauacgcuugaucca

SEQ ID NO: 2449939 - RNA, 19 nt, Homo sapiens
  misc_RNA (1)...(19): siRNA sense strand
gaacagaggacaacgcaac

SEQ ID NO: 2449940 - RNA, 19 nt, Homo sapiens
  misc_RNA (1)...(19): siRNA sense strand
gcauugagguuuccaggga

SEQ ID NO: 2449941 - RNA, 19 nt, Homo sapiens
  misc_RNA (1)...(19): siRNA sense strand
acauacuccuccagaccua

SEQ ID NO: 2449942 - RNA, 19 nt, Homo sapiens
  misc_RNA (1)...(19): siRNA sense strand
ccaaaguggaaucagcauu

SEQ ID NO: 2449943 - RNA, 19 nt, Homo sapiens
  misc_RNA (1)...(19): siRNA sense strand
ccuaugaaagcuaugaaaa

SEQ ID NO: 2449944 - RNA, 19 nt, Homo sapiens
  misc_RNA (1)...(19): siRNA sense strand
aauaggcacaggaggacaa

SEQ ID NO: 2449945 - RNA, 19 nt, Homo sapiens
  misc_RNA (1)...(19): siRNA sense strand
cggcagaaccaauugaaag

SEQ ID NO: 2449946 - RNA, 19 nt, Homo sapiens
  misc_RNA (1)...(19): siRNA sense strand
agaccaacagcaacagcaa

SEQ ID NO: 2449947 - RNA, 19 nt, Homo sapiens
  misc_RNA (1)...(19): siRNA sense strand
gucaaaugguucuggaaag

SEQ ID NO: 2449948 - RNA, 19 nt, Homo sapiens
  misc_RNA (1)...(19): siRNA sense strand
cuggcagagaggagaguca

SEQ ID NO: 2449949 - RNA, 19 nt, Homo sapiens
  misc_RNA (1)...(19): siRNA sense strand
aguuaauccggaacauuua

SEQ ID NO: 2449950 - RNA, 19 nt, Homo sapiens
  misc_RNA (1)...(19): siRNA sense strand
gaauaaugggaauggcugu

SEQ ID NO: 2449951 - RNA, 19 nt, Homo sapiens
  misc_RNA (1)...(19): siRNA sense strand
ucuggaaagcuguggaguu

SEQ ID NO: 2449952 - RNA, 19 nt, Homo sapiens
  misc_RNA (1)...(19): siRNA sense strand
guggcaaggcccagggaaa

SEQ ID NO: 2449953 - RNA, 19 nt, Homo sapiens
  misc_RNA (1)...(19): siRNA sense strand
cggaaggaccugaugguga

SEQ ID NO: 2449954 - RNA, 19 nt, Homo sapiens
  misc_RNA (1)...(19): siRNA sense strand
aagaauuggcccaggguga

SEQ ID NO: 2449955 - RNA, 19 nt, Homo sapiens
  misc_RNA (1)...(19): siRNA sense strand
gugaaaucccagacugcaa

SEQ ID NO: 2449956 - RNA, 19 nt, Homo sapiens
  misc_RNA (1)...(19): siRNA sense strand
caggaaggagcuggagaaa

SEQ ID NO: 2449957 - RNA, 19 nt, Homo sapiens
  misc_RNA (1)...(19): siRNA sense strand
cgaaauguguucagcguug

SEQ ID NO: 2449958 - RNA, 19 nt, Homo sapiens
  misc_RNA (1)...(19): siRNA sense strand
gcuuugaaugcuauggcua

SEQ ID NO: 2449959 - RNA, 19 nt, Homo sapiens
  misc_RNA (1)...(19): siRNA sense strand
cagaaaacgaggacuggaa

SEQ ID NO: 2449960 - RNA, 19 nt, Homo sapiens
  misc_RNA (1)...(19): siRNA sense strand
acaucaucaucgacgacaa

SEQ ID NO: 2449961 - RNA, 19 nt, Homo sapiens
  misc_RNA (1)...(19): siRNA sense strand
aggaccugauggugaagaa

SEQ ID NO: 2449962 - RNA, 19 nt, Homo sapiens
  misc_RNA (1)...(19): siRNA sense strand
agaaacacggggaggacua

SEQ ID NO: 2449963 - RNA, 19 nt, Homo sapiens
  misc_RNA (1)...(19): siRNA sense strand
cggugaugaacaaugacaa

SEQ ID NO: 2449964 - RNA, 19 nt, Homo sapiens
  misc_RNA (1)...(19): siRNA sense strand
gggaaaguaaaauggguca

SEQ ID NO: 2449965 - RNA, 19 nt, Homo sapiens
  misc_RNA (1)...(19): siRNA sense strand
gggcaaguggacagugagu

SEQ ID NO: 2449966 - RNA, 19 nt, Homo sapiens
  misc_RNA (1)...(19): siRNA sense strand
cgagauucuguaugaugaa

SEQ ID NO: 2449967 - RNA, 19 nt, Homo sapiens
  misc_RNA (1)...(19): siRNA sense strand
ugagaagccgucaggguca

SEQ ID NO: 2449968 - RNA, 19 nt, Homo sapiens
  misc_RNA (1)...(19): siRNA sense strand
ccagacugcaaauggaaca

SEQ ID NO: 2449969 - RNA, 19 nt, Homo sapiens
  misc_RNA (1)...(19): siRNA sense strand
gaaugaagacugugcggaa

SEQ ID NO: 2449970 - RNA, 19 nt, Homo sapiens
  misc_RNA (1)...(19): siRNA sense strand
gggugaguugccagagaaa

SEQ ID NO: 2449971 - RNA, 19 nt, Homo sapiens
  misc_RNA (1)...(19): siRNA sense strand
gggugaguugccagagaaa

SEQ ID NO: 2449972 - RNA, 19 nt, Homo sapiens
  misc_RNA (1)...(19): siRNA sense strand
gggugaguugccagagaaa

SEQ ID NO: 2449973 - RNA, 19 nt, Homo sapiens
  misc_RNA (1)...(19): siRNA sense strand
gggugaguugccagagaaa

SEQ ID NO: 2449974 - RNA, 19 nt, Homo sapiens
  misc_RNA (1)...(19): siRNA sense strand
gggugaguugccagagaaa

SEQ ID NO: 2449975 - RNA, 19 nt, Homo sapiens
  misc_RNA (1)...(19): siRNA sense strand
aggaacaauccgagcaaga

SEQ ID NO: 2449976 - RNA, 19 nt, Homo sapiens
  misc_RNA (1)...(19): siRNA sense strand
aguccaagcagcagcaaau

SEQ ID NO: 2449977 - RNA, 19 nt, Homo sapiens
  misc_RNA (1)...(19): siRNA sense strand
ugucuaacucccagcggaa

SEQ ID NO: 2449978 - RNA, 19 nt, Homo sapiens
  misc_RNA (1)...(19): siRNA sense strand
augaagacugugcggaauu

SEQ ID NO: 2449979 - RNA, 19 nt, Homo sapiens
  misc_RNA (1)...(19): siRNA sense strand
ggcaguggcuggaacgaca

SEQ ID NO: 2449980 - RNA, 19 nt, Homo sapiens
  misc_RNA (1)...(19): siRNA sense strand
acccaacaauagcgggaau

SEQ ID NO: 2449981 - RNA, 19 nt, Homo sapiens
  misc_RNA (1)...(19): siRNA sense strand
gcugaaggcugcagugggu

SEQ ID NO: 2449982 - RNA, 19 nt, Homo sapiens
  misc_RNA (1)...(19): siRNA sense strand
gcugaaggcugcagugggu

SEQ ID NO: 2449983 - RNA, 19 nt, Homo sapiens
  misc_RNA (1)...(19): siRNA sense strand
gcugaaggcugcagugggu

SEQ ID NO: 2449984 - RNA, 19 nt, Homo sapiens
  misc_RNA (1)...(19): siRNA sense strand
gcugaaggcugcagugggu

SEQ ID NO: 2449985 - RNA, 19 nt, Homo sapiens
  misc_RNA (1)...(19): siRNA sense strand
gcugaaggcugcagugggu

SEQ ID NO: 2449986 - RNA, 19 nt, Homo sapiens
  misc_RNA (1)...(19): siRNA sense strand
gcugaaggcugcagugggu

SEQ ID NO: 2449987 - RNA, 19 nt, Homo sapiens
  misc_RNA (1)...(19): siRNA sense strand
guguguggccuguggcaau

SEQ ID NO: 2449988 - RNA, 19 nt, Homo sapiens
  misc_RNA (1)...(19): siRNA sense strand
ggugugugcuggaggguac

SEQ ID NO: 2449989 - RNA, 19 nt, Homo sapiens
  misc_RNA (1)...(19): siRNA sense strand
agguggaacuggugggguu

SEQ ID NO: 2449990 - RNA, 19 nt, Homo sapiens
  misc_RNA (1)...(19): siRNA sense strand
ugguguugggugaguacaa

SEQ ID NO: 2449991 - RNA, 19 nt, Homo sapiens
  misc_RNA (1)...(19): siRNA sense strand
aguuuaaggaagauggcaa

SEQ ID NO: 2449992 - RNA, 19 nt, Homo sapiens
  misc_RNA (1)...(19): siRNA sense strand
guuuaaggaagauggcaau

SEQ ID NO: 2449993 - RNA, 19 nt, Homo sapiens
  misc_RNA (1)...(19): siRNA sense strand
agaagauaguuuaaggaag

SEQ ID NO: 2449994 - RNA, 19 nt, Homo sapiens
  misc_RNA (1)...(19): siRNA sense strand
ggcaauaauaacaacacau

SEQ ID NO: 2449995 - RNA, 19 nt, Homo sapiens
  misc_RNA (1)...(19): siRNA sense strand
cgacagagcuucuucaaua

SEQ ID NO: 2449996 - RNA, 19 nt, Homo sapiens
  misc_RNA (1)...(19): siRNA sense strand
gcucaugaugcuugguguu

SEQ ID NO: 2449997 - RNA, 19 nt, Homo sapiens
  misc_RNA (1)...(19): siRNA sense strand
cggagcacgaagugagcaa

SEQ ID NO: 2449998 - RNA, 19 nt, Homo sapiens
  misc_RNA (1)...(19): siRNA sense strand
cguggagagcagaggcaga

SEQ ID NO: 2449999 - RNA, 19 nt, Homo sapiens
  misc_RNA (1)...(19): siRNA sense strand
gaagacacguggagagcag

SEQ ID NO: 2450000 - RNA, 19 nt, Homo sapiens
  misc_RNA (1)...(19): siRNA sense strand
cggaaucgucacugagaaa

SEQ ID NO: 2450001 - RNA, 19 nt, Homo sapiens
  misc_RNA (1)...(19): siRNA sense strand
acucauuauuggacaggaa

SEQ ID NO: 2450002 - RNA, 19 nt, Homo sapiens
  misc_RNA (1)...(19): siRNA sense strand
ggaaauaacccauaccuca

SEQ ID NO: 2450003 - RNA, 19 nt, Homo sapiens
  misc_RNA (1)...(19): siRNA sense strand
ccaagaguuucuauggaga

SEQ ID NO: 2450004 - RNA, 19 nt, Homo sapiens
  misc_RNA (1)...(19): siRNA sense strand
ucaaaaucgaagagcuuua

SEQ ID NO: 2450005 - RNA, 19 nt, Homo sapiens
  misc_RNA (1)...(19): siRNA sense strand
ccagaaucgaagcuguaaa

SEQ ID NO: 2450006 - RNA, 19 nt, Homo sapiens
  misc_RNA (1)...(19): siRNA sense strand
cuucagaaucuaugugcuu

SEQ ID NO: 2450007 - RNA, 19 nt, Homo sapiens
  misc_RNA (1)...(19): siRNA sense strand
cagcaguaguccuucaaaa

SEQ ID NO: 2450008 - RNA, 19 nt, Homo sapiens
  misc_RNA (1)...(19): siRNA sense strand
guaccugaacaauggaaca

SEQ ID NO: 2450009 - RNA, 19 nt, Homo sapiens
  misc_RNA (1)...(19): siRNA sense strand
cgucacugagaaaguuaaa

SEQ ID NO: 2450010 - RNA, 19 nt, Homo sapiens
  misc_RNA (1)...(19): siRNA sense strand
ccaucuacacugaacaaga

SEQ ID NO: 2450011 - RNA, 19 nt, Homo sapiens
  misc_RNA (1)...(19): siRNA sense strand
cuugcuaaccgcugaaaga

SEQ ID NO: 2450012 - RNA, 19 nt, Homo sapiens
  misc_RNA (1)...(19): siRNA sense strand
gcacagaaauaaacaccac

SEQ ID NO: 2450013 - RNA, 19 nt, Homo sapiens
  misc_RNA (1)...(19): siRNA sense strand
guuaaagaaauucgagauc

SEQ ID NO: 2450014 - RNA, 19 nt, Homo sapiens
  misc_RNA (1)...(19): siRNA sense strand
uggacuuacuucacccaaa

SEQ ID NO: 2450015 - RNA, 19 nt, Homo sapiens
  misc_RNA (1)...(19): siRNA sense strand
ccggaaucgucacugagaa

SEQ ID NO: 2450016 - RNA, 19 nt, Homo sapiens
  misc_RNA (1)...(19): siRNA sense strand
guuaaugacaucaaaggca

SEQ ID NO: 2450017 - RNA, 19 nt, Homo sapiens
  misc_RNA (1)...(19): siRNA sense strand
ugcacuagguacuggcauu

SEQ ID NO: 2450018 - RNA, 19 nt, Homo sapiens
  misc_RNA (1)...(19): siRNA sense strand
gggaaauggaggugcgcaa

SEQ ID NO: 2450019 - RNA, 19 nt, Homo sapiens
  misc_RNA (1)...(19): siRNA sense strand
aggagaaugaggacggaga

SEQ ID NO: 2450020 - RNA, 19 nt, Homo sapiens
  misc_RNA (1)...(19): siRNA sense strand
gcucaaagagggaaaggga

SEQ ID NO: 2450021 - RNA, 19 nt, Homo sapiens
  misc_RNA (1)...(19): siRNA sense strand
gggaaagggagcaacccaa

SEQ ID NO: 2450022 - RNA, 19 nt, Homo sapiens
  misc_RNA (1)...(19): siRNA sense strand
aguuaaugcuacagauugu

SEQ ID NO: 2450023 - RNA, 19 nt, Homo sapiens
  misc_RNA (1)...(19): siRNA sense strand
ccucaugguaucaaagaca

SEQ ID NO: 2450024 - RNA, 19 nt, Homo sapiens
  misc_RNA (1)...(19): siRNA sense strand
uuacauuaugccugugaaa

SEQ ID NO: 2450025 - RNA, 19 nt, Homo sapiens
  misc_RNA (1)...(19): siRNA sense strand
gaauaagcauggugagagc

SEQ ID NO: 2450026 - RNA, 19 nt, Homo sapiens
  misc_RNA (1)...(19): siRNA sense strand
caaguguggcgguggguga

SEQ ID NO: 2450027 - RNA, 19 nt, Homo sapiens
  misc_RNA (1)...(19): siRNA sense strand
ucaugguaucaaagacaaa

SEQ ID NO: 2450028 - RNA, 19 nt, Homo sapiens
  misc_RNA (1)...(19): siRNA sense strand
guaucaaagacaaagcaga

SEQ ID NO: 2450029 - RNA, 19 nt, Homo sapiens
  misc_RNA (1)...(19): siRNA sense strand
aagaauaagcauggugaga

SEQ ID NO: 2450030 - RNA, 19 nt, Homo sapiens
  misc_RNA (1)...(19): siRNA sense strand
acuugaugcuggugucgaa

SEQ ID NO: 2450031 - RNA, 19 nt, Homo sapiens
  misc_RNA (1)...(19): siRNA sense strand
caucaugcugugaagaaaa

SEQ ID NO: 2450032 - RNA, 19 nt, Homo sapiens
  misc_RNA (1)...(19): siRNA sense strand
uguuauggcuguaccgcau

SEQ ID NO: 2450033 - RNA, 19 nt, Homo sapiens
  misc_RNA (1)...(19): siRNA sense strand
acggcuaugugguggaaga

SEQ ID NO: 2450034 - RNA, 19 nt, Homo sapiens
  misc_RNA (1)...(19): siRNA sense strand
uguuguaagaagaggaaac

SEQ ID NO: 2450035 - RNA, 19 nt, Homo sapiens
  misc_RNA (1)...(19): siRNA sense strand
ggaugaagguggagggcag

SEQ ID NO: 2450036 - RNA, 19 nt, Homo sapiens
  misc_RNA (1)...(19): siRNA sense strand
caaaauaggcagaaccuga

SEQ ID NO: 2450037 - RNA, 19 nt, Homo sapiens
  misc_RNA (1)...(19): siRNA sense strand
gcucuuaacagcagugcca

SEQ ID NO: 2450038 - RNA, 19 nt, Homo sapiens
  misc_RNA (1)...(19): siRNA sense strand
ggagaagaugggaggcuca

SEQ ID NO: 2450039 - RNA, 19 nt, Homo sapiens
  misc_RNA (1)...(19): siRNA sense strand
cgguggagaugguggugau

SEQ ID NO: 2450040 - RNA, 19 nt, Homo sapiens
  misc_RNA (1)...(19): siRNA sense strand
uguuacaaguccugaccaa

SEQ ID NO: 2450041 - RNA, 19 nt, Homo sapiens
  misc_RNA (1)...(19): siRNA sense strand
ccuccaagaagcuggugaa

SEQ ID NO: 2450042 - RNA, 19 nt, Homo sapiens
  misc_RNA (1)...(19): siRNA sense strand
gggccaucuuggaggucuu

SEQ ID NO: 2450043 - RNA, 19 nt, Homo sapiens
  misc_RNA (1)...(19): siRNA sense strand
caguugugaugauggucaa

SEQ ID NO: 2450044 - RNA, 19 nt, Homo sapiens
  misc_RNA (1)...(19): siRNA sense strand
uggaggucuugcagagcua

SEQ ID NO: 2450045 - RNA, 19 nt, Homo sapiens
  misc_RNA (1)...(19): siRNA sense strand
gggcuggaggagaucgcaa

SEQ ID NO: 2450046 - RNA, 19 nt, Homo sapiens
  misc_RNA (1)...(19): siRNA sense strand
cgccgaugagauugugaaa

SEQ ID NO: 2450047 - RNA, 19 nt, Homo sapiens
  misc_RNA (1)...(19): siRNA sense strand
gugcugagcugguuggaga

SEQ ID NO: 2450048 - RNA, 19 nt, Homo sapiens
  misc_RNA (1)...(19): siRNA sense strand
cugcauaccuucugugcca

SEQ ID NO: 2450049 - RNA, 19 nt, Homo sapiens
  misc_RNA (1)...(19): siRNA sense strand
ccguaauacaucagucuuu

SEQ ID NO: 2450050 - RNA, 19 nt, Homo sapiens
  misc_RNA (1)...(19): siRNA sense strand
gccuguuagcuguggcaua

SEQ ID NO: 2450051 - RNA, 19 nt, Homo sapiens
  misc_RNA (1)...(19): siRNA sense strand
uggagaacugugugggaga

SEQ ID NO: 2450052 - RNA, 19 nt, Homo sapiens
  misc_RNA (1)...(19): siRNA sense strand
aggaggagcucaaagagga

SEQ ID NO: 2450053 - RNA, 19 nt, Homo sapiens
  misc_RNA (1)...(19): siRNA sense strand
ggucugugguugcggucca

SEQ ID NO: 2450054 - RNA, 19 nt, Homo sapiens
  misc_RNA (1)...(19): siRNA sense strand
gugcugagcuuuagcggga

SEQ ID NO: 2450055 - RNA, 19 nt, Homo sapiens
  misc_RNA (1)...(19): siRNA sense strand
gcaacaggcugguggagcu

SEQ ID NO: 2450056 - RNA, 19 nt, Homo sapiens
  misc_RNA (1)...(19): siRNA sense strand
ggaaaguacuggaggagcu

SEQ ID NO: 2450057 - RNA, 19 nt, Homo sapiens
  misc_RNA (1)...(19): siRNA sense strand
aggaaguguucaaagcaaa

SEQ ID NO: 2450058 - RNA, 19 nt, Homo sapiens
  misc_RNA (1)...(19): siRNA sense strand
cguaaaagagcgaaagaau

SEQ ID NO: 2450059 - RNA, 19 nt, Homo sapiens
  misc_RNA (1)...(19): siRNA sense strand
gcagaaaggcagauggugu

SEQ ID NO: 2450060 - RNA, 19 nt, Homo sapiens
  misc_RNA (1)...(19): siRNA sense strand
aggaaaugaagcagcgaau

SEQ ID NO: 2450061 - RNA, 19 nt, Homo sapiens
  misc_RNA (1)...(19): siRNA sense strand
aggaagaggccgagugcca

SEQ ID NO: 2450062 - RNA, 19 nt, Homo sapiens
  misc_RNA (1)...(19): siRNA sense strand
gggauaaacuccaggaagc

SEQ ID NO: 2450063 - RNA, 19 nt, Homo sapiens
  misc_RNA (1)...(19): siRNA sense strand
ccaagaaagaagcagaaca

SEQ ID NO: 2450064 - RNA, 19 nt, Homo sapiens
  misc_RNA (1)...(19): siRNA sense strand
ggaagaaggccgaguggcu

SEQ ID NO: 2450065 - RNA, 19 nt, Homo sapiens
  misc_RNA (1)...(19): siRNA sense strand
gggcuguucaagagaaaga

SEQ ID NO: 2450066 - RNA, 19 nt, Homo sapiens
  misc_RNA (1)...(19): siRNA sense strand
gaacugaagcagaaaggca

SEQ ID NO: 2450067 - RNA, 19 nt, Homo sapiens
  misc_RNA (1)...(19): siRNA sense strand
aaagcaaagcugaaagaga

SEQ ID NO: 2450068 - RNA, 19 nt, Homo sapiens
  misc_RNA (1)...(19): siRNA sense strand
ccgggcuguucaagagaaa

SEQ ID NO: 2450069 - RNA, 19 nt, Homo sapiens
  misc_RNA (1)...(19): siRNA sense strand
aagaaagaacuggaggaaa

SEQ ID NO: 2450070 - RNA, 19 nt, Homo sapiens
  misc_RNA (1)...(19): siRNA sense strand
ccauaaaagccuggaggaa

SEQ ID NO: 2450071 - RNA, 19 nt, Homo sapiens
  misc_RNA (1)...(19): siRNA sense strand
caucagagauccagagcag

SEQ ID NO: 2450072 - RNA, 19 nt, Homo sapiens
  misc_RNA (1)...(19): siRNA sense strand
ccuuugagcaggagaggca

SEQ ID NO: 2450073 - RNA, 19 nt, Homo sapiens
  misc_RNA (1)...(19): siRNA sense strand
ccagaggaggagauggauu

SEQ ID NO: 2450074 - RNA, 19 nt, Homo sapiens
  misc_RNA (1)...(19): siRNA sense strand
cugaaagagaaccggaaca

SEQ ID NO: 2450075 - RNA, 19 nt, Homo sapiens
  misc_RNA (1)...(19): siRNA sense strand
gcccagaggaggagaugga

SEQ ID NO: 2450076 - RNA, 19 nt, Homo sapiens
  misc_RNA (1)...(19): siRNA sense strand
ccagaggcagggugaggaa

SEQ ID NO: 2450077 - RNA, 19 nt, Homo sapiens
  misc_RNA (1)...(19): siRNA sense strand
ccaagaucuccaagcagaa

SEQ ID NO: 2450078 - RNA, 19 nt, Homo sapiens
  misc_RNA (1)...(19): siRNA sense strand
cuggagauacacagaaaga

SEQ ID NO: 2450079 - RNA, 19 nt, Homo sapiens
  misc_RNA (1)...(19): siRNA sense strand
agaaagagaccaaaaucaa

SEQ ID NO: 2450080 - RNA, 19 nt, Homo sapiens
  misc_RNA (1)...(19): siRNA sense strand
gccaccaggaagagggaau

SEQ ID NO: 2450081 - RNA, 19 nt, Homo sapiens
  misc_RNA (1)...(19): siRNA sense strand
gccaagaucuccaagcaga

SEQ ID NO: 2450082 - RNA, 19 nt, Homo sapiens
  misc_RNA (1)...(19): siRNA sense strand
ccuucagcuuccuggagaa

SEQ ID NO: 2450083 - RNA, 19 nt, Homo sapiens
  misc_RNA (1)...(19): siRNA sense strand
acagaugccaccaggaaga

SEQ ID NO: 2450084 - RNA, 19 nt, Homo sapiens
  misc_RNA (1)...(19): siRNA sense strand
uucaagagaaagagaccaa

SEQ ID NO: 2450085 - RNA, 19 nt, Homo sapiens
  misc_RNA (1)...(19): siRNA sense strand
caagagaaagagaccaaaa

SEQ ID NO: 2450086 - RNA, 19 nt, Homo sapiens
  misc_RNA (1)...(19): siRNA sense strand
auaaaagccuggaggaagu

SEQ ID NO: 2450087 - RNA, 19 nt, Homo sapiens
  misc_RNA (1)...(19): siRNA sense strand
gaggaaaugaagcagcgaa

SEQ ID NO: 2450088 - RNA, 19 nt, Homo sapiens
  misc_RNA (1)...(19): siRNA sense strand
gagaaagagaccaaaauca

SEQ ID NO: 2450089 - RNA, 19 nt, Homo sapiens
  misc_RNA (1)...(19): siRNA sense strand
ucucugaagaugaggagga

SEQ ID NO: 2450090 - RNA, 19 nt, Homo sapiens
  misc_RNA (1)...(19): siRNA sense strand
cugaagaugaggaggaccu

SEQ ID NO: 2450091 - RNA, 19 nt, Homo sapiens
  misc_RNA (1)...(19): siRNA sense strand
cagggauccagaagaggaa

SEQ ID NO: 2450092 - RNA, 19 nt, Homo sapiens
  misc_RNA (1)...(19): siRNA sense strand
cagaaggccaccagaagga

SEQ ID NO: 2450093 - RNA, 19 nt, Homo sapiens
  misc_RNA (1)...(19): siRNA sense strand
gcaggaaaagcuuggguuu

SEQ ID NO: 2450094 - RNA, 19 nt, Homo sapiens
  misc_RNA (1)...(19): siRNA sense strand
gcagccaaaagaagagaaa

SEQ ID NO: 2450095 - RNA, 19 nt, Homo sapiens
  misc_RNA (1)...(19): siRNA sense strand
auaagaaagaacuggagga

SEQ ID NO: 2450096 - RNA, 19 nt, Homo sapiens
  misc_RNA (1)...(19): siRNA sense strand
aagcagaaggccaccagaa

SEQ ID NO: 2450097 - RNA, 19 nt, Homo sapiens
  misc_RNA (1)...(19): siRNA sense strand
caaaagaagagaaacccaa

SEQ ID NO: 2450098 - RNA, 19 nt, Homo sapiens
  misc_RNA (1)...(19): siRNA sense strand
ggaggggagccgucagaua

SEQ ID NO: 2450099 - RNA, 19 nt, Homo sapiens
  misc_RNA (1)...(19): siRNA sense strand
agccaagaaagaagcagaa

SEQ ID NO: 2450100 - RNA, 19 nt, Homo sapiens
  misc_RNA (1)...(19): siRNA sense strand
agaggcagggugaggaaga

SEQ ID NO: 2450101 - RNA, 19 nt, Homo sapiens
  misc_RNA (1)...(19): siRNA sense strand
uguccaaaucugugaccuu

SEQ ID NO: 2450102 - RNA, 19 nt, Homo sapiens
  misc_RNA (1)...(19): siRNA sense strand
gcuaaaggaagcugcucga

SEQ ID NO: 2450103 - RNA, 19 nt, Homo sapiens
  misc_RNA (1)...(19): siRNA sense strand
aaaugagagcccuggacau

SEQ ID NO: 2450104 - RNA, 19 nt, Homo sapiens
  misc_RNA (1)...(19): siRNA sense strand
gcccuaucucuuugaacaa

SEQ ID NO: 2450105 - RNA, 19 nt, Homo sapiens
  misc_RNA (1)...(19): siRNA sense strand
uggagaagcugauucggaa

SEQ ID NO: 2450106 - RNA, 19 nt, Homo sapiens
  misc_RNA (1)...(19): siRNA sense strand
ccaaguaaggacaaggaca

SEQ ID NO: 2450107 - RNA, 19 nt, Homo sapiens
  misc_RNA (1)...(19): siRNA sense strand
cuggagaaggagucggcua

SEQ ID NO: 2450108 - RNA, 19 nt, Homo sapiens
  misc_RNA (1)...(19): siRNA sense strand
uggagaaggagucggcuau

SEQ ID NO: 2450109 - RNA, 19 nt, Homo sapiens
  misc_RNA (1)...(19): siRNA sense strand
gagugaagcugcaagcgga

SEQ ID NO: 2450110 - RNA, 19 nt, Homo sapiens
  misc_RNA (1)...(19): siRNA sense strand
cacgagaagaagaaggaca

SEQ ID NO: 2450111 - RNA, 19 nt, Homo sapiens
  misc_RNA (1)...(19): siRNA sense strand
aggccauccuggaguacau

SEQ ID NO: 2450112 - RNA, 19 nt, Homo sapiens
  misc_RNA (1)...(19): siRNA sense strand
ccuaccacgagaagaagaa

SEQ ID NO: 2450113 - RNA, 19 nt, Homo sapiens
  misc_RNA (1)...(19): siRNA sense strand
ucgaaugcguggagaagcu

SEQ ID NO: 2450114 - RNA, 19 nt, Homo sapiens
  misc_RNA (1)...(19): siRNA sense strand
uguaugagcgugaggccau

SEQ ID NO: 2450115 - RNA, 19 nt, Homo sapiens
  misc_RNA (1)...(19): siRNA sense strand
aaguaaggacaaggacaaa

SEQ ID NO: 2450116 - RNA, 19 nt, Homo sapiens
  misc_RNA (1)...(19): siRNA sense strand
ggacaaggacaaagugcug

SEQ ID NO: 2450117 - RNA, 19 nt, Homo sapiens
  misc_RNA (1)...(19): siRNA sense strand
ccaccaagcuggagaagcc

SEQ ID NO: 2450118 - RNA, 19 nt, Homo sapiens
  misc_RNA (1)...(19): siRNA sense strand
ugugauuguagguggaauu

SEQ ID NO: 2450119 - RNA, 19 nt, Homo sapiens
  misc_RNA (1)...(19): siRNA sense strand
uggaugaagccgaccgaau

SEQ ID NO: 2450120 - RNA, 19 nt, Homo sapiens
  misc_RNA (1)...(19): siRNA sense strand
cugauugaccacuuggaaa

SEQ ID NO: 2450121 - RNA, 19 nt, Homo sapiens
  misc_RNA (1)...(19): siRNA sense strand
agaagaaacgcucgcgaga

SEQ ID NO: 2450122 - RNA, 19 nt, Homo sapiens
  misc_RNA (1)...(19): siRNA sense strand
gaacaagguggcuggagga

SEQ ID NO: 2450123 - RNA, 19 nt, Homo sapiens
  misc_RNA (1)...(19): siRNA sense strand
auguagaugugguugucaa

SEQ ID NO: 2450124 - RNA, 19 nt, Homo sapiens
  misc_RNA (1)...(19): siRNA sense strand
aguuaagggagcauggaga

SEQ ID NO: 2450125 - RNA, 19 nt, Homo sapiens
  misc_RNA (1)...(19): siRNA sense strand
cgagaggaugcuggagaua

SEQ ID NO: 2450126 - RNA, 19 nt, Homo sapiens
  misc_RNA (1)...(19): siRNA sense strand
ugauugaccacuuggaaaa

SEQ ID NO: 2450127 - RNA, 19 nt, Homo sapiens
  misc_RNA (1)...(19): siRNA sense strand
cgauuguggaagaggagga

SEQ ID NO: 2450128 - RNA, 19 nt, Homo sapiens
  misc_RNA (1)...(19): siRNA sense strand
gcuauuggugucaggaaca

SEQ ID NO: 2450129 - RNA, 19 nt, Homo sapiens
  misc_RNA (1)...(19): siRNA sense strand
cauuuaaagaccugggugu

SEQ ID NO: 2450130 - RNA, 19 nt, Homo sapiens
  misc_RNA (1)...(19): siRNA sense strand
cgcugaagcccaaagguuu

SEQ ID NO: 2450131 - RNA, 19 nt, Homo sapiens
  misc_RNA (1)...(19): siRNA sense strand
uggagauaaugaugacaca

SEQ ID NO: 2450132 - RNA, 19 nt, Homo sapiens
  misc_RNA (1)...(19): siRNA sense strand
uaucauugggcuugcagaa

SEQ ID NO: 2450133 - RNA, 19 nt, Homo sapiens
  misc_RNA (1)...(19): siRNA sense strand
ugacagaacgcgucgcuga

SEQ ID NO: 2450134 - RNA, 19 nt, Homo sapiens
  misc_RNA (1)...(19): siRNA sense strand
ccucuaaauaccagacagu

SEQ ID NO: 2450135 - RNA, 19 nt, Homo sapiens
  misc_RNA (1)...(19): siRNA sense strand
uggaaaauacgaaagguuu

SEQ ID NO: 2450136 - RNA, 19 nt, Homo sapiens
  misc_RNA (1)...(19): siRNA sense strand
agugcagagugcugugauu

SEQ ID NO: 2450137 - RNA, 19 nt, Homo sapiens
  misc_RNA (1)...(19): siRNA sense strand
ccgaccgaauacugaauau

SEQ ID NO: 2450138 - RNA, 19 nt, Homo sapiens
  misc_RNA (1)...(19): siRNA sense strand
gugugaagcuugugaccag

SEQ ID NO: 2450139 - RNA, 19 nt, Homo sapiens
  misc_RNA (1)...(19): siRNA sense strand
uagaacacuuaauugggaa

SEQ ID NO: 2450140 - RNA, 19 nt, Homo sapiens
  misc_RNA (1)...(19): siRNA sense strand
cgaauggaguuaagggagc

SEQ ID NO: 2450141 - RNA, 19 nt, Homo sapiens
  misc_RNA (1)...(19): siRNA sense strand
ugugauuguagguggaauu

SEQ ID NO: 2450142 - RNA, 19 nt, Homo sapiens
  misc_RNA (1)...(19): siRNA sense strand
uggaugaagccgaccgaau

SEQ ID NO: 2450143 - RNA, 19 nt, Homo sapiens
  misc_RNA (1)...(19): siRNA sense strand
cugauugaccacuuggaaa

SEQ ID NO: 2450144 - RNA, 19 nt, Homo sapiens
  misc_RNA (1)...(19): siRNA sense strand
agaagaaacgcucgcgaga

SEQ ID NO: 2450145 - RNA, 19 nt, Homo sapiens
  misc_RNA (1)...(19): siRNA sense strand
gaacaagguggcuggagga

SEQ ID NO: 2450146 - RNA, 19 nt, Homo sapiens
  misc_RNA (1)...(19): siRNA sense strand
auguagaugugguugucaa

SEQ ID NO: 2450147 - RNA, 19 nt, Homo sapiens
  misc_RNA (1)...(19): siRNA sense strand
aguuaagggagcauggaga

SEQ ID NO: 2450148 - RNA, 19 nt, Homo sapiens
  misc_RNA (1)...(19): siRNA sense strand
cgagaggaugcuggagaua

SEQ ID NO: 2450149 - RNA, 19 nt, Homo sapiens
  misc_RNA (1)...(19): siRNA sense strand
ugauugaccacuuggaaaa

SEQ ID NO: 2450150 - RNA, 19 nt, Homo sapiens
  misc_RNA (1)...(19): siRNA sense strand
cgauuguggaagaggagga

SEQ ID NO: 2450151 - RNA, 19 nt, Homo sapiens
  misc_RNA (1)...(19): siRNA sense strand
gcuauuggugucaggaaca

SEQ ID NO: 2450152 - RNA, 19 nt, Homo sapiens
  misc_RNA (1)...(19): siRNA sense strand
cauuuaaagaccugggugu

SEQ ID NO: 2450153 - RNA, 19 nt, Homo sapiens
  misc_RNA (1)...(19): siRNA sense strand
cgcugaagcccaaagguuu

SEQ ID NO: 2450154 - RNA, 19 nt, Homo sapiens
  misc_RNA (1)...(19): siRNA sense strand
uggagauaaugaugacaca

SEQ ID NO: 2450155 - RNA, 19 nt, Homo sapiens
  misc_RNA (1)...(19): siRNA sense strand
uaucauugggcuugcagaa

SEQ ID NO: 2450156 - RNA, 19 nt, Homo sapiens
  misc_RNA (1)...(19): siRNA sense strand
ugacagaacgcgucgcuga

SEQ ID NO: 2450157 - RNA, 19 nt, Homo sapiens
  misc_RNA (1)...(19): siRNA sense strand
ccucuaaauaccagacagu

SEQ ID NO: 2450158 - RNA, 19 nt, Homo sapiens
  misc_RNA (1)...(19): siRNA sense strand
uggaaaauacgaaagguuu

SEQ ID NO: 2450159 - RNA, 19 nt, Homo sapiens
  misc_RNA (1)...(19): siRNA sense strand
agugcagagugcugugauu

SEQ ID NO: 2450160 - RNA, 19 nt, Homo sapiens
  misc_RNA (1)...(19): siRNA sense strand
ccgaccgaauacugaauau

SEQ ID NO: 2450161 - RNA, 19 nt, Homo sapiens
  misc_RNA (1)...(19): siRNA sense strand
gugugaagcuugugaccag

SEQ ID NO: 2450162 - RNA, 19 nt, Homo sapiens
  misc_RNA (1)...(19): siRNA sense strand
uagaacacuuaauugggaa

SEQ ID NO: 2450163 - RNA, 19 nt, Homo sapiens
  misc_RNA (1)...(19): siRNA sense strand
cgaauggaguuaagggagc

SEQ ID NO: 2450164 - RNA, 19 nt, Homo sapiens
  misc_RNA (1)...(19): siRNA sense strand
gaggaaaaggacuggaauu

SEQ ID NO: 2450165 - RNA, 19 nt, Homo sapiens
  misc_RNA (1)...(19): siRNA sense strand
uggauuggucugaggaaca

SEQ ID NO: 2450166 - RNA, 19 nt, Homo sapiens
  misc_RNA (1)...(19): siRNA sense strand
gcuggaugaaauaugguaa

SEQ ID NO: 2450167 - RNA, 19 nt, Homo sapiens
  misc_RNA (1)...(19): siRNA sense strand
cugccuagccagagacuca

SEQ ID NO: 2450168 - RNA, 19 nt, Homo sapiens
  misc_RNA (1)...(19): siRNA sense strand
ccagaaugacuauggacca

SEQ ID NO: 2450169 - RNA, 19 nt, Homo sapiens
  misc_RNA (1)...(19): siRNA sense strand
ugacuauggaccacagcaa

SEQ ID NO: 2450170 - RNA, 19 nt, Homo sapiens
  misc_RNA (1)...(19): siRNA sense strand
uggaagaccuacugggagu

SEQ ID NO: 2450171 - RNA, 19 nt, Homo sapiens
  misc_RNA (1)...(19): siRNA sense strand
gcugcaaguacaaggaaga

SEQ ID NO: 2450172 - RNA, 19 nt, Homo sapiens
  misc_RNA (1)...(19): siRNA sense strand
agauaaagggacucaaaca

SEQ ID NO: 2450173 - RNA, 19 nt, Homo sapiens
  misc_RNA (1)...(19): siRNA sense strand
gcauagacuuugaggaagc

SEQ ID NO: 2450174 - RNA, 19 nt, Homo sapiens
  misc_RNA (1)...(19): siRNA sense strand
uugaggaagcuuugaggaa

SEQ ID NO: 2450175 - RNA, 19 nt, Homo sapiens
  misc_RNA (1)...(19): siRNA sense strand
gcaaggaucuggaggugcu

SEQ ID NO: 2450176 - RNA, 19 nt, Homo sapiens
  misc_RNA (1)...(19): siRNA sense strand
agguuaugcauuucacaaa

SEQ ID NO: 2450177 - RNA, 19 nt, Homo sapiens
  misc_RNA (1)...(19): siRNA sense strand
ggacauccaaaguggggaa

SEQ ID NO: 2450178 - RNA, 19 nt, Homo sapiens
  misc_RNA (1)...(19): siRNA sense strand
gcaaguacaaggaagagca

SEQ ID NO: 2450179 - RNA, 19 nt, Homo sapiens
  misc_RNA (1)...(19): siRNA sense strand
ugaaagaucuuaacaccca

SEQ ID NO: 2450180 - RNA, 19 nt, Homo sapiens
  misc_RNA (1)...(19): siRNA sense strand
gggaagcagaugugauucu

SEQ ID NO: 2450181 - RNA, 19 nt, Homo sapiens
  misc_RNA (1)...(19): siRNA sense strand
gcaugaacaucaagcccaa

SEQ ID NO: 2450182 - RNA, 19 nt, Homo sapiens
  misc_RNA (1)...(19): siRNA sense strand
agagaaaggguauaggcaa

SEQ ID NO: 2450183 - RNA, 19 nt, Homo sapiens
  misc_RNA (1)...(19): siRNA sense strand
cuucacagcuguuggagca

SEQ ID NO: 2450184 - RNA, 19 nt, Homo sapiens
  misc_RNA (1)...(19): siRNA sense strand
uggaggaagagaaagggua

SEQ ID NO: 2450185 - RNA, 19 nt, Homo sapiens
  misc_RNA (1)...(19): siRNA sense strand
ucauucaagaucugguaaa

SEQ ID NO: 2450186 - RNA, 19 nt, Homo sapiens
  misc_RNA (1)...(19): siRNA sense strand
ggagccaaggacaggacua

SEQ ID NO: 2450187 - RNA, 19 nt, Homo sapiens
  misc_RNA (1)...(19): siRNA sense strand
cguucaaagucggggaaau

SEQ ID NO: 2450188 - RNA, 19 nt, Homo sapiens
  misc_RNA (1)...(19): siRNA sense strand
ccccauggaggaagagaaa

SEQ ID NO: 2450189 - RNA, 19 nt, Homo sapiens
  misc_RNA (1)...(19): siRNA sense strand
guggaaugucccuggagua

SEQ ID NO: 2450190 - RNA, 19 nt, Homo sapiens
  misc_RNA (1)...(19): siRNA sense strand
gggacaagagcaagcugau

SEQ ID NO: 2450191 - RNA, 19 nt, Homo sapiens
  misc_RNA (1)...(19): siRNA sense strand
agaacaugacgcugguaga

SEQ ID NO: 2450192 - RNA, 19 nt, Homo sapiens
  misc_RNA (1)...(19): siRNA sense strand
aggagagggaaguggaaga

SEQ ID NO: 2450193 - RNA, 19 nt, Homo sapiens
  misc_RNA (1)...(19): siRNA sense strand
acgacaaccugcagcgaca

SEQ ID NO: 2450194 - RNA, 19 nt, Homo sapiens
  misc_RNA (1)...(19): siRNA sense strand
gcaacaucauccagcgcau

SEQ ID NO: 2450195 - RNA, 19 nt, Homo sapiens
  misc_RNA (1)...(19): siRNA sense strand
caucaaugaaguggaggaa

SEQ ID NO: 2450196 - RNA, 19 nt, Homo sapiens
  misc_RNA (1)...(19): siRNA sense strand
gugaggaguggcugggaca

SEQ ID NO: 2450197 - RNA, 19 nt, Homo sapiens
  misc_RNA (1)...(19): siRNA sense strand
gggaccuggcuguguacaa

SEQ ID NO: 2450198 - RNA, 19 nt, Homo sapiens
  misc_RNA (1)...(19): siRNA sense strand
aggaagaagacgacaaccu

SEQ ID NO: 2450199 - RNA, 19 nt, Homo sapiens
  misc_RNA (1)...(19): siRNA sense strand
ucaaugaaguggaggaagg

SEQ ID NO: 2450200 - RNA, 19 nt, Homo sapiens
  misc_RNA (1)...(19): siRNA sense strand
uggaagagacgccggagga

SEQ ID NO: 2450201 - RNA, 19 nt, Homo sapiens
  misc_RNA (1)...(19): siRNA sense strand
gugcauggcgggugcucau

SEQ ID NO: 2450202 - RNA, 19 nt, Homo sapiens
  misc_RNA (1)...(19): siRNA sense strand
gaccaggcgacgauggcua

SEQ ID NO: 2450203 - RNA, 19 nt, Homo sapiens
  misc_RNA (1)...(19): siRNA sense strand
aggaauaagaucagagcca

SEQ ID NO: 2450204 - RNA, 19 nt, Homo sapiens
  misc_RNA (1)...(19): siRNA sense strand
ggaccgaauuaaugagcga

SEQ ID NO: 2450205 - RNA, 19 nt, Homo sapiens
  misc_RNA (1)...(19): siRNA sense strand
auuugaaguuggaggauca

SEQ ID NO: 2450206 - RNA, 19 nt, Homo sapiens
  misc_RNA (1)...(19): siRNA sense strand
gaucagagccauugggaag

SEQ ID NO: 2450207 - RNA, 19 nt, Homo sapiens
  misc_RNA (1)...(19): siRNA sense strand
aguauuugagaaugggaaa

SEQ ID NO: 2450208 - RNA, 19 nt, Homo sapiens
  misc_RNA (1)...(19): siRNA sense strand
uggugauauucauggacaa

SEQ ID NO: 2450209 - RNA, 19 nt, Homo sapiens
  misc_RNA (1)...(19): siRNA sense strand
aggaaauuagacagguuua

SEQ ID NO: 2450210 - RNA, 19 nt, Homo sapiens
  misc_RNA (1)...(19): siRNA sense strand
ggcaagaaagugagagugu

SEQ ID NO: 2450211 - RNA, 19 nt, Homo sapiens
  misc_RNA (1)...(19): siRNA sense strand
ccacaguagaagcgguaga

SEQ ID NO: 2450212 - RNA, 19 nt, Homo sapiens
  misc_RNA (1)...(19): siRNA sense strand
gggccaaugaaaucuguaa

SEQ ID NO: 2450213 - RNA, 19 nt, Homo sapiens
  misc_RNA (1)...(19): siRNA sense strand
aggaaggacgacuggaaga

SEQ ID NO: 2450214 - RNA, 19 nt, Homo sapiens
  misc_RNA (1)...(19): siRNA sense strand
ccuccaacccaacggcuua

SEQ ID NO: 2450215 - RNA, 19 nt, Homo sapiens
  misc_RNA (1)...(19): siRNA sense strand
ggauuauggcaaugagaag

SEQ ID NO: 2450216 - RNA, 19 nt, Homo sapiens
  misc_RNA (1)...(19): siRNA sense strand
aggcaagagaagacuauga

SEQ ID NO: 2450217 - RNA, 19 nt, Homo sapiens
  misc_RNA (1)...(19): siRNA sense strand
cgaacugauuucugaugau

SEQ ID NO: 2450218 - RNA, 19 nt, Homo sapiens
  misc_RNA (1)...(19): siRNA sense strand
uggaagaggaaguagccuu

SEQ ID NO: 2450219 - RNA, 19 nt, Homo sapiens
  misc_RNA (1)...(19): siRNA sense strand
cuauguggacagaggcuau

SEQ ID NO: 2450220 - RNA, 19 nt, Homo sapiens
  misc_RNA (1)...(19): siRNA sense strand
gauccggaguuuugaagaa

SEQ ID NO: 2450221 - RNA, 19 nt, Homo sapiens
  misc_RNA (1)...(19): siRNA sense strand
uggacaauucuuugaccua

SEQ ID NO: 2450222 - RNA, 19 nt, Homo sapiens
  misc_RNA (1)...(19): siRNA sense strand
caggaagagccaagccaca

SEQ ID NO: 2450223 - RNA, 19 nt, Homo sapiens
  misc_RNA (1)...(19): siRNA sense strand
aggagaucaucaggaauaa

SEQ ID NO: 2450224 - RNA, 19 nt, Homo sapiens
  misc_RNA (1)...(19): siRNA sense strand
cauacacgcuggugggcca

SEQ ID NO: 2450225 - RNA, 19 nt, Homo sapiens
  misc_RNA (1)...(19): siRNA sense strand
aggacgacuggaagaggaa

SEQ ID NO: 2450226 - RNA, 19 nt, Homo sapiens
  misc_RNA (1)...(19): siRNA sense strand
aggaaguagccuuaaagau

SEQ ID NO: 2450227 - RNA, 19 nt, Homo sapiens
  misc_RNA (1)...(19): siRNA sense strand
cuuuagaugacauuaggaa

SEQ ID NO: 2450228 - RNA, 19 nt, Homo sapiens
  misc_RNA (1)...(19): siRNA sense strand
ugagaaugggaaaccuaaa

SEQ ID NO: 2450229 - RNA, 19 nt, Homo sapiens
  misc_RNA (1)...(19): siRNA sense strand
cuguguacauggaggaaug

SEQ ID NO: 2450230 - RNA, 19 nt, Homo sapiens
  misc_RNA (1)...(19): siRNA sense strand
ggaggaucaccuaguaaca

SEQ ID NO: 2450231 - RNA, 19 nt, Homo sapiens
  misc_RNA (1)...(19): siRNA sense strand
caggaaugucgaaucaaau

SEQ ID NO: 2450232 - RNA, 19 nt, Homo sapiens
  misc_RNA (1)...(19): siRNA sense strand
gaauguacaggaagagcca

SEQ ID NO: 2450233 - RNA, 19 nt, Homo sapiens
  misc_RNA (1)...(19): siRNA sense strand
gggaagauggcacgggucu

SEQ ID NO: 2450234 - RNA, 19 nt, Homo sapiens
  misc_RNA (1)...(19): siRNA sense strand
gugcuguauuuauggaguu

SEQ ID NO: 2450235 - RNA, 19 nt, Homo sapiens
  misc_RNA (1)...(19): siRNA sense strand
cccugcaguuugugaauuu

SEQ ID NO: 2450236 - RNA, 19 nt, Homo sapiens
  misc_RNA (1)...(19): siRNA sense strand
uuaggaaauuagacagguu

SEQ ID NO: 2450237 - RNA, 19 nt, Homo sapiens
  misc_RNA (1)...(19): siRNA sense strand
ccuuuggaccuguguguga

SEQ ID NO: 2450238 - RNA, 19 nt, Homo sapiens
  misc_RNA (1)...(19): siRNA sense strand
augagaagaccuuggagca

SEQ ID NO: 2450239 - RNA, 19 nt, Homo sapiens
  misc_RNA (1)...(19): siRNA sense strand
ggaauaagaucagagccau

SEQ ID NO: 2450240 - RNA, 19 nt, Homo sapiens
  misc_RNA (1)...(19): siRNA sense strand
agaaagaagugauggagca

SEQ ID NO: 2450241 - RNA, 19 nt, Homo sapiens
  misc_RNA (1)...(19): siRNA sense strand
aagaauuccagcugaacaa

SEQ ID NO: 2450242 - RNA, 19 nt, Homo sapiens
  misc_RNA (1)...(19): siRNA sense strand
ggagcaaagugccgggauc

SEQ ID NO: 2450243 - RNA, 19 nt, Homo sapiens
  misc_RNA (1)...(19): siRNA sense strand
ucaguuaaugagagaccua

SEQ ID NO: 2450244 - RNA, 19 nt, Homo sapiens
  misc_RNA (1)...(19): siRNA sense strand
gcauaucauaagacaggau

SEQ ID NO: 2450245 - RNA, 19 nt, Homo sapiens
  misc_RNA (1)...(19): siRNA sense strand
ucaguuaaugagagaccua

SEQ ID NO: 2450246 - RNA, 19 nt, Homo sapiens
  misc_RNA (1)...(19): siRNA sense strand
gcauaucauaagacaggau

SEQ ID NO: 2450247 - RNA, 19 nt, Homo sapiens
  misc_RNA (1)...(19): siRNA sense strand
ggaccaaugaagaaggaua

SEQ ID NO: 2450248 - RNA, 19 nt, Homo sapiens
  misc_RNA (1)...(19): siRNA sense strand
ggauauuuguacagcuaaa

SEQ ID NO: 2450249 - RNA, 19 nt, Homo sapiens
  misc_RNA (1)...(19): siRNA sense strand
aggagaagaugaugaggaa

SEQ ID NO: 2450250 - RNA, 19 nt, Homo sapiens
  misc_RNA (1)...(19): siRNA sense strand
gcggaggauucaagagcaa

SEQ ID NO: 2450251 - RNA, 19 nt, Homo sapiens
  misc_RNA (1)...(19): siRNA sense strand
ccucagagaaaguggauuu

SEQ ID NO: 2450252 - RNA, 19 nt, Homo sapiens
  misc_RNA (1)...(19): siRNA sense strand
cgaagauggcaguggguuu

SEQ ID NO: 2450253 - RNA, 19 nt, Homo sapiens
  misc_RNA (1)...(19): siRNA sense strand
gagaagaagcccaagaaaa

SEQ ID NO: 2450254 - RNA, 19 nt, Homo sapiens
  misc_RNA (1)...(19): siRNA sense strand
cuucauaagaugccagaaa

SEQ ID NO: 2450255 - RNA, 19 nt, Homo sapiens
  misc_RNA (1)...(19): siRNA sense strand
cagaagagcaggaggagga

SEQ ID NO: 2450256 - RNA, 19 nt, Homo sapiens
  misc_RNA (1)...(19): siRNA sense strand
cagaauauagugaggaaaa

SEQ ID NO: 2450257 - RNA, 19 nt, Homo sapiens
  misc_RNA (1)...(19): siRNA sense strand
gaccaaugaagaaggauaa

SEQ ID NO: 2450258 - RNA, 19 nt, Homo sapiens
  misc_RNA (1)...(19): siRNA sense strand
agugaaagauccauggaau

SEQ ID NO: 2450259 - RNA, 19 nt, Homo sapiens
  misc_RNA (1)...(19): siRNA sense strand
cagaagaugcuguagacua

SEQ ID NO: 2450260 - RNA, 19 nt, Homo sapiens
  misc_RNA (1)...(19): siRNA sense strand
gcucggagaaagaggaaga

SEQ ID NO: 2450261 - RNA, 19 nt, Homo sapiens
  misc_RNA (1)...(19): siRNA sense strand
gggaggaaccacagcagaa

SEQ ID NO: 2450262 - RNA, 19 nt, Homo sapiens
  misc_RNA (1)...(19): siRNA sense strand
acuuugaagaaaugggaaa

SEQ ID NO: 2450263 - RNA, 19 nt, Homo sapiens
  misc_RNA (1)...(19): siRNA sense strand
ugacgaagaaggagacaau

SEQ ID NO: 2450264 - RNA, 19 nt, Homo sapiens
  misc_RNA (1)...(19): siRNA sense strand
gauuaggaguacagaagau

SEQ ID NO: 2450265 - RNA, 19 nt, Homo sapiens
  misc_RNA (1)...(19): siRNA sense strand
ggccaagaugagagaacaa

SEQ ID NO: 2450266 - RNA, 19 nt, Homo sapiens
  misc_RNA (1)...(19): siRNA sense strand
gauacgaauggaagauaua

SEQ ID NO: 2450267 - RNA, 19 nt, Homo sapiens
  misc_RNA (1)...(19): siRNA sense strand
gggaaagaacauugagaac

SEQ ID NO: 2450268 - RNA, 19 nt, Homo sapiens
  misc_RNA (1)...(19): siRNA sense strand
aggaaaaggagaagcuuaa

SEQ ID NO: 2450269 - RNA, 19 nt, Homo sapiens
  misc_RNA (1)...(19): siRNA sense strand
uggcaaagauccuggagca

SEQ ID NO: 2450270 - RNA, 19 nt, Homo sapiens
  misc_RNA (1)...(19): siRNA sense strand
agauagugacuuugaagaa

SEQ ID NO: 2450271 - RNA, 19 nt, Homo sapiens
  misc_RNA (1)...(19): siRNA sense strand
agaagaagcccaagaaaau

SEQ ID NO: 2450272 - RNA, 19 nt, Homo sapiens
  misc_RNA (1)...(19): siRNA sense strand
caaaauugucuucgggaaa

SEQ ID NO: 2450273 - RNA, 19 nt, Homo sapiens
  misc_RNA (1)...(19): siRNA sense strand
caaagguuguaaaggacua

SEQ ID NO: 2450274 - RNA, 19 nt, Homo sapiens
  misc_RNA (1)...(19): siRNA sense strand
gcagaagaugaaagccaaa

SEQ ID NO: 2450275 - RNA, 19 nt, Homo sapiens
  misc_RNA (1)...(19): siRNA sense strand
agauguagauaaagugaca

SEQ ID NO: 2450276 - RNA, 19 nt, Homo sapiens
  misc_RNA (1)...(19): siRNA sense strand
augcaaagguuguaaagga

SEQ ID NO: 2450277 - RNA, 19 nt, Homo sapiens
  misc_RNA (1)...(19): siRNA sense strand
uaucaaacacaaagggaca

SEQ ID NO: 2450278 - RNA, 19 nt, Homo sapiens
  misc_RNA (1)...(19): siRNA sense strand
gcaucaagagcguuacaaa

SEQ ID NO: 2450279 - RNA, 19 nt, Homo sapiens
  misc_RNA (1)...(19): siRNA sense strand
ggaagaguucagagagcau

SEQ ID NO: 2450280 - RNA, 19 nt, Homo sapiens
  misc_RNA (1)...(19): siRNA sense strand
ggaaacuugaggaaagcaa

SEQ ID NO: 2450281 - RNA, 19 nt, Homo sapiens
  misc_RNA (1)...(19): siRNA sense strand
caacauugucacccagaaa

SEQ ID NO: 2450282 - RNA, 19 nt, Homo sapiens
  misc_RNA (1)...(19): siRNA sense strand
gggaauuaguggauauuuu

SEQ ID NO: 2450283 - RNA, 19 nt, Homo sapiens
  misc_RNA (1)...(19): siRNA sense strand
aggaggaggaguuggaaaa

SEQ ID NO: 2450284 - RNA, 19 nt, Homo sapiens
  misc_RNA (1)...(19): siRNA sense strand
gaaacagcuaauugagaau

SEQ ID NO: 2450285 - RNA, 19 nt, Homo sapiens
  misc_RNA (1)...(19): siRNA sense strand
ugagagaacaagagaggca

SEQ ID NO: 2450286 - RNA, 19 nt, Homo sapiens
  misc_RNA (1)...(19): siRNA sense strand
ugacagaagagcaggagga

SEQ ID NO: 2450287 - RNA, 19 nt, Homo sapiens
  misc_RNA (1)...(19): siRNA sense strand
aacuggagauguagauaaa

SEQ ID NO: 2450288 - RNA, 19 nt, Homo sapiens
  misc_RNA (1)...(19): siRNA sense strand
aacaugaaccugugauaaa

SEQ ID NO: 2450289 - RNA, 19 nt, Homo sapiens
  misc_RNA (1)...(19): siRNA sense strand
ggacaauaucauuugggau

SEQ ID NO: 2450290 - RNA, 19 nt, Homo sapiens
  misc_RNA (1)...(19): siRNA sense strand
aaggagaguaagaaggaau

SEQ ID NO: 2450291 - RNA, 19 nt, Homo sapiens
  misc_RNA (1)...(19): siRNA sense strand
gggcaccuuuggagggaau

SEQ ID NO: 2450292 - RNA, 19 nt, Homo sapiens
  misc_RNA (1)...(19): siRNA sense strand
aagaagaaaaugaggaaga

SEQ ID NO: 2450293 - RNA, 19 nt, Homo sapiens
  misc_RNA (1)...(19): siRNA sense strand
ucuuugaccuacagaacaa

SEQ ID NO: 2450294 - RNA, 19 nt, Homo sapiens
  misc_RNA (1)...(19): siRNA sense strand
ugaagaaggauaaggacca

SEQ ID NO: 2450295 - RNA, 19 nt, Homo sapiens
  misc_RNA (1)...(19): siRNA sense strand
ucuccaaugaugaguauua

SEQ ID NO: 2450296 - RNA, 19 nt, Homo sapiens
  misc_RNA (1)...(19): siRNA sense strand
guauaauggaccugagagu

SEQ ID NO: 2450297 - RNA, 19 nt, Homo sapiens
  misc_RNA (1)...(19): siRNA sense strand
aaggauauuuguacagcua

SEQ ID NO: 2450298 - RNA, 19 nt, Homo sapiens
  misc_RNA (1)...(19): siRNA sense strand
uggaauaagacccaaacaa

SEQ ID NO: 2450299 - RNA, 19 nt, Homo sapiens
  misc_RNA (1)...(19): siRNA sense strand
aaugaugaaggguggauua

SEQ ID NO: 2450300 - RNA, 19 nt, Homo sapiens
  misc_RNA (1)...(19): siRNA sense strand
ggcagaagaugaaagccaa

SEQ ID NO: 2450301 - RNA, 19 nt, Homo sapiens
  misc_RNA (1)...(19): siRNA sense strand
cggauuaugaugaagauga

SEQ ID NO: 2450302 - RNA, 19 nt, Homo sapiens
  misc_RNA (1)...(19): siRNA sense strand
gcacugaucuucuggcuga

SEQ ID NO: 2450303 - RNA, 19 nt, Homo sapiens
  misc_RNA (1)...(19): siRNA sense strand
ggaacuacggcgaaugcua

SEQ ID NO: 2450304 - RNA, 19 nt, Homo sapiens
  misc_RNA (1)...(19): siRNA sense strand
ggaaacaaucacagagaug

SEQ ID NO: 2450305 - RNA, 19 nt, Homo sapiens
  misc_RNA (1)...(19): siRNA sense strand
cggagugcucggagaaaga

SEQ ID NO: 2450306 - RNA, 19 nt, Homo sapiens
  misc_RNA (1)...(19): siRNA sense strand
cuucaaacugagaaagaca

SEQ ID NO: 2450307 - RNA, 19 nt, Homo sapiens
  misc_RNA (1)...(19): siRNA sense strand
ggacaauauaugggagcau

SEQ ID NO: 2450308 - RNA, 19 nt, Homo sapiens
  misc_RNA (1)...(19): siRNA sense strand
gaagauuauaagagcacau

SEQ ID NO: 2450309 - RNA, 19 nt, Homo sapiens
  misc_RNA (1)...(19): siRNA sense strand
aggaaagcauggaagagga

SEQ ID NO: 2450310 - RNA, 19 nt, Homo sapiens
  misc_RNA (1)...(19): siRNA sense strand
acaucgaaaccaagcuuaa

SEQ ID NO: 2450311 - RNA, 19 nt, Homo sapiens
  misc_RNA (1)...(19): siRNA sense strand
cgaugauggacgaccagaa

SEQ ID NO: 2450312 - RNA, 19 nt, Homo sapiens
  misc_RNA (1)...(19): siRNA sense strand
cugaagaagcggaggccga

SEQ ID NO: 2450313 - RNA, 19 nt, Homo sapiens
  misc_RNA (1)...(19): siRNA sense strand
ccagaaaagcuguaacaau

SEQ ID NO: 2450314 - RNA, 19 nt, Homo sapiens
  misc_RNA (1)...(19): siRNA sense strand
acagaugauuguaagccaa

SEQ ID NO: 2450315 - RNA, 19 nt, Homo sapiens
  misc_RNA (1)...(19): siRNA sense strand
augcagaauguuaccaaua

SEQ ID NO: 2450316 - RNA, 19 nt, Homo sapiens
  misc_RNA (1)...(19): siRNA sense strand
uaaacuuagcagagaggau

SEQ ID NO: 2450317 - RNA, 19 nt, Homo sapiens
  misc_RNA (1)...(19): siRNA sense strand
aaauaggcuuucuuggcua

SEQ ID NO: 2450318 - RNA, 19 nt, Homo sapiens
  misc_RNA (1)...(19): siRNA sense strand
cauuuggauuaccuggaaa

SEQ ID NO: 2450319 - RNA, 19 nt, Homo sapiens
  misc_RNA (1)...(19): siRNA sense strand
agguguuucauuugguuua

SEQ ID NO: 2450320 - RNA, 19 nt, Homo sapiens
  misc_RNA (1)...(19): siRNA sense strand
uaguauguguauucagaca

SEQ ID NO: 2450321 - RNA, 19 nt, Homo sapiens
  misc_RNA (1)...(19): siRNA sense strand
cuccaaagagagugcuuau

SEQ ID NO: 2450322 - RNA, 19 nt, Homo sapiens
  misc_RNA (1)...(19): siRNA sense strand
gacaaaguggagucagaau

SEQ ID NO: 2450323 - RNA, 19 nt, Homo sapiens
  misc_RNA (1)...(19): siRNA sense strand
caucaugggaaguggcauc

SEQ ID NO: 2450324 - RNA, 19 nt, Homo sapiens
  misc_RNA (1)...(19): siRNA sense strand
caaagaaaagaaugcagaa

SEQ ID NO: 2450325 - RNA, 19 nt, Homo sapiens
  misc_RNA (1)...(19): siRNA sense strand
cugaagaagaagaagaaga

SEQ ID NO: 2450326 - RNA, 19 nt, Homo sapiens
  misc_RNA (1)...(19): siRNA sense strand
cagugaugcgccugggaaa

SEQ ID NO: 2450327 - RNA, 19 nt, Homo sapiens
  misc_RNA (1)...(19): siRNA sense strand
aagaggaagcgcagggaca

SEQ ID NO: 2450328 - RNA, 19 nt, Homo sapiens
  misc_RNA (1)...(19): siRNA sense strand
agggaaagcaggugguguu

SEQ ID NO: 2450329 - RNA, 19 nt, Homo sapiens
  misc_RNA (1)...(19): siRNA sense strand
gcaccuuugucuuggccua

SEQ ID NO: 2450330 - RNA, 19 nt, Homo sapiens
  misc_RNA (1)...(19): siRNA sense strand
ccugcuggacagaaagaaa

SEQ ID NO: 2450331 - RNA, 19 nt, Homo sapiens
  misc_RNA (1)...(19): siRNA sense strand
aagaagaagaagaagagga

SEQ ID NO: 2450332 - RNA, 19 nt, Homo sapiens
  misc_RNA (1)...(19): siRNA sense strand
aagcugaagaagaagaaga

SEQ ID NO: 2450333 - RNA, 19 nt, Homo sapiens
  misc_RNA (1)...(19): siRNA sense strand
agcugaagaagaagaagaa

SEQ ID NO: 2450334 - RNA, 19 nt, Homo sapiens
  misc_RNA (1)...(19): siRNA sense strand
acuuccugcuggacagaaa

SEQ ID NO: 2450335 - RNA, 19 nt, Homo sapiens
  misc_RNA (1)...(19): siRNA sense strand
acggacaagcugaagaaga

SEQ ID NO: 2450336 - RNA, 19 nt, Homo sapiens
  misc_RNA (1)...(19): siRNA sense strand
cuaucguccggcagggaaa

SEQ ID NO: 2450337 - RNA, 19 nt, Homo sapiens
  misc_RNA (1)...(19): siRNA sense strand
gccccaugaucgaguguaa

SEQ ID NO: 2450338 - RNA, 19 nt, Homo sapiens
  misc_RNA (1)...(19): siRNA sense strand
acugaaggcaaacggacua

SEQ ID NO: 2450339 - RNA, 19 nt, Homo sapiens
  misc_RNA (1)...(19): siRNA sense strand
aagaagaagaagaggaagc

SEQ ID NO: 2450340 - RNA, 19 nt, Homo sapiens
  misc_RNA (1)...(19): siRNA sense strand
acagaaagaaaacggacaa

SEQ ID NO: 2450341 - RNA, 19 nt, Homo sapiens
  misc_RNA (1)...(19): siRNA sense strand
aagaagaagaggaagcgca

SEQ ID NO: 2450342 - RNA, 19 nt, Homo sapiens
  misc_RNA (1)...(19): siRNA sense strand
cuggcaaugaugaggacau

SEQ ID NO: 2450343 - RNA, 19 nt, Homo sapiens
  misc_RNA (1)...(19): siRNA sense strand
gcgaaaauccggaaaucca

SEQ ID NO: 2450344 - RNA, 19 nt, Homo sapiens
  misc_RNA (1)...(19): siRNA sense strand
ccaaggagcuggaaggaca

SEQ ID NO: 2450345 - RNA, 19 nt, Homo sapiens
  misc_RNA (1)...(19): siRNA sense strand
ccacagacgagaagcccaa

SEQ ID NO: 2450346 - RNA, 19 nt, Homo sapiens
  misc_RNA (1)...(19): siRNA sense strand
ccucggagauccuggccaa

SEQ ID NO: 2450347 - RNA, 19 nt, Homo sapiens
  misc_RNA (1)...(19): siRNA sense strand
gcaucaagguggaggcggu

SEQ ID NO: 2450348 - RNA, 19 nt, Homo sapiens
  misc_RNA (1)...(19): siRNA sense strand
agaccuacaccgugcacaa

SEQ ID NO: 2450349 - RNA, 19 nt, Homo sapiens
  misc_RNA (1)...(19): siRNA sense strand
acaacuacuacgugcacaa

SEQ ID NO: 2450350 - RNA, 19 nt, Homo sapiens
  misc_RNA (1)...(19): siRNA sense strand
gcgagaucaccuucagcaa

SEQ ID NO: 2450351 - RNA, 19 nt, Homo sapiens
  misc_RNA (1)...(19): siRNA sense strand
gggacauccucuacagcca

SEQ ID NO: 2450352 - RNA, 19 nt, Homo sapiens
  misc_RNA (1)...(19): siRNA sense strand
ccaaagagaccuaccccaa

SEQ ID NO: 2450353 - RNA, 19 nt, Homo sapiens
  misc_RNA (1)...(19): siRNA sense strand
ggagaguacaggugccaga

SEQ ID NO: 2450354 - RNA, 19 nt, Homo sapiens
  misc_RNA (1)...(19): siRNA sense strand
ggguguucaaggaggaaga

SEQ ID NO: 2450355 - RNA, 19 nt, Homo sapiens
  misc_RNA (1)...(19): siRNA sense strand
aguacaggugccagacaaa

SEQ ID NO: 2450356 - RNA, 19 nt, Homo sapiens
  misc_RNA (1)...(19): siRNA sense strand
cgagaaggacagugugacu

SEQ ID NO: 2450357 - RNA, 19 nt, Homo sapiens
  misc_RNA (1)...(19): siRNA sense strand
cauauuuacagaauggcaa

SEQ ID NO: 2450358 - RNA, 19 nt, Homo sapiens
  misc_RNA (1)...(19): siRNA sense strand
ccucaaugguacagggugc

SEQ ID NO: 2450359 - RNA, 19 nt, Homo sapiens
  misc_RNA (1)...(19): siRNA sense strand
ucccaaaggcugugguguu

SEQ ID NO: 2450360 - RNA, 19 nt, Homo sapiens
  misc_RNA (1)...(19): siRNA sense strand
ccuuuagggcuccggauau

SEQ ID NO: 2450361 - RNA, 19 nt, Homo sapiens
  misc_RNA (1)...(19): siRNA sense strand
cugacaacauauagagaau

SEQ ID NO: 2450362 - RNA, 19 nt, Homo sapiens
  misc_RNA (1)...(19): siRNA sense strand
acaugaagcaagagcacua

SEQ ID NO: 2450363 - RNA, 19 nt, Homo sapiens
  misc_RNA (1)...(19): siRNA sense strand
uggaaugaucuuuggcuaa

SEQ ID NO: 2450364 - RNA, 19 nt, Homo sapiens
  misc_RNA (1)...(19): siRNA sense strand
gagauuauuucuuuggcaa

SEQ ID NO: 2450365 - RNA, 19 nt, Homo sapiens
  misc_RNA (1)...(19): siRNA sense strand
augaaagcuuuaagggaga

SEQ ID NO: 2450366 - RNA, 19 nt, Homo sapiens
  misc_RNA (1)...(19): siRNA sense strand
cugcagauaucuagggcca

SEQ ID NO: 2450367 - RNA, 19 nt, Homo sapiens
  misc_RNA (1)...(19): siRNA sense strand
guggaaugaucuuuggcua

SEQ ID NO: 2450368 - RNA, 19 nt, Homo sapiens
  misc_RNA (1)...(19): siRNA sense strand
cuccagaagcauagcuaua

SEQ ID NO: 2450369 - RNA, 19 nt, Homo sapiens
  misc_RNA (1)...(19): siRNA sense strand
ggaaaagcuucaauggcua

SEQ ID NO: 2450370 - RNA, 19 nt, Homo sapiens
  misc_RNA (1)...(19): siRNA sense strand
cugaauaugcuaagggagu

SEQ ID NO: 2450371 - RNA, 19 nt, Homo sapiens
  misc_RNA (1)...(19): siRNA sense strand
uugaaaaggccuuggauuu

SEQ ID NO: 2450372 - RNA, 19 nt, Homo sapiens
  misc_RNA (1)...(19): siRNA sense strand
uucagaaaguggaaggaau

SEQ ID NO: 2450373 - RNA, 19 nt, Homo sapiens
  misc_RNA (1)...(19): siRNA sense strand
aacgaggaccugugggaua

SEQ ID NO: 2450374 - RNA, 19 nt, Homo sapiens
  misc_RNA (1)...(19): siRNA sense strand
caaaauuagaagagagcca

SEQ ID NO: 2450375 - RNA, 19 nt, Homo sapiens
  misc_RNA (1)...(19): siRNA sense strand
ggagaaaagagauaugaau

SEQ ID NO: 2450376 - RNA, 19 nt, Homo sapiens
  misc_RNA (1)...(19): siRNA sense strand
uugaagagguaaaaggauu

SEQ ID NO: 2450377 - RNA, 19 nt, Homo sapiens
  misc_RNA (1)...(19): siRNA sense strand
gugaaaaccaugaugaaca

SEQ ID NO: 2450378 - RNA, 19 nt, Homo sapiens
  misc_RNA (1)...(19): siRNA sense strand
gaacccaaaauaaggaaaa

SEQ ID NO: 2450379 - RNA, 19 nt, Homo sapiens
  misc_RNA (1)...(19): siRNA sense strand
gaugaaagcuuuaagggag

SEQ ID NO: 2450380 - RNA, 19 nt, Homo sapiens
  misc_RNA (1)...(19): siRNA sense strand
ucaaauuuaaugugggcau

SEQ ID NO: 2450381 - RNA, 19 nt, Homo sapiens
  misc_RNA (1)...(19): siRNA sense strand
caguaucuccagaagcaua

SEQ ID NO: 2450382 - RNA, 19 nt, Homo sapiens
  misc_RNA (1)...(19): siRNA sense strand
ggauaguauggcaaguauu

SEQ ID NO: 2450383 - RNA, 19 nt, Homo sapiens
  misc_RNA (1)...(19): siRNA sense strand
ccacgaaaguagaaaucac

SEQ ID NO: 2450384 - RNA, 19 nt, Homo sapiens
  misc_RNA (1)...(19): siRNA sense strand
guuggauggauaagaauuu

SEQ ID NO: 2450385 - RNA, 19 nt, Homo sapiens
  misc_RNA (1)...(19): siRNA sense strand
agaugaaagcuuuaaggga

SEQ ID NO: 2450386 - RNA, 19 nt, Homo sapiens
  misc_RNA (1)...(19): siRNA sense strand
ccuggcaauuucugaggaa

SEQ ID NO: 2450387 - RNA, 19 nt, Homo sapiens
  misc_RNA (1)...(19): siRNA sense strand
gguuggauggauaagaauu

SEQ ID NO: 2450388 - RNA, 19 nt, Homo sapiens
  misc_RNA (1)...(19): siRNA sense strand
gaagggagcuggagagagg

SEQ ID NO: 2450389 - RNA, 19 nt, Homo sapiens
  misc_RNA (1)...(19): siRNA sense strand
ggagagaggcuaucggaag

SEQ ID NO: 2450390 - RNA, 19 nt, Homo sapiens
  misc_RNA (1)...(19): siRNA sense strand
gaauaugcuaagggaguau

SEQ ID NO: 2450391 - RNA, 19 nt, Homo sapiens
  misc_RNA (1)...(19): siRNA sense strand
cuugaaacaugaaacugaa

SEQ ID NO: 2450392 - RNA, 19 nt, Homo sapiens
  misc_RNA (1)...(19): siRNA sense strand
gaaugaaguggaaacucaa

SEQ ID NO: 2450393 - RNA, 19 nt, Homo sapiens
  misc_RNA (1)...(19): siRNA sense strand
cuacuagaugaaagcuuua

SEQ ID NO: 2450394 - RNA, 19 nt, Homo sapiens
  misc_RNA (1)...(19): siRNA sense strand
cagucuggugcuauggaaa

SEQ ID NO: 2450395 - RNA, 19 nt, Homo sapiens
  misc_RNA (1)...(19): siRNA sense strand
aggaagggguggaugugaa

SEQ ID NO: 2450396 - RNA, 19 nt, Homo sapiens
  misc_RNA (1)...(19): siRNA sense strand
agcaagagcacuacaugaa

SEQ ID NO: 2450397 - RNA, 19 nt, Homo sapiens
  misc_RNA (1)...(19): siRNA sense strand
acagagggcagaaggcuau

SEQ ID NO: 2450398 - RNA, 19 nt, Homo sapiens
  misc_RNA (1)...(19): siRNA sense strand
uugccaaauuuauggaguu

SEQ ID NO: 2450399 - RNA, 19 nt, Homo sapiens
  misc_RNA (1)...(19): siRNA sense strand
acuugaaacaugaaacuga

SEQ ID NO: 2450400 - RNA, 19 nt, Homo sapiens
  misc_RNA (1)...(19): siRNA sense strand
gagucugucagcaagauaa

SEQ ID NO: 2450401 - RNA, 19 nt, Homo sapiens
  misc_RNA (1)...(19): siRNA sense strand
ugauaagggagcuuguauu

SEQ ID NO: 2450402 - RNA, 19 nt, Homo sapiens
  misc_RNA (1)...(19): siRNA sense strand
ggagcuggagagaggcuau

SEQ ID NO: 2450403 - RNA, 19 nt, Homo sapiens
  misc_RNA (1)...(19): siRNA sense strand
ugucuacaccuguggaaaa

SEQ ID NO: 2450404 - RNA, 19 nt, Homo sapiens
  misc_RNA (1)...(19): siRNA sense strand
ucagaaaguggaaggaauc

SEQ ID NO: 2450405 - RNA, 19 nt, Homo sapiens
  misc_RNA (1)...(19): siRNA sense strand
cuucaaagcaaguuucuca

SEQ ID NO: 2450406 - RNA, 19 nt, Homo sapiens
  misc_RNA (1)...(19): siRNA sense strand
ggaagggguggaugugaaa

SEQ ID NO: 2450407 - RNA, 19 nt, Homo sapiens
  misc_RNA (1)...(19): siRNA sense strand
ugguaauggguacaacaaa

SEQ ID NO: 2450408 - RNA, 19 nt, Homo sapiens
  misc_RNA (1)...(19): siRNA sense strand
ccaucauccugcauaguca

SEQ ID NO: 2450409 - RNA, 19 nt, Homo sapiens
  misc_RNA (1)...(19): siRNA sense strand
gaggauuauuucagcauac

SEQ ID NO: 2450410 - RNA, 19 nt, Homo sapiens
  misc_RNA (1)...(19): siRNA sense strand
cauuucagcucgucagcau

SEQ ID NO: 2450411 - RNA, 19 nt, Homo sapiens
  misc_RNA (1)...(19): siRNA sense strand
aagcaaguuucucaaucaa

SEQ ID NO: 2450412 - RNA, 19 nt, Homo sapiens
  misc_RNA (1)...(19): siRNA sense strand
gaacacggcuugaagaggu

SEQ ID NO: 2450413 - RNA, 19 nt, Homo sapiens
  misc_RNA (1)...(19): siRNA sense strand
cagucaaacagaugggaua

SEQ ID NO: 2450414 - RNA, 19 nt, Homo sapiens
  misc_RNA (1)...(19): siRNA sense strand
gcaaaauauaacagaggaa

SEQ ID NO: 2450415 - RNA, 19 nt, Homo sapiens
  misc_RNA (1)...(19): siRNA sense strand
auacaagcuuagaagacua

SEQ ID NO: 2450416 - RNA, 19 nt, Homo sapiens
  misc_RNA (1)...(19): siRNA sense strand
ggacagaacgauuucgaga

SEQ ID NO: 2450417 - RNA, 19 nt, Homo sapiens
  misc_RNA (1)...(19): siRNA sense strand
ggucauaagucaucccuca

SEQ ID NO: 2450418 - RNA, 19 nt, Homo sapiens
  misc_RNA (1)...(19): siRNA sense strand
acagaagauaauuggagaa

SEQ ID NO: 2450419 - RNA, 19 nt, Homo sapiens
  misc_RNA (1)...(19): siRNA sense strand
ccauauuaccugugguguu

SEQ ID NO: 2450420 - RNA, 19 nt, Homo sapiens
  misc_RNA (1)...(19): siRNA sense strand
ccgaauggucaaagaaaau

SEQ ID NO: 2450421 - RNA, 19 nt, Homo sapiens
  misc_RNA (1)...(19): siRNA sense strand
gaacaacucauaugggaca

SEQ ID NO: 2450422 - RNA, 19 nt, Homo sapiens
  misc_RNA (1)...(19): siRNA sense strand
cagacuuggcuuuggauuu

SEQ ID NO: 2450423 - RNA, 19 nt, Homo sapiens
  misc_RNA (1)...(19): siRNA sense strand
ucaacuucucagugaauua

SEQ ID NO: 2450424 - RNA, 19 nt, Homo sapiens
  misc_RNA (1)...(19): siRNA sense strand
ggcuggaggcauuggagua

SEQ ID NO: 2450425 - RNA, 19 nt, Homo sapiens
  misc_RNA (1)...(19): siRNA sense strand
cagugaagacuuuguugaa

SEQ ID NO: 2450426 - RNA, 19 nt, Homo sapiens
  misc_RNA (1)...(19): siRNA sense strand
ugugaagauuuguauggaa

SEQ ID NO: 2450427 - RNA, 19 nt, Homo sapiens
  misc_RNA (1)...(19): siRNA sense strand
ccaacugaaaccaaagcaa

SEQ ID NO: 2450428 - RNA, 19 nt, Homo sapiens
  misc_RNA (1)...(19): siRNA sense strand
cagcuguaccucagucaaa

SEQ ID NO: 2450429 - RNA, 19 nt, Homo sapiens
  misc_RNA (1)...(19): siRNA sense strand
uggaaauccgaauggucaa

SEQ ID NO: 2450430 - RNA, 19 nt, Homo sapiens
  misc_RNA (1)...(19): siRNA sense strand
auuuggguaugcagagaua

SEQ ID NO: 2450431 - RNA, 19 nt, Homo sapiens
  misc_RNA (1)...(19): siRNA sense strand
gagacuggacagaacgauu

SEQ ID NO: 2450432 - RNA, 19 nt, Homo sapiens
  misc_RNA (1)...(19): siRNA sense strand
agaugaggauccuagaaaa

SEQ ID NO: 2450433 - RNA, 19 nt, Homo sapiens
  misc_RNA (1)...(19): siRNA sense strand
gugaagauuuguauggaag

SEQ ID NO: 2450434 - RNA, 19 nt, Homo sapiens
  misc_RNA (1)...(19): siRNA sense strand
cuacauaugcaauaagagu

SEQ ID NO: 2450435 - RNA, 19 nt, Homo sapiens
  misc_RNA (1)...(19): siRNA sense strand
uugaggaaucacugaacua

SEQ ID NO: 2450436 - RNA, 19 nt, Homo sapiens
  misc_RNA (1)...(19): siRNA sense strand
aggagaaccaggagauugu

SEQ ID NO: 2450437 - RNA, 19 nt, Homo sapiens
  misc_RNA (1)...(19): siRNA sense strand
ggauaaaagcagaacauuc

SEQ ID NO: 2450438 - RNA, 19 nt, Homo sapiens
  misc_RNA (1)...(19): siRNA sense strand
gcuggaggcauuggaguaa

SEQ ID NO: 2450439 - RNA, 19 nt, Homo sapiens
  misc_RNA (1)...(19): siRNA sense strand
gugucuaagcagagccuca

SEQ ID NO: 2450440 - RNA, 19 nt, Homo sapiens
  misc_RNA (1)...(19): siRNA sense strand
acaauguguccaacugaaa

SEQ ID NO: 2450441 - RNA, 19 nt, Homo sapiens
  misc_RNA (1)...(19): siRNA sense strand
ccucaacuucucagugaau

SEQ ID NO: 2450442 - RNA, 19 nt, Homo sapiens
  misc_RNA (1)...(19): siRNA sense strand
gcccagauuccaagcuaau

SEQ ID NO: 2450443 - RNA, 19 nt, Homo sapiens
  misc_RNA (1)...(19): siRNA sense strand
guguccaacugaaaccaaa

SEQ ID NO: 2450444 - RNA, 19 nt, Homo sapiens
  misc_RNA (1)...(19): siRNA sense strand
ccauacaagcuuagaagac

SEQ ID NO: 2450445 - RNA, 19 nt, Homo sapiens
  misc_RNA (1)...(19): siRNA sense strand
cagaacaacucauauggga

SEQ ID NO: 2450446 - RNA, 19 nt, Homo sapiens
  misc_RNA (1)...(19): siRNA sense strand
caaugaaaauggagggaua

SEQ ID NO: 2450447 - RNA, 19 nt, Homo sapiens
  misc_RNA (1)...(19): siRNA sense strand
cugagagauuagaaagaaa

SEQ ID NO: 2450448 - RNA, 19 nt, Homo sapiens
  misc_RNA (1)...(19): siRNA sense strand
aguaauagacccaggaaga

SEQ ID NO: 2450449 - RNA, 19 nt, Homo sapiens
  misc_RNA (1)...(19): siRNA sense strand
ggaagauggaagugaauca

SEQ ID NO: 2450450 - RNA, 19 nt, Homo sapiens
  misc_RNA (1)...(19): siRNA sense strand
uggaaagggcagaugaaau

SEQ ID NO: 2450451 - RNA, 19 nt, Homo sapiens
  misc_RNA (1)...(19): siRNA sense strand
uggacuuaguuuauggaaa

SEQ ID NO: 2450452 - RNA, 19 nt, Homo sapiens
  misc_RNA (1)...(19): siRNA sense strand
ccacauuauacgauaggua

SEQ ID NO: 2450453 - RNA, 19 nt, Homo sapiens
  misc_RNA (1)...(19): siRNA sense strand
aagcaaagggacaguggaa

SEQ ID NO: 2450454 - RNA, 19 nt, Homo sapiens
  misc_RNA (1)...(19): siRNA sense strand
cuucaaagagacugagaga

SEQ ID NO: 2450455 - RNA, 19 nt, Homo sapiens
  misc_RNA (1)...(19): siRNA sense strand
ggcuauuuguugagaauga

SEQ ID NO: 2450456 - RNA, 19 nt, Homo sapiens
  misc_RNA (1)...(19): siRNA sense strand
uuauaagccuccugggaau

SEQ ID NO: 2450457 - RNA, 19 nt, Homo sapiens
  misc_RNA (1)...(19): siRNA sense strand
gcggcuauuuguugagaau

SEQ ID NO: 2450458 - RNA, 19 nt, Homo sapiens
  misc_RNA (1)...(19): siRNA sense strand
cggaugaggaggaggagga

SEQ ID NO: 2450459 - RNA, 19 nt, Homo sapiens
  misc_RNA (1)...(19): siRNA sense strand
ugaaguacucacaggcaaa

SEQ ID NO: 2450460 - RNA, 19 nt, Homo sapiens
  misc_RNA (1)...(19): siRNA sense strand
ggaauuuagaugagcggau

SEQ ID NO: 2450461 - RNA, 19 nt, Homo sapiens
  misc_RNA (1)...(19): siRNA sense strand
caguaauugugcuaaagaa

SEQ ID NO: 2450462 - RNA, 19 nt, Homo sapiens
  misc_RNA (1)...(19): siRNA sense strand
gauauuucuuggagaggau

SEQ ID NO: 2450463 - RNA, 19 nt, Homo sapiens
  misc_RNA (1)...(19): siRNA sense strand
aaagagacugagagaaauu

SEQ ID NO: 2450464 - RNA, 19 nt, Homo sapiens
  misc_RNA (1)...(19): siRNA sense strand
gauagaaccaguagagacu

SEQ ID NO: 2450465 - RNA, 19 nt, Homo sapiens
  misc_RNA (1)...(19): siRNA sense strand
uagcagaagccaucagaau

SEQ ID NO: 2450466 - RNA, 19 nt, Homo sapiens
  misc_RNA (1)...(19): siRNA sense strand
ucuccaagauguagcuaau

SEQ ID NO: 2450467 - RNA, 19 nt, Homo sapiens
  misc_RNA (1)...(19): siRNA sense strand
cguacugagagauuagaaa

SEQ ID NO: 2450468 - RNA, 19 nt, Homo sapiens
  misc_RNA (1)...(19): siRNA sense strand
caacaaugggcaaacggua

SEQ ID NO: 2450469 - RNA, 19 nt, Homo sapiens
  misc_RNA (1)...(19): siRNA sense strand
aaacaaagauagaaccagu

SEQ ID NO: 2450470 - RNA, 19 nt, Homo sapiens
  misc_RNA (1)...(19): siRNA sense strand
aagggacaguggaaggaaa

SEQ ID NO: 2450471 - RNA, 19 nt, Homo sapiens
  misc_RNA (1)...(19): siRNA sense strand
ggaacagauucucaggaca

SEQ ID NO: 2450472 - RNA, 19 nt, Homo sapiens
  misc_RNA (1)...(19): siRNA sense strand
ccuuaagggaaaagaagaa

SEQ ID NO: 2450473 - RNA, 19 nt, Homo sapiens
  misc_RNA (1)...(19): siRNA sense strand
caucaaacagauuaagaca

SEQ ID NO: 2450474 - RNA, 19 nt, Homo sapiens
  misc_RNA (1)...(19): siRNA sense strand
uaugauacgcacaggagaa

SEQ ID NO: 2450475 - RNA, 19 nt, Homo sapiens
  misc_RNA (1)...(19): siRNA sense strand
gagaggaugcugaggagga

SEQ ID NO: 2450476 - RNA, 19 nt, Homo sapiens
  misc_RNA (1)...(19): siRNA sense strand
agugggaagacauggcaaa

SEQ ID NO: 2450477 - RNA, 19 nt, Homo sapiens
  misc_RNA (1)...(19): siRNA sense strand
guuaugaggucaagcagca

SEQ ID NO: 2450478 - RNA, 19 nt, Homo sapiens
  misc_RNA (1)...(19): siRNA sense strand
ggacaguggaaggaaacua

SEQ ID NO: 2450479 - RNA, 19 nt, Homo sapiens
  misc_RNA (1)...(19): siRNA sense strand
uguucagagcagagcuuaa

SEQ ID NO: 2450480 - RNA, 19 nt, Homo sapiens
  misc_RNA (1)...(19): siRNA sense strand
guaaagaacuugugaaccc

SEQ ID NO: 2450481 - RNA, 19 nt, Homo sapiens
  misc_RNA (1)...(19): siRNA sense strand
ggagagaguuuuaaagcca

SEQ ID NO: 2450482 - RNA, 19 nt, Homo sapiens
  misc_RNA (1)...(19): siRNA sense strand
aguccaaagcacuuagaau

SEQ ID NO: 2450483 - RNA, 19 nt, Homo sapiens
  misc_RNA (1)...(19): siRNA sense strand
aguauucauuagagcagaa

SEQ ID NO: 2450484 - RNA, 19 nt, Homo sapiens
  misc_RNA (1)...(19): siRNA sense strand
ugaagaagugggaagacau

SEQ ID NO: 2450485 - RNA, 19 nt, Homo sapiens
  misc_RNA (1)...(19): siRNA sense strand
aggaaugcaccaagugaga

SEQ ID NO: 2450486 - RNA, 19 nt, Homo sapiens
  misc_RNA (1)...(19): siRNA sense strand
cuacaugugaagaggucau

SEQ ID NO: 2450487 - RNA, 19 nt, Homo sapiens
  misc_RNA (1)...(19): siRNA sense strand
ccuggaaagggcagaugaa

SEQ ID NO: 2450488 - RNA, 19 nt, Homo sapiens
  misc_RNA (1)...(19): siRNA sense strand
aacaaugggcaaacgguaa

SEQ ID NO: 2450489 - RNA, 19 nt, Homo sapiens
  misc_RNA (1)...(19): siRNA sense strand
augaagaagugggaagaca

SEQ ID NO: 2450490 - RNA, 19 nt, Homo sapiens
  misc_RNA (1)...(19): siRNA sense strand
gguaaccauuccugugcaa

SEQ ID NO: 2450491 - RNA, 19 nt, Homo sapiens
  misc_RNA (1)...(19): siRNA sense strand
uggcaaaggucacaaaaga

SEQ ID NO: 2450492 - RNA, 19 nt, Homo sapiens
  misc_RNA (1)...(19): siRNA sense strand
ccaacagugacauggaaga

SEQ ID NO: 2450493 - RNA, 19 nt, Homo sapiens
  misc_RNA (1)...(19): siRNA sense strand
augaaguacucacaggcaa

SEQ ID NO: 2450494 - RNA, 19 nt, Homo sapiens
  misc_RNA (1)...(19): siRNA sense strand
gcagcaugagcgaaagcua

SEQ ID NO: 2450495 - RNA, 19 nt, Homo sapiens
  misc_RNA (1)...(19): siRNA sense strand
cccuuguaucauugagaaa

SEQ ID NO: 2450496 - RNA, 19 nt, Homo sapiens
  misc_RNA (1)...(19): siRNA sense strand
caacagugacauggaagaa

SEQ ID NO: 2450497 - RNA, 19 nt, Homo sapiens
  misc_RNA (1)...(19): siRNA sense strand
uguuccaacuguaagcaaa

SEQ ID NO: 2450498 - RNA, 19 nt, Homo sapiens
  misc_RNA (1)...(19): siRNA sense strand
gugcuuuggacuuaguuua

SEQ ID NO: 2450499 - RNA, 19 nt, Homo sapiens
  misc_RNA (1)...(19): siRNA sense strand
caagugagaaacuggaaca

SEQ ID NO: 2450500 - RNA, 19 nt, Homo sapiens
  misc_RNA (1)...(19): siRNA sense strand
ugagaaacuggaacagauu

SEQ ID NO: 2450501 - RNA, 19 nt, Homo sapiens
  misc_RNA (1)...(19): siRNA sense strand
cuaaacaaagauagaacca

SEQ ID NO: 2450502 - RNA, 19 nt, Homo sapiens
  misc_RNA (1)...(19): siRNA sense strand
augaggaggaggaggacga

SEQ ID NO: 2450503 - RNA, 19 nt, Homo sapiens
  misc_RNA (1)...(19): siRNA sense strand
ucagcagcgaggaaggaaa

SEQ ID NO: 2450504 - RNA, 19 nt, Homo sapiens
  misc_RNA (1)...(19): siRNA sense strand
gacuaggagacauggauuu

SEQ ID NO: 2450505 - RNA, 19 nt, Homo sapiens
  misc_RNA (1)...(19): siRNA sense strand
gcuuugaauucuccauaau

SEQ ID NO: 2450506 - RNA, 19 nt, Homo sapiens
  misc_RNA (1)...(19): siRNA sense strand
ucauucaguucuacaacaa

SEQ ID NO: 2450507 - RNA, 19 nt, Homo sapiens
  misc_RNA (1)...(19): siRNA sense strand
caaaggggauaaaggaaca

SEQ ID NO: 2450508 - RNA, 19 nt, Homo sapiens
  misc_RNA (1)...(19): siRNA sense strand
ucaauaaggccuaugagga

SEQ ID NO: 2450509 - RNA, 19 nt, Homo sapiens
  misc_RNA (1)...(19): siRNA sense strand
uguuuuaucuguugggaau

SEQ ID NO: 2450510 - RNA, 19 nt, Homo sapiens
  misc_RNA (1)...(19): siRNA sense strand
ggauaaauuacgauggaga

SEQ ID NO: 2450511 - RNA, 19 nt, Homo sapiens
  misc_RNA (1)...(19): siRNA sense strand
gggcuuuauauguggcaaa

SEQ ID NO: 2450512 - RNA, 19 nt, Homo sapiens
  misc_RNA (1)...(19): siRNA sense strand
aggaaaggcaacagaauca

SEQ ID NO: 2450513 - RNA, 19 nt, Homo sapiens
  misc_RNA (1)...(19): siRNA sense strand
guagugugguugacgguaa

SEQ ID NO: 2450514 - RNA, 19 nt, Homo sapiens
  misc_RNA (1)...(19): siRNA sense strand
cugaagugguauuugggua

SEQ ID NO: 2450515 - RNA, 19 nt, Homo sapiens
  misc_RNA (1)...(19): siRNA sense strand
gcuuguuggaguagauauu

SEQ ID NO: 2450516 - RNA, 19 nt, Homo sapiens
  misc_RNA (1)...(19): siRNA sense strand
uugagaaggccaagauaga

SEQ ID NO: 2450517 - RNA, 19 nt, Homo sapiens
  misc_RNA (1)...(19): siRNA sense strand
gugcuaaugaagagaugau

SEQ ID NO: 2450518 - RNA, 19 nt, Homo sapiens
  misc_RNA (1)...(19): siRNA sense strand
gaguagauauuaaugagga

SEQ ID NO: 2450519 - RNA, 19 nt, Homo sapiens
  misc_RNA (1)...(19): siRNA sense strand
caaagacauugguggcuca

SEQ ID NO: 2450520 - RNA, 19 nt, Homo sapiens
  misc_RNA (1)...(19): siRNA sense strand
aggccaagauagagaacuc

SEQ ID NO: 2450521 - RNA, 19 nt, Homo sapiens
  misc_RNA (1)...(19): siRNA sense strand
uugaauugcuuguuggagu

SEQ ID NO: 2450522 - RNA, 19 nt, Homo sapiens
  misc_RNA (1)...(19): siRNA sense strand
cugccaaggcggaaagaac

SEQ ID NO: 2450523 - RNA, 19 nt, Homo sapiens
  misc_RNA (1)...(19): siRNA sense strand
gaaagaacaggcuggggaa

SEQ ID NO: 2450524 - RNA, 19 nt, Homo sapiens
  misc_RNA (1)...(19): siRNA sense strand
cgguaauuuugaagaaguu

SEQ ID NO: 2450525 - RNA, 19 nt, Homo sapiens
  misc_RNA (1)...(19): siRNA sense strand
ucacagagguugagaaggc

SEQ ID NO: 2450526 - RNA, 19 nt, Homo sapiens
  misc_RNA (1)...(19): siRNA sense strand
ccuuaagagauucagauca

SEQ ID NO: 2450527 - RNA, 19 nt, Homo sapiens
  misc_RNA (1)...(19): siRNA sense strand
cauaaauuugaguggacca

SEQ ID NO: 2450528 - RNA, 19 nt, Homo sapiens
  misc_RNA (1)...(19): siRNA sense strand
ugacgguaauuuugaagaa

SEQ ID NO: 2450529 - RNA, 19 nt, Homo sapiens
  misc_RNA (1)...(19): siRNA sense strand
cuguaagaaaugugggaaa

SEQ ID NO: 2450530 - RNA, 19 nt, Homo sapiens
  misc_RNA (1)...(19): siRNA sense strand
auguaaugacugugggaaa

SEQ ID NO: 2450531 - RNA, 19 nt, Homo sapiens
  misc_RNA (1)...(19): siRNA sense strand
auguaaugaaugugggaaa

SEQ ID NO: 2450532 - RNA, 19 nt, Homo sapiens
  misc_RNA (1)...(19): siRNA sense strand
guguaaugaauguggaaaa

SEQ ID NO: 2450533 - RNA, 19 nt, Homo sapiens
  misc_RNA (1)...(19): siRNA sense strand
gagaagaacuauaagugca

SEQ ID NO: 2450534 - RNA, 19 nt, Homo sapiens
  misc_RNA (1)...(19): siRNA sense strand
cauaauaaagaaagagcca

SEQ ID NO: 2450535 - RNA, 19 nt, Homo sapiens
  misc_RNA (1)...(19): siRNA sense strand
agaagaacuauaagugcaa

SEQ ID NO: 2450536 - RNA, 19 nt, Homo sapiens
  misc_RNA (1)...(19): siRNA sense strand
aacuauaagugcaaggaau

SEQ ID NO: 2450537 - RNA, 19 nt, Homo sapiens
  misc_RNA (1)...(19): siRNA sense strand
cugcaguaaauguggaaaa

SEQ ID NO: 2450538 - RNA, 19 nt, Homo sapiens
  misc_RNA (1)...(19): siRNA sense strand
uuauuagccaccagagaaa

SEQ ID NO: 2450539 - RNA, 19 nt, Homo sapiens
  misc_RNA (1)...(19): siRNA sense strand
aauucauacuggccagaaa

SEQ ID NO: 2450540 - RNA, 19 nt, Homo sapiens
  misc_RNA (1)...(19): siRNA sense strand
gcuggagaacuaugggaau

SEQ ID NO: 2450541 - RNA, 19 nt, Homo sapiens
  misc_RNA (1)...(19): siRNA sense strand
auguaaagaaugugggauc

SEQ ID NO: 2450542 - RNA, 19 nt, Homo sapiens
  misc_RNA (1)...(19): siRNA sense strand
cagaaaacucacaguggaa

SEQ ID NO: 2450543 - RNA, 19 nt, Homo sapiens
  misc_RNA (1)...(19): siRNA sense strand
gcuccacagagaagaacua

SEQ ID NO: 2450544 - RNA, 19 nt, Homo sapiens
  misc_RNA (1)...(19): siRNA sense strand
aauacauaguggagagaag

SEQ ID NO: 2450545 - RNA, 19 nt, Homo sapiens
  misc_RNA (1)...(19): siRNA sense strand
gccuuuaggaagagcucaa

SEQ ID NO: 2450546 - RNA, 19 nt, Homo sapiens
  misc_RNA (1)...(19): siRNA sense strand
cagugagaaaccacauaaa

SEQ ID NO: 2450547 - RNA, 19 nt, Homo sapiens
  misc_RNA (1)...(19): siRNA sense strand
caguaaauguggaaaaucu

SEQ ID NO: 2450548 - RNA, 19 nt, Homo sapiens
  misc_RNA (1)...(19): siRNA sense strand
uuacuggacaucagagaau

SEQ ID NO: 2450549 - RNA, 19 nt, Homo sapiens
  misc_RNA (1)...(19): siRNA sense strand
aagaauacauaguggagag

SEQ ID NO: 2450550 - RNA, 19 nt, Homo sapiens
  misc_RNA (1)...(19): siRNA sense strand
gcccuaaagcaaagcacuu

SEQ ID NO: 2450551 - RNA, 19 nt, Homo sapiens
  misc_RNA (1)...(19): siRNA sense strand
caguguaaugaauguggaa

SEQ ID NO: 2450552 - RNA, 19 nt, Homo sapiens
  misc_RNA (1)...(19): siRNA sense strand
ugggagagcuuucagggau

SEQ ID NO: 2450553 - RNA, 19 nt, Homo sapiens
  misc_RNA (1)...(19): siRNA sense strand
caaagaugucagcccuaaa

SEQ ID NO: 2450554 - RNA, 19 nt, Homo sapiens
  misc_RNA (1)...(19): siRNA sense strand
aauccauacuggugagaag

SEQ ID NO: 2450555 - RNA, 19 nt, Homo sapiens
  misc_RNA (1)...(19): siRNA sense strand
ccuuuuaagucaucagaga

SEQ ID NO: 2450556 - RNA, 19 nt, Homo sapiens
  misc_RNA (1)...(19): siRNA sense strand
gaaaacucacaguggaaau

SEQ ID NO: 2450557 - RNA, 19 nt, Homo sapiens
  misc_RNA (1)...(19): siRNA sense strand
uaauaaagaaagagccaug

SEQ ID NO: 2450558 - RNA, 19 nt, Homo sapiens
  misc_RNA (1)...(19): siRNA sense strand
caacgauaguccaaggaga

SEQ ID NO: 2450559 - RNA, 19 nt, Homo sapiens
  misc_RNA (1)...(19): siRNA sense strand
gcuaccgggcagagacaaa

SEQ ID NO: 2450560 - RNA, 19 nt, Homo sapiens
  misc_RNA (1)...(19): siRNA sense strand
guuugaaggcugugggaug

SEQ ID NO: 2450561 - RNA, 19 nt, Homo sapiens
  misc_RNA (1)...(19): siRNA sense strand
ggacaguggugaagugcag

SEQ ID NO: 2450562 - RNA, 19 nt, Homo sapiens
  misc_RNA (1)...(19): siRNA sense strand
cagagaaacgaaaccggaa

SEQ ID NO: 2450563 - RNA, 19 nt, Homo sapiens
  misc_RNA (1)...(19): siRNA sense strand
aacgauaguccaaggagaa

SEQ ID NO: 2450564 - RNA, 19 nt, Homo sapiens
  misc_RNA (1)...(19): siRNA sense strand
uggaaauuggcgagaaacu

SEQ ID NO: 2450565 - RNA, 19 nt, Homo sapiens
  misc_RNA (1)...(19): siRNA sense strand
aggcccagcuugaggagca

SEQ ID NO: 2450566 - RNA, 19 nt, Homo sapiens
  misc_RNA (1)...(19): siRNA sense strand
ggaaggagcuuguucaccu

SEQ ID NO: 2450567 - RNA, 19 nt, Homo sapiens
  misc_RNA (1)...(19): siRNA sense strand
gagcaguguuugaaggcug

SEQ ID NO: 2450568 - RNA, 19 nt, Homo sapiens
  misc_RNA (1)...(19): siRNA sense strand
gcacgagguuuauagccaa

SEQ ID NO: 2450569 - RNA, 19 nt, Homo sapiens
  misc_RNA (1)...(19): siRNA sense strand
aguuccagcacgagguuua

SEQ ID NO: 2450570 - RNA, 19 nt, Homo sapiens
  misc_RNA (1)...(19): siRNA sense strand
gguuuauagccaauaguca

SEQ ID NO: 2450571 - RNA, 19 nt, Homo sapiens
  misc_RNA (1)...(19): siRNA sense strand
acccagacuccgaccgaaa

SEQ ID NO: 2450572 - RNA, 19 nt, Homo sapiens
  misc_RNA (1)...(19): siRNA sense strand
uagacagaaaccagaggua

SEQ ID NO: 2450573 - RNA, 19 nt, Homo sapiens
  misc_RNA (1)...(19): siRNA sense strand
ccccggaagacaaggauaa

SEQ ID NO: 2450574 - RNA, 19 nt, Homo sapiens
  misc_RNA (1)...(19): siRNA sense strand
aaucaaacguauuagagga

SEQ ID NO: 2450575 - RNA, 19 nt, Homo sapiens
  misc_RNA (1)...(19): siRNA sense strand
gugaagaacucaagggugg

SEQ ID NO: 2450576 - RNA, 19 nt, Homo sapiens
  misc_RNA (1)...(19): siRNA sense strand
acucaaggguggggauaaa

SEQ ID NO: 2450577 - RNA, 19 nt, Homo sapiens
  misc_RNA (1)...(19): siRNA sense strand
ggcugcugcuggaggaaau

SEQ ID NO: 2450578 - RNA, 19 nt, Homo sapiens
  misc_RNA (1)...(19): siRNA sense strand
caaccaaagccuggcgcua

SEQ ID NO: 2450579 - RNA, 19 nt, Homo sapiens
  misc_RNA (1)...(19): siRNA sense strand
ugaaauaaaccaaacagga

SEQ ID NO: 2450580 - RNA, 19 nt, Homo sapiens
  misc_RNA (1)...(19): siRNA sense strand
ccuucguggcauuggguau

SEQ ID NO: 2450581 - RNA, 19 nt, Homo sapiens
  misc_RNA (1)...(19): siRNA sense strand
gaacaugacuguagcgucc

SEQ ID NO: 2450582 - RNA, 19 nt, Homo sapiens
  misc_RNA (1)...(19): siRNA sense strand
aggaggaggcgaagugguu

SEQ ID NO: 2450583 - RNA, 19 nt, Homo sapiens
  misc_RNA (1)...(19): siRNA sense strand
guugauguucuuaaggcaa

SEQ ID NO: 2450584 - RNA, 19 nt, Homo sapiens
  misc_RNA (1)...(19): siRNA sense strand
guauuagaggaauggcgua

SEQ ID NO: 2450585 - RNA, 19 nt, Homo sapiens
  misc_RNA (1)...(19): siRNA sense strand
cuacagggguggaugcgua

SEQ ID NO: 2450586 - RNA, 19 nt, Homo sapiens
  misc_RNA (1)...(19): siRNA sense strand
ggaagaaguacuuugagga

SEQ ID NO: 2450587 - RNA, 19 nt, Homo sapiens
  misc_RNA (1)...(19): siRNA sense strand
aggagaaagggcagcucua

SEQ ID NO: 2450588 - RNA, 19 nt, Homo sapiens
  misc_RNA (1)...(19): siRNA sense strand
gcaucuaccuggacacgga

SEQ ID NO: 2450589 - RNA, 19 nt, Homo sapiens
  misc_RNA (1)...(19): siRNA sense strand
aagagaagguaaagggaga

SEQ ID NO: 2450590 - RNA, 19 nt, Homo sapiens
  misc_RNA (1)...(19): siRNA sense strand
agguaaagggagagguaau

SEQ ID NO: 2450591 - RNA, 19 nt, Homo sapiens
  misc_RNA (1)...(19): siRNA sense strand
agauaaaacaggaggagaa

SEQ ID NO: 2450592 - RNA, 19 nt, Homo sapiens
  misc_RNA (1)...(19): siRNA sense strand
gugaaggaagagaaggaua

SEQ ID NO: 2450593 - RNA, 19 nt, Homo sapiens
  misc_RNA (1)...(19): siRNA sense strand
agaggaaggaaguggacaa

SEQ ID NO: 2450594 - RNA, 19 nt, Homo sapiens
  misc_RNA (1)...(19): siRNA sense strand
ggguagaacaggaggugga

SEQ ID NO: 2450595 - RNA, 19 nt, Homo sapiens
  misc_RNA (1)...(19): siRNA sense strand
cuagacaauuugaggaaca

SEQ ID NO: 2450596 - RNA, 19 nt, Homo sapiens
  misc_RNA (1)...(19): siRNA sense strand
ugggugaaccagagguaaa

SEQ ID NO: 2450597 - RNA, 19 nt, Homo sapiens
  misc_RNA (1)...(19): siRNA sense strand
cgguagugaagcaggaaau

SEQ ID NO: 2450598 - RNA, 19 nt, Homo sapiens
  misc_RNA (1)...(19): siRNA sense strand
aggauaggccugaggugaa

SEQ ID NO: 2450599 - RNA, 19 nt, Homo sapiens
  misc_RNA (1)...(19): siRNA sense strand
cagaagugaaggaagagaa

SEQ ID NO: 2450600 - RNA, 19 nt, Homo sapiens
  misc_RNA (1)...(19): siRNA sense strand
uggacaaaggccagaggaa

SEQ ID NO: 2450601 - RNA, 19 nt, Homo sapiens
  misc_RNA (1)...(19): siRNA sense strand
aggagaaguuuguugguca

SEQ ID NO: 2450602 - RNA, 19 nt, Homo sapiens
  misc_RNA (1)...(19): siRNA sense strand
aggaauugaugcauggaga

SEQ ID NO: 2450603 - RNA, 19 nt, Homo sapiens
  misc_RNA (1)...(19): siRNA sense strand
agguaaaggaagagaaggu

SEQ ID NO: 2450604 - RNA, 19 nt, Homo sapiens
  misc_RNA (1)...(19): siRNA sense strand
gugugagacuugugguaca

SEQ ID NO: 2450605 - RNA, 19 nt, Homo sapiens
  misc_RNA (1)...(19): siRNA sense strand
gugaagcaggagacggaua

SEQ ID NO: 2450606 - RNA, 19 nt, Homo sapiens
  misc_RNA (1)...(19): siRNA sense strand
gcguauuggaggugaagca

SEQ ID NO: 2450607 - RNA, 19 nt, Homo sapiens
  misc_RNA (1)...(19): siRNA sense strand
aggaagagaaggauaacuu

SEQ ID NO: 2450608 - RNA, 19 nt, Homo sapiens
  misc_RNA (1)...(19): siRNA sense strand
guguaaaagaagagaagga

SEQ ID NO: 2450609 - RNA, 19 nt, Homo sapiens
  misc_RNA (1)...(19): siRNA sense strand
ggacagggcugacagggau

SEQ ID NO: 2450610 - RNA, 19 nt, Homo sapiens
  misc_RNA (1)...(19): siRNA sense strand
ucaccaagaggaaggagaa

SEQ ID NO: 2450611 - RNA, 19 nt, Homo sapiens
  misc_RNA (1)...(19): siRNA sense strand
augcauggagaguguguaa

SEQ ID NO: 2450612 - RNA, 19 nt, Homo sapiens
  misc_RNA (1)...(19): siRNA sense strand
aagugaaggaagagaagga

SEQ ID NO: 2450613 - RNA, 19 nt, Homo sapiens
  misc_RNA (1)...(19): siRNA sense strand
gcauggagaguguguaaaa

SEQ ID NO: 2450614 - RNA, 19 nt, Homo sapiens
  misc_RNA (1)...(19): siRNA sense strand
ugaagagaccaauaagcaa

SEQ ID NO: 2450615 - RNA, 19 nt, Homo sapiens
  misc_RNA (1)...(19): siRNA sense strand
guaaaagaagagaaggauu

SEQ ID NO: 2450616 - RNA, 19 nt, Homo sapiens
  misc_RNA (1)...(19): siRNA sense strand
ggauggagaggaaggaagu

SEQ ID NO: 2450617 - RNA, 19 nt, Homo sapiens
  misc_RNA (1)...(19): siRNA sense strand
ggaugauacaaaggugaaa

SEQ ID NO: 2450618 - RNA, 19 nt, Homo sapiens
  misc_RNA (1)...(19): siRNA sense strand
gacuugugguacagaagaa

SEQ ID NO: 2450619 - RNA, 19 nt, Homo sapiens
  misc_RNA (1)...(19): siRNA sense strand
gaggaaggaaguggacaaa

SEQ ID NO: 2450620 - RNA, 19 nt, Homo sapiens
  misc_RNA (1)...(19): siRNA sense strand
caccaagugaagagugaau

SEQ ID NO: 2450621 - RNA, 19 nt, Homo sapiens
  misc_RNA (1)...(19): siRNA sense strand
uagugaagcaggaaauuau

SEQ ID NO: 2450622 - RNA, 19 nt, Homo sapiens
  misc_RNA (1)...(19): siRNA sense strand
ggauaaaggagauagggga

SEQ ID NO: 2450623 - RNA, 19 nt, Homo sapiens
  misc_RNA (1)...(19): siRNA sense strand
ggaagauguggcaagaaca

SEQ ID NO: 2450624 - RNA, 19 nt, Homo sapiens
  misc_RNA (1)...(19): siRNA sense strand
ggaccauauuucuagagau

SEQ ID NO: 2450625 - RNA, 19 nt, Homo sapiens
  misc_RNA (1)...(19): siRNA sense strand
gagaaggauaacuuggaga

SEQ ID NO: 2450626 - RNA, 19 nt, Homo sapiens
  misc_RNA (1)...(19): siRNA sense strand
caggcguauuggaggugaa

SEQ ID NO: 2450627 - RNA, 19 nt, Homo sapiens
  misc_RNA (1)...(19): siRNA sense strand
aggugaagcaggagacgga

SEQ ID NO: 2450628 - RNA, 19 nt, Homo sapiens
  misc_RNA (1)...(19): siRNA sense strand
cagagguaaaggaagagaa

SEQ ID NO: 2450629 - RNA, 19 nt, Homo sapiens
  misc_RNA (1)...(19): siRNA sense strand
uaaagaaacacaaagcaga

SEQ ID NO: 2450630 - RNA, 19 nt, Homo sapiens
  misc_RNA (1)...(19): siRNA sense strand
gaacguuggcaaugaaaau

SEQ ID NO: 2450631 - RNA, 19 nt, Homo sapiens
  misc_RNA (1)...(19): siRNA sense strand
gauacaaaggugaaagaag

SEQ ID NO: 2450632 - RNA, 19 nt, Homo sapiens
  misc_RNA (1)...(19): siRNA sense strand
ggugggugaaccagaggua

SEQ ID NO: 2450633 - RNA, 19 nt, Homo sapiens
  misc_RNA (1)...(19): siRNA sense strand
gauaaaggagauaggggau

SEQ ID NO: 2450634 - RNA, 19 nt, Homo sapiens
  misc_RNA (1)...(19): siRNA sense strand
aagaagcgaagguggguga

SEQ ID NO: 2450635 - RNA, 19 nt, Homo sapiens
  misc_RNA (1)...(19): siRNA sense strand
aggcaaacgagaagaagga

SEQ ID NO: 2450636 - RNA, 19 nt, Homo sapiens
  misc_RNA (1)...(19): siRNA sense strand
agaagaaggaggaacccaa

SEQ ID NO: 2450637 - RNA, 19 nt, Homo sapiens
  misc_RNA (1)...(19): siRNA sense strand
caaacgagaagaaggagga

SEQ ID NO: 2450638 - RNA, 19 nt, Homo sapiens
  misc_RNA (1)...(19): siRNA sense strand
aagcagagggacucggaga

SEQ ID NO: 2450639 - RNA, 19 nt, Homo sapiens
  misc_RNA (1)...(19): siRNA sense strand
ccaaguagcuuuguggcuu

SEQ ID NO: 2450640 - RNA, 19 nt, Homo sapiens
  misc_RNA (1)...(19): siRNA sense strand
gguuagagaaagaagagaa

SEQ ID NO: 2450641 - RNA, 19 nt, Homo sapiens
  misc_RNA (1)...(19): siRNA sense strand
guuagagaaagaagagaaa

SEQ ID NO: 2450642 - RNA, 19 nt, Homo sapiens
  misc_RNA (1)...(19): siRNA sense strand
ggaaauuaauaguagagga

SEQ ID NO: 2450643 - RNA, 19 nt, Homo sapiens
  misc_RNA (1)...(19): siRNA sense strand
gggucaaugccuucagaaa

SEQ ID NO: 2450644 - RNA, 19 nt, Homo sapiens
  misc_RNA (1)...(19): siRNA sense strand
cgcuagaagaugagucaaa

SEQ ID NO: 2450645 - RNA, 19 nt, Homo sapiens
  misc_RNA (1)...(19): siRNA sense strand
uuaugugagaagagagaaa

SEQ ID NO: 2450646 - RNA, 19 nt, Homo sapiens
  misc_RNA (1)...(19): siRNA sense strand
ggaagagcuuacagagcau

SEQ ID NO: 2450647 - RNA, 19 nt, Homo sapiens
  misc_RNA (1)...(19): siRNA sense strand
uaccaaagaaagaggagaa

SEQ ID NO: 2450648 - RNA, 19 nt, Homo sapiens
  misc_RNA (1)...(19): siRNA sense strand
augaauugauggcggauau

SEQ ID NO: 2450649 - RNA, 19 nt, Homo sapiens
  misc_RNA (1)...(19): siRNA sense strand
cuccagaggcccagggaau

SEQ ID NO: 2450650 - RNA, 19 nt, Homo sapiens
  misc_RNA (1)...(19): siRNA sense strand
ggauaaaauggauggguca

SEQ ID NO: 2450651 - RNA, 19 nt, Homo sapiens
  misc_RNA (1)...(19): siRNA sense strand
ggauauuuccaaaaggaua

SEQ ID NO: 2450652 - RNA, 19 nt, Homo sapiens
  misc_RNA (1)...(19): siRNA sense strand
ugaaguauggaaagaacaa

SEQ ID NO: 2450653 - RNA, 19 nt, Homo sapiens
  misc_RNA (1)...(19): siRNA sense strand
guucauaagaagaggaccu

SEQ ID NO: 2450654 - RNA, 19 nt, Homo sapiens
  misc_RNA (1)...(19): siRNA sense strand
gcaucuuugcagucagaaa

SEQ ID NO: 2450655 - RNA, 19 nt, Homo sapiens
  misc_RNA (1)...(19): siRNA sense strand
ucagauuaccaaagaaaga

SEQ ID NO: 2450656 - RNA, 19 nt, Homo sapiens
  misc_RNA (1)...(19): siRNA sense strand
augaaacucuacaggaaau

SEQ ID NO: 2450657 - RNA, 19 nt, Homo sapiens
  misc_RNA (1)...(19): siRNA sense strand
cuaccgaaagcgagccaaa

SEQ ID NO: 2450658 - RNA, 19 nt, Homo sapiens
  misc_RNA (1)...(19): siRNA sense strand
gggaacaggacuauaggau

SEQ ID NO: 2450659 - RNA, 19 nt, Homo sapiens
  misc_RNA (1)...(19): siRNA sense strand
cacaaaggcaagacagauu

SEQ ID NO: 2450660 - RNA, 19 nt, Homo sapiens
  misc_RNA (1)...(19): siRNA sense strand
uagagaaagaagagaaacu

SEQ ID NO: 2450661 - RNA, 19 nt, Homo sapiens
  misc_RNA (1)...(19): siRNA sense strand
ugaacuugugcaugaaaua

SEQ ID NO: 2450662 - RNA, 19 nt, Homo sapiens
  misc_RNA (1)...(19): siRNA sense strand
aagaacgguuggagauaga

SEQ ID NO: 2450663 - RNA, 19 nt, Homo sapiens
  misc_RNA (1)...(19): siRNA sense strand
ugaagaagauguaacggau

SEQ ID NO: 2450664 - RNA, 19 nt, Homo sapiens
  misc_RNA (1)...(19): siRNA sense strand
agaaggagaaagaaaccaa

SEQ ID NO: 2450665 - RNA, 19 nt, Homo sapiens
  misc_RNA (1)...(19): siRNA sense strand
aaacaaaggaagagcuuac

SEQ ID NO: 2450666 - RNA, 19 nt, Homo sapiens
  misc_RNA (1)...(19): siRNA sense strand
ccaaaguacaugcagaaca

SEQ ID NO: 2450667 - RNA, 19 nt, Homo sapiens
  misc_RNA (1)...(19): siRNA sense strand
ugaagaacgguuggagaua

SEQ ID NO: 2450668 - RNA, 19 nt, Homo sapiens
  misc_RNA (1)...(19): siRNA sense strand
auguaacggaugaugauaa

SEQ ID NO: 2450669 - RNA, 19 nt, Homo sapiens
  misc_RNA (1)...(19): siRNA sense strand
cuuuaugugagaagagaga

SEQ ID NO: 2450670 - RNA, 19 nt, Homo sapiens
  misc_RNA (1)...(19): siRNA sense strand
aggcuaugaaguagaguca

SEQ ID NO: 2450671 - RNA, 19 nt, Homo sapiens
  misc_RNA (1)...(19): siRNA sense strand
augaagaacgguuggagau

SEQ ID NO: 2450672 - RNA, 19 nt, Homo sapiens
  misc_RNA (1)...(19): siRNA sense strand
uugcuaugcuugaagaaga

SEQ ID NO: 2450673 - RNA, 19 nt, Homo sapiens
  misc_RNA (1)...(19): siRNA sense strand
aaugaaacucuacaggaaa

SEQ ID NO: 2450674 - RNA, 19 nt, Homo sapiens
  misc_RNA (1)...(19): siRNA sense strand
ggaggcaacagaagcacaa

SEQ ID NO: 2450675 - RNA, 19 nt, Homo sapiens
  misc_RNA (1)...(19): siRNA sense strand
acgguuggagauagaaaua

SEQ ID NO: 2450676 - RNA, 19 nt, Homo sapiens
  misc_RNA (1)...(19): siRNA sense strand
cuccaaaguacaugcagaa

SEQ ID NO: 2450677 - RNA, 19 nt, Homo sapiens
  misc_RNA (1)...(19): siRNA sense strand
aucagaagcuucagcagaa

SEQ ID NO: 2450678 - RNA, 19 nt, Homo sapiens
  misc_RNA (1)...(19): siRNA sense strand
guuuauuguuuccgguaga

SEQ ID NO: 2450679 - RNA, 19 nt, Homo sapiens
  misc_RNA (1)...(19): siRNA sense strand
aggaagagcuuacagagca

SEQ ID NO: 2450680 - RNA, 19 nt, Homo sapiens
  misc_RNA (1)...(19): siRNA sense strand
cuaaaguagacgaaaugau

SEQ ID NO: 2450681 - RNA, 19 nt, Homo sapiens
  misc_RNA (1)...(19): siRNA sense strand
ggaaagaaaaugcucacaa

SEQ ID NO: 2450682 - RNA, 19 nt, Homo sapiens
  misc_RNA (1)...(19): siRNA sense strand
aaaugaccuucaagagauu

SEQ ID NO: 2450683 - RNA, 19 nt, Homo sapiens
  misc_RNA (1)...(19): siRNA sense strand
gaacauuugaagacuccaa

SEQ ID NO: 2450684 - RNA, 19 nt, Homo sapiens
  misc_RNA (1)...(19): siRNA sense strand
aagcugaaguauggaaaga

SEQ ID NO: 2450685 - RNA, 19 nt, Homo sapiens
  misc_RNA (1)...(19): siRNA sense strand
aggagaaagaaaccaaauu

SEQ ID NO: 2450686 - RNA, 19 nt, Homo sapiens
  misc_RNA (1)...(19): siRNA sense strand
cuuuaaagaaugccagcuu

SEQ ID NO: 2450687 - RNA, 19 nt, Homo sapiens
  misc_RNA (1)...(19): siRNA sense strand
gcaugaaauacucugucua

SEQ ID NO: 2450688 - RNA, 19 nt, Homo sapiens
  misc_RNA (1)...(19): siRNA sense strand
acuccaaaguacaugcaga

SEQ ID NO: 2450689 - RNA, 19 nt, Homo sapiens
  misc_RNA (1)...(19): siRNA sense strand
cacaaguagcugaagccaa

SEQ ID NO: 2450690 - RNA, 19 nt, Homo sapiens
  misc_RNA (1)...(19): siRNA sense strand
ucaagagauuucaagcgaa

SEQ ID NO: 2450691 - RNA, 19 nt, Homo sapiens
  misc_RNA (1)...(19): siRNA sense strand
cugaaagaaaccucaauga

SEQ ID NO: 2450692 - RNA, 19 nt, Homo sapiens
  misc_RNA (1)...(19): siRNA sense strand
guggagaaguuuuagauca

SEQ ID NO: 2450693 - RNA, 19 nt, Homo sapiens
  misc_RNA (1)...(19): siRNA sense strand
gauagaaauacgagaugcu

SEQ ID NO: 2450694 - RNA, 19 nt, Homo sapiens
  misc_RNA (1)...(19): siRNA sense strand
agaagcugaaguauggaaa

SEQ ID NO: 2450695 - RNA, 19 nt, Homo sapiens
  misc_RNA (1)...(19): siRNA sense strand
acaucaagacucugacuga

SEQ ID NO: 2450696 - RNA, 19 nt, Homo sapiens
  misc_RNA (1)...(19): siRNA sense strand
gaacaagcaucuuugcagu

SEQ ID NO: 2450697 - RNA, 19 nt, Homo sapiens
  misc_RNA (1)...(19): siRNA sense strand
gaugaugauaacuuggaau

SEQ ID NO: 2450698 - RNA, 19 nt, Homo sapiens
  misc_RNA (1)...(19): siRNA sense strand
gcacagagcauaagagcca

SEQ ID NO: 2450699 - RNA, 19 nt, Homo sapiens
  misc_RNA (1)...(19): siRNA sense strand
gugugaaggcaaagaagaa

SEQ ID NO: 2450700 - RNA, 19 nt, Homo sapiens
  misc_RNA (1)...(19): siRNA sense strand
aauuaagaaaggaggcuaa

SEQ ID NO: 2450701 - RNA, 19 nt, Homo sapiens
  misc_RNA (1)...(19): siRNA sense strand
uguugaaggugcugccaaa

SEQ ID NO: 2450702 - RNA, 19 nt, Homo sapiens
  misc_RNA (1)...(19): siRNA sense strand
cggucugacaaauggaaua

SEQ ID NO: 2450703 - RNA, 19 nt, Homo sapiens
  misc_RNA (1)...(19): siRNA sense strand
cagcaaagccauucggguu

SEQ ID NO: 2450704 - RNA, 19 nt, Homo sapiens
  misc_RNA (1)...(19): siRNA sense strand
ggaaagaaaggaagcagga

SEQ ID NO: 2450705 - RNA, 19 nt, Homo sapiens
  misc_RNA (1)...(19): siRNA sense strand
aggcagaaggaacuagaaa

SEQ ID NO: 2450706 - RNA, 19 nt, Homo sapiens
  misc_RNA (1)...(19): siRNA sense strand
ggaagcaggaggagaggga

SEQ ID NO: 2450707 - RNA, 19 nt, Homo sapiens
  misc_RNA (1)...(19): siRNA sense strand
gauaaagggaagauaacca

SEQ ID NO: 2450708 - RNA, 19 nt, Homo sapiens
  misc_RNA (1)...(19): siRNA sense strand
ugaugaagaaguugaugaa

SEQ ID NO: 2450709 - RNA, 19 nt, Homo sapiens
  misc_RNA (1)...(19): siRNA sense strand
caaagaagcuguacugcca

SEQ ID NO: 2450710 - RNA, 19 nt, Homo sapiens
  misc_RNA (1)...(19): siRNA sense strand
aggaggagagggaggauga

SEQ ID NO: 2450711 - RNA, 19 nt, Homo sapiens
  misc_RNA (1)...(19): siRNA sense strand
aaccaaaggauaaagggaa

SEQ ID NO: 2450712 - RNA, 19 nt, Homo sapiens
  misc_RNA (1)...(19): siRNA sense strand
cagcauuaucaauagcuua

SEQ ID NO: 2450713 - RNA, 19 nt, Homo sapiens
  misc_RNA (1)...(19): siRNA sense strand
aggagagggaggaugacaa

SEQ ID NO: 2450714 - RNA, 19 nt, Homo sapiens
  misc_RNA (1)...(19): siRNA sense strand
aggacauacaugaagaauu

SEQ ID NO: 2450715 - RNA, 19 nt, Homo sapiens
  misc_RNA (1)...(19): siRNA sense strand
ggaaaaggaguuugggcuu

SEQ ID NO: 2450716 - RNA, 19 nt, Homo sapiens
  misc_RNA (1)...(19): siRNA sense strand
ugaagucugcuuugggaaa

SEQ ID NO: 2450717 - RNA, 19 nt, Homo sapiens
  misc_RNA (1)...(19): siRNA sense strand
ucaacaaaaccaaaggaua

SEQ ID NO: 2450718 - RNA, 19 nt, Homo sapiens
  misc_RNA (1)...(19): siRNA sense strand
cauucggguuggaguaauu

SEQ ID NO: 2450719 - RNA, 19 nt, Homo sapiens
  misc_RNA (1)...(19): siRNA sense strand
aggcauguuugcugcagaa

SEQ ID NO: 2450720 - RNA, 19 nt, Homo sapiens
  misc_RNA (1)...(19): siRNA sense strand
cacaagaagccuaggaaag

SEQ ID NO: 2450721 - RNA, 19 nt, Homo sapiens
  misc_RNA (1)...(19): siRNA sense strand
ggaagauaaccaagcgugu

SEQ ID NO: 2450722 - RNA, 19 nt, Homo sapiens
  misc_RNA (1)...(19): siRNA sense strand
gaucacaaucauagauagu

SEQ ID NO: 2450723 - RNA, 19 nt, Homo sapiens
  misc_RNA (1)...(19): siRNA sense strand
auagauaguccgagcuuca

SEQ ID NO: 2450724 - RNA, 19 nt, Homo sapiens
  misc_RNA (1)...(19): siRNA sense strand
ggagacuacagcaggugaa

SEQ ID NO: 2450725 - RNA, 19 nt, Homo sapiens
  misc_RNA (1)...(19): siRNA sense strand
gaaggaacuagaaaagaaa

SEQ ID NO: 2450726 - RNA, 19 nt, Homo sapiens
  misc_RNA (1)...(19): siRNA sense strand
aagaaaggaagcaggagga

SEQ ID NO: 2450727 - RNA, 19 nt, Homo sapiens
  misc_RNA (1)...(19): siRNA sense strand
agagggaggaugacaaaga

SEQ ID NO: 2450728 - RNA, 19 nt, Homo sapiens
  misc_RNA (1)...(19): siRNA sense strand
gcgaaguccagcaaguauu

SEQ ID NO: 2450729 - RNA, 19 nt, Homo sapiens
  misc_RNA (1)...(19): siRNA sense strand
agcaaguauugaaguagua

SEQ ID NO: 2450730 - RNA, 19 nt, Homo sapiens
  misc_RNA (1)...(19): siRNA sense strand
uugccaaaacggaaagaaa

SEQ ID NO: 2450731 - RNA, 19 nt, Homo sapiens
  misc_RNA (1)...(19): siRNA sense strand
ggcagaaggaacuagaaaa

SEQ ID NO: 2450732 - RNA, 19 nt, Homo sapiens
  misc_RNA (1)...(19): siRNA sense strand
gcuuaaaacaagaacagau

SEQ ID NO: 2450733 - RNA, 19 nt, Homo sapiens
  misc_RNA (1)...(19): siRNA sense strand
gaaaggaagcaggaggaga

SEQ ID NO: 2450734 - RNA, 19 nt, Homo sapiens
  misc_RNA (1)...(19): siRNA sense strand
cgggcaaacagaauucaaa

SEQ ID NO: 2450735 - RNA, 19 nt, Homo sapiens
  misc_RNA (1)...(19): siRNA sense strand
gaacagucuacaaggucuu

SEQ ID NO: 2450736 - RNA, 19 nt, Homo sapiens
  misc_RNA (1)...(19): siRNA sense strand
auguggaaccuauggaaaa

SEQ ID NO: 2450737 - RNA, 19 nt, Homo sapiens
  misc_RNA (1)...(19): siRNA sense strand
aggagaauuuggagagcug

SEQ ID NO: 2450738 - RNA, 19 nt, Homo sapiens
  misc_RNA (1)...(19): siRNA sense strand
ugacaaagacagugaccag

SEQ ID NO: 2450739 - RNA, 19 nt, Homo sapiens
  misc_RNA (1)...(19): siRNA sense strand
agcagaaacuugacaggca

SEQ ID NO: 2450740 - RNA, 19 nt, Homo sapiens
  misc_RNA (1)...(19): siRNA sense strand
aaacugagaacaaagccaa

SEQ ID NO: 2450741 - RNA, 19 nt, Homo sapiens
  misc_RNA (1)...(19): siRNA sense strand
accaaaggauaaagggaag

SEQ ID NO: 2450742 - RNA, 19 nt, Homo sapiens
  misc_RNA (1)...(19): siRNA sense strand
ccaaaggauaaagggaaga

SEQ ID NO: 2450743 - RNA, 19 nt, Homo sapiens
  misc_RNA (1)...(19): siRNA sense strand
aggauaaagggaagauaac

SEQ ID NO: 2450744 - RNA, 19 nt, Homo sapiens
  misc_RNA (1)...(19): siRNA sense strand
augagaguauugugguaga

SEQ ID NO: 2450745 - RNA, 19 nt, Homo sapiens
  misc_RNA (1)...(19): siRNA sense strand
agaaaaggacauacaugaa

SEQ ID NO: 2450746 - RNA, 19 nt, Homo sapiens
  misc_RNA (1)...(19): siRNA sense strand
aggaugacaaagacaguga

SEQ ID NO: 2450747 - RNA, 19 nt, Homo sapiens
  misc_RNA (1)...(19): siRNA sense strand
ucgacagguaguacugaaa

SEQ ID NO: 2450748 - RNA, 19 nt, Homo sapiens
  misc_RNA (1)...(19): siRNA sense strand
gcacagagcauaagagcca

SEQ ID NO: 2450749 - RNA, 19 nt, Homo sapiens
  misc_RNA (1)...(19): siRNA sense strand
gugugaaggcaaagaagaa

SEQ ID NO: 2450750 - RNA, 19 nt, Homo sapiens
  misc_RNA (1)...(19): siRNA sense strand
aauuaagaaaggaggcuaa

SEQ ID NO: 2450751 - RNA, 19 nt, Homo sapiens
  misc_RNA (1)...(19): siRNA sense strand
uguugaaggugcugccaaa

SEQ ID NO: 2450752 - RNA, 19 nt, Homo sapiens
  misc_RNA (1)...(19): siRNA sense strand
cggucugacaaauggaaua

SEQ ID NO: 2450753 - RNA, 19 nt, Homo sapiens
  misc_RNA (1)...(19): siRNA sense strand
cagcaaagccauucggguu

SEQ ID NO: 2450754 - RNA, 19 nt, Homo sapiens
  misc_RNA (1)...(19): siRNA sense strand
ggaaagaaaggaagcagga

SEQ ID NO: 2450755 - RNA, 19 nt, Homo sapiens
  misc_RNA (1)...(19): siRNA sense strand
aggcagaaggaacuagaaa

SEQ ID NO: 2450756 - RNA, 19 nt, Homo sapiens
  misc_RNA (1)...(19): siRNA sense strand
ggaagcaggaggagaggga

SEQ ID NO: 2450757 - RNA, 19 nt, Homo sapiens
  misc_RNA (1)...(19): siRNA sense strand
gauaaagggaagauaacca

SEQ ID NO: 2450758 - RNA, 19 nt, Homo sapiens
  misc_RNA (1)...(19): siRNA sense strand
ugaugaagaaguugaugaa

SEQ ID NO: 2450759 - RNA, 19 nt, Homo sapiens
  misc_RNA (1)...(19): siRNA sense strand
caaagaagcuguacugcca

SEQ ID NO: 2450760 - RNA, 19 nt, Homo sapiens
  misc_RNA (1)...(19): siRNA sense strand
aggaggagagggaggauga

SEQ ID NO: 2450761 - RNA, 19 nt, Homo sapiens
  misc_RNA (1)...(19): siRNA sense strand
aaccaaaggauaaagggaa

SEQ ID NO: 2450762 - RNA, 19 nt, Homo sapiens
  misc_RNA (1)...(19): siRNA sense strand
cagcauuaucaauagcuua

SEQ ID NO: 2450763 - RNA, 19 nt, Homo sapiens
  misc_RNA (1)...(19): siRNA sense strand
aggagagggaggaugacaa

SEQ ID NO: 2450764 - RNA, 19 nt, Homo sapiens
  misc_RNA (1)...(19): siRNA sense strand
aggacauacaugaagaauu

SEQ ID NO: 2450765 - RNA, 19 nt, Homo sapiens
  misc_RNA (1)...(19): siRNA sense strand
ggaaaaggaguuugggcuu

SEQ ID NO: 2450766 - RNA, 19 nt, Homo sapiens
  misc_RNA (1)...(19): siRNA sense strand
ugaagucugcuuugggaaa

SEQ ID NO: 2450767 - RNA, 19 nt, Homo sapiens
  misc_RNA (1)...(19): siRNA sense strand
ucaacaaaaccaaaggaua

SEQ ID NO: 2450768 - RNA, 19 nt, Homo sapiens
  misc_RNA (1)...(19): siRNA sense strand
cauucggguuggaguaauu

SEQ ID NO: 2450769 - RNA, 19 nt, Homo sapiens
  misc_RNA (1)...(19): siRNA sense strand
aggcauguuugcugcagaa

SEQ ID NO: 2450770 - RNA, 19 nt, Homo sapiens
  misc_RNA (1)...(19): siRNA sense strand
ggaagauaaccaagcgugu

SEQ ID NO: 2450771 - RNA, 19 nt, Homo sapiens
  misc_RNA (1)...(19): siRNA sense strand
cacaagaagccuaggaaag

SEQ ID NO: 2450772 - RNA, 19 nt, Homo sapiens
  misc_RNA (1)...(19): siRNA sense strand
gaucacaaucauagauagu

SEQ ID NO: 2450773 - RNA, 19 nt, Homo sapiens
  misc_RNA (1)...(19): siRNA sense strand
auagauaguccgagcuuca

SEQ ID NO: 2450774 - RNA, 19 nt, Homo sapiens
  misc_RNA (1)...(19): siRNA sense strand
ggagacuacagcaggugaa

SEQ ID NO: 2450775 - RNA, 19 nt, Homo sapiens
  misc_RNA (1)...(19): siRNA sense strand
gaaggaacuagaaaagaaa

SEQ ID NO: 2450776 - RNA, 19 nt, Homo sapiens
  misc_RNA (1)...(19): siRNA sense strand
aagaaaggaagcaggagga

SEQ ID NO: 2450777 - RNA, 19 nt, Homo sapiens
  misc_RNA (1)...(19): siRNA sense strand
agagggaggaugacaaaga

SEQ ID NO: 2450778 - RNA, 19 nt, Homo sapiens
  misc_RNA (1)...(19): siRNA sense strand
gcgaaguccagcaaguauu

SEQ ID NO: 2450779 - RNA, 19 nt, Homo sapiens
  misc_RNA (1)...(19): siRNA sense strand
agcaaguauugaaguagua

SEQ ID NO: 2450780 - RNA, 19 nt, Homo sapiens
  misc_RNA (1)...(19): siRNA sense strand
uugccaaaacggaaagaaa

SEQ ID NO: 2450781 - RNA, 19 nt, Homo sapiens
  misc_RNA (1)...(19): siRNA sense strand
ggcagaaggaacuagaaaa

SEQ ID NO: 2450782 - RNA, 19 nt, Homo sapiens
  misc_RNA (1)...(19): siRNA sense strand
gcuuaaaacaagaacagau

SEQ ID NO: 2450783 - RNA, 19 nt, Homo sapiens
  misc_RNA (1)...(19): siRNA sense strand
gaaaggaagcaggaggaga

SEQ ID NO: 2450784 - RNA, 19 nt, Homo sapiens
  misc_RNA (1)...(19): siRNA sense strand
cgggcaaacagaauucaaa

SEQ ID NO: 2450785 - RNA, 19 nt, Homo sapiens
  misc_RNA (1)...(19): siRNA sense strand
gaacagucuacaaggucuu

SEQ ID NO: 2450786 - RNA, 19 nt, Homo sapiens
  misc_RNA (1)...(19): siRNA sense strand
auguggaaccuauggaaaa

SEQ ID NO: 2450787 - RNA, 19 nt, Homo sapiens
  misc_RNA (1)...(19): siRNA sense strand
aggagaauuuggagagcug

SEQ ID NO: 2450788 - RNA, 19 nt, Homo sapiens
  misc_RNA (1)...(19): siRNA sense strand
ugacaaagacagugaccag

SEQ ID NO: 2450789 - RNA, 19 nt, Homo sapiens
  misc_RNA (1)...(19): siRNA sense strand
agcagaaacuugacaggca

SEQ ID NO: 2450790 - RNA, 19 nt, Homo sapiens
  misc_RNA (1)...(19): siRNA sense strand
aaacugagaacaaagccaa

SEQ ID NO: 2450791 - RNA, 19 nt, Homo sapiens
  misc_RNA (1)...(19): siRNA sense strand
accaaaggauaaagggaag

SEQ ID NO: 2450792 - RNA, 19 nt, Homo sapiens
  misc_RNA (1)...(19): siRNA sense strand
ccaaaggauaaagggaaga

SEQ ID NO: 2450793 - RNA, 19 nt, Homo sapiens
  misc_RNA (1)...(19): siRNA sense strand
aggauaaagggaagauaac

SEQ ID NO: 2450794 - RNA, 19 nt, Homo sapiens
  misc_RNA (1)...(19): siRNA sense strand
augagaguauugugguaga

SEQ ID NO: 2450795 - RNA, 19 nt, Homo sapiens
  misc_RNA (1)...(19): siRNA sense strand
agaaaaggacauacaugaa

SEQ ID NO: 2450796 - RNA, 19 nt, Homo sapiens
  misc_RNA (1)...(19): siRNA sense strand
aggaugacaaagacaguga

SEQ ID NO: 2450797 - RNA, 19 nt, Homo sapiens
  misc_RNA (1)...(19): siRNA sense strand
ucgacagguaguacugaaa

SEQ ID NO: 2450798 - RNA, 19 nt, Homo sapiens
  misc_RNA (1)...(19): siRNA sense strand
gcacagagcauaagagcca

SEQ ID NO: 2450799 - RNA, 19 nt, Homo sapiens
  misc_RNA (1)...(19): siRNA sense strand
gugugaaggcaaagaagaa

SEQ ID NO: 2450800 - RNA, 19 nt, Homo sapiens
  misc_RNA (1)...(19): siRNA sense strand
aauuaagaaaggaggcuaa

SEQ ID NO: 2450801 - RNA, 19 nt, Homo sapiens
  misc_RNA (1)...(19): siRNA sense strand
uguugaaggugcugccaaa

SEQ ID NO: 2450802 - RNA, 19 nt, Homo sapiens
  misc_RNA (1)...(19): siRNA sense strand
cggucugacaaauggaaua

SEQ ID NO: 2450803 - RNA, 19 nt, Homo sapiens
  misc_RNA (1)...(19): siRNA sense strand
cagcaaagccauucggguu

SEQ ID NO: 2450804 - RNA, 19 nt, Homo sapiens
  misc_RNA (1)...(19): siRNA sense strand
ggaaagaaaggaagcagga

SEQ ID NO: 2450805 - RNA, 19 nt, Homo sapiens
  misc_RNA (1)...(19): siRNA sense strand
aggcagaaggaacuagaaa

SEQ ID NO: 2450806 - RNA, 19 nt, Homo sapiens
  misc_RNA (1)...(19): siRNA sense strand
ggaagcaggaggagaggga

SEQ ID NO: 2450807 - RNA, 19 nt, Homo sapiens
  misc_RNA (1)...(19): siRNA sense strand
gauaaagggaagauaacca

SEQ ID NO: 2450808 - RNA, 19 nt, Homo sapiens
  misc_RNA (1)...(19): siRNA sense strand
ugaugaagaaguugaugaa

SEQ ID NO: 2450809 - RNA, 19 nt, Homo sapiens
  misc_RNA (1)...(19): siRNA sense strand
caaagaagcuguacugcca

SEQ ID NO: 2450810 - RNA, 19 nt, Homo sapiens
  misc_RNA (1)...(19): siRNA sense strand
aggaggagagggaggauga

SEQ ID NO: 2450811 - RNA, 19 nt, Homo sapiens
  misc_RNA (1)...(19): siRNA sense strand
aaccaaaggauaaagggaa

SEQ ID NO: 2450812 - RNA, 19 nt, Homo sapiens
  misc_RNA (1)...(19): siRNA sense strand
cagcauuaucaauagcuua

SEQ ID NO: 2450813 - RNA, 19 nt, Homo sapiens
  misc_RNA (1)...(19): siRNA sense strand
aggagagggaggaugacaa

SEQ ID NO: 2450814 - RNA, 19 nt, Homo sapiens
  misc_RNA (1)...(19): siRNA sense strand
aggacauacaugaagaauu

SEQ ID NO: 2450815 - RNA, 19 nt, Homo sapiens
  misc_RNA (1)...(19): siRNA sense strand
ggaaaaggaguuugggcuu

SEQ ID NO: 2450816 - RNA, 19 nt, Homo sapiens
  misc_RNA (1)...(19): siRNA sense strand
ugaagucugcuuugggaaa

SEQ ID NO: 2450817 - RNA, 19 nt, Homo sapiens
  misc_RNA (1)...(19): siRNA sense strand
ucaacaaaaccaaaggaua

SEQ ID NO: 2450818 - RNA, 19 nt, Homo sapiens
  misc_RNA (1)...(19): siRNA sense strand
cauucggguuggaguaauu

SEQ ID NO: 2450819 - RNA, 19 nt, Homo sapiens
  misc_RNA (1)...(19): siRNA sense strand
aggcauguuugcugcagaa

SEQ ID NO: 2450820 - RNA, 19 nt, Homo sapiens
  misc_RNA (1)...(19): siRNA sense strand
ggaagauaaccaagcgugu

SEQ ID NO: 2450821 - RNA, 19 nt, Homo sapiens
  misc_RNA (1)...(19): siRNA sense strand
cacaagaagccuaggaaag

SEQ ID NO: 2450822 - RNA, 19 nt, Homo sapiens
  misc_RNA (1)...(19): siRNA sense strand
gaucacaaucauagauagu

SEQ ID NO: 2450823 - RNA, 19 nt, Homo sapiens
  misc_RNA (1)...(19): siRNA sense strand
auagauaguccgagcuuca

SEQ ID NO: 2450824 - RNA, 19 nt, Homo sapiens
  misc_RNA (1)...(19): siRNA sense strand
ggagacuacagcaggugaa

SEQ ID NO: 2450825 - RNA, 19 nt, Homo sapiens
  misc_RNA (1)...(19): siRNA sense strand
gaaggaacuagaaaagaaa

SEQ ID NO: 2450826 - RNA, 19 nt, Homo sapiens
  misc_RNA (1)...(19): siRNA sense strand
aagaaaggaagcaggagga

SEQ ID NO: 2450827 - RNA, 19 nt, Homo sapiens
  misc_RNA (1)...(19): siRNA sense strand
agagggaggaugacaaaga

SEQ ID NO: 2450828 - RNA, 19 nt, Homo sapiens
  misc_RNA (1)...(19): siRNA sense strand
gcgaaguccagcaaguauu

SEQ ID NO: 2450829 - RNA, 19 nt, Homo sapiens
  misc_RNA (1)...(19): siRNA sense strand
agcaaguauugaaguagua

SEQ ID NO: 2450830 - RNA, 19 nt, Homo sapiens
  misc_RNA (1)...(19): siRNA sense strand
uugccaaaacggaaagaaa

SEQ ID NO: 2450831 - RNA, 19 nt, Homo sapiens
  misc_RNA (1)...(19): siRNA sense strand
ggcagaaggaacuagaaaa

SEQ ID NO: 2450832 - RNA, 19 nt, Homo sapiens
  misc_RNA (1)...(19): siRNA sense strand
gcuuaaaacaagaacagau

SEQ ID NO: 2450833 - RNA, 19 nt, Homo sapiens
  misc_RNA (1)...(19): siRNA sense strand
gaaaggaagcaggaggaga

SEQ ID NO: 2450834 - RNA, 19 nt, Homo sapiens
  misc_RNA (1)...(19): siRNA sense strand
cgggcaaacagaauucaaa

SEQ ID NO: 2450835 - RNA, 19 nt, Homo sapiens
  misc_RNA (1)...(19): siRNA sense strand
gaacagucuacaaggucuu

SEQ ID NO: 2450836 - RNA, 19 nt, Homo sapiens
  misc_RNA (1)...(19): siRNA sense strand
auguggaaccuauggaaaa

SEQ ID NO: 2450837 - RNA, 19 nt, Homo sapiens
  misc_RNA (1)...(19): siRNA sense strand
aggagaauuuggagagcug

SEQ ID NO: 2450838 - RNA, 19 nt, Homo sapiens
  misc_RNA (1)...(19): siRNA sense strand
ugacaaagacagugaccag

SEQ ID NO: 2450839 - RNA, 19 nt, Homo sapiens
  misc_RNA (1)...(19): siRNA sense strand
agcagaaacuugacaggca

SEQ ID NO: 2450840 - RNA, 19 nt, Homo sapiens
  misc_RNA (1)...(19): siRNA sense strand
aaacugagaacaaagccaa

SEQ ID NO: 2450841 - RNA, 19 nt, Homo sapiens
  misc_RNA (1)...(19): siRNA sense strand
accaaaggauaaagggaag

SEQ ID NO: 2450842 - RNA, 19 nt, Homo sapiens
  misc_RNA (1)...(19): siRNA sense strand
ccaaaggauaaagggaaga

SEQ ID NO: 2450843 - RNA, 19 nt, Homo sapiens
  misc_RNA (1)...(19): siRNA sense strand
aggauaaagggaagauaac

SEQ ID NO: 2450844 - RNA, 19 nt, Homo sapiens
  misc_RNA (1)...(19): siRNA sense strand
augagaguauugugguaga

SEQ ID NO: 2450845 - RNA, 19 nt, Homo sapiens
  misc_RNA (1)...(19): siRNA sense strand
agaaaaggacauacaugaa

SEQ ID NO: 2450846 - RNA, 19 nt, Homo sapiens
  misc_RNA (1)...(19): siRNA sense strand
aggaugacaaagacaguga

SEQ ID NO: 2450847 - RNA, 19 nt, Homo sapiens
  misc_RNA (1)...(19): siRNA sense strand
ucgacagguaguacugaaa

SEQ ID NO: 2450848 - RNA, 19 nt, Homo sapiens
  misc_RNA (1)...(19): siRNA sense strand
ugguuuaauccaagggcaa

SEQ ID NO: 2450849 - RNA, 19 nt, Homo sapiens
  misc_RNA (1)...(19): siRNA sense strand
ggagaugagcugcagggua

SEQ ID NO: 2450850 - RNA, 19 nt, Homo sapiens
  misc_RNA (1)...(19): siRNA sense strand
uaacuaaaucugauggaga

SEQ ID NO: 2450851 - RNA, 19 nt, Homo sapiens
  misc_RNA (1)...(19): siRNA sense strand
cauucaggaaaguguguua

SEQ ID NO: 2450852 - RNA, 19 nt, Homo sapiens
  misc_RNA (1)...(19): siRNA sense strand
aggaaaaccacuagcauuu

SEQ ID NO: 2450853 - RNA, 19 nt, Homo sapiens
  misc_RNA (1)...(19): siRNA sense strand
ugugugaaggagcgggaua

SEQ ID NO: 2450854 - RNA, 19 nt, Homo sapiens
  misc_RNA (1)...(19): siRNA sense strand
guauaaucgagauggcaga

SEQ ID NO: 2450855 - RNA, 19 nt, Homo sapiens
  misc_RNA (1)...(19): siRNA sense strand
ucgaaggauacaagcggaa

SEQ ID NO: 2450856 - RNA, 19 nt, Homo sapiens
  misc_RNA (1)...(19): siRNA sense strand
ucuggaaaccaaagguaau

SEQ ID NO: 2450857 - RNA, 19 nt, Homo sapiens
  misc_RNA (1)...(19): siRNA sense strand
gguuuaauccaagggcaaa

SEQ ID NO: 2450858 - RNA, 19 nt, Homo sapiens
  misc_RNA (1)...(19): siRNA sense strand
aggaaaguguguuagagca

SEQ ID NO: 2450859 - RNA, 19 nt, Homo sapiens
  misc_RNA (1)...(19): siRNA sense strand
gucuggaaaccaaagguaa

SEQ ID NO: 2450860 - RNA, 19 nt, Homo sapiens
  misc_RNA (1)...(19): siRNA sense strand
cgaaugacugaguuaucaa

SEQ ID NO: 2450861 - RNA, 19 nt, Homo sapiens
  misc_RNA (1)...(19): siRNA sense strand
uuguacuagugguggauca

SEQ ID NO: 2450862 - RNA, 19 nt, Homo sapiens
  misc_RNA (1)...(19): siRNA sense strand
aggaagaagaagaggaaga

SEQ ID NO: 2450863 - RNA, 19 nt, Homo sapiens
  misc_RNA (1)...(19): siRNA sense strand
ccaacggaguacaaggaaa

SEQ ID NO: 2450864 - RNA, 19 nt, Homo sapiens
  misc_RNA (1)...(19): siRNA sense strand
gcucauagucacugguaca

SEQ ID NO: 2450865 - RNA, 19 nt, Homo sapiens
  misc_RNA (1)...(19): siRNA sense strand
aaaucaucuuccagggaua

SEQ ID NO: 2450866 - RNA, 19 nt, Homo sapiens
  misc_RNA (1)...(19): siRNA sense strand
aagaagaggaagaggagga

SEQ ID NO: 2450867 - RNA, 19 nt, Homo sapiens
  misc_RNA (1)...(19): siRNA sense strand
aagaggaagaggaggaaga

SEQ ID NO: 2450868 - RNA, 19 nt, Homo sapiens
  misc_RNA (1)...(19): siRNA sense strand
aagaggaggaagaggaaaa

SEQ ID NO: 2450869 - RNA, 19 nt, Homo sapiens
  misc_RNA (1)...(19): siRNA sense strand
aagcaaagaaugagccaga

SEQ ID NO: 2450870 - RNA, 19 nt, Homo sapiens
  misc_RNA (1)...(19): siRNA sense strand
aaaugaagauauugagcca

SEQ ID NO: 2450871 - RNA, 19 nt, Homo sapiens
  misc_RNA (1)...(19): siRNA sense strand
acacuggaagcaagagaaa

SEQ ID NO: 2450872 - RNA, 19 nt, Homo sapiens
  misc_RNA (1)...(19): siRNA sense strand
cugccagaauggaagcaua

SEQ ID NO: 2450873 - RNA, 19 nt, Homo sapiens
  misc_RNA (1)...(19): siRNA sense strand
aagaagaagaagaagcaga

SEQ ID NO: 2450874 - RNA, 19 nt, Homo sapiens
  misc_RNA (1)...(19): siRNA sense strand
cuggaaauggauuggcuaa

SEQ ID NO: 2450875 - RNA, 19 nt, Homo sapiens
  misc_RNA (1)...(19): siRNA sense strand
aggaagaggaggaagagga

SEQ ID NO: 2450876 - RNA, 19 nt, Homo sapiens
  misc_RNA (1)...(19): siRNA sense strand
ccuauauugugaagaacau

SEQ ID NO: 2450877 - RNA, 19 nt, Homo sapiens
  misc_RNA (1)...(19): siRNA sense strand
cagagaugguuuugaagua

SEQ ID NO: 2450878 - RNA, 19 nt, Homo sapiens
  misc_RNA (1)...(19): siRNA sense strand
aaaugaacagagagaaaga

SEQ ID NO: 2450879 - RNA, 19 nt, Homo sapiens
  misc_RNA (1)...(19): siRNA sense strand
agaacauugcuuuggacaa

SEQ ID NO: 2450880 - RNA, 19 nt, Homo sapiens
  misc_RNA (1)...(19): siRNA sense strand
ugacaguaauccucgggaa

SEQ ID NO: 2450881 - RNA, 19 nt, Homo sapiens
  misc_RNA (1)...(19): siRNA sense strand
cagugaaagugaacagagu

SEQ ID NO: 2450882 - RNA, 19 nt, Homo sapiens
  misc_RNA (1)...(19): siRNA sense strand
cugaugaugaggaagcaaa

SEQ ID NO: 2450883 - RNA, 19 nt, Homo sapiens
  misc_RNA (1)...(19): siRNA sense strand
aagaagaagaggaagagga

SEQ ID NO: 2450884 - RNA, 19 nt, Homo sapiens
  misc_RNA (1)...(19): siRNA sense strand
ggacgugggaaguugaaaa

SEQ ID NO: 2450885 - RNA, 19 nt, Homo sapiens
  misc_RNA (1)...(19): siRNA sense strand
cauauaguagagauggaaa

SEQ ID NO: 2450886 - RNA, 19 nt, Homo sapiens
  misc_RNA (1)...(19): siRNA sense strand
aggauguggcagcggcaaa

SEQ ID NO: 2450887 - RNA, 19 nt, Homo sapiens
  misc_RNA (1)...(19): siRNA sense strand
augaggaagcaaagaauga

SEQ ID NO: 2450888 - RNA, 19 nt, Homo sapiens
  misc_RNA (1)...(19): siRNA sense strand
guggaaagaagucgcaaaa

SEQ ID NO: 2450889 - RNA, 19 nt, Homo sapiens
  misc_RNA (1)...(19): siRNA sense strand
ugacaggaggauaugacua

SEQ ID NO: 2450890 - RNA, 19 nt, Homo sapiens
  misc_RNA (1)...(19): siRNA sense strand
uguggaaagaagucgcaaa

SEQ ID NO: 2450891 - RNA, 19 nt, Homo sapiens
  misc_RNA (1)...(19): siRNA sense strand
guauaaaaggagaccagua

SEQ ID NO: 2450892 - RNA, 19 nt, Homo sapiens
  misc_RNA (1)...(19): siRNA sense strand
uuccaaaggguguaugaaa

SEQ ID NO: 2450893 - RNA, 19 nt, Homo sapiens
  misc_RNA (1)...(19): siRNA sense strand
gagucagaggggagcaaaa

SEQ ID NO: 2450894 - RNA, 19 nt, Homo sapiens
  misc_RNA (1)...(19): siRNA sense strand
augaacagagagaaagaau

SEQ ID NO: 2450895 - RNA, 19 nt, Homo sapiens
  misc_RNA (1)...(19): siRNA sense strand
ugaacagagagaaagaauu

SEQ ID NO: 2450896 - RNA, 19 nt, Homo sapiens
  misc_RNA (1)...(19): siRNA sense strand
gagagaaagaauuaagaag

SEQ ID NO: 2450897 - RNA, 19 nt, Homo sapiens
  misc_RNA (1)...(19): siRNA sense strand
guuucaguccagaugauaa

SEQ ID NO: 2450898 - RNA, 19 nt, Homo sapiens
  misc_RNA (1)...(19): siRNA sense strand
uggaaauggauuggcuaaa

SEQ ID NO: 2450899 - RNA, 19 nt, Homo sapiens
  misc_RNA (1)...(19): siRNA sense strand
acaagaccgaugacaguaa

SEQ ID NO: 2450900 - RNA, 19 nt, Homo sapiens
  misc_RNA (1)...(19): siRNA sense strand
uggccaacaccaaggguca

SEQ ID NO: 2450901 - RNA, 19 nt, Homo sapiens
  misc_RNA (1)...(19): siRNA sense strand
ucgaaggacagcuguggaa

SEQ ID NO: 2450902 - RNA, 19 nt, Homo sapiens
  misc_RNA (1)...(19): siRNA sense strand
cagaggaagaagaagagga

SEQ ID NO: 2450903 - RNA, 19 nt, Homo sapiens
  misc_RNA (1)...(19): siRNA sense strand
cauccaaagcugaaccaga

SEQ ID NO: 2450904 - RNA, 19 nt, Homo sapiens
  misc_RNA (1)...(19): siRNA sense strand
caacggaguacaaggaaac

SEQ ID NO: 2450905 - RNA, 19 nt, Homo sapiens
  misc_RNA (1)...(19): siRNA sense strand
aaacccagcggaaggcaaa

SEQ ID NO: 2450906 - RNA, 19 nt, Homo sapiens
  misc_RNA (1)...(19): siRNA sense strand
agaucaagucauuacagua

SEQ ID NO: 2450907 - RNA, 19 nt, Homo sapiens
  misc_RNA (1)...(19): siRNA sense strand
gaucaugguuggaacugga

SEQ ID NO: 2450908 - RNA, 19 nt, Homo sapiens
  misc_RNA (1)...(19): siRNA sense strand
aagaagcagaggaagaaga

SEQ ID NO: 2450909 - RNA, 19 nt, Homo sapiens
  misc_RNA (1)...(19): siRNA sense strand
gugagugccaucagaucaa

SEQ ID NO: 2450910 - RNA, 19 nt, Homo sapiens
  misc_RNA (1)...(19): siRNA sense strand
cagcgaagugacaggcuca

SEQ ID NO: 2450911 - RNA, 19 nt, Homo sapiens
  misc_RNA (1)...(19): siRNA sense strand
ggccaaggugauugacaga

SEQ ID NO: 2450912 - RNA, 19 nt, Homo sapiens
  misc_RNA (1)...(19): siRNA sense strand
ugaugaggaagcaaagaau

SEQ ID NO: 2450913 - RNA, 19 nt, Homo sapiens
  misc_RNA (1)...(19): siRNA sense strand
cuuuaagagucgagggaaa

SEQ ID NO: 2450914 - RNA, 19 nt, Homo sapiens
  misc_RNA (1)...(19): siRNA sense strand
guguuguauuugagagaaa

SEQ ID NO: 2450915 - RNA, 19 nt, Homo sapiens
  misc_RNA (1)...(19): siRNA sense strand
ugguagaagagguggagaa

SEQ ID NO: 2450916 - RNA, 19 nt, Homo sapiens
  misc_RNA (1)...(19): siRNA sense strand
cagauagagcuguuggaaa

SEQ ID NO: 2450917 - RNA, 19 nt, Homo sapiens
  misc_RNA (1)...(19): siRNA sense strand
gguuuauagcucuggcaaa

SEQ ID NO: 2450918 - RNA, 19 nt, Homo sapiens
  misc_RNA (1)...(19): siRNA sense strand
cugaaaacccuuacagaaa

SEQ ID NO: 2450919 - RNA, 19 nt, Homo sapiens
  misc_RNA (1)...(19): siRNA sense strand
cuggagaaguggauaccaa

SEQ ID NO: 2450920 - RNA, 19 nt, Homo sapiens
  misc_RNA (1)...(19): siRNA sense strand
guggagaaguauaaggcca

SEQ ID NO: 2450921 - RNA, 19 nt, Homo sapiens
  misc_RNA (1)...(19): siRNA sense strand
aggaagcauccauaggaaa

SEQ ID NO: 2450922 - RNA, 19 nt, Homo sapiens
  misc_RNA (1)...(19): siRNA sense strand
agagaaauuauaagagcca

SEQ ID NO: 2450923 - RNA, 19 nt, Homo sapiens
  misc_RNA (1)...(19): siRNA sense strand
ccacagguagagauagcaa

SEQ ID NO: 2450924 - RNA, 19 nt, Homo sapiens
  misc_RNA (1)...(19): siRNA sense strand
aagagguggagaaguauaa

SEQ ID NO: 2450925 - RNA, 19 nt, Homo sapiens
  misc_RNA (1)...(19): siRNA sense strand
ugaacuugacacaggagaa

SEQ ID NO: 2450926 - RNA, 19 nt, Homo sapiens
  misc_RNA (1)...(19): siRNA sense strand
gcaaggaagacgaggagac

SEQ ID NO: 2450927 - RNA, 19 nt, Homo sapiens
  misc_RNA (1)...(19): siRNA sense strand
augcugaaugggaggagua

SEQ ID NO: 2450928 - RNA, 19 nt, Homo sapiens
  misc_RNA (1)...(19): siRNA sense strand
ugcugauggaugugaauua

SEQ ID NO: 2450929 - RNA, 19 nt, Homo sapiens
  misc_RNA (1)...(19): siRNA sense strand
aguuuaaggguguugauau

SEQ ID NO: 2450930 - RNA, 19 nt, Homo sapiens
  misc_RNA (1)...(19): siRNA sense strand
ggugcuaauaaccaggaaa

SEQ ID NO: 2450931 - RNA, 19 nt, Homo sapiens
  misc_RNA (1)...(19): siRNA sense strand
gaguauaagacuggcauca

SEQ ID NO: 2450932 - RNA, 19 nt, Homo sapiens
  misc_RNA (1)...(19): siRNA sense strand
agauguugaaggaaaguuu

SEQ ID NO: 2450933 - RNA, 19 nt, Homo sapiens
  misc_RNA (1)...(19): siRNA sense strand
guguguuguauuugagaga

SEQ ID NO: 2450934 - RNA, 19 nt, Homo sapiens
  misc_RNA (1)...(19): siRNA sense strand
gguuauaguuuuaguccca

SEQ ID NO: 2450935 - RNA, 19 nt, Homo sapiens
  misc_RNA (1)...(19): siRNA sense strand
caagcaauucagaagaaaa

SEQ ID NO: 2450936 - RNA, 19 nt, Homo sapiens
  misc_RNA (1)...(19): siRNA sense strand
acagguagagauagcaaau

SEQ ID NO: 2450937 - RNA, 19 nt, Homo sapiens
  misc_RNA (1)...(19): siRNA sense strand
aggcuuaucugaugaccau

SEQ ID NO: 2450938 - RNA, 19 nt, Homo sapiens
  misc_RNA (1)...(19): siRNA sense strand
agggaaaugguguguugua

SEQ ID NO: 2450939 - RNA, 19 nt, Homo sapiens
  misc_RNA (1)...(19): siRNA sense strand
augcagcagaacugguaaa

SEQ ID NO: 2450940 - RNA, 19 nt, Homo sapiens
  misc_RNA (1)...(19): siRNA sense strand
cauccauaggaaagcaaau

SEQ ID NO: 2450941 - RNA, 19 nt, Homo sapiens
  misc_RNA (1)...(19): siRNA sense strand
gugaauuagcugaaaacau

SEQ ID NO: 2450942 - RNA, 19 nt, Homo sapiens
  misc_RNA (1)...(19): siRNA sense strand
ccaggaaacaguaaaauau

SEQ ID NO: 2450943 - RNA, 19 nt, Homo sapiens
  misc_RNA (1)...(19): siRNA sense strand
ggaaauccagaaaagaaaa

SEQ ID NO: 2450944 - RNA, 19 nt, Homo sapiens
  misc_RNA (1)...(19): siRNA sense strand
gcaucaagaaaguuccuau

SEQ ID NO: 2450945 - RNA, 19 nt, Homo sapiens
  misc_RNA (1)...(19): siRNA sense strand
ggaugcugauggaugugaa

SEQ ID NO: 2450946 - RNA, 19 nt, Homo sapiens
  misc_RNA (1)...(19): siRNA sense strand
gaugugaauuagcugaaaa

SEQ ID NO: 2450947 - RNA, 19 nt, Homo sapiens
  misc_RNA (1)...(19): siRNA sense strand
ucauccacagguagagaua

SEQ ID NO: 2450948 - RNA, 19 nt, Homo sapiens
  misc_RNA (1)...(19): siRNA sense strand
uggagauguugaaggaaag

SEQ ID NO: 2450949 - RNA, 19 nt, Homo sapiens
  misc_RNA (1)...(19): siRNA sense strand
agucagugguggagcuuuc

SEQ ID NO: 2450950 - RNA, 19 nt, Homo sapiens
  misc_RNA (1)...(19): siRNA sense strand
uggagaaguggauaccaaa

SEQ ID NO: 2450951 - RNA, 19 nt, Homo sapiens
  misc_RNA (1)...(19): siRNA sense strand
gggaugugguugaagggaa

SEQ ID NO: 2450952 - RNA, 19 nt, Homo sapiens
  misc_RNA (1)...(19): siRNA sense strand
cagggaagccauaggcaga

SEQ ID NO: 2450953 - RNA, 19 nt, Homo sapiens
  misc_RNA (1)...(19): siRNA sense strand
ggaugugguugaagggaac

SEQ ID NO: 2450954 - RNA, 19 nt, Homo sapiens
  misc_RNA (1)...(19): siRNA sense strand
aggacugggcagagaugaa

SEQ ID NO: 2450955 - RNA, 19 nt, Homo sapiens
  misc_RNA (1)...(19): siRNA sense strand
auggagagcuaccgggaga

SEQ ID NO: 2450956 - RNA, 19 nt, Homo sapiens
  misc_RNA (1)...(19): siRNA sense strand
agauauggucgcugcucaa

SEQ ID NO: 2450957 - RNA, 19 nt, Homo sapiens
  misc_RNA (1)...(19): siRNA sense strand
cagaaagacucacugcuca

SEQ ID NO: 2450958 - RNA, 19 nt, Homo sapiens
  misc_RNA (1)...(19): siRNA sense strand
ggucgcugcucaauggaga

SEQ ID NO: 2450959 - RNA, 19 nt, Homo sapiens
  misc_RNA (1)...(19): siRNA sense strand
aggaagaggcauugcguga

SEQ ID NO: 2450960 - RNA, 19 nt, Homo sapiens
  misc_RNA (1)...(19): siRNA sense strand
ugaaaaugaaggaggaaga

SEQ ID NO: 2450961 - RNA, 19 nt, Homo sapiens
  misc_RNA (1)...(19): siRNA sense strand
aucaaagguuaguggugaa

SEQ ID NO: 2450962 - RNA, 19 nt, Homo sapiens
  misc_RNA (1)...(19): siRNA sense strand
gguuaguggugaaaaugaa

SEQ ID NO: 2450963 - RNA, 19 nt, Homo sapiens
  misc_RNA (1)...(19): siRNA sense strand
aaagguuaguggugaaaau

SEQ ID NO: 2450964 - RNA, 19 nt, Homo sapiens
  misc_RNA (1)...(19): siRNA sense strand
ugggaaagaucgagcagag

SEQ ID NO: 2450965 - RNA, 19 nt, Homo sapiens
  misc_RNA (1)...(19): siRNA sense strand
uaucaaagguuagugguga

SEQ ID NO: 2450966 - RNA, 19 nt, Homo sapiens
  misc_RNA (1)...(19): siRNA sense strand
acuggaaaugauagacaau

SEQ ID NO: 2450967 - RNA, 19 nt, Homo sapiens
  misc_RNA (1)...(19): siRNA sense strand
gggaaagaucgagcagaga

SEQ ID NO: 2450968 - RNA, 19 nt, Homo sapiens
  misc_RNA (1)...(19): siRNA sense strand
aggagagaagagagcugaa

SEQ ID NO: 2450969 - RNA, 19 nt, Homo sapiens
  misc_RNA (1)...(19): siRNA sense strand
gagcagagucaaaggcaga

SEQ ID NO: 2450970 - RNA, 19 nt, Homo sapiens
  misc_RNA (1)...(19): siRNA sense strand
ccuuaggagcagagucaaa

SEQ ID NO: 2450971 - RNA, 19 nt, Homo sapiens
  misc_RNA (1)...(19): siRNA sense strand
cagcagaaggagaugccaa

SEQ ID NO: 2450972 - RNA, 19 nt, Homo sapiens
  misc_RNA (1)...(19): siRNA sense strand
agacaguggacaaugccaa

SEQ ID NO: 2450973 - RNA, 19 nt, Homo sapiens
  misc_RNA (1)...(19): siRNA sense strand
uggacaaugccaaugagaa

SEQ ID NO: 2450974 - RNA, 19 nt, Homo sapiens
  misc_RNA (1)...(19): siRNA sense strand
caguucugguugagacaca

SEQ ID NO: 2450975 - RNA, 19 nt, Homo sapiens
  misc_RNA (1)...(19): siRNA sense strand
cgguagccaccaagaucaa

SEQ ID NO: 2450976 - RNA, 19 nt, Homo sapiens
  misc_RNA (1)...(19): siRNA sense strand
guacagagucacagccaac

SEQ ID NO: 2450977 - RNA, 19 nt, Homo sapiens
  misc_RNA (1)...(19): siRNA sense strand
gagccucagcagaaggaga

SEQ ID NO: 2450978 - RNA, 19 nt, Homo sapiens
  misc_RNA (1)...(19): siRNA sense strand
uggcaaauuuggagcgaca

SEQ ID NO: 2450979 - RNA, 19 nt, Homo sapiens
  misc_RNA (1)...(19): siRNA sense strand
uggcggaaacauuggcaaa

SEQ ID NO: 2450980 - RNA, 19 nt, Homo sapiens
  misc_RNA (1)...(19): siRNA sense strand
uggcaggaguucaggacca

SEQ ID NO: 2450981 - RNA, 19 nt, Homo sapiens
  misc_RNA (1)...(19): siRNA sense strand
acacucagauguauggcaa

SEQ ID NO: 2450982 - RNA, 19 nt, Homo sapiens
  misc_RNA (1)...(19): siRNA sense strand
aggaggacccugaggaucu

SEQ ID NO: 2450983 - RNA, 19 nt, Homo sapiens
  misc_RNA (1)...(19): siRNA sense strand
aagcaggagcuggcggaaa

SEQ ID NO: 2450984 - RNA, 19 nt, Homo sapiens
  misc_RNA (1)...(19): siRNA sense strand
cggagcucgugaagcggaa

SEQ ID NO: 2450985 - RNA, 19 nt, Homo sapiens
  misc_RNA (1)...(19): siRNA sense strand
gaucuaugcuuuugaggga

SEQ ID NO: 2450986 - RNA, 19 nt, Homo sapiens
  misc_RNA (1)...(19): siRNA sense strand
agggaagcuaccuggaaga

SEQ ID NO: 2450987 - RNA, 19 nt, Homo sapiens
  misc_RNA (1)...(19): siRNA sense strand
agaaagugcuggagaggcu

SEQ ID NO: 2450988 - RNA, 19 nt, Homo sapiens
  misc_RNA (1)...(19): siRNA sense strand
ccauaaugagaaugcagaa

SEQ ID NO: 2450989 - RNA, 19 nt, Homo sapiens
  misc_RNA (1)...(19): siRNA sense strand
cauaaugagaaugcagaaa

SEQ ID NO: 2450990 - RNA, 19 nt, Homo sapiens
  misc_RNA (1)...(19): siRNA sense strand
cuugaguauucuagguaca

SEQ ID NO: 2450991 - RNA, 19 nt, Homo sapiens
  misc_RNA (1)...(19): siRNA sense strand
cgucagaaagugcuggaga

SEQ ID NO: 2450992 - RNA, 19 nt, Homo sapiens
  misc_RNA (1)...(19): siRNA sense strand
cuucuaccgcaaugggaaa

SEQ ID NO: 2450993 - RNA, 19 nt, Homo sapiens
  misc_RNA (1)...(19): siRNA sense strand
ggagagacauccaggagac

SEQ ID NO: 2450994 - RNA, 19 nt, Homo sapiens
  misc_RNA (1)...(19): siRNA sense strand
uggagagagagcuggacaa

SEQ ID NO: 2450995 - RNA, 19 nt, Homo sapiens
  misc_RNA (1)...(19): siRNA sense strand
guguaucccgagugggcaa

SEQ ID NO: 2450996 - RNA, 19 nt, Homo sapiens
  misc_RNA (1)...(19): siRNA sense strand
gggcaaagccauugacagg

SEQ ID NO: 2450997 - RNA, 19 nt, Homo sapiens
  misc_RNA (1)...(19): siRNA sense strand
gggagauccaggugaugau

SEQ ID NO: 2450998 - RNA, 19 nt, Homo sapiens
  misc_RNA (1)...(19): siRNA sense strand
gaggaaagcugaagugucc

SEQ ID NO: 2450999 - RNA, 19 nt, Homo sapiens
  misc_RNA (1)...(19): siRNA sense strand
ccgagugggcaaagccauu

SEQ ID NO: 2451000 - RNA, 19 nt, Homo sapiens
  misc_RNA (1)...(19): siRNA sense strand
ugucagaugcgguguggga

SEQ ID NO: 2451001 - RNA, 19 nt, Homo sapiens
  misc_RNA (1)...(19): siRNA sense strand
ggacuaaagauaaggccuu

SEQ ID NO: 2451002 - RNA, 19 nt, Homo sapiens
  misc_RNA (1)...(19): siRNA sense strand
gacucaaaguuaaaggcaa

SEQ ID NO: 2451003 - RNA, 19 nt, Homo sapiens
  misc_RNA (1)...(19): siRNA sense strand
ccucaaggagauagcaaaa

SEQ ID NO: 2451004 - RNA, 19 nt, Homo sapiens
  misc_RNA (1)...(19): siRNA sense strand
ucucaaagaagcaaggaca

SEQ ID NO: 2451005 - RNA, 19 nt, Homo sapiens
  misc_RNA (1)...(19): siRNA sense strand
aagaguacaaaguggaaau

SEQ ID NO: 2451006 - RNA, 19 nt, Homo sapiens
  misc_RNA (1)...(19): siRNA sense strand
augaaguaguugaaguaga

SEQ ID NO: 2451007 - RNA, 19 nt, Homo sapiens
  misc_RNA (1)...(19): siRNA sense strand
gugaggagagcuugggaga

SEQ ID NO: 2451008 - RNA, 19 nt, Homo sapiens
  misc_RNA (1)...(19): siRNA sense strand
guuugaugacauagggaga

SEQ ID NO: 2451009 - RNA, 19 nt, Homo sapiens
  misc_RNA (1)...(19): siRNA sense strand
uugaugacauagggagaaa

SEQ ID NO: 2451010 - RNA, 19 nt, Homo sapiens
  misc_RNA (1)...(19): siRNA sense strand
cugcagaaaaugauguuaa

SEQ ID NO: 2451011 - RNA, 19 nt, Homo sapiens
  misc_RNA (1)...(19): siRNA sense strand
gcaacaaauaugaagugga

SEQ ID NO: 2451012 - RNA, 19 nt, Homo sapiens
  misc_RNA (1)...(19): siRNA sense strand
gggagaugucuuaggucca

SEQ ID NO: 2451013 - RNA, 19 nt, Homo sapiens
  misc_RNA (1)...(19): siRNA sense strand
gugauaaagacaaagaacu

SEQ ID NO: 2451014 - RNA, 19 nt, Homo sapiens
  misc_RNA (1)...(19): siRNA sense strand
ccuaugaagauuaugacau

SEQ ID NO: 2451015 - RNA, 19 nt, Homo sapiens
  misc_RNA (1)...(19): siRNA sense strand
aaaugaaagagcugggagu

SEQ ID NO: 2451016 - RNA, 19 nt, Homo sapiens
  misc_RNA (1)...(19): siRNA sense strand
acucaguaccucaaggaga

SEQ ID NO: 2451017 - RNA, 19 nt, Homo sapiens
  misc_RNA (1)...(19): siRNA sense strand
guagaaaauagggaagaaa

SEQ ID NO: 2451018 - RNA, 19 nt, Homo sapiens
  misc_RNA (1)...(19): siRNA sense strand
augaaagagcugggaguga

SEQ ID NO: 2451019 - RNA, 19 nt, Homo sapiens
  misc_RNA (1)...(19): siRNA sense strand
uuaugaaagcgcaccuaaa

SEQ ID NO: 2451020 - RNA, 19 nt, Homo sapiens
  misc_RNA (1)...(19): siRNA sense strand
cucucaaacugaaaccaaa

SEQ ID NO: 2451021 - RNA, 19 nt, Homo sapiens
  misc_RNA (1)...(19): siRNA sense strand
acguaaagccucuuggugu

SEQ ID NO: 2451022 - RNA, 19 nt, Homo sapiens
  misc_RNA (1)...(19): siRNA sense strand
aguagaaaauagggaagaa

SEQ ID NO: 2451023 - RNA, 19 nt, Homo sapiens
  misc_RNA (1)...(19): siRNA sense strand
ugaaagaguacaaagugga

SEQ ID NO: 2451024 - RNA, 19 nt, Homo sapiens
  misc_RNA (1)...(19): siRNA sense strand
ugacauuguuauuuggucu

SEQ ID NO: 2451025 - RNA, 19 nt, Homo sapiens
  misc_RNA (1)...(19): siRNA sense strand
gagugagcacaaaugcaaa

SEQ ID NO: 2451026 - RNA, 19 nt, Homo sapiens
  misc_RNA (1)...(19): siRNA sense strand
cuaaaucgugauaaagaca

SEQ ID NO: 2451027 - RNA, 19 nt, Homo sapiens
  misc_RNA (1)...(19): siRNA sense strand
cugaagaagaggagaaacu

SEQ ID NO: 2451028 - RNA, 19 nt, Homo sapiens
  misc_RNA (1)...(19): siRNA sense strand
aggaaagggcugcaggcaa

SEQ ID NO: 2451029 - RNA, 19 nt, Homo sapiens
  misc_RNA (1)...(19): siRNA sense strand
gguauuaaaaccaggcaaa

SEQ ID NO: 2451030 - RNA, 19 nt, Homo sapiens
  misc_RNA (1)...(19): siRNA sense strand
ggaaagggcugcaggcaag

SEQ ID NO: 2451031 - RNA, 19 nt, Homo sapiens
  misc_RNA (1)...(19): siRNA sense strand
ccagagaguuugaggagcu

SEQ ID NO: 2451032 - RNA, 19 nt, Homo sapiens
  misc_RNA (1)...(19): siRNA sense strand
cagcaaacuuggagaaaac

SEQ ID NO: 2451033 - RNA, 19 nt, Homo sapiens
  misc_RNA (1)...(19): siRNA sense strand
cuuuauggacacagguuau

SEQ ID NO: 2451034 - RNA, 19 nt, Homo sapiens
  misc_RNA (1)...(19): siRNA sense strand
gcucagcucuuuauggaca

SEQ ID NO: 2451035 - RNA, 19 nt, Homo sapiens
  misc_RNA (1)...(19): siRNA sense strand
gagccauugaauauguuaa

SEQ ID NO: 2451036 - RNA, 19 nt, Homo sapiens
  misc_RNA (1)...(19): siRNA sense strand
gguuuaaagccagcagcaa

SEQ ID NO: 2451037 - RNA, 19 nt, Homo sapiens
  misc_RNA (1)...(19): siRNA sense strand
gaaacugaaaagagaccaa

SEQ ID NO: 2451038 - RNA, 19 nt, Homo sapiens
  misc_RNA (1)...(19): siRNA sense strand
auguagagaguuugaagau

SEQ ID NO: 2451039 - RNA, 19 nt, Homo sapiens
  misc_RNA (1)...(19): siRNA sense strand
aauuggaacaagaggcuca

SEQ ID NO: 2451040 - RNA, 19 nt, Homo sapiens
  misc_RNA (1)...(19): siRNA sense strand
agaagugguaaacgaguau

SEQ ID NO: 2451041 - RNA, 19 nt, Homo sapiens
  misc_RNA (1)...(19): siRNA sense strand
agguuaugaagaaguggua

SEQ ID NO: 2451042 - RNA, 19 nt, Homo sapiens
  misc_RNA (1)...(19): siRNA sense strand
acgaguauguguuucgaga

SEQ ID NO: 2451043 - RNA, 19 nt, Homo sapiens
  misc_RNA (1)...(19): siRNA sense strand
aucguaagguagaaggaaa

SEQ ID NO: 2451044 - RNA, 19 nt, Homo sapiens
  misc_RNA (1)...(19): siRNA sense strand
ggguggacuuuuaggagua

SEQ ID NO: 2451045 - RNA, 19 nt, Homo sapiens
  misc_RNA (1)...(19): siRNA sense strand
ccgacaaggacgugcucau

SEQ ID NO: 2451046 - RNA, 19 nt, Homo sapiens
  misc_RNA (1)...(19): siRNA sense strand
agaugucaccauaggagaa

SEQ ID NO: 2451047 - RNA, 19 nt, Homo sapiens
  misc_RNA (1)...(19): siRNA sense strand
gcgccuucuuccuggacau

SEQ ID NO: 2451048 - RNA, 19 nt, Homo sapiens
  misc_RNA (1)...(19): siRNA sense strand
aucguaagguagaaggaaa

SEQ ID NO: 2451049 - RNA, 19 nt, Homo sapiens
  misc_RNA (1)...(19): siRNA sense strand
ggguggacuuuuaggagua

SEQ ID NO: 2451050 - RNA, 19 nt, Homo sapiens
  misc_RNA (1)...(19): siRNA sense strand
ccgacaaggacgugcucau

SEQ ID NO: 2451051 - RNA, 19 nt, Homo sapiens
  misc_RNA (1)...(19): siRNA sense strand
agaugucaccauaggagaa

SEQ ID NO: 2451052 - RNA, 19 nt, Homo sapiens
  misc_RNA (1)...(19): siRNA sense strand
gcgccuucuuccuggacau

SEQ ID NO: 2451053 - RNA, 19 nt, Homo sapiens
  misc_RNA (1)...(19): siRNA sense strand
cgcuagugccugaguccaa

SEQ ID NO: 2451054 - RNA, 19 nt, Homo sapiens
  misc_RNA (1)...(19): siRNA sense strand
cgcuagugccugaguccaa

SEQ ID NO: 2451055 - RNA, 19 nt, Homo sapiens
  misc_RNA (1)...(19): siRNA sense strand
ccaaggaugugcuucggaa

SEQ ID NO: 2451056 - RNA, 19 nt, Homo sapiens
  misc_RNA (1)...(19): siRNA sense strand
ccagcaaguguguggcuau

SEQ ID NO: 2451057 - RNA, 19 nt, Homo sapiens
  misc_RNA (1)...(19): siRNA sense strand
ggcacaggacagaaggaau

SEQ ID NO: 2451058 - RNA, 19 nt, Homo sapiens
  misc_RNA (1)...(19): siRNA sense strand
gcucagugccugugcccuu

SEQ ID NO: 2451059 - RNA, 19 nt, Homo sapiens
  misc_RNA (1)...(19): siRNA sense strand
agaagauccaggugggcca

SEQ ID NO: 2451060 - RNA, 19 nt, Homo sapiens
  misc_RNA (1)...(19): siRNA sense strand
aguagaagaugccacgaca

SEQ ID NO: 2451061 - RNA, 19 nt, Homo sapiens
  misc_RNA (1)...(19): siRNA sense strand
guuugaaagaggauugaau

SEQ ID NO: 2451062 - RNA, 19 nt, Homo sapiens
  misc_RNA (1)...(19): siRNA sense strand
uccuagaccaagugauaaa

SEQ ID NO: 2451063 - RNA, 19 nt, Homo sapiens
  misc_RNA (1)...(19): siRNA sense strand
uaacuaugaucaaaggaca

SEQ ID NO: 2451064 - RNA, 19 nt, Homo sapiens
  misc_RNA (1)...(19): siRNA sense strand
aaggaggguuuuagagaau

SEQ ID NO: 2451065 - RNA, 19 nt, Homo sapiens
  misc_RNA (1)...(19): siRNA sense strand
agugauaaacugaacccua

SEQ ID NO: 2451066 - RNA, 19 nt, Homo sapiens
  misc_RNA (1)...(19): siRNA sense strand
caauuaauccguuugguga

SEQ ID NO: 2451067 - RNA, 19 nt, Homo sapiens
  misc_RNA (1)...(19): siRNA sense strand
ggaaugcaguucagggaag

SEQ ID NO: 2451068 - RNA, 19 nt, Homo sapiens
  misc_RNA (1)...(19): siRNA sense strand
gcagauugguacaugguuc

SEQ ID NO: 2451069 - RNA, 19 nt, Homo sapiens
  misc_RNA (1)...(19): siRNA sense strand
aauuaauccguuuggugaa

SEQ ID NO: 2451070 - RNA, 19 nt, Homo sapiens
  misc_RNA (1)...(19): siRNA sense strand
ggacagaagccuagaggac

SEQ ID NO: 2451071 - RNA, 19 nt, Homo sapiens
  misc_RNA (1)...(19): siRNA sense strand
ccuuaagauuccagcucau

SEQ ID NO: 2451072 - RNA, 19 nt, Homo sapiens
  misc_RNA (1)...(19): siRNA sense strand
caucaaaagaagaagcaaa

SEQ ID NO: 2451073 - RNA, 19 nt, Homo sapiens
  misc_RNA (1)...(19): siRNA sense strand
ccacaaaaucagauggcaa

SEQ ID NO: 2451074 - RNA, 19 nt, Homo sapiens
  misc_RNA (1)...(19): siRNA sense strand
agauggcaacagagagaaa

SEQ ID NO: 2451075 - RNA, 19 nt, Homo sapiens
  misc_RNA (1)...(19): siRNA sense strand
cuucuaagcaugcgggaga

SEQ ID NO: 2451076 - RNA, 19 nt, Homo sapiens
  misc_RNA (1)...(19): siRNA sense strand
gcaagagguccaaaggcuu

SEQ ID NO: 2451077 - RNA, 19 nt, Homo sapiens
  misc_RNA (1)...(19): siRNA sense strand
gggccuucugacuggauua

SEQ ID NO: 2451078 - RNA, 19 nt, Homo sapiens
  misc_RNA (1)...(19): siRNA sense strand
accuagaaagagagugcaa

SEQ ID NO: 2451079 - RNA, 19 nt, Homo sapiens
  misc_RNA (1)...(19): siRNA sense strand
aaauagauguuaugggccu

SEQ ID NO: 2451080 - RNA, 19 nt, Homo sapiens
  misc_RNA (1)...(19): siRNA sense strand
aagagagugcaaugaagaa

SEQ ID NO: 2451081 - RNA, 19 nt, Homo sapiens
  misc_RNA (1)...(19): siRNA sense strand
cacaaaaggauuuagggua

SEQ ID NO: 2451082 - RNA, 19 nt, Homo sapiens
  misc_RNA (1)...(19): siRNA sense strand
cuguggaggaugcaggauu

SEQ ID NO: 2451083 - RNA, 19 nt, Homo sapiens
  misc_RNA (1)...(19): siRNA sense strand
gcuucgaggaggagaucaa

SEQ ID NO: 2451084 - RNA, 19 nt, Homo sapiens
  misc_RNA (1)...(19): siRNA sense strand
agaucaaggacauggagaa

SEQ ID NO: 2451085 - RNA, 19 nt, Homo sapiens
  misc_RNA (1)...(19): siRNA sense strand
ggaagaagcaggcggagga

SEQ ID NO: 2451086 - RNA, 19 nt, Homo sapiens
  misc_RNA (1)...(19): siRNA sense strand
aggaggagaucaaggcaga

SEQ ID NO: 2451087 - RNA, 19 nt, Homo sapiens
  misc_RNA (1)...(19): siRNA sense strand
aggcagagcaggaggaaag

SEQ ID NO: 2451088 - RNA, 19 nt, Homo sapiens
  misc_RNA (1)...(19): siRNA sense strand
gagaagauguucaagcagu

SEQ ID NO: 2451089 - RNA, 19 nt, Homo sapiens
  misc_RNA (1)...(19): siRNA sense strand
augaggacuuugacagcaa

SEQ ID NO: 2451090 - RNA, 19 nt, Homo sapiens
  misc_RNA (1)...(19): siRNA sense strand
agaucaaggcagagcagga

SEQ ID NO: 2451091 - RNA, 19 nt, Homo sapiens
  misc_RNA (1)...(19): siRNA sense strand
agaagcaggcggaggagau

SEQ ID NO: 2451092 - RNA, 19 nt, Homo sapiens
  misc_RNA (1)...(19): siRNA sense strand
ucaaggagguggaugagga

SEQ ID NO: 2451093 - RNA, 19 nt, Homo sapiens
  misc_RNA (1)...(19): siRNA sense strand
aggagguggaugaggacuu

SEQ ID NO: 2451094 - RNA, 19 nt, Homo sapiens
  misc_RNA (1)...(19): siRNA sense strand
aggagaugaagcagcggaa

SEQ ID NO: 2451095 - RNA, 19 nt, Homo sapiens
  misc_RNA (1)...(19): siRNA sense strand
agagcuucuuugaggccaa

SEQ ID NO: 2451096 - RNA, 19 nt, Homo sapiens
  misc_RNA (1)...(19): siRNA sense strand
ucgaccugauggagcuaaa

SEQ ID NO: 2451097 - RNA, 19 nt, Homo sapiens
  misc_RNA (1)...(19): siRNA sense strand
cuguauuaguagagguaaa

SEQ ID NO: 2451098 - RNA, 19 nt, Homo sapiens
  misc_RNA (1)...(19): siRNA sense strand
uggagaaggugaagaggca

SEQ ID NO: 2451099 - RNA, 19 nt, Homo sapiens
  misc_RNA (1)...(19): siRNA sense strand
aaacaaaccuugaagacgu

SEQ ID NO: 2451100 - RNA, 19 nt, Homo sapiens
  misc_RNA (1)...(19): siRNA sense strand
ggcuguugcaggaaggaaa

SEQ ID NO: 2451101 - RNA, 19 nt, Homo sapiens
  misc_RNA (1)...(19): siRNA sense strand
ggcuuuagcaauuggaaaa

SEQ ID NO: 2451102 - RNA, 19 nt, Homo sapiens
  misc_RNA (1)...(19): siRNA sense strand
gcgguuugaauguggagaa

SEQ ID NO: 2451103 - RNA, 19 nt, Homo sapiens
  misc_RNA (1)...(19): siRNA sense strand
aguaaagugcaguggcuca

SEQ ID NO: 2451104 - RNA, 19 nt, Homo sapiens
  misc_RNA (1)...(19): siRNA sense strand
ccucaaacaggcagagauc

SEQ ID NO: 2451105 - RNA, 19 nt, Homo sapiens
  misc_RNA (1)...(19): siRNA sense strand
uggcuuuagcaauuggaaa

SEQ ID NO: 2451106 - RNA, 19 nt, Homo sapiens
  misc_RNA (1)...(19): siRNA sense strand
uaguagacuuugugcgguu

SEQ ID NO: 2451107 - RNA, 19 nt, Homo sapiens
  misc_RNA (1)...(19): siRNA sense strand
aggugaagaggcagcagaa

SEQ ID NO: 2451108 - RNA, 19 nt, Homo sapiens
  misc_RNA (1)...(19): siRNA sense strand
gcaagaaagcucuggagac

SEQ ID NO: 2451109 - RNA, 19 nt, Homo sapiens
  misc_RNA (1)...(19): siRNA sense strand
ugaauguggagaaggugaa

SEQ ID NO: 2451110 - RNA, 19 nt, Homo sapiens
  misc_RNA (1)...(19): siRNA sense strand
agaaggagggcuggagcaa

SEQ ID NO: 2451111 - RNA, 19 nt, Homo sapiens
  misc_RNA (1)...(19): siRNA sense strand
ggugaagaggcagcagaaa

SEQ ID NO: 2451112 - RNA, 19 nt, Homo sapiens
  misc_RNA (1)...(19): siRNA sense strand
guaaauugcaagaaagcuc

SEQ ID NO: 2451113 - RNA, 19 nt, Homo sapiens
  misc_RNA (1)...(19): siRNA sense strand
augcauugucagacccuaa

SEQ ID NO: 2451114 - RNA, 19 nt, Homo sapiens
  misc_RNA (1)...(19): siRNA sense strand
agacuaagaugcuguccca

SEQ ID NO: 2451115 - RNA, 19 nt, Homo sapiens
  misc_RNA (1)...(19): siRNA sense strand
ggcagcauguggugggcau

SEQ ID NO: 2451116 - RNA, 19 nt, Homo sapiens
  misc_RNA (1)...(19): siRNA sense strand
acgaaaugcacaugagcuu

SEQ ID NO: 2451117 - RNA, 19 nt, Homo sapiens
  misc_RNA (1)...(19): siRNA sense strand
ccaagaugaagaaggacau

SEQ ID NO: 2451118 - RNA, 19 nt, Homo sapiens
  misc_RNA (1)...(19): siRNA sense strand
agguagaaucagagacagu

SEQ ID NO: 2451119 - RNA, 19 nt, Homo sapiens
  misc_RNA (1)...(19): siRNA sense strand
uaagaagagucaagcgguu

SEQ ID NO: 2451120 - RNA, 19 nt, Homo sapiens
  misc_RNA (1)...(19): siRNA sense strand
acaacagaugaaaggaaau

SEQ ID NO: 2451121 - RNA, 19 nt, Homo sapiens
  misc_RNA (1)...(19): siRNA sense strand
caucugaaauauuggguuc

SEQ ID NO: 2451122 - RNA, 19 nt, Homo sapiens
  misc_RNA (1)...(19): siRNA sense strand
cccaagaugaagaaggaca

SEQ ID NO: 2451123 - RNA, 19 nt, Homo sapiens
  misc_RNA (1)...(19): siRNA sense strand
ggaaauuauucaaccaccu

SEQ ID NO: 2451124 - RNA, 19 nt, Homo sapiens
  misc_RNA (1)...(19): siRNA sense strand
uuggagaagaugaugauga

SEQ ID NO: 2451125 - RNA, 19 nt, Homo sapiens
  misc_RNA (1)...(19): siRNA sense strand
uggcacuuguggcgguaaa

SEQ ID NO: 2451126 - RNA, 19 nt, Homo sapiens
  misc_RNA (1)...(19): siRNA sense strand
ccuuccacuuugagcacua

SEQ ID NO: 2451127 - RNA, 19 nt, Homo sapiens
  misc_RNA (1)...(19): siRNA sense strand
ucucaaggaaguuguucaa

SEQ ID NO: 2451128 - RNA, 19 nt, Homo sapiens
  misc_RNA (1)...(19): siRNA sense strand
gguccaaaaccccagaaaa

SEQ ID NO: 2451129 - RNA, 19 nt, Homo sapiens
  misc_RNA (1)...(19): siRNA sense strand
agacagagggagaccagga

SEQ ID NO: 2451130 - RNA, 19 nt, Homo sapiens
  misc_RNA (1)...(19): siRNA sense strand
ccaauuaugccaacgcaca

SEQ ID NO: 2451131 - RNA, 19 nt, Homo sapiens
  misc_RNA (1)...(19): siRNA sense strand
ugaagaagcugaaagacga

SEQ ID NO: 2451132 - RNA, 19 nt, Homo sapiens
  misc_RNA (1)...(19): siRNA sense strand
acucaacagaagaaagaau

SEQ ID NO: 2451133 - RNA, 19 nt, Homo sapiens
  misc_RNA (1)...(19): siRNA sense strand
gggucagaacaguauguaa

SEQ ID NO: 2451134 - RNA, 19 nt, Homo sapiens
  misc_RNA (1)...(19): siRNA sense strand
aagugaagaagcugaaaga

SEQ ID NO: 2451135 - RNA, 19 nt, Homo sapiens
  misc_RNA (1)...(19): siRNA sense strand
ucagguaaagaaaggcaaa

SEQ ID NO: 2451136 - RNA, 19 nt, Homo sapiens
  misc_RNA (1)...(19): siRNA sense strand
ucuaugacaacaagggaau

SEQ ID NO: 2451137 - RNA, 19 nt, Homo sapiens
  misc_RNA (1)...(19): siRNA sense strand
ccauaaaugcuggagaaga

SEQ ID NO: 2451138 - RNA, 19 nt, Homo sapiens
  misc_RNA (1)...(19): siRNA sense strand
cuggagaagagcugacuuu

SEQ ID NO: 2451139 - RNA, 19 nt, Homo sapiens
  misc_RNA (1)...(19): siRNA sense strand
acauugugaagaaggcuaa

SEQ ID NO: 2451140 - RNA, 19 nt, Homo sapiens
  misc_RNA (1)...(19): siRNA sense strand
gguaaagaaaggcaaagca

SEQ ID NO: 2451141 - RNA, 19 nt, Homo sapiens
  misc_RNA (1)...(19): siRNA sense strand
gcaauaacuccaaaagaca

SEQ ID NO: 2451142 - RNA, 19 nt, Homo sapiens
  misc_RNA (1)...(19): siRNA sense strand
aggcaaagcaauaacucca

SEQ ID NO: 2451143 - RNA, 19 nt, Homo sapiens
  misc_RNA (1)...(19): siRNA sense strand
uggaaucagcuuagucaau

SEQ ID NO: 2451144 - RNA, 19 nt, Homo sapiens
  misc_RNA (1)...(19): siRNA sense strand
uguaaagacccuugugaag

SEQ ID NO: 2451145 - RNA, 19 nt, Homo sapiens
  misc_RNA (1)...(19): siRNA sense strand
ugaccacagcccagccaaa

SEQ ID NO: 2451146 - RNA, 19 nt, Homo sapiens
  misc_RNA (1)...(19): siRNA sense strand
ccgagguggcagagacaua

SEQ ID NO: 2451147 - RNA, 19 nt, Homo sapiens
  misc_RNA (1)...(19): siRNA sense strand
ggaaacuagcagaggcaca

SEQ ID NO: 2451148 - RNA, 19 nt, Homo sapiens
  misc_RNA (1)...(19): siRNA sense strand
ugacaaaagcagagagacu

SEQ ID NO: 2451149 - RNA, 19 nt, Homo sapiens
  misc_RNA (1)...(19): siRNA sense strand
auuagcagguguagagcaa

SEQ ID NO: 2451150 - RNA, 19 nt, Homo sapiens
  misc_RNA (1)...(19): siRNA sense strand
ccagccuccucgagagaaa

SEQ ID NO: 2451151 - RNA, 19 nt, Homo sapiens
  misc_RNA (1)...(19): siRNA sense strand
cauagaaagaaguuccaaa

SEQ ID NO: 2451152 - RNA, 19 nt, Homo sapiens
  misc_RNA (1)...(19): siRNA sense strand
acccauauugagagaauua

SEQ ID NO: 2451153 - RNA, 19 nt, Homo sapiens
  misc_RNA (1)...(19): siRNA sense strand
ccuggaagccaaaguggaa

SEQ ID NO: 2451154 - RNA, 19 nt, Homo sapiens
  misc_RNA (1)...(19): siRNA sense strand
aggaagaauggauagaaau

SEQ ID NO: 2451155 - RNA, 19 nt, Homo sapiens
  misc_RNA (1)...(19): siRNA sense strand
aagagaaagcaaaguccua

SEQ ID NO: 2451156 - RNA, 19 nt, Homo sapiens
  misc_RNA (1)...(19): siRNA sense strand
aggaagcugcagagaauuu

SEQ ID NO: 2451157 - RNA, 19 nt, Homo sapiens
  misc_RNA (1)...(19): siRNA sense strand
agaaacugaagaagggaga

SEQ ID NO: 2451158 - RNA, 19 nt, Homo sapiens
  misc_RNA (1)...(19): siRNA sense strand
agggaugggaagaaccaaa

SEQ ID NO: 2451159 - RNA, 19 nt, Homo sapiens
  misc_RNA (1)...(19): siRNA sense strand
ucuacaaaugacuggacaa

SEQ ID NO: 2451160 - RNA, 19 nt, Homo sapiens
  misc_RNA (1)...(19): siRNA sense strand
gcugcuacaauguggaaga

SEQ ID NO: 2451161 - RNA, 19 nt, Homo sapiens
  misc_RNA (1)...(19): siRNA sense strand
agccaaaguggaagcauuu

SEQ ID NO: 2451162 - RNA, 19 nt, Homo sapiens
  misc_RNA (1)...(19): siRNA sense strand
uuucaaaggagcugcuaca

SEQ ID NO: 2451163 - RNA, 19 nt, Homo sapiens
  misc_RNA (1)...(19): siRNA sense strand
ccagacaaauccucgccaa

SEQ ID NO: 2451164 - RNA, 19 nt, Homo sapiens
  misc_RNA (1)...(19): siRNA sense strand
gcaagaaacugaagaaggg

SEQ ID NO: 2451165 - RNA, 19 nt, Homo sapiens
  misc_RNA (1)...(19): siRNA sense strand
ggauagaaauugaagcacg

SEQ ID NO: 2451166 - RNA, 19 nt, Homo sapiens
  misc_RNA (1)...(19): siRNA sense strand
augauguagcugagcagua

SEQ ID NO: 2451167 - RNA, 19 nt, Homo sapiens
  misc_RNA (1)...(19): siRNA sense strand
gagagucccuggaagccaa

SEQ ID NO: 2451168 - RNA, 19 nt, Homo sapiens
  misc_RNA (1)...(19): siRNA sense strand
ggaagaauuauaaaggaag

SEQ ID NO: 2451169 - RNA, 19 nt, Homo sapiens
  misc_RNA (1)...(19): siRNA sense strand
uguaucaaggucagaagaa

SEQ ID NO: 2451170 - RNA, 19 nt, Homo sapiens
  misc_RNA (1)...(19): siRNA sense strand
uaucauuugcacaggugua

SEQ ID NO: 2451171 - RNA, 19 nt, Homo sapiens
  misc_RNA (1)...(19): siRNA sense strand
uaucaaggucagaagaagu

SEQ ID NO: 2451172 - RNA, 19 nt, Homo sapiens
  misc_RNA (1)...(19): siRNA sense strand
ugagagaauuagcaggugu

SEQ ID NO: 2451173 - RNA, 19 nt, Homo sapiens
  misc_RNA (1)...(19): siRNA sense strand
guguaaugaaugugggaaa

SEQ ID NO: 2451174 - RNA, 19 nt, Homo sapiens
  misc_RNA (1)...(19): siRNA sense strand
gggaaauccuuuaggcaca

SEQ ID NO: 2451175 - RNA, 19 nt, Homo sapiens
  misc_RNA (1)...(19): siRNA sense strand
gaguuaacaugcagaagaa

SEQ ID NO: 2451176 - RNA, 19 nt, Homo sapiens
  misc_RNA (1)...(19): siRNA sense strand
aauucauaccggagagaaa

SEQ ID NO: 2451177 - RNA, 19 nt, Homo sapiens
  misc_RNA (1)...(19): siRNA sense strand
guguguuggaugugggaaa

SEQ ID NO: 2451178 - RNA, 19 nt, Homo sapiens
  misc_RNA (1)...(19): siRNA sense strand
aagucauucuggagauaaa

SEQ ID NO: 2451179 - RNA, 19 nt, Homo sapiens
  misc_RNA (1)...(19): siRNA sense strand
augcaaugaauguggaaaa

SEQ ID NO: 2451180 - RNA, 19 nt, Homo sapiens
  misc_RNA (1)...(19): siRNA sense strand
aaguguagugagugugaaa

SEQ ID NO: 2451181 - RNA, 19 nt, Homo sapiens
  misc_RNA (1)...(19): siRNA sense strand
auguacagaauguggcaaa

SEQ ID NO: 2451182 - RNA, 19 nt, Homo sapiens
  misc_RNA (1)...(19): siRNA sense strand
uuauuaaacaccagcgaau

SEQ ID NO: 2451183 - RNA, 19 nt, Homo sapiens
  misc_RNA (1)...(19): siRNA sense strand
gugcagugaauguggaagu

SEQ ID NO: 2451184 - RNA, 19 nt, Homo sapiens
  misc_RNA (1)...(19): siRNA sense strand
augcacugaaugugguaaa

SEQ ID NO: 2451185 - RNA, 19 nt, Homo sapiens
  misc_RNA (1)...(19): siRNA sense strand
cccuaugugugcagugaau

SEQ ID NO: 2451186 - RNA, 19 nt, Homo sapiens
  misc_RNA (1)...(19): siRNA sense strand
ggagaguuaacaugcagaa

SEQ ID NO: 2451187 - RNA, 19 nt, Homo sapiens
  misc_RNA (1)...(19): siRNA sense strand
uggagagaaaccauauaaa

SEQ ID NO: 2451188 - RNA, 19 nt, Homo sapiens
  misc_RNA (1)...(19): siRNA sense strand
guguagugaaugugggaag

SEQ ID NO: 2451189 - RNA, 19 nt, Homo sapiens
  misc_RNA (1)...(19): siRNA sense strand
gccuuuaaucagagugcau

SEQ ID NO: 2451190 - RNA, 19 nt, Homo sapiens
  misc_RNA (1)...(19): siRNA sense strand
agaguuaacaugcagaaga

SEQ ID NO: 2451191 - RNA, 19 nt, Homo sapiens
  misc_RNA (1)...(19): siRNA sense strand
guguaaugacugugggaaa

SEQ ID NO: 2451192 - RNA, 19 nt, Homo sapiens
  misc_RNA (1)...(19): siRNA sense strand
aggaaauguaugaaggaaa

SEQ ID NO: 2451193 - RNA, 19 nt, Homo sapiens
  misc_RNA (1)...(19): siRNA sense strand
ggaaauauaaagaaggaga

SEQ ID NO: 2451194 - RNA, 19 nt, Homo sapiens
  misc_RNA (1)...(19): siRNA sense strand
guguaaugaaugcgggaaa

SEQ ID NO: 2451195 - RNA, 19 nt, Homo sapiens
  misc_RNA (1)...(19): siRNA sense strand
gugcaaggaauguggaaau

SEQ ID NO: 2451196 - RNA, 19 nt, Homo sapiens
  misc_RNA (1)...(19): siRNA sense strand
auguaaggaaugugggaaa

SEQ ID NO: 2451197 - RNA, 19 nt, Homo sapiens
  misc_RNA (1)...(19): siRNA sense strand
guguaaagaguguggaaaa

SEQ ID NO: 2451198 - RNA, 19 nt, Homo sapiens
  misc_RNA (1)...(19): siRNA sense strand
guguagugugugugggaaa

SEQ ID NO: 2451199 - RNA, 19 nt, Homo sapiens
  misc_RNA (1)...(19): siRNA sense strand
auguauggaaugugagaaa

SEQ ID NO: 2451200 - RNA, 19 nt, Homo sapiens
  misc_RNA (1)...(19): siRNA sense strand
cuucagcguuaaugggaaa

SEQ ID NO: 2451201 - RNA, 19 nt, Homo sapiens
  misc_RNA (1)...(19): siRNA sense strand
agaacaacacugaggaaaa

SEQ ID NO: 2451202 - RNA, 19 nt, Homo sapiens
  misc_RNA (1)...(19): siRNA sense strand
cguucaauguuaaugcaaa

SEQ ID NO: 2451203 - RNA, 19 nt, Homo sapiens
  misc_RNA (1)...(19): siRNA sense strand
gcuggagaauuaugggaau

SEQ ID NO: 2451204 - RNA, 19 nt, Homo sapiens
  misc_RNA (1)...(19): siRNA sense strand
guguaaggaguguggaaaa

SEQ ID NO: 2451205 - RNA, 19 nt, Homo sapiens
  misc_RNA (1)...(19): siRNA sense strand
cauugauggaacagugaaa

SEQ ID NO: 2451206 - RNA, 19 nt, Homo sapiens
  misc_RNA (1)...(19): siRNA sense strand
guaugaaggaaaagagaau

SEQ ID NO: 2451207 - RNA, 19 nt, Homo sapiens
  misc_RNA (1)...(19): siRNA sense strand
auacaaaacucgugaagca

SEQ ID NO: 2451208 - RNA, 19 nt, Homo sapiens
  misc_RNA (1)...(19): siRNA sense strand
uguccauagugaaggaaaa

SEQ ID NO: 2451209 - RNA, 19 nt, Homo sapiens
  misc_RNA (1)...(19): siRNA sense strand
aagaaggagaagagcaaca

SEQ ID NO: 2451210 - RNA, 19 nt, Homo sapiens
  misc_RNA (1)...(19): siRNA sense strand
ggaaaaggcuucaggugca

SEQ ID NO: 2451211 - RNA, 19 nt, Homo sapiens
  misc_RNA (1)...(19): siRNA sense strand
aagaauuaguagagcccuu

SEQ ID NO: 2451212 - RNA, 19 nt, Homo sapiens
  misc_RNA (1)...(19): siRNA sense strand
aauccacacaggugagaaa

SEQ ID NO: 2451213 - RNA, 19 nt, Homo sapiens
  misc_RNA (1)...(19): siRNA sense strand
gaguguaaugaguguggaa

SEQ ID NO: 2451214 - RNA, 19 nt, Homo sapiens
  misc_RNA (1)...(19): siRNA sense strand
caguguaaggaguguggaa

SEQ ID NO: 2451215 - RNA, 19 nt, Homo sapiens
  misc_RNA (1)...(19): siRNA sense strand
gauacauacuggggagaaa

SEQ ID NO: 2451216 - RNA, 19 nt, Homo sapiens
  misc_RNA (1)...(19): siRNA sense strand
ucgugaagcaugaaauaau

SEQ ID NO: 2451217 - RNA, 19 nt, Homo sapiens
  misc_RNA (1)...(19): siRNA sense strand
aggcaucagaggauacaua

SEQ ID NO: 2451218 - RNA, 19 nt, Homo sapiens
  misc_RNA (1)...(19): siRNA sense strand
auguaaugagugugggaga

SEQ ID NO: 2451219 - RNA, 19 nt, Homo sapiens
  misc_RNA (1)...(19): siRNA sense strand
gagcauccacacaggagaa

SEQ ID NO: 2451220 - RNA, 19 nt, Homo sapiens
  misc_RNA (1)...(19): siRNA sense strand
caguguaaagaguguggaa

SEQ ID NO: 2451221 - RNA, 19 nt, Homo sapiens
  misc_RNA (1)...(19): siRNA sense strand
guggaaaaggcuucaauaa

SEQ ID NO: 2451222 - RNA, 19 nt, Homo sapiens
  misc_RNA (1)...(19): siRNA sense strand
cuucaguaucaaugccaaa

SEQ ID NO: 2451223 - RNA, 19 nt, Homo sapiens
  misc_RNA (1)...(19): siRNA sense strand
agagaacaacacugaggaa

SEQ ID NO: 2451224 - RNA, 19 nt, Homo sapiens
  misc_RNA (1)...(19): siRNA sense strand
auguguggagugugggaaa

SEQ ID NO: 2451225 - RNA, 19 nt, Homo sapiens
  misc_RNA (1)...(19): siRNA sense strand
cccuaugaguguaaugaau

SEQ ID NO: 2451226 - RNA, 19 nt, Homo sapiens
  misc_RNA (1)...(19): siRNA sense strand
gugggaaagccuucaguau

SEQ ID NO: 2451227 - RNA, 19 nt, Homo sapiens
  misc_RNA (1)...(19): siRNA sense strand
acucgugaagcaugaaaua

SEQ ID NO: 2451228 - RNA, 19 nt, Homo sapiens
  misc_RNA (1)...(19): siRNA sense strand
ccuuucaaauguauggaau

SEQ ID NO: 2451229 - RNA, 19 nt, Homo sapiens
  misc_RNA (1)...(19): siRNA sense strand
caguguuaauggaagccua

SEQ ID NO: 2451230 - RNA, 19 nt, Homo sapiens
  misc_RNA (1)...(19): siRNA sense strand
uagagaaacaacaggaagu

SEQ ID NO: 2451231 - RNA, 19 nt, Homo sapiens
  misc_RNA (1)...(19): siRNA sense strand
ggagagaaaccuuacgagu

SEQ ID NO: 2451232 - RNA, 19 nt, Homo sapiens
  misc_RNA (1)...(19): siRNA sense strand
cagugaaagaugagacaag

SEQ ID NO: 2451233 - RNA, 19 nt, Homo sapiens
  misc_RNA (1)...(19): siRNA sense strand
auaaagaaggagaagagca

SEQ ID NO: 2451234 - RNA, 19 nt, Homo sapiens
  misc_RNA (1)...(19): siRNA sense strand
gugucaaagggaaguuaau

SEQ ID NO: 2451235 - RNA, 19 nt, Homo sapiens
  misc_RNA (1)...(19): siRNA sense strand
auauugugcaccagagaau

SEQ ID NO: 2451236 - RNA, 19 nt, Homo sapiens
  misc_RNA (1)...(19): siRNA sense strand
cuauauguguagugugugu

SEQ ID NO: 2451237 - RNA, 19 nt, Homo sapiens
  misc_RNA (1)...(19): siRNA sense strand
cuacauuauacaucagaca

SEQ ID NO: 2451238 - RNA, 19 nt, Homo sapiens
  misc_RNA (1)...(19): siRNA sense strand
auauaaagaaggagaagag

SEQ ID NO: 2451239 - RNA, 19 nt, Homo sapiens
  misc_RNA (1)...(19): siRNA sense strand
agaaacccuaugaguguaa

SEQ ID NO: 2451240 - RNA, 19 nt, Homo sapiens
  misc_RNA (1)...(19): siRNA sense strand
ccuucagcguuaaugggaa

SEQ ID NO: 2451241 - RNA, 19 nt, Homo sapiens
  misc_RNA (1)...(19): siRNA sense strand
cuaacuauauugugcacca

SEQ ID NO: 2451242 - RNA, 19 nt, Homo sapiens
  misc_RNA (1)...(19): siRNA sense strand
auguguggaauguggcaaa

SEQ ID NO: 2451243 - RNA, 19 nt, Homo sapiens
  misc_RNA (1)...(19): siRNA sense strand
aauucacacaggcgagaaa

SEQ ID NO: 2451244 - RNA, 19 nt, Homo sapiens
  misc_RNA (1)...(19): siRNA sense strand
cccuaucaauguaaggaau

SEQ ID NO: 2451245 - RNA, 19 nt, Homo sapiens
  misc_RNA (1)...(19): siRNA sense strand
ccaacgaaagcuauggcaa

SEQ ID NO: 2451246 - RNA, 19 nt, Homo sapiens
  misc_RNA (1)...(19): siRNA sense strand
aagaaaacugagugggaau

SEQ ID NO: 2451247 - RNA, 19 nt, Homo sapiens
  misc_RNA (1)...(19): siRNA sense strand
cagaagaacacuaugccau

SEQ ID NO: 2451248 - RNA, 19 nt, Homo sapiens
  misc_RNA (1)...(19): siRNA sense strand
ucuguaaagaagagaacau

SEQ ID NO: 2451249 - RNA, 19 nt, Homo sapiens
  misc_RNA (1)...(19): siRNA sense strand
gaaauggagaugugggaac

SEQ ID NO: 2451250 - RNA, 19 nt, Homo sapiens
  misc_RNA (1)...(19): siRNA sense strand
ugacacaacuguagagcag

SEQ ID NO: 2451251 - RNA, 19 nt, Homo sapiens
  misc_RNA (1)...(19): siRNA sense strand
gggaauacccugcagguuc

SEQ ID NO: 2451252 - RNA, 19 nt, Homo sapiens
  misc_RNA (1)...(19): siRNA sense strand
caacgaaagcuauggcaac

SEQ ID NO: 2451253 - RNA, 19 nt, Homo sapiens
  misc_RNA (1)...(19): siRNA sense strand
acucuagggcaaacagaau

SEQ ID NO: 2451254 - RNA, 19 nt, Homo sapiens
  misc_RNA (1)...(19): siRNA sense strand
acuguaaaggaguuaacaa

SEQ ID NO: 2451255 - RNA, 19 nt, Homo sapiens
  misc_RNA (1)...(19): siRNA sense strand
uguaaagaagagaacauga

SEQ ID NO: 2451256 - RNA, 19 nt, Homo sapiens
  misc_RNA (1)...(19): siRNA sense strand
aagaaggacuugagggcca

SEQ ID NO: 2451257 - RNA, 19 nt, Homo sapiens
  misc_RNA (1)...(19): siRNA sense strand
ggauaaagagccuucacca

SEQ ID NO: 2451258 - RNA, 19 nt, Homo sapiens
  misc_RNA (1)...(19): siRNA sense strand
acguggagagacugaagaa

SEQ ID NO: 2451259 - RNA, 19 nt, Homo sapiens
  misc_RNA (1)...(19): siRNA sense strand
agaaggagaucgacgcgua

SEQ ID NO: 2451260 - RNA, 19 nt, Homo sapiens
  misc_RNA (1)...(19): siRNA sense strand
cguacaucgugcaggccaa

SEQ ID NO: 2451261 - RNA, 19 nt, Homo sapiens
  misc_RNA (1)...(19): siRNA sense strand
cugugaagaccaagaacau

SEQ ID NO: 2451262 - RNA, 19 nt, Homo sapiens
  misc_RNA (1)...(19): siRNA sense strand
cuuucuacuaugagaucaa

SEQ ID NO: 2451263 - RNA, 19 nt, Homo sapiens
  misc_RNA (1)...(19): siRNA sense strand
gcugugaagaccaagaaca

SEQ ID NO: 2451264 - RNA, 19 nt, Homo sapiens
  misc_RNA (1)...(19): siRNA sense strand
cuucauggcagcagagauc

SEQ ID NO: 2451265 - RNA, 19 nt, Homo sapiens
  misc_RNA (1)...(19): siRNA sense strand
acagcgacaccgaggauga

SEQ ID NO: 2451266 - RNA, 19 nt, Homo sapiens
  misc_RNA (1)...(19): siRNA sense strand
ggaucuagcuguagcccua

SEQ ID NO: 2451267 - RNA, 19 nt, Homo sapiens
  misc_RNA (1)...(19): siRNA sense strand
aggaaaaggucgagaaagu

SEQ ID NO: 2451268 - RNA, 19 nt, Homo sapiens
  misc_RNA (1)...(19): siRNA sense strand
ggauauaauucuauggauc

SEQ ID NO: 2451269 - RNA, 19 nt, Homo sapiens
  misc_RNA (1)...(19): siRNA sense strand
ggcaaauagcugugguaga

SEQ ID NO: 2451270 - RNA, 19 nt, Homo sapiens
  misc_RNA (1)...(19): siRNA sense strand
gggaauucaaguaaggcau

SEQ ID NO: 2451271 - RNA, 19 nt, Homo sapiens
  misc_RNA (1)...(19): siRNA sense strand
acacggaugaagaaggauu

SEQ ID NO: 2451272 - RNA, 19 nt, Homo sapiens
  misc_RNA (1)...(19): siRNA sense strand
aggcuauagaaguguucaa

SEQ ID NO: 2451273 - RNA, 19 nt, Homo sapiens
  misc_RNA (1)...(19): siRNA sense strand
ccuuaaaugaagaagauag

SEQ ID NO: 2451274 - RNA, 19 nt, Homo sapiens
  misc_RNA (1)...(19): siRNA sense strand
accaacaaacacagaggaa

SEQ ID NO: 2451275 - RNA, 19 nt, Homo sapiens
  misc_RNA (1)...(19): siRNA sense strand
cgggcaaauagcuguggua

SEQ ID NO: 2451276 - RNA, 19 nt, Homo sapiens
  misc_RNA (1)...(19): siRNA sense strand
auuguggaguugauguaaa

SEQ ID NO: 2451277 - RNA, 19 nt, Homo sapiens
  misc_RNA (1)...(19): siRNA sense strand
acaucaacaaaucuggaua

SEQ ID NO: 2451278 - RNA, 19 nt, Homo sapiens
  misc_RNA (1)...(19): siRNA sense strand
ggauauuggagcccagcuu

SEQ ID NO: 2451279 - RNA, 19 nt, Homo sapiens
  misc_RNA (1)...(19): siRNA sense strand
gcuugauuguggaguugau

SEQ ID NO: 2451280 - RNA, 19 nt, Homo sapiens
  misc_RNA (1)...(19): siRNA sense strand
gggcaaguuccaaggcaga

SEQ ID NO: 2451281 - RNA, 19 nt, Homo sapiens
  misc_RNA (1)...(19): siRNA sense strand
ccagaagggccguugguga

SEQ ID NO: 2451282 - RNA, 19 nt, Homo sapiens
  misc_RNA (1)...(19): siRNA sense strand
gggccguuggugaggaaau

SEQ ID NO: 2451283 - RNA, 19 nt, Homo sapiens
  misc_RNA (1)...(19): siRNA sense strand
gauucugaguauuuggaga

SEQ ID NO: 2451284 - RNA, 19 nt, Homo sapiens
  misc_RNA (1)...(19): siRNA sense strand
gcuauacacugcuggacca

SEQ ID NO: 2451285 - RNA, 19 nt, Homo sapiens
  misc_RNA (1)...(19): siRNA sense strand
aggacaagccuuagaagcu

SEQ ID NO: 2451286 - RNA, 19 nt, Homo sapiens
  misc_RNA (1)...(19): siRNA sense strand
ggcaaagggaccugaacaa

SEQ ID NO: 2451287 - RNA, 19 nt, Homo sapiens
  misc_RNA (1)...(19): siRNA sense strand
ggaucaaagacaaagaaga

SEQ ID NO: 2451288 - RNA, 19 nt, Homo sapiens
  misc_RNA (1)...(19): siRNA sense strand
gugcuauacugcaggucaa

SEQ ID NO: 2451289 - RNA, 19 nt, Homo sapiens
  misc_RNA (1)...(19): siRNA sense strand
ucaaagacaaagaagacaa

SEQ ID NO: 2451290 - RNA, 19 nt, Homo sapiens
  misc_RNA (1)...(19): siRNA sense strand
ccuacaaggagaugacauu

SEQ ID NO: 2451291 - RNA, 19 nt, Homo sapiens
  misc_RNA (1)...(19): siRNA sense strand
aggaagacuugaaggagca

SEQ ID NO: 2451292 - RNA, 19 nt, Homo sapiens
  misc_RNA (1)...(19): siRNA sense strand
aagacaaagaagacaagaa

SEQ ID NO: 2451293 - RNA, 19 nt, Homo sapiens
  misc_RNA (1)...(19): siRNA sense strand
cugaagagcaagaucaaaa

SEQ ID NO: 2451294 - RNA, 19 nt, Homo sapiens
  misc_RNA (1)...(19): siRNA sense strand
cugggaaggaggagcggaa

SEQ ID NO: 2451295 - RNA, 19 nt, Homo sapiens
  misc_RNA (1)...(19): siRNA sense strand
ccauaaagaaugucgagga

SEQ ID NO: 2451296 - RNA, 19 nt, Homo sapiens
  misc_RNA (1)...(19): siRNA sense strand
ccauuaagaaggaagacuu

SEQ ID NO: 2451297 - RNA, 19 nt, Homo sapiens
  misc_RNA (1)...(19): siRNA sense strand
cugcugaaggagagucaaa

SEQ ID NO: 2451298 - RNA, 19 nt, Homo sapiens
  misc_RNA (1)...(19): siRNA sense strand
gggcaaagggaccugaaca

SEQ ID NO: 2451299 - RNA, 19 nt, Homo sapiens
  misc_RNA (1)...(19): siRNA sense strand
agcaagaagcacaaggcaa

SEQ ID NO: 2451300 - RNA, 19 nt, Homo sapiens
  misc_RNA (1)...(19): siRNA sense strand
aaagaaaagaagcgggcaa

SEQ ID NO: 2451301 - RNA, 19 nt, Homo sapiens
  misc_RNA (1)...(19): siRNA sense strand
auuagaggccucagagaau

SEQ ID NO: 2451302 - RNA, 19 nt, Homo sapiens
  misc_RNA (1)...(19): siRNA sense strand
gcgaagugcugcaggagcu

SEQ ID NO: 2451303 - RNA, 19 nt, Homo sapiens
  misc_RNA (1)...(19): siRNA sense strand
guuuugaggaugagaggaa

SEQ ID NO: 2451304 - RNA, 19 nt, Homo sapiens
  misc_RNA (1)...(19): siRNA sense strand
agaaggaagacuugaagga

SEQ ID NO: 2451305 - RNA, 19 nt, Homo sapiens
  misc_RNA (1)...(19): siRNA sense strand
aaggagagucaaagcaaaa

SEQ ID NO: 2451306 - RNA, 19 nt, Homo sapiens
  misc_RNA (1)...(19): siRNA sense strand
cggaagaagcagcaggaag

SEQ ID NO: 2451307 - RNA, 19 nt, Homo sapiens
  misc_RNA (1)...(19): siRNA sense strand
ggaagaagcagcaggaagc

SEQ ID NO: 2451308 - RNA, 19 nt, Homo sapiens
  misc_RNA (1)...(19): siRNA sense strand
ucauggaagagcuggauuu

SEQ ID NO: 2451309 - RNA, 19 nt, Homo sapiens
  misc_RNA (1)...(19): siRNA sense strand
gagcugugccagaagccaa

SEQ ID NO: 2451310 - RNA, 19 nt, Homo sapiens
  misc_RNA (1)...(19): siRNA sense strand
ccaacagcaagaagcacaa

SEQ ID NO: 2451311 - RNA, 19 nt, Homo sapiens
  misc_RNA (1)...(19): siRNA sense strand
agcacaaggcaaaggauga

SEQ ID NO: 2451312 - RNA, 19 nt, Homo sapiens
  misc_RNA (1)...(19): siRNA sense strand
gagaauugcacuugcucga

SEQ ID NO: 2451313 - RNA, 19 nt, Homo sapiens
  misc_RNA (1)...(19): siRNA sense strand
aacccuagaaggcgagaaa

SEQ ID NO: 2451314 - RNA, 19 nt, Homo sapiens
  misc_RNA (1)...(19): siRNA sense strand
ccggguggagacaggauua

SEQ ID NO: 2451315 - RNA, 19 nt, Homo sapiens
  misc_RNA (1)...(19): siRNA sense strand
gccugaagagcaagaucaa

SEQ ID NO: 2451316 - RNA, 19 nt, Homo sapiens
  misc_RNA (1)...(19): siRNA sense strand
aggaaaagcugggagaaca

SEQ ID NO: 2451317 - RNA, 19 nt, Homo sapiens
  misc_RNA (1)...(19): siRNA sense strand
cggcuguuacuguggaaga

SEQ ID NO: 2451318 - RNA, 19 nt, Homo sapiens
  misc_RNA (1)...(19): siRNA sense strand
gcaggaagcccucagcgaa

SEQ ID NO: 2451319 - RNA, 19 nt, Homo sapiens
  misc_RNA (1)...(19): siRNA sense strand
gugucaucacccagaaauu

SEQ ID NO: 2451320 - RNA, 19 nt, Homo sapiens
  misc_RNA (1)...(19): siRNA sense strand
ccuaaagaagccagugagu

SEQ ID NO: 2451321 - RNA, 19 nt, Homo sapiens
  misc_RNA (1)...(19): siRNA sense strand
cugaugagaaccacagaga

SEQ ID NO: 2451322 - RNA, 19 nt, Homo sapiens
  misc_RNA (1)...(19): siRNA sense strand
agaaugucgaggaggcuuu

SEQ ID NO: 2451323 - RNA, 19 nt, Homo sapiens
  misc_RNA (1)...(19): siRNA sense strand
gacuggaauacuugggaga

SEQ ID NO: 2451324 - RNA, 19 nt, Homo sapiens
  misc_RNA (1)...(19): siRNA sense strand
agagcaucauggaggagau

SEQ ID NO: 2451325 - RNA, 19 nt, Homo sapiens
  misc_RNA (1)...(19): siRNA sense strand
gggaaggaggagcggaaag

SEQ ID NO: 2451326 - RNA, 19 nt, Homo sapiens
  misc_RNA (1)...(19): siRNA sense strand
acaaagaagacaagaaagg

SEQ ID NO: 2451327 - RNA, 19 nt, Homo sapiens
  misc_RNA (1)...(19): siRNA sense strand
guaacacagcccugcggaa

SEQ ID NO: 2451328 - RNA, 19 nt, Homo sapiens
  misc_RNA (1)...(19): siRNA sense strand
ucagaaaggcagugauggu

SEQ ID NO: 2451329 - RNA, 19 nt, Homo sapiens
  misc_RNA (1)...(19): siRNA sense strand
aggaagagccugaaccugu

SEQ ID NO: 2451330 - RNA, 19 nt, Homo sapiens
  misc_RNA (1)...(19): siRNA sense strand
gauaggaaaagcugggaga

SEQ ID NO: 2451331 - RNA, 19 nt, Homo sapiens
  misc_RNA (1)...(19): siRNA sense strand
cgcaaggagcugcagagaa

SEQ ID NO: 2451332 - RNA, 19 nt, Homo sapiens
  misc_RNA (1)...(19): siRNA sense strand
ugcagagaaucauggaaga

SEQ ID NO: 2451333 - RNA, 19 nt, Homo sapiens
  misc_RNA (1)...(19): siRNA sense strand
cuguuacuguggaagacua

SEQ ID NO: 2451334 - RNA, 19 nt, Homo sapiens
  misc_RNA (1)...(19): siRNA sense strand
gaggaugagaggaaaguac

SEQ ID NO: 2451335 - RNA, 19 nt, Homo sapiens
  misc_RNA (1)...(19): siRNA sense strand
ugaagguaccuguggggaa

SEQ ID NO: 2451336 - RNA, 19 nt, Homo sapiens
  misc_RNA (1)...(19): siRNA sense strand
auucaagagaaaugggaua

SEQ ID NO: 2451337 - RNA, 19 nt, Homo sapiens
  misc_RNA (1)...(19): siRNA sense strand
ccagaaagcuaaagcagca

SEQ ID NO: 2451338 - RNA, 19 nt, Homo sapiens
  misc_RNA (1)...(19): siRNA sense strand
acucaauggagcugauaua

SEQ ID NO: 2451339 - RNA, 19 nt, Homo sapiens
  misc_RNA (1)...(19): siRNA sense strand
agguggaagucaucauaaa

SEQ ID NO: 2451340 - RNA, 19 nt, Homo sapiens
  misc_RNA (1)...(19): siRNA sense strand
acgacaggcucuaguggaa

SEQ ID NO: 2451341 - RNA, 19 nt, Homo sapiens
  misc_RNA (1)...(19): siRNA sense strand
aggaaauacugaugaucca

SEQ ID NO: 2451342 - RNA, 19 nt, Homo sapiens
  misc_RNA (1)...(19): siRNA sense strand
uauuagaaugggagugcaa

SEQ ID NO: 2451343 - RNA, 19 nt, Homo sapiens
  misc_RNA (1)...(19): siRNA sense strand
gguuaguggauuacaucaa

SEQ ID NO: 2451344 - RNA, 19 nt, Homo sapiens
  misc_RNA (1)...(19): siRNA sense strand
cguuuagacaugauggcua

SEQ ID NO: 2451345 - RNA, 19 nt, Homo sapiens
  misc_RNA (1)...(19): siRNA sense strand
cuuuacaagugcuggccaa

SEQ ID NO: 2451346 - RNA, 19 nt, Homo sapiens
  misc_RNA (1)...(19): siRNA sense strand
agaaaugggauacaagcaa

SEQ ID NO: 2451347 - RNA, 19 nt, Homo sapiens
  misc_RNA (1)...(19): siRNA sense strand
agugcaacguauuguuaua

SEQ ID NO: 2451348 - RNA, 19 nt, Homo sapiens
  misc_RNA (1)...(19): siRNA sense strand
guguaaugaccaugaaguu

SEQ ID NO: 2451349 - RNA, 19 nt, Homo sapiens
  misc_RNA (1)...(19): siRNA sense strand
caaaacacuuucugggcua

SEQ ID NO: 2451350 - RNA, 19 nt, Homo sapiens
  misc_RNA (1)...(19): siRNA sense strand
ugccaaagaaugugugaca

SEQ ID NO: 2451351 - RNA, 19 nt, Homo sapiens
  misc_RNA (1)...(19): siRNA sense strand
uggcaaagugcaacguauu

SEQ ID NO: 2451352 - RNA, 19 nt, Homo sapiens
  misc_RNA (1)...(19): siRNA sense strand
uggccaagcaucuaagaau

SEQ ID NO: 2451353 - RNA, 19 nt, Homo sapiens
  misc_RNA (1)...(19): siRNA sense strand
agauagugccaaagaaugu

SEQ ID NO: 2451354 - RNA, 19 nt, Homo sapiens
  misc_RNA (1)...(19): siRNA sense strand
aagacgagauagaggaaag

SEQ ID NO: 2451355 - RNA, 19 nt, Homo sapiens
  misc_RNA (1)...(19): siRNA sense strand
gggaagacgagauagagga

SEQ ID NO: 2451356 - RNA, 19 nt, Homo sapiens
  misc_RNA (1)...(19): siRNA sense strand
auagauagugccaaagaau

SEQ ID NO: 2451357 - RNA, 19 nt, Homo sapiens
  misc_RNA (1)...(19): siRNA sense strand
ugcaaaaccuucagccaaa

SEQ ID NO: 2451358 - RNA, 19 nt, Homo sapiens
  misc_RNA (1)...(19): siRNA sense strand
guggauuacaucaacuaaa

SEQ ID NO: 2451359 - RNA, 19 nt, Homo sapiens
  misc_RNA (1)...(19): siRNA sense strand
ggacaauaugcuaugugau

SEQ ID NO: 2451360 - RNA, 19 nt, Homo sapiens
  misc_RNA (1)...(19): siRNA sense strand
gagaaaugggauacaagca

SEQ ID NO: 2451361 - RNA, 19 nt, Homo sapiens
  misc_RNA (1)...(19): siRNA sense strand
aggaaaucccucugguuca

SEQ ID NO: 2451362 - RNA, 19 nt, Homo sapiens
  misc_RNA (1)...(19): siRNA sense strand
uguucugcuuauauggaaa

SEQ ID NO: 2451363 - RNA, 19 nt, Homo sapiens
  misc_RNA (1)...(19): siRNA sense strand
ucguggaagcgcuggaaaa

SEQ ID NO: 2451364 - RNA, 19 nt, Homo sapiens
  misc_RNA (1)...(19): siRNA sense strand
caauaugcuaugugaugau

SEQ ID NO: 2451365 - RNA, 19 nt, Homo sapiens
  misc_RNA (1)...(19): siRNA sense strand
gggagacguacgaggagga

SEQ ID NO: 2451366 - RNA, 19 nt, Homo sapiens
  misc_RNA (1)...(19): siRNA sense strand
uagaaagagcugucacaca

SEQ ID NO: 2451367 - RNA, 19 nt, Homo sapiens
  misc_RNA (1)...(19): siRNA sense strand
guucgaggacucugugaau

SEQ ID NO: 2451368 - RNA, 19 nt, Homo sapiens
  misc_RNA (1)...(19): siRNA sense strand
caacaaaguucuucugcuc

SEQ ID NO: 2451369 - RNA, 19 nt, Homo sapiens
  misc_RNA (1)...(19): siRNA sense strand
acuaaaccauauuugggaa

SEQ ID NO: 2451370 - RNA, 19 nt, Homo sapiens
  misc_RNA (1)...(19): siRNA sense strand
gaucacucggccaggaaau

SEQ ID NO: 2451371 - RNA, 19 nt, Homo sapiens
  misc_RNA (1)...(19): siRNA sense strand
gacaaugacaguugggacu

SEQ ID NO: 2451372 - RNA, 19 nt, Homo sapiens
  misc_RNA (1)...(19): siRNA sense strand
cagaaugggcucucgagau

SEQ ID NO: 2451373 - RNA, 19 nt, Homo sapiens
  misc_RNA (1)...(19): siRNA sense strand
auggaaauauugagaaggu

SEQ ID NO: 2451374 - RNA, 19 nt, Homo sapiens
  misc_RNA (1)...(19): siRNA sense strand
uggaaauauugagaaggua

SEQ ID NO: 2451375 - RNA, 19 nt, Homo sapiens
  misc_RNA (1)...(19): siRNA sense strand
aguacgagagccaggccaa

SEQ ID NO: 2451376 - RNA, 19 nt, Homo sapiens
  misc_RNA (1)...(19): siRNA sense strand
aguuguuccaagucaaaua

SEQ ID NO: 2451377 - RNA, 19 nt, Homo sapiens
  misc_RNA (1)...(19): siRNA sense strand
aagcagaccucguggaagc

SEQ ID NO: 2451378 - RNA, 19 nt, Homo sapiens
  misc_RNA (1)...(19): siRNA sense strand
acaagcaaugguugaguuu

SEQ ID NO: 2451379 - RNA, 19 nt, Homo sapiens
  misc_RNA (1)...(19): siRNA sense strand
aagaagacagauagagcaa

SEQ ID NO: 2451380 - RNA, 19 nt, Homo sapiens
  misc_RNA (1)...(19): siRNA sense strand
gcuucaacgucuucgguga

SEQ ID NO: 2451381 - RNA, 19 nt, Homo sapiens
  misc_RNA (1)...(19): siRNA sense strand
cagaaaagaaggagacgau

SEQ ID NO: 2451382 - RNA, 19 nt, Homo sapiens
  misc_RNA (1)...(19): siRNA sense strand
agauaagaagacagauaga

SEQ ID NO: 2451383 - RNA, 19 nt, Homo sapiens
  misc_RNA (1)...(19): siRNA sense strand
augaagugguuaauggaga

SEQ ID NO: 2451384 - RNA, 19 nt, Homo sapiens
  misc_RNA (1)...(19): siRNA sense strand
gguauguggaacugaccaa

SEQ ID NO: 2451385 - RNA, 19 nt, Homo sapiens
  misc_RNA (1)...(19): siRNA sense strand
cagugauuggagaaaguua

SEQ ID NO: 2451386 - RNA, 19 nt, Homo sapiens
  misc_RNA (1)...(19): siRNA sense strand
caguaauuccguuguaaaa

SEQ ID NO: 2451387 - RNA, 19 nt, Homo sapiens
  misc_RNA (1)...(19): siRNA sense strand
uuauaaagacuacagggaa

SEQ ID NO: 2451388 - RNA, 19 nt, Homo sapiens
  misc_RNA (1)...(19): siRNA sense strand
ggagaaaguuaccggcuuc

SEQ ID NO: 2451389 - RNA, 19 nt, Homo sapiens
  misc_RNA (1)...(19): siRNA sense strand
cauaugaauucaaagcuga

SEQ ID NO: 2451390 - RNA, 19 nt, Homo sapiens
  misc_RNA (1)...(19): siRNA sense strand
aauucaaagcugaugcauu

SEQ ID NO: 2451391 - RNA, 19 nt, Homo sapiens
  misc_RNA (1)...(19): siRNA sense strand
uggagaaaguuaccggcuu

SEQ ID NO: 2451392 - RNA, 19 nt, Homo sapiens
  misc_RNA (1)...(19): siRNA sense strand
acagauagagcaagggaug

SEQ ID NO: 2451393 - RNA, 19 nt, Homo sapiens
  misc_RNA (1)...(19): siRNA sense strand
agugguuaauggagaaaau

SEQ ID NO: 2451394 - RNA, 19 nt, Homo sapiens
  misc_RNA (1)...(19): siRNA sense strand
gcauaugaauucaaagcug

SEQ ID NO: 2451395 - RNA, 19 nt, Homo sapiens
  misc_RNA (1)...(19): siRNA sense strand
ggacaaagucaauugcaga

SEQ ID NO: 2451396 - RNA, 19 nt, Homo sapiens
  misc_RNA (1)...(19): siRNA sense strand
agaaggugcuggaggcgaa

SEQ ID NO: 2451397 - RNA, 19 nt, Homo sapiens
  misc_RNA (1)...(19): siRNA sense strand
agucaauugcagagcagaa

SEQ ID NO: 2451398 - RNA, 19 nt, Homo sapiens
  misc_RNA (1)...(19): siRNA sense strand
gguuuaaagcccaugguca

SEQ ID NO: 2451399 - RNA, 19 nt, Homo sapiens
  misc_RNA (1)...(19): siRNA sense strand
gggaugaaucucugcccua

SEQ ID NO: 2451400 - RNA, 19 nt, Homo sapiens
  misc_RNA (1)...(19): siRNA sense strand
ugucaucuuuggaggucaa

SEQ ID NO: 2451401 - RNA, 19 nt, Homo sapiens
  misc_RNA (1)...(19): siRNA sense strand
aggucaaguuaucagaaau

SEQ ID NO: 2451402 - RNA, 19 nt, Homo sapiens
  misc_RNA (1)...(19): siRNA sense strand
caucuaugggccuggagaa

SEQ ID NO: 2451403 - RNA, 19 nt, Homo sapiens
  misc_RNA (1)...(19): siRNA sense strand
ccugucugacguagagaaa

SEQ ID NO: 2451404 - RNA, 19 nt, Homo sapiens
  misc_RNA (1)...(19): siRNA sense strand
ugguugagggccugggcua

SEQ ID NO: 2451405 - RNA, 19 nt, Homo sapiens
  misc_RNA (1)...(19): siRNA sense strand
guuuauacaaggagacauc

SEQ ID NO: 2451406 - RNA, 19 nt, Homo sapiens
  misc_RNA (1)...(19): siRNA sense strand
auggcagacccgugaacaa

SEQ ID NO: 2451407 - RNA, 19 nt, Homo sapiens
  misc_RNA (1)...(19): siRNA sense strand
cuuagagaaagccaagaaa

SEQ ID NO: 2451408 - RNA, 19 nt, Homo sapiens
  misc_RNA (1)...(19): siRNA sense strand
ucgagaagggucuguucaa

SEQ ID NO: 2451409 - RNA, 19 nt, Homo sapiens
  misc_RNA (1)...(19): siRNA sense strand
ccuccugauuauagcaguu

SEQ ID NO: 2451410 - RNA, 19 nt, Homo sapiens
  misc_RNA (1)...(19): siRNA sense strand
ccugaagcccagagggaga

SEQ ID NO: 2451411 - RNA, 19 nt, Homo sapiens
  misc_RNA (1)...(19): siRNA sense strand
cagcagaggaugaacccaa

SEQ ID NO: 2451412 - RNA, 19 nt, Homo sapiens
  misc_RNA (1)...(19): siRNA sense strand
aggaaguaucauagcguga

SEQ ID NO: 2451413 - RNA, 19 nt, Homo sapiens
  misc_RNA (1)...(19): siRNA sense strand
cugcaguaauuguggaaac

SEQ ID NO: 2451414 - RNA, 19 nt, Homo sapiens
  misc_RNA (1)...(19): siRNA sense strand
agccagaugaagaguuuaa

SEQ ID NO: 2451415 - RNA, 19 nt, Homo sapiens
  misc_RNA (1)...(19): siRNA sense strand
ggaugaacccaaagcagga

SEQ ID NO: 2451416 - RNA, 19 nt, Homo sapiens
  misc_RNA (1)...(19): siRNA sense strand
gugucugaguacagggcau

SEQ ID NO: 2451417 - RNA, 19 nt, Homo sapiens
  misc_RNA (1)...(19): siRNA sense strand
aagaagaggcggagcugca

SEQ ID NO: 2451418 - RNA, 19 nt, Homo sapiens
  misc_RNA (1)...(19): siRNA sense strand
ccaccaacaacuucgggaa

SEQ ID NO: 2451419 - RNA, 19 nt, Homo sapiens
  misc_RNA (1)...(19): siRNA sense strand
aguuuaaagaugcgauuga

SEQ ID NO: 2451420 - RNA, 19 nt, Homo sapiens
  misc_RNA (1)...(19): siRNA sense strand
aggccguggcugaggugaa

SEQ ID NO: 2451421 - RNA, 19 nt, Homo sapiens
  misc_RNA (1)...(19): siRNA sense strand
gugcugaagaagaggcgga

SEQ ID NO: 2451422 - RNA, 19 nt, Homo sapiens
  misc_RNA (1)...(19): siRNA sense strand
aaggauggucugauggaca

SEQ ID NO: 2451423 - RNA, 19 nt, Homo sapiens
  misc_RNA (1)...(19): siRNA sense strand
aggacagggaggagcguga

SEQ ID NO: 2451424 - RNA, 19 nt, Homo sapiens
  misc_RNA (1)...(19): siRNA sense strand
cauccauccaggagcgcaa

SEQ ID NO: 2451425 - RNA, 19 nt, Homo sapiens
  misc_RNA (1)...(19): siRNA sense strand
ccuacaauaaugugcucaa

SEQ ID NO: 2451426 - RNA, 19 nt, Homo sapiens
  misc_RNA (1)...(19): siRNA sense strand
gguccuacgcugugcuaca

SEQ ID NO: 2451427 - RNA, 19 nt, Homo sapiens
  misc_RNA (1)...(19): siRNA sense strand
gcuaacaucugaagagcca

SEQ ID NO: 2451428 - RNA, 19 nt, Homo sapiens
  misc_RNA (1)...(19): siRNA sense strand
agucaaagauguagaggag

SEQ ID NO: 2451429 - RNA, 19 nt, Homo sapiens
  misc_RNA (1)...(19): siRNA sense strand
cuucucagaccgagguaaa

SEQ ID NO: 2451430 - RNA, 19 nt, Homo sapiens
  misc_RNA (1)...(19): siRNA sense strand
gguauaauuccauuggcaa

SEQ ID NO: 2451431 - RNA, 19 nt, Homo sapiens
  misc_RNA (1)...(19): siRNA sense strand
cuaucauggaggagauuau

SEQ ID NO: 2451432 - RNA, 19 nt, Homo sapiens
  misc_RNA (1)...(19): siRNA sense strand
ucaaagauguagaggagac

SEQ ID NO: 2451433 - RNA, 19 nt, Homo sapiens
  misc_RNA (1)...(19): siRNA sense strand
gaagaggaugagaaggaga

SEQ ID NO: 2451434 - RNA, 19 nt, Homo sapiens
  misc_RNA (1)...(19): siRNA sense strand
cagcagugacacaugacaa

SEQ ID NO: 2451435 - RNA, 19 nt, Homo sapiens
  misc_RNA (1)...(19): siRNA sense strand
gaaggagagaggaggagga

SEQ ID NO: 2451436 - RNA, 19 nt, Homo sapiens
  misc_RNA (1)...(19): siRNA sense strand
ccuggaagccacagagcca

SEQ ID NO: 2451437 - RNA, 19 nt, Homo sapiens
  misc_RNA (1)...(19): siRNA sense strand
cagaauuuugugaggcaua

SEQ ID NO: 2451438 - RNA, 19 nt, Homo sapiens
  misc_RNA (1)...(19): siRNA sense strand
ucauagucaaggaagggaa

SEQ ID NO: 2451439 - RNA, 19 nt, Homo sapiens
  misc_RNA (1)...(19): siRNA sense strand
ugagaaggagagaggagga

SEQ ID NO: 2451440 - RNA, 19 nt, Homo sapiens
  misc_RNA (1)...(19): siRNA sense strand
aagauguagaggagacaga

SEQ ID NO: 2451441 - RNA, 19 nt, Homo sapiens
  misc_RNA (1)...(19): siRNA sense strand
ugguugggcuggaggagca

SEQ ID NO: 2451442 - RNA, 19 nt, Homo sapiens
  misc_RNA (1)...(19): siRNA sense strand
ggaggaggaaaauggcaaa

SEQ ID NO: 2451443 - RNA, 19 nt, Homo sapiens
  misc_RNA (1)...(19): siRNA sense strand
cugaacaucaccaagguau

SEQ ID NO: 2451444 - RNA, 19 nt, Homo sapiens
  misc_RNA (1)...(19): siRNA sense strand
acgagcaaccucagcaaau

SEQ ID NO: 2451445 - RNA, 19 nt, Homo sapiens
  misc_RNA (1)...(19): siRNA sense strand
cagaacugucggcggaaca

SEQ ID NO: 2451446 - RNA, 19 nt, Homo sapiens
  misc_RNA (1)...(19): siRNA sense strand
gagaagcugcagaaggcau

SEQ ID NO: 2451447 - RNA, 19 nt, Homo sapiens
  misc_RNA (1)...(19): siRNA sense strand
ccacccagaaauugagaaa

SEQ ID NO: 2451448 - RNA, 19 nt, Homo sapiens
  misc_RNA (1)...(19): siRNA sense strand
agaauacacucaagggaga

SEQ ID NO: 2451449 - RNA, 19 nt, Homo sapiens
  misc_RNA (1)...(19): siRNA sense strand
ggguguagcuuguguggga

SEQ ID NO: 2451450 - RNA, 19 nt, Homo sapiens
  misc_RNA (1)...(19): siRNA sense strand
cugugaugagugugagaaa

SEQ ID NO: 2451451 - RNA, 19 nt, Homo sapiens
  misc_RNA (1)...(19): siRNA sense strand
augugauguuggagaacua

SEQ ID NO: 2451452 - RNA, 19 nt, Homo sapiens
  misc_RNA (1)...(19): siRNA sense strand
acucauuagacaucagaaa

SEQ ID NO: 2451453 - RNA, 19 nt, Homo sapiens
  misc_RNA (1)...(19): siRNA sense strand
ggacacuagaagaugaaau

SEQ ID NO: 2451454 - RNA, 19 nt, Homo sapiens
  misc_RNA (1)...(19): siRNA sense strand
cuuaaguccuagugaacau

SEQ ID NO: 2451455 - RNA, 19 nt, Homo sapiens
  misc_RNA (1)...(19): siRNA sense strand
augcacugacugugggaaa

SEQ ID NO: 2451456 - RNA, 19 nt, Homo sapiens
  misc_RNA (1)...(19): siRNA sense strand
gcauaagagaauucauaca

SEQ ID NO: 2451457 - RNA, 19 nt, Homo sapiens
  misc_RNA (1)...(19): siRNA sense strand
guguguagcuuguguggga

SEQ ID NO: 2451458 - RNA, 19 nt, Homo sapiens
  misc_RNA (1)...(19): siRNA sense strand
aacucacacuggagagaaa

SEQ ID NO: 2451459 - RNA, 19 nt, Homo sapiens
  misc_RNA (1)...(19): siRNA sense strand
cugcugaguuuaauggaga

SEQ ID NO: 2451460 - RNA, 19 nt, Homo sapiens
  misc_RNA (1)...(19): siRNA sense strand
uuguagcacaucagagaua

SEQ ID NO: 2451461 - RNA, 19 nt, Homo sapiens
  misc_RNA (1)...(19): siRNA sense strand
gugaacaugugcaggggaa

SEQ ID NO: 2451462 - RNA, 19 nt, Homo sapiens
  misc_RNA (1)...(19): siRNA sense strand
caacauagagaaagcccau

SEQ ID NO: 2451463 - RNA, 19 nt, Homo sapiens
  misc_RNA (1)...(19): siRNA sense strand
guguagcuugugugggaaa

SEQ ID NO: 2451464 - RNA, 19 nt, Homo sapiens
  misc_RNA (1)...(19): siRNA sense strand
guguagcuugugugggaaa

SEQ ID NO: 2451465 - RNA, 19 nt, Homo sapiens
  misc_RNA (1)...(19): siRNA sense strand
cagagauaucauacaggaa

SEQ ID NO: 2451466 - RNA, 19 nt, Homo sapiens
  misc_RNA (1)...(19): siRNA sense strand
acagcaagucacagcuuaa

SEQ ID NO: 2451467 - RNA, 19 nt, Homo sapiens
  misc_RNA (1)...(19): siRNA sense strand
augcagugaauguggaaaa

SEQ ID NO: 2451468 - RNA, 19 nt, Homo sapiens
  misc_RNA (1)...(19): siRNA sense strand
ggggaaaagcccuguuaau

SEQ ID NO: 2451469 - RNA, 19 nt, Homo sapiens
  misc_RNA (1)...(19): siRNA sense strand
cgagagagcucacagagga

SEQ ID NO: 2451470 - RNA, 19 nt, Homo sapiens
  misc_RNA (1)...(19): siRNA sense strand
aggagaaccacuauggaca

SEQ ID NO: 2451471 - RNA, 19 nt, Homo sapiens
  misc_RNA (1)...(19): siRNA sense strand
acacggaagaacuuugaaa

SEQ ID NO: 2451472 - RNA, 19 nt, Homo sapiens
  misc_RNA (1)...(19): siRNA sense strand
agagaauucauacaggaaa

SEQ ID NO: 2451473 - RNA, 19 nt, Homo sapiens
  misc_RNA (1)...(19): siRNA sense strand
uacaagaaguacaggcuca

SEQ ID NO: 2451474 - RNA, 19 nt, Homo sapiens
  misc_RNA (1)...(19): siRNA sense strand
uacaagagguacaggcuca

SEQ ID NO: 2451475 - RNA, 19 nt, Homo sapiens
  misc_RNA (1)...(19): siRNA sense strand
gagagaaaccuuauggaug

SEQ ID NO: 2451476 - RNA, 19 nt, Homo sapiens
  misc_RNA (1)...(19): siRNA sense strand
aauucacucaggagagaaa

SEQ ID NO: 2451477 - RNA, 19 nt, Homo sapiens
  misc_RNA (1)...(19): siRNA sense strand
gaacaugugcaggggaaaa

SEQ ID NO: 2451478 - RNA, 19 nt, Homo sapiens
  misc_RNA (1)...(19): siRNA sense strand
aagagaauucauacaggaa

SEQ ID NO: 2451479 - RNA, 19 nt, Homo sapiens
  misc_RNA (1)...(19): siRNA sense strand
ccuuguagcacaucagaga

SEQ ID NO: 2451480 - RNA, 19 nt, Homo sapiens
  misc_RNA (1)...(19): siRNA sense strand
agucacaauuccuuaaaca

SEQ ID NO: 2451481 - RNA, 19 nt, Homo sapiens
  misc_RNA (1)...(19): siRNA sense strand
aggauguggcuguggacuu

SEQ ID NO: 2451482 - RNA, 19 nt, Homo sapiens
  misc_RNA (1)...(19): siRNA sense strand
agcucacagaggagagaaa

SEQ ID NO: 2451483 - RNA, 19 nt, Homo sapiens
  misc_RNA (1)...(19): siRNA sense strand
cccuauaaaugcagugacu

SEQ ID NO: 2451484 - RNA, 19 nt, Homo sapiens
  misc_RNA (1)...(19): siRNA sense strand
caaaggauucacacgggaa

SEQ ID NO: 2451485 - RNA, 19 nt, Homo sapiens
  misc_RNA (1)...(19): siRNA sense strand
uuacaaagacaaugcucau

SEQ ID NO: 2451486 - RNA, 19 nt, Homo sapiens
  misc_RNA (1)...(19): siRNA sense strand
uguuggagaacuacagcaa

SEQ ID NO: 2451487 - RNA, 19 nt, Homo sapiens
  misc_RNA (1)...(19): siRNA sense strand
aaccagagcagaagauaca

SEQ ID NO: 2451488 - RNA, 19 nt, Homo sapiens
  misc_RNA (1)...(19): siRNA sense strand
aacaaaugccuacggaaau

SEQ ID NO: 2451489 - RNA, 19 nt, Homo sapiens
  misc_RNA (1)...(19): siRNA sense strand
gagauaucauacaggaaag

SEQ ID NO: 2451490 - RNA, 19 nt, Homo sapiens
  misc_RNA (1)...(19): siRNA sense strand
uggcaaugguggcagggca

SEQ ID NO: 2451491 - RNA, 19 nt, Homo sapiens
  misc_RNA (1)...(19): siRNA sense strand
acacgagagagcucacaaa

SEQ ID NO: 2451492 - RNA, 19 nt, Homo sapiens
  misc_RNA (1)...(19): siRNA sense strand
agcagaagauacaacagaa

SEQ ID NO: 2451493 - RNA, 19 nt, Homo sapiens
  misc_RNA (1)...(19): siRNA sense strand
ggcaaggccuucagccaga

SEQ ID NO: 2451494 - RNA, 19 nt, Homo sapiens
  misc_RNA (1)...(19): siRNA sense strand
acauaagagaauacacuca

SEQ ID NO: 2451495 - RNA, 19 nt, Homo sapiens
  misc_RNA (1)...(19): siRNA sense strand
aacacacaacauagagaaa

SEQ ID NO: 2451496 - RNA, 19 nt, Homo sapiens
  misc_RNA (1)...(19): siRNA sense strand
gugggaaagccuucuacaa

SEQ ID NO: 2451497 - RNA, 19 nt, Homo sapiens
  misc_RNA (1)...(19): siRNA sense strand
gugggaaagccuucuacaa

SEQ ID NO: 2451498 - RNA, 19 nt, Homo sapiens
  misc_RNA (1)...(19): siRNA sense strand
cgggaugugauguuggaga

SEQ ID NO: 2451499 - RNA, 19 nt, Homo sapiens
  misc_RNA (1)...(19): siRNA sense strand
agcucacaaaggagagaaa

SEQ ID NO: 2451500 - RNA, 19 nt, Homo sapiens
  misc_RNA (1)...(19): siRNA sense strand
cagaaauugagaaagcuga

SEQ ID NO: 2451501 - RNA, 19 nt, Homo sapiens
  misc_RNA (1)...(19): siRNA sense strand
uuaaccaaccagagcagaa

SEQ ID NO: 2451502 - RNA, 19 nt, Homo sapiens
  misc_RNA (1)...(19): siRNA sense strand
gcaauuauuuccaggagca

SEQ ID NO: 2451503 - RNA, 19 nt, Homo sapiens
  misc_RNA (1)...(19): siRNA sense strand
gaacaaagccgaugacagc

SEQ ID NO: 2451504 - RNA, 19 nt, Homo sapiens
  misc_RNA (1)...(19): siRNA sense strand
cgagagaugaccugagaac

SEQ ID NO: 2451505 - RNA, 19 nt, Homo sapiens
  misc_RNA (1)...(19): siRNA sense strand
ggaacaaagccgaugacag

SEQ ID NO: 2451506 - RNA, 19 nt, Homo sapiens
  misc_RNA (1)...(19): siRNA sense strand
aagcagauauucagugcca

SEQ ID NO: 2451507 - RNA, 19 nt, Homo sapiens
  misc_RNA (1)...(19): siRNA sense strand
cugagaaccuugugcucca

SEQ ID NO: 2451508 - RNA, 19 nt, Homo sapiens
  misc_RNA (1)...(19): siRNA sense strand
agagaugaccugagaaccu

SEQ ID NO: 2451509 - RNA, 19 nt, Homo sapiens
  misc_RNA (1)...(19): siRNA sense strand
ccaaggagcuggagcguga

SEQ ID NO: 2451510 - RNA, 19 nt, Homo sapiens
  misc_RNA (1)...(19): siRNA sense strand
aggugaaggccgagaguga

SEQ ID NO: 2451511 - RNA, 19 nt, Homo sapiens
  misc_RNA (1)...(19): siRNA sense strand
gggagaaggugaaggccga

SEQ ID NO: 2451512 - RNA, 19 nt, Homo sapiens
  misc_RNA (1)...(19): siRNA sense strand
agguugagcuucagcgaca

SEQ ID NO: 2451513 - RNA, 19 nt, Homo sapiens
  misc_RNA (1)...(19): siRNA sense strand
gcaccuacgacaaggccua

SEQ ID NO: 2451514 - RNA, 19 nt, Homo sapiens
  misc_RNA (1)...(19): siRNA sense strand
gccaaaagcuccaaggaca

SEQ ID NO: 2451515 - RNA, 19 nt, Homo sapiens
  misc_RNA (1)...(19): siRNA sense strand
gguaaugcccgaaggagca

SEQ ID NO: 2451516 - RNA, 19 nt, Homo sapiens
  misc_RNA (1)...(19): siRNA sense strand
ggacaagagcagcaccaga

SEQ ID NO: 2451517 - RNA, 19 nt, Homo sapiens
  misc_RNA (1)...(19): siRNA sense strand
agaccaagcuggaaagcac

SEQ ID NO: 2451518 - RNA, 19 nt, Homo sapiens
  misc_RNA (1)...(19): siRNA sense strand
ugaaagagaccaagcugga

SEQ ID NO: 2451519 - RNA, 19 nt, Homo sapiens
  misc_RNA (1)...(19): siRNA sense strand
uccugaaccuggaaggcaa

SEQ ID NO: 2451520 - RNA, 19 nt, Homo sapiens
  misc_RNA (1)...(19): siRNA sense strand
gagcuacaccggaggcuga

SEQ ID NO: 2451521 - RNA, 19 nt, Homo sapiens
  misc_RNA (1)...(19): siRNA sense strand
ccaaggacaccucgcggaa

SEQ ID NO: 2451522 - RNA, 19 nt, Homo sapiens
  misc_RNA (1)...(19): siRNA sense strand
ccaacaaggagagcagcaa

SEQ ID NO: 2451523 - RNA, 19 nt, Homo sapiens
  misc_RNA (1)...(19): siRNA sense strand
cggccaaggacaagagcag

SEQ ID NO: 2451524 - RNA, 19 nt, Homo sapiens
  misc_RNA (1)...(19): siRNA sense strand
cgacaaggccuacacggau

SEQ ID NO: 2451525 - RNA, 19 nt, Homo sapiens
  misc_RNA (1)...(19): siRNA sense strand
aaguagaggagucggggua

SEQ ID NO: 2451526 - RNA, 19 nt, Homo sapiens
  misc_RNA (1)...(19): siRNA sense strand
gcucaguauucacagggaa

SEQ ID NO: 2451527 - RNA, 19 nt, Homo sapiens
  misc_RNA (1)...(19): siRNA sense strand
agggaaagcugugagggaa

SEQ ID NO: 2451528 - RNA, 19 nt, Homo sapiens
  misc_RNA (1)...(19): siRNA sense strand
gggaaagcugugagggaag

SEQ ID NO: 2451529 - RNA, 19 nt, Homo sapiens
  misc_RNA (1)...(19): siRNA sense strand
cagggaaagcugugaggga

SEQ ID NO: 2451530 - RNA, 19 nt, Homo sapiens
  misc_RNA (1)...(19): siRNA sense strand
cucaguauucacagggaaa

SEQ ID NO: 2451531 - RNA, 19 nt, Homo sapiens
  misc_RNA (1)...(19): siRNA sense strand
auggaaaggugauggugga

SEQ ID NO: 2451532 - RNA, 19 nt, Homo sapiens
  misc_RNA (1)...(19): siRNA sense strand
cauuacacggguacagcaa

SEQ ID NO: 2451533 - RNA, 19 nt, Homo sapiens
  misc_RNA (1)...(19): siRNA sense strand
cuucaaaagcagugcaacu

SEQ ID NO: 2451534 - RNA, 19 nt, Homo sapiens
  misc_RNA (1)...(19): siRNA sense strand
gugaaagcucaguuuaaaa

SEQ ID NO: 2451535 - RNA, 19 nt, Homo sapiens
  misc_RNA (1)...(19): siRNA sense strand
agaugaacagguugacaga

SEQ ID NO: 2451536 - RNA, 19 nt, Homo sapiens
  misc_RNA (1)...(19): siRNA sense strand
gcaaagaaccaguggccaa

SEQ ID NO: 2451537 - RNA, 19 nt, Homo sapiens
  misc_RNA (1)...(19): siRNA sense strand
gggaaagagaaauuggaaa

SEQ ID NO: 2451538 - RNA, 19 nt, Homo sapiens
  misc_RNA (1)...(19): siRNA sense strand
caugaaugggaaagagaaa

SEQ ID NO: 2451539 - RNA, 19 nt, Homo sapiens
  misc_RNA (1)...(19): siRNA sense strand
ucagaaaagcagaggauaa

SEQ ID NO: 2451540 - RNA, 19 nt, Homo sapiens
  misc_RNA (1)...(19): siRNA sense strand
ggacaaaagacuugcacua

SEQ ID NO: 2451541 - RNA, 19 nt, Homo sapiens
  misc_RNA (1)...(19): siRNA sense strand
cugacaaggugcuggaaaa

SEQ ID NO: 2451542 - RNA, 19 nt, Homo sapiens
  misc_RNA (1)...(19): siRNA sense strand
augccaaacucgugccaaa

SEQ ID NO: 2451543 - RNA, 19 nt, Homo sapiens
  misc_RNA (1)...(19): siRNA sense strand
aggaggaaacagaaauaaa

SEQ ID NO: 2451544 - RNA, 19 nt, Homo sapiens
  misc_RNA (1)...(19): siRNA sense strand
caacaaauaaagcaggcaa

SEQ ID NO: 2451545 - RNA, 19 nt, Homo sapiens
  misc_RNA (1)...(19): siRNA sense strand
cgaucaagcuucaggucga

SEQ ID NO: 2451546 - RNA, 19 nt, Homo sapiens
  misc_RNA (1)...(19): siRNA sense strand
cugaagaguuugaugacga

SEQ ID NO: 2451547 - RNA, 19 nt, Homo sapiens
  misc_RNA (1)...(19): siRNA sense strand
gcaucgaaguaacgugcaa

SEQ ID NO: 2451548 - RNA, 19 nt, Homo sapiens
  misc_RNA (1)...(19): siRNA sense strand
cgucaggcaauguggagaa

SEQ ID NO: 2451549 - RNA, 19 nt, Homo sapiens
  misc_RNA (1)...(19): siRNA sense strand
caucaagauaggagaacca

SEQ ID NO: 2451550 - RNA, 19 nt, Homo sapiens
  misc_RNA (1)...(19): siRNA sense strand
ggaucaagcacaaaggcau

SEQ ID NO: 2451551 - RNA, 19 nt, Homo sapiens
  misc_RNA (1)...(19): siRNA sense strand
acgagaagauugaggugga

SEQ ID NO: 2451552 - RNA, 19 nt, Homo sapiens
  misc_RNA (1)...(19): siRNA sense strand
agaacaaagaggacaccaa

SEQ ID NO: 2451553 - RNA, 19 nt, Homo sapiens
  misc_RNA (1)...(19): siRNA sense strand
ugaaugggaaagagaaauu

SEQ ID NO: 2451554 - RNA, 19 nt, Homo sapiens
  misc_RNA (1)...(19): siRNA sense strand
gcaaaauggggcuggggaa

SEQ ID NO: 2451555 - RNA, 19 nt, Homo sapiens
  misc_RNA (1)...(19): siRNA sense strand
aagauaaccaacaggagaa

SEQ ID NO: 2451556 - RNA, 19 nt, Homo sapiens
  misc_RNA (1)...(19): siRNA sense strand
aggauaaauugaaggaaag

SEQ ID NO: 2451557 - RNA, 19 nt, Homo sapiens
  misc_RNA (1)...(19): siRNA sense strand
gaagauaaccaacaggaga

SEQ ID NO: 2451558 - RNA, 19 nt, Homo sapiens
  misc_RNA (1)...(19): siRNA sense strand
gugcaaagugugcgcaaaa

SEQ ID NO: 2451559 - RNA, 19 nt, Homo sapiens
  misc_RNA (1)...(19): siRNA sense strand
ggguggacguguugggagu

SEQ ID NO: 2451560 - RNA, 19 nt, Homo sapiens
  misc_RNA (1)...(19): siRNA sense strand
ugaggaggaaacagaaaua

SEQ ID NO: 2451561 - RNA, 19 nt, Homo sapiens
  misc_RNA (1)...(19): siRNA sense strand
uggcaauggcuuacauaau

SEQ ID NO: 2451562 - RNA, 19 nt, Homo sapiens
  misc_RNA (1)...(19): siRNA sense strand
acgauaagcugaaggcacu

SEQ ID NO: 2451563 - RNA, 19 nt, Homo sapiens
  misc_RNA (1)...(19): siRNA sense strand
gacccugaccugaaagaaa

SEQ ID NO: 2451564 - RNA, 19 nt, Homo sapiens
  misc_RNA (1)...(19): siRNA sense strand
cagaaaagcagaggauaaa

SEQ ID NO: 2451565 - RNA, 19 nt, Homo sapiens
  misc_RNA (1)...(19): siRNA sense strand
acgggaagcaaaugaagaa

SEQ ID NO: 2451566 - RNA, 19 nt, Homo sapiens
  misc_RNA (1)...(19): siRNA sense strand
auaaccaacaggagaacaa

SEQ ID NO: 2451567 - RNA, 19 nt, Homo sapiens
  misc_RNA (1)...(19): siRNA sense strand
ugagcucagccgagaaaua

SEQ ID NO: 2451568 - RNA, 19 nt, Homo sapiens
  misc_RNA (1)...(19): siRNA sense strand
acagaguccuagaugggaa

SEQ ID NO: 2451569 - RNA, 19 nt, Homo sapiens
  misc_RNA (1)...(19): siRNA sense strand
ccggauagucccagaagca

SEQ ID NO: 2451570 - RNA, 19 nt, Homo sapiens
  misc_RNA (1)...(19): siRNA sense strand
caagauaggagaaccaaaa

SEQ ID NO: 2451571 - RNA, 19 nt, Homo sapiens
  misc_RNA (1)...(19): siRNA sense strand
guacacaaguuaaaggaac

SEQ ID NO: 2451572 - RNA, 19 nt, Homo sapiens
  misc_RNA (1)...(19): siRNA sense strand
agagaauccaucagcacaa

SEQ ID NO: 2451573 - RNA, 19 nt, Homo sapiens
  misc_RNA (1)...(19): siRNA sense strand
acauaucccacgugaggaa

SEQ ID NO: 2451574 - RNA, 19 nt, Homo sapiens
  misc_RNA (1)...(19): siRNA sense strand
ccaccaaugaggaggaaac

SEQ ID NO: 2451575 - RNA, 19 nt, Homo sapiens
  misc_RNA (1)...(19): siRNA sense strand
cagccaguguccaagcaaa

SEQ ID NO: 2451576 - RNA, 19 nt, Homo sapiens
  misc_RNA (1)...(19): siRNA sense strand
caauggaaaccaagaaagu

SEQ ID NO: 2451577 - RNA, 19 nt, Homo sapiens
  misc_RNA (1)...(19): siRNA sense strand
agaagauugagguggauga

SEQ ID NO: 2451578 - RNA, 19 nt, Homo sapiens
  misc_RNA (1)...(19): siRNA sense strand
aaagcuguuaagagagaaa

SEQ ID NO: 2451579 - RNA, 19 nt, Homo sapiens
  misc_RNA (1)...(19): siRNA sense strand
auuugaagcucgcuaacaa

SEQ ID NO: 2451580 - RNA, 19 nt, Homo sapiens
  misc_RNA (1)...(19): siRNA sense strand
ccaagaacugucugcacua

SEQ ID NO: 2451581 - RNA, 19 nt, Homo sapiens
  misc_RNA (1)...(19): siRNA sense strand
gcguuaucgucaagaaugu

SEQ ID NO: 2451582 - RNA, 19 nt, Homo sapiens
  misc_RNA (1)...(19): siRNA sense strand
agaacagugaccaggguau

SEQ ID NO: 2451583 - RNA, 19 nt, Homo sapiens
  misc_RNA (1)...(19): siRNA sense strand
ccgccaagugcuaaccaaa

SEQ ID NO: 2451584 - RNA, 19 nt, Homo sapiens
  misc_RNA (1)...(19): siRNA sense strand
aguaaaugacaguccgaga

SEQ ID NO: 2451585 - RNA, 19 nt, Homo sapiens
  misc_RNA (1)...(19): siRNA sense strand
augcaucacaccagagaau

SEQ ID NO: 2451586 - RNA, 19 nt, Homo sapiens
  misc_RNA (1)...(19): siRNA sense strand
cauuaagccugcaacucaa

SEQ ID NO: 2451587 - RNA, 19 nt, Homo sapiens
  misc_RNA (1)...(19): siRNA sense strand
ggguauugccagaagugga

SEQ ID NO: 2451588 - RNA, 19 nt, Homo sapiens
  misc_RNA (1)...(19): siRNA sense strand
ggucauaucugcugccucu

SEQ ID NO: 2451589 - RNA, 19 nt, Homo sapiens
  misc_RNA (1)...(19): siRNA sense strand
agauauggucgauccuaaa

SEQ ID NO: 2451590 - RNA, 19 nt, Homo sapiens
  misc_RNA (1)...(19): siRNA sense strand
cgugauggccucugugaca

SEQ ID NO: 2451591 - RNA, 19 nt, Homo sapiens
  misc_RNA (1)...(19): siRNA sense strand
gagagaaacagaagccagu

SEQ ID NO: 2451592 - RNA, 19 nt, Homo sapiens
  misc_RNA (1)...(19): siRNA sense strand
guucugugguggaagcuuu

SEQ ID NO: 2451593 - RNA, 19 nt, Homo sapiens
  misc_RNA (1)...(19): siRNA sense strand
uggcaucaagauaggagaa

SEQ ID NO: 2451594 - RNA, 19 nt, Homo sapiens
  misc_RNA (1)...(19): siRNA sense strand
ugaggaaggagcacgggaa

SEQ ID NO: 2451595 - RNA, 19 nt, Homo sapiens
  misc_RNA (1)...(19): siRNA sense strand
aaugaggaggaaacagaaa

SEQ ID NO: 2451596 - RNA, 19 nt, Homo sapiens
  misc_RNA (1)...(19): siRNA sense strand
aagcagaggauaaauugaa

SEQ ID NO: 2451597 - RNA, 19 nt, Homo sapiens
  misc_RNA (1)...(19): siRNA sense strand
ugguggaagcuuucaacaa

SEQ ID NO: 2451598 - RNA, 19 nt, Homo sapiens
  misc_RNA (1)...(19): siRNA sense strand
guuucuccgucaagcaaua

SEQ ID NO: 2451599 - RNA, 19 nt, Homo sapiens
  misc_RNA (1)...(19): siRNA sense strand
ugaccaggguauugccaga

SEQ ID NO: 2451600 - RNA, 19 nt, Homo sapiens
  misc_RNA (1)...(19): siRNA sense strand
aggagaaaggggugguaau

SEQ ID NO: 2451601 - RNA, 19 nt, Homo sapiens
  misc_RNA (1)...(19): siRNA sense strand
caggagaggaagagggaau

SEQ ID NO: 2451602 - RNA, 19 nt, Homo sapiens
  misc_RNA (1)...(19): siRNA sense strand
ggagaaagaagaaacgcua

SEQ ID NO: 2451603 - RNA, 19 nt, Homo sapiens
  misc_RNA (1)...(19): siRNA sense strand
gccaaagagaagugggauu

SEQ ID NO: 2451604 - RNA, 19 nt, Homo sapiens
  misc_RNA (1)...(19): siRNA sense strand
cuauaaaagaagagcgcaa

SEQ ID NO: 2451605 - RNA, 19 nt, Homo sapiens
  misc_RNA (1)...(19): siRNA sense strand
aggaagagggaauggauau

SEQ ID NO: 2451606 - RNA, 19 nt, Homo sapiens
  misc_RNA (1)...(19): siRNA sense strand
ugaagaaaggcgagcagaa

SEQ ID NO: 2451607 - RNA, 19 nt, Homo sapiens
  misc_RNA (1)...(19): siRNA sense strand
agaagaauguugagggucu

SEQ ID NO: 2451608 - RNA, 19 nt, Homo sapiens
  misc_RNA (1)...(19): siRNA sense strand
caacaggagagaggagaaa

SEQ ID NO: 2451609 - RNA, 19 nt, Homo sapiens
  misc_RNA (1)...(19): siRNA sense strand
gauuaauggcagugaucuu

SEQ ID NO: 2451610 - RNA, 19 nt, Homo sapiens
  misc_RNA (1)...(19): siRNA sense strand
gagaagugggauugugaau

SEQ ID NO: 2451611 - RNA, 19 nt, Homo sapiens
  misc_RNA (1)...(19): siRNA sense strand
aacgaagaguggagaagaa

SEQ ID NO: 2451612 - RNA, 19 nt, Homo sapiens
  misc_RNA (1)...(19): siRNA sense strand
gaugaugagaagggagaua

SEQ ID NO: 2451613 - RNA, 19 nt, Homo sapiens
  misc_RNA (1)...(19): siRNA sense strand
cugaaagaauacagaugau

SEQ ID NO: 2451614 - RNA, 19 nt, Homo sapiens
  misc_RNA (1)...(19): siRNA sense strand
uaaaagagcaagaaagcaa

SEQ ID NO: 2451615 - RNA, 19 nt, Homo sapiens
  misc_RNA (1)...(19): siRNA sense strand
ccuuuauagagaagaagaa

SEQ ID NO: 2451616 - RNA, 19 nt, Homo sapiens
  misc_RNA (1)...(19): siRNA sense strand
cuauucaaguggacagcaa

SEQ ID NO: 2451617 - RNA, 19 nt, Homo sapiens
  misc_RNA (1)...(19): siRNA sense strand
agucugaggaggaagaaau

SEQ ID NO: 2451618 - RNA, 19 nt, Homo sapiens
  misc_RNA (1)...(19): siRNA sense strand
uugaagaagccaaagagaa

SEQ ID NO: 2451619 - RNA, 19 nt, Homo sapiens
  misc_RNA (1)...(19): siRNA sense strand
aggcaacaggagaggaaga

SEQ ID NO: 2451620 - RNA, 19 nt, Homo sapiens
  misc_RNA (1)...(19): siRNA sense strand
aagaaaggacucacagcaa

SEQ ID NO: 2451621 - RNA, 19 nt, Homo sapiens
  misc_RNA (1)...(19): siRNA sense strand
uguugagggucuaaagcua

SEQ ID NO: 2451622 - RNA, 19 nt, Homo sapiens
  misc_RNA (1)...(19): siRNA sense strand
ccaauaaggcaacaggaga

SEQ ID NO: 2451623 - RNA, 19 nt, Homo sapiens
  misc_RNA (1)...(19): siRNA sense strand
aaauuggagcucuggauaa

SEQ ID NO: 2451624 - RNA, 19 nt, Homo sapiens
  misc_RNA (1)...(19): siRNA sense strand
acuauaaagagaaggcaga

SEQ ID NO: 2451625 - RNA, 19 nt, Homo sapiens
  misc_RNA (1)...(19): siRNA sense strand
acaacaggagagaggagaa

SEQ ID NO: 2451626 - RNA, 19 nt, Homo sapiens
  misc_RNA (1)...(19): siRNA sense strand
augagaagggagauagcaa

SEQ ID NO: 2451627 - RNA, 19 nt, Homo sapiens
  misc_RNA (1)...(19): siRNA sense strand
gaagaagaauguugagggu

SEQ ID NO: 2451628 - RNA, 19 nt, Homo sapiens
  misc_RNA (1)...(19): siRNA sense strand
acaggagagaggagaaaga

SEQ ID NO: 2451629 - RNA, 19 nt, Homo sapiens
  misc_RNA (1)...(19): siRNA sense strand
cuuugaugauccagauaau

SEQ ID NO: 2451630 - RNA, 19 nt, Homo sapiens
  misc_RNA (1)...(19): siRNA sense strand
agaaaagaaggcaagaaaa

SEQ ID NO: 2451631 - RNA, 19 nt, Homo sapiens
  misc_RNA (1)...(19): siRNA sense strand
auaaagagaaggcagagaa

SEQ ID NO: 2451632 - RNA, 19 nt, Homo sapiens
  misc_RNA (1)...(19): siRNA sense strand
augagagguuugagaaguu

SEQ ID NO: 2451633 - RNA, 19 nt, Homo sapiens
  misc_RNA (1)...(19): siRNA sense strand
ggcagagaauuguguaaaa

SEQ ID NO: 2451634 - RNA, 19 nt, Homo sapiens
  misc_RNA (1)...(19): siRNA sense strand
acagcaaagcaaacugaaa

SEQ ID NO: 2451635 - RNA, 19 nt, Homo sapiens
  misc_RNA (1)...(19): siRNA sense strand
agcaagaaagcaagcuaua

SEQ ID NO: 2451636 - RNA, 19 nt, Homo sapiens
  misc_RNA (1)...(19): siRNA sense strand
aagaagaaacgcuaguaau

SEQ ID NO: 2451637 - RNA, 19 nt, Homo sapiens
  misc_RNA (1)...(19): siRNA sense strand
aagagaaggcagagaauug

SEQ ID NO: 2451638 - RNA, 19 nt, Homo sapiens
  misc_RNA (1)...(19): siRNA sense strand
uggaugaugagaagggaga

SEQ ID NO: 2451639 - RNA, 19 nt, Homo sapiens
  misc_RNA (1)...(19): siRNA sense strand
uaaagagaaggcagagaau

SEQ ID NO: 2451640 - RNA, 19 nt, Homo sapiens
  misc_RNA (1)...(19): siRNA sense strand
agaaugaagaugacagcga

SEQ ID NO: 2451641 - RNA, 19 nt, Homo sapiens
  misc_RNA (1)...(19): siRNA sense strand
cauuuaaacuggagaaaag

SEQ ID NO: 2451642 - RNA, 19 nt, Homo sapiens
  misc_RNA (1)...(19): siRNA sense strand
ugacauuguugcagcucuu

SEQ ID NO: 2451643 - RNA, 19 nt, Homo sapiens
  misc_RNA (1)...(19): siRNA sense strand
cuucaggccaauaaggcaa

SEQ ID NO: 2451644 - RNA, 19 nt, Homo sapiens
  misc_RNA (1)...(19): siRNA sense strand
agacaaugaagaaaggcga

SEQ ID NO: 2451645 - RNA, 19 nt, Homo sapiens
  misc_RNA (1)...(19): siRNA sense strand
agugggaagauguggauga

SEQ ID NO: 2451646 - RNA, 19 nt, Homo sapiens
  misc_RNA (1)...(19): siRNA sense strand
uggagaagaaagcuaacaa

SEQ ID NO: 2451647 - RNA, 19 nt, Homo sapiens
  misc_RNA (1)...(19): siRNA sense strand
ugcugaacuugaagaagaa

SEQ ID NO: 2451648 - RNA, 19 nt, Homo sapiens
  misc_RNA (1)...(19): siRNA sense strand
aggaacgaagaguggagaa

SEQ ID NO: 2451649 - RNA, 19 nt, Homo sapiens
  misc_RNA (1)...(19): siRNA sense strand
uaaggcaacaggagaggaa

SEQ ID NO: 2451650 - RNA, 19 nt, Homo sapiens
  misc_RNA (1)...(19): siRNA sense strand
acgaagaguggagaagaaa

SEQ ID NO: 2451651 - RNA, 19 nt, Homo sapiens
  misc_RNA (1)...(19): siRNA sense strand
cgagcagaacagaggaagu

SEQ ID NO: 2451652 - RNA, 19 nt, Homo sapiens
  misc_RNA (1)...(19): siRNA sense strand
gcacacaacaggagagagg

SEQ ID NO: 2451653 - RNA, 19 nt, Homo sapiens
  misc_RNA (1)...(19): siRNA sense strand
ugucagaugaagacuguau

SEQ ID NO: 2451654 - RNA, 19 nt, Homo sapiens
  misc_RNA (1)...(19): siRNA sense strand
ugagaaguuuuaugagcaa

SEQ ID NO: 2451655 - RNA, 19 nt, Homo sapiens
  misc_RNA (1)...(19): siRNA sense strand
acuuuauucuucaggccaa

SEQ ID NO: 2451656 - RNA, 19 nt, Homo sapiens
  misc_RNA (1)...(19): siRNA sense strand
agaguggagaagaaagcua

SEQ ID NO: 2451657 - RNA, 19 nt, Homo sapiens
  misc_RNA (1)...(19): siRNA sense strand
gagaggagaaagaagaaac

SEQ ID NO: 2451658 - RNA, 19 nt, Homo sapiens
  misc_RNA (1)...(19): siRNA sense strand
ggaaguauggaguguucuu

SEQ ID NO: 2451659 - RNA, 19 nt, Homo sapiens
  misc_RNA (1)...(19): siRNA sense strand
gcuaguaauuccaagcacu

SEQ ID NO: 2451660 - RNA, 19 nt, Homo sapiens
  misc_RNA (1)...(19): siRNA sense strand
agagcaagaaagcaagcua

SEQ ID NO: 2451661 - RNA, 19 nt, Homo sapiens
  misc_RNA (1)...(19): siRNA sense strand
cuuuaaugauggaggaaga

SEQ ID NO: 2451662 - RNA, 19 nt, Homo sapiens
  misc_RNA (1)...(19): siRNA sense strand
caaugaaguuacuggaaaa

SEQ ID NO: 2451663 - RNA, 19 nt, Homo sapiens
  misc_RNA (1)...(19): siRNA sense strand
gcgaauuacagcacgagaa

SEQ ID NO: 2451664 - RNA, 19 nt, Homo sapiens
  misc_RNA (1)...(19): siRNA sense strand
aauuacagcacgagaaaga

SEQ ID NO: 2451665 - RNA, 19 nt, Homo sapiens
  misc_RNA (1)...(19): siRNA sense strand
agauagauggcuuggaaaa

SEQ ID NO: 2451666 - RNA, 19 nt, Homo sapiens
  misc_RNA (1)...(19): siRNA sense strand
gaaagaugacgaagcgaca

SEQ ID NO: 2451667 - RNA, 19 nt, Homo sapiens
  misc_RNA (1)...(19): siRNA sense strand
aaaccaagauagauggcuu

SEQ ID NO: 2451668 - RNA, 19 nt, Homo sapiens
  misc_RNA (1)...(19): siRNA sense strand
cuggagacuuacaagcaaa

SEQ ID NO: 2451669 - RNA, 19 nt, Homo sapiens
  misc_RNA (1)...(19): siRNA sense strand
gcaucaagguguugcucca

SEQ ID NO: 2451670 - RNA, 19 nt, Homo sapiens
  misc_RNA (1)...(19): siRNA sense strand
uggaagaagucaaagcgau

SEQ ID NO: 2451671 - RNA, 19 nt, Homo sapiens
  misc_RNA (1)...(19): siRNA sense strand
gaagaaagguugcagcacu

SEQ ID NO: 2451672 - RNA, 19 nt, Homo sapiens
  misc_RNA (1)...(19): siRNA sense strand
agcuaaaagaggagaagaa

SEQ ID NO: 2451673 - RNA, 19 nt, Homo sapiens
  misc_RNA (1)...(19): siRNA sense strand
uggcaaggagcaugaaaga

SEQ ID NO: 2451674 - RNA, 19 nt, Homo sapiens
  misc_RNA (1)...(19): siRNA sense strand
gcagcaguuaagagaacaa

SEQ ID NO: 2451675 - RNA, 19 nt, Homo sapiens
  misc_RNA (1)...(19): siRNA sense strand
agaaagaagugaaaagagu

SEQ ID NO: 2451676 - RNA, 19 nt, Homo sapiens
  misc_RNA (1)...(19): siRNA sense strand
gcuugaaaggagaagacuu

SEQ ID NO: 2451677 - RNA, 19 nt, Homo sapiens
  misc_RNA (1)...(19): siRNA sense strand
cggcaaggucuggaugaaa

SEQ ID NO: 2451678 - RNA, 19 nt, Homo sapiens
  misc_RNA (1)...(19): siRNA sense strand
agcugaagauggaagauau

SEQ ID NO: 2451679 - RNA, 19 nt, Homo sapiens
  misc_RNA (1)...(19): siRNA sense strand
ccgaaauggaaauugcaau

SEQ ID NO: 2451680 - RNA, 19 nt, Homo sapiens
  misc_RNA (1)...(19): siRNA sense strand
acaaguggaaggacugaaa

SEQ ID NO: 2451681 - RNA, 19 nt, Homo sapiens
  misc_RNA (1)...(19): siRNA sense strand
cugaaagugcuuauagaca

SEQ ID NO: 2451682 - RNA, 19 nt, Homo sapiens
  misc_RNA (1)...(19): siRNA sense strand
uaacaaaacaggauaccaa

SEQ ID NO: 2451683 - RNA, 19 nt, Homo sapiens
  misc_RNA (1)...(19): siRNA sense strand
aggaagaagggauggugau

SEQ ID NO: 2451684 - RNA, 19 nt, Homo sapiens
  misc_RNA (1)...(19): siRNA sense strand
aaagaaacuggcagauuau

SEQ ID NO: 2451685 - RNA, 19 nt, Homo sapiens
  misc_RNA (1)...(19): siRNA sense strand
auucgagaaagaagugaaa

SEQ ID NO: 2451686 - RNA, 19 nt, Homo sapiens
  misc_RNA (1)...(19): siRNA sense strand
aagaagucaaagcgauuaa

SEQ ID NO: 2451687 - RNA, 19 nt, Homo sapiens
  misc_RNA (1)...(19): siRNA sense strand
cagcaugaaacaaauggaa

SEQ ID NO: 2451688 - RNA, 19 nt, Homo sapiens
  misc_RNA (1)...(19): siRNA sense strand
gaggaagaagggaugguga

SEQ ID NO: 2451689 - RNA, 19 nt, Homo sapiens
  misc_RNA (1)...(19): siRNA sense strand
uggaagaacuuaaccggca

SEQ ID NO: 2451690 - RNA, 19 nt, Homo sapiens
  misc_RNA (1)...(19): siRNA sense strand
auaccaaaguugagcugga

SEQ ID NO: 2451691 - RNA, 19 nt, Homo sapiens
  misc_RNA (1)...(19): siRNA sense strand
uggagaaagaauugaaauc

SEQ ID NO: 2451692 - RNA, 19 nt, Homo sapiens
  misc_RNA (1)...(19): siRNA sense strand
augaaaaccgaaauggaaa

SEQ ID NO: 2451693 - RNA, 19 nt, Homo sapiens
  misc_RNA (1)...(19): siRNA sense strand
gauauagcgacuaguguca

SEQ ID NO: 2451694 - RNA, 19 nt, Homo sapiens
  misc_RNA (1)...(19): siRNA sense strand
gcuaaaagaggagaagaaa

SEQ ID NO: 2451695 - RNA, 19 nt, Homo sapiens
  misc_RNA (1)...(19): siRNA sense strand
uggaaauugcaaugaaguu

SEQ ID NO: 2451696 - RNA, 19 nt, Homo sapiens
  misc_RNA (1)...(19): siRNA sense strand
uggaaaagacuaacucaaa

SEQ ID NO: 2451697 - RNA, 19 nt, Homo sapiens
  misc_RNA (1)...(19): siRNA sense strand
gcagaagaaugaagccauc

SEQ ID NO: 2451698 - RNA, 19 nt, Homo sapiens
  misc_RNA (1)...(19): siRNA sense strand
ugauggaggaagaagggau

SEQ ID NO: 2451699 - RNA, 19 nt, Homo sapiens
  misc_RNA (1)...(19): siRNA sense strand
uaaaagaggagaagaaagu

SEQ ID NO: 2451700 - RNA, 19 nt, Homo sapiens
  misc_RNA (1)...(19): siRNA sense strand
aguuauguccagcaugaaa

SEQ ID NO: 2451701 - RNA, 19 nt, Homo sapiens
  misc_RNA (1)...(19): siRNA sense strand
aagcugaagauggaagaua

SEQ ID NO: 2451702 - RNA, 19 nt, Homo sapiens
  misc_RNA (1)...(19): siRNA sense strand
cuucaaaccaagauagaug

SEQ ID NO: 2451703 - RNA, 19 nt, Homo sapiens
  misc_RNA (1)...(19): siRNA sense strand
acuuacagauguuucacaa

SEQ ID NO: 2451704 - RNA, 19 nt, Homo sapiens
  misc_RNA (1)...(19): siRNA sense strand
caugaaacaaauggaagaa

SEQ ID NO: 2451705 - RNA, 19 nt, Homo sapiens
  misc_RNA (1)...(19): siRNA sense strand
gcgacuagugucagaaauc

SEQ ID NO: 2451706 - RNA, 19 nt, Homo sapiens
  misc_RNA (1)...(19): siRNA sense strand
aagauagauggcuuggaaa

SEQ ID NO: 2451707 - RNA, 19 nt, Homo sapiens
  misc_RNA (1)...(19): siRNA sense strand
ucagaauggagcugcaaca

SEQ ID NO: 2451708 - RNA, 19 nt, Homo sapiens
  misc_RNA (1)...(19): siRNA sense strand
agguuggaguaauagauuu

SEQ ID NO: 2451709 - RNA, 19 nt, Homo sapiens
  misc_RNA (1)...(19): siRNA sense strand
gugaaaagaguguagagau

SEQ ID NO: 2451710 - RNA, 19 nt, Homo sapiens
  misc_RNA (1)...(19): siRNA sense strand
gaguguagagauaacaaaa

SEQ ID NO: 2451711 - RNA, 19 nt, Homo sapiens
  misc_RNA (1)...(19): siRNA sense strand
guuugcagcagaagaauga

SEQ ID NO: 2451712 - RNA, 19 nt, Homo sapiens
  misc_RNA (1)...(19): siRNA sense strand
gguuggaguaauagauuuu

SEQ ID NO: 2451713 - RNA, 19 nt, Homo sapiens
  misc_RNA (1)...(19): siRNA sense strand
aaucaauaaaggugggaua

SEQ ID NO: 2451714 - RNA, 19 nt, Homo sapiens
  misc_RNA (1)...(19): siRNA sense strand
aggcauuguugaagaacua

SEQ ID NO: 2451715 - RNA, 19 nt, Homo sapiens
  misc_RNA (1)...(19): siRNA sense strand
cauuuaaggcuguuggaaa

SEQ ID NO: 2451716 - RNA, 19 nt, Homo sapiens
  misc_RNA (1)...(19): siRNA sense strand
ccaaauauuuacaagguga

SEQ ID NO: 2451717 - RNA, 19 nt, Homo sapiens
  misc_RNA (1)...(19): siRNA sense strand
ggucagacucauaggguca

SEQ ID NO: 2451718 - RNA, 19 nt, Homo sapiens
  misc_RNA (1)...(19): siRNA sense strand
auuuaaggcuguuggaaaa

SEQ ID NO: 2451719 - RNA, 19 nt, Homo sapiens
  misc_RNA (1)...(19): siRNA sense strand
gcugaaaaucugaacaaaa

SEQ ID NO: 2451720 - RNA, 19 nt, Homo sapiens
  misc_RNA (1)...(19): siRNA sense strand
gguuagauuuaguuaccaa

SEQ ID NO: 2451721 - RNA, 19 nt, Homo sapiens
  misc_RNA (1)...(19): siRNA sense strand
ugauaagguaauagagcau

SEQ ID NO: 2451722 - RNA, 19 nt, Homo sapiens
  misc_RNA (1)...(19): siRNA sense strand
cagucaaccuaauggaaca

SEQ ID NO: 2451723 - RNA, 19 nt, Homo sapiens
  misc_RNA (1)...(19): siRNA sense strand
gcagauaauuucacaggca

SEQ ID NO: 2451724 - RNA, 19 nt, Homo sapiens
  misc_RNA (1)...(19): siRNA sense strand
gggcaaaagaagcugaaau

SEQ ID NO: 2451725 - RNA, 19 nt, Homo sapiens
  misc_RNA (1)...(19): siRNA sense strand
ggcaaaagaagcugaaauu

SEQ ID NO: 2451726 - RNA, 19 nt, Homo sapiens
  misc_RNA (1)...(19): siRNA sense strand
aucaaagacugcagauaau

SEQ ID NO: 2451727 - RNA, 19 nt, Homo sapiens
  misc_RNA (1)...(19): siRNA sense strand
ugaccaaggcauuguugaa

SEQ ID NO: 2451728 - RNA, 19 nt, Homo sapiens
  misc_RNA (1)...(19): siRNA sense strand
auaaagaaagaccgaagaa

SEQ ID NO: 2451729 - RNA, 19 nt, Homo sapiens
  misc_RNA (1)...(19): siRNA sense strand
aagaguugaaugagaaaca

SEQ ID NO: 2451730 - RNA, 19 nt, Homo sapiens
  misc_RNA (1)...(19): siRNA sense strand
ggauagaugcaguagaaag

SEQ ID NO: 2451731 - RNA, 19 nt, Homo sapiens
  misc_RNA (1)...(19): siRNA sense strand
caauaaagaaagaccgaag

SEQ ID NO: 2451732 - RNA, 19 nt, Homo sapiens
  misc_RNA (1)...(19): siRNA sense strand
aggcugauuuagaugaaga

SEQ ID NO: 2451733 - RNA, 19 nt, Homo sapiens
  misc_RNA (1)...(19): siRNA sense strand
aauccaacuugaagcaaaa

SEQ ID NO: 2451734 - RNA, 19 nt, Homo sapiens
  misc_RNA (1)...(19): siRNA sense strand
cucauagggucauggagua

SEQ ID NO: 2451735 - RNA, 19 nt, Homo sapiens
  misc_RNA (1)...(19): siRNA sense strand
uguagaagugacaaggaau

SEQ ID NO: 2451736 - RNA, 19 nt, Homo sapiens
  misc_RNA (1)...(19): siRNA sense strand
uuacagaaacugaaagacu

SEQ ID NO: 2451737 - RNA, 19 nt, Homo sapiens
  misc_RNA (1)...(19): siRNA sense strand
gcaguguagggcagaguau

SEQ ID NO: 2451738 - RNA, 19 nt, Homo sapiens
  misc_RNA (1)...(19): siRNA sense strand
aagaacuaauggaagauga

SEQ ID NO: 2451739 - RNA, 19 nt, Homo sapiens
  misc_RNA (1)...(19): siRNA sense strand
ggcugcaguuacagaaauu

SEQ ID NO: 2451740 - RNA, 19 nt, Homo sapiens
  misc_RNA (1)...(19): siRNA sense strand
auuaaaacggcgagaugua

SEQ ID NO: 2451741 - RNA, 19 nt, Homo sapiens
  misc_RNA (1)...(19): siRNA sense strand
gaugauccacgcagggcaa

SEQ ID NO: 2451742 - RNA, 19 nt, Homo sapiens
  misc_RNA (1)...(19): siRNA sense strand
acauacagcaguugaagga

SEQ ID NO: 2451743 - RNA, 19 nt, Homo sapiens
  misc_RNA (1)...(19): siRNA sense strand
cauuaagcuacuucaagaa

SEQ ID NO: 2451744 - RNA, 19 nt, Homo sapiens
  misc_RNA (1)...(19): siRNA sense strand
aguggcaagaaguggcaaa

SEQ ID NO: 2451745 - RNA, 19 nt, Homo sapiens
  misc_RNA (1)...(19): siRNA sense strand
cugaagaggaugacgcagu

SEQ ID NO: 2451746 - RNA, 19 nt, Homo sapiens
  misc_RNA (1)...(19): siRNA sense strand
gauuauggggagcaggaua

SEQ ID NO: 2451747 - RNA, 19 nt, Homo sapiens
  misc_RNA (1)...(19): siRNA sense strand
auauuuacaaggugaccaa

SEQ ID NO: 2451748 - RNA, 19 nt, Homo sapiens
  misc_RNA (1)...(19): siRNA sense strand
uguugaagaacuaauggaa

SEQ ID NO: 2451749 - RNA, 19 nt, Homo sapiens
  misc_RNA (1)...(19): siRNA sense strand
uggcuuuagcucagauuau

SEQ ID NO: 2451750 - RNA, 19 nt, Homo sapiens
  misc_RNA (1)...(19): siRNA sense strand
aggaccugcugaugaauau

SEQ ID NO: 2451751 - RNA, 19 nt, Homo sapiens
  misc_RNA (1)...(19): siRNA sense strand
ggcacuuaguucaugggua

SEQ ID NO: 2451752 - RNA, 19 nt, Homo sapiens
  misc_RNA (1)...(19): siRNA sense strand
acaaggugaccaaggcauu

SEQ ID NO: 2451753 - RNA, 19 nt, Homo sapiens
  misc_RNA (1)...(19): siRNA sense strand
caggaaagacugacauuuu

SEQ ID NO: 2451754 - RNA, 19 nt, Homo sapiens
  misc_RNA (1)...(19): siRNA sense strand
cuccaaagauccuucaaaa

SEQ ID NO: 2451755 - RNA, 19 nt, Homo sapiens
  misc_RNA (1)...(19): siRNA sense strand
acggcgagauguagcugaa

SEQ ID NO: 2451756 - RNA, 19 nt, Homo sapiens
  misc_RNA (1)...(19): siRNA sense strand
gcgagauguagcugaaaau

SEQ ID NO: 2451757 - RNA, 19 nt, Homo sapiens
  misc_RNA (1)...(19): siRNA sense strand
augaaaaggcagcuuguua

SEQ ID NO: 2451758 - RNA, 19 nt, Homo sapiens
  misc_RNA (1)...(19): siRNA sense strand
gagcaaauucagaaaacca

SEQ ID NO: 2451759 - RNA, 19 nt, Homo sapiens
  misc_RNA (1)...(19): siRNA sense strand
gagcaggauacuuauaaca

SEQ ID NO: 2451760 - RNA, 19 nt, Homo sapiens
  misc_RNA (1)...(19): siRNA sense strand
auacuuauaacaaggccaa

SEQ ID NO: 2451761 - RNA, 19 nt, Homo sapiens
  misc_RNA (1)...(19): siRNA sense strand
gacaauaaagaaagaccga

SEQ ID NO: 2451762 - RNA, 19 nt, Homo sapiens
  misc_RNA (1)...(19): siRNA sense strand
aggaaggaccugcugauga

SEQ ID NO: 2451763 - RNA, 19 nt, Homo sapiens
  misc_RNA (1)...(19): siRNA sense strand
agaacuaauggaagaugau

SEQ ID NO: 2451764 - RNA, 19 nt, Homo sapiens
  misc_RNA (1)...(19): siRNA sense strand
cucuaacccuggaaggaau

SEQ ID NO: 2451765 - RNA, 19 nt, Homo sapiens
  misc_RNA (1)...(19): siRNA sense strand
uggaguacauacagcaguu

SEQ ID NO: 2451766 - RNA, 19 nt, Homo sapiens
  misc_RNA (1)...(19): siRNA sense strand
caguagaguucuucggcua

SEQ ID NO: 2451767 - RNA, 19 nt, Homo sapiens
  misc_RNA (1)...(19): siRNA sense strand
acuuugaauuugugguaga

SEQ ID NO: 2451768 - RNA, 19 nt, Homo sapiens
  misc_RNA (1)...(19): siRNA sense strand
ggaaugaccuggcucggua

SEQ ID NO: 2451769 - RNA, 19 nt, Homo sapiens
  misc_RNA (1)...(19): siRNA sense strand
ggguggaaggcgugacaca

SEQ ID NO: 2451770 - RNA, 19 nt, Homo sapiens
  misc_RNA (1)...(19): siRNA sense strand
ccgaauuauauuugccaau

SEQ ID NO: 2451771 - RNA, 19 nt, Homo sapiens
  misc_RNA (1)...(19): siRNA sense strand
gguacaacuuagaugagga

SEQ ID NO: 2451772 - RNA, 19 nt, Homo sapiens
  misc_RNA (1)...(19): siRNA sense strand
gagcguuggguguggaaca

SEQ ID NO: 2451773 - RNA, 19 nt, Homo sapiens
  misc_RNA (1)...(19): siRNA sense strand
cccuaaaguucauccggua

SEQ ID NO: 2451774 - RNA, 19 nt, Homo sapiens
  misc_RNA (1)...(19): siRNA sense strand
ugguagaugacuugccaau

SEQ ID NO: 2451775 - RNA, 19 nt, Homo sapiens
  misc_RNA (1)...(19): siRNA sense strand
ggugacaauggcuggaaaa

SEQ ID NO: 2451776 - RNA, 19 nt, Homo sapiens
  misc_RNA (1)...(19): siRNA sense strand
accuagaauuccauggaga

SEQ ID NO: 2451777 - RNA, 19 nt, Homo sapiens
  misc_RNA (1)...(19): siRNA sense strand
auacagaugucuuccgcuu

SEQ ID NO: 2451778 - RNA, 19 nt, Homo sapiens
  misc_RNA (1)...(19): siRNA sense strand
cauucaaagaugaggagaa

SEQ ID NO: 2451779 - RNA, 19 nt, Homo sapiens
  misc_RNA (1)...(19): siRNA sense strand
aggagaaggaagagcugaa

SEQ ID NO: 2451780 - RNA, 19 nt, Homo sapiens
  misc_RNA (1)...(19): siRNA sense strand
aggaaaauuuggagcucaa

SEQ ID NO: 2451781 - RNA, 19 nt, Homo sapiens
  misc_RNA (1)...(19): siRNA sense strand
ggauaaagauguuagggga

SEQ ID NO: 2451782 - RNA, 19 nt, Homo sapiens
  misc_RNA (1)...(19): siRNA sense strand
aagcaaaggccucaggaga

SEQ ID NO: 2451783 - RNA, 19 nt, Homo sapiens
  misc_RNA (1)...(19): siRNA sense strand
caguaugagcagaagauca

SEQ ID NO: 2451784 - RNA, 19 nt, Homo sapiens
  misc_RNA (1)...(19): siRNA sense strand
uggauaagggccuggaaca

SEQ ID NO: 2451785 - RNA, 19 nt, Homo sapiens
  misc_RNA (1)...(19): siRNA sense strand
ggaaggagaacgaggcucu

SEQ ID NO: 2451786 - RNA, 19 nt, Homo sapiens
  misc_RNA (1)...(19): siRNA sense strand
aaagaugaggagaaggcaa

SEQ ID NO: 2451787 - RNA, 19 nt, Homo sapiens
  misc_RNA (1)...(19): siRNA sense strand
aggagcuagugaaggacaa

SEQ ID NO: 2451788 - RNA, 19 nt, Homo sapiens
  misc_RNA (1)...(19): siRNA sense strand
aggcagaggagcuagugaa

SEQ ID NO: 2451789 - RNA, 19 nt, Homo sapiens
  misc_RNA (1)...(19): siRNA sense strand
cagcagaggccaaggagcu

SEQ ID NO: 2451790 - RNA, 19 nt, Homo sapiens
  misc_RNA (1)...(19): siRNA sense strand
ugacugaccuggaggccga

SEQ ID NO: 2451791 - RNA, 19 nt, Homo sapiens
  misc_RNA (1)...(19): siRNA sense strand
uggaagagucccagaugga

SEQ ID NO: 2451792 - RNA, 19 nt, Homo sapiens
  misc_RNA (1)...(19): siRNA sense strand
gguccaugaagcagcagua

SEQ ID NO: 2451793 - RNA, 19 nt, Homo sapiens
  misc_RNA (1)...(19): siRNA sense strand
uggccaaguccaagauuga

SEQ ID NO: 2451794 - RNA, 19 nt, Homo sapiens
  misc_RNA (1)...(19): siRNA sense strand
uggaggaagcacugagcau

SEQ ID NO: 2451795 - RNA, 19 nt, Homo sapiens
  misc_RNA (1)...(19): siRNA sense strand
gccaaguccaagauugaaa

SEQ ID NO: 2451796 - RNA, 19 nt, Homo sapiens
  misc_RNA (1)...(19): siRNA sense strand
aggaggacuuccagaggga

SEQ ID NO: 2451797 - RNA, 19 nt, Homo sapiens
  misc_RNA (1)...(19): siRNA sense strand
ucccagaggugguggccuu

SEQ ID NO: 2451798 - RNA, 19 nt, Homo sapiens
  misc_RNA (1)...(19): siRNA sense strand
ucaacaaggcccuggagga

SEQ ID NO: 2451799 - RNA, 19 nt, Homo sapiens
  misc_RNA (1)...(19): siRNA sense strand
agauugaaauggaggagac

SEQ ID NO: 2451800 - RNA, 19 nt, Homo sapiens
  misc_RNA (1)...(19): siRNA sense strand
uugaaauggaggagaccga

SEQ ID NO: 2451801 - RNA, 19 nt, Homo sapiens
  misc_RNA (1)...(19): siRNA sense strand
gggagcagaagcagcguga

SEQ ID NO: 2451802 - RNA, 19 nt, Homo sapiens
  misc_RNA (1)...(19): siRNA sense strand
ggcagaaggcagaggagcu

SEQ ID NO: 2451803 - RNA, 19 nt, Homo sapiens
  misc_RNA (1)...(19): siRNA sense strand
ggacaggcaagaaggcagu

SEQ ID NO: 2451804 - RNA, 19 nt, Homo sapiens
  misc_RNA (1)...(19): siRNA sense strand
gcaagcuccuccuggccaa

SEQ ID NO: 2451805 - RNA, 19 nt, Homo sapiens
  misc_RNA (1)...(19): siRNA sense strand
aggccucaggagagcguua

SEQ ID NO: 2451806 - RNA, 19 nt, Homo sapiens
  misc_RNA (1)...(19): siRNA sense strand
gcagugaucgugagcgcau

SEQ ID NO: 2451807 - RNA, 19 nt, Homo sapiens
  misc_RNA (1)...(19): siRNA sense strand
ggagaggaccguaccggau

SEQ ID NO: 2451808 - RNA, 19 nt, Homo sapiens
  misc_RNA (1)...(19): siRNA sense strand
agacagcagaagaggaaag

SEQ ID NO: 2451809 - RNA, 19 nt, Homo sapiens
  misc_RNA (1)...(19): siRNA sense strand
ccaugaaggagguggacga

SEQ ID NO: 2451810 - RNA, 19 nt, Homo sapiens
  misc_RNA (1)...(19): siRNA sense strand
gcgacugccuucagggcuu

SEQ ID NO: 2451811 - RNA, 19 nt, Homo sapiens
  misc_RNA (1)...(19): siRNA sense strand
acacggugguggagcccua

SEQ ID NO: 2451812 - RNA, 19 nt, Homo sapiens
  misc_RNA (1)...(19): siRNA sense strand
ggagguuaucagugacgaa

SEQ ID NO: 2451813 - RNA, 19 nt, Homo sapiens
  misc_RNA (1)...(19): siRNA sense strand
ugaaggagguggacgagca

SEQ ID NO: 2451814 - RNA, 19 nt, Homo sapiens
  misc_RNA (1)...(19): siRNA sense strand
gcuacuucguggaguggau

SEQ ID NO: 2451815 - RNA, 19 nt, Homo sapiens
  misc_RNA (1)...(19): siRNA sense strand
caacgaggccacaggagga

SEQ ID NO: 2451816 - RNA, 19 nt, Homo sapiens
  misc_RNA (1)...(19): siRNA sense strand
gugcagagcaagaacagca

SEQ ID NO: 2451817 - RNA, 19 nt, Homo sapiens
  misc_RNA (1)...(19): siRNA sense strand
caacaugaaugaccuggua

SEQ ID NO: 2451818 - RNA, 19 nt, Homo sapiens
  misc_RNA (1)...(19): siRNA sense strand
agggcgaguucgaggagga

SEQ ID NO: 2451819 - RNA, 19 nt, Homo sapiens
  misc_RNA (1)...(19): siRNA sense strand
cugcaacuggagaggauca

SEQ ID NO: 2451820 - RNA, 19 nt, Homo sapiens
  misc_RNA (1)...(19): siRNA sense strand
cggaugagaccuacugcau

SEQ ID NO: 2451821 - RNA, 19 nt, Homo sapiens
  misc_RNA (1)...(19): siRNA sense strand
ggggaaagcuguugggaga

SEQ ID NO: 2451822 - RNA, 19 nt, Homo sapiens
  misc_RNA (1)...(19): siRNA sense strand
ggcuaugaauucaggaaaa

SEQ ID NO: 2451823 - RNA, 19 nt, Homo sapiens
  misc_RNA (1)...(19): siRNA sense strand
acguagggccugggagaaa

SEQ ID NO: 2451824 - RNA, 19 nt, Homo sapiens
  misc_RNA (1)...(19): siRNA sense strand
auggagagaaucacagaaa

SEQ ID NO: 2451825 - RNA, 19 nt, Homo sapiens
  misc_RNA (1)...(19): siRNA sense strand
agucuaagcuugcggagca

SEQ ID NO: 2451826 - RNA, 19 nt, Homo sapiens
  misc_RNA (1)...(19): siRNA sense strand
acaucagaguacacacaaa

SEQ ID NO: 2451827 - RNA, 19 nt, Homo sapiens
  misc_RNA (1)...(19): siRNA sense strand
acacguagggccugggaga

SEQ ID NO: 2451828 - RNA, 19 nt, Homo sapiens
  misc_RNA (1)...(19): siRNA sense strand
gagcaagaauggcaggauc

SEQ ID NO: 2451829 - RNA, 19 nt, Homo sapiens
  misc_RNA (1)...(19): siRNA sense strand
aggcauggcagaaggaacu

SEQ ID NO: 2451830 - RNA, 19 nt, Homo sapiens
  misc_RNA (1)...(19): siRNA sense strand
gugaaacacucaaagcuca

SEQ ID NO: 2451831 - RNA, 19 nt, Homo sapiens
  misc_RNA (1)...(19): siRNA sense strand
uugcaaugauagaggccga

SEQ ID NO: 2451832 - RNA, 19 nt, Homo sapiens
  misc_RNA (1)...(19): siRNA sense strand
acgcagaugccguggagca

SEQ ID NO: 2451833 - RNA, 19 nt, Homo sapiens
  misc_RNA (1)...(19): siRNA sense strand
cggagugcgacaagcgcua

SEQ ID NO: 2451834 - RNA, 19 nt, Homo sapiens
  misc_RNA (1)...(19): siRNA sense strand
aggcuaugaauucaggaaa

SEQ ID NO: 2451835 - RNA, 19 nt, Homo sapiens
  misc_RNA (1)...(19): siRNA sense strand
ggaaguguggcaagggcuu

SEQ ID NO: 2451836 - RNA, 19 nt, Homo sapiens
  misc_RNA (1)...(19): siRNA sense strand
gggaaagcuguugggagaa

SEQ ID NO: 2451837 - RNA, 19 nt, Homo sapiens
  misc_RNA (1)...(19): siRNA sense strand
aagcaugugaugagaagca

SEQ ID NO: 2451838 - RNA, 19 nt, Homo sapiens
  misc_RNA (1)...(19): siRNA sense strand
aauuagauccugaaagcca

SEQ ID NO: 2451839 - RNA, 19 nt, Homo sapiens
  misc_RNA (1)...(19): siRNA sense strand
gaucuagaggcauggcaga

SEQ ID NO: 2451840 - RNA, 19 nt, Homo sapiens
  misc_RNA (1)...(19): siRNA sense strand
acaagagggcggagacgca

SEQ ID NO: 2451841 - RNA, 19 nt, Homo sapiens
  misc_RNA (1)...(19): siRNA sense strand
gggaguguggcaagggcuu

SEQ ID NO: 2451842 - RNA, 19 nt, Homo sapiens
  misc_RNA (1)...(19): siRNA sense strand
gcaugugaugagaagcaau

SEQ ID NO: 2451843 - RNA, 19 nt, Homo sapiens
  misc_RNA (1)...(19): siRNA sense strand
ggaugaaaggagugaggaa

SEQ ID NO: 2451844 - RNA, 19 nt, Homo sapiens
  misc_RNA (1)...(19): siRNA sense strand
agaaauagauacaaggaca

SEQ ID NO: 2451845 - RNA, 19 nt, Homo sapiens
  misc_RNA (1)...(19): siRNA sense strand
ucacagagaucauggcaga

SEQ ID NO: 2451846 - RNA, 19 nt, Homo sapiens
  misc_RNA (1)...(19): siRNA sense strand
aauuagagaaaccgagaaa

SEQ ID NO: 2451847 - RNA, 19 nt, Homo sapiens
  misc_RNA (1)...(19): siRNA sense strand
ccaccaaguaagcgaagaa

SEQ ID NO: 2451848 - RNA, 19 nt, Homo sapiens
  misc_RNA (1)...(19): siRNA sense strand
ccaaguaagcgaagaaaau

SEQ ID NO: 2451849 - RNA, 19 nt, Homo sapiens
  misc_RNA (1)...(19): siRNA sense strand
cugcaugcugggaaagaaa

SEQ ID NO: 2451850 - RNA, 19 nt, Homo sapiens
  misc_RNA (1)...(19): siRNA sense strand
augaaaggagugaggaaaa

SEQ ID NO: 2451851 - RNA, 19 nt, Homo sapiens
  misc_RNA (1)...(19): siRNA sense strand
ggaaaguugucaaggcucu

SEQ ID NO: 2451852 - RNA, 19 nt, Homo sapiens
  misc_RNA (1)...(19): siRNA sense strand
aggaggugaauuagaguuu

SEQ ID NO: 2451853 - RNA, 19 nt, Homo sapiens
  misc_RNA (1)...(19): siRNA sense strand
ucgcaacagaaguggauga

SEQ ID NO: 2451854 - RNA, 19 nt, Homo sapiens
  misc_RNA (1)...(19): siRNA sense strand
gugugagacagcugagaga

SEQ ID NO: 2451855 - RNA, 19 nt, Homo sapiens
  misc_RNA (1)...(19): siRNA sense strand
ccacaguucccuugagacu

SEQ ID NO: 2451856 - RNA, 19 nt, Homo sapiens
  misc_RNA (1)...(19): siRNA sense strand
ucauaaaaguggugaaggu

SEQ ID NO: 2451857 - RNA, 19 nt, Homo sapiens
  misc_RNA (1)...(19): siRNA sense strand
caugcaagaaauagauaca

SEQ ID NO: 2451858 - RNA, 19 nt, Homo sapiens
  misc_RNA (1)...(19): siRNA sense strand
cuggauucauuuaaggaga

SEQ ID NO: 2451859 - RNA, 19 nt, Homo sapiens
  misc_RNA (1)...(19): siRNA sense strand
caacuauauucacugggua

SEQ ID NO: 2451860 - RNA, 19 nt, Homo sapiens
  misc_RNA (1)...(19): siRNA sense strand
gaagaaaauuagagaaacc

SEQ ID NO: 2451861 - RNA, 19 nt, Homo sapiens
  misc_RNA (1)...(19): siRNA sense strand
auagcugcaugcugggaaa

SEQ ID NO: 2451862 - RNA, 19 nt, Homo sapiens
  misc_RNA (1)...(19): siRNA sense strand
agggagggguggagguuuu

SEQ ID NO: 2451863 - RNA, 19 nt, Homo sapiens
  misc_RNA (1)...(19): siRNA sense strand
agcagcauguucagauaaa

SEQ ID NO: 2451864 - RNA, 19 nt, Homo sapiens
  misc_RNA (1)...(19): siRNA sense strand
gaucauggcagaaggaggu

SEQ ID NO: 2451865 - RNA, 19 nt, Homo sapiens
  misc_RNA (1)...(19): siRNA sense strand
ucauucaggccuuggaaga

SEQ ID NO: 2451866 - RNA, 19 nt, Homo sapiens
  misc_RNA (1)...(19): siRNA sense strand
ccaagaggcuucugagcag

SEQ ID NO: 2451867 - RNA, 19 nt, Homo sapiens
  misc_RNA (1)...(19): siRNA sense strand
acgaaauccucgaagaccu

SEQ ID NO: 2451868 - RNA, 19 nt, Homo sapiens
  misc_RNA (1)...(19): siRNA sense strand
ggaaagaaaugcagccugg

SEQ ID NO: 2451869 - RNA, 19 nt, Homo sapiens
  misc_RNA (1)...(19): siRNA sense strand
gagaaagaaaagagagcgu

SEQ ID NO: 2451870 - RNA, 19 nt, Homo sapiens
  misc_RNA (1)...(19): siRNA sense strand
ggguggagguuuuggaaag

SEQ ID NO: 2451871 - RNA, 19 nt, Homo sapiens
  misc_RNA (1)...(19): siRNA sense strand
ggaauggccuggaggagca

SEQ ID NO: 2451872 - RNA, 19 nt, Homo sapiens
  misc_RNA (1)...(19): siRNA sense strand
gcaugggacugcagggcuu

SEQ ID NO: 2451873 - RNA, 19 nt, Homo sapiens
  misc_RNA (1)...(19): siRNA sense strand
ccuucauagucaacagcaa

SEQ ID NO: 2451874 - RNA, 19 nt, Homo sapiens
  misc_RNA (1)...(19): siRNA sense strand
gcacgaaggguguuugaaa

SEQ ID NO: 2451875 - RNA, 19 nt, Homo sapiens
  misc_RNA (1)...(19): siRNA sense strand
gaaucgaacaugagcacga

SEQ ID NO: 2451876 - RNA, 19 nt, Homo sapiens
  misc_RNA (1)...(19): siRNA sense strand
gcaaaucccaguaugagaa

SEQ ID NO: 2451877 - RNA, 19 nt, Homo sapiens
  misc_RNA (1)...(19): siRNA sense strand
guaugagaaucgaacauga

SEQ ID NO: 2451878 - RNA, 19 nt, Homo sapiens
  misc_RNA (1)...(19): siRNA sense strand
caguaugagaaucgaacau

SEQ ID NO: 2451879 - RNA, 19 nt, Homo sapiens
  misc_RNA (1)...(19): siRNA sense strand
uuauauagccaaagacgga

SEQ ID NO: 2451880 - RNA, 19 nt, Homo sapiens
  misc_RNA (1)...(19): siRNA sense strand
cagccucguugaugaagaa

SEQ ID NO: 2451881 - RNA, 19 nt, Homo sapiens
  misc_RNA (1)...(19): siRNA sense strand
gauuuuaggcuuugacauu

SEQ ID NO: 2451882 - RNA, 19 nt, Homo sapiens
  misc_RNA (1)...(19): siRNA sense strand
cgugaaaccugaugguggu

SEQ ID NO: 2451883 - RNA, 19 nt, Homo sapiens
  misc_RNA (1)...(19): siRNA sense strand
guuugauauucgucuguau

SEQ ID NO: 2451884 - RNA, 19 nt, Homo sapiens
  misc_RNA (1)...(19): siRNA sense strand
cacgaaggguguuugaaaa

SEQ ID NO: 2451885 - RNA, 19 nt, Homo sapiens
  misc_RNA (1)...(19): siRNA sense strand
ucuuagaaggagagaauaa

SEQ ID NO: 2451886 - RNA, 19 nt, Homo sapiens
  misc_RNA (1)...(19): siRNA sense strand
auggacaagcugagggaaa

SEQ ID NO: 2451887 - RNA, 19 nt, Homo sapiens
  misc_RNA (1)...(19): siRNA sense strand
agaucagccuagaggagaa

SEQ ID NO: 2451888 - RNA, 19 nt, Homo sapiens
  misc_RNA (1)...(19): siRNA sense strand
uaacagaaacccaggccaa

SEQ ID NO: 2451889 - RNA, 19 nt, Homo sapiens
  misc_RNA (1)...(19): siRNA sense strand
aggagaaagaccagaggau

SEQ ID NO: 2451890 - RNA, 19 nt, Homo sapiens
  misc_RNA (1)...(19): siRNA sense strand
gaguuaaccaugaagaaaa

SEQ ID NO: 2451891 - RNA, 19 nt, Homo sapiens
  misc_RNA (1)...(19): siRNA sense strand
cuacaaagcagguuggacu

SEQ ID NO: 2451892 - RNA, 19 nt, Homo sapiens
  misc_RNA (1)...(19): siRNA sense strand
ucugaaagugauugaagaa

SEQ ID NO: 2451893 - RNA, 19 nt, Homo sapiens
  misc_RNA (1)...(19): siRNA sense strand
gaguccaguuccugagcaa

SEQ ID NO: 2451894 - RNA, 19 nt, Homo sapiens
  misc_RNA (1)...(19): siRNA sense strand
cugauugagcgcauggaaa

SEQ ID NO: 2451895 - RNA, 19 nt, Homo sapiens
  misc_RNA (1)...(19): siRNA sense strand
guuccugagcaaugugaaa

SEQ ID NO: 2451896 - RNA, 19 nt, Homo sapiens
  misc_RNA (1)...(19): siRNA sense strand
gugagagccacuuuggaaa

SEQ ID NO: 2451897 - RNA, 19 nt, Homo sapiens
  misc_RNA (1)...(19): siRNA sense strand
ggaaaaggaacgucaucaa

SEQ ID NO: 2451898 - RNA, 19 nt, Homo sapiens
  misc_RNA (1)...(19): siRNA sense strand
cagcaggaguaucuggaga

SEQ ID NO: 2451899 - RNA, 19 nt, Homo sapiens
  misc_RNA (1)...(19): siRNA sense strand
guggaugugacuuuggaaa

SEQ ID NO: 2451900 - RNA, 19 nt, Homo sapiens
  misc_RNA (1)...(19): siRNA sense strand
augcugaggugaugcgaga

SEQ ID NO: 2451901 - RNA, 19 nt, Homo sapiens
  misc_RNA (1)...(19): siRNA sense strand
agcugaaagaagagaugaa

SEQ ID NO: 2451902 - RNA, 19 nt, Homo sapiens
  misc_RNA (1)...(19): siRNA sense strand
gugcauugccagcagaaga

SEQ ID NO: 2451903 - RNA, 19 nt, Homo sapiens
  misc_RNA (1)...(19): siRNA sense strand
ugauugagcgcauggaaaa

SEQ ID NO: 2451904 - RNA, 19 nt, Homo sapiens
  misc_RNA (1)...(19): siRNA sense strand
cagaagaaagucaagcaga

SEQ ID NO: 2451905 - RNA, 19 nt, Homo sapiens
  misc_RNA (1)...(19): siRNA sense strand
agcagauggucgaggagau

SEQ ID NO: 2451906 - RNA, 19 nt, Homo sapiens
  misc_RNA (1)...(19): siRNA sense strand
ugaccugagcaauggagaa

SEQ ID NO: 2451907 - RNA, 19 nt, Homo sapiens
  misc_RNA (1)...(19): siRNA sense strand
uggacaagcugagggaaaa

SEQ ID NO: 2451908 - RNA, 19 nt, Homo sapiens
  misc_RNA (1)...(19): siRNA sense strand
uggaguuaaccaugaagaa

SEQ ID NO: 2451909 - RNA, 19 nt, Homo sapiens
  misc_RNA (1)...(19): siRNA sense strand
ugaaaagaagauugagaga

SEQ ID NO: 2451910 - RNA, 19 nt, Homo sapiens
  misc_RNA (1)...(19): siRNA sense strand
gcaguuggagguagcgcaa

SEQ ID NO: 2451911 - RNA, 19 nt, Homo sapiens
  misc_RNA (1)...(19): siRNA sense strand
aggaaagguaucagcaguu

SEQ ID NO: 2451912 - RNA, 19 nt, Homo sapiens
  misc_RNA (1)...(19): siRNA sense strand
ggaaaaggugagaaagcga

SEQ ID NO: 2451913 - RNA, 19 nt, Homo sapiens
  misc_RNA (1)...(19): siRNA sense strand
gaaagcgaauguauggaga

SEQ ID NO: 2451914 - RNA, 19 nt, Homo sapiens
  misc_RNA (1)...(19): siRNA sense strand
uaugaugagaugagacaga

SEQ ID NO: 2451915 - RNA, 19 nt, Homo sapiens
  misc_RNA (1)...(19): siRNA sense strand
gagaaagaccagaggaucg

SEQ ID NO: 2451916 - RNA, 19 nt, Homo sapiens
  misc_RNA (1)...(19): siRNA sense strand
acuaugaugagaugagaca

SEQ ID NO: 2451917 - RNA, 19 nt, Homo sapiens
  misc_RNA (1)...(19): siRNA sense strand
gcugaggugaugcgagaga

SEQ ID NO: 2451918 - RNA, 19 nt, Homo sapiens
  misc_RNA (1)...(19): siRNA sense strand
ugcaggaagaacagaggaa

SEQ ID NO: 2451919 - RNA, 19 nt, Homo sapiens
  misc_RNA (1)...(19): siRNA sense strand
gaagaacagaggaagcaca

SEQ ID NO: 2451920 - RNA, 19 nt, Homo sapiens
  misc_RNA (1)...(19): siRNA sense strand
uggaugugacuuuggaaaa

SEQ ID NO: 2451921 - RNA, 19 nt, Homo sapiens
  misc_RNA (1)...(19): siRNA sense strand
gguaucagcaguuggagga

SEQ ID NO: 2451922 - RNA, 19 nt, Homo sapiens
  misc_RNA (1)...(19): siRNA sense strand
acuucaacuccuagaacau

SEQ ID NO: 2451923 - RNA, 19 nt, Homo sapiens
  misc_RNA (1)...(19): siRNA sense strand
gcaacauuaaggaucaaau

SEQ ID NO: 2451924 - RNA, 19 nt, Homo sapiens
  misc_RNA (1)...(19): siRNA sense strand
augaagcauccauggacaa

SEQ ID NO: 2451925 - RNA, 19 nt, Homo sapiens
  misc_RNA (1)...(19): siRNA sense strand
aggagugggcugugaucuu

SEQ ID NO: 2451926 - RNA, 19 nt, Homo sapiens
  misc_RNA (1)...(19): siRNA sense strand
uugaaaaccagcugcuaaa

SEQ ID NO: 2451927 - RNA, 19 nt, Homo sapiens
  misc_RNA (1)...(19): siRNA sense strand
aagccaaugcugaggugau

SEQ ID NO: 2451928 - RNA, 19 nt, Homo sapiens
  misc_RNA (1)...(19): siRNA sense strand
cagcaacauuaaggaucaa

SEQ ID NO: 2451929 - RNA, 19 nt, Homo sapiens
  misc_RNA (1)...(19): siRNA sense strand
cagcagacguaugaagcau

SEQ ID NO: 2451930 - RNA, 19 nt, Homo sapiens
  misc_RNA (1)...(19): siRNA sense strand
ccucagggacgcagggaau

SEQ ID NO: 2451931 - RNA, 19 nt, Homo sapiens
  misc_RNA (1)...(19): siRNA sense strand
ccaucagaaggcagggaaa

SEQ ID NO: 2451932 - RNA, 19 nt, Homo sapiens
  misc_RNA (1)...(19): siRNA sense strand
caggauuccaagaagcaaa

SEQ ID NO: 2451933 - RNA, 19 nt, Homo sapiens
  misc_RNA (1)...(19): siRNA sense strand
cgcugaagcuugaggccga

SEQ ID NO: 2451934 - RNA, 19 nt, Homo sapiens
  misc_RNA (1)...(19): siRNA sense strand
aguaucagcaaaagagaaa

SEQ ID NO: 2451935 - RNA, 19 nt, Homo sapiens
  misc_RNA (1)...(19): siRNA sense strand
agggaaaaugcgagaccaa

SEQ ID NO: 2451936 - RNA, 19 nt, Homo sapiens
  misc_RNA (1)...(19): siRNA sense strand
gagaaaaccuugcugcaga

SEQ ID NO: 2451937 - RNA, 19 nt, Homo sapiens
  misc_RNA (1)...(19): siRNA sense strand
agggcgaggccauggaaga

SEQ ID NO: 2451938 - RNA, 19 nt, Homo sapiens
  misc_RNA (1)...(19): siRNA sense strand
caucaugacuacagcacgu

SEQ ID NO: 2451939 - RNA, 19 nt, Homo sapiens
  misc_RNA (1)...(19): siRNA sense strand
gaaccaaaggagaggggca

SEQ ID NO: 2451940 - RNA, 19 nt, Homo sapiens
  misc_RNA (1)...(19): siRNA sense strand
caucagaaggcagggaaaa

SEQ ID NO: 2451941 - RNA, 19 nt, Homo sapiens
  misc_RNA (1)...(19): siRNA sense strand
gugaaaagggucagccaca

SEQ ID NO: 2451942 - RNA, 19 nt, Homo sapiens
  misc_RNA (1)...(19): siRNA sense strand
aguuacaguaucagcaaaa

SEQ ID NO: 2451943 - RNA, 19 nt, Homo sapiens
  misc_RNA (1)...(19): siRNA sense strand
ggaagagugaaaaggguca

SEQ ID NO: 2451944 - RNA, 19 nt, Homo sapiens
  misc_RNA (1)...(19): siRNA sense strand
ccugcaaucccguggaaau

SEQ ID NO: 2451945 - RNA, 19 nt, Homo sapiens
  misc_RNA (1)...(19): siRNA sense strand
ccucagaaagugaaggagu

SEQ ID NO: 2451946 - RNA, 19 nt, Homo sapiens
  misc_RNA (1)...(19): siRNA sense strand
guacugaccugcuggcuga

SEQ ID NO: 2451947 - RNA, 19 nt, Homo sapiens
  misc_RNA (1)...(19): siRNA sense strand
guaccagauuccagggauc

SEQ ID NO: 2451948 - RNA, 19 nt, Homo sapiens
  misc_RNA (1)...(19): siRNA sense strand
ugagaagaagagaugguau

SEQ ID NO: 2451949 - RNA, 19 nt, Homo sapiens
  misc_RNA (1)...(19): siRNA sense strand
gaaaugagguuugccggaa

SEQ ID NO: 2451950 - RNA, 19 nt, Homo sapiens
  misc_RNA (1)...(19): siRNA sense strand
ggaaaugagguuugccgga

SEQ ID NO: 2451951 - RNA, 19 nt, Homo sapiens
  misc_RNA (1)...(19): siRNA sense strand
cuucaugacuggacccuca

SEQ ID NO: 2451952 - RNA, 19 nt, Homo sapiens
  misc_RNA (1)...(19): siRNA sense strand
ggacaucuuuaguaccaga

SEQ ID NO: 2451953 - RNA, 19 nt, Homo sapiens
  misc_RNA (1)...(19): siRNA sense strand
ggacuuaggaucagccaag

SEQ ID NO: 2451954 - RNA, 19 nt, Homo sapiens
  misc_RNA (1)...(19): siRNA sense strand
ggucgaugcuccugggugu

SEQ ID NO: 2451955 - RNA, 19 nt, Homo sapiens
  misc_RNA (1)...(19): siRNA sense strand
ccucaaugcaggagcagca

SEQ ID NO: 2451956 - RNA, 19 nt, Homo sapiens
  misc_RNA (1)...(19): siRNA sense strand
ccuucaggguccaggccuu

SEQ ID NO: 2451957 - RNA, 19 nt, Homo sapiens
  misc_RNA (1)...(19): siRNA sense strand
aggagaggcuugagcguga

SEQ ID NO: 2451958 - RNA, 19 nt, Homo sapiens
  misc_RNA (1)...(19): siRNA sense strand
gauucaagguagaggugga

SEQ ID NO: 2451959 - RNA, 19 nt, Homo sapiens
  misc_RNA (1)...(19): siRNA sense strand
acucaagccagguggaauu

SEQ ID NO: 2451960 - RNA, 19 nt, Homo sapiens
  misc_RNA (1)...(19): siRNA sense strand
cuggagugaaacugggaaa

SEQ ID NO: 2451961 - RNA, 19 nt, Homo sapiens
  misc_RNA (1)...(19): siRNA sense strand
aagaaauacuacugaccau

SEQ ID NO: 2451962 - RNA, 19 nt, Homo sapiens
  misc_RNA (1)...(19): siRNA sense strand
ccggaaaugcauugaucau

SEQ ID NO: 2451963 - RNA, 19 nt, Homo sapiens
  misc_RNA (1)...(19): siRNA sense strand
gcgaggagguggaagugca

SEQ ID NO: 2451964 - RNA, 19 nt, Homo sapiens
  misc_RNA (1)...(19): siRNA sense strand
auauggagaagaugggaau

SEQ ID NO: 2451965 - RNA, 19 nt, Homo sapiens
  misc_RNA (1)...(19): siRNA sense strand
ugggaaagcagaaagggau

SEQ ID NO: 2451966 - RNA, 19 nt, Homo sapiens
  misc_RNA (1)...(19): siRNA sense strand
aguauggauucaagguaga

SEQ ID NO: 2451967 - RNA, 19 nt, Homo sapiens
  misc_RNA (1)...(19): siRNA sense strand
ggugaaccgaacagaaaga

SEQ ID NO: 2451968 - RNA, 19 nt, Homo sapiens
  misc_RNA (1)...(19): siRNA sense strand
agaauugagcuaugaggau

SEQ ID NO: 2451969 - RNA, 19 nt, Homo sapiens
  misc_RNA (1)...(19): siRNA sense strand
ucaagguagagguggaaaa

SEQ ID NO: 2451970 - RNA, 19 nt, Homo sapiens
  misc_RNA (1)...(19): siRNA sense strand
cagcuaaccaacagaaacu

SEQ ID NO: 2451971 - RNA, 19 nt, Homo sapiens
  misc_RNA (1)...(19): siRNA sense strand
gggaaagcagaaagggaug

SEQ ID NO: 2451972 - RNA, 19 nt, Homo sapiens
  misc_RNA (1)...(19): siRNA sense strand
aggagauuuucaagagauu

SEQ ID NO: 2451973 - RNA, 19 nt, Homo sapiens
  misc_RNA (1)...(19): siRNA sense strand
acuacugaccauugugaau

SEQ ID NO: 2451974 - RNA, 19 nt, Homo sapiens
  misc_RNA (1)...(19): siRNA sense strand
ucaaggaaaugaauggagu

SEQ ID NO: 2451975 - RNA, 19 nt, Homo sapiens
  misc_RNA (1)...(19): siRNA sense strand
uuuccauagaauugagcua

SEQ ID NO: 2451976 - RNA, 19 nt, Homo sapiens
  misc_RNA (1)...(19): siRNA sense strand
aauugagcuaugaggauau

SEQ ID NO: 2451977 - RNA, 19 nt, Homo sapiens
  misc_RNA (1)...(19): siRNA sense strand
ugaaacugggaaagcagaa

SEQ ID NO: 2451978 - RNA, 19 nt, Homo sapiens
  misc_RNA (1)...(19): siRNA sense strand
cuuccaacuuuguacucaa

SEQ ID NO: 2451979 - RNA, 19 nt, Homo sapiens
  misc_RNA (1)...(19): siRNA sense strand
gccagguggaauuuggaua

SEQ ID NO: 2451980 - RNA, 19 nt, Homo sapiens
  misc_RNA (1)...(19): siRNA sense strand
aauauggagaagaugggaa

SEQ ID NO: 2451981 - RNA, 19 nt, Homo sapiens
  misc_RNA (1)...(19): siRNA sense strand
ccaaaagagagaugggauc

SEQ ID NO: 2451982 - RNA, 19 nt, Homo sapiens
  misc_RNA (1)...(19): siRNA sense strand
aggaggaggaggagaggcu

SEQ ID NO: 2451983 - RNA, 19 nt, Homo sapiens
  misc_RNA (1)...(19): siRNA sense strand
auaaagaugaagauggaga

SEQ ID NO: 2451984 - RNA, 19 nt, Homo sapiens
  misc_RNA (1)...(19): siRNA sense strand
caguauucagcaagcuaua

SEQ ID NO: 2451985 - RNA, 19 nt, Homo sapiens
  misc_RNA (1)...(19): siRNA sense strand
caccaauauuccugaaaau

SEQ ID NO: 2451986 - RNA, 19 nt, Homo sapiens
  misc_RNA (1)...(19): siRNA sense strand
gcccaaacuucucagccua

SEQ ID NO: 2451987 - RNA, 19 nt, Homo sapiens
  misc_RNA (1)...(19): siRNA sense strand
acuucugaguaaugaugaa

SEQ ID NO: 2451988 - RNA, 19 nt, Homo sapiens
  misc_RNA (1)...(19): siRNA sense strand
aauucagugcaguaggaua

SEQ ID NO: 2451989 - RNA, 19 nt, Homo sapiens
  misc_RNA (1)...(19): siRNA sense strand
ugaucagguuucagggcca

SEQ ID NO: 2451990 - RNA, 19 nt, Homo sapiens
  misc_RNA (1)...(19): siRNA sense strand
cuuggaaccaccuggagaa

SEQ ID NO: 2451991 - RNA, 19 nt, Homo sapiens
  misc_RNA (1)...(19): siRNA sense strand
guggaugguagggaagaaa

SEQ ID NO: 2451992 - RNA, 19 nt, Homo sapiens
  misc_RNA (1)...(19): siRNA sense strand
acccagugcuccugcagaa

SEQ ID NO: 2451993 - RNA, 19 nt, Homo sapiens
  misc_RNA (1)...(19): siRNA sense strand
caggucagauugaagguca

SEQ ID NO: 2451994 - RNA, 19 nt, Homo sapiens
  misc_RNA (1)...(19): siRNA sense strand
cgcaaaugucagagaugaa

SEQ ID NO: 2451995 - RNA, 19 nt, Homo sapiens
  misc_RNA (1)...(19): siRNA sense strand
cagaaaaucaagcaggcua

SEQ ID NO: 2451996 - RNA, 19 nt, Homo sapiens
  misc_RNA (1)...(19): siRNA sense strand
ccuuauagaaauagagaga

SEQ ID NO: 2451997 - RNA, 19 nt, Homo sapiens
  misc_RNA (1)...(19): siRNA sense strand
cgguaacauucgugauaga

SEQ ID NO: 2451998 - RNA, 19 nt, Homo sapiens
  misc_RNA (1)...(19): siRNA sense strand
ucugagaaguauaggacau

SEQ ID NO: 2451999 - RNA, 19 nt, Homo sapiens
  misc_RNA (1)...(19): siRNA sense strand
cacuaauacaacugggaua

SEQ ID NO: 2452000 - RNA, 19 nt, Homo sapiens
  misc_RNA (1)...(19): siRNA sense strand
gacuuaaagacaauggaaa

SEQ ID NO: 2452001 - RNA, 19 nt, Homo sapiens
  misc_RNA (1)...(19): siRNA sense strand
agaauggaaacuaggacua

SEQ ID NO: 2452002 - RNA, 19 nt, Homo sapiens
  misc_RNA (1)...(19): siRNA sense strand
cuauaaggguaguguccau

SEQ ID NO: 2452003 - RNA, 19 nt, Homo sapiens
  misc_RNA (1)...(19): siRNA sense strand
gggauaucugagaaguaua

SEQ ID NO: 2452004 - RNA, 19 nt, Homo sapiens
  misc_RNA (1)...(19): siRNA sense strand
cuguaaaggauguucuaau

SEQ ID NO: 2452005 - RNA, 19 nt, Homo sapiens
  misc_RNA (1)...(19): siRNA sense strand
ggaaucuaagggaggaaau

SEQ ID NO: 2452006 - RNA, 19 nt, Homo sapiens
  misc_RNA (1)...(19): siRNA sense strand
caacugugcacaaggaaaa

SEQ ID NO: 2452007 - RNA, 19 nt, Homo sapiens
  misc_RNA (1)...(19): siRNA sense strand
auucgaagggaguugguaa

SEQ ID NO: 2452008 - RNA, 19 nt, Homo sapiens
  misc_RNA (1)...(19): siRNA sense strand
cuggaugaaagaaagauaa

SEQ ID NO: 2452009 - RNA, 19 nt, Homo sapiens
  misc_RNA (1)...(19): siRNA sense strand
gauagauggaagaaauaga

SEQ ID NO: 2452010 - RNA, 19 nt, Homo sapiens
  misc_RNA (1)...(19): siRNA sense strand
gugauagauaccaguuuaa

SEQ ID NO: 2452011 - RNA, 19 nt, Homo sapiens
  misc_RNA (1)...(19): siRNA sense strand
caguuuaaucccauggaau

SEQ ID NO: 2452012 - RNA, 19 nt, Homo sapiens
  misc_RNA (1)...(19): siRNA sense strand
acuggaugaaagaaagaua

SEQ ID NO: 2452013 - RNA, 19 nt, Homo sapiens
  misc_RNA (1)...(19): siRNA sense strand
gguucaacaaauacgaauu

SEQ ID NO: 2452014 - RNA, 19 nt, Homo sapiens
  misc_RNA (1)...(19): siRNA sense strand
ucuauaucuugaacgguaa

SEQ ID NO: 2452015 - RNA, 19 nt, Homo sapiens
  misc_RNA (1)...(19): siRNA sense strand
cugggauaucugagaagua

SEQ ID NO: 2452016 - RNA, 19 nt, Homo sapiens
  misc_RNA (1)...(19): siRNA sense strand
agacgggaaagauggcaaa

SEQ ID NO: 2452017 - RNA, 19 nt, Homo sapiens
  misc_RNA (1)...(19): siRNA sense strand
cagaauucauuguguggca

SEQ ID NO: 2452018 - RNA, 19 nt, Homo sapiens
  misc_RNA (1)...(19): siRNA sense strand
gagacgggaaagauggcaa

SEQ ID NO: 2452019 - RNA, 19 nt, Homo sapiens
  misc_RNA (1)...(19): siRNA sense strand
agaggaaguccaaagaaaa

SEQ ID NO: 2452020 - RNA, 19 nt, Homo sapiens
  misc_RNA (1)...(19): siRNA sense strand
augacuucuuagaggauuu

SEQ ID NO: 2452021 - RNA, 19 nt, Homo sapiens
  misc_RNA (1)...(19): siRNA sense strand
ucuuagaggauuugccuuu

SEQ ID NO: 2452022 - RNA, 19 nt, Homo sapiens
  misc_RNA (1)...(19): siRNA sense strand
ucaacugugcacaaggaaa

SEQ ID NO: 2452023 - RNA, 19 nt, Homo sapiens
  misc_RNA (1)...(19): siRNA sense strand
cugucugccuugagaacuu

SEQ ID NO: 2452024 - RNA, 19 nt, Homo sapiens
  misc_RNA (1)...(19): siRNA sense strand
cugagaaguauaggacaua

SEQ ID NO: 2452025 - RNA, 19 nt, Homo sapiens
  misc_RNA (1)...(19): siRNA sense strand
cuacucuaacagugauuua

SEQ ID NO: 2452026 - RNA, 19 nt, Homo sapiens
  misc_RNA (1)...(19): siRNA sense strand
aauuaucaacugugcacaa

SEQ ID NO: 2452027 - RNA, 19 nt, Homo sapiens
  misc_RNA (1)...(19): siRNA sense strand
acuauguacaccagaaaca

SEQ ID NO: 2452028 - RNA, 19 nt, Homo sapiens
  misc_RNA (1)...(19): siRNA sense strand
agaucauauuauuggagca

SEQ ID NO: 2452029 - RNA, 19 nt, Homo sapiens
  misc_RNA (1)...(19): siRNA sense strand
aggacuauguacaccagaa

SEQ ID NO: 2452030 - RNA, 19 nt, Homo sapiens
  misc_RNA (1)...(19): siRNA sense strand
acuaauacaacugggauau

SEQ ID NO: 2452031 - RNA, 19 nt, Homo sapiens
  misc_RNA (1)...(19): siRNA sense strand
ggguaguguccauggauuc

SEQ ID NO: 2452032 - RNA, 19 nt, Homo sapiens
  misc_RNA (1)...(19): siRNA sense strand
gaucauauuauuggagcau

SEQ ID NO: 2452033 - RNA, 19 nt, Homo sapiens
  misc_RNA (1)...(19): siRNA sense strand
acaucucggugguuagcaa

SEQ ID NO: 2452034 - RNA, 19 nt, Homo sapiens
  misc_RNA (1)...(19): siRNA sense strand
gggaaucuaagggaggaaa

SEQ ID NO: 2452035 - RNA, 19 nt, Homo sapiens
  misc_RNA (1)...(19): siRNA sense strand
cggaagagaguuaccagga

SEQ ID NO: 2452036 - RNA, 19 nt, Homo sapiens
  misc_RNA (1)...(19): siRNA sense strand
gggccauauccuacaccaa

SEQ ID NO: 2452037 - RNA, 19 nt, Homo sapiens
  misc_RNA (1)...(19): siRNA sense strand
uggaauaauccgagugcuc

SEQ ID NO: 2452038 - RNA, 19 nt, Homo sapiens
  misc_RNA (1)...(19): siRNA sense strand
ggaagaacaucaagggcau

SEQ ID NO: 2452039 - RNA, 19 nt, Homo sapiens
  misc_RNA (1)...(19): siRNA sense strand
aggaaauucacgacggaaa

SEQ ID NO: 2452040 - RNA, 19 nt, Homo sapiens
  misc_RNA (1)...(19): siRNA sense strand
cggaaaaucuuguaggaga

SEQ ID NO: 2452041 - RNA, 19 nt, Homo sapiens
  misc_RNA (1)...(19): siRNA sense strand
guguagauccugagaacau

SEQ ID NO: 2452042 - RNA, 19 nt, Homo sapiens
  misc_RNA (1)...(19): siRNA sense strand
gauuaaaauuuguggcuca

SEQ ID NO: 2452043 - RNA, 19 nt, Homo sapiens
  misc_RNA (1)...(19): siRNA sense strand
ccugagaacaucaccgaaa

SEQ ID NO: 2452044 - RNA, 19 nt, Homo sapiens
  misc_RNA (1)...(19): siRNA sense strand
ccaagaaugaguaugggaa

SEQ ID NO: 2452045 - RNA, 19 nt, Homo sapiens
  misc_RNA (1)...(19): siRNA sense strand
caauauugaaugaguccaa

SEQ ID NO: 2452046 - RNA, 19 nt, Homo sapiens
  misc_RNA (1)...(19): siRNA sense strand
ucacuguggaggaaggaaa

SEQ ID NO: 2452047 - RNA, 19 nt, Homo sapiens
  misc_RNA (1)...(19): siRNA sense strand
aggccgagcuccugaccaa

SEQ ID NO: 2452048 - RNA, 19 nt, Homo sapiens
  misc_RNA (1)...(19): siRNA sense strand
acgaacagaaguaaugaaa

SEQ ID NO: 2452049 - RNA, 19 nt, Homo sapiens
  misc_RNA (1)...(19): siRNA sense strand
guaugggaaggaugagaaa

SEQ ID NO: 2452050 - RNA, 19 nt, Homo sapiens
  misc_RNA (1)...(19): siRNA sense strand
uuauggaacugcagcgaau

SEQ ID NO: 2452051 - RNA, 19 nt, Homo sapiens
  misc_RNA (1)...(19): siRNA sense strand
ugauaaaaccggucgggaa

SEQ ID NO: 2452052 - RNA, 19 nt, Homo sapiens
  misc_RNA (1)...(19): siRNA sense strand
agaacuugcuggugaaaau

SEQ ID NO: 2452053 - RNA, 19 nt, Homo sapiens
  misc_RNA (1)...(19): siRNA sense strand
cuuaugugggacugagaaa

SEQ ID NO: 2452054 - RNA, 19 nt, Homo sapiens
  misc_RNA (1)...(19): siRNA sense strand
ugucaaacaaugaggugau

SEQ ID NO: 2452055 - RNA, 19 nt, Homo sapiens
  misc_RNA (1)...(19): siRNA sense strand
augggaaggaugagaaaca

SEQ ID NO: 2452056 - RNA, 19 nt, Homo sapiens
  misc_RNA (1)...(19): siRNA sense strand
uguauugggauguugguaa

SEQ ID NO: 2452057 - RNA, 19 nt, Homo sapiens
  misc_RNA (1)...(19): siRNA sense strand
gggaaggaugagaaacaga

SEQ ID NO: 2452058 - RNA, 19 nt, Homo sapiens
  misc_RNA (1)...(19): siRNA sense strand
cugaaugaaagcagcaaga

SEQ ID NO: 2452059 - RNA, 19 nt, Homo sapiens
  misc_RNA (1)...(19): siRNA sense strand
acacauuuguucagcacau

SEQ ID NO: 2452060 - RNA, 19 nt, Homo sapiens
  misc_RNA (1)...(19): siRNA sense strand
caguguagauccugagaac

SEQ ID NO: 2452061 - RNA, 19 nt, Homo sapiens
  misc_RNA (1)...(19): siRNA sense strand
agaugauguugaagcuuau

SEQ ID NO: 2452062 - RNA, 19 nt, Homo sapiens
  misc_RNA (1)...(19): siRNA sense strand
augguuuggauuugggaaa

SEQ ID NO: 2452063 - RNA, 19 nt, Homo sapiens
  misc_RNA (1)...(19): siRNA sense strand
aagacaagguguuggccca

SEQ ID NO: 2452064 - RNA, 19 nt, Homo sapiens
  misc_RNA (1)...(19): siRNA sense strand
gugaagacccugaaggaug

SEQ ID NO: 2452065 - RNA, 19 nt, Homo sapiens
  misc_RNA (1)...(19): siRNA sense strand
aggaagaacaucaagggca

SEQ ID NO: 2452066 - RNA, 19 nt, Homo sapiens
  misc_RNA (1)...(19): siRNA sense strand
augaaagcagcaagaauau

SEQ ID NO: 2452067 - RNA, 19 nt, Homo sapiens
  misc_RNA (1)...(19): siRNA sense strand
ggauuuugccuuuugguaa

SEQ ID NO: 2452068 - RNA, 19 nt, Homo sapiens
  misc_RNA (1)...(19): siRNA sense strand
gcaaggacuuccaccguga

SEQ ID NO: 2452069 - RNA, 19 nt, Homo sapiens
  misc_RNA (1)...(19): siRNA sense strand
augaggugauagaguguau

SEQ ID NO: 2452070 - RNA, 19 nt, Homo sapiens
  misc_RNA (1)...(19): siRNA sense strand
cucuaauagccaagaauga

SEQ ID NO: 2452071 - RNA, 19 nt, Homo sapiens
  misc_RNA (1)...(19): siRNA sense strand
uugaaugaguccaaauaca

SEQ ID NO: 2452072 - RNA, 19 nt, Homo sapiens
  misc_RNA (1)...(19): siRNA sense strand
cgaacagaaguaaugaaau

SEQ ID NO: 2452073 - RNA, 19 nt, Homo sapiens
  misc_RNA (1)...(19): siRNA sense strand
ccaaauuauccugauguaa

SEQ ID NO: 2452074 - RNA, 19 nt, Homo sapiens
  misc_RNA (1)...(19): siRNA sense strand
aaguuuggcaugaaagauu

SEQ ID NO: 2452075 - RNA, 19 nt, Homo sapiens
  misc_RNA (1)...(19): siRNA sense strand
cagugaagacccugaagga

SEQ ID NO: 2452076 - RNA, 19 nt, Homo sapiens
  misc_RNA (1)...(19): siRNA sense strand
ugcugauggcugagggcaa

SEQ ID NO: 2452077 - RNA, 19 nt, Homo sapiens
  misc_RNA (1)...(19): siRNA sense strand
ggggagaacuugcugguga

SEQ ID NO: 2452078 - RNA, 19 nt, Homo sapiens
  misc_RNA (1)...(19): siRNA sense strand
gaaaagggagcuaggcgaa

SEQ ID NO: 2452079 - RNA, 19 nt, Homo sapiens
  misc_RNA (1)...(19): siRNA sense strand
caucauggucuuugaguac

SEQ ID NO: 2452080 - RNA, 19 nt, Homo sapiens
  misc_RNA (1)...(19): siRNA sense strand
uguugaagcuuauguggga

SEQ ID NO: 2452081 - RNA, 19 nt, Homo sapiens
  misc_RNA (1)...(19): siRNA sense strand
caauuuuacccgaaacaaa

SEQ ID NO: 2452082 - RNA, 19 nt, Homo sapiens
  misc_RNA (1)...(19): siRNA sense strand
gcuaaauccaguccagaca

SEQ ID NO: 2452083 - RNA, 19 nt, Homo sapiens
  misc_RNA (1)...(19): siRNA sense strand
ccagaaaagguuagaaauc

SEQ ID NO: 2452084 - RNA, 19 nt, Homo sapiens
  misc_RNA (1)...(19): siRNA sense strand
aacugauccuggugggcaa

SEQ ID NO: 2452085 - RNA, 19 nt, Homo sapiens
  misc_RNA (1)...(19): siRNA sense strand
ccuuaaggauaacuaacau

SEQ ID NO: 2452086 - RNA, 19 nt, Homo sapiens
  misc_RNA (1)...(19): siRNA sense strand
acagcaaccugcagcacau

SEQ ID NO: 2452087 - RNA, 19 nt, Homo sapiens
  misc_RNA (1)...(19): siRNA sense strand
cagcaugagcacaucguca

SEQ ID NO: 2452088 - RNA, 19 nt, Homo sapiens
  misc_RNA (1)...(19): siRNA sense strand
cugaaggaugccagugaca

SEQ ID NO: 2452089 - RNA, 19 nt, Homo sapiens
  misc_RNA (1)...(19): siRNA sense strand
gcgauuuggccaccaggaa

SEQ ID NO: 2452090 - RNA, 19 nt, Homo sapiens
  misc_RNA (1)...(19): siRNA sense strand
gcaagaaggaggagccgaa

SEQ ID NO: 2452091 - RNA, 19 nt, Homo sapiens
  misc_RNA (1)...(19): siRNA sense strand
ucacagauguugagcgaca

SEQ ID NO: 2452092 - RNA, 19 nt, Homo sapiens
  misc_RNA (1)...(19): siRNA sense strand
ucauugaagaggaggcaaa

SEQ ID NO: 2452093 - RNA, 19 nt, Homo sapiens
  misc_RNA (1)...(19): siRNA sense strand
ggacaagcaaacuggguau

SEQ ID NO: 2452094 - RNA, 19 nt, Homo sapiens
  misc_RNA (1)...(19): siRNA sense strand
aggaaaugcucaugaacca

SEQ ID NO: 2452095 - RNA, 19 nt, Homo sapiens
  misc_RNA (1)...(19): siRNA sense strand
uuggagaaguagagccuua

SEQ ID NO: 2452096 - RNA, 19 nt, Homo sapiens
  misc_RNA (1)...(19): siRNA sense strand
gaaagaagauauuguggga

SEQ ID NO: 2452097 - RNA, 19 nt, Homo sapiens
  misc_RNA (1)...(19): siRNA sense strand
aggagguggugaugacaaa

SEQ ID NO: 2452098 - RNA, 19 nt, Homo sapiens
  misc_RNA (1)...(19): siRNA sense strand
aagaagauauugugggagu

SEQ ID NO: 2452099 - RNA, 19 nt, Homo sapiens
  misc_RNA (1)...(19): siRNA sense strand
aggaguacuuugacaggaa

SEQ ID NO: 2452100 - RNA, 19 nt, Homo sapiens
  misc_RNA (1)...(19): siRNA sense strand
acaacaggaaggauggaaa

SEQ ID NO: 2452101 - RNA, 19 nt, Homo sapiens
  misc_RNA (1)...(19): siRNA sense strand
cgauaagaugaauaagcua

SEQ ID NO: 2452102 - RNA, 19 nt, Homo sapiens
  misc_RNA (1)...(19): siRNA sense strand
ugaaagaggacuugccaga

SEQ ID NO: 2452103 - RNA, 19 nt, Homo sapiens
  misc_RNA (1)...(19): siRNA sense strand
acuaagaaccugcuggcaa

SEQ ID NO: 2452104 - RNA, 19 nt, Homo sapiens
  misc_RNA (1)...(19): siRNA sense strand
ccaaguugccguggagaaa

SEQ ID NO: 2452105 - RNA, 19 nt, Homo sapiens
  misc_RNA (1)...(19): siRNA sense strand
ccuacgauaagaugaauaa

SEQ ID NO: 2452106 - RNA, 19 nt, Homo sapiens
  misc_RNA (1)...(19): siRNA sense strand
gauccaaccaagaaagaga

SEQ ID NO: 2452107 - RNA, 19 nt, Homo sapiens
  misc_RNA (1)...(19): siRNA sense strand
cgaaaggaccuguagacga

SEQ ID NO: 2452108 - RNA, 19 nt, Homo sapiens
  misc_RNA (1)...(19): siRNA sense strand
aaguugccguggagaaaua

SEQ ID NO: 2452109 - RNA, 19 nt, Homo sapiens
  misc_RNA (1)...(19): siRNA sense strand
cugaugaguaugaugcaaa

SEQ ID NO: 2452110 - RNA, 19 nt, Homo sapiens
  misc_RNA (1)...(19): siRNA sense strand
acacagaucucgaagccuu

SEQ ID NO: 2452111 - RNA, 19 nt, Homo sapiens
  misc_RNA (1)...(19): siRNA sense strand
caacaggaaggauggaaaa

SEQ ID NO: 2452112 - RNA, 19 nt, Homo sapiens
  misc_RNA (1)...(19): siRNA sense strand
aaggagaucuggagagaac

SEQ ID NO: 2452113 - RNA, 19 nt, Homo sapiens
  misc_RNA (1)...(19): siRNA sense strand
aauaaaugugguggagaaa

SEQ ID NO: 2452114 - RNA, 19 nt, Homo sapiens
  misc_RNA (1)...(19): siRNA sense strand
gaacaaaugcaaacggaag

SEQ ID NO: 2452115 - RNA, 19 nt, Homo sapiens
  misc_RNA (1)...(19): siRNA sense strand
gaugcaaagaugaagguca

SEQ ID NO: 2452116 - RNA, 19 nt, Homo sapiens
  misc_RNA (1)...(19): siRNA sense strand
gcaaugaugaugacggcau

SEQ ID NO: 2452117 - RNA, 19 nt, Homo sapiens
  misc_RNA (1)...(19): siRNA sense strand
ccauuggacugcuggacau

SEQ ID NO: 2452118 - RNA, 19 nt, Homo sapiens
  misc_RNA (1)...(19): siRNA sense strand
uggacaugaccaaggagaa

SEQ ID NO: 2452119 - RNA, 19 nt, Homo sapiens
  misc_RNA (1)...(19): siRNA sense strand
gagaaauaccuggaggaga

SEQ ID NO: 2452120 - RNA, 19 nt, Homo sapiens
  misc_RNA (1)...(19): siRNA sense strand
cugaugacaggaagauuaa

SEQ ID NO: 2452121 - RNA, 19 nt, Homo sapiens
  misc_RNA (1)...(19): siRNA sense strand
auggaaaagaagagaucaa

SEQ ID NO: 2452122 - RNA, 19 nt, Homo sapiens
  misc_RNA (1)...(19): siRNA sense strand
ggauugauuaaauguggaa

SEQ ID NO: 2452123 - RNA, 19 nt, Homo sapiens
  misc_RNA (1)...(19): siRNA sense strand
uaugauggacagaaacaaa

SEQ ID NO: 2452124 - RNA, 19 nt, Homo sapiens
  misc_RNA (1)...(19): siRNA sense strand
aguaugaugcaaagaugaa

SEQ ID NO: 2452125 - RNA, 19 nt, Homo sapiens
  misc_RNA (1)...(19): siRNA sense strand
acaccuacgauaagaugaa

SEQ ID NO: 2452126 - RNA, 19 nt, Homo sapiens
  misc_RNA (1)...(19): siRNA sense strand
acuuaugguugcaaaugaa

SEQ ID NO: 2452127 - RNA, 19 nt, Homo sapiens
  misc_RNA (1)...(19): siRNA sense strand
aggacauugcucaggaaau

SEQ ID NO: 2452128 - RNA, 19 nt, Homo sapiens
  misc_RNA (1)...(19): siRNA sense strand
ccugggaggugcaaaguca

SEQ ID NO: 2452129 - RNA, 19 nt, Homo sapiens
  misc_RNA (1)...(19): siRNA sense strand
ggacagaaacaaaagagau

SEQ ID NO: 2452130 - RNA, 19 nt, Homo sapiens
  misc_RNA (1)...(19): siRNA sense strand
ccuggugggcccugacaaa

SEQ ID NO: 2452131 - RNA, 19 nt, Homo sapiens
  misc_RNA (1)...(19): siRNA sense strand
gaugaauacauuaccgaga

SEQ ID NO: 2452132 - RNA, 19 nt, Homo sapiens
  misc_RNA (1)...(19): siRNA sense strand
auacugacaccuacgauaa

SEQ ID NO: 2452133 - RNA, 19 nt, Homo sapiens
  misc_RNA (1)...(19): siRNA sense strand
uguugcaggaugagaguuu

SEQ ID NO: 2452134 - RNA, 19 nt, Homo sapiens
  misc_RNA (1)...(19): siRNA sense strand
aaagaagagaucaaaguga

SEQ ID NO: 2452135 - RNA, 19 nt, Homo sapiens
  misc_RNA (1)...(19): siRNA sense strand
gaacaaggagaucuggaga

SEQ ID NO: 2452136 - RNA, 19 nt, Homo sapiens
  misc_RNA (1)...(19): siRNA sense strand
ccuaugauggacagaaaca

SEQ ID NO: 2452137 - RNA, 19 nt, Homo sapiens
  misc_RNA (1)...(19): siRNA sense strand
uuucugacuucauggacaa

SEQ ID NO: 2452138 - RNA, 19 nt, Homo sapiens
  misc_RNA (1)...(19): siRNA sense strand
aauaagcggcaguuugaaa

SEQ ID NO: 2452139 - RNA, 19 nt, Homo sapiens
  misc_RNA (1)...(19): siRNA sense strand
guggaggugcugggagaaa

SEQ ID NO: 2452140 - RNA, 19 nt, Homo sapiens
  misc_RNA (1)...(19): siRNA sense strand
gaguaugaugcaaagauga

SEQ ID NO: 2452141 - RNA, 19 nt, Homo sapiens
  misc_RNA (1)...(19): siRNA sense strand
ugaucauggcaguuaacaa

SEQ ID NO: 2452142 - RNA, 19 nt, Homo sapiens
  misc_RNA (1)...(19): siRNA sense strand
gauauugaccacagaggca

SEQ ID NO: 2452143 - RNA, 19 nt, Homo sapiens
  misc_RNA (1)...(19): siRNA sense strand
auauguaacuguugaucca

SEQ ID NO: 2452144 - RNA, 19 nt, Homo sapiens
  misc_RNA (1)...(19): siRNA sense strand
ccaagaaagagauuaucau

SEQ ID NO: 2452145 - RNA, 19 nt, Homo sapiens
  misc_RNA (1)...(19): siRNA sense strand
uuccuaugauggacagaaa

SEQ ID NO: 2452146 - RNA, 19 nt, Homo sapiens
  misc_RNA (1)...(19): siRNA sense strand
cuagaaaacagaaaggaca

SEQ ID NO: 2452147 - RNA, 19 nt, Homo sapiens
  misc_RNA (1)...(19): siRNA sense strand
gaaccaaaccaaagccacu

SEQ ID NO: 2452148 - RNA, 19 nt, Homo sapiens
  misc_RNA (1)...(19): siRNA sense strand
ugacaggaagauuaaagaa

SEQ ID NO: 2452149 - RNA, 19 nt, Homo sapiens
  misc_RNA (1)...(19): siRNA sense strand
cagaaacaaaagagaugaa

SEQ ID NO: 2452150 - RNA, 19 nt, Homo sapiens
  misc_RNA (1)...(19): siRNA sense strand
cagagcacggauugauuaa

SEQ ID NO: 2452151 - RNA, 19 nt, Homo sapiens
  misc_RNA (1)...(19): siRNA sense strand
uggcaguuaacaaaguaaa

SEQ ID NO: 2452152 - RNA, 19 nt, Homo sapiens
  misc_RNA (1)...(19): siRNA sense strand
uggagaagcucaaggcuga

SEQ ID NO: 2452153 - RNA, 19 nt, Homo sapiens
  misc_RNA (1)...(19): siRNA sense strand
aggagaugcaggaggcuuu

SEQ ID NO: 2452154 - RNA, 19 nt, Homo sapiens
  misc_RNA (1)...(19): siRNA sense strand
caggaagagaucaaggaga

SEQ ID NO: 2452155 - RNA, 19 nt, Homo sapiens
  misc_RNA (1)...(19): siRNA sense strand
uggagaucgaggagcgcaa

SEQ ID NO: 2452156 - RNA, 19 nt, Homo sapiens
  misc_RNA (1)...(19): siRNA sense strand
ucaucaacgagcagaacuu

SEQ ID NO: 2452157 - RNA, 19 nt, Homo sapiens
  misc_RNA (1)...(19): siRNA sense strand
caguaaagacucagaaaau

SEQ ID NO: 2452158 - RNA, 19 nt, Homo sapiens
  misc_RNA (1)...(19): siRNA sense strand
cuuugaagcuaaauggcaa

SEQ ID NO: 2452159 - RNA, 19 nt, Homo sapiens
  misc_RNA (1)...(19): siRNA sense strand
gaugcagaagagagggaaa

SEQ ID NO: 2452160 - RNA, 19 nt, Homo sapiens
  misc_RNA (1)...(19): siRNA sense strand
aggagaagcuggaggaccu

SEQ ID NO: 2452161 - RNA, 19 nt, Homo sapiens
  misc_RNA (1)...(19): siRNA sense strand
cggcagaauaccaggagca

SEQ ID NO: 2452162 - RNA, 19 nt, Homo sapiens
  misc_RNA (1)...(19): siRNA sense strand
ugagaugcuauguggaaau

SEQ ID NO: 2452163 - RNA, 19 nt, Homo sapiens
  misc_RNA (1)...(19): siRNA sense strand
uuuauuuggaggagaggaa

SEQ ID NO: 2452164 - RNA, 19 nt, Homo sapiens
  misc_RNA (1)...(19): siRNA sense strand
uggaaaucguugagaagcu

SEQ ID NO: 2452165 - RNA, 19 nt, Homo sapiens
  misc_RNA (1)...(19): siRNA sense strand
gugcucagcuaaagcccaa

SEQ ID NO: 2452166 - RNA, 19 nt, Homo sapiens
  misc_RNA (1)...(19): siRNA sense strand
auguggaaaucguugagaa

SEQ ID NO: 2452167 - RNA, 19 nt, Homo sapiens
  misc_RNA (1)...(19): siRNA sense strand
uguccacagaggagaagua

SEQ ID NO: 2452168 - RNA, 19 nt, Homo sapiens
  misc_RNA (1)...(19): siRNA sense strand
aggaagaccauccggcaca

SEQ ID NO: 2452169 - RNA, 19 nt, Homo sapiens
  misc_RNA (1)...(19): siRNA sense strand
cagaauaccaggagcacug

SEQ ID NO: 2452170 - RNA, 19 nt, Homo sapiens
  misc_RNA (1)...(19): siRNA sense strand
ggaaacagcuggacugagc

SEQ ID NO: 2452171 - RNA, 19 nt, Homo sapiens
  misc_RNA (1)...(19): siRNA sense strand
caguaaagacucagaaaau

SEQ ID NO: 2452172 - RNA, 19 nt, Homo sapiens
  misc_RNA (1)...(19): siRNA sense strand
cuuugaagcuaaauggcaa

SEQ ID NO: 2452173 - RNA, 19 nt, Homo sapiens
  misc_RNA (1)...(19): siRNA sense strand
gaugcagaagagagggaaa

SEQ ID NO: 2452174 - RNA, 19 nt, Homo sapiens
  misc_RNA (1)...(19): siRNA sense strand
aggagaagcuggaggaccu

SEQ ID NO: 2452175 - RNA, 19 nt, Homo sapiens
  misc_RNA (1)...(19): siRNA sense strand
cggcagaauaccaggagca

SEQ ID NO: 2452176 - RNA, 19 nt, Homo sapiens
  misc_RNA (1)...(19): siRNA sense strand
uuuauuuggaggagaggaa

SEQ ID NO: 2452177 - RNA, 19 nt, Homo sapiens
  misc_RNA (1)...(19): siRNA sense strand
ugagaugcuauguggaaau

SEQ ID NO: 2452178 - RNA, 19 nt, Homo sapiens
  misc_RNA (1)...(19): siRNA sense strand
uggaaaucguugagaagcu

SEQ ID NO: 2452179 - RNA, 19 nt, Homo sapiens
  misc_RNA (1)...(19): siRNA sense strand
gugcucagcuaaagcccaa

SEQ ID NO: 2452180 - RNA, 19 nt, Homo sapiens
  misc_RNA (1)...(19): siRNA sense strand
auguggaaaucguugagaa

SEQ ID NO: 2452181 - RNA, 19 nt, Homo sapiens
  misc_RNA (1)...(19): siRNA sense strand
uguccacagaggagaagua

SEQ ID NO: 2452182 - RNA, 19 nt, Homo sapiens
  misc_RNA (1)...(19): siRNA sense strand
aggaagaccauccggcaca

SEQ ID NO: 2452183 - RNA, 19 nt, Homo sapiens
  misc_RNA (1)...(19): siRNA sense strand
cagaauaccaggagcacug

SEQ ID NO: 2452184 - RNA, 19 nt, Homo sapiens
  misc_RNA (1)...(19): siRNA sense strand
ggaaacagcuggacugagc

SEQ ID NO: 2452185 - RNA, 19 nt, Homo sapiens
  misc_RNA (1)...(19): siRNA sense strand
gaaggaaacucgagggaag

SEQ ID NO: 2452186 - RNA, 19 nt, Homo sapiens
  misc_RNA (1)...(19): siRNA sense strand
ccaugaugcugcaggacca

SEQ ID NO: 2452187 - RNA, 19 nt, Homo sapiens
  misc_RNA (1)...(19): siRNA sense strand
cggcaucaccaaacagcaa

SEQ ID NO: 2452188 - RNA, 19 nt, Homo sapiens
  misc_RNA (1)...(19): siRNA sense strand
ggauggauuacaaaggaga

SEQ ID NO: 2452189 - RNA, 19 nt, Homo sapiens
  misc_RNA (1)...(19): siRNA sense strand
augcuaaugagguggaaca

SEQ ID NO: 2452190 - RNA, 19 nt, Homo sapiens
  misc_RNA (1)...(19): siRNA sense strand
ucuugauggugcuggugaa

SEQ ID NO: 2452191 - RNA, 19 nt, Homo sapiens
  misc_RNA (1)...(19): siRNA sense strand
acguugagcaugaugguga

SEQ ID NO: 2452192 - RNA, 19 nt, Homo sapiens
  misc_RNA (1)...(19): siRNA sense strand
ugagcaugauggugagagu

SEQ ID NO: 2452193 - RNA, 19 nt, Homo sapiens
  misc_RNA (1)...(19): siRNA sense strand
acuuguugcggaagaggaa

SEQ ID NO: 2452194 - RNA, 19 nt, Homo sapiens
  misc_RNA (1)...(19): siRNA sense strand
ucacacagccgcagccaga

SEQ ID NO: 2452195 - RNA, 19 nt, Homo sapiens
  misc_RNA (1)...(19): siRNA sense strand
guccaaagcucaaauaaua

SEQ ID NO: 2452196 - RNA, 19 nt, Homo sapiens
  misc_RNA (1)...(19): siRNA sense strand
guggaaggccauagagaau

SEQ ID NO: 2452197 - RNA, 19 nt, Homo sapiens
  misc_RNA (1)...(19): siRNA sense strand
ugacagaaauggaguggau

SEQ ID NO: 2452198 - RNA, 19 nt, Homo sapiens
  misc_RNA (1)...(19): siRNA sense strand
gaacauggcucccaacaaa

SEQ ID NO: 2452199 - RNA, 19 nt, Homo sapiens
  misc_RNA (1)...(19): siRNA sense strand
gcacagacacggagaaaau

SEQ ID NO: 2452200 - RNA, 19 nt, Homo sapiens
  misc_RNA (1)...(19): siRNA sense strand
ggacucuaccugacagaaa

SEQ ID NO: 2452201 - RNA, 19 nt, Homo sapiens
  misc_RNA (1)...(19): siRNA sense strand
uggcaaagaccuuccgcaa

SEQ ID NO: 2452202 - RNA, 19 nt, Homo sapiens
  misc_RNA (1)...(19): siRNA sense strand
acagaaauggaguggauga

SEQ ID NO: 2452203 - RNA, 19 nt, Homo sapiens
  misc_RNA (1)...(19): siRNA sense strand
aggaaacacugcaggagga

SEQ ID NO: 2452204 - RNA, 19 nt, Homo sapiens
  misc_RNA (1)...(19): siRNA sense strand
cagugaagacagcgaccaa

SEQ ID NO: 2452205 - RNA, 19 nt, Homo sapiens
  misc_RNA (1)...(19): siRNA sense strand
ugauggaacugaaagugaa

SEQ ID NO: 2452206 - RNA, 19 nt, Homo sapiens
  misc_RNA (1)...(19): siRNA sense strand
caacagaaauucaucgcca

SEQ ID NO: 2452207 - RNA, 19 nt, Homo sapiens
  misc_RNA (1)...(19): siRNA sense strand
guucagaaacacuguccaa

SEQ ID NO: 2452208 - RNA, 19 nt, Homo sapiens
  misc_RNA (1)...(19): siRNA sense strand
gcaacuucaccaugacuua

SEQ ID NO: 2452209 - RNA, 19 nt, Homo sapiens
  misc_RNA (1)...(19): siRNA sense strand
uggagaaggccuaugccaa

SEQ ID NO: 2452210 - RNA, 19 nt, Homo sapiens
  misc_RNA (1)...(19): siRNA sense strand
ggcuagaccaagaggaguu

SEQ ID NO: 2452211 - RNA, 19 nt, Homo sapiens
  misc_RNA (1)...(19): siRNA sense strand
agaagcugcuccaggaaaa

SEQ ID NO: 2452212 - RNA, 19 nt, Homo sapiens
  misc_RNA (1)...(19): siRNA sense strand
caaauaauguuuaggaagc

SEQ ID NO: 2452213 - RNA, 19 nt, Homo sapiens
  misc_RNA (1)...(19): siRNA sense strand
aguucaaagaccaggacuu

SEQ ID NO: 2452214 - RNA, 19 nt, Homo sapiens
  misc_RNA (1)...(19): siRNA sense strand
ccaaauaauguuuaggaag

SEQ ID NO: 2452215 - RNA, 19 nt, Homo sapiens
  misc_RNA (1)...(19): siRNA sense strand
ggagaaaaucagcggaguu

SEQ ID NO: 2452216 - RNA, 19 nt, Homo sapiens
  misc_RNA (1)...(19): siRNA sense strand
ugaaaaugccagacaguga

SEQ ID NO: 2452217 - RNA, 19 nt, Homo sapiens
  misc_RNA (1)...(19): siRNA sense strand
cuacauaagaaacgggaag

SEQ ID NO: 2452218 - RNA, 19 nt, Homo sapiens
  misc_RNA (1)...(19): siRNA sense strand
uguccaaagcucaaauaau

SEQ ID NO: 2452219 - RNA, 19 nt, Homo sapiens
  misc_RNA (1)...(19): siRNA sense strand
gcgcuggagugaugggucu

SEQ ID NO: 2452220 - RNA, 19 nt, Homo sapiens
  misc_RNA (1)...(19): siRNA sense strand
guuuaggaagcaagugauu

SEQ ID NO: 2452221 - RNA, 19 nt, Homo sapiens
  misc_RNA (1)...(19): siRNA sense strand
caacaaagcauuuucaaca

SEQ ID NO: 2452222 - RNA, 19 nt, Homo sapiens
  misc_RNA (1)...(19): siRNA sense strand
ucacagcgguuccgggaga

SEQ ID NO: 2452223 - RNA, 19 nt, Homo sapiens
  misc_RNA (1)...(19): siRNA sense strand
ggaugauauaagcagauuu

SEQ ID NO: 2452224 - RNA, 19 nt, Homo sapiens
  misc_RNA (1)...(19): siRNA sense strand
gcuccgaaucuuccugaaa

SEQ ID NO: 2452225 - RNA, 19 nt, Homo sapiens
  misc_RNA (1)...(19): siRNA sense strand
ccugauaaccugugccacu

SEQ ID NO: 2452226 - RNA, 19 nt, Homo sapiens
  misc_RNA (1)...(19): siRNA sense strand
ccauagagaauacagacuu

SEQ ID NO: 2452227 - RNA, 19 nt, Homo sapiens
  misc_RNA (1)...(19): siRNA sense strand
ccuccaucaucaaguucaa

SEQ ID NO: 2452228 - RNA, 19 nt, Homo sapiens
  misc_RNA (1)...(19): siRNA sense strand
ucaucaaguucaaagacca

SEQ ID NO: 2452229 - RNA, 19 nt, Homo sapiens
  misc_RNA (1)...(19): siRNA sense strand
uguggaaggccauagagaa

SEQ ID NO: 2452230 - RNA, 19 nt, Homo sapiens
  misc_RNA (1)...(19): siRNA sense strand
gauggaacugaaagugaau

SEQ ID NO: 2452231 - RNA, 19 nt, Homo sapiens
  misc_RNA (1)...(19): siRNA sense strand
cugauggaacugaaaguga

SEQ ID NO: 2452232 - RNA, 19 nt, Homo sapiens
  misc_RNA (1)...(19): siRNA sense strand
gcuacauaagaaacgggaa

SEQ ID NO: 2452233 - RNA, 19 nt, Homo sapiens
  misc_RNA (1)...(19): siRNA sense strand
ggaaggccauagagaauac

SEQ ID NO: 2452234 - RNA, 19 nt, Homo sapiens
  misc_RNA (1)...(19): siRNA sense strand
gcuuauccuuggagaggca

SEQ ID NO: 2452235 - RNA, 19 nt, Homo sapiens
  misc_RNA (1)...(19): siRNA sense strand
cccaagaucacgucggcaa

SEQ ID NO: 2452236 - RNA, 19 nt, Homo sapiens
  misc_RNA (1)...(19): siRNA sense strand
ggaacuauuugcagggaga

SEQ ID NO: 2452237 - RNA, 19 nt, Homo sapiens
  misc_RNA (1)...(19): siRNA sense strand
gaggaaagaagaagaccaa

SEQ ID NO: 2452238 - RNA, 19 nt, Homo sapiens
  misc_RNA (1)...(19): siRNA sense strand
ggacaagugaacagaguga

SEQ ID NO: 2452239 - RNA, 19 nt, Homo sapiens
  misc_RNA (1)...(19): siRNA sense strand
gcuuugaggaagugaagaa

SEQ ID NO: 2452240 - RNA, 19 nt, Homo sapiens
  misc_RNA (1)...(19): siRNA sense strand
gggccaaggucuggaagaa

SEQ ID NO: 2452241 - RNA, 19 nt, Homo sapiens
  misc_RNA (1)...(19): siRNA sense strand
aagaacagaaugaggaaau

SEQ ID NO: 2452242 - RNA, 19 nt, Homo sapiens
  misc_RNA (1)...(19): siRNA sense strand
ugaugauggaacaggaaua

SEQ ID NO: 2452243 - RNA, 19 nt, Homo sapiens
  misc_RNA (1)...(19): siRNA sense strand
cgguaauggagucggaaau

SEQ ID NO: 2452244 - RNA, 19 nt, Homo sapiens
  misc_RNA (1)...(19): siRNA sense strand
augaguugguagaagaaua

SEQ ID NO: 2452245 - RNA, 19 nt, Homo sapiens
  misc_RNA (1)...(19): siRNA sense strand
ccagagacccaaagccaaa

SEQ ID NO: 2452246 - RNA, 19 nt, Homo sapiens
  misc_RNA (1)...(19): siRNA sense strand
gggagaagagucuggaaga

SEQ ID NO: 2452247 - RNA, 19 nt, Homo sapiens
  misc_RNA (1)...(19): siRNA sense strand
uugaggaagugaagaagaa

SEQ ID NO: 2452248 - RNA, 19 nt, Homo sapiens
  misc_RNA (1)...(19): siRNA sense strand
uuacagaaucccugcauaa

SEQ ID NO: 2452249 - RNA, 19 nt, Homo sapiens
  misc_RNA (1)...(19): siRNA sense strand
agaaaaggcuagaagaaca

SEQ ID NO: 2452250 - RNA, 19 nt, Homo sapiens
  misc_RNA (1)...(19): siRNA sense strand
aggaagugaagaagaagaa

SEQ ID NO: 2452251 - RNA, 19 nt, Homo sapiens
  misc_RNA (1)...(19): siRNA sense strand
gagcauggacacugccaaa

SEQ ID NO: 2452252 - RNA, 19 nt, Homo sapiens
  misc_RNA (1)...(19): siRNA sense strand
agccuuuguuagugagaua

SEQ ID NO: 2452253 - RNA, 19 nt, Homo sapiens
  misc_RNA (1)...(19): siRNA sense strand
caaaggacacaaagagaga

SEQ ID NO: 2452254 - RNA, 19 nt, Homo sapiens
  misc_RNA (1)...(19): siRNA sense strand
ggcuagaagaacagaauga

SEQ ID NO: 2452255 - RNA, 19 nt, Homo sapiens
  misc_RNA (1)...(19): siRNA sense strand
caucagugcauuugggaca

SEQ ID NO: 2452256 - RNA, 19 nt, Homo sapiens
  misc_RNA (1)...(19): siRNA sense strand
ucaggaagaaagugaacaa

SEQ ID NO: 2452257 - RNA, 19 nt, Homo sapiens
  misc_RNA (1)...(19): siRNA sense strand
ugacagugaaagaaagcua

SEQ ID NO: 2452258 - RNA, 19 nt, Homo sapiens
  misc_RNA (1)...(19): siRNA sense strand
aggaagaaagugaacaaau

SEQ ID NO: 2452259 - RNA, 19 nt, Homo sapiens
  misc_RNA (1)...(19): siRNA sense strand
cugaagacacauaugcaaa

SEQ ID NO: 2452260 - RNA, 19 nt, Homo sapiens
  misc_RNA (1)...(19): siRNA sense strand
augaggaaaugaugaagaa

SEQ ID NO: 2452261 - RNA, 19 nt, Homo sapiens
  misc_RNA (1)...(19): siRNA sense strand
aggaaacucauaagacaaa

SEQ ID NO: 2452262 - RNA, 19 nt, Homo sapiens
  misc_RNA (1)...(19): siRNA sense strand
agaaugaggaaaugaugaa

SEQ ID NO: 2452263 - RNA, 19 nt, Homo sapiens
  misc_RNA (1)...(19): siRNA sense strand
gggugauggcugugaacuu

SEQ ID NO: 2452264 - RNA, 19 nt, Homo sapiens
  misc_RNA (1)...(19): siRNA sense strand
uucugaaggcugugagaua

SEQ ID NO: 2452265 - RNA, 19 nt, Homo sapiens
  misc_RNA (1)...(19): siRNA sense strand
cccaguaaguucaguggaa

SEQ ID NO: 2452266 - RNA, 19 nt, Homo sapiens
  misc_RNA (1)...(19): siRNA sense strand
augaagaagcaguuggaga

SEQ ID NO: 2452267 - RNA, 19 nt, Homo sapiens
  misc_RNA (1)...(19): siRNA sense strand
aaguacaccugcugaacaa

SEQ ID NO: 2452268 - RNA, 19 nt, Homo sapiens
  misc_RNA (1)...(19): siRNA sense strand
ugagaaaaggcuagaagaa

SEQ ID NO: 2452269 - RNA, 19 nt, Homo sapiens
  misc_RNA (1)...(19): siRNA sense strand
agaagugaccagauguuaa

SEQ ID NO: 2452270 - RNA, 19 nt, Homo sapiens
  misc_RNA (1)...(19): siRNA sense strand
ggaagaugucauugauuca

SEQ ID NO: 2452271 - RNA, 19 nt, Homo sapiens
  misc_RNA (1)...(19): siRNA sense strand
agaagagucuggaagaaca

SEQ ID NO: 2452272 - RNA, 19 nt, Homo sapiens
  misc_RNA (1)...(19): siRNA sense strand
agaagaacagaaugaggaa

SEQ ID NO: 2452273 - RNA, 19 nt, Homo sapiens
  misc_RNA (1)...(19): siRNA sense strand
cuaauaaagaaaugcccaa

SEQ ID NO: 2452274 - RNA, 19 nt, Homo sapiens
  misc_RNA (1)...(19): siRNA sense strand
gugaagagaggcuccguaa

SEQ ID NO: 2452275 - RNA, 19 nt, Homo sapiens
  misc_RNA (1)...(19): siRNA sense strand
gcgagaggaaagaagaaga

SEQ ID NO: 2452276 - RNA, 19 nt, Homo sapiens
  misc_RNA (1)...(19): siRNA sense strand
aaguaaaugaguugguaga

SEQ ID NO: 2452277 - RNA, 19 nt, Homo sapiens
  misc_RNA (1)...(19): siRNA sense strand
augaauaugacuuggugaa

SEQ ID NO: 2452278 - RNA, 19 nt, Homo sapiens
  misc_RNA (1)...(19): siRNA sense strand
augcaaguccagaggucaa

SEQ ID NO: 2452279 - RNA, 19 nt, Homo sapiens
  misc_RNA (1)...(19): siRNA sense strand
cagcgagaggaaagaagaa

SEQ ID NO: 2452280 - RNA, 19 nt, Homo sapiens
  misc_RNA (1)...(19): siRNA sense strand
aaggaaacucauaagacaa

SEQ ID NO: 2452281 - RNA, 19 nt, Homo sapiens
  misc_RNA (1)...(19): siRNA sense strand
agaagaagaagauggaguu

SEQ ID NO: 2452282 - RNA, 19 nt, Homo sapiens
  misc_RNA (1)...(19): siRNA sense strand
aggaauguuucaaaggaca

SEQ ID NO: 2452283 - RNA, 19 nt, Homo sapiens
  misc_RNA (1)...(19): siRNA sense strand
ggaaggaguucuaucacga

SEQ ID NO: 2452284 - RNA, 19 nt, Homo sapiens
  misc_RNA (1)...(19): siRNA sense strand
acguagcgaugcagaagaa

SEQ ID NO: 2452285 - RNA, 19 nt, Homo sapiens
  misc_RNA (1)...(19): siRNA sense strand
ggagcaugaacaaggaaga

SEQ ID NO: 2452286 - RNA, 19 nt, Homo sapiens
  misc_RNA (1)...(19): siRNA sense strand
cuacagugguauugugagu

SEQ ID NO: 2452287 - RNA, 19 nt, Homo sapiens
  misc_RNA (1)...(19): siRNA sense strand
ucucaaaggaaguuacaga

SEQ ID NO: 2452288 - RNA, 19 nt, Homo sapiens
  misc_RNA (1)...(19): siRNA sense strand
ccaguaaguucaguggaaa

SEQ ID NO: 2452289 - RNA, 19 nt, Homo sapiens
  misc_RNA (1)...(19): siRNA sense strand
gaggaagugaagaagaaga

SEQ ID NO: 2452290 - RNA, 19 nt, Homo sapiens
  misc_RNA (1)...(19): siRNA sense strand
aagaagaagaagauggagu

SEQ ID NO: 2452291 - RNA, 19 nt, Homo sapiens
  misc_RNA (1)...(19): siRNA sense strand
ggugaaauuagaugaaagu

SEQ ID NO: 2452292 - RNA, 19 nt, Homo sapiens
  misc_RNA (1)...(19): siRNA sense strand
gccaaggucuggaagaaaa

SEQ ID NO: 2452293 - RNA, 19 nt, Homo sapiens
  misc_RNA (1)...(19): siRNA sense strand
uacaacaaccagagacuua

SEQ ID NO: 2452294 - RNA, 19 nt, Homo sapiens
  misc_RNA (1)...(19): siRNA sense strand
agaaagugaacaaaugcaa

SEQ ID NO: 2452295 - RNA, 19 nt, Homo sapiens
  misc_RNA (1)...(19): siRNA sense strand
agagauauccacagauuca

SEQ ID NO: 2452296 - RNA, 19 nt, Homo sapiens
  misc_RNA (1)...(19): siRNA sense strand
agauggaguuccugcauga

SEQ ID NO: 2452297 - RNA, 19 nt, Homo sapiens
  misc_RNA (1)...(19): siRNA sense strand
gagcagguuagaagaugaa

SEQ ID NO: 2452298 - RNA, 19 nt, Homo sapiens
  misc_RNA (1)...(19): siRNA sense strand
ggaugcuggugguggccuu

SEQ ID NO: 2452299 - RNA, 19 nt, Homo sapiens
  misc_RNA (1)...(19): siRNA sense strand
cagcaaaucacaauugaaa

SEQ ID NO: 2452300 - RNA, 19 nt, Homo sapiens
  misc_RNA (1)...(19): siRNA sense strand
agucaaagccucucaagaa

SEQ ID NO: 2452301 - RNA, 19 nt, Homo sapiens
  misc_RNA (1)...(19): siRNA sense strand
ccagaaaggauuuacaaaa

SEQ ID NO: 2452302 - RNA, 19 nt, Homo sapiens
  misc_RNA (1)...(19): siRNA sense strand
gucaaagccucucaagaaa

SEQ ID NO: 2452303 - RNA, 19 nt, Homo sapiens
  misc_RNA (1)...(19): siRNA sense strand
guaagggcauugaguggua

SEQ ID NO: 2452304 - RNA, 19 nt, Homo sapiens
  misc_RNA (1)...(19): siRNA sense strand
auugagugguauaggaaaa

SEQ ID NO: 2452305 - RNA, 19 nt, Homo sapiens
  misc_RNA (1)...(19): siRNA sense strand
gcauugagugguauaggaa

SEQ ID NO: 2452306 - RNA, 19 nt, Homo sapiens
  misc_RNA (1)...(19): siRNA sense strand
ggugaggaaaggaggcaca

SEQ ID NO: 2452307 - RNA, 19 nt, Homo sapiens
  misc_RNA (1)...(19): siRNA sense strand
ccuccaaggauaagucaau

SEQ ID NO: 2452308 - RNA, 19 nt, Homo sapiens
  misc_RNA (1)...(19): siRNA sense strand
agaauuaugguaagggcau

SEQ ID NO: 2452309 - RNA, 19 nt, Homo sapiens
  misc_RNA (1)...(19): siRNA sense strand
ugaaaagagcccagcauau

SEQ ID NO: 2452310 - RNA, 19 nt, Homo sapiens
  misc_RNA (1)...(19): siRNA sense strand
caaugcuaccagaggguuu

SEQ ID NO: 2452311 - RNA, 19 nt, Homo sapiens
  misc_RNA (1)...(19): siRNA sense strand
aaggagaggaagaacaaaa

SEQ ID NO: 2452312 - RNA, 19 nt, Homo sapiens
  misc_RNA (1)...(19): siRNA sense strand
gaauuaugguaagggcauu

SEQ ID NO: 2452313 - RNA, 19 nt, Homo sapiens
  misc_RNA (1)...(19): siRNA sense strand
auacuuuccaauugagcaa

SEQ ID NO: 2452314 - RNA, 19 nt, Homo sapiens
  misc_RNA (1)...(19): siRNA sense strand
agaguugggagcuuggaua

SEQ ID NO: 2452315 - RNA, 19 nt, Homo sapiens
  misc_RNA (1)...(19): siRNA sense strand
acagaggagguuccagaaa

SEQ ID NO: 2452316 - RNA, 19 nt, Homo sapiens
  misc_RNA (1)...(19): siRNA sense strand
auuacaaguuugagaagcu

SEQ ID NO: 2452317 - RNA, 19 nt, Homo sapiens
  misc_RNA (1)...(19): siRNA sense strand
gagaauuaugguaagggca

SEQ ID NO: 2452318 - RNA, 19 nt, Homo sapiens
  misc_RNA (1)...(19): siRNA sense strand
cauugagugguauaggaaa

SEQ ID NO: 2452319 - RNA, 19 nt, Homo sapiens
  misc_RNA (1)...(19): siRNA sense strand
ucacagaggagguuccaga

SEQ ID NO: 2452320 - RNA, 19 nt, Homo sapiens
  misc_RNA (1)...(19): siRNA sense strand
acgaguuccggaagggcaa

SEQ ID NO: 2452321 - RNA, 19 nt, Homo sapiens
  misc_RNA (1)...(19): siRNA sense strand
ggagguuccagaaaggauu

SEQ ID NO: 2452322 - RNA, 19 nt, Homo sapiens
  misc_RNA (1)...(19): siRNA sense strand
auuacaggauggaggaaga

SEQ ID NO: 2452323 - RNA, 19 nt, Homo sapiens
  misc_RNA (1)...(19): siRNA sense strand
gcagagugguggaggaggu

SEQ ID NO: 2452324 - RNA, 19 nt, Homo sapiens
  misc_RNA (1)...(19): siRNA sense strand
ggaggaagacugugugcca

SEQ ID NO: 2452325 - RNA, 19 nt, Homo sapiens
  misc_RNA (1)...(19): siRNA sense strand
uggcacaggcucugggcau

SEQ ID NO: 2452326 - RNA, 19 nt, Homo sapiens
  misc_RNA (1)...(19): siRNA sense strand
guucaaaccaggagccuuc

SEQ ID NO: 2452327 - RNA, 19 nt, Homo sapiens
  misc_RNA (1)...(19): siRNA sense strand
ggacagugcuggagccaca

SEQ ID NO: 2452328 - RNA, 19 nt, Homo sapiens
  misc_RNA (1)...(19): siRNA sense strand
cggacgaccuggauggcaa

SEQ ID NO: 2452329 - RNA, 19 nt, Homo sapiens
  misc_RNA (1)...(19): siRNA sense strand
ggaucaagguggccaggga

SEQ ID NO: 2452330 - RNA, 19 nt, Homo sapiens
  misc_RNA (1)...(19): siRNA sense strand
cggucaucuuuccggauaa

SEQ ID NO: 2452331 - RNA, 19 nt, Homo sapiens
  misc_RNA (1)...(19): siRNA sense strand
ccaacgaggccaagccaga

SEQ ID NO: 2452332 - RNA, 19 nt, Homo sapiens
  misc_RNA (1)...(19): siRNA sense strand
gggccuuugggaagagaau

SEQ ID NO: 2452333 - RNA, 19 nt, Homo sapiens
  misc_RNA (1)...(19): siRNA sense strand
ucacaagaauggagcagcu

SEQ ID NO: 2452334 - RNA, 19 nt, Homo sapiens
  misc_RNA (1)...(19): siRNA sense strand
ggaaauuguccuaggccag

SEQ ID NO: 2452335 - RNA, 19 nt, Homo sapiens
  misc_RNA (1)...(19): siRNA sense strand
gcagcaacccaauagguca

SEQ ID NO: 2452336 - RNA, 19 nt, Homo sapiens
  misc_RNA (1)...(19): siRNA sense strand
gggauaaagagaagagcaa

SEQ ID NO: 2452337 - RNA, 19 nt, Homo sapiens
  misc_RNA (1)...(19): siRNA sense strand
ugucaaaaucugaggauaa

SEQ ID NO: 2452338 - RNA, 19 nt, Homo sapiens
  misc_RNA (1)...(19): siRNA sense strand
gauaaagagaagagcaaca

SEQ ID NO: 2452339 - RNA, 19 nt, Homo sapiens
  misc_RNA (1)...(19): siRNA sense strand
cuauuagauuggaggauuu

SEQ ID NO: 2452340 - RNA, 19 nt, Homo sapiens
  misc_RNA (1)...(19): siRNA sense strand
cuaaguugguggagcagaa

SEQ ID NO: 2452341 - RNA, 19 nt, Homo sapiens
  misc_RNA (1)...(19): siRNA sense strand
guacaagcucauugggauu

SEQ ID NO: 2452342 - RNA, 19 nt, Homo sapiens
  misc_RNA (1)...(19): siRNA sense strand
aaacaagaacagugaugaa

SEQ ID NO: 2452343 - RNA, 19 nt, Homo sapiens
  misc_RNA (1)...(19): siRNA sense strand
agucuuacauugaggauga

SEQ ID NO: 2452344 - RNA, 19 nt, Homo sapiens
  misc_RNA (1)...(19): siRNA sense strand
acggaaacuuggaggagau

SEQ ID NO: 2452345 - RNA, 19 nt, Homo sapiens
  misc_RNA (1)...(19): siRNA sense strand
ugauggaccaggagugaaa

SEQ ID NO: 2452346 - RNA, 19 nt, Homo sapiens
  misc_RNA (1)...(19): siRNA sense strand
ccuuaguagccgacugaaa

SEQ ID NO: 2452347 - RNA, 19 nt, Homo sapiens
  misc_RNA (1)...(19): siRNA sense strand
ggauuaaggcaauugaaaa

SEQ ID NO: 2452348 - RNA, 19 nt, Homo sapiens
  misc_RNA (1)...(19): siRNA sense strand
gguuaaagcacauuguaga

SEQ ID NO: 2452349 - RNA, 19 nt, Homo sapiens
  misc_RNA (1)...(19): siRNA sense strand
guucuaaguugguggagca

SEQ ID NO: 2452350 - RNA, 19 nt, Homo sapiens
  misc_RNA (1)...(19): siRNA sense strand
caguauugcuccagagaac

SEQ ID NO: 2452351 - RNA, 19 nt, Homo sapiens
  misc_RNA (1)...(19): siRNA sense strand
aaguaaaggacgagcaagu

SEQ ID NO: 2452352 - RNA, 19 nt, Homo sapiens
  misc_RNA (1)...(19): siRNA sense strand
uagaguugguaguguuaaa

SEQ ID NO: 2452353 - RNA, 19 nt, Homo sapiens
  misc_RNA (1)...(19): siRNA sense strand
augaaaagcuggauccaaa

SEQ ID NO: 2452354 - RNA, 19 nt, Homo sapiens
  misc_RNA (1)...(19): siRNA sense strand
gcaccguauucaaguacaa

SEQ ID NO: 2452355 - RNA, 19 nt, Homo sapiens
  misc_RNA (1)...(19): siRNA sense strand
agagacagcauaacggaaa

SEQ ID NO: 2452356 - RNA, 19 nt, Homo sapiens
  misc_RNA (1)...(19): siRNA sense strand
uggauacacuugagguaau

SEQ ID NO: 2452357 - RNA, 19 nt, Homo sapiens
  misc_RNA (1)...(19): siRNA sense strand
ccauaucugcagugggaau

SEQ ID NO: 2452358 - RNA, 19 nt, Homo sapiens
  misc_RNA (1)...(19): siRNA sense strand
gaaacuuggaggagauuga

SEQ ID NO: 2452359 - RNA, 19 nt, Homo sapiens
  misc_RNA (1)...(19): siRNA sense strand
caacaauuguagagaggcu

SEQ ID NO: 2452360 - RNA, 19 nt, Homo sapiens
  misc_RNA (1)...(19): siRNA sense strand
cgggagagagucagaauca

SEQ ID NO: 2452361 - RNA, 19 nt, Homo sapiens
  misc_RNA (1)...(19): siRNA sense strand
gaacuagagaagacgguga

SEQ ID NO: 2452362 - RNA, 19 nt, Homo sapiens
  misc_RNA (1)...(19): siRNA sense strand
aggauuuaccugugauaau

SEQ ID NO: 2452363 - RNA, 19 nt, Homo sapiens
  misc_RNA (1)...(19): siRNA sense strand
auggauaaguugucgucua

SEQ ID NO: 2452364 - RNA, 19 nt, Homo sapiens
  misc_RNA (1)...(19): siRNA sense strand
uugacagggugcuaagaaa

SEQ ID NO: 2452365 - RNA, 19 nt, Homo sapiens
  misc_RNA (1)...(19): siRNA sense strand
caacugguuccgagagauu

SEQ ID NO: 2452366 - RNA, 19 nt, Homo sapiens
  misc_RNA (1)...(19): siRNA sense strand
gcacauuguagaauugcaa

SEQ ID NO: 2452367 - RNA, 19 nt, Homo sapiens
  misc_RNA (1)...(19): siRNA sense strand
guaaccaccuggagaacau

SEQ ID NO: 2452368 - RNA, 19 nt, Homo sapiens
  misc_RNA (1)...(19): siRNA sense strand
cgguguaguugauggacca

SEQ ID NO: 2452369 - RNA, 19 nt, Homo sapiens
  misc_RNA (1)...(19): siRNA sense strand
cuugcagggugaagagauu

SEQ ID NO: 2452370 - RNA, 19 nt, Homo sapiens
  misc_RNA (1)...(19): siRNA sense strand
guugaaaaguaaaggacga

SEQ ID NO: 2452371 - RNA, 19 nt, Homo sapiens
  misc_RNA (1)...(19): siRNA sense strand
guuaaagcacauuguagaa

SEQ ID NO: 2452372 - RNA, 19 nt, Homo sapiens
  misc_RNA (1)...(19): siRNA sense strand
gugaagagauuaaguccca

SEQ ID NO: 2452373 - RNA, 19 nt, Homo sapiens
  misc_RNA (1)...(19): siRNA sense strand
acagaguuguggauggcaa

SEQ ID NO: 2452374 - RNA, 19 nt, Homo sapiens
  misc_RNA (1)...(19): siRNA sense strand
gcacacuggcauuuagcaa

SEQ ID NO: 2452375 - RNA, 19 nt, Homo sapiens
  misc_RNA (1)...(19): siRNA sense strand
ggauaaagagagccugaca

SEQ ID NO: 2452376 - RNA, 19 nt, Homo sapiens
  misc_RNA (1)...(19): siRNA sense strand
guguggagagacagcauaa

SEQ ID NO: 2452377 - RNA, 19 nt, Homo sapiens
  misc_RNA (1)...(19): siRNA sense strand
gcuaaagagcguucauuca

SEQ ID NO: 2452378 - RNA, 19 nt, Homo sapiens
  misc_RNA (1)...(19): siRNA sense strand
ugcaaauaauccuggaaaa

SEQ ID NO: 2452379 - RNA, 19 nt, Homo sapiens
  misc_RNA (1)...(19): siRNA sense strand
uggauuaaggcaauugaaa

SEQ ID NO: 2452380 - RNA, 19 nt, Homo sapiens
  misc_RNA (1)...(19): siRNA sense strand
gagcacagcagaugagagu

SEQ ID NO: 2452381 - RNA, 19 nt, Homo sapiens
  misc_RNA (1)...(19): siRNA sense strand
ugaccuacugauagagaau

SEQ ID NO: 2452382 - RNA, 19 nt, Homo sapiens
  misc_RNA (1)...(19): siRNA sense strand
gaggauaaagagagccuga

SEQ ID NO: 2452383 - RNA, 19 nt, Homo sapiens
  misc_RNA (1)...(19): siRNA sense strand
gcuaaugaaguugaagaaa

SEQ ID NO: 2452384 - RNA, 19 nt, Homo sapiens
  misc_RNA (1)...(19): siRNA sense strand
acaagaacagugaugaaau

SEQ ID NO: 2452385 - RNA, 19 nt, Homo sapiens
  misc_RNA (1)...(19): siRNA sense strand
acucauugucagucaacua

SEQ ID NO: 2452386 - RNA, 19 nt, Homo sapiens
  misc_RNA (1)...(19): siRNA sense strand
ugagguaauuucugagcuu

SEQ ID NO: 2452387 - RNA, 19 nt, Homo sapiens
  misc_RNA (1)...(19): siRNA sense strand
ggugcuaagaaauaagauu

SEQ ID NO: 2452388 - RNA, 19 nt, Homo sapiens
  misc_RNA (1)...(19): siRNA sense strand
caucauggcggcagacaga

SEQ ID NO: 2452389 - RNA, 19 nt, Homo sapiens
  misc_RNA (1)...(19): siRNA sense strand
acaaggaguucacagggaa

SEQ ID NO: 2452390 - RNA, 19 nt, Homo sapiens
  misc_RNA (1)...(19): siRNA sense strand
ucacagggaaggaagaaaa

SEQ ID NO: 2452391 - RNA, 19 nt, Homo sapiens
  misc_RNA (1)...(19): siRNA sense strand
cacugaagcuacagaaguu

SEQ ID NO: 2452392 - RNA, 19 nt, Homo sapiens
  misc_RNA (1)...(19): siRNA sense strand
gaagagauuaagucccaaa

SEQ ID NO: 2452393 - RNA, 19 nt, Homo sapiens
  misc_RNA (1)...(19): siRNA sense strand
cauggauacacuugaggua

SEQ ID NO: 2452394 - RNA, 19 nt, Homo sapiens
  misc_RNA (1)...(19): siRNA sense strand
ugacagggugcuaagaaau

SEQ ID NO: 2452395 - RNA, 19 nt, Homo sapiens
  misc_RNA (1)...(19): siRNA sense strand
aguacaagcucauugggau

SEQ ID NO: 2452396 - RNA, 19 nt, Homo sapiens
  misc_RNA (1)...(19): siRNA sense strand
ggaggauuuaccugugaua

SEQ ID NO: 2452397 - RNA, 19 nt, Homo sapiens
  misc_RNA (1)...(19): siRNA sense strand
uuugagaaguugccagaau

SEQ ID NO: 2452398 - RNA, 19 nt, Homo sapiens
  misc_RNA (1)...(19): siRNA sense strand
gggagaaguuggaucugca

SEQ ID NO: 2452399 - RNA, 19 nt, Homo sapiens
  misc_RNA (1)...(19): siRNA sense strand
auaaagagagccugacaga

SEQ ID NO: 2452400 - RNA, 19 nt, Homo sapiens
  misc_RNA (1)...(19): siRNA sense strand
uggaagaauacgacacuca

SEQ ID NO: 2452401 - RNA, 19 nt, Homo sapiens
  misc_RNA (1)...(19): siRNA sense strand
gaagaaaccuugaacgaca

SEQ ID NO: 2452402 - RNA, 19 nt, Homo sapiens
  misc_RNA (1)...(19): siRNA sense strand
cagccuacgcccagagcaa

SEQ ID NO: 2452403 - RNA, 19 nt, Homo sapiens
  misc_RNA (1)...(19): siRNA sense strand
ggacagauggcauuggcua

SEQ ID NO: 2452404 - RNA, 19 nt, Homo sapiens
  misc_RNA (1)...(19): siRNA sense strand
acaacgagaaagagaccaa

SEQ ID NO: 2452405 - RNA, 19 nt, Homo sapiens
  misc_RNA (1)...(19): siRNA sense strand
cuggaaauaaugacagcaa

SEQ ID NO: 2452406 - RNA, 19 nt, Homo sapiens
  misc_RNA (1)...(19): siRNA sense strand
cuauacaacgagaaagaga

SEQ ID NO: 2452407 - RNA, 19 nt, Homo sapiens
  misc_RNA (1)...(19): siRNA sense strand
accuauacaacgagaaaga

SEQ ID NO: 2452408 - RNA, 19 nt, Homo sapiens
  misc_RNA (1)...(19): siRNA sense strand
gaggaaaaccagagaugga

SEQ ID NO: 2452409 - RNA, 19 nt, Homo sapiens
  misc_RNA (1)...(19): siRNA sense strand
uauagugacgggagggaca

SEQ ID NO: 2452410 - RNA, 19 nt, Homo sapiens
  misc_RNA (1)...(19): siRNA sense strand
uggucuaagaguugugaga

SEQ ID NO: 2452411 - RNA, 19 nt, Homo sapiens
  misc_RNA (1)...(19): siRNA sense strand
cgggagggacagauggcau

SEQ ID NO: 2452412 - RNA, 19 nt, Homo sapiens
  misc_RNA (1)...(19): siRNA sense strand
agauggauucgaagaacau

SEQ ID NO: 2452413 - RNA, 19 nt, Homo sapiens
  misc_RNA (1)...(19): siRNA sense strand
gugugaaggagaagggaca

SEQ ID NO: 2452414 - RNA, 19 nt, Homo sapiens
  misc_RNA (1)...(19): siRNA sense strand
gcaucugugccgagggcua

SEQ ID NO: 2452415 - RNA, 19 nt, Homo sapiens
  misc_RNA (1)...(19): siRNA sense strand
ggacaacuuuggaggugga

SEQ ID NO: 2452416 - RNA, 19 nt, Homo sapiens
  misc_RNA (1)...(19): siRNA sense strand
cgggcagugugaaggagaa

SEQ ID NO: 2452417 - RNA, 19 nt, Homo sapiens
  misc_RNA (1)...(19): siRNA sense strand
gagagaaccauccgggaca

SEQ ID NO: 2452418 - RNA, 19 nt, Homo sapiens
  misc_RNA (1)...(19): siRNA sense strand
ggagcagaucccagaguca

SEQ ID NO: 2452419 - RNA, 19 nt, Homo sapiens
  misc_RNA (1)...(19): siRNA sense strand
acuuugaggcagaacgcaa

SEQ ID NO: 2452420 - RNA, 19 nt, Homo sapiens
  misc_RNA (1)...(19): siRNA sense strand
uggaugagugugagacaga

SEQ ID NO: 2452421 - RNA, 19 nt, Homo sapiens
  misc_RNA (1)...(19): siRNA sense strand
acaagcagauggaaggcau

SEQ ID NO: 2452422 - RNA, 19 nt, Homo sapiens
  misc_RNA (1)...(19): siRNA sense strand
uagaggugcuggagggugu

SEQ ID NO: 2452423 - RNA, 19 nt, Homo sapiens
  misc_RNA (1)...(19): siRNA sense strand
caacuuuggagguggaaac

SEQ ID NO: 2452424 - RNA, 19 nt, Homo sapiens
  misc_RNA (1)...(19): siRNA sense strand
gugaggagcugguggagag

SEQ ID NO: 2452425 - RNA, 19 nt, Homo sapiens
  misc_RNA (1)...(19): siRNA sense strand
auacaaagacagugagacc

SEQ ID NO: 2452426 - RNA, 19 nt, Homo sapiens
  misc_RNA (1)...(19): siRNA sense strand
cugccugggaggaagagaa

SEQ ID NO: 2452427 - RNA, 19 nt, Homo sapiens
  misc_RNA (1)...(19): siRNA sense strand
gcaucugugugaaggagca

SEQ ID NO: 2452428 - RNA, 19 nt, Homo sapiens
  misc_RNA (1)...(19): siRNA sense strand
cagagaugacagaagacga

SEQ ID NO: 2452429 - RNA, 19 nt, Homo sapiens
  misc_RNA (1)...(19): siRNA sense strand
agagaauagaugaagcaaa

SEQ ID NO: 2452430 - RNA, 19 nt, Homo sapiens
  misc_RNA (1)...(19): siRNA sense strand
gaagaugaagagugggaga

SEQ ID NO: 2452431 - RNA, 19 nt, Homo sapiens
  misc_RNA (1)...(19): siRNA sense strand
gggaaagagccuugcagga

SEQ ID NO: 2452432 - RNA, 19 nt, Homo sapiens
  misc_RNA (1)...(19): siRNA sense strand
acaaaagcuuacaaggaaa

SEQ ID NO: 2452433 - RNA, 19 nt, Homo sapiens
  misc_RNA (1)...(19): siRNA sense strand
ccacaguauaacagaacuu

SEQ ID NO: 2452434 - RNA, 19 nt, Homo sapiens
  misc_RNA (1)...(19): siRNA sense strand
gaagagugggagaaggaga

SEQ ID NO: 2452435 - RNA, 19 nt, Homo sapiens
  misc_RNA (1)...(19): siRNA sense strand
aggaaacguugaagaaaau

SEQ ID NO: 2452436 - RNA, 19 nt, Homo sapiens
  misc_RNA (1)...(19): siRNA sense strand
cuuacaaggaaaucacaaa

SEQ ID NO: 2452437 - RNA, 19 nt, Homo sapiens
  misc_RNA (1)...(19): siRNA sense strand
gagcccuagaagagacaaa

SEQ ID NO: 2452438 - RNA, 19 nt, Homo sapiens
  misc_RNA (1)...(19): siRNA sense strand
aagagugggagaaggagaa

SEQ ID NO: 2452439 - RNA, 19 nt, Homo sapiens
  misc_RNA (1)...(19): siRNA sense strand
augaagagugggagaagga

SEQ ID NO: 2452440 - RNA, 19 nt, Homo sapiens
  misc_RNA (1)...(19): siRNA sense strand
agaauaagacguuggucca

SEQ ID NO: 2452441 - RNA, 19 nt, Homo sapiens
  misc_RNA (1)...(19): siRNA sense strand
ggaggaagaaacagccaga

SEQ ID NO: 2452442 - RNA, 19 nt, Homo sapiens
  misc_RNA (1)...(19): siRNA sense strand
uggaagaugaagaguggga

SEQ ID NO: 2452443 - RNA, 19 nt, Homo sapiens
  misc_RNA (1)...(19): siRNA sense strand
guuccuugagagagaagua

SEQ ID NO: 2452444 - RNA, 19 nt, Homo sapiens
  misc_RNA (1)...(19): siRNA sense strand
aagauaagauucagaggcu

SEQ ID NO: 2452445 - RNA, 19 nt, Homo sapiens
  misc_RNA (1)...(19): siRNA sense strand
agaagaagaacuagaggcu

SEQ ID NO: 2452446 - RNA, 19 nt, Homo sapiens
  misc_RNA (1)...(19): siRNA sense strand
agggauacgcagagaauag

SEQ ID NO: 2452447 - RNA, 19 nt, Homo sapiens
  misc_RNA (1)...(19): siRNA sense strand
gggccugguggaagaugaa

SEQ ID NO: 2452448 - RNA, 19 nt, Homo sapiens
  misc_RNA (1)...(19): siRNA sense strand
gcaccacgauggaaaggga

SEQ ID NO: 2452449 - RNA, 19 nt, Homo sapiens
  misc_RNA (1)...(19): siRNA sense strand
agagggaagauaagauuca

SEQ ID NO: 2452450 - RNA, 19 nt, Homo sapiens
  misc_RNA (1)...(19): siRNA sense strand
acauaaagaaguaccagga

SEQ ID NO: 2452451 - RNA, 19 nt, Homo sapiens
  misc_RNA (1)...(19): siRNA sense strand
gcuuacaaggaaaucacaa

SEQ ID NO: 2452452 - RNA, 19 nt, Homo sapiens
  misc_RNA (1)...(19): siRNA sense strand
cuugaaagggauacgcaga

SEQ ID NO: 2452453 - RNA, 19 nt, Homo sapiens
  misc_RNA (1)...(19): siRNA sense strand
accaggaaacguugaagaa

SEQ ID NO: 2452454 - RNA, 19 nt, Homo sapiens
  misc_RNA (1)...(19): siRNA sense strand
accacgauggaaagggaaa

SEQ ID NO: 2452455 - RNA, 19 nt, Homo sapiens
  misc_RNA (1)...(19): siRNA sense strand
gaaaggaagaauaagacgu

SEQ ID NO: 2452456 - RNA, 19 nt, Homo sapiens
  misc_RNA (1)...(19): siRNA sense strand
cacuugagacagaggacau

SEQ ID NO: 2452457 - RNA, 19 nt, Homo sapiens
  misc_RNA (1)...(19): siRNA sense strand
ugucuaaugaguuggaaaa

SEQ ID NO: 2452458 - RNA, 19 nt, Homo sapiens
  misc_RNA (1)...(19): siRNA sense strand
acucaaacauucacaggca

SEQ ID NO: 2452459 - RNA, 19 nt, Homo sapiens
  misc_RNA (1)...(19): siRNA sense strand
augucuaaugaguuggaaa

SEQ ID NO: 2452460 - RNA, 19 nt, Homo sapiens
  misc_RNA (1)...(19): siRNA sense strand
uguaguggauauaagccaa

SEQ ID NO: 2452461 - RNA, 19 nt, Homo sapiens
  misc_RNA (1)...(19): siRNA sense strand
uggauauaagccaacaaua

SEQ ID NO: 2452462 - RNA, 19 nt, Homo sapiens
  misc_RNA (1)...(19): siRNA sense strand
cugauaaguuggaagaaaa

SEQ ID NO: 2452463 - RNA, 19 nt, Homo sapiens
  misc_RNA (1)...(19): siRNA sense strand
cagugaauuucuugaggaa

SEQ ID NO: 2452464 - RNA, 19 nt, Homo sapiens
  misc_RNA (1)...(19): siRNA sense strand
acaaagaauaugaggacga

SEQ ID NO: 2452465 - RNA, 19 nt, Homo sapiens
  misc_RNA (1)...(19): siRNA sense strand
gggaauaaaccaagugacu

SEQ ID NO: 2452466 - RNA, 19 nt, Homo sapiens
  misc_RNA (1)...(19): siRNA sense strand
gcucaguacuccagaaaau

SEQ ID NO: 2452467 - RNA, 19 nt, Homo sapiens
  misc_RNA (1)...(19): siRNA sense strand
aagaaguagaagagcuuaa

SEQ ID NO: 2452468 - RNA, 19 nt, Homo sapiens
  misc_RNA (1)...(19): siRNA sense strand
aagaauaugaggacgaaau

SEQ ID NO: 2452469 - RNA, 19 nt, Homo sapiens
  misc_RNA (1)...(19): siRNA sense strand
aguccaaaguagaacagua

SEQ ID NO: 2452470 - RNA, 19 nt, Homo sapiens
  misc_RNA (1)...(19): siRNA sense strand
gugaagagaaagaagcuau

SEQ ID NO: 2452471 - RNA, 19 nt, Homo sapiens
  misc_RNA (1)...(19): siRNA sense strand
agguagaaguaauguuaga

SEQ ID NO: 2452472 - RNA, 19 nt, Homo sapiens
  misc_RNA (1)...(19): siRNA sense strand
gagcaaaggcagugaggag

SEQ ID NO: 2452473 - RNA, 19 nt, Homo sapiens
  misc_RNA (1)...(19): siRNA sense strand
uaaccuuggugcagggcaa

SEQ ID NO: 2452474 - RNA, 19 nt, Homo sapiens
  misc_RNA (1)...(19): siRNA sense strand
agaaagaaguagaagagcu

SEQ ID NO: 2452475 - RNA, 19 nt, Homo sapiens
  misc_RNA (1)...(19): siRNA sense strand
agcuaaaggaggcaaauaa

SEQ ID NO: 2452476 - RNA, 19 nt, Homo sapiens
  misc_RNA (1)...(19): siRNA sense strand
ccaaaguagaacaguauga

SEQ ID NO: 2452477 - RNA, 19 nt, Homo sapiens
  misc_RNA (1)...(19): siRNA sense strand
gcuuggagucacagaucaa

SEQ ID NO: 2452478 - RNA, 19 nt, Homo sapiens
  misc_RNA (1)...(19): siRNA sense strand
gagugagaaaucaggcuua

SEQ ID NO: 2452479 - RNA, 19 nt, Homo sapiens
  misc_RNA (1)...(19): siRNA sense strand
ccagcaaagcagaccuuaa

SEQ ID NO: 2452480 - RNA, 19 nt, Homo sapiens
  misc_RNA (1)...(19): siRNA sense strand
guagcagaguggaagaaaa

SEQ ID NO: 2452481 - RNA, 19 nt, Homo sapiens
  misc_RNA (1)...(19): siRNA sense strand
ucaaagaaucaaggcgaua

SEQ ID NO: 2452482 - RNA, 19 nt, Homo sapiens
  misc_RNA (1)...(19): siRNA sense strand
cuaagaacaaagaccuaua

SEQ ID NO: 2452483 - RNA, 19 nt, Homo sapiens
  misc_RNA (1)...(19): siRNA sense strand
guccaaaguagaacaguau

SEQ ID NO: 2452484 - RNA, 19 nt, Homo sapiens
  misc_RNA (1)...(19): siRNA sense strand
gcaaaggcagugaggagga

SEQ ID NO: 2452485 - RNA, 19 nt, Homo sapiens
  misc_RNA (1)...(19): siRNA sense strand
uagcaaauucuguuggaga

SEQ ID NO: 2452486 - RNA, 19 nt, Homo sapiens
  misc_RNA (1)...(19): siRNA sense strand
guuagaaaauggaagugaa

SEQ ID NO: 2452487 - RNA, 19 nt, Homo sapiens
  misc_RNA (1)...(19): siRNA sense strand
aaacuguagcagaguggaa

SEQ ID NO: 2452488 - RNA, 19 nt, Homo sapiens
  misc_RNA (1)...(19): siRNA sense strand
aggacgaaauagauuguuu

SEQ ID NO: 2452489 - RNA, 19 nt, Homo sapiens
  misc_RNA (1)...(19): siRNA sense strand
ccuacaaagaugaagaacu

SEQ ID NO: 2452490 - RNA, 19 nt, Homo sapiens
  misc_RNA (1)...(19): siRNA sense strand
ugucaaagaaucaaggcga

SEQ ID NO: 2452491 - RNA, 19 nt, Homo sapiens
  misc_RNA (1)...(19): siRNA sense strand
ggaagugaauggaaaccca

SEQ ID NO: 2452492 - RNA, 19 nt, Homo sapiens
  misc_RNA (1)...(19): siRNA sense strand
cacagauaauccaaguaaa

SEQ ID NO: 2452493 - RNA, 19 nt, Homo sapiens
  misc_RNA (1)...(19): siRNA sense strand
uagaacaguaugagcguga

SEQ ID NO: 2452494 - RNA, 19 nt, Homo sapiens
  misc_RNA (1)...(19): siRNA sense strand
acucagaacagcuaaugaa

SEQ ID NO: 2452495 - RNA, 19 nt, Homo sapiens
  misc_RNA (1)...(19): siRNA sense strand
aguaugagcgugaaaccaa

SEQ ID NO: 2452496 - RNA, 19 nt, Homo sapiens
  misc_RNA (1)...(19): siRNA sense strand
ggauguggugucaaagaau

SEQ ID NO: 2452497 - RNA, 19 nt, Homo sapiens
  misc_RNA (1)...(19): siRNA sense strand
aauaugaggacgaaauaga

SEQ ID NO: 2452498 - RNA, 19 nt, Homo sapiens
  misc_RNA (1)...(19): siRNA sense strand
agggagaauuuacgacuga

SEQ ID NO: 2452499 - RNA, 19 nt, Homo sapiens
  misc_RNA (1)...(19): siRNA sense strand
gucaaagaaucaaggcgau

SEQ ID NO: 2452500 - RNA, 19 nt, Homo sapiens
  misc_RNA (1)...(19): siRNA sense strand
acacaaagaauaugaggac

SEQ ID NO: 2452501 - RNA, 19 nt, Homo sapiens
  misc_RNA (1)...(19): siRNA sense strand
gagucagacaacagcaaga

SEQ ID NO: 2452502 - RNA, 19 nt, Homo sapiens
  misc_RNA (1)...(19): siRNA sense strand
cugcuuaccuugacaaaau

SEQ ID NO: 2452503 - RNA, 19 nt, Homo sapiens
  misc_RNA (1)...(19): siRNA sense strand
gcccuggaacgaagugaua

SEQ ID NO: 2452504 - RNA, 19 nt, Homo sapiens
  misc_RNA (1)...(19): siRNA sense strand
auguuagaugugacagaua

SEQ ID NO: 2452505 - RNA, 19 nt, Homo sapiens
  misc_RNA (1)...(19): siRNA sense strand
ccaagcaggagguuccaaa

SEQ ID NO: 2452506 - RNA, 19 nt, Homo sapiens
  misc_RNA (1)...(19): siRNA sense strand
caaugaugucagagucaga

SEQ ID NO: 2452507 - RNA, 19 nt, Homo sapiens
  misc_RNA (1)...(19): siRNA sense strand
aggauguggugucaaagaa

SEQ ID NO: 2452508 - RNA, 19 nt, Homo sapiens
  misc_RNA (1)...(19): siRNA sense strand
gugaaagaugauguggaua

SEQ ID NO: 2452509 - RNA, 19 nt, Homo sapiens
  misc_RNA (1)...(19): siRNA sense strand
gaugauguggauaagcuaa

SEQ ID NO: 2452510 - RNA, 19 nt, Homo sapiens
  misc_RNA (1)...(19): siRNA sense strand
augauguggauaagcuaaa

SEQ ID NO: 2452511 - RNA, 19 nt, Homo sapiens
  misc_RNA (1)...(19): siRNA sense strand
ucagaaaauugguguuuga

SEQ ID NO: 2452512 - RNA, 19 nt, Homo sapiens
  misc_RNA (1)...(19): siRNA sense strand
guuuacagaaagaaguaga

SEQ ID NO: 2452513 - RNA, 19 nt, Homo sapiens
  misc_RNA (1)...(19): siRNA sense strand
caggaaaguaccagcaaag

SEQ ID NO: 2452514 - RNA, 19 nt, Homo sapiens
  misc_RNA (1)...(19): siRNA sense strand
gugaauuucuugaggaacc

SEQ ID NO: 2452515 - RNA, 19 nt, Homo sapiens
  misc_RNA (1)...(19): siRNA sense strand
gacugaaggcugaaguuga

SEQ ID NO: 2452516 - RNA, 19 nt, Homo sapiens
  misc_RNA (1)...(19): siRNA sense strand
cucaauagaaaguggguau

SEQ ID NO: 2452517 - RNA, 19 nt, Homo sapiens
  misc_RNA (1)...(19): siRNA sense strand
gcacaaggugaucgcaaaa

SEQ ID NO: 2452518 - RNA, 19 nt, Homo sapiens
  misc_RNA (1)...(19): siRNA sense strand
ucgcaaaacaccaggccaa

SEQ ID NO: 2452519 - RNA, 19 nt, Homo sapiens
  misc_RNA (1)...(19): siRNA sense strand
ggaagaaauaggaggcggu

SEQ ID NO: 2452520 - RNA, 19 nt, Homo sapiens
  misc_RNA (1)...(19): siRNA sense strand
gguccaaguccuuacaaaa

SEQ ID NO: 2452521 - RNA, 19 nt, Homo sapiens
  misc_RNA (1)...(19): siRNA sense strand
gcagacuagcucaggaaca

SEQ ID NO: 2452522 - RNA, 19 nt, Homo sapiens
  misc_RNA (1)...(19): siRNA sense strand
acuaaaguacaaacagcaa

SEQ ID NO: 2452523 - RNA, 19 nt, Homo sapiens
  misc_RNA (1)...(19): siRNA sense strand
guaaaucucccaaagggua

SEQ ID NO: 2452524 - RNA, 19 nt, Homo sapiens
  misc_RNA (1)...(19): siRNA sense strand
ccaagugaucacaggagau

SEQ ID NO: 2452525 - RNA, 19 nt, Homo sapiens
  misc_RNA (1)...(19): siRNA sense strand
aguacaaacagcaaagcau

SEQ ID NO: 2452526 - RNA, 19 nt, Homo sapiens
  misc_RNA (1)...(19): siRNA sense strand
guccaagucaauaggaaaa

SEQ ID NO: 2452527 - RNA, 19 nt, Homo sapiens
  misc_RNA (1)...(19): siRNA sense strand
uguucgaggugcugaagau

SEQ ID NO: 2452528 - RNA, 19 nt, Homo sapiens
  misc_RNA (1)...(19): siRNA sense strand
agguccaagucaauaggaa

SEQ ID NO: 2452529 - RNA, 19 nt, Homo sapiens
  misc_RNA (1)...(19): siRNA sense strand
ccgugaguuuggucgauau

SEQ ID NO: 2452530 - RNA, 19 nt, Homo sapiens
  misc_RNA (1)...(19): siRNA sense strand
aagcagacuagcucaggaa

SEQ ID NO: 2452531 - RNA, 19 nt, Homo sapiens
  misc_RNA (1)...(19): siRNA sense strand
gggaagagauucagcagca

SEQ ID NO: 2452532 - RNA, 19 nt, Homo sapiens
  misc_RNA (1)...(19): siRNA sense strand
gacacauacaggagagaaa

SEQ ID NO: 2452533 - RNA, 19 nt, Homo sapiens
  misc_RNA (1)...(19): siRNA sense strand
ggaaaauucacguagaaaa

SEQ ID NO: 2452534 - RNA, 19 nt, Homo sapiens
  misc_RNA (1)...(19): siRNA sense strand
cugaauaugaggaaaguuu

SEQ ID NO: 2452535 - RNA, 19 nt, Homo sapiens
  misc_RNA (1)...(19): siRNA sense strand
uagcuaaagaggaggaaaa

SEQ ID NO: 2452536 - RNA, 19 nt, Homo sapiens
  misc_RNA (1)...(19): siRNA sense strand
cugcaaugugauagaagaa

SEQ ID NO: 2452537 - RNA, 19 nt, Homo sapiens
  misc_RNA (1)...(19): siRNA sense strand
guguggugaaugugggaaa

SEQ ID NO: 2452538 - RNA, 19 nt, Homo sapiens
  misc_RNA (1)...(19): siRNA sense strand
caugaauggacuuggaaaa

SEQ ID NO: 2452539 - RNA, 19 nt, Homo sapiens
  misc_RNA (1)...(19): siRNA sense strand
ucuaacagcuuuauggaga

SEQ ID NO: 2452540 - RNA, 19 nt, Homo sapiens
  misc_RNA (1)...(19): siRNA sense strand
ccagaaugugggaagaauu

SEQ ID NO: 2452541 - RNA, 19 nt, Homo sapiens
  misc_RNA (1)...(19): siRNA sense strand
gugaaugugggaagaguuu

SEQ ID NO: 2452542 - RNA, 19 nt, Homo sapiens
  misc_RNA (1)...(19): siRNA sense strand
ccuuauuacacaccagaaa

SEQ ID NO: 2452543 - RNA, 19 nt, Homo sapiens
  misc_RNA (1)...(19): siRNA sense strand
agucagaguuccagccuca

SEQ ID NO: 2452544 - RNA, 19 nt, Homo sapiens
  misc_RNA (1)...(19): siRNA sense strand
ccacaauaauucuaaggca

SEQ ID NO: 2452545 - RNA, 19 nt, Homo sapiens
  misc_RNA (1)...(19): siRNA sense strand
ccuaugagagugauggcaa

SEQ ID NO: 2452546 - RNA, 19 nt, Homo sapiens
  misc_RNA (1)...(19): siRNA sense strand
cccuauaaauguuccgaau

SEQ ID NO: 2452547 - RNA, 19 nt, Homo sapiens
  misc_RNA (1)...(19): siRNA sense strand
aaugcacacaggagagaaa

SEQ ID NO: 2452548 - RNA, 19 nt, Homo sapiens
  misc_RNA (1)...(19): siRNA sense strand
acaauaauucuaaggcaga

SEQ ID NO: 2452549 - RNA, 19 nt, Homo sapiens
  misc_RNA (1)...(19): siRNA sense strand
ucuuauuauccaugagaga

SEQ ID NO: 2452550 - RNA, 19 nt, Homo sapiens
  misc_RNA (1)...(19): siRNA sense strand
gagugugggaagagauuca

SEQ ID NO: 2452551 - RNA, 19 nt, Homo sapiens
  misc_RNA (1)...(19): siRNA sense strand
acacaggagagaagcccua

SEQ ID NO: 2452552 - RNA, 19 nt, Homo sapiens
  misc_RNA (1)...(19): siRNA sense strand
uuauggagagggagaguuu

SEQ ID NO: 2452553 - RNA, 19 nt, Homo sapiens
  misc_RNA (1)...(19): siRNA sense strand
auguaccagcugugagaaa

SEQ ID NO: 2452554 - RNA, 19 nt, Homo sapiens
  misc_RNA (1)...(19): siRNA sense strand
aggaaugggacucaggaga

SEQ ID NO: 2452555 - RNA, 19 nt, Homo sapiens
  misc_RNA (1)...(19): siRNA sense strand
ccgagugugggaagagauu

SEQ ID NO: 2452556 - RNA, 19 nt, Homo sapiens
  misc_RNA (1)...(19): siRNA sense strand
ggagaaaagccuuaucaau

SEQ ID NO: 2452557 - RNA, 19 nt, Homo sapiens
  misc_RNA (1)...(19): siRNA sense strand
ccucagucagcaucggaaa

SEQ ID NO: 2452558 - RNA, 19 nt, Homo sapiens
  misc_RNA (1)...(19): siRNA sense strand
uaaaagacauagaccacaa

SEQ ID NO: 2452559 - RNA, 19 nt, Homo sapiens
  misc_RNA (1)...(19): siRNA sense strand
acauagaccacaacauuau

SEQ ID NO: 2452560 - RNA, 19 nt, Homo sapiens
  misc_RNA (1)...(19): siRNA sense strand
agucagagaauuggggaaa

SEQ ID NO: 2452561 - RNA, 19 nt, Homo sapiens
  misc_RNA (1)...(19): siRNA sense strand
ucaugaauggacuuggaaa

SEQ ID NO: 2452562 - RNA, 19 nt, Homo sapiens
  misc_RNA (1)...(19): siRNA sense strand
ccuuauaaaugcucugagu

SEQ ID NO: 2452563 - RNA, 19 nt, Homo sapiens
  misc_RNA (1)...(19): siRNA sense strand
uuauaaaugcucugagugu

SEQ ID NO: 2452564 - RNA, 19 nt, Homo sapiens
  misc_RNA (1)...(19): siRNA sense strand
uguucugagugcuggaaaa

SEQ ID NO: 2452565 - RNA, 19 nt, Homo sapiens
  misc_RNA (1)...(19): siRNA sense strand
agugauggcaagucagaga

SEQ ID NO: 2452566 - RNA, 19 nt, Homo sapiens
  misc_RNA (1)...(19): siRNA sense strand
gagagaaauccuaugaaag

SEQ ID NO: 2452567 - RNA, 19 nt, Homo sapiens
  misc_RNA (1)...(19): siRNA sense strand
guucugaauaugaggaaag

SEQ ID NO: 2452568 - RNA, 19 nt, Homo sapiens
  misc_RNA (1)...(19): siRNA sense strand
aggagagaaaccuuauaaa

SEQ ID NO: 2452569 - RNA, 19 nt, Homo sapiens
  misc_RNA (1)...(19): siRNA sense strand
gggagagaaacccuacaaa

SEQ ID NO: 2452570 - RNA, 19 nt, Homo sapiens
  misc_RNA (1)...(19): siRNA sense strand
ccuuaucaauguccagaau

SEQ ID NO: 2452571 - RNA, 19 nt, Homo sapiens
  misc_RNA (1)...(19): siRNA sense strand
gcuuuaaccuuaucaggca

SEQ ID NO: 2452572 - RNA, 19 nt, Homo sapiens
  misc_RNA (1)...(19): siRNA sense strand
gugauagaagaaugcagaa

SEQ ID NO: 2452573 - RNA, 19 nt, Homo sapiens
  misc_RNA (1)...(19): siRNA sense strand
ugauagaagaaugcagaau

SEQ ID NO: 2452574 - RNA, 19 nt, Homo sapiens
  misc_RNA (1)...(19): siRNA sense strand
uggaaacuguucaccacaa

SEQ ID NO: 2452575 - RNA, 19 nt, Homo sapiens
  misc_RNA (1)...(19): siRNA sense strand
agagaauacauacaggaga

SEQ ID NO: 2452576 - RNA, 19 nt, Homo sapiens
  misc_RNA (1)...(19): siRNA sense strand
aagcuaagucggaaggaaa

SEQ ID NO: 2452577 - RNA, 19 nt, Homo sapiens
  misc_RNA (1)...(19): siRNA sense strand
cuucuaagacagaggaaau

SEQ ID NO: 2452578 - RNA, 19 nt, Homo sapiens
  misc_RNA (1)...(19): siRNA sense strand
acaugaaagcauugaagaa

SEQ ID NO: 2452579 - RNA, 19 nt, Homo sapiens
  misc_RNA (1)...(19): siRNA sense strand
acugauugcaaguggaaua

SEQ ID NO: 2452580 - RNA, 19 nt, Homo sapiens
  misc_RNA (1)...(19): siRNA sense strand
auuuguugauugugggaaa

SEQ ID NO: 2452581 - RNA, 19 nt, Homo sapiens
  misc_RNA (1)...(19): siRNA sense strand
aaagagucuaugugagaaa

SEQ ID NO: 2452582 - RNA, 19 nt, Homo sapiens
  misc_RNA (1)...(19): siRNA sense strand
uugaagaagugaaggaacu

SEQ ID NO: 2452583 - RNA, 19 nt, Homo sapiens
  misc_RNA (1)...(19): siRNA sense strand
cucuaugauuggugugaua

SEQ ID NO: 2452584 - RNA, 19 nt, Homo sapiens
  misc_RNA (1)...(19): siRNA sense strand
gggaagauggauugcaaca

SEQ ID NO: 2452585 - RNA, 19 nt, Homo sapiens
  misc_RNA (1)...(19): siRNA sense strand
gagaaaacaguauggcaaa

SEQ ID NO: 2452586 - RNA, 19 nt, Homo sapiens
  misc_RNA (1)...(19): siRNA sense strand
uugcaagguuugaguguga

SEQ ID NO: 2452587 - RNA, 19 nt, Homo sapiens
  misc_RNA (1)...(19): siRNA sense strand
cagaguacuucuugggcuu

SEQ ID NO: 2452588 - RNA, 19 nt, Homo sapiens
  misc_RNA (1)...(19): siRNA sense strand
gcauugaagaagugaagga

SEQ ID NO: 2452589 - RNA, 19 nt, Homo sapiens
  misc_RNA (1)...(19): siRNA sense strand
caaaagagucaguaagaga

SEQ ID NO: 2452590 - RNA, 19 nt, Homo sapiens
  misc_RNA (1)...(19): siRNA sense strand
auacaucauugaagggaga

SEQ ID NO: 2452591 - RNA, 19 nt, Homo sapiens
  misc_RNA (1)...(19): siRNA sense strand
ccaagugggcagaaaauaa

SEQ ID NO: 2452592 - RNA, 19 nt, Homo sapiens
  misc_RNA (1)...(19): siRNA sense strand
agaaauacugccuuugaaa

SEQ ID NO: 2452593 - RNA, 19 nt, Homo sapiens
  misc_RNA (1)...(19): siRNA sense strand
aaucagugcuauugcuaau

SEQ ID NO: 2452594 - RNA, 19 nt, Homo sapiens
  misc_RNA (1)...(19): siRNA sense strand
aaagagucaguaagagaaa

SEQ ID NO: 2452595 - RNA, 19 nt, Homo sapiens
  misc_RNA (1)...(19): siRNA sense strand
uuaaauggcuugaggacgu

SEQ ID NO: 2452596 - RNA, 19 nt, Homo sapiens
  misc_RNA (1)...(19): siRNA sense strand
gcucagaaaaugaaaguga

SEQ ID NO: 2452597 - RNA, 19 nt, Homo sapiens
  misc_RNA (1)...(19): siRNA sense strand
gcaagguuugagugugaaa

SEQ ID NO: 2452598 - RNA, 19 nt, Homo sapiens
  misc_RNA (1)...(19): siRNA sense strand
augaaugguguaacagaaa

SEQ ID NO: 2452599 - RNA, 19 nt, Homo sapiens
  misc_RNA (1)...(19): siRNA sense strand
uguaaggacaagacaagua

SEQ ID NO: 2452600 - RNA, 19 nt, Homo sapiens
  misc_RNA (1)...(19): siRNA sense strand
cauugaagggagagaaacu

SEQ ID NO: 2452601 - RNA, 19 nt, Homo sapiens
  misc_RNA (1)...(19): siRNA sense strand
agagaaaacaguauggcaa

SEQ ID NO: 2452602 - RNA, 19 nt, Homo sapiens
  misc_RNA (1)...(19): siRNA sense strand
uuuagagacacaagugaaa

SEQ ID NO: 2452603 - RNA, 19 nt, Homo sapiens
  misc_RNA (1)...(19): siRNA sense strand
gcugaaaaggagaucauua

SEQ ID NO: 2452604 - RNA, 19 nt, Homo sapiens
  misc_RNA (1)...(19): siRNA sense strand
cuuuagacucugugcauuu

SEQ ID NO: 2452605 - RNA, 19 nt, Homo sapiens
  misc_RNA (1)...(19): siRNA sense strand
gugaguugauucagguaca

SEQ ID NO: 2452606 - RNA, 19 nt, Homo sapiens
  misc_RNA (1)...(19): siRNA sense strand
gaaauagagcggagcccuu

SEQ ID NO: 2452607 - RNA, 19 nt, Homo sapiens
  misc_RNA (1)...(19): siRNA sense strand
aaggaagggaagauggauu

SEQ ID NO: 2452608 - RNA, 19 nt, Homo sapiens
  misc_RNA (1)...(19): siRNA sense strand
cuaagacagaggaaauuaa

SEQ ID NO: 2452609 - RNA, 19 nt, Homo sapiens
  misc_RNA (1)...(19): siRNA sense strand
aggaaagaucuucagcuua

SEQ ID NO: 2452610 - RNA, 19 nt, Homo sapiens
  misc_RNA (1)...(19): siRNA sense strand
gcaacauugaaguuagcua

SEQ ID NO: 2452611 - RNA, 19 nt, Homo sapiens
  misc_RNA (1)...(19): siRNA sense strand
cauugaaguuagcuaguga

SEQ ID NO: 2452612 - RNA, 19 nt, Homo sapiens
  misc_RNA (1)...(19): siRNA sense strand
gcuucucagucuuggauuu

SEQ ID NO: 2452613 - RNA, 19 nt, Homo sapiens
  misc_RNA (1)...(19): siRNA sense strand
acuacaugcacuaaugaaa

SEQ ID NO: 2452614 - RNA, 19 nt, Homo sapiens
  misc_RNA (1)...(19): siRNA sense strand
acuagaacagauagaaaga

SEQ ID NO: 2452615 - RNA, 19 nt, Homo sapiens
  misc_RNA (1)...(19): siRNA sense strand
aagggaagauggauugcaa

SEQ ID NO: 2452616 - RNA, 19 nt, Homo sapiens
  misc_RNA (1)...(19): siRNA sense strand
guaacaaaagagucaguaa

SEQ ID NO: 2452617 - RNA, 19 nt, Homo sapiens
  misc_RNA (1)...(19): siRNA sense strand
cauuauaagcagacuuuca

SEQ ID NO: 2452618 - RNA, 19 nt, Homo sapiens
  misc_RNA (1)...(19): siRNA sense strand
cuguaguugugcuggauga

SEQ ID NO: 2452619 - RNA, 19 nt, Homo sapiens
  misc_RNA (1)...(19): siRNA sense strand
cuggaugaguguagucaga

SEQ ID NO: 2452620 - RNA, 19 nt, Homo sapiens
  misc_RNA (1)...(19): siRNA sense strand
acagauagaaagagauaac

SEQ ID NO: 2452621 - RNA, 19 nt, Homo sapiens
  misc_RNA (1)...(19): siRNA sense strand
guugauugugggaaauuua

SEQ ID NO: 2452622 - RNA, 19 nt, Homo sapiens
  misc_RNA (1)...(19): siRNA sense strand
acuagaggaaagaggcauu

SEQ ID NO: 2452623 - RNA, 19 nt, Homo sapiens
  misc_RNA (1)...(19): siRNA sense strand
aguaugaaccacagcugaa

SEQ ID NO: 2452624 - RNA, 19 nt, Homo sapiens
  misc_RNA (1)...(19): siRNA sense strand
gaccugacuccuacggaaa

SEQ ID NO: 2452625 - RNA, 19 nt, Homo sapiens
  misc_RNA (1)...(19): siRNA sense strand
agugaaagacagagugaug

SEQ ID NO: 2452626 - RNA, 19 nt, Homo sapiens
  misc_RNA (1)...(19): siRNA sense strand
ccaauagaacccugcugaa

SEQ ID NO: 2452627 - RNA, 19 nt, Homo sapiens
  misc_RNA (1)...(19): siRNA sense strand
caagugaaagacagaguga

SEQ ID NO: 2452628 - RNA, 19 nt, Homo sapiens
  misc_RNA (1)...(19): siRNA sense strand
cgaaggaagggaagaugga

SEQ ID NO: 2452629 - RNA, 19 nt, Homo sapiens
  misc_RNA (1)...(19): siRNA sense strand
caaaacuugucaugguuaa

SEQ ID NO: 2452630 - RNA, 19 nt, Homo sapiens
  misc_RNA (1)...(19): siRNA sense strand
gguucgaguaguuggaguu

SEQ ID NO: 2452631 - RNA, 19 nt, Homo sapiens
  misc_RNA (1)...(19): siRNA sense strand
gaugaguguagucagauaa

SEQ ID NO: 2452632 - RNA, 19 nt, Homo sapiens
  misc_RNA (1)...(19): siRNA sense strand
caucauagucaaccugcaa

SEQ ID NO: 2452633 - RNA, 19 nt, Homo sapiens
  misc_RNA (1)...(19): siRNA sense strand
acaaguuaaacaaggauca

SEQ ID NO: 2452634 - RNA, 19 nt, Homo sapiens
  misc_RNA (1)...(19): siRNA sense strand
augaaagcauugaagaagu

SEQ ID NO: 2452635 - RNA, 19 nt, Homo sapiens
  misc_RNA (1)...(19): siRNA sense strand
uaacagaaauagagcggag

SEQ ID NO: 2452636 - RNA, 19 nt, Homo sapiens
  misc_RNA (1)...(19): siRNA sense strand
aaacaguauggcaaacuaa

SEQ ID NO: 2452637 - RNA, 19 nt, Homo sapiens
  misc_RNA (1)...(19): siRNA sense strand
aucauugaagggagagaaa

SEQ ID NO: 2452638 - RNA, 19 nt, Homo sapiens
  misc_RNA (1)...(19): siRNA sense strand
uagaaagagauaacagcuu

SEQ ID NO: 2452639 - RNA, 19 nt, Homo sapiens
  misc_RNA (1)...(19): siRNA sense strand
cuguguaaggacaagacaa

SEQ ID NO: 2452640 - RNA, 19 nt, Homo sapiens
  misc_RNA (1)...(19): siRNA sense strand
gcgccgaagcagagaggaa

SEQ ID NO: 2452641 - RNA, 19 nt, Homo sapiens
  misc_RNA (1)...(19): siRNA sense strand
agagugagguggaggcaga

SEQ ID NO: 2452642 - RNA, 19 nt, Homo sapiens
  misc_RNA (1)...(19): siRNA sense strand
ccaucaagagugaggugga

SEQ ID NO: 2452643 - RNA, 19 nt, Homo sapiens
  misc_RNA (1)...(19): siRNA sense strand
gcgaaauaugagagacaaa

SEQ ID NO: 2452644 - RNA, 19 nt, Homo sapiens
  misc_RNA (1)...(19): siRNA sense strand
uggauaucuugguggagaa

SEQ ID NO: 2452645 - RNA, 19 nt, Homo sapiens
  misc_RNA (1)...(19): siRNA sense strand
ggaacuaccacgagccaca

SEQ ID NO: 2452646 - RNA, 19 nt, Homo sapiens
  misc_RNA (1)...(19): siRNA sense strand
aggguguuguggagcgaaa

SEQ ID NO: 2452647 - RNA, 19 nt, Homo sapiens
  misc_RNA (1)...(19): siRNA sense strand
caagauauauccauggcuu

SEQ ID NO: 2452648 - RNA, 19 nt, Homo sapiens
  misc_RNA (1)...(19): siRNA sense strand
auaucuugguggagaacau

SEQ ID NO: 2452649 - RNA, 19 nt, Homo sapiens
  misc_RNA (1)...(19): siRNA sense strand
ucuaagaaccucagaucca

SEQ ID NO: 2452650 - RNA, 19 nt, Homo sapiens
  misc_RNA (1)...(19): siRNA sense strand
aaccaaaggacuagagaac

SEQ ID NO: 2452651 - RNA, 19 nt, Homo sapiens
  misc_RNA (1)...(19): siRNA sense strand
agcuguaaccaaaggacua

SEQ ID NO: 2452652 - RNA, 19 nt, Homo sapiens
  misc_RNA (1)...(19): siRNA sense strand
gacuagagaacaugcucaa

SEQ ID NO: 2452653 - RNA, 19 nt, Homo sapiens
  misc_RNA (1)...(19): siRNA sense strand
cagcugacaacaugaccaa

SEQ ID NO: 2452654 - RNA, 19 nt, Homo sapiens
  misc_RNA (1)...(19): siRNA sense strand
gggucuaacagcagugacu

SEQ ID NO: 2452655 - RNA, 19 nt, Homo sapiens
  misc_RNA (1)...(19): siRNA sense strand
gcugacaacaugaccaaaa

SEQ ID NO: 2452656 - RNA, 19 nt, Homo sapiens
  misc_RNA (1)...(19): siRNA sense strand
ccaagauacgggaugaaaa

SEQ ID NO: 2452657 - RNA, 19 nt, Homo sapiens
  misc_RNA (1)...(19): siRNA sense strand
gaggaugagaacaagucaa

SEQ ID NO: 2452658 - RNA, 19 nt, Homo sapiens
  misc_RNA (1)...(19): siRNA sense strand
aggaugagaacaagucaau

SEQ ID NO: 2452659 - RNA, 19 nt, Homo sapiens
  misc_RNA (1)...(19): siRNA sense strand
auucagagcagcuggucuu

SEQ ID NO: 2452660 - RNA, 19 nt, Homo sapiens
  misc_RNA (1)...(19): siRNA sense strand
ucaaagaugcagagggaca

SEQ ID NO: 2452661 - RNA, 19 nt, Homo sapiens
  misc_RNA (1)...(19): siRNA sense strand
aaucaaagaugcagaggga

SEQ ID NO: 2452662 - RNA, 19 nt, Homo sapiens
  misc_RNA (1)...(19): siRNA sense strand
gagaagaagcucagccaga

SEQ ID NO: 2452663 - RNA, 19 nt, Homo sapiens
  misc_RNA (1)...(19): siRNA sense strand
ccuuaaagacccuggagau

SEQ ID NO: 2452664 - RNA, 19 nt, Homo sapiens
  misc_RNA (1)...(19): siRNA sense strand
gcaucuaaggcgagugaga

SEQ ID NO: 2452665 - RNA, 19 nt, Homo sapiens
  misc_RNA (1)...(19): siRNA sense strand
ggcaaguucucgaggccaa

SEQ ID NO: 2452666 - RNA, 19 nt, Homo sapiens
  misc_RNA (1)...(19): siRNA sense strand
gaacaaggcaagaagagga

SEQ ID NO: 2452667 - RNA, 19 nt, Homo sapiens
  misc_RNA (1)...(19): siRNA sense strand
agaugaagcuggacaggga

SEQ ID NO: 2452668 - RNA, 19 nt, Homo sapiens
  misc_RNA (1)...(19): siRNA sense strand
acaaaauagaagaggguca

SEQ ID NO: 2452669 - RNA, 19 nt, Homo sapiens
  misc_RNA (1)...(19): siRNA sense strand
ggagccagugaaagggaua

SEQ ID NO: 2452670 - RNA, 19 nt, Homo sapiens
  misc_RNA (1)...(19): siRNA sense strand
agugaaagggauauggaga

SEQ ID NO: 2452671 - RNA, 19 nt, Homo sapiens
  misc_RNA (1)...(19): siRNA sense strand
cuguaagccucguggagca

SEQ ID NO: 2452672 - RNA, 19 nt, Homo sapiens
  misc_RNA (1)...(19): siRNA sense strand
caaggcaagaagaggagaa

SEQ ID NO: 2452673 - RNA, 19 nt, Homo sapiens
  misc_RNA (1)...(19): siRNA sense strand
uuugauggucagagaacaa

SEQ ID NO: 2452674 - RNA, 19 nt, Homo sapiens
  misc_RNA (1)...(19): siRNA sense strand
cagaaacauaacugccaua

SEQ ID NO: 2452675 - RNA, 19 nt, Homo sapiens
  misc_RNA (1)...(19): siRNA sense strand
ggucagagaacaaggcaag

SEQ ID NO: 2452676 - RNA, 19 nt, Homo sapiens
  misc_RNA (1)...(19): siRNA sense strand
aagaagaggagaagaugca

SEQ ID NO: 2452677 - RNA, 19 nt, Homo sapiens
  misc_RNA (1)...(19): siRNA sense strand
ucaaggaaaugaaagcaga

SEQ ID NO: 2452678 - RNA, 19 nt, Homo sapiens
  misc_RNA (1)...(19): siRNA sense strand
ggaaaacaguggagccagu

SEQ ID NO: 2452679 - RNA, 19 nt, Homo sapiens
  misc_RNA (1)...(19): siRNA sense strand
aagcaacuuaaucgggaua

SEQ ID NO: 2452680 - RNA, 19 nt, Homo sapiens
  misc_RNA (1)...(19): siRNA sense strand
ucguggagcagcuggaaga

SEQ ID NO: 2452681 - RNA, 19 nt, Homo sapiens
  misc_RNA (1)...(19): siRNA sense strand
ggagaagaugcacgggcga

SEQ ID NO: 2452682 - RNA, 19 nt, Homo sapiens
  misc_RNA (1)...(19): siRNA sense strand
agcuggaguuacagaugaa

SEQ ID NO: 2452683 - RNA, 19 nt, Homo sapiens
  misc_RNA (1)...(19): siRNA sense strand
aggccaagaugaagcugga

SEQ ID NO: 2452684 - RNA, 19 nt, Homo sapiens
  misc_RNA (1)...(19): siRNA sense strand
cgacacagccagucccuga

SEQ ID NO: 2452685 - RNA, 19 nt, Homo sapiens
  misc_RNA (1)...(19): siRNA sense strand
gggauauggagaagaagcu

SEQ ID NO: 2452686 - RNA, 19 nt, Homo sapiens
  misc_RNA (1)...(19): siRNA sense strand
gagaagaugcacgggcgaa

SEQ ID NO: 2452687 - RNA, 19 nt, Homo sapiens
  misc_RNA (1)...(19): siRNA sense strand
acaaagagggcaagggcua

SEQ ID NO: 2452688 - RNA, 19 nt, Homo sapiens
  misc_RNA (1)...(19): siRNA sense strand
ccucaauggccaaggaugu

SEQ ID NO: 2452689 - RNA, 19 nt, Homo sapiens
  misc_RNA (1)...(19): siRNA sense strand
ucaacgagguggaggcgga

SEQ ID NO: 2452690 - RNA, 19 nt, Homo sapiens
  misc_RNA (1)...(19): siRNA sense strand
ugaugaaggaggccgacaa

SEQ ID NO: 2452691 - RNA, 19 nt, Homo sapiens
  misc_RNA (1)...(19): siRNA sense strand
augagaaggcccagaacca

SEQ ID NO: 2452692 - RNA, 19 nt, Homo sapiens
  misc_RNA (1)...(19): siRNA sense strand
agguggaggcggagcagau

SEQ ID NO: 2452693 - RNA, 19 nt, Homo sapiens
  misc_RNA (1)...(19): siRNA sense strand
augaggaguuuguggccau

SEQ ID NO: 2452694 - RNA, 19 nt, Homo sapiens
  misc_RNA (1)...(19): siRNA sense strand
ccaucgacuaugaggaguu

SEQ ID NO: 2452695 - RNA, 19 nt, Homo sapiens
  misc_RNA (1)...(19): siRNA sense strand
ucaaggaguacaagggagu

SEQ ID NO: 2452696 - RNA, 19 nt, Homo sapiens
  misc_RNA (1)...(19): siRNA sense strand
cccagaaccaggagagcga

SEQ ID NO: 2452697 - RNA, 19 nt, Homo sapiens
  misc_RNA (1)...(19): siRNA sense strand
ggauguggacagagacaac

SEQ ID NO: 2452698 - RNA, 19 nt, Homo sapiens
  misc_RNA (1)...(19): siRNA sense strand
aagaaaucucacugacaga

SEQ ID NO: 2452699 - RNA, 19 nt, Homo sapiens
  misc_RNA (1)...(19): siRNA sense strand
agggagucuuugagauguu

SEQ ID NO: 2452700 - RNA, 19 nt, Homo sapiens
  misc_RNA (1)...(19): siRNA sense strand
ccgccaacguaguccgcuu

SEQ ID NO: 2452701 - RNA, 19 nt, Homo sapiens
  misc_RNA (1)...(19): siRNA sense strand
ccacaggacccauggcaca

SEQ ID NO: 2452702 - RNA, 19 nt, Homo sapiens
  misc_RNA (1)...(19): siRNA sense strand
gcagugauguggaagccau

SEQ ID NO: 2452703 - RNA, 19 nt, Homo sapiens
  misc_RNA (1)...(19): siRNA sense strand
ugguaaagauugugagaga

SEQ ID NO: 2452704 - RNA, 19 nt, Homo sapiens
  misc_RNA (1)...(19): siRNA sense strand
ccugaaaguuggacggcaa

SEQ ID NO: 2452705 - RNA, 19 nt, Homo sapiens
  misc_RNA (1)...(19): siRNA sense strand
uggccaaacuggagaguga

SEQ ID NO: 2452706 - RNA, 19 nt, Homo sapiens
  misc_RNA (1)...(19): siRNA sense strand
cacuauacccaaagggaaa

SEQ ID NO: 2452707 - RNA, 19 nt, Homo sapiens
  misc_RNA (1)...(19): siRNA sense strand
aagauaaaccagugaaaga

SEQ ID NO: 2452708 - RNA, 19 nt, Homo sapiens
  misc_RNA (1)...(19): siRNA sense strand
ugaagaagaagaaggagaa

SEQ ID NO: 2452709 - RNA, 19 nt, Homo sapiens
  misc_RNA (1)...(19): siRNA sense strand
ggauauagauggaaggccu

SEQ ID NO: 2452710 - RNA, 19 nt, Homo sapiens
  misc_RNA (1)...(19): siRNA sense strand
aggaaagagggaagagaga

SEQ ID NO: 2452711 - RNA, 19 nt, Homo sapiens
  misc_RNA (1)...(19): siRNA sense strand
ccaaauguuuauugagcuu

SEQ ID NO: 2452712 - RNA, 19 nt, Homo sapiens
  misc_RNA (1)...(19): siRNA sense strand
agaagauaaaccagugaaa

SEQ ID NO: 2452713 - RNA, 19 nt, Homo sapiens
  misc_RNA (1)...(19): siRNA sense strand
gauccaaguauaagccaaa

SEQ ID NO: 2452714 - RNA, 19 nt, Homo sapiens
  misc_RNA (1)...(19): siRNA sense strand
cuacagaauguuuggaaaa

SEQ ID NO: 2452715 - RNA, 19 nt, Homo sapiens
  misc_RNA (1)...(19): siRNA sense strand
agaaagaagagaagaccuu

SEQ ID NO: 2452716 - RNA, 19 nt, Homo sapiens
  misc_RNA (1)...(19): siRNA sense strand
augaagaagaagaaggaga

SEQ ID NO: 2452717 - RNA, 19 nt, Homo sapiens
  misc_RNA (1)...(19): siRNA sense strand
agugauauggauagugaaa

SEQ ID NO: 2452718 - RNA, 19 nt, Homo sapiens
  misc_RNA (1)...(19): siRNA sense strand
uggaagagaaagaguauga

SEQ ID NO: 2452719 - RNA, 19 nt, Homo sapiens
  misc_RNA (1)...(19): siRNA sense strand
gugcagucuugaaguuaaa

SEQ ID NO: 2452720 - RNA, 19 nt, Homo sapiens
  misc_RNA (1)...(19): siRNA sense strand
agaaacagaaagaagagaa

SEQ ID NO: 2452721 - RNA, 19 nt, Homo sapiens
  misc_RNA (1)...(19): siRNA sense strand
uggaaauucaguuggacaa

SEQ ID NO: 2452722 - RNA, 19 nt, Homo sapiens
  misc_RNA (1)...(19): siRNA sense strand
uguagaagacacugaggaa

SEQ ID NO: 2452723 - RNA, 19 nt, Homo sapiens
  misc_RNA (1)...(19): siRNA sense strand
aggaaaagaaacagaaaga

SEQ ID NO: 2452724 - RNA, 19 nt, Homo sapiens
  misc_RNA (1)...(19): siRNA sense strand
cauacauuguguuggaaau

SEQ ID NO: 2452725 - RNA, 19 nt, Homo sapiens
  misc_RNA (1)...(19): siRNA sense strand
gccagaagggucaaggaaa

SEQ ID NO: 2452726 - RNA, 19 nt, Homo sapiens
  misc_RNA (1)...(19): siRNA sense strand
ccauacauuucuugaugaa

SEQ ID NO: 2452727 - RNA, 19 nt, Homo sapiens
  misc_RNA (1)...(19): siRNA sense strand
acuacagaauguuuggaaa

SEQ ID NO: 2452728 - RNA, 19 nt, Homo sapiens
  misc_RNA (1)...(19): siRNA sense strand
ccuacaaguacaugaucaa

SEQ ID NO: 2452729 - RNA, 19 nt, Homo sapiens
  misc_RNA (1)...(19): siRNA sense strand
acuccuagaucaagugcua

SEQ ID NO: 2452730 - RNA, 19 nt, Homo sapiens
  misc_RNA (1)...(19): siRNA sense strand
ggaaucaagcagagugcau

SEQ ID NO: 2452731 - RNA, 19 nt, Homo sapiens
  misc_RNA (1)...(19): siRNA sense strand
cuggagagugauauggaua

SEQ ID NO: 2452732 - RNA, 19 nt, Homo sapiens
  misc_RNA (1)...(19): siRNA sense strand
caaugauauucgaauggaa

SEQ ID NO: 2452733 - RNA, 19 nt, Homo sapiens
  misc_RNA (1)...(19): siRNA sense strand
caucuaucuggaagagaaa

SEQ ID NO: 2452734 - RNA, 19 nt, Homo sapiens
  misc_RNA (1)...(19): siRNA sense strand
uuagaaacuccuagaucaa

SEQ ID NO: 2452735 - RNA, 19 nt, Homo sapiens
  misc_RNA (1)...(19): siRNA sense strand
uuaaaguauuaguggcaga

SEQ ID NO: 2452736 - RNA, 19 nt, Homo sapiens
  misc_RNA (1)...(19): siRNA sense strand
gcagcauauuauaaagaga

SEQ ID NO: 2452737 - RNA, 19 nt, Homo sapiens
  misc_RNA (1)...(19): siRNA sense strand
agacaacaucaaagcacaa

SEQ ID NO: 2452738 - RNA, 19 nt, Homo sapiens
  misc_RNA (1)...(19): siRNA sense strand
gcaaaagagcacuggugua

SEQ ID NO: 2452739 - RNA, 19 nt, Homo sapiens
  misc_RNA (1)...(19): siRNA sense strand
ggauccaaguauaagccaa

SEQ ID NO: 2452740 - RNA, 19 nt, Homo sapiens
  misc_RNA (1)...(19): siRNA sense strand
acacauuuaucaaggagau

SEQ ID NO: 2452741 - RNA, 19 nt, Homo sapiens
  misc_RNA (1)...(19): siRNA sense strand
aagucaaggcugugcagua

SEQ ID NO: 2452742 - RNA, 19 nt, Homo sapiens
  misc_RNA (1)...(19): siRNA sense strand
aaucaagcagagugcauaa

SEQ ID NO: 2452743 - RNA, 19 nt, Homo sapiens
  misc_RNA (1)...(19): siRNA sense strand
caaagggaaagcuggcaaa

SEQ ID NO: 2452744 - RNA, 19 nt, Homo sapiens
  misc_RNA (1)...(19): siRNA sense strand
cugaaaagacugaugaaga

SEQ ID NO: 2452745 - RNA, 19 nt, Homo sapiens
  misc_RNA (1)...(19): siRNA sense strand
cacaaaugguucugcaaca

SEQ ID NO: 2452746 - RNA, 19 nt, Homo sapiens
  misc_RNA (1)...(19): siRNA sense strand
gcagagugcauaaagaaaa

SEQ ID NO: 2452747 - RNA, 19 nt, Homo sapiens
  misc_RNA (1)...(19): siRNA sense strand
ccaaagggaaagcuggcaa

SEQ ID NO: 2452748 - RNA, 19 nt, Homo sapiens
  misc_RNA (1)...(19): siRNA sense strand
ccacauacagaucaagaau

SEQ ID NO: 2452749 - RNA, 19 nt, Homo sapiens
  misc_RNA (1)...(19): siRNA sense strand
caacaucauuugaaagcca

SEQ ID NO: 2452750 - RNA, 19 nt, Homo sapiens
  misc_RNA (1)...(19): siRNA sense strand
caacaaagaaagaagcauc

SEQ ID NO: 2452751 - RNA, 19 nt, Homo sapiens
  misc_RNA (1)...(19): siRNA sense strand
aagaagaaggagaacucaa

SEQ ID NO: 2452752 - RNA, 19 nt, Homo sapiens
  misc_RNA (1)...(19): siRNA sense strand
aguuaaaguauuaguggca

SEQ ID NO: 2452753 - RNA, 19 nt, Homo sapiens
  misc_RNA (1)...(19): siRNA sense strand
ggaaagagggaagagagaa

SEQ ID NO: 2452754 - RNA, 19 nt, Homo sapiens
  misc_RNA (1)...(19): siRNA sense strand
ugaugaaagucaaggcugu

SEQ ID NO: 2452755 - RNA, 19 nt, Homo sapiens
  misc_RNA (1)...(19): siRNA sense strand
gaaaucauucugaggccaa

SEQ ID NO: 2452756 - RNA, 19 nt, Homo sapiens
  misc_RNA (1)...(19): siRNA sense strand
aaagaagagaagaccuuaa

SEQ ID NO: 2452757 - RNA, 19 nt, Homo sapiens
  misc_RNA (1)...(19): siRNA sense strand
ggaaauucaguuggacaaa

SEQ ID NO: 2452758 - RNA, 19 nt, Homo sapiens
  misc_RNA (1)...(19): siRNA sense strand
gugaaaccuuggaggagca

SEQ ID NO: 2452759 - RNA, 19 nt, Homo sapiens
  misc_RNA (1)...(19): siRNA sense strand
acucaagcaugcuguggua

SEQ ID NO: 2452760 - RNA, 19 nt, Homo sapiens
  misc_RNA (1)...(19): siRNA sense strand
ucaagcaugcugugguaaa

SEQ ID NO: 2452761 - RNA, 19 nt, Homo sapiens
  misc_RNA (1)...(19): siRNA sense strand
gccaaacuggagagugaua

SEQ ID NO: 2452762 - RNA, 19 nt, Homo sapiens
  misc_RNA (1)...(19): siRNA sense strand
ggcacaaguaacaaagcaa

SEQ ID NO: 2452763 - RNA, 19 nt, Homo sapiens
  misc_RNA (1)...(19): siRNA sense strand
guagaagacacugaggaaa

SEQ ID NO: 2452764 - RNA, 19 nt, Homo sapiens
  misc_RNA (1)...(19): siRNA sense strand
cagugaaagaaaaggauau

SEQ ID NO: 2452765 - RNA, 19 nt, Homo sapiens
  misc_RNA (1)...(19): siRNA sense strand
guaugaaaaggcaaagaaa

SEQ ID NO: 2452766 - RNA, 19 nt, Homo sapiens
  misc_RNA (1)...(19): siRNA sense strand
cuacauggucggucugcaa

SEQ ID NO: 2452767 - RNA, 19 nt, Homo sapiens
  misc_RNA (1)...(19): siRNA sense strand
gagcuagccagaaggguca

SEQ ID NO: 2452768 - RNA, 19 nt, Homo sapiens
  misc_RNA (1)...(19): siRNA sense strand
aaacaguuggcuuuggaaa

SEQ ID NO: 2452769 - RNA, 19 nt, Homo sapiens
  misc_RNA (1)...(19): siRNA sense strand
cuaugaagaagaagaagga

SEQ ID NO: 2452770 - RNA, 19 nt, Homo sapiens
  misc_RNA (1)...(19): siRNA sense strand
cauuaaagaaagauggaca

SEQ ID NO: 2452771 - RNA, 19 nt, Homo sapiens
  misc_RNA (1)...(19): siRNA sense strand
cugaaucgguugaaggaga

SEQ ID NO: 2452772 - RNA, 19 nt, Homo sapiens
  misc_RNA (1)...(19): siRNA sense strand
ccugaagacaaauggacaa

SEQ ID NO: 2452773 - RNA, 19 nt, Homo sapiens
  misc_RNA (1)...(19): siRNA sense strand
aagaagauauugaaggcau

SEQ ID NO: 2452774 - RNA, 19 nt, Homo sapiens
  misc_RNA (1)...(19): siRNA sense strand
uggaauuggaagcggaaca

SEQ ID NO: 2452775 - RNA, 19 nt, Homo sapiens
  misc_RNA (1)...(19): siRNA sense strand
ugacauuggaaaagaacua

SEQ ID NO: 2452776 - RNA, 19 nt, Homo sapiens
  misc_RNA (1)...(19): siRNA sense strand
aguucugguuguuggaauu

SEQ ID NO: 2452777 - RNA, 19 nt, Homo sapiens
  misc_RNA (1)...(19): siRNA sense strand
gcguguucgccgugcacaa

SEQ ID NO: 2452778 - RNA, 19 nt, Homo sapiens
  misc_RNA (1)...(19): siRNA sense strand
aggugaagucguagaagca

SEQ ID NO: 2452779 - RNA, 19 nt, Homo sapiens
  misc_RNA (1)...(19): siRNA sense strand
gguuuugagcugugaauau

SEQ ID NO: 2452780 - RNA, 19 nt, Homo sapiens
  misc_RNA (1)...(19): siRNA sense strand
agccaaagagagaagauga

SEQ ID NO: 2452781 - RNA, 19 nt, Homo sapiens
  misc_RNA (1)...(19): siRNA sense strand
gccaaagagagaagaugau

SEQ ID NO: 2452782 - RNA, 19 nt, Homo sapiens
  misc_RNA (1)...(19): siRNA sense strand
ucuaaaugagccaaagaga

SEQ ID NO: 2452783 - RNA, 19 nt, Homo sapiens
  misc_RNA (1)...(19): siRNA sense strand
auauacugccauuggagaa

SEQ ID NO: 2452784 - RNA, 19 nt, Homo sapiens
  misc_RNA (1)...(19): siRNA sense strand
gcuagaagaacaugcccuu

SEQ ID NO: 2452785 - RNA, 19 nt, Homo sapiens
  misc_RNA (1)...(19): siRNA sense strand
ccagaauggaccaagagga

SEQ ID NO: 2452786 - RNA, 19 nt, Homo sapiens
  misc_RNA (1)...(19): siRNA sense strand
cuuucgacuuugaugaaga

SEQ ID NO: 2452787 - RNA, 19 nt, Homo sapiens
  misc_RNA (1)...(19): siRNA sense strand
agaaagauggacaaagacu

SEQ ID NO: 2452788 - RNA, 19 nt, Homo sapiens
  misc_RNA (1)...(19): siRNA sense strand
uguugaauguggaggaggu

SEQ ID NO: 2452789 - RNA, 19 nt, Homo sapiens
  misc_RNA (1)...(19): siRNA sense strand
gggagaaccugaagcugga

SEQ ID NO: 2452790 - RNA, 19 nt, Homo sapiens
  misc_RNA (1)...(19): siRNA sense strand
cgcucaaaguguucggcaa

SEQ ID NO: 2452791 - RNA, 19 nt, Homo sapiens
  misc_RNA (1)...(19): siRNA sense strand
caucgaaagaaaugcuaga

SEQ ID NO: 2452792 - RNA, 19 nt, Homo sapiens
  misc_RNA (1)...(19): siRNA sense strand
cggaagagcuggaaaaccu

SEQ ID NO: 2452793 - RNA, 19 nt, Homo sapiens
  misc_RNA (1)...(19): siRNA sense strand
ucgaaagaaaugcuagaau

SEQ ID NO: 2452794 - RNA, 19 nt, Homo sapiens
  misc_RNA (1)...(19): siRNA sense strand
gugcagagggagaaccuga

SEQ ID NO: 2452795 - RNA, 19 nt, Homo sapiens
  misc_RNA (1)...(19): siRNA sense strand
ccaaugaccgcgugccgua

SEQ ID NO: 2452796 - RNA, 19 nt, Homo sapiens
  misc_RNA (1)...(19): siRNA sense strand
ggaaccagcuuguggaguc

SEQ ID NO: 2452797 - RNA, 19 nt, Homo sapiens
  misc_RNA (1)...(19): siRNA sense strand
gcucaaaguguucggcaac

SEQ ID NO: 2452798 - RNA, 19 nt, Homo sapiens
  misc_RNA (1)...(19): siRNA sense strand
caucagacgaagagggaaa

SEQ ID NO: 2452799 - RNA, 19 nt, Homo sapiens
  misc_RNA (1)...(19): siRNA sense strand
cccaaaagggaaagagaaa

SEQ ID NO: 2452800 - RNA, 19 nt, Homo sapiens
  misc_RNA (1)...(19): siRNA sense strand
uugaagacacagauagaaa

SEQ ID NO: 2452801 - RNA, 19 nt, Homo sapiens
  misc_RNA (1)...(19): siRNA sense strand
ccaaagaacugguggccuc

SEQ ID NO: 2452802 - RNA, 19 nt, Homo sapiens
  misc_RNA (1)...(19): siRNA sense strand
ccuugaagacacagauaga

SEQ ID NO: 2452803 - RNA, 19 nt, Homo sapiens
  misc_RNA (1)...(19): siRNA sense strand
aaucuagaaaugagagaca

SEQ ID NO: 2452804 - RNA, 19 nt, Homo sapiens
  misc_RNA (1)...(19): siRNA sense strand
ucuaacaagccaagaccua

SEQ ID NO: 2452805 - RNA, 19 nt, Homo sapiens
  misc_RNA (1)...(19): siRNA sense strand
gugugaugaaggugcuaua

SEQ ID NO: 2452806 - RNA, 19 nt, Homo sapiens
  misc_RNA (1)...(19): siRNA sense strand
ugaugaacagcgugcuaaa

SEQ ID NO: 2452807 - RNA, 19 nt, Homo sapiens
  misc_RNA (1)...(19): siRNA sense strand
ccgcguagaccuagaucuu

SEQ ID NO: 2452808 - RNA, 19 nt, Homo sapiens
  misc_RNA (1)...(19): siRNA sense strand
agaagagauccaacagcaa

SEQ ID NO: 2452809 - RNA, 19 nt, Homo sapiens
  misc_RNA (1)...(19): siRNA sense strand
uagauuaagagaugaccaa

SEQ ID NO: 2452810 - RNA, 19 nt, Homo sapiens
  misc_RNA (1)...(19): siRNA sense strand
aggaaacccaaaagggaaa

SEQ ID NO: 2452811 - RNA, 19 nt, Homo sapiens
  misc_RNA (1)...(19): siRNA sense strand
gcagaaaagaccacugaau

SEQ ID NO: 2452812 - RNA, 19 nt, Homo sapiens
  misc_RNA (1)...(19): siRNA sense strand
cgugaugaacagcgugcua

SEQ ID NO: 2452813 - RNA, 19 nt, Homo sapiens
  misc_RNA (1)...(19): siRNA sense strand
cuauaagucaggaugugaa

SEQ ID NO: 2452814 - RNA, 19 nt, Homo sapiens
  misc_RNA (1)...(19): siRNA sense strand
ccaccaauccugagcaaac

SEQ ID NO: 2452815 - RNA, 19 nt, Homo sapiens
  misc_RNA (1)...(19): siRNA sense strand
augaaggugcuauagguua

SEQ ID NO: 2452816 - RNA, 19 nt, Homo sapiens
  misc_RNA (1)...(19): siRNA sense strand
uagaugaaauugucggcau

SEQ ID NO: 2452817 - RNA, 19 nt, Homo sapiens
  misc_RNA (1)...(19): siRNA sense strand
cguaaacgcaaauuggaca

SEQ ID NO: 2452818 - RNA, 19 nt, Homo sapiens
  misc_RNA (1)...(19): siRNA sense strand
uugacaaucauaugaggaa

SEQ ID NO: 2452819 - RNA, 19 nt, Homo sapiens
  misc_RNA (1)...(19): siRNA sense strand
guagauaccuugaagacac

SEQ ID NO: 2452820 - RNA, 19 nt, Homo sapiens
  misc_RNA (1)...(19): siRNA sense strand
caaaagggaaagagaaagu

SEQ ID NO: 2452821 - RNA, 19 nt, Homo sapiens
  misc_RNA (1)...(19): siRNA sense strand
gagaaaagcacgaagcugu

SEQ ID NO: 2452822 - RNA, 19 nt, Homo sapiens
  misc_RNA (1)...(19): siRNA sense strand
cagagaaaccugacuggga

SEQ ID NO: 2452823 - RNA, 19 nt, Homo sapiens
  misc_RNA (1)...(19): siRNA sense strand
gauccaacagcaaggacuu

SEQ ID NO: 2452824 - RNA, 19 nt, Homo sapiens
  misc_RNA (1)...(19): siRNA sense strand
ugaaacagaaacugcauga

SEQ ID NO: 2452825 - RNA, 19 nt, Homo sapiens
  misc_RNA (1)...(19): siRNA sense strand
aaauaaaguugcugcgcag

SEQ ID NO: 2452826 - RNA, 19 nt, Homo sapiens
  misc_RNA (1)...(19): siRNA sense strand
aagcaaagaaggaaacucu

SEQ ID NO: 2452827 - RNA, 19 nt, Homo sapiens
  misc_RNA (1)...(19): siRNA sense strand
gcaugaggaaaaugaagaa

SEQ ID NO: 2452828 - RNA, 19 nt, Homo sapiens
  misc_RNA (1)...(19): siRNA sense strand
cugggaagucacagaagau

SEQ ID NO: 2452829 - RNA, 19 nt, Homo sapiens
  misc_RNA (1)...(19): siRNA sense strand
gauagaaacuugagccgug

SEQ ID NO: 2452830 - RNA, 19 nt, Homo sapiens
  misc_RNA (1)...(19): siRNA sense strand
ggaucauaguucccagcau

SEQ ID NO: 2452831 - RNA, 19 nt, Homo sapiens
  misc_RNA (1)...(19): siRNA sense strand
uagaagagauccaacagca

SEQ ID NO: 2452832 - RNA, 19 nt, Homo sapiens
  misc_RNA (1)...(19): siRNA sense strand
ugacaaucauaugaggaau

SEQ ID NO: 2452833 - RNA, 19 nt, Homo sapiens
  misc_RNA (1)...(19): siRNA sense strand
gggaagaggagaaggcacc

SEQ ID NO: 2452834 - RNA, 19 nt, Homo sapiens
  misc_RNA (1)...(19): siRNA sense strand
aagacaacuuugauccaau

SEQ ID NO: 2452835 - RNA, 19 nt, Homo sapiens
  misc_RNA (1)...(19): siRNA sense strand
agcacgaagcuguggauca

SEQ ID NO: 2452836 - RNA, 19 nt, Homo sapiens
  misc_RNA (1)...(19): siRNA sense strand
gggaagagcugguuggacu

SEQ ID NO: 2452837 - RNA, 19 nt, Homo sapiens
  misc_RNA (1)...(19): siRNA sense strand
gaauuaagcucuauagcca

SEQ ID NO: 2452838 - RNA, 19 nt, Homo sapiens
  misc_RNA (1)...(19): siRNA sense strand
gcaugaaacgcaaggacau

SEQ ID NO: 2452839 - RNA, 19 nt, Homo sapiens
  misc_RNA (1)...(19): siRNA sense strand
ccugaaggagaaagcaaua

SEQ ID NO: 2452840 - RNA, 19 nt, Homo sapiens
  misc_RNA (1)...(19): siRNA sense strand
ggcucaagcuccugggaca

SEQ ID NO: 2452841 - RNA, 19 nt, Homo sapiens
  misc_RNA (1)...(19): siRNA sense strand
caagaugguccaagcggaa

SEQ ID NO: 2452842 - RNA, 19 nt, Homo sapiens
  misc_RNA (1)...(19): siRNA sense strand
ccaucuuacuggagagaac

SEQ ID NO: 2452843 - RNA, 19 nt, Homo sapiens
  misc_RNA (1)...(19): siRNA sense strand
augccuuccugaugagaua

SEQ ID NO: 2452844 - RNA, 19 nt, Homo sapiens
  misc_RNA (1)...(19): siRNA sense strand
cugaaaucccacuuauaaa

SEQ ID NO: 2452845 - RNA, 19 nt, Homo sapiens
  misc_RNA (1)...(19): siRNA sense strand
ccagaagcucaaagcagaa

SEQ ID NO: 2452846 - RNA, 19 nt, Homo sapiens
  misc_RNA (1)...(19): siRNA sense strand
gcaauacagguuugggaca

SEQ ID NO: 2452847 - RNA, 19 nt, Homo sapiens
  misc_RNA (1)...(19): siRNA sense strand
gggugguaguggccagaau

SEQ ID NO: 2452848 - RNA, 19 nt, Homo sapiens
  misc_RNA (1)...(19): siRNA sense strand
cugaugacccugaaggaga

SEQ ID NO: 2452849 - RNA, 19 nt, Homo sapiens
  misc_RNA (1)...(19): siRNA sense strand
gggccaagagccaggucau

SEQ ID NO: 2452850 - RNA, 19 nt, Homo sapiens
  misc_RNA (1)...(19): siRNA sense strand
gggcuuucuuuaaggaagu

SEQ ID NO: 2452851 - RNA, 19 nt, Homo sapiens
  misc_RNA (1)...(19): siRNA sense strand
ccagaaggccugaggagcu

SEQ ID NO: 2452852 - RNA, 19 nt, Homo sapiens
  misc_RNA (1)...(19): siRNA sense strand
gcguggaaauacugggaag

SEQ ID NO: 2452853 - RNA, 19 nt, Homo sapiens
  misc_RNA (1)...(19): siRNA sense strand
cucuauagccacaaaguuu

SEQ ID NO: 2452854 - RNA, 19 nt, Homo sapiens
  misc_RNA (1)...(19): siRNA sense strand
caggcaucguggagauaca

SEQ ID NO: 2452855 - RNA, 19 nt, Homo sapiens
  misc_RNA (1)...(19): siRNA sense strand
ucuacaaugaccuggaauu

SEQ ID NO: 2452856 - RNA, 19 nt, Homo sapiens
  misc_RNA (1)...(19): siRNA sense strand
gugcauggaggaagacaca

SEQ ID NO: 2452857 - RNA, 19 nt, Homo sapiens
  misc_RNA (1)...(19): siRNA sense strand
gcaagaugguccaagcgga

SEQ ID NO: 2452858 - RNA, 19 nt, Homo sapiens
  misc_RNA (1)...(19): siRNA sense strand
gguccaagcggaagacacu

SEQ ID NO: 2452859 - RNA, 19 nt, Homo sapiens
  misc_RNA (1)...(19): siRNA sense strand
ggacauugccauggagaac

SEQ ID NO: 2452860 - RNA, 19 nt, Homo sapiens
  misc_RNA (1)...(19): siRNA sense strand
cuguaugagcuucuguuaa

SEQ ID NO: 2452861 - RNA, 19 nt, Homo sapiens
  misc_RNA (1)...(19): siRNA sense strand
ggaaagugcagcagugccu

SEQ ID NO: 2452862 - RNA, 19 nt, Homo sapiens
  misc_RNA (1)...(19): siRNA sense strand
gcucacacauugaugccau

SEQ ID NO: 2452863 - RNA, 19 nt, Homo sapiens
  misc_RNA (1)...(19): siRNA sense strand
cuguuaaagaccaccagaa

SEQ ID NO: 2452864 - RNA, 19 nt, Homo sapiens
  misc_RNA (1)...(19): siRNA sense strand
gcacacaugucuuagccga

SEQ ID NO: 2452865 - RNA, 19 nt, Homo sapiens
  misc_RNA (1)...(19): siRNA sense strand
cuggauuaacuaaggcaga

SEQ ID NO: 2452866 - RNA, 19 nt, Homo sapiens
  misc_RNA (1)...(19): siRNA sense strand
uggacauugccauggagaa

SEQ ID NO: 2452867 - RNA, 19 nt, Homo sapiens
  misc_RNA (1)...(19): siRNA sense strand
ccauagacacuguggcuuc

SEQ ID NO: 2452868 - RNA, 19 nt, Homo sapiens
  misc_RNA (1)...(19): siRNA sense strand
augucuuagccgaguuuaa

SEQ ID NO: 2452869 - RNA, 19 nt, Homo sapiens
  misc_RNA (1)...(19): siRNA sense strand
aguuuaagaggaaggcuga

SEQ ID NO: 2452870 - RNA, 19 nt, Homo sapiens
  misc_RNA (1)...(19): siRNA sense strand
ggaccauugcagcuggauu

SEQ ID NO: 2452871 - RNA, 19 nt, Homo sapiens
  misc_RNA (1)...(19): siRNA sense strand
ggauaaggaacuuggaagg

SEQ ID NO: 2452872 - RNA, 19 nt, Homo sapiens
  misc_RNA (1)...(19): siRNA sense strand
augaguacacuguggacau

SEQ ID NO: 2452873 - RNA, 19 nt, Homo sapiens
  misc_RNA (1)...(19): siRNA sense strand
gggaagagcugguuggacu

SEQ ID NO: 2452874 - RNA, 19 nt, Homo sapiens
  misc_RNA (1)...(19): siRNA sense strand
gaauuaagcucuauagcca

SEQ ID NO: 2452875 - RNA, 19 nt, Homo sapiens
  misc_RNA (1)...(19): siRNA sense strand
gcaugaaacgcaaggacau

SEQ ID NO: 2452876 - RNA, 19 nt, Homo sapiens
  misc_RNA (1)...(19): siRNA sense strand
ccugaaggagaaagcaaua

SEQ ID NO: 2452877 - RNA, 19 nt, Homo sapiens
  misc_RNA (1)...(19): siRNA sense strand
ggcucaagcuccugggaca

SEQ ID NO: 2452878 - RNA, 19 nt, Homo sapiens
  misc_RNA (1)...(19): siRNA sense strand
caagaugguccaagcggaa

SEQ ID NO: 2452879 - RNA, 19 nt, Homo sapiens
  misc_RNA (1)...(19): siRNA sense strand
ccaucuuacuggagagaac

SEQ ID NO: 2452880 - RNA, 19 nt, Homo sapiens
  misc_RNA (1)...(19): siRNA sense strand
augccuuccugaugagaua

SEQ ID NO: 2452881 - RNA, 19 nt, Homo sapiens
  misc_RNA (1)...(19): siRNA sense strand
cugaaaucccacuuauaaa

SEQ ID NO: 2452882 - RNA, 19 nt, Homo sapiens
  misc_RNA (1)...(19): siRNA sense strand
ccagaagcucaaagcagaa

SEQ ID NO: 2452883 - RNA, 19 nt, Homo sapiens
  misc_RNA (1)...(19): siRNA sense strand
gcaauacagguuugggaca

SEQ ID NO: 2452884 - RNA, 19 nt, Homo sapiens
  misc_RNA (1)...(19): siRNA sense strand
gggugguaguggccagaau

SEQ ID NO: 2452885 - RNA, 19 nt, Homo sapiens
  misc_RNA (1)...(19): siRNA sense strand
cugaugacccugaaggaga

SEQ ID NO: 2452886 - RNA, 19 nt, Homo sapiens
  misc_RNA (1)...(19): siRNA sense strand
gggccaagagccaggucau

SEQ ID NO: 2452887 - RNA, 19 nt, Homo sapiens
  misc_RNA (1)...(19): siRNA sense strand
gggcuuucuuuaaggaagu

SEQ ID NO: 2452888 - RNA, 19 nt, Homo sapiens
  misc_RNA (1)...(19): siRNA sense strand
ccagaaggccugaggagcu

SEQ ID NO: 2452889 - RNA, 19 nt, Homo sapiens
  misc_RNA (1)...(19): siRNA sense strand
gcguggaaauacugggaag

SEQ ID NO: 2452890 - RNA, 19 nt, Homo sapiens
  misc_RNA (1)...(19): siRNA sense strand
cucuauagccacaaaguuu

SEQ ID NO: 2452891 - RNA, 19 nt, Homo sapiens
  misc_RNA (1)...(19): siRNA sense strand
caggcaucguggagauaca

SEQ ID NO: 2452892 - RNA, 19 nt, Homo sapiens
  misc_RNA (1)...(19): siRNA sense strand
ucuacaaugaccuggaauu

SEQ ID NO: 2452893 - RNA, 19 nt, Homo sapiens
  misc_RNA (1)...(19): siRNA sense strand
gugcauggaggaagacaca

SEQ ID NO: 2452894 - RNA, 19 nt, Homo sapiens
  misc_RNA (1)...(19): siRNA sense strand
gcaagaugguccaagcgga

SEQ ID NO: 2452895 - RNA, 19 nt, Homo sapiens
  misc_RNA (1)...(19): siRNA sense strand
gguccaagcggaagacacu

SEQ ID NO: 2452896 - RNA, 19 nt, Homo sapiens
  misc_RNA (1)...(19): siRNA sense strand
ggacauugccauggagaac

SEQ ID NO: 2452897 - RNA, 19 nt, Homo sapiens
  misc_RNA (1)...(19): siRNA sense strand
cuguaugagcuucuguuaa

SEQ ID NO: 2452898 - RNA, 19 nt, Homo sapiens
  misc_RNA (1)...(19): siRNA sense strand
ggaaagugcagcagugccu

SEQ ID NO: 2452899 - RNA, 19 nt, Homo sapiens
  misc_RNA (1)...(19): siRNA sense strand
gcucacacauugaugccau

SEQ ID NO: 2452900 - RNA, 19 nt, Homo sapiens
  misc_RNA (1)...(19): siRNA sense strand
cuguuaaagaccaccagaa

SEQ ID NO: 2452901 - RNA, 19 nt, Homo sapiens
  misc_RNA (1)...(19): siRNA sense strand
gcacacaugucuuagccga

SEQ ID NO: 2452902 - RNA, 19 nt, Homo sapiens
  misc_RNA (1)...(19): siRNA sense strand
cuggauuaacuaaggcaga

SEQ ID NO: 2452903 - RNA, 19 nt, Homo sapiens
  misc_RNA (1)...(19): siRNA sense strand
uggacauugccauggagaa

SEQ ID NO: 2452904 - RNA, 19 nt, Homo sapiens
  misc_RNA (1)...(19): siRNA sense strand
ccauagacacuguggcuuc

SEQ ID NO: 2452905 - RNA, 19 nt, Homo sapiens
  misc_RNA (1)...(19): siRNA sense strand
augucuuagccgaguuuaa

SEQ ID NO: 2452906 - RNA, 19 nt, Homo sapiens
  misc_RNA (1)...(19): siRNA sense strand
aguuuaagaggaaggcuga

SEQ ID NO: 2452907 - RNA, 19 nt, Homo sapiens
  misc_RNA (1)...(19): siRNA sense strand
ggaccauugcagcuggauu

SEQ ID NO: 2452908 - RNA, 19 nt, Homo sapiens
  misc_RNA (1)...(19): siRNA sense strand
ggauaaggaacuuggaagg

SEQ ID NO: 2452909 - RNA, 19 nt, Homo sapiens
  misc_RNA (1)...(19): siRNA sense strand
augaguacacuguggacau

SEQ ID NO: 2452910 - RNA, 19 nt, Homo sapiens
  misc_RNA (1)...(19): siRNA sense strand
aagaugaagaggagagaaa

SEQ ID NO: 2452911 - RNA, 19 nt, Homo sapiens
  misc_RNA (1)...(19): siRNA sense strand
gcaccaaaacagugggaaa

SEQ ID NO: 2452912 - RNA, 19 nt, Homo sapiens
  misc_RNA (1)...(19): siRNA sense strand
acaaugauggagagagaaa

SEQ ID NO: 2452913 - RNA, 19 nt, Homo sapiens
  misc_RNA (1)...(19): siRNA sense strand
gagagaaaccauaggcaga

SEQ ID NO: 2452914 - RNA, 19 nt, Homo sapiens
  misc_RNA (1)...(19): siRNA sense strand
gggccaagucaaaggcaau

SEQ ID NO: 2452915 - RNA, 19 nt, Homo sapiens
  misc_RNA (1)...(19): siRNA sense strand
ugaacaaagaagagauuga

SEQ ID NO: 2452916 - RNA, 19 nt, Homo sapiens
  misc_RNA (1)...(19): siRNA sense strand
gggaaaugggccaagucaa

SEQ ID NO: 2452917 - RNA, 19 nt, Homo sapiens
  misc_RNA (1)...(19): siRNA sense strand
ggaaauuggcugagagguc

SEQ ID NO: 2452918 - RNA, 19 nt, Homo sapiens
  misc_RNA (1)...(19): siRNA sense strand
auggaaagaaugagccuua

SEQ ID NO: 2452919 - RNA, 19 nt, Homo sapiens
  misc_RNA (1)...(19): siRNA sense strand
aagaaagaccaguggcaga

SEQ ID NO: 2452920 - RNA, 19 nt, Homo sapiens
  misc_RNA (1)...(19): siRNA sense strand
gcuacagagaccagagaga

SEQ ID NO: 2452921 - RNA, 19 nt, Homo sapiens
  misc_RNA (1)...(19): siRNA sense strand
uggaaagaauaggcggaaa

SEQ ID NO: 2452922 - RNA, 19 nt, Homo sapiens
  misc_RNA (1)...(19): siRNA sense strand
aagaagagauugaacggau

SEQ ID NO: 2452923 - RNA, 19 nt, Homo sapiens
  misc_RNA (1)...(19): siRNA sense strand
ugaagaaaggaaaggccaa

SEQ ID NO: 2452924 - RNA, 19 nt, Homo sapiens
  misc_RNA (1)...(19): siRNA sense strand
gcucgaagagagaagaaaa

SEQ ID NO: 2452925 - RNA, 19 nt, Homo sapiens
  misc_RNA (1)...(19): siRNA sense strand
ggaagaggagggaggcaca

SEQ ID NO: 2452926 - RNA, 19 nt, Homo sapiens
  misc_RNA (1)...(19): siRNA sense strand
caucaguccaggaagcaaa

SEQ ID NO: 2452927 - RNA, 19 nt, Homo sapiens
  misc_RNA (1)...(19): siRNA sense strand
cucagaaauugaaggaaaa

SEQ ID NO: 2452928 - RNA, 19 nt, Homo sapiens
  misc_RNA (1)...(19): siRNA sense strand
gcugagaggucugaggcua

SEQ ID NO: 2452929 - RNA, 19 nt, Homo sapiens
  misc_RNA (1)...(19): siRNA sense strand
agaacaaagaacugacaca

SEQ ID NO: 2452930 - RNA, 19 nt, Homo sapiens
  misc_RNA (1)...(19): siRNA sense strand
ccacaauagaggagcugga

SEQ ID NO: 2452931 - RNA, 19 nt, Homo sapiens
  misc_RNA (1)...(19): siRNA sense strand
gaguacuaucucagaaauu

SEQ ID NO: 2452932 - RNA, 19 nt, Homo sapiens
  misc_RNA (1)...(19): siRNA sense strand
aagcuguggaggcgaguaa

SEQ ID NO: 2452933 - RNA, 19 nt, Homo sapiens
  misc_RNA (1)...(19): siRNA sense strand
uggaacacccagagggcuu

SEQ ID NO: 2452934 - RNA, 19 nt, Homo sapiens
  misc_RNA (1)...(19): siRNA sense strand
uggaguuaccucugaacaa

SEQ ID NO: 2452935 - RNA, 19 nt, Homo sapiens
  misc_RNA (1)...(19): siRNA sense strand
cacuagaagaacuggaaaa

SEQ ID NO: 2452936 - RNA, 19 nt, Homo sapiens
  misc_RNA (1)...(19): siRNA sense strand
ugccagagcuugaggccca

SEQ ID NO: 2452937 - RNA, 19 nt, Homo sapiens
  misc_RNA (1)...(19): siRNA sense strand
gaccaguggcagaagaaga

SEQ ID NO: 2452938 - RNA, 19 nt, Homo sapiens
  misc_RNA (1)...(19): siRNA sense strand
aagugagggagaagaaaga

SEQ ID NO: 2452939 - RNA, 19 nt, Homo sapiens
  misc_RNA (1)...(19): siRNA sense strand
agaagaaagaccaguggca

SEQ ID NO: 2452940 - RNA, 19 nt, Homo sapiens
  misc_RNA (1)...(19): siRNA sense strand
ccagcaggcagucaagaaa

SEQ ID NO: 2452941 - RNA, 19 nt, Homo sapiens
  misc_RNA (1)...(19): siRNA sense strand
cucaguggcuggaaggcaa

SEQ ID NO: 2452942 - RNA, 19 nt, Homo sapiens
  misc_RNA (1)...(19): siRNA sense strand
aguccuacuaugaggccaa

SEQ ID NO: 2452943 - RNA, 19 nt, Homo sapiens
  misc_RNA (1)...(19): siRNA sense strand
uugaaagagaagagggaag

SEQ ID NO: 2452944 - RNA, 19 nt, Homo sapiens
  misc_RNA (1)...(19): siRNA sense strand
agaaaggaaaggccaagaa

SEQ ID NO: 2452945 - RNA, 19 nt, Homo sapiens
  misc_RNA (1)...(19): siRNA sense strand
ccaaagaggcugcaaccca

SEQ ID NO: 2452946 - RNA, 19 nt, Homo sapiens
  misc_RNA (1)...(19): siRNA sense strand
cgaguaagccaaaggacgu

SEQ ID NO: 2452947 - RNA, 19 nt, Homo sapiens
  misc_RNA (1)...(19): siRNA sense strand
gccaaggcucgaagagaga

SEQ ID NO: 2452948 - RNA, 19 nt, Homo sapiens
  misc_RNA (1)...(19): siRNA sense strand
ccaagaaagcccuaaaaga

SEQ ID NO: 2452949 - RNA, 19 nt, Homo sapiens
  misc_RNA (1)...(19): siRNA sense strand
gugaagaaaggaaaggcca

SEQ ID NO: 2452950 - RNA, 19 nt, Homo sapiens
  misc_RNA (1)...(19): siRNA sense strand
aguuugagcagcugcggaa

SEQ ID NO: 2452951 - RNA, 19 nt, Homo sapiens
  misc_RNA (1)...(19): siRNA sense strand
gaaugagccuuaagcacca

SEQ ID NO: 2452952 - RNA, 19 nt, Homo sapiens
  misc_RNA (1)...(19): siRNA sense strand
caaaggcaauuauggccaa

SEQ ID NO: 2452953 - RNA, 19 nt, Homo sapiens
  misc_RNA (1)...(19): siRNA sense strand
ugaagaaccggcaggcaga

SEQ ID NO: 2452954 - RNA, 19 nt, Homo sapiens
  misc_RNA (1)...(19): siRNA sense strand
acaagcagccagugacaga

SEQ ID NO: 2452955 - RNA, 19 nt, Homo sapiens
  misc_RNA (1)...(19): siRNA sense strand
gagcagagcuucagagggc

SEQ ID NO: 2452956 - RNA, 19 nt, Homo sapiens
  misc_RNA (1)...(19): siRNA sense strand
gcuugaggcccauggaguu

SEQ ID NO: 2452957 - RNA, 19 nt, Homo sapiens
  misc_RNA (1)...(19): siRNA sense strand
ggagcaaaugaucgaccua

SEQ ID NO: 2452958 - RNA, 19 nt, Homo sapiens
  misc_RNA (1)...(19): siRNA sense strand
ggaagaugaagaggagaga

SEQ ID NO: 2452959 - RNA, 19 nt, Homo sapiens
  misc_RNA (1)...(19): siRNA sense strand
accauaggcagaugauaaa

SEQ ID NO: 2452960 - RNA, 19 nt, Homo sapiens
  misc_RNA (1)...(19): siRNA sense strand
aagcaacugaguagaguca

SEQ ID NO: 2452961 - RNA, 19 nt, Homo sapiens
  misc_RNA (1)...(19): siRNA sense strand
agaaagaccaguggcagaa

SEQ ID NO: 2452962 - RNA, 19 nt, Homo sapiens
  misc_RNA (1)...(19): siRNA sense strand
gaagagagaagaaaaucaa

SEQ ID NO: 2452963 - RNA, 19 nt, Homo sapiens
  misc_RNA (1)...(19): siRNA sense strand
gcuagaagagcugggaaaa

SEQ ID NO: 2452964 - RNA, 19 nt, Homo sapiens
  misc_RNA (1)...(19): siRNA sense strand
agaaggagcaaaugaucga

SEQ ID NO: 2452965 - RNA, 19 nt, Homo sapiens
  misc_RNA (1)...(19): siRNA sense strand
ucugaacaaagaagagauu

SEQ ID NO: 2452966 - RNA, 19 nt, Homo sapiens
  misc_RNA (1)...(19): siRNA sense strand
ccgcacaaguccucuccaa

SEQ ID NO: 2452967 - RNA, 19 nt, Homo sapiens
  misc_RNA (1)...(19): siRNA sense strand
caagaaaagacgccgguuu

SEQ ID NO: 2452968 - RNA, 19 nt, Homo sapiens
  misc_RNA (1)...(19): siRNA sense strand
ccucacaggcugaaggcuu

SEQ ID NO: 2452969 - RNA, 19 nt, Homo sapiens
  misc_RNA (1)...(19): siRNA sense strand
augcugaggaguaugcaaa

SEQ ID NO: 2452970 - RNA, 19 nt, Homo sapiens
  misc_RNA (1)...(19): siRNA sense strand
cugaaugagaccaucaauu

SEQ ID NO: 2452971 - RNA, 19 nt, Homo sapiens
  misc_RNA (1)...(19): siRNA sense strand
aggaaaacgcuuagagauu

SEQ ID NO: 2452972 - RNA, 19 nt, Homo sapiens
  misc_RNA (1)...(19): siRNA sense strand
aguagagaacugugagcaa

SEQ ID NO: 2452973 - RNA, 19 nt, Homo sapiens
  misc_RNA (1)...(19): siRNA sense strand
ccugaagaagguagagcaa

SEQ ID NO: 2452974 - RNA, 19 nt, Homo sapiens
  misc_RNA (1)...(19): siRNA sense strand
agggaagaaucuauggcaa

SEQ ID NO: 2452975 - RNA, 19 nt, Homo sapiens
  misc_RNA (1)...(19): siRNA sense strand
cauaaagaggcuaaggaca

SEQ ID NO: 2452976 - RNA, 19 nt, Homo sapiens
  misc_RNA (1)...(19): siRNA sense strand
aagugaacaccgagaguga

SEQ ID NO: 2452977 - RNA, 19 nt, Homo sapiens
  misc_RNA (1)...(19): siRNA sense strand
aagugaagcuggagaccca

SEQ ID NO: 2452978 - RNA, 19 nt, Homo sapiens
  misc_RNA (1)...(19): siRNA sense strand
cggugaacgaguugcagaa

SEQ ID NO: 2452979 - RNA, 19 nt, Homo sapiens
  misc_RNA (1)...(19): siRNA sense strand
gggaaguacuggacagccu

SEQ ID NO: 2452980 - RNA, 19 nt, Homo sapiens
  misc_RNA (1)...(19): siRNA sense strand
agaaaguucgggaggccua

SEQ ID NO: 2452981 - RNA, 19 nt, Homo sapiens
  misc_RNA (1)...(19): siRNA sense strand
ggucauuggcaaaggugga

SEQ ID NO: 2452982 - RNA, 19 nt, Homo sapiens
  misc_RNA (1)...(19): siRNA sense strand
agaaaguguuugcggagca

SEQ ID NO: 2452983 - RNA, 19 nt, Homo sapiens
  misc_RNA (1)...(19): siRNA sense strand
aucagaagggacagaguaa

SEQ ID NO: 2452984 - RNA, 19 nt, Homo sapiens
  misc_RNA (1)...(19): siRNA sense strand
ggaaaauucaaauccgaaa

SEQ ID NO: 2452985 - RNA, 19 nt, Homo sapiens
  misc_RNA (1)...(19): siRNA sense strand
agguuaagcagcagcauca

SEQ ID NO: 2452986 - RNA, 19 nt, Homo sapiens
  misc_RNA (1)...(19): siRNA sense strand
aggagauggugcagguguu

SEQ ID NO: 2452987 - RNA, 19 nt, Homo sapiens
  misc_RNA (1)...(19): siRNA sense strand
gugagacggcaguggugaa

SEQ ID NO: 2452988 - RNA, 19 nt, Homo sapiens
  misc_RNA (1)...(19): siRNA sense strand
ucaugaagcugaauggcca

SEQ ID NO: 2452989 - RNA, 19 nt, Homo sapiens
  misc_RNA (1)...(19): siRNA sense strand
gcggccaguucuuggucaa

SEQ ID NO: 2452990 - RNA, 19 nt, Homo sapiens
  misc_RNA (1)...(19): siRNA sense strand
auaaagaggcuaaggacac

SEQ ID NO: 2452991 - RNA, 19 nt, Homo sapiens
  misc_RNA (1)...(19): siRNA sense strand
ccaaggaggaagugaagcu

SEQ ID NO: 2452992 - RNA, 19 nt, Homo sapiens
  misc_RNA (1)...(19): siRNA sense strand
acgcuuagagauugaacau

SEQ ID NO: 2452993 - RNA, 19 nt, Homo sapiens
  misc_RNA (1)...(19): siRNA sense strand
gagcaagugaacaccgaga

SEQ ID NO: 2452994 - RNA, 19 nt, Homo sapiens
  misc_RNA (1)...(19): siRNA sense strand
ucgggaggccuaugagaau

SEQ ID NO: 2452995 - RNA, 19 nt, Homo sapiens
  misc_RNA (1)...(19): siRNA sense strand
aggaggaagugaagcugga

SEQ ID NO: 2452996 - RNA, 19 nt, Homo sapiens
  misc_RNA (1)...(19): siRNA sense strand
gagcagaccaggcaagcca

SEQ ID NO: 2452997 - RNA, 19 nt, Homo sapiens
  misc_RNA (1)...(19): siRNA sense strand
auggcaaacucaaggagga

SEQ ID NO: 2452998 - RNA, 19 nt, Homo sapiens
  misc_RNA (1)...(19): siRNA sense strand
gcaagaaggggcagcacau

SEQ ID NO: 2452999 - RNA, 19 nt, Homo sapiens
  misc_RNA (1)...(19): siRNA sense strand
guguagagccgguggagca

SEQ ID NO: 2453000 - RNA, 19 nt, Homo sapiens
  misc_RNA (1)...(19): siRNA sense strand
gaccaagcuaccagggcua

SEQ ID NO: 2453001 - RNA, 19 nt, Homo sapiens
  misc_RNA (1)...(19): siRNA sense strand
ggugagguguguauggcuu

SEQ ID NO: 2453002 - RNA, 19 nt, Homo sapiens
  misc_RNA (1)...(19): siRNA sense strand
ggaaaggugugcugugccu

SEQ ID NO: 2453003 - RNA, 19 nt, Homo sapiens
  misc_RNA (1)...(19): siRNA sense strand
agaaauuuguguggagcga

SEQ ID NO: 2453004 - RNA, 19 nt, Homo sapiens
  misc_RNA (1)...(19): siRNA sense strand
gagcguagcaugauggaca

SEQ ID NO: 2453005 - RNA, 19 nt, Homo sapiens
  misc_RNA (1)...(19): siRNA sense strand
aggcaaggaaggaggcaca

SEQ ID NO: 2453006 - RNA, 19 nt, Homo sapiens
  misc_RNA (1)...(19): siRNA sense strand
cagcaaagggagacgucau

SEQ ID NO: 2453007 - RNA, 19 nt, Homo sapiens
  misc_RNA (1)...(19): siRNA sense strand
gggaguacgugcagcccau

SEQ ID NO: 2453008 - RNA, 19 nt, Homo sapiens
  misc_RNA (1)...(19): siRNA sense strand
uggacauggaggaaggcaa

SEQ ID NO: 2453009 - RNA, 19 nt, Homo sapiens
  misc_RNA (1)...(19): siRNA sense strand
aguucacacugcagagcua

SEQ ID NO: 2453010 - RNA, 19 nt, Homo sapiens
  misc_RNA (1)...(19): siRNA sense strand
ggaacaacaacgagauccu

SEQ ID NO: 2453011 - RNA, 19 nt, Homo sapiens
  misc_RNA (1)...(19): siRNA sense strand
ggacauggaggaaggcaag

SEQ ID NO: 2453012 - RNA, 19 nt, Homo sapiens
  misc_RNA (1)...(19): siRNA sense strand
gcacaggugagcugggaca

SEQ ID NO: 2453013 - RNA, 19 nt, Homo sapiens
  misc_RNA (1)...(19): siRNA sense strand
ccuggaaaggaaaggaaga

SEQ ID NO: 2453014 - RNA, 19 nt, Homo sapiens
  misc_RNA (1)...(19): siRNA sense strand
ucuucgaguuggaaaggaa

SEQ ID NO: 2453015 - RNA, 19 nt, Homo sapiens
  misc_RNA (1)...(19): siRNA sense strand
agaagaaucuccaagggca

SEQ ID NO: 2453016 - RNA, 19 nt, Homo sapiens
  misc_RNA (1)...(19): siRNA sense strand
ccauaaaaguuucuggagu

SEQ ID NO: 2453017 - RNA, 19 nt, Homo sapiens
  misc_RNA (1)...(19): siRNA sense strand
guaacagguccuugggcca

SEQ ID NO: 2453018 - RNA, 19 nt, Homo sapiens
  misc_RNA (1)...(19): siRNA sense strand
gcugggacaagaugggaga

SEQ ID NO: 2453019 - RNA, 19 nt, Homo sapiens
  misc_RNA (1)...(19): siRNA sense strand
ggaaaggaauguauccauc

SEQ ID NO: 2453020 - RNA, 19 nt, Homo sapiens
  misc_RNA (1)...(19): siRNA sense strand
ccacaauggugcaaggauc

SEQ ID NO: 2453021 - RNA, 19 nt, Homo sapiens
  misc_RNA (1)...(19): siRNA sense strand
uccuagguccuuagagaaa

SEQ ID NO: 2453022 - RNA, 19 nt, Homo sapiens
  misc_RNA (1)...(19): siRNA sense strand
ccuacagauucuaccacaa

SEQ ID NO: 2453023 - RNA, 19 nt, Homo sapiens
  misc_RNA (1)...(19): siRNA sense strand
ccgacuaccagcugcacaa

SEQ ID NO: 2453024 - RNA, 19 nt, Homo sapiens
  misc_RNA (1)...(19): siRNA sense strand
acacggaguacgagaucuu

SEQ ID NO: 2453025 - RNA, 19 nt, Homo sapiens
  misc_RNA (1)...(19): siRNA sense strand
ggucaggcccagaguucau

SEQ ID NO: 2453026 - RNA, 19 nt, Homo sapiens
  misc_RNA (1)...(19): siRNA sense strand
aggccagagaagagagcca

SEQ ID NO: 2453027 - RNA, 19 nt, Homo sapiens
  misc_RNA (1)...(19): siRNA sense strand
ccguaugagugcagggaau

SEQ ID NO: 2453028 - RNA, 19 nt, Homo sapiens
  misc_RNA (1)...(19): siRNA sense strand
acuuaugagugcagagaau

SEQ ID NO: 2453029 - RNA, 19 nt, Homo sapiens
  misc_RNA (1)...(19): siRNA sense strand
gugcagagaauguggaaaa

SEQ ID NO: 2453030 - RNA, 19 nt, Homo sapiens
  misc_RNA (1)...(19): siRNA sense strand
gggaaauucuuuauggaca

SEQ ID NO: 2453031 - RNA, 19 nt, Homo sapiens
  misc_RNA (1)...(19): siRNA sense strand
ccuuaugagugcagcgaau

SEQ ID NO: 2453032 - RNA, 19 nt, Homo sapiens
  misc_RNA (1)...(19): siRNA sense strand
ccuuaugagugcagcgaau

SEQ ID NO: 2453033 - RNA, 19 nt, Homo sapiens
  misc_RNA (1)...(19): siRNA sense strand
gcagcaaauuggagaaaau

SEQ ID NO: 2453034 - RNA, 19 nt, Homo sapiens
  misc_RNA (1)...(19): siRNA sense strand
augcagugaaugugggaaa

SEQ ID NO: 2453035 - RNA, 19 nt, Homo sapiens
  misc_RNA (1)...(19): siRNA sense strand
auguagugaaugugggaaa

SEQ ID NO: 2453036 - RNA, 19 nt, Homo sapiens
  misc_RNA (1)...(19): siRNA sense strand
uggaauucauccugagcaa

SEQ ID NO: 2453037 - RNA, 19 nt, Homo sapiens
  misc_RNA (1)...(19): siRNA sense strand
gagaaaucacacuggagaa

SEQ ID NO: 2453038 - RNA, 19 nt, Homo sapiens
  misc_RNA (1)...(19): siRNA sense strand
gagaaaucacacuggagaa

SEQ ID NO: 2453039 - RNA, 19 nt, Homo sapiens
  misc_RNA (1)...(19): siRNA sense strand
auguaacaaaugugggaaa

SEQ ID NO: 2453040 - RNA, 19 nt, Homo sapiens
  misc_RNA (1)...(19): siRNA sense strand
gugcagcgaaugcgggaaa

SEQ ID NO: 2453041 - RNA, 19 nt, Homo sapiens
  misc_RNA (1)...(19): siRNA sense strand
ggagaaaggccuuacgagu

SEQ ID NO: 2453042 - RNA, 19 nt, Homo sapiens
  misc_RNA (1)...(19): siRNA sense strand
gcauauacuuguugagcac

SEQ ID NO: 2453043 - RNA, 19 nt, Homo sapiens
  misc_RNA (1)...(19): siRNA sense strand
cauauauauuugugaggca

SEQ ID NO: 2453044 - RNA, 19 nt, Homo sapiens
  misc_RNA (1)...(19): siRNA sense strand
ucauuagacaucagagaau

SEQ ID NO: 2453045 - RNA, 19 nt, Homo sapiens
  misc_RNA (1)...(19): siRNA sense strand
gguccacccuagugagaca

SEQ ID NO: 2453046 - RNA, 19 nt, Homo sapiens
  misc_RNA (1)...(19): siRNA sense strand
ucauuaaacaucagagagu

SEQ ID NO: 2453047 - RNA, 19 nt, Homo sapiens
  misc_RNA (1)...(19): siRNA sense strand
ggagaaaucacacuggaga

SEQ ID NO: 2453048 - RNA, 19 nt, Homo sapiens
  misc_RNA (1)...(19): siRNA sense strand
uggagaaaggccuuauaaa

SEQ ID NO: 2453049 - RNA, 19 nt, Homo sapiens
  misc_RNA (1)...(19): siRNA sense strand
ggagaaaucacacuggaga

SEQ ID NO: 2453050 - RNA, 19 nt, Homo sapiens
  misc_RNA (1)...(19): siRNA sense strand
agagauugcuguaccguga

SEQ ID NO: 2453051 - RNA, 19 nt, Homo sapiens
  misc_RNA (1)...(19): siRNA sense strand
ggcauggagcugaggauga

SEQ ID NO: 2453052 - RNA, 19 nt, Homo sapiens
  misc_RNA (1)...(19): siRNA sense strand
gguugagcacaauggaauu

SEQ ID NO: 2453053 - RNA, 19 nt, Homo sapiens
  misc_RNA (1)...(19): siRNA sense strand
ggggaauuguuuagguaca

SEQ ID NO: 2453054 - RNA, 19 nt, Homo sapiens
  misc_RNA (1)...(19): siRNA sense strand
gagauuucacaauggagaa

SEQ ID NO: 2453055 - RNA, 19 nt, Homo sapiens
  misc_RNA (1)...(19): siRNA sense strand
guaacaaaugugggaaauu

SEQ ID NO: 2453056 - RNA, 19 nt, Homo sapiens
  misc_RNA (1)...(19): siRNA sense strand
ccuuaugagugcaacacau

SEQ ID NO: 2453057 - RNA, 19 nt, Homo sapiens
  misc_RNA (1)...(19): siRNA sense strand
gcgaaugccagaaggccuu

SEQ ID NO: 2453058 - RNA, 19 nt, Homo sapiens
  misc_RNA (1)...(19): siRNA sense strand
uguaacaaaugugggaaau

SEQ ID NO: 2453059 - RNA, 19 nt, Homo sapiens
  misc_RNA (1)...(19): siRNA sense strand
gggacacagaggacagaga

SEQ ID NO: 2453060 - RNA, 19 nt, Homo sapiens
  misc_RNA (1)...(19): siRNA sense strand
ggaaauucuuuauggacag

SEQ ID NO: 2453061 - RNA, 19 nt, Homo sapiens
  misc_RNA (1)...(19): siRNA sense strand
gugcaguguauguggggaa

SEQ ID NO: 2453062 - RNA, 19 nt, Homo sapiens
  misc_RNA (1)...(19): siRNA sense strand
ccuuacgagugcagagagu

SEQ ID NO: 2453063 - RNA, 19 nt, Homo sapiens
  misc_RNA (1)...(19): siRNA sense strand
ccucauuaaacaucagaga

SEQ ID NO: 2453064 - RNA, 19 nt, Homo sapiens
  misc_RNA (1)...(19): siRNA sense strand
gcgaguucacacuggagaa

SEQ ID NO: 2453065 - RNA, 19 nt, Homo sapiens
  misc_RNA (1)...(19): siRNA sense strand
cucauuaaacauuggagaa

SEQ ID NO: 2453066 - RNA, 19 nt, Homo sapiens
  misc_RNA (1)...(19): siRNA sense strand
ccucaaagcgaguggaagc

SEQ ID NO: 2453067 - RNA, 19 nt, Homo sapiens
  misc_RNA (1)...(19): siRNA sense strand
uggaagccauacagggaca

SEQ ID NO: 2453068 - RNA, 19 nt, Homo sapiens
  misc_RNA (1)...(19): siRNA sense strand
ccucauuaaacauuggaga

SEQ ID NO: 2453069 - RNA, 19 nt, Homo sapiens
  misc_RNA (1)...(19): siRNA sense strand
ugguugagcacaauggaau

SEQ ID NO: 2453070 - RNA, 19 nt, Homo sapiens
  misc_RNA (1)...(19): siRNA sense strand
gcucauuagacaccagaga

SEQ ID NO: 2453071 - RNA, 19 nt, Homo sapiens
  misc_RNA (1)...(19): siRNA sense strand
agaaagaccuuaugagugc

SEQ ID NO: 2453072 - RNA, 19 nt, Homo sapiens
  misc_RNA (1)...(19): siRNA sense strand
gaauguaacaaauguggga

SEQ ID NO: 2453073 - RNA, 19 nt, Homo sapiens
  misc_RNA (1)...(19): siRNA sense strand
aguucacaccggagaaaga

SEQ ID NO: 2453074 - RNA, 19 nt, Homo sapiens
  misc_RNA (1)...(19): siRNA sense strand
acucauuagacaucagaga

SEQ ID NO: 2453075 - RNA, 19 nt, Homo sapiens
  misc_RNA (1)...(19): siRNA sense strand
gcuccacauuuguuagaca

SEQ ID NO: 2453076 - RNA, 19 nt, Homo sapiens
  misc_RNA (1)...(19): siRNA sense strand
gcuccaugaauguggggaa

SEQ ID NO: 2453077 - RNA, 19 nt, Homo sapiens
  misc_RNA (1)...(19): siRNA sense strand
gagcugaggaugaggaguc

SEQ ID NO: 2453078 - RNA, 19 nt, Homo sapiens
  misc_RNA (1)...(19): siRNA sense strand
ccacagaguucacauggca

SEQ ID NO: 2453079 - RNA, 19 nt, Homo sapiens
  misc_RNA (1)...(19): siRNA sense strand
auucauuuguugagcacca

SEQ ID NO: 2453080 - RNA, 19 nt, Homo sapiens
  misc_RNA (1)...(19): siRNA sense strand
ccacacaggagaaaggucu

SEQ ID NO: 2453081 - RNA, 19 nt, Homo sapiens
  misc_RNA (1)...(19): siRNA sense strand
gaaaauccacacaggagaa

SEQ ID NO: 2453082 - RNA, 19 nt, Homo sapiens
  misc_RNA (1)...(19): siRNA sense strand
cuuuaaguacagugccaau

SEQ ID NO: 2453083 - RNA, 19 nt, Homo sapiens
  misc_RNA (1)...(19): siRNA sense strand
cguuacaacuccaaccuca

SEQ ID NO: 2453084 - RNA, 19 nt, Homo sapiens
  misc_RNA (1)...(19): siRNA sense strand
ccuuuagccacaagcauau

SEQ ID NO: 2453085 - RNA, 19 nt, Homo sapiens
  misc_RNA (1)...(19): siRNA sense strand
ggacagaggaugaggagac

SEQ ID NO: 2453086 - RNA, 19 nt, Homo sapiens
  misc_RNA (1)...(19): siRNA sense strand
aggcagaagcaaucaggaa

SEQ ID NO: 2453087 - RNA, 19 nt, Homo sapiens
  misc_RNA (1)...(19): siRNA sense strand
cugagaaggcagaagcaau

SEQ ID NO: 2453088 - RNA, 19 nt, Homo sapiens
  misc_RNA (1)...(19): siRNA sense strand
gagucugaguucauggaga

SEQ ID NO: 2453089 - RNA, 19 nt, Homo sapiens
  misc_RNA (1)...(19): siRNA sense strand
gaggagaccaggaagcuga

SEQ ID NO: 2453090 - RNA, 19 nt, Homo sapiens
  misc_RNA (1)...(19): siRNA sense strand
gaagauaggcuuugggacc

SEQ ID NO: 2453091 - RNA, 19 nt, Homo sapiens
  misc_RNA (1)...(19): siRNA sense strand
ccggcuggacagaggauga

SEQ ID NO: 2453092 - RNA, 19 nt, Homo sapiens
  misc_RNA (1)...(19): siRNA sense strand
caggaaacccuuagaggca

SEQ ID NO: 2453093 - RNA, 19 nt, Homo sapiens
  misc_RNA (1)...(19): siRNA sense strand
gcaagauggagaagggucu

SEQ ID NO: 2453094 - RNA, 19 nt, Homo sapiens
  misc_RNA (1)...(19): siRNA sense strand
ccaucugaguaccuggaaa

SEQ ID NO: 2453095 - RNA, 19 nt, Homo sapiens
  misc_RNA (1)...(19): siRNA sense strand
cgcugaagcugcaggaaac

SEQ ID NO: 2453096 - RNA, 19 nt, Homo sapiens
  misc_RNA (1)...(19): siRNA sense strand
cggagugggaagaggugga

SEQ ID NO: 2453097 - RNA, 19 nt, Homo sapiens
  misc_RNA (1)...(19): siRNA sense strand
gccugguggccaaggacaa

SEQ ID NO: 2453098 - RNA, 19 nt, Homo sapiens
  misc_RNA (1)...(19): siRNA sense strand
ccucuauaagucugucaaa

SEQ ID NO: 2453099 - RNA, 19 nt, Homo sapiens
  misc_RNA (1)...(19): siRNA sense strand
gcguacaaccugacccaca

SEQ ID NO: 2453100 - RNA, 19 nt, Homo sapiens
  misc_RNA (1)...(19): siRNA sense strand
ggcagggaucugugagaaa

SEQ ID NO: 2453101 - RNA, 19 nt, Homo sapiens
  misc_RNA (1)...(19): siRNA sense strand
aggaagaagccgaagcuga

SEQ ID NO: 2453102 - RNA, 19 nt, Homo sapiens
  misc_RNA (1)...(19): siRNA sense strand
gcagcaaaucugagagcca

SEQ ID NO: 2453103 - RNA, 19 nt, Homo sapiens
  misc_RNA (1)...(19): siRNA sense strand
aggaagugcggcuggaaaa

SEQ ID NO: 2453104 - RNA, 19 nt, Homo sapiens
  misc_RNA (1)...(19): siRNA sense strand
cagugaacaucgaccguca

SEQ ID NO: 2453105 - RNA, 19 nt, Homo sapiens
  misc_RNA (1)...(19): siRNA sense strand
acggagggugaaagugaaa

SEQ ID NO: 2453106 - RNA, 19 nt, Homo sapiens
  misc_RNA (1)...(19): siRNA sense strand
gagacaugcuggcagggau

SEQ ID NO: 2453107 - RNA, 19 nt, Homo sapiens
  misc_RNA (1)...(19): siRNA sense strand
cggaagagccuugggagca

SEQ ID NO: 2453108 - RNA, 19 nt, Homo sapiens
  misc_RNA (1)...(19): siRNA sense strand
ccacgaggaagaagccgaa

SEQ ID NO: 2453109 - RNA, 19 nt, Homo sapiens
  misc_RNA (1)...(19): siRNA sense strand
cgcuagagguggugcugca

SEQ ID NO: 2453110 - RNA, 19 nt, Homo sapiens
  misc_RNA (1)...(19): siRNA sense strand
gcaacaucuaccaggaguu

SEQ ID NO: 2453111 - RNA, 19 nt, Homo sapiens
  misc_RNA (1)...(19): siRNA sense strand
ggaucaaguacgaggaaga

SEQ ID NO: 2453112 - RNA, 19 nt, Homo sapiens
  misc_RNA (1)...(19): siRNA sense strand
gaacagaggaggaacggaa

SEQ ID NO: 2453113 - RNA, 19 nt, Homo sapiens
  misc_RNA (1)...(19): siRNA sense strand
gaacaaauggcuaaggcaa

SEQ ID NO: 2453114 - RNA, 19 nt, Homo sapiens
  misc_RNA (1)...(19): siRNA sense strand
gagaagaggaggaggagga

SEQ ID NO: 2453115 - RNA, 19 nt, Homo sapiens
  misc_RNA (1)...(19): siRNA sense strand
cagaaggagaauagaggaa

SEQ ID NO: 2453116 - RNA, 19 nt, Homo sapiens
  misc_RNA (1)...(19): siRNA sense strand
cgagcaagaaggagaacaa

SEQ ID NO: 2453117 - RNA, 19 nt, Homo sapiens
  misc_RNA (1)...(19): siRNA sense strand
agaagaagccagaaggaga

SEQ ID NO: 2453118 - RNA, 19 nt, Homo sapiens
  misc_RNA (1)...(19): siRNA sense strand
aggaaaugggagaggaaga

SEQ ID NO: 2453119 - RNA, 19 nt, Homo sapiens
  misc_RNA (1)...(19): siRNA sense strand
agaagauggaggagaguau

SEQ ID NO: 2453120 - RNA, 19 nt, Homo sapiens
  misc_RNA (1)...(19): siRNA sense strand
ggcuaaggcaagagaagaa

SEQ ID NO: 2453121 - RNA, 19 nt, Homo sapiens
  misc_RNA (1)...(19): siRNA sense strand
ggagaauagaggaagaaaa

SEQ ID NO: 2453122 - RNA, 19 nt, Homo sapiens
  misc_RNA (1)...(19): siRNA sense strand
cugaacagauugaggacau

SEQ ID NO: 2453123 - RNA, 19 nt, Homo sapiens
  misc_RNA (1)...(19): siRNA sense strand
agcuagaaauggagaaaca

SEQ ID NO: 2453124 - RNA, 19 nt, Homo sapiens
  misc_RNA (1)...(19): siRNA sense strand
aagagaagaagaagaacaa

SEQ ID NO: 2453125 - RNA, 19 nt, Homo sapiens
  misc_RNA (1)...(19): siRNA sense strand
ugggagaggaagaggaaga

SEQ ID NO: 2453126 - RNA, 19 nt, Homo sapiens
  misc_RNA (1)...(19): siRNA sense strand
caagagaagaagaagaaca

SEQ ID NO: 2453127 - RNA, 19 nt, Homo sapiens
  misc_RNA (1)...(19): siRNA sense strand
ugaaauagaaagugaagca

SEQ ID NO: 2453128 - RNA, 19 nt, Homo sapiens
  misc_RNA (1)...(19): siRNA sense strand
gaauagaggaagaaaagaa

SEQ ID NO: 2453129 - RNA, 19 nt, Homo sapiens
  misc_RNA (1)...(19): siRNA sense strand
ccuugaaauuaaagagcga

SEQ ID NO: 2453130 - RNA, 19 nt, Homo sapiens
  misc_RNA (1)...(19): siRNA sense strand
gagaggaagaggaagaaaa

SEQ ID NO: 2453131 - RNA, 19 nt, Homo sapiens
  misc_RNA (1)...(19): siRNA sense strand
agaagaagagcgagcaaga

SEQ ID NO: 2453132 - RNA, 19 nt, Homo sapiens
  misc_RNA (1)...(19): siRNA sense strand
aggcaagagaagaagaaga

SEQ ID NO: 2453133 - RNA, 19 nt, Homo sapiens
  misc_RNA (1)...(19): siRNA sense strand
gugguuugaaggagaaaua

SEQ ID NO: 2453134 - RNA, 19 nt, Homo sapiens
  misc_RNA (1)...(19): siRNA sense strand
gugaagagaaagaaaggau

SEQ ID NO: 2453135 - RNA, 19 nt, Homo sapiens
  misc_RNA (1)...(19): siRNA sense strand
gcagaauugagcaggauau

SEQ ID NO: 2453136 - RNA, 19 nt, Homo sapiens
  misc_RNA (1)...(19): siRNA sense strand
ggaagagaacggaggagga

SEQ ID NO: 2453137 - RNA, 19 nt, Homo sapiens
  misc_RNA (1)...(19): siRNA sense strand
aggaggaacggaagcauaa

SEQ ID NO: 2453138 - RNA, 19 nt, Homo sapiens
  misc_RNA (1)...(19): siRNA sense strand
uggauugagcagagaauau

SEQ ID NO: 2453139 - RNA, 19 nt, Homo sapiens
  misc_RNA (1)...(19): siRNA sense strand
acaggaaaugggagaggaa

SEQ ID NO: 2453140 - RNA, 19 nt, Homo sapiens
  misc_RNA (1)...(19): siRNA sense strand
caagaggaacaaaggaaga

SEQ ID NO: 2453141 - RNA, 19 nt, Homo sapiens
  misc_RNA (1)...(19): siRNA sense strand
aaagagaagaggaggagga

SEQ ID NO: 2453142 - RNA, 19 nt, Homo sapiens
  misc_RNA (1)...(19): siRNA sense strand
ugaagaaauggaaaggcaa

SEQ ID NO: 2453143 - RNA, 19 nt, Homo sapiens
  misc_RNA (1)...(19): siRNA sense strand
caucaguuguagacaguga

SEQ ID NO: 2453144 - RNA, 19 nt, Homo sapiens
  misc_RNA (1)...(19): siRNA sense strand
aaaggaaagcagaagaaga

SEQ ID NO: 2453145 - RNA, 19 nt, Homo sapiens
  misc_RNA (1)...(19): siRNA sense strand
aacaaagacaagaggaaca

SEQ ID NO: 2453146 - RNA, 19 nt, Homo sapiens
  misc_RNA (1)...(19): siRNA sense strand
guguaaagcagucaacaau

SEQ ID NO: 2453147 - RNA, 19 nt, Homo sapiens
  misc_RNA (1)...(19): siRNA sense strand
ggacauaaacaauacggga

SEQ ID NO: 2453148 - RNA, 19 nt, Homo sapiens
  misc_RNA (1)...(19): siRNA sense strand
ggaugaugaaauagaaagu

SEQ ID NO: 2453149 - RNA, 19 nt, Homo sapiens
  misc_RNA (1)...(19): siRNA sense strand
gcagagaauaugaagaacu

SEQ ID NO: 2453150 - RNA, 19 nt, Homo sapiens
  misc_RNA (1)...(19): siRNA sense strand
uugaagaaauggaaaggca

SEQ ID NO: 2453151 - RNA, 19 nt, Homo sapiens
  misc_RNA (1)...(19): siRNA sense strand
agauugaggacauaaacaa

SEQ ID NO: 2453152 - RNA, 19 nt, Homo sapiens
  misc_RNA (1)...(19): siRNA sense strand
gacauaaacaauacgggaa

SEQ ID NO: 2453153 - RNA, 19 nt, Homo sapiens
  misc_RNA (1)...(19): siRNA sense strand
gagaaauaugguaguagau

SEQ ID NO: 2453154 - RNA, 19 nt, Homo sapiens
  misc_RNA (1)...(19): siRNA sense strand
agacaaucucucaagaauu

SEQ ID NO: 2453155 - RNA, 19 nt, Homo sapiens
  misc_RNA (1)...(19): siRNA sense strand
gaaagcuagauuugaacaa

SEQ ID NO: 2453156 - RNA, 19 nt, Homo sapiens
  misc_RNA (1)...(19): siRNA sense strand
cagcaucagaggaaggaga

SEQ ID NO: 2453157 - RNA, 19 nt, Homo sapiens
  misc_RNA (1)...(19): siRNA sense strand
cggaagcauaagcuagaaa

SEQ ID NO: 2453158 - RNA, 19 nt, Homo sapiens
  misc_RNA (1)...(19): siRNA sense strand
cagucagauuuacgguuaa

SEQ ID NO: 2453159 - RNA, 19 nt, Homo sapiens
  misc_RNA (1)...(19): siRNA sense strand
cagagauguauaagacaau

SEQ ID NO: 2453160 - RNA, 19 nt, Homo sapiens
  misc_RNA (1)...(19): siRNA sense strand
agaaauggagaaacaagaa

SEQ ID NO: 2453161 - RNA, 19 nt, Homo sapiens
  misc_RNA (1)...(19): siRNA sense strand
gagaagaagaagaacaaag

SEQ ID NO: 2453162 - RNA, 19 nt, Homo sapiens
  misc_RNA (1)...(19): siRNA sense strand
auggagaagacuaucaaua

SEQ ID NO: 2453163 - RNA, 19 nt, Homo sapiens
  misc_RNA (1)...(19): siRNA sense strand
gaacaaaggaagagaacgg

SEQ ID NO: 2453164 - RNA, 19 nt, Homo sapiens
  misc_RNA (1)...(19): siRNA sense strand
aggaagaggaagaaaauga

SEQ ID NO: 2453165 - RNA, 19 nt, Homo sapiens
  misc_RNA (1)...(19): siRNA sense strand
gagcgagcaagaaggagaa

SEQ ID NO: 2453166 - RNA, 19 nt, Homo sapiens
  misc_RNA (1)...(19): siRNA sense strand
ccucagagcuccagcgacu

SEQ ID NO: 2453167 - RNA, 19 nt, Homo sapiens
  misc_RNA (1)...(19): siRNA sense strand
aggaggacucagagagcaa

SEQ ID NO: 2453168 - RNA, 19 nt, Homo sapiens
  misc_RNA (1)...(19): siRNA sense strand
gagcauggcgagagggacu

SEQ ID NO: 2453169 - RNA, 19 nt, Homo sapiens
  misc_RNA (1)...(19): siRNA sense strand
gagacauauuggauggcuu

SEQ ID NO: 2453170 - RNA, 19 nt, Homo sapiens
  misc_RNA (1)...(19): siRNA sense strand
cugcaggccuugugcccaa

SEQ ID NO: 2453171 - RNA, 19 nt, Homo sapiens
  misc_RNA (1)...(19): siRNA sense strand
aggugaaggcccagacuga

SEQ ID NO: 2453172 - RNA, 19 nt, Homo sapiens
  misc_RNA (1)...(19): siRNA sense strand
uggacaggguggaggagca

SEQ ID NO: 2453173 - RNA, 19 nt, Homo sapiens
  misc_RNA (1)...(19): siRNA sense strand
cgcugaagcucuaccggaa

SEQ ID NO: 2453174 - RNA, 19 nt, Homo sapiens
  misc_RNA (1)...(19): siRNA sense strand
uguccaaggaucagaagau

SEQ ID NO: 2453175 - RNA, 19 nt, Homo sapiens
  misc_RNA (1)...(19): siRNA sense strand
ucagggagauggagcgguu

SEQ ID NO: 2453176 - RNA, 19 nt, Homo sapiens
  misc_RNA (1)...(19): siRNA sense strand
acucggagcugauggccuu

SEQ ID NO: 2453177 - RNA, 19 nt, Homo sapiens
  misc_RNA (1)...(19): siRNA sense strand
agauacuguccaaggauca

SEQ ID NO: 2453178 - RNA, 19 nt, Homo sapiens
  misc_RNA (1)...(19): siRNA sense strand
agcuggugguagaggguga

SEQ ID NO: 2453179 - RNA, 19 nt, Homo sapiens
  misc_RNA (1)...(19): siRNA sense strand
ccucagagcuccagcgacu

SEQ ID NO: 2453180 - RNA, 19 nt, Homo sapiens
  misc_RNA (1)...(19): siRNA sense strand
gagacauauuggauggcuu

SEQ ID NO: 2453181 - RNA, 19 nt, Homo sapiens
  misc_RNA (1)...(19): siRNA sense strand
cugcaggccuugugcccaa

SEQ ID NO: 2453182 - RNA, 19 nt, Homo sapiens
  misc_RNA (1)...(19): siRNA sense strand
uggacaggguggaggagca

SEQ ID NO: 2453183 - RNA, 19 nt, Homo sapiens
  misc_RNA (1)...(19): siRNA sense strand
cgcugaagcucuaccggaa

SEQ ID NO: 2453184 - RNA, 19 nt, Homo sapiens
  misc_RNA (1)...(19): siRNA sense strand
agcuggugguagaggguga

SEQ ID NO: 2453185 - RNA, 19 nt, Homo sapiens
  misc_RNA (1)...(19): siRNA sense strand
ccucagagcuccagcgacu

SEQ ID NO: 2453186 - RNA, 19 nt, Homo sapiens
  misc_RNA (1)...(19): siRNA sense strand
aggaggacucagagagcaa

SEQ ID NO: 2453187 - RNA, 19 nt, Homo sapiens
  misc_RNA (1)...(19): siRNA sense strand
gagcauggcgagagggacu

SEQ ID NO: 2453188 - RNA, 19 nt, Homo sapiens
  misc_RNA (1)...(19): siRNA sense strand
gagacauauuggauggcuu

SEQ ID NO: 2453189 - RNA, 19 nt, Homo sapiens
  misc_RNA (1)...(19): siRNA sense strand
cugcaggccuugugcccaa

SEQ ID NO: 2453190 - RNA, 19 nt, Homo sapiens
  misc_RNA (1)...(19): siRNA sense strand
aggugaaggcccagacuga

SEQ ID NO: 2453191 - RNA, 19 nt, Homo sapiens
  misc_RNA (1)...(19): siRNA sense strand
uggacaggguggaggagca

SEQ ID NO: 2453192 - RNA, 19 nt, Homo sapiens
  misc_RNA (1)...(19): siRNA sense strand
cgcugaagcucuaccggaa

SEQ ID NO: 2453193 - RNA, 19 nt, Homo sapiens
  misc_RNA (1)...(19): siRNA sense strand
uguccaaggaucagaagau

SEQ ID NO: 2453194 - RNA, 19 nt, Homo sapiens
  misc_RNA (1)...(19): siRNA sense strand
ucagggagauggagcgguu

SEQ ID NO: 2453195 - RNA, 19 nt, Homo sapiens
  misc_RNA (1)...(19): siRNA sense strand
acucggagcugauggccuu

SEQ ID NO: 2453196 - RNA, 19 nt, Homo sapiens
  misc_RNA (1)...(19): siRNA sense strand
agauacuguccaaggauca

SEQ ID NO: 2453197 - RNA, 19 nt, Homo sapiens
  misc_RNA (1)...(19): siRNA sense strand
agcuggugguagaggguga

SEQ ID NO: 2453198 - RNA, 19 nt, Homo sapiens
  misc_RNA (1)...(19): siRNA sense strand
acuuacaugagcagcuaaa

SEQ ID NO: 2453199 - RNA, 19 nt, Homo sapiens
  misc_RNA (1)...(19): siRNA sense strand
ggccugaugcugaaggaga

SEQ ID NO: 2453200 - RNA, 19 nt, Homo sapiens
  misc_RNA (1)...(19): siRNA sense strand
aaucucagcuguuugggaa

SEQ ID NO: 2453201 - RNA, 19 nt, Homo sapiens
  misc_RNA (1)...(19): siRNA sense strand
ggccaggaguucaagacca

SEQ ID NO: 2453202 - RNA, 19 nt, Homo sapiens
  misc_RNA (1)...(19): siRNA sense strand
gagaggauggcauggguga

SEQ ID NO: 2453203 - RNA, 19 nt, Homo sapiens
  misc_RNA (1)...(19): siRNA sense strand
ccaaagagcucauggucca

SEQ ID NO: 2453204 - RNA, 19 nt, Homo sapiens
  misc_RNA (1)...(19): siRNA sense strand
aagugaaacacgugaccaa

SEQ ID NO: 2453205 - RNA, 19 nt, Homo sapiens
  misc_RNA (1)...(19): siRNA sense strand
aggacgaauaugugcuaua

SEQ ID NO: 2453206 - RNA, 19 nt, Homo sapiens
  misc_RNA (1)...(19): siRNA sense strand
uggugaucauugugggaau

SEQ ID NO: 2453207 - RNA, 19 nt, Homo sapiens
  misc_RNA (1)...(19): siRNA sense strand
gcacagaagugaaacacgu

SEQ ID NO: 2453208 - RNA, 19 nt, Homo sapiens
  misc_RNA (1)...(19): siRNA sense strand
cuucaaggagugagggagu

SEQ ID NO: 2453209 - RNA, 19 nt, Homo sapiens
  misc_RNA (1)...(19): siRNA sense strand
uaacaguccauguggguga

SEQ ID NO: 2453210 - RNA, 19 nt, Homo sapiens
  misc_RNA (1)...(19): siRNA sense strand
gggagagccagguguucaa

SEQ ID NO: 2453211 - RNA, 19 nt, Homo sapiens
  misc_RNA (1)...(19): siRNA sense strand
aagaacacgaagaagacua

SEQ ID NO: 2453212 - RNA, 19 nt, Homo sapiens
  misc_RNA (1)...(19): siRNA sense strand
ucaagaaggcggugguacu

SEQ ID NO: 2453213 - RNA, 19 nt, Homo sapiens
  misc_RNA (1)...(19): siRNA sense strand
ggaacaacucacuugaaaa

SEQ ID NO: 2453214 - RNA, 19 nt, Homo sapiens
  misc_RNA (1)...(19): siRNA sense strand
aggaagaagaaccaaguga

SEQ ID NO: 2453215 - RNA, 19 nt, Homo sapiens
  misc_RNA (1)...(19): siRNA sense strand
ggaaccuauaucugugaaa

SEQ ID NO: 2453216 - RNA, 19 nt, Homo sapiens
  misc_RNA (1)...(19): siRNA sense strand
uggugaagaacacgaagaa

SEQ ID NO: 2453217 - RNA, 19 nt, Homo sapiens
  misc_RNA (1)...(19): siRNA sense strand
cgaagaagacuaauccaga

SEQ ID NO: 2453218 - RNA, 19 nt, Homo sapiens
  misc_RNA (1)...(19): siRNA sense strand
ggugguaaucaguugguga

SEQ ID NO: 2453219 - RNA, 19 nt, Homo sapiens
  misc_RNA (1)...(19): siRNA sense strand
ccaucaugcuucaaggagu

SEQ ID NO: 2453220 - RNA, 19 nt, Homo sapiens
  misc_RNA (1)...(19): siRNA sense strand
ggauugauucagaugggau

SEQ ID NO: 2453221 - RNA, 19 nt, Homo sapiens
  misc_RNA (1)...(19): siRNA sense strand
guucugauauugaucguga

SEQ ID NO: 2453222 - RNA, 19 nt, Homo sapiens
  misc_RNA (1)...(19): siRNA sense strand
gcaagaggcugaccaggga

SEQ ID NO: 2453223 - RNA, 19 nt, Homo sapiens
  misc_RNA (1)...(19): siRNA sense strand
cuguaauagcuaagagaaa

SEQ ID NO: 2453224 - RNA, 19 nt, Homo sapiens
  misc_RNA (1)...(19): siRNA sense strand
cagcaaugaugaauggaca

SEQ ID NO: 2453225 - RNA, 19 nt, Homo sapiens
  misc_RNA (1)...(19): siRNA sense strand
cagaagagguugaagaggu

SEQ ID NO: 2453226 - RNA, 19 nt, Homo sapiens
  misc_RNA (1)...(19): siRNA sense strand
uauagaaaguuuagggaag

SEQ ID NO: 2453227 - RNA, 19 nt, Homo sapiens
  misc_RNA (1)...(19): siRNA sense strand
ggugaaugaaagugaacga

SEQ ID NO: 2453228 - RNA, 19 nt, Homo sapiens
  misc_RNA (1)...(19): siRNA sense strand
gaacaaaagacgacgcuca

SEQ ID NO: 2453229 - RNA, 19 nt, Homo sapiens
  misc_RNA (1)...(19): siRNA sense strand
uuacaaaggcauaugcuga

SEQ ID NO: 2453230 - RNA, 19 nt, Homo sapiens
  misc_RNA (1)...(19): siRNA sense strand
aggcauaugcugacacaca

SEQ ID NO: 2453231 - RNA, 19 nt, Homo sapiens
  misc_RNA (1)...(19): siRNA sense strand
cugaagacauucugccuga

SEQ ID NO: 2453232 - RNA, 19 nt, Homo sapiens
  misc_RNA (1)...(19): siRNA sense strand
acauguagauggucagcga

SEQ ID NO: 2453233 - RNA, 19 nt, Homo sapiens
  misc_RNA (1)...(19): siRNA sense strand
ggaaugaacaaaaggagga

SEQ ID NO: 2453234 - RNA, 19 nt, Homo sapiens
  misc_RNA (1)...(19): siRNA sense strand
augaacaaaaggaggaaau

SEQ ID NO: 2453235 - RNA, 19 nt, Homo sapiens
  misc_RNA (1)...(19): siRNA sense strand
ugaaugaaagugaacgaca

SEQ ID NO: 2453236 - RNA, 19 nt, Homo sapiens
  misc_RNA (1)...(19): siRNA sense strand
cuaaagcuggaaugaacaa

SEQ ID NO: 2453237 - RNA, 19 nt, Homo sapiens
  misc_RNA (1)...(19): siRNA sense strand
agcaaugaugaauggacaa

SEQ ID NO: 2453238 - RNA, 19 nt, Homo sapiens
  misc_RNA (1)...(19): siRNA sense strand
ccucaaaaguuucuagcca

SEQ ID NO: 2453239 - RNA, 19 nt, Homo sapiens
  misc_RNA (1)...(19): siRNA sense strand
cuuauggaaagguuguaaa

SEQ ID NO: 2453240 - RNA, 19 nt, Homo sapiens
  misc_RNA (1)...(19): siRNA sense strand
ccucaagauaaaucggaaa

SEQ ID NO: 2453241 - RNA, 19 nt, Homo sapiens
  misc_RNA (1)...(19): siRNA sense strand
caccaagcgaagaaagaaa

SEQ ID NO: 2453242 - RNA, 19 nt, Homo sapiens
  misc_RNA (1)...(19): siRNA sense strand
gggccaagcaagaacaaaa

SEQ ID NO: 2453243 - RNA, 19 nt, Homo sapiens
  misc_RNA (1)...(19): siRNA sense strand
gauauaaagucaaacagga

SEQ ID NO: 2453244 - RNA, 19 nt, Homo sapiens
  misc_RNA (1)...(19): siRNA sense strand
gcaaggaguaugaagcuga

SEQ ID NO: 2453245 - RNA, 19 nt, Homo sapiens
  misc_RNA (1)...(19): siRNA sense strand
cagaaggauauaaagucaa

SEQ ID NO: 2453246 - RNA, 19 nt, Homo sapiens
  misc_RNA (1)...(19): siRNA sense strand
cgucaguggcagaagaaac

SEQ ID NO: 2453247 - RNA, 19 nt, Homo sapiens
  misc_RNA (1)...(19): siRNA sense strand
ccugcugacagaagaggaa

SEQ ID NO: 2453248 - RNA, 19 nt, Homo sapiens
  misc_RNA (1)...(19): siRNA sense strand
gcaagaaucugugggagca

SEQ ID NO: 2453249 - RNA, 19 nt, Homo sapiens
  misc_RNA (1)...(19): siRNA sense strand
agaaacuucgcgaggccaa

SEQ ID NO: 2453250 - RNA, 19 nt, Homo sapiens
  misc_RNA (1)...(19): siRNA sense strand
cggcaaauccccagccaca

SEQ ID NO: 2453251 - RNA, 19 nt, Homo sapiens
  misc_RNA (1)...(19): siRNA sense strand
caaaggaggugguggccau

SEQ ID NO: 2453252 - RNA, 19 nt, Homo sapiens
  misc_RNA (1)...(19): siRNA sense strand
acgcagauuaagaggaaca

SEQ ID NO: 2453253 - RNA, 19 nt, Homo sapiens
  misc_RNA (1)...(19): siRNA sense strand
cagacaagcugauggugca

SEQ ID NO: 2453254 - RNA, 19 nt, Homo sapiens
  misc_RNA (1)...(19): siRNA sense strand
ucaccaagcucgaccgcau

SEQ ID NO: 2453255 - RNA, 19 nt, Homo sapiens
  misc_RNA (1)...(19): siRNA sense strand
cagauuaagaggaacacau

SEQ ID NO: 2453256 - RNA, 19 nt, Homo sapiens
  misc_RNA (1)...(19): siRNA sense strand
ccuacgacuucaaggcuga

SEQ ID NO: 2453257 - RNA, 19 nt, Homo sapiens
  misc_RNA (1)...(19): siRNA sense strand
gggagauucugaagggccu

SEQ ID NO: 2453258 - RNA, 19 nt, Homo sapiens
  misc_RNA (1)...(19): siRNA sense strand
aaagagaagcacaagcaga

SEQ ID NO: 2453259 - RNA, 19 nt, Homo sapiens
  misc_RNA (1)...(19): siRNA sense strand
aggccgaggaugagaucga

SEQ ID NO: 2453260 - RNA, 19 nt, Homo sapiens
  misc_RNA (1)...(19): siRNA sense strand
cgcaagauccaccgagaca

SEQ ID NO: 2453261 - RNA, 19 nt, Homo sapiens
  misc_RNA (1)...(19): siRNA sense strand
ucaucaagcagucggccua

SEQ ID NO: 2453262 - RNA, 19 nt, Homo sapiens
  misc_RNA (1)...(19): siRNA sense strand
cgcuggaggagcuggagaa

SEQ ID NO: 2453263 - RNA, 19 nt, Homo sapiens
  misc_RNA (1)...(19): siRNA sense strand
gggaggucuacaagggcau

SEQ ID NO: 2453264 - RNA, 19 nt, Homo sapiens
  misc_RNA (1)...(19): siRNA sense strand
ggaacacauucgugggcac

SEQ ID NO: 2453265 - RNA, 19 nt, Homo sapiens
  misc_RNA (1)...(19): siRNA sense strand
agcucaaagagaagcacaa

SEQ ID NO: 2453266 - RNA, 19 nt, Homo sapiens
  misc_RNA (1)...(19): siRNA sense strand
gggcauuaaacugggaaua

SEQ ID NO: 2453267 - RNA, 19 nt, Homo sapiens
  misc_RNA (1)...(19): siRNA sense strand
aaguggaaacagagcaaua

SEQ ID NO: 2453268 - RNA, 19 nt, Homo sapiens
  misc_RNA (1)...(19): siRNA sense strand
cagcagaggagguagccaa

SEQ ID NO: 2453269 - RNA, 19 nt, Homo sapiens
  misc_RNA (1)...(19): siRNA sense strand
gaaaauaacuugaugccuu

SEQ ID NO: 2453270 - RNA, 19 nt, Homo sapiens
  misc_RNA (1)...(19): siRNA sense strand
uauucaugcugcagacaaa

SEQ ID NO: 2453271 - RNA, 19 nt, Homo sapiens
  misc_RNA (1)...(19): siRNA sense strand
agggaauuauggaagaaau

SEQ ID NO: 2453272 - RNA, 19 nt, Homo sapiens
  misc_RNA (1)...(19): siRNA sense strand
cauaaagacuucaaggaac

SEQ ID NO: 2453273 - RNA, 19 nt, Homo sapiens
  misc_RNA (1)...(19): siRNA sense strand
uggaaagaauggaagcuca

SEQ ID NO: 2453274 - RNA, 19 nt, Homo sapiens
  misc_RNA (1)...(19): siRNA sense strand
auaaagacuucaaggaacu

SEQ ID NO: 2453275 - RNA, 19 nt, Homo sapiens
  misc_RNA (1)...(19): siRNA sense strand
auuaaaagaacgagaccaa

SEQ ID NO: 2453276 - RNA, 19 nt, Homo sapiens
  misc_RNA (1)...(19): siRNA sense strand
ggguacaaugagugucuua

SEQ ID NO: 2453277 - RNA, 19 nt, Homo sapiens
  misc_RNA (1)...(19): siRNA sense strand
gggcagaauuagaaaucuc

SEQ ID NO: 2453278 - RNA, 19 nt, Homo sapiens
  misc_RNA (1)...(19): siRNA sense strand
cugaacagagugaugacaa

SEQ ID NO: 2453279 - RNA, 19 nt, Homo sapiens
  misc_RNA (1)...(19): siRNA sense strand
cagacaaacagcugcuuau

SEQ ID NO: 2453280 - RNA, 19 nt, Homo sapiens
  misc_RNA (1)...(19): siRNA sense strand
aggccauggauuacauuaa

SEQ ID NO: 2453281 - RNA, 19 nt, Homo sapiens
  misc_RNA (1)...(19): siRNA sense strand
cagaaguuuaccagcagaa

SEQ ID NO: 2453282 - RNA, 19 nt, Homo sapiens
  misc_RNA (1)...(19): siRNA sense strand
gacuaauagggaugccaaa

SEQ ID NO: 2453283 - RNA, 19 nt, Homo sapiens
  misc_RNA (1)...(19): siRNA sense strand
agaagcauacaguggaauu

SEQ ID NO: 2453284 - RNA, 19 nt, Homo sapiens
  misc_RNA (1)...(19): siRNA sense strand
cuucaaggaacuaggguac

SEQ ID NO: 2453285 - RNA, 19 nt, Homo sapiens
  misc_RNA (1)...(19): siRNA sense strand
acucagaaguuuaccagca

SEQ ID NO: 2453286 - RNA, 19 nt, Homo sapiens
  misc_RNA (1)...(19): siRNA sense strand
accaaguggcgauggcuaa

SEQ ID NO: 2453287 - RNA, 19 nt, Homo sapiens
  misc_RNA (1)...(19): siRNA sense strand
gcauguagaugguugugca

SEQ ID NO: 2453288 - RNA, 19 nt, Homo sapiens
  misc_RNA (1)...(19): siRNA sense strand
auagggaugccaaaggaaa

SEQ ID NO: 2453289 - RNA, 19 nt, Homo sapiens
  misc_RNA (1)...(19): siRNA sense strand
auugaaggagcguggauau

SEQ ID NO: 2453290 - RNA, 19 nt, Homo sapiens
  misc_RNA (1)...(19): siRNA sense strand
gaauuagaaaucucgggua

SEQ ID NO: 2453291 - RNA, 19 nt, Homo sapiens
  misc_RNA (1)...(19): siRNA sense strand
ugguauuagagguccacaa

SEQ ID NO: 2453292 - RNA, 19 nt, Homo sapiens
  misc_RNA (1)...(19): siRNA sense strand
ggagcagguaugaagccua

SEQ ID NO: 2453293 - RNA, 19 nt, Homo sapiens
  misc_RNA (1)...(19): siRNA sense strand
ccuuugggcagguguagaa

SEQ ID NO: 2453294 - RNA, 19 nt, Homo sapiens
  misc_RNA (1)...(19): siRNA sense strand
aauuagaaaucucggguag

SEQ ID NO: 2453295 - RNA, 19 nt, Homo sapiens
  misc_RNA (1)...(19): siRNA sense strand
uguuugucucagagguuaa

SEQ ID NO: 2453296 - RNA, 19 nt, Homo sapiens
  misc_RNA (1)...(19): siRNA sense strand
gagugaugacaaaagauaa

SEQ ID NO: 2453297 - RNA, 19 nt, Homo sapiens
  misc_RNA (1)...(19): siRNA sense strand
acuucaaggaacuagggua

SEQ ID NO: 2453298 - RNA, 19 nt, Homo sapiens
  misc_RNA (1)...(19): siRNA sense strand
ucgcauuccaccugauauu

SEQ ID NO: 2453299 - RNA, 19 nt, Homo sapiens
  misc_RNA (1)...(19): siRNA sense strand
uccaaagucacgugccaaa

SEQ ID NO: 2453300 - RNA, 19 nt, Homo sapiens
  misc_RNA (1)...(19): siRNA sense strand
auacuuaagcaauggagga

SEQ ID NO: 2453301 - RNA, 19 nt, Homo sapiens
  misc_RNA (1)...(19): siRNA sense strand
ggagaaucacacauggcuu

SEQ ID NO: 2453302 - RNA, 19 nt, Homo sapiens
  misc_RNA (1)...(19): siRNA sense strand
uaaacugggaauacaggaa

SEQ ID NO: 2453303 - RNA, 19 nt, Homo sapiens
  misc_RNA (1)...(19): siRNA sense strand
agacuaauagggaugccaa

SEQ ID NO: 2453304 - RNA, 19 nt, Homo sapiens
  misc_RNA (1)...(19): siRNA sense strand
aauuuacauuggugcagaa

SEQ ID NO: 2453305 - RNA, 19 nt, Homo sapiens
  misc_RNA (1)...(19): siRNA sense strand
gaggaguagcugacaacca

SEQ ID NO: 2453306 - RNA, 19 nt, Homo sapiens
  misc_RNA (1)...(19): siRNA sense strand
aagagaagcucaaaggcaa

SEQ ID NO: 2453307 - RNA, 19 nt, Homo sapiens
  misc_RNA (1)...(19): siRNA sense strand
ccaucaugcugguggggaa

SEQ ID NO: 2453308 - RNA, 19 nt, Homo sapiens
  misc_RNA (1)...(19): siRNA sense strand
cagcagaaaaggaaagaga

SEQ ID NO: 2453309 - RNA, 19 nt, Homo sapiens
  misc_RNA (1)...(19): siRNA sense strand
ugacaagagcauaugcaca

SEQ ID NO: 2453310 - RNA, 19 nt, Homo sapiens
  misc_RNA (1)...(19): siRNA sense strand
gacaagagcauaugcacau

SEQ ID NO: 2453311 - RNA, 19 nt, Homo sapiens
  misc_RNA (1)...(19): siRNA sense strand
aaaggaaagagaagcucaa

SEQ ID NO: 2453312 - RNA, 19 nt, Homo sapiens
  misc_RNA (1)...(19): siRNA sense strand
gaacaagugugaugagagc

SEQ ID NO: 2453313 - RNA, 19 nt, Homo sapiens
  misc_RNA (1)...(19): siRNA sense strand
uggaggagcucaagcccau

SEQ ID NO: 2453314 - RNA, 19 nt, Homo sapiens
  misc_RNA (1)...(19): siRNA sense strand
ucuccagaucgacgggaaa

SEQ ID NO: 2453315 - RNA, 19 nt, Homo sapiens
  misc_RNA (1)...(19): siRNA sense strand
cucaaaggcaagugcguga

SEQ ID NO: 2453316 - RNA, 19 nt, Homo sapiens
  misc_RNA (1)...(19): siRNA sense strand
gcagaaaaggaaagagaag

SEQ ID NO: 2453317 - RNA, 19 nt, Homo sapiens
  misc_RNA (1)...(19): siRNA sense strand
gagaagcgcaggaccguga

SEQ ID NO: 2453318 - RNA, 19 nt, Homo sapiens
  misc_RNA (1)...(19): siRNA sense strand
ggaagacaccuaccggcaa

SEQ ID NO: 2453319 - RNA, 19 nt, Homo sapiens
  misc_RNA (1)...(19): siRNA sense strand
aaagagaagcucaaaggca

SEQ ID NO: 2453320 - RNA, 19 nt, Homo sapiens
  misc_RNA (1)...(19): siRNA sense strand
gauuauuggccaagggaaa

SEQ ID NO: 2453321 - RNA, 19 nt, Homo sapiens
  misc_RNA (1)...(19): siRNA sense strand
gcugaaauugagagagaau

SEQ ID NO: 2453322 - RNA, 19 nt, Homo sapiens
  misc_RNA (1)...(19): siRNA sense strand
acuacaacuuugaggaaga

SEQ ID NO: 2453323 - RNA, 19 nt, Homo sapiens
  misc_RNA (1)...(19): siRNA sense strand
acuuugaggaagaagaaua

SEQ ID NO: 2453324 - RNA, 19 nt, Homo sapiens
  misc_RNA (1)...(19): siRNA sense strand
aagcaugauuucugagaca

SEQ ID NO: 2453325 - RNA, 19 nt, Homo sapiens
  misc_RNA (1)...(19): siRNA sense strand
gagcauaccucuaagucga

SEQ ID NO: 2453326 - RNA, 19 nt, Homo sapiens
  misc_RNA (1)...(19): siRNA sense strand
ugucaaaggaggagcagca

SEQ ID NO: 2453327 - RNA, 19 nt, Homo sapiens
  misc_RNA (1)...(19): siRNA sense strand
cugaacaacccaagagcau

SEQ ID NO: 2453328 - RNA, 19 nt, Homo sapiens
  misc_RNA (1)...(19): siRNA sense strand
ccuaagaaaaccaagauua

SEQ ID NO: 2453329 - RNA, 19 nt, Homo sapiens
  misc_RNA (1)...(19): siRNA sense strand
gcaaaaucaguaaaggaaa

SEQ ID NO: 2453330 - RNA, 19 nt, Homo sapiens
  misc_RNA (1)...(19): siRNA sense strand
agaagaauauagaggguug

SEQ ID NO: 2453331 - RNA, 19 nt, Homo sapiens
  misc_RNA (1)...(19): siRNA sense strand
uuaaagaagaucuagggaa

SEQ ID NO: 2453332 - RNA, 19 nt, Homo sapiens
  misc_RNA (1)...(19): siRNA sense strand
uuccaaagcaccuaagaaa

SEQ ID NO: 2453333 - RNA, 19 nt, Homo sapiens
  misc_RNA (1)...(19): siRNA sense strand
auguuauaaaggaggcaaa

SEQ ID NO: 2453334 - RNA, 19 nt, Homo sapiens
  misc_RNA (1)...(19): siRNA sense strand
uccaaagagcauugaagaa

SEQ ID NO: 2453335 - RNA, 19 nt, Homo sapiens
  misc_RNA (1)...(19): siRNA sense strand
ugaaauugagagagaaugu

SEQ ID NO: 2453336 - RNA, 19 nt, Homo sapiens
  misc_RNA (1)...(19): siRNA sense strand
uauacacaccuaugggaaa

SEQ ID NO: 2453337 - RNA, 19 nt, Homo sapiens
  misc_RNA (1)...(19): siRNA sense strand
agagaagaauauagagggu

SEQ ID NO: 2453338 - RNA, 19 nt, Homo sapiens
  misc_RNA (1)...(19): siRNA sense strand
auggagacagagaagaaua

SEQ ID NO: 2453339 - RNA, 19 nt, Homo sapiens
  misc_RNA (1)...(19): siRNA sense strand
gauaaauggucaugcacuc

SEQ ID NO: 2453340 - RNA, 19 nt, Homo sapiens
  misc_RNA (1)...(19): siRNA sense strand
cgaacaugucaaaggagga

SEQ ID NO: 2453341 - RNA, 19 nt, Homo sapiens
  misc_RNA (1)...(19): siRNA sense strand
gagcauauacguugcccau

SEQ ID NO: 2453342 - RNA, 19 nt, Homo sapiens
  misc_RNA (1)...(19): siRNA sense strand
agaugaugauaaaugguca

SEQ ID NO: 2453343 - RNA, 19 nt, Homo sapiens
  misc_RNA (1)...(19): siRNA sense strand
ggauuauuggccaagggaa

SEQ ID NO: 2453344 - RNA, 19 nt, Homo sapiens
  misc_RNA (1)...(19): siRNA sense strand
cugaaagaacucuccacaa

SEQ ID NO: 2453345 - RNA, 19 nt, Homo sapiens
  misc_RNA (1)...(19): siRNA sense strand
guuccgaagcugaaauuga

SEQ ID NO: 2453346 - RNA, 19 nt, Homo sapiens
  misc_RNA (1)...(19): siRNA sense strand
uggagacagagaagaauau

SEQ ID NO: 2453347 - RNA, 19 nt, Homo sapiens
  misc_RNA (1)...(19): siRNA sense strand
cgaagcugaaauugagaga

SEQ ID NO: 2453348 - RNA, 19 nt, Homo sapiens
  misc_RNA (1)...(19): siRNA sense strand
aauuuaggccugacagaga

SEQ ID NO: 2453349 - RNA, 19 nt, Homo sapiens
  misc_RNA (1)...(19): siRNA sense strand
aaagaauugcagacaguca

SEQ ID NO: 2453350 - RNA, 19 nt, Homo sapiens
  misc_RNA (1)...(19): siRNA sense strand
gcaagaaccuccaaagagc

SEQ ID NO: 2453351 - RNA, 19 nt, Homo sapiens
  misc_RNA (1)...(19): siRNA sense strand
caucaacagacaacuacaa

SEQ ID NO: 2453352 - RNA, 19 nt, Homo sapiens
  misc_RNA (1)...(19): siRNA sense strand
ugaaauggagacagagaag

SEQ ID NO: 2453353 - RNA, 19 nt, Homo sapiens
  misc_RNA (1)...(19): siRNA sense strand
gagaaaaccaagauugcuu

SEQ ID NO: 2453354 - RNA, 19 nt, Homo sapiens
  misc_RNA (1)...(19): siRNA sense strand
cagaaaguuaugugacacu

SEQ ID NO: 2453355 - RNA, 19 nt, Homo sapiens
  misc_RNA (1)...(19): siRNA sense strand
ugagagagaauguguggca

SEQ ID NO: 2453356 - RNA, 19 nt, Homo sapiens
  misc_RNA (1)...(19): siRNA sense strand
gcuaauggggagauagaaa

SEQ ID NO: 2453357 - RNA, 19 nt, Homo sapiens
  misc_RNA (1)...(19): siRNA sense strand
gaugcuaagaagagauaau

SEQ ID NO: 2453358 - RNA, 19 nt, Homo sapiens
  misc_RNA (1)...(19): siRNA sense strand
gagcuguuggauagggaaa

SEQ ID NO: 2453359 - RNA, 19 nt, Homo sapiens
  misc_RNA (1)...(19): siRNA sense strand
uugggaacuacgagagaaa

SEQ ID NO: 2453360 - RNA, 19 nt, Homo sapiens
  misc_RNA (1)...(19): siRNA sense strand
cugagggagcuguuggaua

SEQ ID NO: 2453361 - RNA, 19 nt, Homo sapiens
  misc_RNA (1)...(19): siRNA sense strand
gagaaaagacagacagagu

SEQ ID NO: 2453362 - RNA, 19 nt, Homo sapiens
  misc_RNA (1)...(19): siRNA sense strand
caggauuugaguugaggaa

SEQ ID NO: 2453363 - RNA, 19 nt, Homo sapiens
  misc_RNA (1)...(19): siRNA sense strand
aaggaaacuuugaggcagu

SEQ ID NO: 2453364 - RNA, 19 nt, Homo sapiens
  misc_RNA (1)...(19): siRNA sense strand
uggauucugcuaagggaaa

SEQ ID NO: 2453365 - RNA, 19 nt, Homo sapiens
  misc_RNA (1)...(19): siRNA sense strand
cuuucaauaaggagaucaa

SEQ ID NO: 2453366 - RNA, 19 nt, Homo sapiens
  misc_RNA (1)...(19): siRNA sense strand
gggaaaucgccacuggaga

SEQ ID NO: 2453367 - RNA, 19 nt, Homo sapiens
  misc_RNA (1)...(19): siRNA sense strand
ugaucaagccucuggagau

SEQ ID NO: 2453368 - RNA, 19 nt, Homo sapiens
  misc_RNA (1)...(19): siRNA sense strand
agucugaaauauacagcuu

SEQ ID NO: 2453369 - RNA, 19 nt, Homo sapiens
  misc_RNA (1)...(19): siRNA sense strand
agcaaaucaaggagaucaa

SEQ ID NO: 2453370 - RNA, 19 nt, Homo sapiens
  misc_RNA (1)...(19): siRNA sense strand
ggagaauaccacagagcuc

SEQ ID NO: 2453371 - RNA, 19 nt, Homo sapiens
  misc_RNA (1)...(19): siRNA sense strand
aaaucaaggagaucaagaa

SEQ ID NO: 2453372 - RNA, 19 nt, Homo sapiens
  misc_RNA (1)...(19): siRNA sense strand
ccuucagagcugcgggaga

SEQ ID NO: 2453373 - RNA, 19 nt, Homo sapiens
  misc_RNA (1)...(19): siRNA sense strand
agauagaaaaguucagcaa

SEQ ID NO: 2453374 - RNA, 19 nt, Homo sapiens
  misc_RNA (1)...(19): siRNA sense strand
ccaaaaugcaugcaggaga

SEQ ID NO: 2453375 - RNA, 19 nt, Homo sapiens
  misc_RNA (1)...(19): siRNA sense strand
agaucaaaaccaugaagaa

SEQ ID NO: 2453376 - RNA, 19 nt, Homo sapiens
  misc_RNA (1)...(19): siRNA sense strand
ugaacaggaagcugaguga

SEQ ID NO: 2453377 - RNA, 19 nt, Homo sapiens
  misc_RNA (1)...(19): siRNA sense strand
augaaauacugcaagaaac

SEQ ID NO: 2453378 - RNA, 19 nt, Homo sapiens
  misc_RNA (1)...(19): siRNA sense strand
agacagagucaaaucuaca

SEQ ID NO: 2453379 - RNA, 19 nt, Homo sapiens
  misc_RNA (1)...(19): siRNA sense strand
cagcaagccaggacaaaau

SEQ ID NO: 2453380 - RNA, 19 nt, Homo sapiens
  misc_RNA (1)...(19): siRNA sense strand
aagagcaaaucaaggagau

SEQ ID NO: 2453381 - RNA, 19 nt, Homo sapiens
  misc_RNA (1)...(19): siRNA sense strand
gcauugcaauagugaggca

SEQ ID NO: 2453382 - RNA, 19 nt, Homo sapiens
  misc_RNA (1)...(19): siRNA sense strand
agcucaaacuuccugguaa

SEQ ID NO: 2453383 - RNA, 19 nt, Homo sapiens
  misc_RNA (1)...(19): siRNA sense strand
cggugugaagagaugaaau

SEQ ID NO: 2453384 - RNA, 19 nt, Homo sapiens
  misc_RNA (1)...(19): siRNA sense strand
ccgcacaggucuagggagu

SEQ ID NO: 2453385 - RNA, 19 nt, Homo sapiens
  misc_RNA (1)...(19): siRNA sense strand
ggcaaaagcuucaggcaga

SEQ ID NO: 2453386 - RNA, 19 nt, Homo sapiens
  misc_RNA (1)...(19): siRNA sense strand
agaucaugaaguaggaaau

SEQ ID NO: 2453387 - RNA, 19 nt, Homo sapiens
  misc_RNA (1)...(19): siRNA sense strand
ggcaagagcuuccggcuga

SEQ ID NO: 2453388 - RNA, 19 nt, Homo sapiens
  misc_RNA (1)...(19): siRNA sense strand
cugaaugcggcaaggguuu

SEQ ID NO: 2453389 - RNA, 19 nt, Homo sapiens
  misc_RNA (1)...(19): siRNA sense strand
cagaucaugaaguaggaaa

SEQ ID NO: 2453390 - RNA, 19 nt, Homo sapiens
  misc_RNA (1)...(19): siRNA sense strand
gcauauguggcaagggcuu

SEQ ID NO: 2453391 - RNA, 19 nt, Homo sapiens
  misc_RNA (1)...(19): siRNA sense strand
cggcaaagguuucgcggac

SEQ ID NO: 2453392 - RNA, 19 nt, Homo sapiens
  misc_RNA (1)...(19): siRNA sense strand
ucucaaaccugaaggcauc

SEQ ID NO: 2453393 - RNA, 19 nt, Homo sapiens
  misc_RNA (1)...(19): siRNA sense strand
gugaauguggcaagagcuu

SEQ ID NO: 2453394 - RNA, 19 nt, Homo sapiens
  misc_RNA (1)...(19): siRNA sense strand
aggaaaugucucucucaaa

SEQ ID NO: 2453395 - RNA, 19 nt, Homo sapiens
  misc_RNA (1)...(19): siRNA sense strand
guguggugaguguggcaaa

SEQ ID NO: 2453396 - RNA, 19 nt, Homo sapiens
  misc_RNA (1)...(19): siRNA sense strand
ggaagaagauuuggcucca

SEQ ID NO: 2453397 - RNA, 19 nt, Homo sapiens
  misc_RNA (1)...(19): siRNA sense strand
aggcccaggacaagccaua

SEQ ID NO: 2453398 - RNA, 19 nt, Homo sapiens
  misc_RNA (1)...(19): siRNA sense strand
gggugucacugcagcccaa

SEQ ID NO: 2453399 - RNA, 19 nt, Homo sapiens
  misc_RNA (1)...(19): siRNA sense strand
acagaaaauuggagucaaa

SEQ ID NO: 2453400 - RNA, 19 nt, Homo sapiens
  misc_RNA (1)...(19): siRNA sense strand
agaaaguguuccagugaca

SEQ ID NO: 2453401 - RNA, 19 nt, Homo sapiens
  misc_RNA (1)...(19): siRNA sense strand
ugauagaagcauugcaaaa

SEQ ID NO: 2453402 - RNA, 19 nt, Homo sapiens
  misc_RNA (1)...(19): siRNA sense strand
ugaaaauguuugaggcuau

SEQ ID NO: 2453403 - RNA, 19 nt, Homo sapiens
  misc_RNA (1)...(19): siRNA sense strand
ugugaaaggaauaggagau

SEQ ID NO: 2453404 - RNA, 19 nt, Homo sapiens
  misc_RNA (1)...(19): siRNA sense strand
gaauauuagcagagaugca

SEQ ID NO: 2453405 - RNA, 19 nt, Homo sapiens
  misc_RNA (1)...(19): siRNA sense strand
gcucgaagcuucaguggca

SEQ ID NO: 2453406 - RNA, 19 nt, Homo sapiens
  misc_RNA (1)...(19): siRNA sense strand
cagaagaaaaugugugcaa

SEQ ID NO: 2453407 - RNA, 19 nt, Homo sapiens
  misc_RNA (1)...(19): siRNA sense strand
ccaugauagcuuagaggau

SEQ ID NO: 2453408 - RNA, 19 nt, Homo sapiens
  misc_RNA (1)...(19): siRNA sense strand
caauugacccagaggcuau

SEQ ID NO: 2453409 - RNA, 19 nt, Homo sapiens
  misc_RNA (1)...(19): siRNA sense strand
caguggaugugaaaggaau

SEQ ID NO: 2453410 - RNA, 19 nt, Homo sapiens
  misc_RNA (1)...(19): siRNA sense strand
cgguuaaauugguccauga

SEQ ID NO: 2453411 - RNA, 19 nt, Homo sapiens
  misc_RNA (1)...(19): siRNA sense strand
ggauucaacgaguggaaaa

SEQ ID NO: 2453412 - RNA, 19 nt, Homo sapiens
  misc_RNA (1)...(19): siRNA sense strand
ggaaaguugccaaaauaaa

SEQ ID NO: 2453413 - RNA, 19 nt, Homo sapiens
  misc_RNA (1)...(19): siRNA sense strand
gcuuagaggaucuucaaau

SEQ ID NO: 2453414 - RNA, 19 nt, Homo sapiens
  misc_RNA (1)...(19): siRNA sense strand
ggaugggaaaguugccaaa

SEQ ID NO: 2453415 - RNA, 19 nt, Homo sapiens
  misc_RNA (1)...(19): siRNA sense strand
caggagaugucauggucau

SEQ ID NO: 2453416 - RNA, 19 nt, Homo sapiens
  misc_RNA (1)...(19): siRNA sense strand
cauguuaacaggagaaagu

SEQ ID NO: 2453417 - RNA, 19 nt, Homo sapiens
  misc_RNA (1)...(19): siRNA sense strand
ugcaaugagauguugguaa

SEQ ID NO: 2453418 - RNA, 19 nt, Homo sapiens
  misc_RNA (1)...(19): siRNA sense strand
aguggaugugaaaggaaua

SEQ ID NO: 2453419 - RNA, 19 nt, Homo sapiens
  misc_RNA (1)...(19): siRNA sense strand
cagaauauuagcagagaug

SEQ ID NO: 2453420 - RNA, 19 nt, Homo sapiens
  misc_RNA (1)...(19): siRNA sense strand
ugaagaagaaacagcacuu

SEQ ID NO: 2453421 - RNA, 19 nt, Homo sapiens
  misc_RNA (1)...(19): siRNA sense strand
gggaaaguugccaaaauaa

SEQ ID NO: 2453422 - RNA, 19 nt, Homo sapiens
  misc_RNA (1)...(19): siRNA sense strand
cggaaacacauaaacgaca

SEQ ID NO: 2453423 - RNA, 19 nt, Homo sapiens
  misc_RNA (1)...(19): siRNA sense strand
aagcauguuaacaggagaa

SEQ ID NO: 2453424 - RNA, 19 nt, Homo sapiens
  misc_RNA (1)...(19): siRNA sense strand
cugcaggaaaccaagaaau

SEQ ID NO: 2453425 - RNA, 19 nt, Homo sapiens
  misc_RNA (1)...(19): siRNA sense strand
ugauucuaccucaggauaa

SEQ ID NO: 2453426 - RNA, 19 nt, Homo sapiens
  misc_RNA (1)...(19): siRNA sense strand
cuacuuaugagauaggaau

SEQ ID NO: 2453427 - RNA, 19 nt, Homo sapiens
  misc_RNA (1)...(19): siRNA sense strand
cugcaaugacugcugguau

SEQ ID NO: 2453428 - RNA, 19 nt, Homo sapiens
  misc_RNA (1)...(19): siRNA sense strand
uggaagaagcaacugaaga

SEQ ID NO: 2453429 - RNA, 19 nt, Homo sapiens
  misc_RNA (1)...(19): siRNA sense strand
guugauagaagcauugcaa

SEQ ID NO: 2453430 - RNA, 19 nt, Homo sapiens
  misc_RNA (1)...(19): siRNA sense strand
uuggauggauucuggaaga

SEQ ID NO: 2453431 - RNA, 19 nt, Homo sapiens
  misc_RNA (1)...(19): siRNA sense strand
gcauuguaaacgaaagcau

SEQ ID NO: 2453432 - RNA, 19 nt, Homo sapiens
  misc_RNA (1)...(19): siRNA sense strand
accaagaaauggagcuguu

SEQ ID NO: 2453433 - RNA, 19 nt, Homo sapiens
  misc_RNA (1)...(19): siRNA sense strand
aggauuuaguacuuccaaa

SEQ ID NO: 2453434 - RNA, 19 nt, Homo sapiens
  misc_RNA (1)...(19): siRNA sense strand
aagaaacagcacuucauaa

SEQ ID NO: 2453435 - RNA, 19 nt, Homo sapiens
  misc_RNA (1)...(19): siRNA sense strand
gcuacuuaugagauaggaa

SEQ ID NO: 2453436 - RNA, 19 nt, Homo sapiens
  misc_RNA (1)...(19): siRNA sense strand
cagagaugcaauugagaac

SEQ ID NO: 2453437 - RNA, 19 nt, Homo sapiens
  misc_RNA (1)...(19): siRNA sense strand
gguacaaguuggggucaua

SEQ ID NO: 2453438 - RNA, 19 nt, Homo sapiens
  misc_RNA (1)...(19): siRNA sense strand
guguggugauggcgcaaau

SEQ ID NO: 2453439 - RNA, 19 nt, Homo sapiens
  misc_RNA (1)...(19): siRNA sense strand
gcuacuugucauucacuua

SEQ ID NO: 2453440 - RNA, 19 nt, Homo sapiens
  misc_RNA (1)...(19): siRNA sense strand
aagaagcaacugaagaaga

SEQ ID NO: 2453441 - RNA, 19 nt, Homo sapiens
  misc_RNA (1)...(19): siRNA sense strand
ccaaacaacugcuuccuga

SEQ ID NO: 2453442 - RNA, 19 nt, Homo sapiens
  misc_RNA (1)...(19): siRNA sense strand
aaaguguuccagugacaaa

SEQ ID NO: 2453443 - RNA, 19 nt, Homo sapiens
  misc_RNA (1)...(19): siRNA sense strand
guaucaguccucaaagaau

SEQ ID NO: 2453444 - RNA, 19 nt, Homo sapiens
  misc_RNA (1)...(19): siRNA sense strand
caggaaaccaagaaaugga

SEQ ID NO: 2453445 - RNA, 19 nt, Homo sapiens
  misc_RNA (1)...(19): siRNA sense strand
aagaaauggagcuguuuga

SEQ ID NO: 2453446 - RNA, 19 nt, Homo sapiens
  misc_RNA (1)...(19): siRNA sense strand
auugagaacaacauggauu

SEQ ID NO: 2453447 - RNA, 19 nt, Homo sapiens
  misc_RNA (1)...(19): siRNA sense strand
agaagacacaguugauaga

SEQ ID NO: 2453448 - RNA, 19 nt, Homo sapiens
  misc_RNA (1)...(19): siRNA sense strand
cuguaucaguccucaaaga

SEQ ID NO: 2453449 - RNA, 19 nt, Homo sapiens
  misc_RNA (1)...(19): siRNA sense strand
uugagaacaacauggauuu

SEQ ID NO: 2453450 - RNA, 19 nt, Homo sapiens
  misc_RNA (1)...(19): siRNA sense strand
ucuaacugaagaugguuua

SEQ ID NO: 2453451 - RNA, 19 nt, Homo sapiens
  misc_RNA (1)...(19): siRNA sense strand
acagaauauuagcagagau

SEQ ID NO: 2453452 - RNA, 19 nt, Homo sapiens
  misc_RNA (1)...(19): siRNA sense strand
cgaggaagaucccgggaga

SEQ ID NO: 2453453 - RNA, 19 nt, Homo sapiens
  misc_RNA (1)...(19): siRNA sense strand
ucuucaaggaggaggguga

SEQ ID NO: 2453454 - RNA, 19 nt, Homo sapiens
  misc_RNA (1)...(19): siRNA sense strand
ccggauugcagaagguaca

SEQ ID NO: 2453455 - RNA, 19 nt, Homo sapiens
  misc_RNA (1)...(19): siRNA sense strand
cgcaggacaccgaggaaga

SEQ ID NO: 2453456 - RNA, 19 nt, Homo sapiens
  misc_RNA (1)...(19): siRNA sense strand
ccgaagaagcucugcucca

SEQ ID NO: 2453457 - RNA, 19 nt, Homo sapiens
  misc_RNA (1)...(19): siRNA sense strand
ggccgaaguuggagagagc

SEQ ID NO: 2453458 - RNA, 19 nt, Homo sapiens
  misc_RNA (1)...(19): siRNA sense strand
ccuuaaagcuccagccaca

SEQ ID NO: 2453459 - RNA, 19 nt, Homo sapiens
  misc_RNA (1)...(19): siRNA sense strand
caugaggagugcagggaga

SEQ ID NO: 2453460 - RNA, 19 nt, Homo sapiens
  misc_RNA (1)...(19): siRNA sense strand
gagaggagcacuuugggaa

SEQ ID NO: 2453461 - RNA, 19 nt, Homo sapiens
  misc_RNA (1)...(19): siRNA sense strand
gagccaaggagcaggagga

SEQ ID NO: 2453462 - RNA, 19 nt, Homo sapiens
  misc_RNA (1)...(19): siRNA sense strand
ccugggaggaugagaagca

SEQ ID NO: 2453463 - RNA, 19 nt, Homo sapiens
  misc_RNA (1)...(19): siRNA sense strand
uugaaaagacuaagguaca

SEQ ID NO: 2453464 - RNA, 19 nt, Homo sapiens
  misc_RNA (1)...(19): siRNA sense strand
gcauugaggagcugcggga

SEQ ID NO: 2453465 - RNA, 19 nt, Homo sapiens
  misc_RNA (1)...(19): siRNA sense strand
acguaggagccaaggagca

SEQ ID NO: 2453466 - RNA, 19 nt, Homo sapiens
  misc_RNA (1)...(19): siRNA sense strand
cuggaggagaggacggaca

SEQ ID NO: 2453467 - RNA, 19 nt, Homo sapiens
  misc_RNA (1)...(19): siRNA sense strand
ccgcauuggaccagaacua

SEQ ID NO: 2453468 - RNA, 19 nt, Homo sapiens
  misc_RNA (1)...(19): siRNA sense strand
agcaaagacagcagggaaa

SEQ ID NO: 2453469 - RNA, 19 nt, Homo sapiens
  misc_RNA (1)...(19): siRNA sense strand
cagcaaagacagcagggaa

SEQ ID NO: 2453470 - RNA, 19 nt, Homo sapiens
  misc_RNA (1)...(19): siRNA sense strand
cugaaagggaagagaagau

SEQ ID NO: 2453471 - RNA, 19 nt, Homo sapiens
  misc_RNA (1)...(19): siRNA sense strand
acuaugaaagggaaggaaa

SEQ ID NO: 2453472 - RNA, 19 nt, Homo sapiens
  misc_RNA (1)...(19): siRNA sense strand
aggaaacgcuucagggcuu

SEQ ID NO: 2453473 - RNA, 19 nt, Homo sapiens
  misc_RNA (1)...(19): siRNA sense strand
gagacagccugaaagggaa

SEQ ID NO: 2453474 - RNA, 19 nt, Homo sapiens
  misc_RNA (1)...(19): siRNA sense strand
agggaaacagggagcaaau

SEQ ID NO: 2453475 - RNA, 19 nt, Homo sapiens
  misc_RNA (1)...(19): siRNA sense strand
gugaaagugaagaugaaga

SEQ ID NO: 2453476 - RNA, 19 nt, Homo sapiens
  misc_RNA (1)...(19): siRNA sense strand
agaagauuguagugguuga

SEQ ID NO: 2453477 - RNA, 19 nt, Homo sapiens
  misc_RNA (1)...(19): siRNA sense strand
ggaaagaaagaaugcagca

SEQ ID NO: 2453478 - RNA, 19 nt, Homo sapiens
  misc_RNA (1)...(19): siRNA sense strand
ccuucugucuggagaguga

SEQ ID NO: 2453479 - RNA, 19 nt, Homo sapiens
  misc_RNA (1)...(19): siRNA sense strand
ggagacagccugaaaggga

SEQ ID NO: 2453480 - RNA, 19 nt, Homo sapiens
  misc_RNA (1)...(19): siRNA sense strand
aaauaaugaaggugcauca

SEQ ID NO: 2453481 - RNA, 19 nt, Homo sapiens
  misc_RNA (1)...(19): siRNA sense strand
gguagacgcugaagaggca

SEQ ID NO: 2453482 - RNA, 19 nt, Homo sapiens
  misc_RNA (1)...(19): siRNA sense strand
cugaagaggcauuggugga

SEQ ID NO: 2453483 - RNA, 19 nt, Homo sapiens
  misc_RNA (1)...(19): siRNA sense strand
gguccagggaagaggcuca

SEQ ID NO: 2453484 - RNA, 19 nt, Homo sapiens
  misc_RNA (1)...(19): siRNA sense strand
gagaaaugcuucagugcuc

SEQ ID NO: 2453485 - RNA, 19 nt, Homo sapiens
  misc_RNA (1)...(19): siRNA sense strand
agaagcagcagcagagaca

SEQ ID NO: 2453486 - RNA, 19 nt, Homo sapiens
  misc_RNA (1)...(19): siRNA sense strand
gugcagagcuggaaagagc

SEQ ID NO: 2453487 - RNA, 19 nt, Homo sapiens
  misc_RNA (1)...(19): siRNA sense strand
gggaagaggcucacacgga

SEQ ID NO: 2453488 - RNA, 19 nt, Homo sapiens
  misc_RNA (1)...(19): siRNA sense strand
ggccagugcaguugugaau

SEQ ID NO: 2453489 - RNA, 19 nt, Homo sapiens
  misc_RNA (1)...(19): siRNA sense strand
agagaggagugcagcagau

SEQ ID NO: 2453490 - RNA, 19 nt, Homo sapiens
  misc_RNA (1)...(19): siRNA sense strand
aagacaggaaagaaagaau

SEQ ID NO: 2453491 - RNA, 19 nt, Homo sapiens
  misc_RNA (1)...(19): siRNA sense strand
aagcagugaaagugaagau

SEQ ID NO: 2453492 - RNA, 19 nt, Homo sapiens
  misc_RNA (1)...(19): siRNA sense strand
gucagaagguccagggaag

SEQ ID NO: 2453493 - RNA, 19 nt, Homo sapiens
  misc_RNA (1)...(19): siRNA sense strand
ccagaacuauccaggcgua

SEQ ID NO: 2453494 - RNA, 19 nt, Homo sapiens
  misc_RNA (1)...(19): siRNA sense strand
aagcaaggcagaaggaaag

SEQ ID NO: 2453495 - RNA, 19 nt, Homo sapiens
  misc_RNA (1)...(19): siRNA sense strand
agaagacaggaaagaaaga

SEQ ID NO: 2453496 - RNA, 19 nt, Homo sapiens
  misc_RNA (1)...(19): siRNA sense strand
gugcaguugugaaugccua

SEQ ID NO: 2453497 - RNA, 19 nt, Homo sapiens
  misc_RNA (1)...(19): siRNA sense strand
gcaucaugugacuggaaaa

SEQ ID NO: 2453498 - RNA, 19 nt, Homo sapiens
  misc_RNA (1)...(19): siRNA sense strand
agucagaagguccagggaa

SEQ ID NO: 2453499 - RNA, 19 nt, Homo sapiens
  misc_RNA (1)...(19): siRNA sense strand
ggaagaggcucacacggau

SEQ ID NO: 2453500 - RNA, 19 nt, Homo sapiens
  misc_RNA (1)...(19): siRNA sense strand
cuaugaaagggaaggaaac

SEQ ID NO: 2453501 - RNA, 19 nt, Homo sapiens
  misc_RNA (1)...(19): siRNA sense strand
gaucaggagaaaugcuuca

SEQ ID NO: 2453502 - RNA, 19 nt, Homo sapiens
  misc_RNA (1)...(19): siRNA sense strand
ccucuggcucaaaggcuua

SEQ ID NO: 2453503 - RNA, 19 nt, Homo sapiens
  misc_RNA (1)...(19): siRNA sense strand
auaaacagaccaagaagca

SEQ ID NO: 2453504 - RNA, 19 nt, Homo sapiens
  misc_RNA (1)...(19): siRNA sense strand
auaacaaggaccugaucuu

SEQ ID NO: 2453505 - RNA, 19 nt, Homo sapiens
  misc_RNA (1)...(19): siRNA sense strand
ugggaaagcaagugagauc

SEQ ID NO: 2453506 - RNA, 19 nt, Homo sapiens
  misc_RNA (1)...(19): siRNA sense strand
cauugaaggcucuggucau

SEQ ID NO: 2453507 - RNA, 19 nt, Homo sapiens
  misc_RNA (1)...(19): siRNA sense strand
uggaaggcgagcugggaga

SEQ ID NO: 2453508 - RNA, 19 nt, Homo sapiens
  misc_RNA (1)...(19): siRNA sense strand
gaggaauauaaacggauca

SEQ ID NO: 2453509 - RNA, 19 nt, Homo sapiens
  misc_RNA (1)...(19): siRNA sense strand
acagcuggccaaugaggaa

SEQ ID NO: 2453510 - RNA, 19 nt, Homo sapiens
  misc_RNA (1)...(19): siRNA sense strand
uacaagacauggugggacu

SEQ ID NO: 2453511 - RNA, 19 nt, Homo sapiens
  misc_RNA (1)...(19): siRNA sense strand
gggaagagcuggagagcga

SEQ ID NO: 2453512 - RNA, 19 nt, Homo sapiens
  misc_RNA (1)...(19): siRNA sense strand
aggaagaggaggaggagga

SEQ ID NO: 2453513 - RNA, 19 nt, Homo sapiens
  misc_RNA (1)...(19): siRNA sense strand
ucuaaaugaagaagaggaa

SEQ ID NO: 2453514 - RNA, 19 nt, Homo sapiens
  misc_RNA (1)...(19): siRNA sense strand
aagaagaggaagaggagga

SEQ ID NO: 2453515 - RNA, 19 nt, Homo sapiens
  misc_RNA (1)...(19): siRNA sense strand
aggaggaggaggaaagcaa

SEQ ID NO: 2453516 - RNA, 19 nt, Homo sapiens
  misc_RNA (1)...(19): siRNA sense strand
aggaaaagaccgagcccaa

SEQ ID NO: 2453517 - RNA, 19 nt, Homo sapiens
  misc_RNA (1)...(19): siRNA sense strand
agauggaugagaaggcaaa

SEQ ID NO: 2453518 - RNA, 19 nt, Homo sapiens
  misc_RNA (1)...(19): siRNA sense strand
ggucagggcagcaagguga

SEQ ID NO: 2453519 - RNA, 19 nt, Homo sapiens
  misc_RNA (1)...(19): siRNA sense strand
agaacacaguccaggccaa

SEQ ID NO: 2453520 - RNA, 19 nt, Homo sapiens
  misc_RNA (1)...(19): siRNA sense strand
aagagaaagacaaggagga

SEQ ID NO: 2453521 - RNA, 19 nt, Homo sapiens
  misc_RNA (1)...(19): siRNA sense strand
gagauggaugagaaggcaa

SEQ ID NO: 2453522 - RNA, 19 nt, Homo sapiens
  misc_RNA (1)...(19): siRNA sense strand
aagaggaagaggaggagga

SEQ ID NO: 2453523 - RNA, 19 nt, Homo sapiens
  misc_RNA (1)...(19): siRNA sense strand
gagaaagacaaggaggaga

SEQ ID NO: 2453524 - RNA, 19 nt, Homo sapiens
  misc_RNA (1)...(19): siRNA sense strand
augagaaggcaaagcugaa

SEQ ID NO: 2453525 - RNA, 19 nt, Homo sapiens
  misc_RNA (1)...(19): siRNA sense strand
aggugaucaagaagguaaa

SEQ ID NO: 2453526 - RNA, 19 nt, Homo sapiens
  misc_RNA (1)...(19): siRNA sense strand
augaagaagaggaagagga

SEQ ID NO: 2453527 - RNA, 19 nt, Homo sapiens
  misc_RNA (1)...(19): siRNA sense strand
aagacaaggaggagaugga

SEQ ID NO: 2453528 - RNA, 19 nt, Homo sapiens
  misc_RNA (1)...(19): siRNA sense strand
aaggcaaagcugaagaaaa

SEQ ID NO: 2453529 - RNA, 19 nt, Homo sapiens
  misc_RNA (1)...(19): siRNA sense strand
cgguuaaauuggagccuuc

SEQ ID NO: 2453530 - RNA, 19 nt, Homo sapiens
  misc_RNA (1)...(19): siRNA sense strand
ggacuaaggaaaagaccga

SEQ ID NO: 2453531 - RNA, 19 nt, Homo sapiens
  misc_RNA (1)...(19): siRNA sense strand
aagaggaggaggaggaaag

SEQ ID NO: 2453532 - RNA, 19 nt, Homo sapiens
  misc_RNA (1)...(19): siRNA sense strand
ucgcccaggaagagagaga

SEQ ID NO: 2453533 - RNA, 19 nt, Homo sapiens
  misc_RNA (1)...(19): siRNA sense strand
caguugacuaagaagaaaa

SEQ ID NO: 2453534 - RNA, 19 nt, Homo sapiens
  misc_RNA (1)...(19): siRNA sense strand
ugacaagugcugcuggaga

SEQ ID NO: 2453535 - RNA, 19 nt, Homo sapiens
  misc_RNA (1)...(19): siRNA sense strand
gaugagaaggcaaagcuga

SEQ ID NO: 2453536 - RNA, 19 nt, Homo sapiens
  misc_RNA (1)...(19): siRNA sense strand
aagccaggaagguaaacaa

SEQ ID NO: 2453537 - RNA, 19 nt, Homo sapiens
  misc_RNA (1)...(19): siRNA sense strand
uggcaaagaaggagggaag

SEQ ID NO: 2453538 - RNA, 19 nt, Homo sapiens
  misc_RNA (1)...(19): siRNA sense strand
ggaaagagccacagcacag

SEQ ID NO: 2453539 - RNA, 19 nt, Homo sapiens
  misc_RNA (1)...(19): siRNA sense strand
aaggagggaaggaagcaaa

SEQ ID NO: 2453540 - RNA, 19 nt, Homo sapiens
  misc_RNA (1)...(19): siRNA sense strand
ccaagaaggaaugaggaga

SEQ ID NO: 2453541 - RNA, 19 nt, Homo sapiens
  misc_RNA (1)...(19): siRNA sense strand
ccaggaaggccaagcagca

SEQ ID NO: 2453542 - RNA, 19 nt, Homo sapiens
  misc_RNA (1)...(19): siRNA sense strand
ucucugugccugugguaau

SEQ ID NO: 2453543 - RNA, 19 nt, Homo sapiens
  misc_RNA (1)...(19): siRNA sense strand
ggggagaagaagagagaaa

SEQ ID NO: 2453544 - RNA, 19 nt, Homo sapiens
  misc_RNA (1)...(19): siRNA sense strand
cguuaaaggagaagugaau

SEQ ID NO: 2453545 - RNA, 19 nt, Homo sapiens
  misc_RNA (1)...(19): siRNA sense strand
cagaauggcagcagcauga

SEQ ID NO: 2453546 - RNA, 19 nt, Homo sapiens
  misc_RNA (1)...(19): siRNA sense strand
caugaaaccucgagccgau

SEQ ID NO: 2453547 - RNA, 19 nt, Homo sapiens
  misc_RNA (1)...(19): siRNA sense strand
caggaaaaucaaaggauau

SEQ ID NO: 2453548 - RNA, 19 nt, Homo sapiens
  misc_RNA (1)...(19): siRNA sense strand
agugaaugcaaaugccaaa

SEQ ID NO: 2453549 - RNA, 19 nt, Homo sapiens
  misc_RNA (1)...(19): siRNA sense strand
uuauggugcugaaggacaa

SEQ ID NO: 2453550 - RNA, 19 nt, Homo sapiens
  misc_RNA (1)...(19): siRNA sense strand
cauuuauggcaaagugaau

SEQ ID NO: 2453551 - RNA, 19 nt, Homo sapiens
  misc_RNA (1)...(19): siRNA sense strand
aggagaagugaaugcaaau

SEQ ID NO: 2453552 - RNA, 19 nt, Homo sapiens
  misc_RNA (1)...(19): siRNA sense strand
cuuaaacaaccuacagaau

SEQ ID NO: 2453553 - RNA, 19 nt, Homo sapiens
  misc_RNA (1)...(19): siRNA sense strand
aaauagacacucugggcau

SEQ ID NO: 2453554 - RNA, 19 nt, Homo sapiens
  misc_RNA (1)...(19): siRNA sense strand
aguauugacacgcuggaaa

SEQ ID NO: 2453555 - RNA, 19 nt, Homo sapiens
  misc_RNA (1)...(19): siRNA sense strand
ccuuaaacaaccuacagaa

SEQ ID NO: 2453556 - RNA, 19 nt, Homo sapiens
  misc_RNA (1)...(19): siRNA sense strand
ugauuauggugcugaagga

SEQ ID NO: 2453557 - RNA, 19 nt, Homo sapiens
  misc_RNA (1)...(19): siRNA sense strand
gauugugauacgugggcau

SEQ ID NO: 2453558 - RNA, 19 nt, Homo sapiens
  misc_RNA (1)...(19): siRNA sense strand
ugaccuacuagcaggaaaa

SEQ ID NO: 2453559 - RNA, 19 nt, Homo sapiens
  misc_RNA (1)...(19): siRNA sense strand
acacagauuuaaagagcuc

SEQ ID NO: 2453560 - RNA, 19 nt, Homo sapiens
  misc_RNA (1)...(19): siRNA sense strand
ucguuaaaggagaagugaa

SEQ ID NO: 2453561 - RNA, 19 nt, Homo sapiens
  misc_RNA (1)...(19): siRNA sense strand
gcguacacagccuggagua

SEQ ID NO: 2453562 - RNA, 19 nt, Homo sapiens
  misc_RNA (1)...(19): siRNA sense strand
ggaucggcccagagaaaau

SEQ ID NO: 2453563 - RNA, 19 nt, Homo sapiens
  misc_RNA (1)...(19): siRNA sense strand
cuuuugagaucgugauuau

SEQ ID NO: 2453564 - RNA, 19 nt, Homo sapiens
  misc_RNA (1)...(19): siRNA sense strand
aucaaaggauauugcucua

SEQ ID NO: 2453565 - RNA, 19 nt, Homo sapiens
  misc_RNA (1)...(19): siRNA sense strand
cgcuggaaauuaauggaga

SEQ ID NO: 2453566 - RNA, 19 nt, Homo sapiens
  misc_RNA (1)...(19): siRNA sense strand
gcauguuccuagugacgca

SEQ ID NO: 2453567 - RNA, 19 nt, Homo sapiens
  misc_RNA (1)...(19): siRNA sense strand
ggggagaagaagagagaaa

SEQ ID NO: 2453568 - RNA, 19 nt, Homo sapiens
  misc_RNA (1)...(19): siRNA sense strand
cguuaaaggagaagugaau

SEQ ID NO: 2453569 - RNA, 19 nt, Homo sapiens
  misc_RNA (1)...(19): siRNA sense strand
cagaauggcagcagcauga

SEQ ID NO: 2453570 - RNA, 19 nt, Homo sapiens
  misc_RNA (1)...(19): siRNA sense strand
caugaaaccucgagccgau

SEQ ID NO: 2453571 - RNA, 19 nt, Homo sapiens
  misc_RNA (1)...(19): siRNA sense strand
caggaaaaucaaaggauau

SEQ ID NO: 2453572 - RNA, 19 nt, Homo sapiens
  misc_RNA (1)...(19): siRNA sense strand
agugaaugcaaaugccaaa

SEQ ID NO: 2453573 - RNA, 19 nt, Homo sapiens
  misc_RNA (1)...(19): siRNA sense strand
uuauggugcugaaggacaa

SEQ ID NO: 2453574 - RNA, 19 nt, Homo sapiens
  misc_RNA (1)...(19): siRNA sense strand
cauuuauggcaaagugaau

SEQ ID NO: 2453575 - RNA, 19 nt, Homo sapiens
  misc_RNA (1)...(19): siRNA sense strand
aggagaagugaaugcaaau

SEQ ID NO: 2453576 - RNA, 19 nt, Homo sapiens
  misc_RNA (1)...(19): siRNA sense strand
cuuaaacaaccuacagaau

SEQ ID NO: 2453577 - RNA, 19 nt, Homo sapiens
  misc_RNA (1)...(19): siRNA sense strand
aaauagacacucugggcau

SEQ ID NO: 2453578 - RNA, 19 nt, Homo sapiens
  misc_RNA (1)...(19): siRNA sense strand
aguauugacacgcuggaaa

SEQ ID NO: 2453579 - RNA, 19 nt, Homo sapiens
  misc_RNA (1)...(19): siRNA sense strand
ccuuaaacaaccuacagaa

SEQ ID NO: 2453580 - RNA, 19 nt, Homo sapiens
  misc_RNA (1)...(19): siRNA sense strand
ugauuauggugcugaagga

SEQ ID NO: 2453581 - RNA, 19 nt, Homo sapiens
  misc_RNA (1)...(19): siRNA sense strand
gauugugauacgugggcau

SEQ ID NO: 2453582 - RNA, 19 nt, Homo sapiens
  misc_RNA (1)...(19): siRNA sense strand
ugaccuacuagcaggaaaa

SEQ ID NO: 2453583 - RNA, 19 nt, Homo sapiens
  misc_RNA (1)...(19): siRNA sense strand
acacagauuuaaagagcuc

SEQ ID NO: 2453584 - RNA, 19 nt, Homo sapiens
  misc_RNA (1)...(19): siRNA sense strand
ucguuaaaggagaagugaa

SEQ ID NO: 2453585 - RNA, 19 nt, Homo sapiens
  misc_RNA (1)...(19): siRNA sense strand
gcguacacagccuggagua

SEQ ID NO: 2453586 - RNA, 19 nt, Homo sapiens
  misc_RNA (1)...(19): siRNA sense strand
ggaucggcccagagaaaau

SEQ ID NO: 2453587 - RNA, 19 nt, Homo sapiens
  misc_RNA (1)...(19): siRNA sense strand
cuuuugagaucgugauuau

SEQ ID NO: 2453588 - RNA, 19 nt, Homo sapiens
  misc_RNA (1)...(19): siRNA sense strand
aucaaaggauauugcucua

SEQ ID NO: 2453589 - RNA, 19 nt, Homo sapiens
  misc_RNA (1)...(19): siRNA sense strand
cgcuggaaauuaauggaga

SEQ ID NO: 2453590 - RNA, 19 nt, Homo sapiens
  misc_RNA (1)...(19): siRNA sense strand
gcauguuccuagugacgca

SEQ ID NO: 2453591 - RNA, 19 nt, Homo sapiens
  misc_RNA (1)...(19): siRNA sense strand
ggggagaagaagagagaaa

SEQ ID NO: 2453592 - RNA, 19 nt, Homo sapiens
  misc_RNA (1)...(19): siRNA sense strand
cguuaaaggagaagugaau

SEQ ID NO: 2453593 - RNA, 19 nt, Homo sapiens
  misc_RNA (1)...(19): siRNA sense strand
cagaauggcagcagcauga

SEQ ID NO: 2453594 - RNA, 19 nt, Homo sapiens
  misc_RNA (1)...(19): siRNA sense strand
caugaaaccucgagccgau

SEQ ID NO: 2453595 - RNA, 19 nt, Homo sapiens
  misc_RNA (1)...(19): siRNA sense strand
caggaaaaucaaaggauau

SEQ ID NO: 2453596 - RNA, 19 nt, Homo sapiens
  misc_RNA (1)...(19): siRNA sense strand
agugaaugcaaaugccaaa

SEQ ID NO: 2453597 - RNA, 19 nt, Homo sapiens
  misc_RNA (1)...(19): siRNA sense strand
uuauggugcugaaggacaa

SEQ ID NO: 2453598 - RNA, 19 nt, Homo sapiens
  misc_RNA (1)...(19): siRNA sense strand
cauuuauggcaaagugaau

SEQ ID NO: 2453599 - RNA, 19 nt, Homo sapiens
  misc_RNA (1)...(19): siRNA sense strand
aggagaagugaaugcaaau

SEQ ID NO: 2453600 - RNA, 19 nt, Homo sapiens
  misc_RNA (1)...(19): siRNA sense strand
cuuaaacaaccuacagaau

SEQ ID NO: 2453601 - RNA, 19 nt, Homo sapiens
  misc_RNA (1)...(19): siRNA sense strand
aaauagacacucugggcau

SEQ ID NO: 2453602 - RNA, 19 nt, Homo sapiens
  misc_RNA (1)...(19): siRNA sense strand
aguauugacacgcuggaaa

SEQ ID NO: 2453603 - RNA, 19 nt, Homo sapiens
  misc_RNA (1)...(19): siRNA sense strand
ccuuaaacaaccuacagaa

SEQ ID NO: 2453604 - RNA, 19 nt, Homo sapiens
  misc_RNA (1)...(19): siRNA sense strand
ugauuauggugcugaagga

SEQ ID NO: 2453605 - RNA, 19 nt, Homo sapiens
  misc_RNA (1)...(19): siRNA sense strand
gauugugauacgugggcau

SEQ ID NO: 2453606 - RNA, 19 nt, Homo sapiens
  misc_RNA (1)...(19): siRNA sense strand
ugaccuacuagcaggaaaa

SEQ ID NO: 2453607 - RNA, 19 nt, Homo sapiens
  misc_RNA (1)...(19): siRNA sense strand
acacagauuuaaagagcuc

SEQ ID NO: 2453608 - RNA, 19 nt, Homo sapiens
  misc_RNA (1)...(19): siRNA sense strand
ucguuaaaggagaagugaa

SEQ ID NO: 2453609 - RNA, 19 nt, Homo sapiens
  misc_RNA (1)...(19): siRNA sense strand
gcguacacagccuggagua

SEQ ID NO: 2453610 - RNA, 19 nt, Homo sapiens
  misc_RNA (1)...(19): siRNA sense strand
ggaucggcccagagaaaau

SEQ ID NO: 2453611 - RNA, 19 nt, Homo sapiens
  misc_RNA (1)...(19): siRNA sense strand
cuuuugagaucgugauuau

SEQ ID NO: 2453612 - RNA, 19 nt, Homo sapiens
  misc_RNA (1)...(19): siRNA sense strand
aucaaaggauauugcucua

SEQ ID NO: 2453613 - RNA, 19 nt, Homo sapiens
  misc_RNA (1)...(19): siRNA sense strand
cgcuggaaauuaauggaga

SEQ ID NO: 2453614 - RNA, 19 nt, Homo sapiens
  misc_RNA (1)...(19): siRNA sense strand
gcauguuccuagugacgca

SEQ ID NO: 2453615 - RNA, 19 nt, Homo sapiens
  misc_RNA (1)...(19): siRNA sense strand
ggggagaagaagagagaaa

SEQ ID NO: 2453616 - RNA, 19 nt, Homo sapiens
  misc_RNA (1)...(19): siRNA sense strand
cguuaaaggagaagugaau

SEQ ID NO: 2453617 - RNA, 19 nt, Homo sapiens
  misc_RNA (1)...(19): siRNA sense strand
cagaauggcagcagcauga

SEQ ID NO: 2453618 - RNA, 19 nt, Homo sapiens
  misc_RNA (1)...(19): siRNA sense strand
caugaaaccucgagccgau

SEQ ID NO: 2453619 - RNA, 19 nt, Homo sapiens
  misc_RNA (1)...(19): siRNA sense strand
caggaaaaucaaaggauau

SEQ ID NO: 2453620 - RNA, 19 nt, Homo sapiens
  misc_RNA (1)...(19): siRNA sense strand
agugaaugcaaaugccaaa

SEQ ID NO: 2453621 - RNA, 19 nt, Homo sapiens
  misc_RNA (1)...(19): siRNA sense strand
uuauggugcugaaggacaa

SEQ ID NO: 2453622 - RNA, 19 nt, Homo sapiens
  misc_RNA (1)...(19): siRNA sense strand
cauuuauggcaaagugaau

SEQ ID NO: 2453623 - RNA, 19 nt, Homo sapiens
  misc_RNA (1)...(19): siRNA sense strand
aggagaagugaaugcaaau

SEQ ID NO: 2453624 - RNA, 19 nt, Homo sapiens
  misc_RNA (1)...(19): siRNA sense strand
cuuaaacaaccuacagaau

SEQ ID NO: 2453625 - RNA, 19 nt, Homo sapiens
  misc_RNA (1)...(19): siRNA sense strand
aaauagacacucugggcau

SEQ ID NO: 2453626 - RNA, 19 nt, Homo sapiens
  misc_RNA (1)...(19): siRNA sense strand
aguauugacacgcuggaaa

SEQ ID NO: 2453627 - RNA, 19 nt, Homo sapiens
  misc_RNA (1)...(19): siRNA sense strand
ccuuaaacaaccuacagaa

SEQ ID NO: 2453628 - RNA, 19 nt, Homo sapiens
  misc_RNA (1)...(19): siRNA sense strand
ugauuauggugcugaagga

SEQ ID NO: 2453629 - RNA, 19 nt, Homo sapiens
  misc_RNA (1)...(19): siRNA sense strand
gauugugauacgugggcau

SEQ ID NO: 2453630 - RNA, 19 nt, Homo sapiens
  misc_RNA (1)...(19): siRNA sense strand
ugaccuacuagcaggaaaa

SEQ ID NO: 2453631 - RNA, 19 nt, Homo sapiens
  misc_RNA (1)...(19): siRNA sense strand
acacagauuuaaagagcuc

SEQ ID NO: 2453632 - RNA, 19 nt, Homo sapiens
  misc_RNA (1)...(19): siRNA sense strand
ucguuaaaggagaagugaa

SEQ ID NO: 2453633 - RNA, 19 nt, Homo sapiens
  misc_RNA (1)...(19): siRNA sense strand
gcguacacagccuggagua

SEQ ID NO: 2453634 - RNA, 19 nt, Homo sapiens
  misc_RNA (1)...(19): siRNA sense strand
ggaucggcccagagaaaau

SEQ ID NO: 2453635 - RNA, 19 nt, Homo sapiens
  misc_RNA (1)...(19): siRNA sense strand
cuuuugagaucgugauuau

SEQ ID NO: 2453636 - RNA, 19 nt, Homo sapiens
  misc_RNA (1)...(19): siRNA sense strand
aucaaaggauauugcucua

SEQ ID NO: 2453637 - RNA, 19 nt, Homo sapiens
  misc_RNA (1)...(19): siRNA sense strand
cgcuggaaauuaauggaga

SEQ ID NO: 2453638 - RNA, 19 nt, Homo sapiens
  misc_RNA (1)...(19): siRNA sense strand
gcauguuccuagugacgca

SEQ ID NO: 2453639 - RNA, 19 nt, Homo sapiens
  misc_RNA (1)...(19): siRNA sense strand
ucaucaacguggaaggcaa

SEQ ID NO: 2453640 - RNA, 19 nt, Homo sapiens
  misc_RNA (1)...(19): siRNA sense strand
cggcagauggagagcguuc

SEQ ID NO: 2453641 - RNA, 19 nt, Homo sapiens
  misc_RNA (1)...(19): siRNA sense strand
cuguggacauugcaagaau

SEQ ID NO: 2453642 - RNA, 19 nt, Homo sapiens
  misc_RNA (1)...(19): siRNA sense strand
cugcaaagugacaucccaa

SEQ ID NO: 2453643 - RNA, 19 nt, Homo sapiens
  misc_RNA (1)...(19): siRNA sense strand
aaauuaaagacgaggagga

SEQ ID NO: 2453644 - RNA, 19 nt, Homo sapiens
  misc_RNA (1)...(19): siRNA sense strand
aaacagaaauggugaggac

SEQ ID NO: 2453645 - RNA, 19 nt, Homo sapiens
  misc_RNA (1)...(19): siRNA sense strand
gcagauaaguuacgacgca

SEQ ID NO: 2453646 - RNA, 19 nt, Homo sapiens
  misc_RNA (1)...(19): siRNA sense strand
gaagaaagcugaaugaggu

SEQ ID NO: 2453647 - RNA, 19 nt, Homo sapiens
  misc_RNA (1)...(19): siRNA sense strand
gcucaaacagaaaugguga

SEQ ID NO: 2453648 - RNA, 19 nt, Homo sapiens
  misc_RNA (1)...(19): siRNA sense strand
agcggaaguuagaagcaaa

SEQ ID NO: 2453649 - RNA, 19 nt, Homo sapiens
  misc_RNA (1)...(19): siRNA sense strand
gggaggaggaugaggacac

SEQ ID NO: 2453650 - RNA, 19 nt, Homo sapiens
  misc_RNA (1)...(19): siRNA sense strand
aauuaaagacgaggaggaa

SEQ ID NO: 2453651 - RNA, 19 nt, Homo sapiens
  misc_RNA (1)...(19): siRNA sense strand
gaugaaaauucuaagcuga

SEQ ID NO: 2453652 - RNA, 19 nt, Homo sapiens
  misc_RNA (1)...(19): siRNA sense strand
ugaucaaggaggaaagcga

SEQ ID NO: 2453653 - RNA, 19 nt, Homo sapiens
  misc_RNA (1)...(19): siRNA sense strand
aagaucuggaagaggcaaa

SEQ ID NO: 2453654 - RNA, 19 nt, Homo sapiens
  misc_RNA (1)...(19): siRNA sense strand
gcggaaguuagaagcaaaa

SEQ ID NO: 2453655 - RNA, 19 nt, Homo sapiens
  misc_RNA (1)...(19): siRNA sense strand
caaacgggcuguaaaggca

SEQ ID NO: 2453656 - RNA, 19 nt, Homo sapiens
  misc_RNA (1)...(19): siRNA sense strand
cuguaaaggcagaaaacca

SEQ ID NO: 2453657 - RNA, 19 nt, Homo sapiens
  misc_RNA (1)...(19): siRNA sense strand
gaucaguggcacaagggaa

SEQ ID NO: 2453658 - RNA, 19 nt, Homo sapiens
  misc_RNA (1)...(19): siRNA sense strand
ucagugaacaugagggaga

SEQ ID NO: 2453659 - RNA, 19 nt, Homo sapiens
  misc_RNA (1)...(19): siRNA sense strand
gggaauuggaagugguucu

SEQ ID NO: 2453660 - RNA, 19 nt, Homo sapiens
  misc_RNA (1)...(19): siRNA sense strand
gcgaauagcugaaagggug

SEQ ID NO: 2453661 - RNA, 19 nt, Homo sapiens
  misc_RNA (1)...(19): siRNA sense strand
auaaccaagugcugggaau

SEQ ID NO: 2453662 - RNA, 19 nt, Homo sapiens
  misc_RNA (1)...(19): siRNA sense strand
cugaugaaguagaugcuga

SEQ ID NO: 2453663 - RNA, 19 nt, Homo sapiens
  misc_RNA (1)...(19): siRNA sense strand
ucaacauggcugagagagu

SEQ ID NO: 2453664 - RNA, 19 nt, Homo sapiens
  misc_RNA (1)...(19): siRNA sense strand
cgaauagcugaaaggguga

SEQ ID NO: 2453665 - RNA, 19 nt, Homo sapiens
  misc_RNA (1)...(19): siRNA sense strand
caguauggcuugacccuca

SEQ ID NO: 2453666 - RNA, 19 nt, Homo sapiens
  misc_RNA (1)...(19): siRNA sense strand
agaagauuguggcuggcua

SEQ ID NO: 2453667 - RNA, 19 nt, Homo sapiens
  misc_RNA (1)...(19): siRNA sense strand
caucaacauggcugagaga

SEQ ID NO: 2453668 - RNA, 19 nt, Homo sapiens
  misc_RNA (1)...(19): siRNA sense strand
gugaauacagcuaucaaaa

SEQ ID NO: 2453669 - RNA, 19 nt, Homo sapiens
  misc_RNA (1)...(19): siRNA sense strand
agugaagugaauacagcua

SEQ ID NO: 2453670 - RNA, 19 nt, Homo sapiens
  misc_RNA (1)...(19): siRNA sense strand
gcugaaagggugaagcaag

SEQ ID NO: 2453671 - RNA, 19 nt, Homo sapiens
  misc_RNA (1)...(19): siRNA sense strand
aggaaggagucgagugaca

SEQ ID NO: 2453672 - RNA, 19 nt, Homo sapiens
  misc_RNA (1)...(19): siRNA sense strand
gcaacaaggcucuggccaa

SEQ ID NO: 2453673 - RNA, 19 nt, Homo sapiens
  misc_RNA (1)...(19): siRNA sense strand
gggaugugacagagaggaa

SEQ ID NO: 2453674 - RNA, 19 nt, Homo sapiens
  misc_RNA (1)...(19): siRNA sense strand
ccaaugagcuuucgggacu

SEQ ID NO: 2453675 - RNA, 19 nt, Homo sapiens
  misc_RNA (1)...(19): siRNA sense strand
gcuccagaacaaaggacua

SEQ ID NO: 2453676 - RNA, 19 nt, Homo sapiens
  misc_RNA (1)...(19): siRNA sense strand
gauaauuugcccaggacau

SEQ ID NO: 2453677 - RNA, 19 nt, Homo sapiens
  misc_RNA (1)...(19): siRNA sense strand
ccagagaaucagaaguuca

SEQ ID NO: 2453678 - RNA, 19 nt, Homo sapiens
  misc_RNA (1)...(19): siRNA sense strand
ggcuguuugcugugaguaa

SEQ ID NO: 2453679 - RNA, 19 nt, Homo sapiens
  misc_RNA (1)...(19): siRNA sense strand
ugaaggagcgcuuggccaa

SEQ ID NO: 2453680 - RNA, 19 nt, Homo sapiens
  misc_RNA (1)...(19): siRNA sense strand
cuacagugauagagagcac

SEQ ID NO: 2453681 - RNA, 19 nt, Homo sapiens
  misc_RNA (1)...(19): siRNA sense strand
ggaugaauuuaaagagcuc

SEQ ID NO: 2453682 - RNA, 19 nt, Homo sapiens
  misc_RNA (1)...(19): siRNA sense strand
acacaguuccugagaggga

SEQ ID NO: 2453683 - RNA, 19 nt, Homo sapiens
  misc_RNA (1)...(19): siRNA sense strand
ccugagagggagaggauac

SEQ ID NO: 2453684 - RNA, 19 nt, Homo sapiens
  misc_RNA (1)...(19): siRNA sense strand
ccaacaagagagagggccu

SEQ ID NO: 2453685 - RNA, 19 nt, Homo sapiens
  misc_RNA (1)...(19): siRNA sense strand
gaacaaaggacuaacagac

SEQ ID NO: 2453686 - RNA, 19 nt, Homo sapiens
  misc_RNA (1)...(19): siRNA sense strand
ggaaguuuggggaggagaa

SEQ ID NO: 2453687 - RNA, 19 nt, Homo sapiens
  misc_RNA (1)...(19): siRNA sense strand
cugaaguauggauggauga

SEQ ID NO: 2453688 - RNA, 19 nt, Homo sapiens
  misc_RNA (1)...(19): siRNA sense strand
agaaacugccccagagaau

SEQ ID NO: 2453689 - RNA, 19 nt, Homo sapiens
  misc_RNA (1)...(19): siRNA sense strand
uugcugugaguaagaaaua

SEQ ID NO: 2453690 - RNA, 19 nt, Homo sapiens
  misc_RNA (1)...(19): siRNA sense strand
uauaaugaagccuggucaa

SEQ ID NO: 2453691 - RNA, 19 nt, Homo sapiens
  misc_RNA (1)...(19): siRNA sense strand
guguccaggcugcgaggaa

SEQ ID NO: 2453692 - RNA, 19 nt, Homo sapiens
  misc_RNA (1)...(19): siRNA sense strand
gcacacaguuccugagagg

SEQ ID NO: 2453693 - RNA, 19 nt, Homo sapiens
  misc_RNA (1)...(19): siRNA sense strand
aagaagagauagugcgcuu

SEQ ID NO: 2453694 - RNA, 19 nt, Homo sapiens
  misc_RNA (1)...(19): siRNA sense strand
ccuccagaacaaugagcua

SEQ ID NO: 2453695 - RNA, 19 nt, Homo sapiens
  misc_RNA (1)...(19): siRNA sense strand
aagggaagggcgaggaaca

SEQ ID NO: 2453696 - RNA, 19 nt, Homo sapiens
  misc_RNA (1)...(19): siRNA sense strand
ucaagaaagggaagggcga

SEQ ID NO: 2453697 - RNA, 19 nt, Homo sapiens
  misc_RNA (1)...(19): siRNA sense strand
gaggaaaagcugaaggagu

SEQ ID NO: 2453698 - RNA, 19 nt, Homo sapiens
  misc_RNA (1)...(19): siRNA sense strand
gugaaugcgaagaagagau

SEQ ID NO: 2453699 - RNA, 19 nt, Homo sapiens
  misc_RNA (1)...(19): siRNA sense strand
gggacaagcgggcagacau

SEQ ID NO: 2453700 - RNA, 19 nt, Homo sapiens
  misc_RNA (1)...(19): siRNA sense strand
ucaaggaagugcuggguuc

SEQ ID NO: 2453701 - RNA, 19 nt, Homo sapiens
  misc_RNA (1)...(19): siRNA sense strand
acaaugagcuacuccguga

SEQ ID NO: 2453702 - RNA, 19 nt, Homo sapiens
  misc_RNA (1)...(19): siRNA sense strand
gcggugaaugcgaagaaga

SEQ ID NO: 2453703 - RNA, 19 nt, Homo sapiens
  misc_RNA (1)...(19): siRNA sense strand
guacaaugcugcugccuuc

SEQ ID NO: 2453704 - RNA, 19 nt, Homo sapiens
  misc_RNA (1)...(19): siRNA sense strand
ggacaagcgggcagacauc

SEQ ID NO: 2453705 - RNA, 19 nt, Homo sapiens
  misc_RNA (1)...(19): siRNA sense strand
agggaagggcgaggaacaa

SEQ ID NO: 2453706 - RNA, 19 nt, Homo sapiens
  misc_RNA (1)...(19): siRNA sense strand
aaggagaaguugauggaga

SEQ ID NO: 2453707 - RNA, 19 nt, Homo sapiens
  misc_RNA (1)...(19): siRNA sense strand
cagacagggagucggagaa

SEQ ID NO: 2453708 - RNA, 19 nt, Homo sapiens
  misc_RNA (1)...(19): siRNA sense strand
guuccaaaaucuaaggaga

SEQ ID NO: 2453709 - RNA, 19 nt, Homo sapiens
  misc_RNA (1)...(19): siRNA sense strand
gcagacagggagucggaga

SEQ ID NO: 2453710 - RNA, 19 nt, Homo sapiens
  misc_RNA (1)...(19): siRNA sense strand
aagcaaaaguccagcagga

SEQ ID NO: 2453711 - RNA, 19 nt, Homo sapiens
  misc_RNA (1)...(19): siRNA sense strand
caaaaguccagcaggaaga

SEQ ID NO: 2453712 - RNA, 19 nt, Homo sapiens
  misc_RNA (1)...(19): siRNA sense strand
ggacacugggguugggaaa

SEQ ID NO: 2453713 - RNA, 19 nt, Homo sapiens
  misc_RNA (1)...(19): siRNA sense strand
gguugagacaagugcaaaa

SEQ ID NO: 2453714 - RNA, 19 nt, Homo sapiens
  misc_RNA (1)...(19): siRNA sense strand
gcugaaagaacauggucca

SEQ ID NO: 2453715 - RNA, 19 nt, Homo sapiens
  misc_RNA (1)...(19): siRNA sense strand
cugaaggaugcuaaggaau

SEQ ID NO: 2453716 - RNA, 19 nt, Homo sapiens
  misc_RNA (1)...(19): siRNA sense strand
aaauggaaacaauggaaca

SEQ ID NO: 2453717 - RNA, 19 nt, Homo sapiens
  misc_RNA (1)...(19): siRNA sense strand
aggaauacgcugaauccau

SEQ ID NO: 2453718 - RNA, 19 nt, Homo sapiens
  misc_RNA (1)...(19): siRNA sense strand
uggcgauacgggagcucaa

SEQ ID NO: 2453719 - RNA, 19 nt, Homo sapiens
  misc_RNA (1)...(19): siRNA sense strand
gugguugagacaagugcaa

SEQ ID NO: 2453720 - RNA, 19 nt, Homo sapiens
  misc_RNA (1)...(19): siRNA sense strand
aguucaaaguagagagaaa

SEQ ID NO: 2453721 - RNA, 19 nt, Homo sapiens
  misc_RNA (1)...(19): siRNA sense strand
augcaauacuuguggaaaa

SEQ ID NO: 2453722 - RNA, 19 nt, Homo sapiens
  misc_RNA (1)...(19): siRNA sense strand
aauucauaccggagagaaa

SEQ ID NO: 2453723 - RNA, 19 nt, Homo sapiens
  misc_RNA (1)...(19): siRNA sense strand
acucauuguucaucagaaa

SEQ ID NO: 2453724 - RNA, 19 nt, Homo sapiens
  misc_RNA (1)...(19): siRNA sense strand
aauucauacaggagagaaa

SEQ ID NO: 2453725 - RNA, 19 nt, Homo sapiens
  misc_RNA (1)...(19): siRNA sense strand
acacaagagugaagcccua

SEQ ID NO: 2453726 - RNA, 19 nt, Homo sapiens
  misc_RNA (1)...(19): siRNA sense strand
ccucaauauacaucagaaa

SEQ ID NO: 2453727 - RNA, 19 nt, Homo sapiens
  misc_RNA (1)...(19): siRNA sense strand
ucacagugcaucagagaau

SEQ ID NO: 2453728 - RNA, 19 nt, Homo sapiens
  misc_RNA (1)...(19): siRNA sense strand
aauucauacuggagagaga

SEQ ID NO: 2453729 - RNA, 19 nt, Homo sapiens
  misc_RNA (1)...(19): siRNA sense strand
aguucacacaggagagaaa

SEQ ID NO: 2453730 - RNA, 19 nt, Homo sapiens
  misc_RNA (1)...(19): siRNA sense strand
agucacaacuucagguaca

SEQ ID NO: 2453731 - RNA, 19 nt, Homo sapiens
  misc_RNA (1)...(19): siRNA sense strand
cgccaaauuugaaaagaua

SEQ ID NO: 2453732 - RNA, 19 nt, Homo sapiens
  misc_RNA (1)...(19): siRNA sense strand
ucucauuacacaucagaaa

SEQ ID NO: 2453733 - RNA, 19 nt, Homo sapiens
  misc_RNA (1)...(19): siRNA sense strand
augcaaugaauguggaaaa

SEQ ID NO: 2453734 - RNA, 19 nt, Homo sapiens
  misc_RNA (1)...(19): siRNA sense strand
gggaaggccuuuaguggca

SEQ ID NO: 2453735 - RNA, 19 nt, Homo sapiens
  misc_RNA (1)...(19): siRNA sense strand
ccauaugagugcaguaacu

SEQ ID NO: 2453736 - RNA, 19 nt, Homo sapiens
  misc_RNA (1)...(19): siRNA sense strand
ccucguuacacauaagaaa

SEQ ID NO: 2453737 - RNA, 19 nt, Homo sapiens
  misc_RNA (1)...(19): siRNA sense strand
gggaaagccuucaaccaga

SEQ ID NO: 2453738 - RNA, 19 nt, Homo sapiens
  misc_RNA (1)...(19): siRNA sense strand
acucaagaugcaucagaaa

SEQ ID NO: 2453739 - RNA, 19 nt, Homo sapiens
  misc_RNA (1)...(19): siRNA sense strand
acgaauucacacaggagaa

SEQ ID NO: 2453740 - RNA, 19 nt, Homo sapiens
  misc_RNA (1)...(19): siRNA sense strand
uggcaaagcauucacacaa

SEQ ID NO: 2453741 - RNA, 19 nt, Homo sapiens
  misc_RNA (1)...(19): siRNA sense strand
aacucauacaggagagaaa

SEQ ID NO: 2453742 - RNA, 19 nt, Homo sapiens
  misc_RNA (1)...(19): siRNA sense strand
ccgaauaugggaaggucuu

SEQ ID NO: 2453743 - RNA, 19 nt, Homo sapiens
  misc_RNA (1)...(19): siRNA sense strand
guguggcaucugugggaaa

SEQ ID NO: 2453744 - RNA, 19 nt, Homo sapiens
  misc_RNA (1)...(19): siRNA sense strand
ccuuaugagugcagugacu

SEQ ID NO: 2453745 - RNA, 19 nt, Homo sapiens
  misc_RNA (1)...(19): siRNA sense strand
gugcaauaaaugugggaag

SEQ ID NO: 2453746 - RNA, 19 nt, Homo sapiens
  misc_RNA (1)...(19): siRNA sense strand
agucacagcucaaaguaca

SEQ ID NO: 2453747 - RNA, 19 nt, Homo sapiens
  misc_RNA (1)...(19): siRNA sense strand
ugaaaguucuugcaggaga

SEQ ID NO: 2453748 - RNA, 19 nt, Homo sapiens
  misc_RNA (1)...(19): siRNA sense strand
ucauguuggagcaaggaaa

SEQ ID NO: 2453749 - RNA, 19 nt, Homo sapiens
  misc_RNA (1)...(19): siRNA sense strand
cagaagucagaguugauua

SEQ ID NO: 2453750 - RNA, 19 nt, Homo sapiens
  misc_RNA (1)...(19): siRNA sense strand
agucagaguugauuacaca

SEQ ID NO: 2453751 - RNA, 19 nt, Homo sapiens
  misc_RNA (1)...(19): siRNA sense strand
ggagagaaauuaugggacc

SEQ ID NO: 2453752 - RNA, 19 nt, Homo sapiens
  misc_RNA (1)...(19): siRNA sense strand
ggaaaggccuucacccaga

SEQ ID NO: 2453753 - RNA, 19 nt, Homo sapiens
  misc_RNA (1)...(19): siRNA sense strand
ggagaaaagcucuauguau

SEQ ID NO: 2453754 - RNA, 19 nt, Homo sapiens
  misc_RNA (1)...(19): siRNA sense strand
gcgccaaauuugaaaagau

SEQ ID NO: 2453755 - RNA, 19 nt, Homo sapiens
  misc_RNA (1)...(19): siRNA sense strand
ccuuaugaaugcagugacu

SEQ ID NO: 2453756 - RNA, 19 nt, Homo sapiens
  misc_RNA (1)...(19): siRNA sense strand
ccuuaugaaugcagugacu

SEQ ID NO: 2453757 - RNA, 19 nt, Homo sapiens
  misc_RNA (1)...(19): siRNA sense strand
gggaagucuuucacuaaaa

SEQ ID NO: 2453758 - RNA, 19 nt, Homo sapiens
  misc_RNA (1)...(19): siRNA sense strand
aacacacacuggagacaaa

SEQ ID NO: 2453759 - RNA, 19 nt, Homo sapiens
  misc_RNA (1)...(19): siRNA sense strand
ggagagaagccuuacgugu

SEQ ID NO: 2453760 - RNA, 19 nt, Homo sapiens
  misc_RNA (1)...(19): siRNA sense strand
acacaaaaguccacacuca

SEQ ID NO: 2453761 - RNA, 19 nt, Homo sapiens
  misc_RNA (1)...(19): siRNA sense strand
cgaauucacacaggagaaa

SEQ ID NO: 2453762 - RNA, 19 nt, Homo sapiens
  misc_RNA (1)...(19): siRNA sense strand
gugggaagucuuucacuaa

SEQ ID NO: 2453763 - RNA, 19 nt, Homo sapiens
  misc_RNA (1)...(19): siRNA sense strand
gagagaaauuaugggacca

SEQ ID NO: 2453764 - RNA, 19 nt, Homo sapiens
  misc_RNA (1)...(19): siRNA sense strand
augcacugacuguggcaaa

SEQ ID NO: 2453765 - RNA, 19 nt, Homo sapiens
  misc_RNA (1)...(19): siRNA sense strand
ggacaggccuucauccaga

SEQ ID NO: 2453766 - RNA, 19 nt, Homo sapiens
  misc_RNA (1)...(19): siRNA sense strand
cccuauauauguaccgaau

SEQ ID NO: 2453767 - RNA, 19 nt, Homo sapiens
  misc_RNA (1)...(19): siRNA sense strand
cccuauaugugcaauaaau

SEQ ID NO: 2453768 - RNA, 19 nt, Homo sapiens
  misc_RNA (1)...(19): siRNA sense strand
aacccauaugagagagaaa

SEQ ID NO: 2453769 - RNA, 19 nt, Homo sapiens
  misc_RNA (1)...(19): siRNA sense strand
ucuucaggcaucagagaau

SEQ ID NO: 2453770 - RNA, 19 nt, Homo sapiens
  misc_RNA (1)...(19): siRNA sense strand
ggaaaggaaccaugggcac

SEQ ID NO: 2453771 - RNA, 19 nt, Homo sapiens
  misc_RNA (1)...(19): siRNA sense strand
aauaaaugugggaaggcau

SEQ ID NO: 2453772 - RNA, 19 nt, Homo sapiens
  misc_RNA (1)...(19): siRNA sense strand
ucaaaguacaccugaaagu

SEQ ID NO: 2453773 - RNA, 19 nt, Homo sapiens
  misc_RNA (1)...(19): siRNA sense strand
aguucaaaguagagagaaa

SEQ ID NO: 2453774 - RNA, 19 nt, Homo sapiens
  misc_RNA (1)...(19): siRNA sense strand
augcaauacuuguggaaaa

SEQ ID NO: 2453775 - RNA, 19 nt, Homo sapiens
  misc_RNA (1)...(19): siRNA sense strand
aauucauaccggagagaaa

SEQ ID NO: 2453776 - RNA, 19 nt, Homo sapiens
  misc_RNA (1)...(19): siRNA sense strand
acucauuguucaucagaaa

SEQ ID NO: 2453777 - RNA, 19 nt, Homo sapiens
  misc_RNA (1)...(19): siRNA sense strand
aauucauacaggagagaaa

SEQ ID NO: 2453778 - RNA, 19 nt, Homo sapiens
  misc_RNA (1)...(19): siRNA sense strand
acacaagagugaagcccua

SEQ ID NO: 2453779 - RNA, 19 nt, Homo sapiens
  misc_RNA (1)...(19): siRNA sense strand
ccucaauauacaucagaaa

SEQ ID NO: 2453780 - RNA, 19 nt, Homo sapiens
  misc_RNA (1)...(19): siRNA sense strand
ucacagugcaucagagaau

SEQ ID NO: 2453781 - RNA, 19 nt, Homo sapiens
  misc_RNA (1)...(19): siRNA sense strand
aauucauacuggagagaga

SEQ ID NO: 2453782 - RNA, 19 nt, Homo sapiens
  misc_RNA (1)...(19): siRNA sense strand
aguucacacaggagagaaa

SEQ ID NO: 2453783 - RNA, 19 nt, Homo sapiens
  misc_RNA (1)...(19): siRNA sense strand
agucacaacuucagguaca

SEQ ID NO: 2453784 - RNA, 19 nt, Homo sapiens
  misc_RNA (1)...(19): siRNA sense strand
cgccaaauuugaaaagaua

SEQ ID NO: 2453785 - RNA, 19 nt, Homo sapiens
  misc_RNA (1)...(19): siRNA sense strand
ucucauuacacaucagaaa

SEQ ID NO: 2453786 - RNA, 19 nt, Homo sapiens
  misc_RNA (1)...(19): siRNA sense strand
augcaaugaauguggaaaa

SEQ ID NO: 2453787 - RNA, 19 nt, Homo sapiens
  misc_RNA (1)...(19): siRNA sense strand
gggaaggccuuuaguggca

SEQ ID NO: 2453788 - RNA, 19 nt, Homo sapiens
  misc_RNA (1)...(19): siRNA sense strand
ccauaugagugcaguaacu

SEQ ID NO: 2453789 - RNA, 19 nt, Homo sapiens
  misc_RNA (1)...(19): siRNA sense strand
ccucguuacacauaagaaa

SEQ ID NO: 2453790 - RNA, 19 nt, Homo sapiens
  misc_RNA (1)...(19): siRNA sense strand
gggaaagccuucaaccaga

SEQ ID NO: 2453791 - RNA, 19 nt, Homo sapiens
  misc_RNA (1)...(19): siRNA sense strand
acucaagaugcaucagaaa

SEQ ID NO: 2453792 - RNA, 19 nt, Homo sapiens
  misc_RNA (1)...(19): siRNA sense strand
acgaauucacacaggagaa

SEQ ID NO: 2453793 - RNA, 19 nt, Homo sapiens
  misc_RNA (1)...(19): siRNA sense strand
uggcaaagcauucacacaa

SEQ ID NO: 2453794 - RNA, 19 nt, Homo sapiens
  misc_RNA (1)...(19): siRNA sense strand
aacucauacaggagagaaa

SEQ ID NO: 2453795 - RNA, 19 nt, Homo sapiens
  misc_RNA (1)...(19): siRNA sense strand
ccgaauaugggaaggucuu

SEQ ID NO: 2453796 - RNA, 19 nt, Homo sapiens
  misc_RNA (1)...(19): siRNA sense strand
guguggcaucugugggaaa

SEQ ID NO: 2453797 - RNA, 19 nt, Homo sapiens
  misc_RNA (1)...(19): siRNA sense strand
ccuuaugagugcagugacu

SEQ ID NO: 2453798 - RNA, 19 nt, Homo sapiens
  misc_RNA (1)...(19): siRNA sense strand
gugcaauaaaugugggaag

SEQ ID NO: 2453799 - RNA, 19 nt, Homo sapiens
  misc_RNA (1)...(19): siRNA sense strand
agucacagcucaaaguaca

SEQ ID NO: 2453800 - RNA, 19 nt, Homo sapiens
  misc_RNA (1)...(19): siRNA sense strand
ugaaaguucuugcaggaga

SEQ ID NO: 2453801 - RNA, 19 nt, Homo sapiens
  misc_RNA (1)...(19): siRNA sense strand
ucauguuggagcaaggaaa

SEQ ID NO: 2453802 - RNA, 19 nt, Homo sapiens
  misc_RNA (1)...(19): siRNA sense strand
cagaagucagaguugauua

SEQ ID NO: 2453803 - RNA, 19 nt, Homo sapiens
  misc_RNA (1)...(19): siRNA sense strand
agucagaguugauuacaca

SEQ ID NO: 2453804 - RNA, 19 nt, Homo sapiens
  misc_RNA (1)...(19): siRNA sense strand
ggagagaaauuaugggacc

SEQ ID NO: 2453805 - RNA, 19 nt, Homo sapiens
  misc_RNA (1)...(19): siRNA sense strand
ggaaaggccuucacccaga

SEQ ID NO: 2453806 - RNA, 19 nt, Homo sapiens
  misc_RNA (1)...(19): siRNA sense strand
ggagaaaagcucuauguau

SEQ ID NO: 2453807 - RNA, 19 nt, Homo sapiens
  misc_RNA (1)...(19): siRNA sense strand
gcgccaaauuugaaaagau

SEQ ID NO: 2453808 - RNA, 19 nt, Homo sapiens
  misc_RNA (1)...(19): siRNA sense strand
ccuuaugaaugcagugacu

SEQ ID NO: 2453809 - RNA, 19 nt, Homo sapiens
  misc_RNA (1)...(19): siRNA sense strand
ccuuaugaaugcagugacu

SEQ ID NO: 2453810 - RNA, 19 nt, Homo sapiens
  misc_RNA (1)...(19): siRNA sense strand
gggaagucuuucacuaaaa

SEQ ID NO: 2453811 - RNA, 19 nt, Homo sapiens
  misc_RNA (1)...(19): siRNA sense strand
aacacacacuggagacaaa

SEQ ID NO: 2453812 - RNA, 19 nt, Homo sapiens
  misc_RNA (1)...(19): siRNA sense strand
ggagagaagccuuacgugu

SEQ ID NO: 2453813 - RNA, 19 nt, Homo sapiens
  misc_RNA (1)...(19): siRNA sense strand
acacaaaaguccacacuca

SEQ ID NO: 2453814 - RNA, 19 nt, Homo sapiens
  misc_RNA (1)...(19): siRNA sense strand
cgaauucacacaggagaaa

SEQ ID NO: 2453815 - RNA, 19 nt, Homo sapiens
  misc_RNA (1)...(19): siRNA sense strand
gugggaagucuuucacuaa

SEQ ID NO: 2453816 - RNA, 19 nt, Homo sapiens
  misc_RNA (1)...(19): siRNA sense strand
gagagaaauuaugggacca

SEQ ID NO: 2453817 - RNA, 19 nt, Homo sapiens
  misc_RNA (1)...(19): siRNA sense strand
augcacugacuguggcaaa

SEQ ID NO: 2453818 - RNA, 19 nt, Homo sapiens
  misc_RNA (1)...(19): siRNA sense strand
ggacaggccuucauccaga

SEQ ID NO: 2453819 - RNA, 19 nt, Homo sapiens
  misc_RNA (1)...(19): siRNA sense strand
cccuauauauguaccgaau

SEQ ID NO: 2453820 - RNA, 19 nt, Homo sapiens
  misc_RNA (1)...(19): siRNA sense strand
cccuauaugugcaauaaau

SEQ ID NO: 2453821 - RNA, 19 nt, Homo sapiens
  misc_RNA (1)...(19): siRNA sense strand
aacccauaugagagagaaa

SEQ ID NO: 2453822 - RNA, 19 nt, Homo sapiens
  misc_RNA (1)...(19): siRNA sense strand
ucuucaggcaucagagaau

SEQ ID NO: 2453823 - RNA, 19 nt, Homo sapiens
  misc_RNA (1)...(19): siRNA sense strand
ggaaaggaaccaugggcac

SEQ ID NO: 2453824 - RNA, 19 nt, Homo sapiens
  misc_RNA (1)...(19): siRNA sense strand
aauaaaugugggaaggcau

SEQ ID NO: 2453825 - RNA, 19 nt, Homo sapiens
  misc_RNA (1)...(19): siRNA sense strand
ucaaaguacaccugaaagu

SEQ ID NO: 2453826 - RNA, 19 nt, Homo sapiens
  misc_RNA (1)...(19): siRNA sense strand
gaaagaagguagaugggaa

SEQ ID NO: 2453827 - RNA, 19 nt, Homo sapiens
  misc_RNA (1)...(19): siRNA sense strand
cagaacaacugcaggccaa

SEQ ID NO: 2453828 - RNA, 19 nt, Homo sapiens
  misc_RNA (1)...(19): siRNA sense strand
agaccaaagagcagaggaa

SEQ ID NO: 2453829 - RNA, 19 nt, Homo sapiens
  misc_RNA (1)...(19): siRNA sense strand
aguaccagcaggagaguaa

SEQ ID NO: 2453830 - RNA, 19 nt, Homo sapiens
  misc_RNA (1)...(19): siRNA sense strand
aggaaagaugauagaaaga

SEQ ID NO: 2453831 - RNA, 19 nt, Homo sapiens
  misc_RNA (1)...(19): siRNA sense strand
uuacagaguugaaggcuga

SEQ ID NO: 2453832 - RNA, 19 nt, Homo sapiens
  misc_RNA (1)...(19): siRNA sense strand
ccauuauaacagccagaaa

SEQ ID NO: 2453833 - RNA, 19 nt, Homo sapiens
  misc_RNA (1)...(19): siRNA sense strand
ccugaguggugguggccau

SEQ ID NO: 2453834 - RNA, 19 nt, Homo sapiens
  misc_RNA (1)...(19): siRNA sense strand
cauuauaacagccagaaaa

SEQ ID NO: 2453835 - RNA, 19 nt, Homo sapiens
  misc_RNA (1)...(19): siRNA sense strand
ggacugaguaccagcagga

SEQ ID NO: 2453836 - RNA, 19 nt, Homo sapiens
  misc_RNA (1)...(19): siRNA sense strand
gaugauagaaagaagguag

SEQ ID NO: 2453837 - RNA, 19 nt, Homo sapiens
  misc_RNA (1)...(19): siRNA sense strand
uuagagaaagagaagaaga

SEQ ID NO: 2453838 - RNA, 19 nt, Homo sapiens
  misc_RNA (1)...(19): siRNA sense strand
accaaagagcagaggaaac

SEQ ID NO: 2453839 - RNA, 19 nt, Homo sapiens
  misc_RNA (1)...(19): siRNA sense strand
agaagauuacagaguugaa

SEQ ID NO: 2453840 - RNA, 19 nt, Homo sapiens
  misc_RNA (1)...(19): siRNA sense strand
gcuuuguccaagagcaaga

SEQ ID NO: 2453841 - RNA, 19 nt, Homo sapiens
  misc_RNA (1)...(19): siRNA sense strand
ccugagagcuccugcguca

SEQ ID NO: 2453842 - RNA, 19 nt, Homo sapiens
  misc_RNA (1)...(19): siRNA sense strand
ugucagagcugcaggguug

SEQ ID NO: 2453843 - RNA, 19 nt, Homo sapiens
  misc_RNA (1)...(19): siRNA sense strand
gggaggagucagccaggau

SEQ ID NO: 2453844 - RNA, 19 nt, Homo sapiens
  misc_RNA (1)...(19): siRNA sense strand
gugagaagcuggugggcga

SEQ ID NO: 2453845 - RNA, 19 nt, Homo sapiens
  misc_RNA (1)...(19): siRNA sense strand
aggaggagaaggaggagaa

SEQ ID NO: 2453846 - RNA, 19 nt, Homo sapiens
  misc_RNA (1)...(19): siRNA sense strand
gaggaaaauaacaggcaaa

SEQ ID NO: 2453847 - RNA, 19 nt, Homo sapiens
  misc_RNA (1)...(19): siRNA sense strand
aggagaaggaggagaagga

SEQ ID NO: 2453848 - RNA, 19 nt, Homo sapiens
  misc_RNA (1)...(19): siRNA sense strand
gaguauuuguggaugguca

SEQ ID NO: 2453849 - RNA, 19 nt, Homo sapiens
  misc_RNA (1)...(19): siRNA sense strand
ccaagaagaggcugcgcua

SEQ ID NO: 2453850 - RNA, 19 nt, Homo sapiens
  misc_RNA (1)...(19): siRNA sense strand
uggcagaggcggagaucga

SEQ ID NO: 2453851 - RNA, 19 nt, Homo sapiens
  misc_RNA (1)...(19): siRNA sense strand
ccguggaugcggaggaaaa

SEQ ID NO: 2453852 - RNA, 19 nt, Homo sapiens
  misc_RNA (1)...(19): siRNA sense strand
cagaggaggagaaggagga

SEQ ID NO: 2453853 - RNA, 19 nt, Homo sapiens
  misc_RNA (1)...(19): siRNA sense strand
ccaaaguaggagaaaccau

SEQ ID NO: 2453854 - RNA, 19 nt, Homo sapiens
  misc_RNA (1)...(19): siRNA sense strand
gggagaagagugauccaga

SEQ ID NO: 2453855 - RNA, 19 nt, Homo sapiens
  misc_RNA (1)...(19): siRNA sense strand
ggaggaaaauaacaggcaa

SEQ ID NO: 2453856 - RNA, 19 nt, Homo sapiens
  misc_RNA (1)...(19): siRNA sense strand
ccucaguaagguucaggaa

SEQ ID NO: 2453857 - RNA, 19 nt, Homo sapiens
  misc_RNA (1)...(19): siRNA sense strand
uguuuguacucaucagaau

SEQ ID NO: 2453858 - RNA, 19 nt, Homo sapiens
  misc_RNA (1)...(19): siRNA sense strand
gcuaaugaugacagcacca

SEQ ID NO: 2453859 - RNA, 19 nt, Homo sapiens
  misc_RNA (1)...(19): siRNA sense strand
aggaaaacgaagagaagaa

SEQ ID NO: 2453860 - RNA, 19 nt, Homo sapiens
  misc_RNA (1)...(19): siRNA sense strand
ggguugauugugaaagaaa

SEQ ID NO: 2453861 - RNA, 19 nt, Homo sapiens
  misc_RNA (1)...(19): siRNA sense strand
aauugguguuuguggguaa

SEQ ID NO: 2453862 - RNA, 19 nt, Homo sapiens
  misc_RNA (1)...(19): siRNA sense strand
gaaaauacuucgagccaga

SEQ ID NO: 2453863 - RNA, 19 nt, Homo sapiens
  misc_RNA (1)...(19): siRNA sense strand
agaaagacuuccugcgcau

SEQ ID NO: 2453864 - RNA, 19 nt, Homo sapiens
  misc_RNA (1)...(19): siRNA sense strand
aggaauaagcacuauggaa

SEQ ID NO: 2453865 - RNA, 19 nt, Homo sapiens
  misc_RNA (1)...(19): siRNA sense strand
uuucauaacaacagaguca

SEQ ID NO: 2453866 - RNA, 19 nt, Homo sapiens
  misc_RNA (1)...(19): siRNA sense strand
gugacagagcagcaagaua

SEQ ID NO: 2453867 - RNA, 19 nt, Homo sapiens
  misc_RNA (1)...(19): siRNA sense strand
ggauugaccaugaggggaa

SEQ ID NO: 2453868 - RNA, 19 nt, Homo sapiens
  misc_RNA (1)...(19): siRNA sense strand
gguugauugugaaagaaau

SEQ ID NO: 2453869 - RNA, 19 nt, Homo sapiens
  misc_RNA (1)...(19): siRNA sense strand
guauaaggauaaaagggaa

SEQ ID NO: 2453870 - RNA, 19 nt, Homo sapiens
  misc_RNA (1)...(19): siRNA sense strand
gaacauguguauauggagu

SEQ ID NO: 2453871 - RNA, 19 nt, Homo sapiens
  misc_RNA (1)...(19): siRNA sense strand
cugaaaaccugcagcucaa

SEQ ID NO: 2453872 - RNA, 19 nt, Homo sapiens
  misc_RNA (1)...(19): siRNA sense strand
gugcaguacuauguggaaa

SEQ ID NO: 2453873 - RNA, 19 nt, Homo sapiens
  misc_RNA (1)...(19): siRNA sense strand
cuggacaaauguuggaaaa

SEQ ID NO: 2453874 - RNA, 19 nt, Homo sapiens
  misc_RNA (1)...(19): siRNA sense strand
ccaugaacuggaugaggaa

SEQ ID NO: 2453875 - RNA, 19 nt, Homo sapiens
  misc_RNA (1)...(19): siRNA sense strand
auuacuggcaccugagaaa

SEQ ID NO: 2453876 - RNA, 19 nt, Homo sapiens
  misc_RNA (1)...(19): siRNA sense strand
gguguuuguggguaagaaa

SEQ ID NO: 2453877 - RNA, 19 nt, Homo sapiens
  misc_RNA (1)...(19): siRNA sense strand
uccggaagcuggaggaaaa

SEQ ID NO: 2453878 - RNA, 19 nt, Homo sapiens
  misc_RNA (1)...(19): siRNA sense strand
aagaagcaguaccgggaau

SEQ ID NO: 2453879 - RNA, 19 nt, Homo sapiens
  misc_RNA (1)...(19): siRNA sense strand
acuuacaggacgaugaaau

SEQ ID NO: 2453880 - RNA, 19 nt, Homo sapiens
  misc_RNA (1)...(19): siRNA sense strand
cuggguugauugugaaaga

SEQ ID NO: 2453881 - RNA, 19 nt, Homo sapiens
  misc_RNA (1)...(19): siRNA sense strand
gggaacuucaaaaggaaua

SEQ ID NO: 2453882 - RNA, 19 nt, Homo sapiens
  misc_RNA (1)...(19): siRNA sense strand
accucgagcucuucagaaa

SEQ ID NO: 2453883 - RNA, 19 nt, Homo sapiens
  misc_RNA (1)...(19): siRNA sense strand
cagauugaucagugacaga

SEQ ID NO: 2453884 - RNA, 19 nt, Homo sapiens
  misc_RNA (1)...(19): siRNA sense strand
aggacacugcucagaguua

SEQ ID NO: 2453885 - RNA, 19 nt, Homo sapiens
  misc_RNA (1)...(19): siRNA sense strand
gaucagugacagagcagca

SEQ ID NO: 2453886 - RNA, 19 nt, Homo sapiens
  misc_RNA (1)...(19): siRNA sense strand
cggcaaagaccggcuggaa

SEQ ID NO: 2453887 - RNA, 19 nt, Homo sapiens
  misc_RNA (1)...(19): siRNA sense strand
ggauaaaagggaaauugaa

SEQ ID NO: 2453888 - RNA, 19 nt, Homo sapiens
  misc_RNA (1)...(19): siRNA sense strand
gcuugagccucgaugacau

SEQ ID NO: 2453889 - RNA, 19 nt, Homo sapiens
  misc_RNA (1)...(19): siRNA sense strand
ugugaaagaaauugggucu

SEQ ID NO: 2453890 - RNA, 19 nt, Homo sapiens
  misc_RNA (1)...(19): siRNA sense strand
auguuaagauucuguguca

SEQ ID NO: 2453891 - RNA, 19 nt, Homo sapiens
  misc_RNA (1)...(19): siRNA sense strand
ucacagaggacaugcucau

SEQ ID NO: 2453892 - RNA, 19 nt, Homo sapiens
  misc_RNA (1)...(19): siRNA sense strand
ucaaaaggaauaagcacua

SEQ ID NO: 2453893 - RNA, 19 nt, Homo sapiens
  misc_RNA (1)...(19): siRNA sense strand
gaaucuuacaucagugaca

SEQ ID NO: 2453894 - RNA, 19 nt, Homo sapiens
  misc_RNA (1)...(19): siRNA sense strand
acgaugaaucucugaacau

SEQ ID NO: 2453895 - RNA, 19 nt, Homo sapiens
  misc_RNA (1)...(19): siRNA sense strand
cuuuggacucaguguuaua

SEQ ID NO: 2453896 - RNA, 19 nt, Homo sapiens
  misc_RNA (1)...(19): siRNA sense strand
ucaaagaggcuguccgacu

SEQ ID NO: 2453897 - RNA, 19 nt, Homo sapiens
  misc_RNA (1)...(19): siRNA sense strand
gcaugaaacacaagcgccu

SEQ ID NO: 2453898 - RNA, 19 nt, Homo sapiens
  misc_RNA (1)...(19): siRNA sense strand
cgcggaagcugaauggaca

SEQ ID NO: 2453899 - RNA, 19 nt, Homo sapiens
  misc_RNA (1)...(19): siRNA sense strand
acuauaugucggaaaccaa

SEQ ID NO: 2453900 - RNA, 19 nt, Homo sapiens
  misc_RNA (1)...(19): siRNA sense strand
gccaugaacuggaugagga

SEQ ID NO: 2453901 - RNA, 19 nt, Homo sapiens
  misc_RNA (1)...(19): siRNA sense strand
gucaaaagaaccagcaaau

SEQ ID NO: 2453902 - RNA, 19 nt, Homo sapiens
  misc_RNA (1)...(19): siRNA sense strand
aagaggacuuacaggacga

SEQ ID NO: 2453903 - RNA, 19 nt, Homo sapiens
  misc_RNA (1)...(19): siRNA sense strand
acagacuauaugucggaaa

SEQ ID NO: 2453904 - RNA, 19 nt, Homo sapiens
  misc_RNA (1)...(19): siRNA sense strand
agucaaaagaaccagcaaa

SEQ ID NO: 2453905 - RNA, 19 nt, Homo sapiens
  misc_RNA (1)...(19): siRNA sense strand
acauggaccagcuggaaaa

SEQ ID NO: 2453906 - RNA, 19 nt, Homo sapiens
  misc_RNA (1)...(19): siRNA sense strand
agaagaagcaguaccggga

SEQ ID NO: 2453907 - RNA, 19 nt, Homo sapiens
  misc_RNA (1)...(19): siRNA sense strand
cuguaaaguaucagaguaa

SEQ ID NO: 2453908 - RNA, 19 nt, Homo sapiens
  misc_RNA (1)...(19): siRNA sense strand
agugagaagagaugggaaa

SEQ ID NO: 2453909 - RNA, 19 nt, Homo sapiens
  misc_RNA (1)...(19): siRNA sense strand
aggaaaaccuaaagcuaaa

SEQ ID NO: 2453910 - RNA, 19 nt, Homo sapiens
  misc_RNA (1)...(19): siRNA sense strand
ggaccaaggaagaagccaa

SEQ ID NO: 2453911 - RNA, 19 nt, Homo sapiens
  misc_RNA (1)...(19): siRNA sense strand
auaaggaagaagucagaaa

SEQ ID NO: 2453912 - RNA, 19 nt, Homo sapiens
  misc_RNA (1)...(19): siRNA sense strand
gagcaaaguuucuacgguu

SEQ ID NO: 2453913 - RNA, 19 nt, Homo sapiens
  misc_RNA (1)...(19): siRNA sense strand
acugaaaggaaacaagaaa

SEQ ID NO: 2453914 - RNA, 19 nt, Homo sapiens
  misc_RNA (1)...(19): siRNA sense strand
agaagaaaagagagcaaaa

SEQ ID NO: 2453915 - RNA, 19 nt, Homo sapiens
  misc_RNA (1)...(19): siRNA sense strand
ccagaagaaaagagagcaa

SEQ ID NO: 2453916 - RNA, 19 nt, Homo sapiens
  misc_RNA (1)...(19): siRNA sense strand
aaaccaaugucuaggacca

SEQ ID NO: 2453917 - RNA, 19 nt, Homo sapiens
  misc_RNA (1)...(19): siRNA sense strand
augucuaggaccagauaua

SEQ ID NO: 2453918 - RNA, 19 nt, Homo sapiens
  misc_RNA (1)...(19): siRNA sense strand
guuaaaaggaagggagcaa

SEQ ID NO: 2453919 - RNA, 19 nt, Homo sapiens
  misc_RNA (1)...(19): siRNA sense strand
cuaaauaccucguucgacu

SEQ ID NO: 2453920 - RNA, 19 nt, Homo sapiens
  misc_RNA (1)...(19): siRNA sense strand
cucaaagaugggaagauaa

SEQ ID NO: 2453921 - RNA, 19 nt, Homo sapiens
  misc_RNA (1)...(19): siRNA sense strand
uggucaacaucaacagcaa

SEQ ID NO: 2453922 - RNA, 19 nt, Homo sapiens
  misc_RNA (1)...(19): siRNA sense strand
aaugaagaccagaagaaaa

SEQ ID NO: 2453923 - RNA, 19 nt, Homo sapiens
  misc_RNA (1)...(19): siRNA sense strand
caguuucagcuuagaggaa

SEQ ID NO: 2453924 - RNA, 19 nt, Homo sapiens
  misc_RNA (1)...(19): siRNA sense strand
acacaagaaucaaagccuu

SEQ ID NO: 2453925 - RNA, 19 nt, Homo sapiens
  misc_RNA (1)...(19): siRNA sense strand
ucagaguaagguugugaaa

SEQ ID NO: 2453926 - RNA, 19 nt, Homo sapiens
  misc_RNA (1)...(19): siRNA sense strand
uguccaaauccaagugaga

SEQ ID NO: 2453927 - RNA, 19 nt, Homo sapiens
  misc_RNA (1)...(19): siRNA sense strand
uggcuaggcacucaggaaa

SEQ ID NO: 2453928 - RNA, 19 nt, Homo sapiens
  misc_RNA (1)...(19): siRNA sense strand
ccaaggaagaagccaaaca

SEQ ID NO: 2453929 - RNA, 19 nt, Homo sapiens
  misc_RNA (1)...(19): siRNA sense strand
ggaaacaagaaaggagcau

SEQ ID NO: 2453930 - RNA, 19 nt, Homo sapiens
  misc_RNA (1)...(19): siRNA sense strand
aaacaagaaaggagcaucu

SEQ ID NO: 2453931 - RNA, 19 nt, Homo sapiens
  misc_RNA (1)...(19): siRNA sense strand
aauuaaaggucuucagccu

SEQ ID NO: 2453932 - RNA, 19 nt, Homo sapiens
  misc_RNA (1)...(19): siRNA sense strand
gaacgcaguuuccaggcaa

SEQ ID NO: 2453933 - RNA, 19 nt, Homo sapiens
  misc_RNA (1)...(19): siRNA sense strand
ugggaagauaacagaugua

SEQ ID NO: 2453934 - RNA, 19 nt, Homo sapiens
  misc_RNA (1)...(19): siRNA sense strand
cagaaacaauuaaaggucu

SEQ ID NO: 2453935 - RNA, 19 nt, Homo sapiens
  misc_RNA (1)...(19): siRNA sense strand
ucguucgacugaaaggaaa

SEQ ID NO: 2453936 - RNA, 19 nt, Homo sapiens
  misc_RNA (1)...(19): siRNA sense strand
agaaaaucugcauaggaaa

SEQ ID NO: 2453937 - RNA, 19 nt, Homo sapiens
  misc_RNA (1)...(19): siRNA sense strand
agaguaagguugugaaaac

SEQ ID NO: 2453938 - RNA, 19 nt, Homo sapiens
  misc_RNA (1)...(19): siRNA sense strand
acguauuuguggucaacau

SEQ ID NO: 2453939 - RNA, 19 nt, Homo sapiens
  misc_RNA (1)...(19): siRNA sense strand
cucagaauguggaaggcau

SEQ ID NO: 2453940 - RNA, 19 nt, Homo sapiens
  misc_RNA (1)...(19): siRNA sense strand
agaggaaaaccuaaagcua

SEQ ID NO: 2453941 - RNA, 19 nt, Homo sapiens
  misc_RNA (1)...(19): siRNA sense strand
agaaaagguccucuguaaa

SEQ ID NO: 2453942 - RNA, 19 nt, Homo sapiens
  misc_RNA (1)...(19): siRNA sense strand
ggaaagaacgugaaggcau

SEQ ID NO: 2453943 - RNA, 19 nt, Homo sapiens
  misc_RNA (1)...(19): siRNA sense strand
agaaguacccuauggccua

SEQ ID NO: 2453944 - RNA, 19 nt, Homo sapiens
  misc_RNA (1)...(19): siRNA sense strand
gcaaugagaguuuccgcaa

SEQ ID NO: 2453945 - RNA, 19 nt, Homo sapiens
  misc_RNA (1)...(19): siRNA sense strand
cgucagccguagaaggcau

SEQ ID NO: 2453946 - RNA, 19 nt, Homo sapiens
  misc_RNA (1)...(19): siRNA sense strand
accacaaagagauggcuaa

SEQ ID NO: 2453947 - RNA, 19 nt, Homo sapiens
  misc_RNA (1)...(19): siRNA sense strand
gcacagaaguugcggcagg

SEQ ID NO: 2453948 - RNA, 19 nt, Homo sapiens
  misc_RNA (1)...(19): siRNA sense strand
cggcaggaagugaagcaga

SEQ ID NO: 2453949 - RNA, 19 nt, Homo sapiens
  misc_RNA (1)...(19): siRNA sense strand
gagcuuguaaagaagggaa

SEQ ID NO: 2453950 - RNA, 19 nt, Homo sapiens
  misc_RNA (1)...(19): siRNA sense strand
ucugaaggaagaaggcaau

SEQ ID NO: 2453951 - RNA, 19 nt, Homo sapiens
  misc_RNA (1)...(19): siRNA sense strand
ggcuaaaagcaaauccaaa

SEQ ID NO: 2453952 - RNA, 19 nt, Homo sapiens
  misc_RNA (1)...(19): siRNA sense strand
agcuuguaaagaagggaaa

SEQ ID NO: 2453953 - RNA, 19 nt, Homo sapiens
  misc_RNA (1)...(19): siRNA sense strand
agagaagaucugugagaga

SEQ ID NO: 2453954 - RNA, 19 nt, Homo sapiens
  misc_RNA (1)...(19): siRNA sense strand
gggacaaggucaagugggu

SEQ ID NO: 2453955 - RNA, 19 nt, Homo sapiens
  misc_RNA (1)...(19): siRNA sense strand
cuccauaaugauagaguuu

SEQ ID NO: 2453956 - RNA, 19 nt, Homo sapiens
  misc_RNA (1)...(19): siRNA sense strand
gccuaauuguggcgagaca

SEQ ID NO: 2453957 - RNA, 19 nt, Homo sapiens
  misc_RNA (1)...(19): siRNA sense strand
gugcauaauuggagugugc

SEQ ID NO: 2453958 - RNA, 19 nt, Homo sapiens
  misc_RNA (1)...(19): siRNA sense strand
caaauuguguggugggaag

SEQ ID NO: 2453959 - RNA, 19 nt, Homo sapiens
  misc_RNA (1)...(19): siRNA sense strand
cugccagacacauggagaa

SEQ ID NO: 2453960 - RNA, 19 nt, Homo sapiens
  misc_RNA (1)...(19): siRNA sense strand
ugaugguggacgagauuau

SEQ ID NO: 2453961 - RNA, 19 nt, Homo sapiens
  misc_RNA (1)...(19): siRNA sense strand
ccguggugaugguggacga

SEQ ID NO: 2453962 - RNA, 19 nt, Homo sapiens
  misc_RNA (1)...(19): siRNA sense strand
acauggagaaauagaaagu

SEQ ID NO: 2453963 - RNA, 19 nt, Homo sapiens
  misc_RNA (1)...(19): siRNA sense strand
aaacaaaagagcauugcaa

SEQ ID NO: 2453964 - RNA, 19 nt, Homo sapiens
  misc_RNA (1)...(19): siRNA sense strand
aguacaaugugaagaugca

SEQ ID NO: 2453965 - RNA, 19 nt, Homo sapiens
  misc_RNA (1)...(19): siRNA sense strand
gcaagaaccccguggugau

SEQ ID NO: 2453966 - RNA, 19 nt, Homo sapiens
  misc_RNA (1)...(19): siRNA sense strand
gcaaacguguccugccaga

SEQ ID NO: 2453967 - RNA, 19 nt, Homo sapiens
  misc_RNA (1)...(19): siRNA sense strand
uggugaugguggacgagau

SEQ ID NO: 2453968 - RNA, 19 nt, Homo sapiens
  misc_RNA (1)...(19): siRNA sense strand
acgggaggcacgagaacau

SEQ ID NO: 2453969 - RNA, 19 nt, Homo sapiens
  misc_RNA (1)...(19): siRNA sense strand
ccauagugugcgaugacuu

SEQ ID NO: 2453970 - RNA, 19 nt, Homo sapiens
  misc_RNA (1)...(19): siRNA sense strand
cggauggccagcaggauca

SEQ ID NO: 2453971 - RNA, 19 nt, Homo sapiens
  misc_RNA (1)...(19): siRNA sense strand
cagucaaacaaaagagcau

SEQ ID NO: 2453972 - RNA, 19 nt, Homo sapiens
  misc_RNA (1)...(19): siRNA sense strand
ccagaggggacaaggucaa

SEQ ID NO: 2453973 - RNA, 19 nt, Homo sapiens
  misc_RNA (1)...(19): siRNA sense strand
gggacauggcagucuccaa

SEQ ID NO: 2453974 - RNA, 19 nt, Homo sapiens
  misc_RNA (1)...(19): siRNA sense strand
agagaagaucugugagaga

SEQ ID NO: 2453975 - RNA, 19 nt, Homo sapiens
  misc_RNA (1)...(19): siRNA sense strand
gggacaaggucaagugggu

SEQ ID NO: 2453976 - RNA, 19 nt, Homo sapiens
  misc_RNA (1)...(19): siRNA sense strand
cuccauaaugauagaguuu

SEQ ID NO: 2453977 - RNA, 19 nt, Homo sapiens
  misc_RNA (1)...(19): siRNA sense strand
gccuaauuguggcgagaca

SEQ ID NO: 2453978 - RNA, 19 nt, Homo sapiens
  misc_RNA (1)...(19): siRNA sense strand
gugcauaauuggagugugc

SEQ ID NO: 2453979 - RNA, 19 nt, Homo sapiens
  misc_RNA (1)...(19): siRNA sense strand
caaauuguguggugggaag

SEQ ID NO: 2453980 - RNA, 19 nt, Homo sapiens
  misc_RNA (1)...(19): siRNA sense strand
cugccagacacauggagaa

SEQ ID NO: 2453981 - RNA, 19 nt, Homo sapiens
  misc_RNA (1)...(19): siRNA sense strand
ugaugguggacgagauuau

SEQ ID NO: 2453982 - RNA, 19 nt, Homo sapiens
  misc_RNA (1)...(19): siRNA sense strand
ccguggugaugguggacga

SEQ ID NO: 2453983 - RNA, 19 nt, Homo sapiens
  misc_RNA (1)...(19): siRNA sense strand
acauggagaaauagaaagu

SEQ ID NO: 2453984 - RNA, 19 nt, Homo sapiens
  misc_RNA (1)...(19): siRNA sense strand
aaacaaaagagcauugcaa

SEQ ID NO: 2453985 - RNA, 19 nt, Homo sapiens
  misc_RNA (1)...(19): siRNA sense strand
aguacaaugugaagaugca

SEQ ID NO: 2453986 - RNA, 19 nt, Homo sapiens
  misc_RNA (1)...(19): siRNA sense strand
gcaagaaccccguggugau

SEQ ID NO: 2453987 - RNA, 19 nt, Homo sapiens
  misc_RNA (1)...(19): siRNA sense strand
gcaaacguguccugccaga

SEQ ID NO: 2453988 - RNA, 19 nt, Homo sapiens
  misc_RNA (1)...(19): siRNA sense strand
uggugaugguggacgagau

SEQ ID NO: 2453989 - RNA, 19 nt, Homo sapiens
  misc_RNA (1)...(19): siRNA sense strand
acgggaggcacgagaacau

SEQ ID NO: 2453990 - RNA, 19 nt, Homo sapiens
  misc_RNA (1)...(19): siRNA sense strand
ccauagugugcgaugacuu

SEQ ID NO: 2453991 - RNA, 19 nt, Homo sapiens
  misc_RNA (1)...(19): siRNA sense strand
cggauggccagcaggauca

SEQ ID NO: 2453992 - RNA, 19 nt, Homo sapiens
  misc_RNA (1)...(19): siRNA sense strand
cagucaaacaaaagagcau

SEQ ID NO: 2453993 - RNA, 19 nt, Homo sapiens
  misc_RNA (1)...(19): siRNA sense strand
ccagaggggacaaggucaa

SEQ ID NO: 2453994 - RNA, 19 nt, Homo sapiens
  misc_RNA (1)...(19): siRNA sense strand
gggacauggcagucuccaa

SEQ ID NO: 2453995 - RNA, 19 nt, Homo sapiens
  misc_RNA (1)...(19): siRNA sense strand
agagaagaucugugagaga

SEQ ID NO: 2453996 - RNA, 19 nt, Homo sapiens
  misc_RNA (1)...(19): siRNA sense strand
gggacaaggucaagugggu

SEQ ID NO: 2453997 - RNA, 19 nt, Homo sapiens
  misc_RNA (1)...(19): siRNA sense strand
cuccauaaugauagaguuu

SEQ ID NO: 2453998 - RNA, 19 nt, Homo sapiens
  misc_RNA (1)...(19): siRNA sense strand
gccuaauuguggcgagaca

SEQ ID NO: 2453999 - RNA, 19 nt, Homo sapiens
  misc_RNA (1)...(19): siRNA sense strand
gugcauaauuggagugugc

SEQ ID NO: 2454000 - RNA, 19 nt, Homo sapiens
  misc_RNA (1)...(19): siRNA sense strand
caaauuguguggugggaag

SEQ ID NO: 2454001 - RNA, 19 nt, Homo sapiens
  misc_RNA (1)...(19): siRNA sense strand
ugaugguggacgagauuau

SEQ ID NO: 2454002 - RNA, 19 nt, Homo sapiens
  misc_RNA (1)...(19): siRNA sense strand
ccguggugaugguggacga

SEQ ID NO: 2454003 - RNA, 19 nt, Homo sapiens
  misc_RNA (1)...(19): siRNA sense strand
aaacaaaagagcauugcaa

SEQ ID NO: 2454004 - RNA, 19 nt, Homo sapiens
  misc_RNA (1)...(19): siRNA sense strand
aguacaaugugaagaugca

SEQ ID NO: 2454005 - RNA, 19 nt, Homo sapiens
  misc_RNA (1)...(19): siRNA sense strand
gcaagaaccccguggugau

SEQ ID NO: 2454006 - RNA, 19 nt, Homo sapiens
  misc_RNA (1)...(19): siRNA sense strand
uggugaugguggacgagau

SEQ ID NO: 2454007 - RNA, 19 nt, Homo sapiens
  misc_RNA (1)...(19): siRNA sense strand
acgggaggcacgagaacau

SEQ ID NO: 2454008 - RNA, 19 nt, Homo sapiens
  misc_RNA (1)...(19): siRNA sense strand
ccauagugugcgaugacuu

SEQ ID NO: 2454009 - RNA, 19 nt, Homo sapiens
  misc_RNA (1)...(19): siRNA sense strand
cggauggccagcaggauca

SEQ ID NO: 2454010 - RNA, 19 nt, Homo sapiens
  misc_RNA (1)...(19): siRNA sense strand
cagucaaacaaaagagcau

SEQ ID NO: 2454011 - RNA, 19 nt, Homo sapiens
  misc_RNA (1)...(19): siRNA sense strand
ccagaggggacaaggucaa

SEQ ID NO: 2454012 - RNA, 19 nt, Homo sapiens
  misc_RNA (1)...(19): siRNA sense strand
gggacauggcagucuccaa

SEQ ID NO: 2454013 - RNA, 19 nt, Homo sapiens
  misc_RNA (1)...(19): siRNA sense strand
ccgaacaagccgaaagcaa

SEQ ID NO: 2454014 - RNA, 19 nt, Homo sapiens
  misc_RNA (1)...(19): siRNA sense strand
gcaagaaaauggauggcua

SEQ ID NO: 2454015 - RNA, 19 nt, Homo sapiens
  misc_RNA (1)...(19): siRNA sense strand
gugaagaacuccagccuga

SEQ ID NO: 2454016 - RNA, 19 nt, Homo sapiens
  misc_RNA (1)...(19): siRNA sense strand
ggaaugauguauaucgcua

SEQ ID NO: 2454017 - RNA, 19 nt, Homo sapiens
  misc_RNA (1)...(19): siRNA sense strand
cgaaagaaucaaaggccga

SEQ ID NO: 2454018 - RNA, 19 nt, Homo sapiens
  misc_RNA (1)...(19): siRNA sense strand
gugaggacgagcagagcaa

SEQ ID NO: 2454019 - RNA, 19 nt, Homo sapiens
  misc_RNA (1)...(19): siRNA sense strand
uggccaaaccuaagcacaa

SEQ ID NO: 2454020 - RNA, 19 nt, Homo sapiens
  misc_RNA (1)...(19): siRNA sense strand
ugucauugcagaugugaau

SEQ ID NO: 2454021 - RNA, 19 nt, Homo sapiens
  misc_RNA (1)...(19): siRNA sense strand
gaggacgagcagagcaauu

SEQ ID NO: 2454022 - RNA, 19 nt, Homo sapiens
  misc_RNA (1)...(19): siRNA sense strand
aaaccaagaaccagcguga

SEQ ID NO: 2454023 - RNA, 19 nt, Homo sapiens
  misc_RNA (1)...(19): siRNA sense strand
ggaacaugggcgucgugaa

SEQ ID NO: 2454024 - RNA, 19 nt, Homo sapiens
  misc_RNA (1)...(19): siRNA sense strand
gcaagaacaugcucggugu

SEQ ID NO: 2454025 - RNA, 19 nt, Homo sapiens
  misc_RNA (1)...(19): siRNA sense strand
gagcagagcaauuacacca

SEQ ID NO: 2454026 - RNA, 19 nt, Homo sapiens
  misc_RNA (1)...(19): siRNA sense strand
agaagaagauccuccgcuu

SEQ ID NO: 2454027 - RNA, 19 nt, Homo sapiens
  misc_RNA (1)...(19): siRNA sense strand
uugaacuguuugaggcgaa

SEQ ID NO: 2454028 - RNA, 19 nt, Homo sapiens
  misc_RNA (1)...(19): siRNA sense strand
uggaauauaaagaaggcca

SEQ ID NO: 2454029 - RNA, 19 nt, Homo sapiens
  misc_RNA (1)...(19): siRNA sense strand
gagacagacagucggccua

SEQ ID NO: 2454030 - RNA, 19 nt, Homo sapiens
  misc_RNA (1)...(19): siRNA sense strand
aggaagcgcaccuggucaa

SEQ ID NO: 2454031 - RNA, 19 nt, Homo sapiens
  misc_RNA (1)...(19): siRNA sense strand
cagugugaaccuuaagaau

SEQ ID NO: 2454032 - RNA, 19 nt, Homo sapiens
  misc_RNA (1)...(19): siRNA sense strand
agauaagugaccugagacu

SEQ ID NO: 2454033 - RNA, 19 nt, Homo sapiens
  misc_RNA (1)...(19): siRNA sense strand
uggucaaggcccaguuuau

SEQ ID NO: 2454034 - RNA, 19 nt, Homo sapiens
  misc_RNA (1)...(19): siRNA sense strand
ugacauuugcgguggaucu

SEQ ID NO: 2454035 - RNA, 19 nt, Homo sapiens
  misc_RNA (1)...(19): siRNA sense strand
aaaccuaagcacaagcgaa

SEQ ID NO: 2454036 - RNA, 19 nt, Homo sapiens
  misc_RNA (1)...(19): siRNA sense strand
cucauaggauuguuggaau

SEQ ID NO: 2454037 - RNA, 19 nt, Homo sapiens
  misc_RNA (1)...(19): siRNA sense strand
cggagaacggaaaggagaa

SEQ ID NO: 2454038 - RNA, 19 nt, Homo sapiens
  misc_RNA (1)...(19): siRNA sense strand
ugugaaagaacuagugaau

SEQ ID NO: 2454039 - RNA, 19 nt, Homo sapiens
  misc_RNA (1)...(19): siRNA sense strand
accagaaaguaaugaacaa

SEQ ID NO: 2454040 - RNA, 19 nt, Homo sapiens
  misc_RNA (1)...(19): siRNA sense strand
ccgaagacacaaacaacaa

SEQ ID NO: 2454041 - RNA, 19 nt, Homo sapiens
  misc_RNA (1)...(19): siRNA sense strand
gcgagaaggagaaggagca

SEQ ID NO: 2454042 - RNA, 19 nt, Homo sapiens
  misc_RNA (1)...(19): siRNA sense strand
agagaaugccaguuaacaa

SEQ ID NO: 2454043 - RNA, 19 nt, Homo sapiens
  misc_RNA (1)...(19): siRNA sense strand
aagagcaaauccagagcaa

SEQ ID NO: 2454044 - RNA, 19 nt, Homo sapiens
  misc_RNA (1)...(19): siRNA sense strand
uggaaaucccacugaaaga

SEQ ID NO: 2454045 - RNA, 19 nt, Homo sapiens
  misc_RNA (1)...(19): siRNA sense strand
ggaaguggcuuaagcagca

SEQ ID NO: 2454046 - RNA, 19 nt, Homo sapiens
  misc_RNA (1)...(19): siRNA sense strand
ggugauacggagaacggaa

SEQ ID NO: 2454047 - RNA, 19 nt, Homo sapiens
  misc_RNA (1)...(19): siRNA sense strand
ccaccauccuucaggcgaa

SEQ ID NO: 2454048 - RNA, 19 nt, Homo sapiens
  misc_RNA (1)...(19): siRNA sense strand
ucgggaaauaaguggacaa

SEQ ID NO: 2454049 - RNA, 19 nt, Homo sapiens
  misc_RNA (1)...(19): siRNA sense strand
cugaguauuuaguaggaga

SEQ ID NO: 2454050 - RNA, 19 nt, Homo sapiens
  misc_RNA (1)...(19): siRNA sense strand
aaacaagaacagucugcaa

SEQ ID NO: 2454051 - RNA, 19 nt, Homo sapiens
  misc_RNA (1)...(19): siRNA sense strand
gugauacggagaacggaaa

SEQ ID NO: 2454052 - RNA, 19 nt, Homo sapiens
  misc_RNA (1)...(19): siRNA sense strand
gcuucaggaccaugaguuu

SEQ ID NO: 2454053 - RNA, 19 nt, Homo sapiens
  misc_RNA (1)...(19): siRNA sense strand
ggacagaaaaugacgacuu

SEQ ID NO: 2454054 - RNA, 19 nt, Homo sapiens
  misc_RNA (1)...(19): siRNA sense strand
gagaagggugauacggaga

SEQ ID NO: 2454055 - RNA, 19 nt, Homo sapiens
  misc_RNA (1)...(19): siRNA sense strand
aaggauuggucgagccaca

SEQ ID NO: 2454056 - RNA, 19 nt, Homo sapiens
  misc_RNA (1)...(19): siRNA sense strand
ccagaaaguaaugaacaaa

SEQ ID NO: 2454057 - RNA, 19 nt, Homo sapiens
  misc_RNA (1)...(19): siRNA sense strand
cgggaaauaaguggacaaa

SEQ ID NO: 2454058 - RNA, 19 nt, Homo sapiens
  misc_RNA (1)...(19): siRNA sense strand
ccggcugauugcauggaaa

SEQ ID NO: 2454059 - RNA, 19 nt, Homo sapiens
  misc_RNA (1)...(19): siRNA sense strand
gcagcaugugaaagaacua

SEQ ID NO: 2454060 - RNA, 19 nt, Homo sapiens
  misc_RNA (1)...(19): siRNA sense strand
ggaucaagcaauauggucu

SEQ ID NO: 2454061 - RNA, 19 nt, Homo sapiens
  misc_RNA (1)...(19): siRNA sense strand
guguuggcuuguuuggaua

SEQ ID NO: 2454062 - RNA, 19 nt, Homo sapiens
  misc_RNA (1)...(19): siRNA sense strand
caccuauggaaguggcuua

SEQ ID NO: 2454063 - RNA, 19 nt, Homo sapiens
  misc_RNA (1)...(19): siRNA sense strand
acggagaacggaaaggaga

SEQ ID NO: 2454064 - RNA, 19 nt, Homo sapiens
  misc_RNA (1)...(19): siRNA sense strand
ccuaagggagggacuaaau

SEQ ID NO: 2454065 - RNA, 19 nt, Homo sapiens
  misc_RNA (1)...(19): siRNA sense strand
cuuggaaaucccacugaaa

SEQ ID NO: 2454066 - RNA, 19 nt, Homo sapiens
  misc_RNA (1)...(19): siRNA sense strand
aagggagggacuaaauaaa

SEQ ID NO: 2454067 - RNA, 19 nt, Homo sapiens
  misc_RNA (1)...(19): siRNA sense strand
gaacauuaccugcuggcca

SEQ ID NO: 2454068 - RNA, 19 nt, Homo sapiens
  misc_RNA (1)...(19): siRNA sense strand
gccuuaaaaugguggauca

SEQ ID NO: 2454069 - RNA, 19 nt, Homo sapiens
  misc_RNA (1)...(19): siRNA sense strand
gcggcgagaaggagaagga

SEQ ID NO: 2454070 - RNA, 19 nt, Homo sapiens
  misc_RNA (1)...(19): siRNA sense strand
aagaagauguacagcucca

SEQ ID NO: 2454071 - RNA, 19 nt, Homo sapiens
  misc_RNA (1)...(19): siRNA sense strand
caggcgaauuauugaaaau

SEQ ID NO: 2454072 - RNA, 19 nt, Homo sapiens
  misc_RNA (1)...(19): siRNA sense strand
guuucgauuaggagaugaa

SEQ ID NO: 2454073 - RNA, 19 nt, Homo sapiens
  misc_RNA (1)...(19): siRNA sense strand
gcacagaucucagggcgau

SEQ ID NO: 2454074 - RNA, 19 nt, Homo sapiens
  misc_RNA (1)...(19): siRNA sense strand
ggauugucuucuucugcaa

SEQ ID NO: 2454075 - RNA, 19 nt, Homo sapiens
  misc_RNA (1)...(19): siRNA sense strand
acacaaacaacaagggcag

SEQ ID NO: 2454076 - RNA, 19 nt, Homo sapiens
  misc_RNA (1)...(19): siRNA sense strand
aggcacgcuccuacaauaa

SEQ ID NO: 2454077 - RNA, 19 nt, Homo sapiens
  misc_RNA (1)...(19): siRNA sense strand
gcauauaguggacgagaaa

SEQ ID NO: 2454078 - RNA, 19 nt, Homo sapiens
  misc_RNA (1)...(19): siRNA sense strand
gugaaauacgggaccgaua

SEQ ID NO: 2454079 - RNA, 19 nt, Homo sapiens
  misc_RNA (1)...(19): siRNA sense strand
ccauauuacuacaaagcau

SEQ ID NO: 2454080 - RNA, 19 nt, Homo sapiens
  misc_RNA (1)...(19): siRNA sense strand
auauaguggacgagaaaca

SEQ ID NO: 2454081 - RNA, 19 nt, Homo sapiens
  misc_RNA (1)...(19): siRNA sense strand
cagucgaagucucugguaa

SEQ ID NO: 2454082 - RNA, 19 nt, Homo sapiens
  misc_RNA (1)...(19): siRNA sense strand
ccugugaaccuaagaguga

SEQ ID NO: 2454083 - RNA, 19 nt, Homo sapiens
  misc_RNA (1)...(19): siRNA sense strand
acccuaugaaugugaaaua

SEQ ID NO: 2454084 - RNA, 19 nt, Homo sapiens
  misc_RNA (1)...(19): siRNA sense strand
guaaagcgacccauugaaa

SEQ ID NO: 2454085 - RNA, 19 nt, Homo sapiens
  misc_RNA (1)...(19): siRNA sense strand
aaccuaagagugagaacua

SEQ ID NO: 2454086 - RNA, 19 nt, Homo sapiens
  misc_RNA (1)...(19): siRNA sense strand
acaaagggcaaaugaggga

SEQ ID NO: 2454087 - RNA, 19 nt, Homo sapiens
  misc_RNA (1)...(19): siRNA sense strand
ccuaagagugagaacuaca

SEQ ID NO: 2454088 - RNA, 19 nt, Homo sapiens
  misc_RNA (1)...(19): siRNA sense strand
ggacccuaucaaugugaaa

SEQ ID NO: 2454089 - RNA, 19 nt, Homo sapiens
  misc_RNA (1)...(19): siRNA sense strand
ugcauauaguggacgagaa

SEQ ID NO: 2454090 - RNA, 19 nt, Homo sapiens
  misc_RNA (1)...(19): siRNA sense strand
gagaaacagcauauuccaa

SEQ ID NO: 2454091 - RNA, 19 nt, Homo sapiens
  misc_RNA (1)...(19): siRNA sense strand
ggaccgauaugguggcauc

SEQ ID NO: 2454092 - RNA, 19 nt, Homo sapiens
  misc_RNA (1)...(19): siRNA sense strand
caucugguacaaagggcaa

SEQ ID NO: 2454093 - RNA, 19 nt, Homo sapiens
  misc_RNA (1)...(19): siRNA sense strand
cgauugaagccgagccaac

SEQ ID NO: 2454094 - RNA, 19 nt, Homo sapiens
  misc_RNA (1)...(19): siRNA sense strand
uggacgagaaacagcauau

SEQ ID NO: 2454095 - RNA, 19 nt, Homo sapiens
  misc_RNA (1)...(19): siRNA sense strand
accuacauuugguggcuaa

SEQ ID NO: 2454096 - RNA, 19 nt, Homo sapiens
  misc_RNA (1)...(19): siRNA sense strand
acccuaucaaugugaaaua

SEQ ID NO: 2454097 - RNA, 19 nt, Homo sapiens
  misc_RNA (1)...(19): siRNA sense strand
gcuccaaauccaugacagu

SEQ ID NO: 2454098 - RNA, 19 nt, Homo sapiens
  misc_RNA (1)...(19): siRNA sense strand
agugagaacuacaccuaca

SEQ ID NO: 2454099 - RNA, 19 nt, Homo sapiens
  misc_RNA (1)...(19): siRNA sense strand
ggacccuaugaaugugaaa

SEQ ID NO: 2454100 - RNA, 19 nt, Homo sapiens
  misc_RNA (1)...(19): siRNA sense strand
ugaaauacgggaccgauau

SEQ ID NO: 2454101 - RNA, 19 nt, Homo sapiens
  misc_RNA (1)...(19): siRNA sense strand
ccacaagaucacagggaag

SEQ ID NO: 2454102 - RNA, 19 nt, Homo sapiens
  misc_RNA (1)...(19): siRNA sense strand
ccgaggagaaagacgccaa

SEQ ID NO: 2454103 - RNA, 19 nt, Homo sapiens
  misc_RNA (1)...(19): siRNA sense strand
cguccaaccaggaggccuu

SEQ ID NO: 2454104 - RNA, 19 nt, Homo sapiens
  misc_RNA (1)...(19): siRNA sense strand
uggguaucgucauggacaa

SEQ ID NO: 2454105 - RNA, 19 nt, Homo sapiens
  misc_RNA (1)...(19): siRNA sense strand
ccucauuaacacugcccaa

SEQ ID NO: 2454106 - RNA, 19 nt, Homo sapiens
  misc_RNA (1)...(19): siRNA sense strand
augacaaacucuuccucaa

SEQ ID NO: 2454107 - RNA, 19 nt, Homo sapiens
  misc_RNA (1)...(19): siRNA sense strand
agcagaggcaggaggauga

SEQ ID NO: 2454108 - RNA, 19 nt, Homo sapiens
  misc_RNA (1)...(19): siRNA sense strand
uggacuacucggugaagau

SEQ ID NO: 2454109 - RNA, 19 nt, Homo sapiens
  misc_RNA (1)...(19): siRNA sense strand
cagaagaucacuaaugcca

SEQ ID NO: 2454110 - RNA, 19 nt, Homo sapiens
  misc_RNA (1)...(19): siRNA sense strand
aagccagcccggagagaaa

SEQ ID NO: 2454111 - RNA, 19 nt, Homo sapiens
  misc_RNA (1)...(19): siRNA sense strand
gcacaagggcugagaggac

SEQ ID NO: 2454112 - RNA, 19 nt, Homo sapiens
  misc_RNA (1)...(19): siRNA sense strand
agaaaagacuuguagccaa

SEQ ID NO: 2454113 - RNA, 19 nt, Homo sapiens
  misc_RNA (1)...(19): siRNA sense strand
gguacaugcugcugggcca

SEQ ID NO: 2454114 - RNA, 19 nt, Homo sapiens
  misc_RNA (1)...(19): siRNA sense strand
ggaugcugcaggaggagaa

SEQ ID NO: 2454115 - RNA, 19 nt, Homo sapiens
  misc_RNA (1)...(19): siRNA sense strand
uucgagaggcccagggaaa

SEQ ID NO: 2454116 - RNA, 19 nt, Homo sapiens
  misc_RNA (1)...(19): siRNA sense strand
caugguggcucgagggcuu

SEQ ID NO: 2454117 - RNA, 19 nt, Homo sapiens
  misc_RNA (1)...(19): siRNA sense strand
cuacaggagcugaaggcuu

SEQ ID NO: 2454118 - RNA, 19 nt, Homo sapiens
  misc_RNA (1)...(19): siRNA sense strand
gaaaggugacagaggcuga

SEQ ID NO: 2454119 - RNA, 19 nt, Homo sapiens
  misc_RNA (1)...(19): siRNA sense strand
gcagagacuagaagcccaa

SEQ ID NO: 2454120 - RNA, 19 nt, Homo sapiens
  misc_RNA (1)...(19): siRNA sense strand
caugagaaggagcgcacaa

SEQ ID NO: 2454121 - RNA, 19 nt, Homo sapiens
  misc_RNA (1)...(19): siRNA sense strand
augaagaguuuguuggacu

SEQ ID NO: 2454122 - RNA, 19 nt, Homo sapiens
  misc_RNA (1)...(19): siRNA sense strand
aggccaagcugaaggaggu

SEQ ID NO: 2454123 - RNA, 19 nt, Homo sapiens
  misc_RNA (1)...(19): siRNA sense strand
gcccaagucaacaggaaca

SEQ ID NO: 2454124 - RNA, 19 nt, Homo sapiens
  misc_RNA (1)...(19): siRNA sense strand
gggacagauaugaagaguu

SEQ ID NO: 2454125 - RNA, 19 nt, Homo sapiens
  misc_RNA (1)...(19): siRNA sense strand
gcuuagucauuccaggcaa

SEQ ID NO: 2454126 - RNA, 19 nt, Homo sapiens
  misc_RNA (1)...(19): siRNA sense strand
uggaaguucaccaggccaa

SEQ ID NO: 2454127 - RNA, 19 nt, Homo sapiens
  misc_RNA (1)...(19): siRNA sense strand
gggaaaggugacagaggcu

SEQ ID NO: 2454128 - RNA, 19 nt, Homo sapiens
  misc_RNA (1)...(19): siRNA sense strand
auucaugucuagaaggcuu

SEQ ID NO: 2454129 - RNA, 19 nt, Homo sapiens
  misc_RNA (1)...(19): siRNA sense strand
acaggaugcugcaggagga

SEQ ID NO: 2454130 - RNA, 19 nt, Homo sapiens
  misc_RNA (1)...(19): siRNA sense strand
ggagcaugaucuuggcacu

SEQ ID NO: 2454131 - RNA, 19 nt, Homo sapiens
  misc_RNA (1)...(19): siRNA sense strand
ucgccaucgucuagauaaa

SEQ ID NO: 2454132 - RNA, 19 nt, Homo sapiens
  misc_RNA (1)...(19): siRNA sense strand
gagacugagacaagagcuu

SEQ ID NO: 2454133 - RNA, 19 nt, Homo sapiens
  misc_RNA (1)...(19): siRNA sense strand
uguaugagagacugagaca

SEQ ID NO: 2454134 - RNA, 19 nt, Homo sapiens
  misc_RNA (1)...(19): siRNA sense strand
ccaaagaggaggugacccu

SEQ ID NO: 2454135 - RNA, 19 nt, Homo sapiens
  misc_RNA (1)...(19): siRNA sense strand
ccaaagagggaguggcuuc

SEQ ID NO: 2454136 - RNA, 19 nt, Homo sapiens
  misc_RNA (1)...(19): siRNA sense strand
ucaaguacuuuguagccaa

SEQ ID NO: 2454137 - RNA, 19 nt, Homo sapiens
  misc_RNA (1)...(19): siRNA sense strand
ggacaaggcuucuauccca

SEQ ID NO: 2454138 - RNA, 19 nt, Homo sapiens
  misc_RNA (1)...(19): siRNA sense strand
cgcaaaacuacacggaaaa

SEQ ID NO: 2454139 - RNA, 19 nt, Homo sapiens
  misc_RNA (1)...(19): siRNA sense strand
cagagaggugccugggaga

SEQ ID NO: 2454140 - RNA, 19 nt, Homo sapiens
  misc_RNA (1)...(19): siRNA sense strand
augaaauguacccuaguua

SEQ ID NO: 2454141 - RNA, 19 nt, Homo sapiens
  misc_RNA (1)...(19): siRNA sense strand
aggaggugacccugaaaga

SEQ ID NO: 2454142 - RNA, 19 nt, Homo sapiens
  misc_RNA (1)...(19): siRNA sense strand
cgaagaggcuacaacccuu

SEQ ID NO: 2454143 - RNA, 19 nt, Homo sapiens
  misc_RNA (1)...(19): siRNA sense strand
ccaccagagaugacauuca

SEQ ID NO: 2454144 - RNA, 19 nt, Homo sapiens
  misc_RNA (1)...(19): siRNA sense strand
uggacaaagccaaggugaa

SEQ ID NO: 2454145 - RNA, 19 nt, Homo sapiens
  misc_RNA (1)...(19): siRNA sense strand
aagccaaggcccugggaga

SEQ ID NO: 2454146 - RNA, 19 nt, Homo sapiens
  misc_RNA (1)...(19): siRNA sense strand
ggaagaaaagagaagguau

SEQ ID NO: 2454147 - RNA, 19 nt, Homo sapiens
  misc_RNA (1)...(19): siRNA sense strand
agguggagaucgagcacuu

SEQ ID NO: 2454148 - RNA, 19 nt, Homo sapiens
  misc_RNA (1)...(19): siRNA sense strand
cugggaaguccaagaucaa

SEQ ID NO: 2454149 - RNA, 19 nt, Homo sapiens
  misc_RNA (1)...(19): siRNA sense strand
cagaagcaauguuugggaa

SEQ ID NO: 2454150 - RNA, 19 nt, Homo sapiens
  misc_RNA (1)...(19): siRNA sense strand
cccugaagguggagaucga

SEQ ID NO: 2454151 - RNA, 19 nt, Homo sapiens
  misc_RNA (1)...(19): siRNA sense strand
agaucaaggcacuggcaga

SEQ ID NO: 2454152 - RNA, 19 nt, Homo sapiens
  misc_RNA (1)...(19): siRNA sense strand
ggagacagccagacggacu

SEQ ID NO: 2454153 - RNA, 19 nt, Homo sapiens
  misc_RNA (1)...(19): siRNA sense strand
aguccaagaucaaggcacu

SEQ ID NO: 2454154 - RNA, 19 nt, Homo sapiens
  misc_RNA (1)...(19): siRNA sense strand
agaaagaguuugaagucug

SEQ ID NO: 2454155 - RNA, 19 nt, Homo sapiens
  misc_RNA (1)...(19): siRNA sense strand
gaugugaaugccaggaaaa

SEQ ID NO: 2454156 - RNA, 19 nt, Homo sapiens
  misc_RNA (1)...(19): siRNA sense strand
cccuaggaaucucggaaaa

SEQ ID NO: 2454157 - RNA, 19 nt, Homo sapiens
  misc_RNA (1)...(19): siRNA sense strand
gcuuauuagaggaggagga

SEQ ID NO: 2454158 - RNA, 19 nt, Homo sapiens
  misc_RNA (1)...(19): siRNA sense strand
uauuagaggaggaggagga

SEQ ID NO: 2454159 - RNA, 19 nt, Homo sapiens
  misc_RNA (1)...(19): siRNA sense strand
gcacggaacuuucggcgca

SEQ ID NO: 2454160 - RNA, 19 nt, Homo sapiens
  misc_RNA (1)...(19): siRNA sense strand
gcugcuuauuagaggagga

SEQ ID NO: 2454161 - RNA, 19 nt, Homo sapiens
  misc_RNA (1)...(19): siRNA sense strand
gcacggaacuuucggcgca

SEQ ID NO: 2454162 - RNA, 19 nt, Homo sapiens
  misc_RNA (1)...(19): siRNA sense strand
gcuuauuagaggaggagga

SEQ ID NO: 2454163 - RNA, 19 nt, Homo sapiens
  misc_RNA (1)...(19): siRNA sense strand
uauuagaggaggaggagga

SEQ ID NO: 2454164 - RNA, 19 nt, Homo sapiens
  misc_RNA (1)...(19): siRNA sense strand
gcacggaacuuucggcgca

SEQ ID NO: 2454165 - RNA, 19 nt, Homo sapiens
  misc_RNA (1)...(19): siRNA sense strand
gcugcuuauuagaggagga

SEQ ID NO: 2454166 - RNA, 19 nt, Homo sapiens
  misc_RNA (1)...(19): siRNA sense strand
uggaaauggaggaugaaga

SEQ ID NO: 2454167 - RNA, 19 nt, Homo sapiens
  misc_RNA (1)...(19): siRNA sense strand
guaaacuaaugaaagccua

SEQ ID NO: 2454168 - RNA, 19 nt, Homo sapiens
  misc_RNA (1)...(19): siRNA sense strand
aaucaaugaaacagacaca

SEQ ID NO: 2454169 - RNA, 19 nt, Homo sapiens
  misc_RNA (1)...(19): siRNA sense strand
acaccugcacaguuggaaa

SEQ ID NO: 2454170 - RNA, 19 nt, Homo sapiens
  misc_RNA (1)...(19): siRNA sense strand
guauaauggauaugggaaa

SEQ ID NO: 2454171 - RNA, 19 nt, Homo sapiens
  misc_RNA (1)...(19): siRNA sense strand
uggugaaggagaagaguaa

SEQ ID NO: 2454172 - RNA, 19 nt, Homo sapiens
  misc_RNA (1)...(19): siRNA sense strand
augcaaugaaugugggaaa

SEQ ID NO: 2454173 - RNA, 19 nt, Homo sapiens
  misc_RNA (1)...(19): siRNA sense strand
uuguaaugaaugugggaaa

SEQ ID NO: 2454174 - RNA, 19 nt, Homo sapiens
  misc_RNA (1)...(19): siRNA sense strand
gggaauucacucagaagaa

SEQ ID NO: 2454175 - RNA, 19 nt, Homo sapiens
  misc_RNA (1)...(19): siRNA sense strand
aauccauacaggugagaaa

SEQ ID NO: 2454176 - RNA, 19 nt, Homo sapiens
  misc_RNA (1)...(19): siRNA sense strand
ggauauaaugacugugaga

SEQ ID NO: 2454177 - RNA, 19 nt, Homo sapiens
  misc_RNA (1)...(19): siRNA sense strand
ggagaagagccauggacau

SEQ ID NO: 2454178 - RNA, 19 nt, Homo sapiens
  misc_RNA (1)...(19): siRNA sense strand
ccugcaagaaagagacuua

SEQ ID NO: 2454179 - RNA, 19 nt, Homo sapiens
  misc_RNA (1)...(19): siRNA sense strand
aggaacaccaagagaagua

SEQ ID NO: 2454180 - RNA, 19 nt, Homo sapiens
  misc_RNA (1)...(19): siRNA sense strand
ggaacgaggagaagagcca

SEQ ID NO: 2454181 - RNA, 19 nt, Homo sapiens
  misc_RNA (1)...(19): siRNA sense strand
gugaaggagaagaguaaaa

SEQ ID NO: 2454182 - RNA, 19 nt, Homo sapiens
  misc_RNA (1)...(19): siRNA sense strand
cagcacagucauuuggaua

SEQ ID NO: 2454183 - RNA, 19 nt, Homo sapiens
  misc_RNA (1)...(19): siRNA sense strand
cccuauauuuguagugaau

SEQ ID NO: 2454184 - RNA, 19 nt, Homo sapiens
  misc_RNA (1)...(19): siRNA sense strand
gggagagaaaccauauaaa

SEQ ID NO: 2454185 - RNA, 19 nt, Homo sapiens
  misc_RNA (1)...(19): siRNA sense strand
aaucaaagugccagagcuu

SEQ ID NO: 2454186 - RNA, 19 nt, Homo sapiens
  misc_RNA (1)...(19): siRNA sense strand
agucaaaucccauaaucaa

SEQ ID NO: 2454187 - RNA, 19 nt, Homo sapiens
  misc_RNA (1)...(19): siRNA sense strand
caaguuggaacgaggagaa

SEQ ID NO: 2454188 - RNA, 19 nt, Homo sapiens
  misc_RNA (1)...(19): siRNA sense strand
ggacaucauuugcagguca

SEQ ID NO: 2454189 - RNA, 19 nt, Homo sapiens
  misc_RNA (1)...(19): siRNA sense strand
ggggagaaaucguaugaau

SEQ ID NO: 2454190 - RNA, 19 nt, Homo sapiens
  misc_RNA (1)...(19): siRNA sense strand
ccucauucgucaucagaga

SEQ ID NO: 2454191 - RNA, 19 nt, Homo sapiens
  misc_RNA (1)...(19): siRNA sense strand
agaaaccauaugaguguaa

SEQ ID NO: 2454192 - RNA, 19 nt, Homo sapiens
  misc_RNA (1)...(19): siRNA sense strand
gugggaaggccuuuagaau

SEQ ID NO: 2454193 - RNA, 19 nt, Homo sapiens
  misc_RNA (1)...(19): siRNA sense strand
guacuaaacaagagacuac

SEQ ID NO: 2454194 - RNA, 19 nt, Homo sapiens
  misc_RNA (1)...(19): siRNA sense strand
ccauaugaguguaaugacu

SEQ ID NO: 2454195 - RNA, 19 nt, Homo sapiens
  misc_RNA (1)...(19): siRNA sense strand
ggucauaccugcuuggaag

SEQ ID NO: 2454196 - RNA, 19 nt, Homo sapiens
  misc_RNA (1)...(19): siRNA sense strand
guguaaugacugugggaag

SEQ ID NO: 2454197 - RNA, 19 nt, Homo sapiens
  misc_RNA (1)...(19): siRNA sense strand
ggggagaaaucuuaugaau

SEQ ID NO: 2454198 - RNA, 19 nt, Homo sapiens
  misc_RNA (1)...(19): siRNA sense strand
ucaaagaacucauacggga

SEQ ID NO: 2454199 - RNA, 19 nt, Homo sapiens
  misc_RNA (1)...(19): siRNA sense strand
gggaaguccuuucgccaga

SEQ ID NO: 2454200 - RNA, 19 nt, Homo sapiens
  misc_RNA (1)...(19): siRNA sense strand
ucaaagaacucacaaggga

SEQ ID NO: 2454201 - RNA, 19 nt, Homo sapiens
  misc_RNA (1)...(19): siRNA sense strand
acauaguagaccuuacaaa

SEQ ID NO: 2454202 - RNA, 19 nt, Homo sapiens
  misc_RNA (1)...(19): siRNA sense strand
agagcaaccaauauugaaa

SEQ ID NO: 2454203 - RNA, 19 nt, Homo sapiens
  misc_RNA (1)...(19): siRNA sense strand
ccuugcucuucaugagaaa

SEQ ID NO: 2454204 - RNA, 19 nt, Homo sapiens
  misc_RNA (1)...(19): siRNA sense strand
aauacauaccggccagaaa

SEQ ID NO: 2454205 - RNA, 19 nt, Homo sapiens
  misc_RNA (1)...(19): siRNA sense strand
aacucauacgggagagaaa

SEQ ID NO: 2454206 - RNA, 19 nt, Homo sapiens
  misc_RNA (1)...(19): siRNA sense strand
agacauuuacucuaggcaa

SEQ ID NO: 2454207 - RNA, 19 nt, Homo sapiens
  misc_RNA (1)...(19): siRNA sense strand
ccauaaucaaagugccaga

SEQ ID NO: 2454208 - RNA, 19 nt, Homo sapiens
  misc_RNA (1)...(19): siRNA sense strand
uuguaaagaaugugggaag

SEQ ID NO: 2454209 - RNA, 19 nt, Homo sapiens
  misc_RNA (1)...(19): siRNA sense strand
ccucacuguacaucagaaa

SEQ ID NO: 2454210 - RNA, 19 nt, Homo sapiens
  misc_RNA (1)...(19): siRNA sense strand
ccucauuguccaucaaaga

SEQ ID NO: 2454211 - RNA, 19 nt, Homo sapiens
  misc_RNA (1)...(19): siRNA sense strand
ugauacucauggaaggauu

SEQ ID NO: 2454212 - RNA, 19 nt, Homo sapiens
  misc_RNA (1)...(19): siRNA sense strand
aucuaaauccugcaagaaa

SEQ ID NO: 2454213 - RNA, 19 nt, Homo sapiens
  misc_RNA (1)...(19): siRNA sense strand
augaaguucuuaugcagua

SEQ ID NO: 2454214 - RNA, 19 nt, Homo sapiens
  misc_RNA (1)...(19): siRNA sense strand
guuuguaaugaguguggua

SEQ ID NO: 2454215 - RNA, 19 nt, Homo sapiens
  misc_RNA (1)...(19): siRNA sense strand
aguauaauggauaugggaa

SEQ ID NO: 2454216 - RNA, 19 nt, Homo sapiens
  misc_RNA (1)...(19): siRNA sense strand
ccuuguagcacaucagaga

SEQ ID NO: 2454217 - RNA, 19 nt, Homo sapiens
  misc_RNA (1)...(19): siRNA sense strand
cuagaucaguuguaagcau

SEQ ID NO: 2454218 - RNA, 19 nt, Homo sapiens
  misc_RNA (1)...(19): siRNA sense strand
gggagaaaucguaugaaug

SEQ ID NO: 2454219 - RNA, 19 nt, Homo sapiens
  misc_RNA (1)...(19): siRNA sense strand
gaagaaaacuggaaagcug

SEQ ID NO: 2454220 - RNA, 19 nt, Homo sapiens
  misc_RNA (1)...(19): siRNA sense strand
aggagaagagccauggaca

SEQ ID NO: 2454221 - RNA, 19 nt, Homo sapiens
  misc_RNA (1)...(19): siRNA sense strand
ggcaaaucuuacuguacau

SEQ ID NO: 2454222 - RNA, 19 nt, Homo sapiens
  misc_RNA (1)...(19): siRNA sense strand
gcccuauauuuguaaugaa

SEQ ID NO: 2454223 - RNA, 19 nt, Homo sapiens
  misc_RNA (1)...(19): siRNA sense strand
ugguaaaucauucagucaa

SEQ ID NO: 2454224 - RNA, 19 nt, Homo sapiens
  misc_RNA (1)...(19): siRNA sense strand
acuggaaagcugaagacuu

SEQ ID NO: 2454225 - RNA, 19 nt, Homo sapiens
  misc_RNA (1)...(19): siRNA sense strand
auguaaaguaugugggaaa

SEQ ID NO: 2454226 - RNA, 19 nt, Homo sapiens
  misc_RNA (1)...(19): siRNA sense strand
auguaaagagugugggaaa

SEQ ID NO: 2454227 - RNA, 19 nt, Homo sapiens
  misc_RNA (1)...(19): siRNA sense strand
aauucauacuggugagaaa

SEQ ID NO: 2454228 - RNA, 19 nt, Homo sapiens
  misc_RNA (1)...(19): siRNA sense strand
gaauuaugccagagggaga

SEQ ID NO: 2454229 - RNA, 19 nt, Homo sapiens
  misc_RNA (1)...(19): siRNA sense strand
cuuauuggaacaagggaaa

SEQ ID NO: 2454230 - RNA, 19 nt, Homo sapiens
  misc_RNA (1)...(19): siRNA sense strand
aauucauacaggugagaaa

SEQ ID NO: 2454231 - RNA, 19 nt, Homo sapiens
  misc_RNA (1)...(19): siRNA sense strand
auguaaggaauguggcaaa

SEQ ID NO: 2454232 - RNA, 19 nt, Homo sapiens
  misc_RNA (1)...(19): siRNA sense strand
uugcaaaacaacugggaua

SEQ ID NO: 2454233 - RNA, 19 nt, Homo sapiens
  misc_RNA (1)...(19): siRNA sense strand
augugauguuggagaacua

SEQ ID NO: 2454234 - RNA, 19 nt, Homo sapiens
  misc_RNA (1)...(19): siRNA sense strand
cuggaaucgaugugugaaa

SEQ ID NO: 2454235 - RNA, 19 nt, Homo sapiens
  misc_RNA (1)...(19): siRNA sense strand
uguaaagagugugggaaau

SEQ ID NO: 2454236 - RNA, 19 nt, Homo sapiens
  misc_RNA (1)...(19): siRNA sense strand
aauccauaccgguaagaaa

SEQ ID NO: 2454237 - RNA, 19 nt, Homo sapiens
  misc_RNA (1)...(19): siRNA sense strand
gaaauagaauuaugccaga

SEQ ID NO: 2454238 - RNA, 19 nt, Homo sapiens
  misc_RNA (1)...(19): siRNA sense strand
cccuaugaauguaaggaau

SEQ ID NO: 2454239 - RNA, 19 nt, Homo sapiens
  misc_RNA (1)...(19): siRNA sense strand
cccuaugaauguaaggaau

SEQ ID NO: 2454240 - RNA, 19 nt, Homo sapiens
  misc_RNA (1)...(19): siRNA sense strand
gcucaaaccuuacucgaca

SEQ ID NO: 2454241 - RNA, 19 nt, Homo sapiens
  misc_RNA (1)...(19): siRNA sense strand
cccuaugauuguaaggaau

SEQ ID NO: 2454242 - RNA, 19 nt, Homo sapiens
  misc_RNA (1)...(19): siRNA sense strand
cccuaugaauguaagaaau

SEQ ID NO: 2454243 - RNA, 19 nt, Homo sapiens
  misc_RNA (1)...(19): siRNA sense strand
cccuaugagugcaaggaau

SEQ ID NO: 2454244 - RNA, 19 nt, Homo sapiens
  misc_RNA (1)...(19): siRNA sense strand
agauaaugggacuuacaaa

SEQ ID NO: 2454245 - RNA, 19 nt, Homo sapiens
  misc_RNA (1)...(19): siRNA sense strand
uuggagauguuuuggaaua

SEQ ID NO: 2454246 - RNA, 19 nt, Homo sapiens
  misc_RNA (1)...(19): siRNA sense strand
gauuguaaggaauguggaa

SEQ ID NO: 2454247 - RNA, 19 nt, Homo sapiens
  misc_RNA (1)...(19): siRNA sense strand
gggauauccaaaugggcau

SEQ ID NO: 2454248 - RNA, 19 nt, Homo sapiens
  misc_RNA (1)...(19): siRNA sense strand
gaugguuggcagagagcuu

SEQ ID NO: 2454249 - RNA, 19 nt, Homo sapiens
  misc_RNA (1)...(19): siRNA sense strand
gaaaauucauacuggcgaa

SEQ ID NO: 2454250 - RNA, 19 nt, Homo sapiens
  misc_RNA (1)...(19): siRNA sense strand
gccuuuaguuauugcucaa

SEQ ID NO: 2454251 - RNA, 19 nt, Homo sapiens
  misc_RNA (1)...(19): siRNA sense strand
cagagaauccauaccggua

SEQ ID NO: 2454252 - RNA, 19 nt, Homo sapiens
  misc_RNA (1)...(19): siRNA sense strand
cuuugaaugucuugaaugu

SEQ ID NO: 2454253 - RNA, 19 nt, Homo sapiens
  misc_RNA (1)...(19): siRNA sense strand
cgucaacaucagagaauuc

SEQ ID NO: 2454254 - RNA, 19 nt, Homo sapiens
  misc_RNA (1)...(19): siRNA sense strand
cuguaaggaaugugggaag

SEQ ID NO: 2454255 - RNA, 19 nt, Homo sapiens
  misc_RNA (1)...(19): siRNA sense strand
agagggagauaaugggacu

SEQ ID NO: 2454256 - RNA, 19 nt, Homo sapiens
  misc_RNA (1)...(19): siRNA sense strand
agagggacuuauacagaga

SEQ ID NO: 2454257 - RNA, 19 nt, Homo sapiens
  misc_RNA (1)...(19): siRNA sense strand
uguuggagaacuacggcaa

SEQ ID NO: 2454258 - RNA, 19 nt, Homo sapiens
  misc_RNA (1)...(19): siRNA sense strand
agagaauccauaccgguaa

SEQ ID NO: 2454259 - RNA, 19 nt, Homo sapiens
  misc_RNA (1)...(19): siRNA sense strand
acccuaugaauguaagaaa

SEQ ID NO: 2454260 - RNA, 19 nt, Homo sapiens
  misc_RNA (1)...(19): siRNA sense strand
gaauguaaagaguguggga

SEQ ID NO: 2454261 - RNA, 19 nt, Homo sapiens
  misc_RNA (1)...(19): siRNA sense strand
auucuuuaguugugguuca

SEQ ID NO: 2454262 - RNA, 19 nt, Homo sapiens
  misc_RNA (1)...(19): siRNA sense strand
aggaaugugggaaggcuuu

SEQ ID NO: 2454263 - RNA, 19 nt, Homo sapiens
  misc_RNA (1)...(19): siRNA sense strand
gccuuuacccagagcucaa

SEQ ID NO: 2454264 - RNA, 19 nt, Homo sapiens
  misc_RNA (1)...(19): siRNA sense strand
guucaacaucagagaauuc

SEQ ID NO: 2454265 - RNA, 19 nt, Homo sapiens
  misc_RNA (1)...(19): siRNA sense strand
uggcagagagcuuacaaga

SEQ ID NO: 2454266 - RNA, 19 nt, Homo sapiens
  misc_RNA (1)...(19): siRNA sense strand
gggcauuuuagucaagaaa

SEQ ID NO: 2454267 - RNA, 19 nt, Homo sapiens
  misc_RNA (1)...(19): siRNA sense strand
gcccuauaacuguaaggaa

SEQ ID NO: 2454268 - RNA, 19 nt, Homo sapiens
  misc_RNA (1)...(19): siRNA sense strand
ugggaaggccuuuaguuau

SEQ ID NO: 2454269 - RNA, 19 nt, Homo sapiens
  misc_RNA (1)...(19): siRNA sense strand
augcaaagaaugugggaaa

SEQ ID NO: 2454270 - RNA, 19 nt, Homo sapiens
  misc_RNA (1)...(19): siRNA sense strand
gcaaagaaaugcaauguau

SEQ ID NO: 2454271 - RNA, 19 nt, Homo sapiens
  misc_RNA (1)...(19): siRNA sense strand
gugagaaggcuuaugaaua

SEQ ID NO: 2454272 - RNA, 19 nt, Homo sapiens
  misc_RNA (1)...(19): siRNA sense strand
aauucauacuggugagaaa

SEQ ID NO: 2454273 - RNA, 19 nt, Homo sapiens
  misc_RNA (1)...(19): siRNA sense strand
aauucauacuggugagaaa

SEQ ID NO: 2454274 - RNA, 19 nt, Homo sapiens
  misc_RNA (1)...(19): siRNA sense strand
ccauaugaaugcaaagaau

SEQ ID NO: 2454275 - RNA, 19 nt, Homo sapiens
  misc_RNA (1)...(19): siRNA sense strand
ccauaugaguguaaguaau

SEQ ID NO: 2454276 - RNA, 19 nt, Homo sapiens
  misc_RNA (1)...(19): siRNA sense strand
ugagaaggcuuaugaauau

SEQ ID NO: 2454277 - RNA, 19 nt, Homo sapiens
  misc_RNA (1)...(19): siRNA sense strand
gaauauaagcaguguggga

SEQ ID NO: 2454278 - RNA, 19 nt, Homo sapiens
  misc_RNA (1)...(19): siRNA sense strand
gaauguagaaagacguuua

SEQ ID NO: 2454279 - RNA, 19 nt, Homo sapiens
  misc_RNA (1)...(19): siRNA sense strand
aauucacacuggugggaaa

SEQ ID NO: 2454280 - RNA, 19 nt, Homo sapiens
  misc_RNA (1)...(19): siRNA sense strand
agaaagacguuuaggcgga

SEQ ID NO: 2454281 - RNA, 19 nt, Homo sapiens
  misc_RNA (1)...(19): siRNA sense strand
auguaaggaauguggcaaa

SEQ ID NO: 2454282 - RNA, 19 nt, Homo sapiens
  misc_RNA (1)...(19): siRNA sense strand
gcuuguaacuuucaacuaa

SEQ ID NO: 2454283 - RNA, 19 nt, Homo sapiens
  misc_RNA (1)...(19): siRNA sense strand
ggugagaaguccuuugaau

SEQ ID NO: 2454284 - RNA, 19 nt, Homo sapiens
  misc_RNA (1)...(19): siRNA sense strand
auguaaagaaugugguaga

SEQ ID NO: 2454285 - RNA, 19 nt, Homo sapiens
  misc_RNA (1)...(19): siRNA sense strand
ccagagaacucauacuaau

SEQ ID NO: 2454286 - RNA, 19 nt, Homo sapiens
  misc_RNA (1)...(19): siRNA sense strand
guggcaaagcauucaauaa

SEQ ID NO: 2454287 - RNA, 19 nt, Homo sapiens
  misc_RNA (1)...(19): siRNA sense strand
auuuaaagaauguggcaga

SEQ ID NO: 2454288 - RNA, 19 nt, Homo sapiens
  misc_RNA (1)...(19): siRNA sense strand
aagucaugcuaaucagaaa

SEQ ID NO: 2454289 - RNA, 19 nt, Homo sapiens
  misc_RNA (1)...(19): siRNA sense strand
cccuaugaauguaaagaau

SEQ ID NO: 2454290 - RNA, 19 nt, Homo sapiens
  misc_RNA (1)...(19): siRNA sense strand
gaugagagacuuuacgaau

SEQ ID NO: 2454291 - RNA, 19 nt, Homo sapiens
  misc_RNA (1)...(19): siRNA sense strand
uggcaaagcauucaauaau

SEQ ID NO: 2454292 - RNA, 19 nt, Homo sapiens
  misc_RNA (1)...(19): siRNA sense strand
ugucuggaauguagaaaga

SEQ ID NO: 2454293 - RNA, 19 nt, Homo sapiens
  misc_RNA (1)...(19): siRNA sense strand
ggugagaaggcuuaugaau

SEQ ID NO: 2454294 - RNA, 19 nt, Homo sapiens
  misc_RNA (1)...(19): siRNA sense strand
caacaucagagaacacaua

SEQ ID NO: 2454295 - RNA, 19 nt, Homo sapiens
  misc_RNA (1)...(19): siRNA sense strand
guguuuaucuguuguucaa

SEQ ID NO: 2454296 - RNA, 19 nt, Homo sapiens
  misc_RNA (1)...(19): siRNA sense strand
gcauuuaacaaucgcucaa

SEQ ID NO: 2454297 - RNA, 19 nt, Homo sapiens
  misc_RNA (1)...(19): siRNA sense strand
agaaaccauaugaguguaa

SEQ ID NO: 2454298 - RNA, 19 nt, Homo sapiens
  misc_RNA (1)...(19): siRNA sense strand
gaguguaaguaauguggga

SEQ ID NO: 2454299 - RNA, 19 nt, Homo sapiens
  misc_RNA (1)...(19): siRNA sense strand
gugggaaggcauuuaacaa

SEQ ID NO: 2454300 - RNA, 19 nt, Homo sapiens
  misc_RNA (1)...(19): siRNA sense strand
augaaugucaggaauguaa

SEQ ID NO: 2454301 - RNA, 19 nt, Homo sapiens
  misc_RNA (1)...(19): siRNA sense strand
gagaacacauacuaaugaa

SEQ ID NO: 2454302 - RNA, 19 nt, Homo sapiens
  misc_RNA (1)...(19): siRNA sense strand
caacauaagagaacucaca

SEQ ID NO: 2454303 - RNA, 19 nt, Homo sapiens
  misc_RNA (1)...(19): siRNA sense strand
cauaagagaacucacacua

SEQ ID NO: 2454304 - RNA, 19 nt, Homo sapiens
  misc_RNA (1)...(19): siRNA sense strand
gaaaccauaugaaugcaaa

SEQ ID NO: 2454305 - RNA, 19 nt, Homo sapiens
  misc_RNA (1)...(19): siRNA sense strand
gcaaagaaugugggaaagu

SEQ ID NO: 2454306 - RNA, 19 nt, Homo sapiens
  misc_RNA (1)...(19): siRNA sense strand
ccuuaugaaugucaguaau

SEQ ID NO: 2454307 - RNA, 19 nt, Homo sapiens
  misc_RNA (1)...(19): siRNA sense strand
gggaaaguguuuaucuguu

SEQ ID NO: 2454308 - RNA, 19 nt, Homo sapiens
  misc_RNA (1)...(19): siRNA sense strand
ggcaaagcauucaauaauu

SEQ ID NO: 2454309 - RNA, 19 nt, Homo sapiens
  misc_RNA (1)...(19): siRNA sense strand
ugagaaaccauaugagugu

SEQ ID NO: 2454310 - RNA, 19 nt, Homo sapiens
  misc_RNA (1)...(19): siRNA sense strand
caacauaaucgaauucaca

SEQ ID NO: 2454311 - RNA, 19 nt, Homo sapiens
  misc_RNA (1)...(19): siRNA sense strand
aaagaaugugguagagcuu

SEQ ID NO: 2454312 - RNA, 19 nt, Homo sapiens
  misc_RNA (1)...(19): siRNA sense strand
gaaugucaguaaugcaaga

SEQ ID NO: 2454313 - RNA, 19 nt, Homo sapiens
  misc_RNA (1)...(19): siRNA sense strand
aaucagaaacccuaugaau

SEQ ID NO: 2454314 - RNA, 19 nt, Homo sapiens
  misc_RNA (1)...(19): siRNA sense strand
ucuuaugaaugucaggaau

SEQ ID NO: 2454315 - RNA, 19 nt, Homo sapiens
  misc_RNA (1)...(19): siRNA sense strand
ugguagagcuuuuaacaau

SEQ ID NO: 2454316 - RNA, 19 nt, Homo sapiens
  misc_RNA (1)...(19): siRNA sense strand
gagaaggcuuaugaauaua

SEQ ID NO: 2454317 - RNA, 19 nt, Homo sapiens
  misc_RNA (1)...(19): siRNA sense strand
ucagaaacccuaugaaugu

SEQ ID NO: 2454318 - RNA, 19 nt, Homo sapiens
  misc_RNA (1)...(19): siRNA sense strand
cuuuacgaauguacagaau

SEQ ID NO: 2454319 - RNA, 19 nt, Homo sapiens
  misc_RNA (1)...(19): siRNA sense strand
acaucuuauucgacaucaa

SEQ ID NO: 2454320 - RNA, 19 nt, Homo sapiens
  misc_RNA (1)...(19): siRNA sense strand
ggaaaccauaugaaugcaa

SEQ ID NO: 2454321 - RNA, 19 nt, Homo sapiens
  misc_RNA (1)...(19): siRNA sense strand
uuacgaauguacagaaugu

SEQ ID NO: 2454322 - RNA, 19 nt, Homo sapiens
  misc_RNA (1)...(19): siRNA sense strand
aagcagugugggaagguuu

SEQ ID NO: 2454323 - RNA, 19 nt, Homo sapiens
  misc_RNA (1)...(19): siRNA sense strand
aagcaauguuggaaggccu

SEQ ID NO: 2454324 - RNA, 19 nt, Homo sapiens
  misc_RNA (1)...(19): siRNA sense strand
acaucuuacucaacaucaa

SEQ ID NO: 2454325 - RNA, 19 nt, Homo sapiens
  misc_RNA (1)...(19): siRNA sense strand
caucagagaacacauacua

SEQ ID NO: 2454326 - RNA, 19 nt, Homo sapiens
  misc_RNA (1)...(19): siRNA sense strand
acacuggugagaaggcuua

SEQ ID NO: 2454327 - RNA, 19 nt, Homo sapiens
  misc_RNA (1)...(19): siRNA sense strand
ccaccuuacccaacauaau

SEQ ID NO: 2454328 - RNA, 19 nt, Homo sapiens
  misc_RNA (1)...(19): siRNA sense strand
agaaugugggaaaguguuu

SEQ ID NO: 2454329 - RNA, 19 nt, Homo sapiens
  misc_RNA (1)...(19): siRNA sense strand
agugagaaacccuaugaau

SEQ ID NO: 2454330 - RNA, 19 nt, Homo sapiens
  misc_RNA (1)...(19): siRNA sense strand
aauucacacugaugagaga

SEQ ID NO: 2454331 - RNA, 19 nt, Homo sapiens
  misc_RNA (1)...(19): siRNA sense strand
gggaaggcauuuaacaauc

SEQ ID NO: 2454332 - RNA, 19 nt, Homo sapiens
  misc_RNA (1)...(19): siRNA sense strand
aggcaaagugcacaucuua

SEQ ID NO: 2454333 - RNA, 19 nt, Homo sapiens
  misc_RNA (1)...(19): siRNA sense strand
aguaaugugggaaggcuuu

SEQ ID NO: 2454334 - RNA, 19 nt, Homo sapiens
  misc_RNA (1)...(19): siRNA sense strand
acagaaugugggaaggcau

SEQ ID NO: 2454335 - RNA, 19 nt, Homo sapiens
  misc_RNA (1)...(19): siRNA sense strand
ugggaaggcauuuaacaau

SEQ ID NO: 2454336 - RNA, 19 nt, Homo sapiens
  misc_RNA (1)...(19): siRNA sense strand
aaguaaugugggaaggcuu

SEQ ID NO: 2454337 - RNA, 19 nt, Homo sapiens
  misc_RNA (1)...(19): siRNA sense strand
aauucauacuggugagaaa

SEQ ID NO: 2454338 - RNA, 19 nt, Homo sapiens
  misc_RNA (1)...(19): siRNA sense strand
augugauguuggagaauua

SEQ ID NO: 2454339 - RNA, 19 nt, Homo sapiens
  misc_RNA (1)...(19): siRNA sense strand
cuuuaaagaacaugagaga

SEQ ID NO: 2454340 - RNA, 19 nt, Homo sapiens
  misc_RNA (1)...(19): siRNA sense strand
aggcauaagaccaagaaau

SEQ ID NO: 2454341 - RNA, 19 nt, Homo sapiens
  misc_RNA (1)...(19): siRNA sense strand
auguaaggagugugggaaa

SEQ ID NO: 2454342 - RNA, 19 nt, Homo sapiens
  misc_RNA (1)...(19): siRNA sense strand
auguaaggagugugggaaa

SEQ ID NO: 2454343 - RNA, 19 nt, Homo sapiens
  misc_RNA (1)...(19): siRNA sense strand
auguaaggaaugcgggaaa

SEQ ID NO: 2454344 - RNA, 19 nt, Homo sapiens
  misc_RNA (1)...(19): siRNA sense strand
agaaaugugauaaggguuu

SEQ ID NO: 2454345 - RNA, 19 nt, Homo sapiens
  misc_RNA (1)...(19): siRNA sense strand
aaagugaguuugaggguca

SEQ ID NO: 2454346 - RNA, 19 nt, Homo sapiens
  misc_RNA (1)...(19): siRNA sense strand
gcauguaaggugugugaga

SEQ ID NO: 2454347 - RNA, 19 nt, Homo sapiens
  misc_RNA (1)...(19): siRNA sense strand
gggaaagcuuuuaguguau

SEQ ID NO: 2454348 - RNA, 19 nt, Homo sapiens
  misc_RNA (1)...(19): siRNA sense strand
cccuauauguguaagaaau

SEQ ID NO: 2454349 - RNA, 19 nt, Homo sapiens
  misc_RNA (1)...(19): siRNA sense strand
cccuaugacuguaaagaau

SEQ ID NO: 2454350 - RNA, 19 nt, Homo sapiens
  misc_RNA (1)...(19): siRNA sense strand
augugagaaaugugggaaa

SEQ ID NO: 2454351 - RNA, 19 nt, Homo sapiens
  misc_RNA (1)...(19): siRNA sense strand
gguuuguuauccaggcaua

SEQ ID NO: 2454352 - RNA, 19 nt, Homo sapiens
  misc_RNA (1)...(19): siRNA sense strand
uuacugaacaccagagaau

SEQ ID NO: 2454353 - RNA, 19 nt, Homo sapiens
  misc_RNA (1)...(19): siRNA sense strand
cuguaaagaaugugggaag

SEQ ID NO: 2454354 - RNA, 19 nt, Homo sapiens
  misc_RNA (1)...(19): siRNA sense strand
gacacuacccagaggaaau

SEQ ID NO: 2454355 - RNA, 19 nt, Homo sapiens
  misc_RNA (1)...(19): siRNA sense strand
cuuacuggagcaagggaaa

SEQ ID NO: 2454356 - RNA, 19 nt, Homo sapiens
  misc_RNA (1)...(19): siRNA sense strand
cccuaugaguguaagguau

SEQ ID NO: 2454357 - RNA, 19 nt, Homo sapiens
  misc_RNA (1)...(19): siRNA sense strand
gaaaauucacacugguaaa

SEQ ID NO: 2454358 - RNA, 19 nt, Homo sapiens
  misc_RNA (1)...(19): siRNA sense strand
acuuaaucgacaucagaaa

SEQ ID NO: 2454359 - RNA, 19 nt, Homo sapiens
  misc_RNA (1)...(19): siRNA sense strand
uuguaaagaaugugggagu

SEQ ID NO: 2454360 - RNA, 19 nt, Homo sapiens
  misc_RNA (1)...(19): siRNA sense strand
aggaaauuguacagagaug

SEQ ID NO: 2454361 - RNA, 19 nt, Homo sapiens
  misc_RNA (1)...(19): siRNA sense strand
guguaaacaaugugggaag

SEQ ID NO: 2454362 - RNA, 19 nt, Homo sapiens
  misc_RNA (1)...(19): siRNA sense strand
cagaagaacucaugcaggu

SEQ ID NO: 2454363 - RNA, 19 nt, Homo sapiens
  misc_RNA (1)...(19): siRNA sense strand
uguaaggagugugggaaau

SEQ ID NO: 2454364 - RNA, 19 nt, Homo sapiens
  misc_RNA (1)...(19): siRNA sense strand
ccuuagaauacaucaaaga

SEQ ID NO: 2454365 - RNA, 19 nt, Homo sapiens
  misc_RNA (1)...(19): siRNA sense strand
gaguguaagguauguagaa

SEQ ID NO: 2454366 - RNA, 19 nt, Homo sapiens
  misc_RNA (1)...(19): siRNA sense strand
acagggacuuaaagaaaga

SEQ ID NO: 2454367 - RNA, 19 nt, Homo sapiens
  misc_RNA (1)...(19): siRNA sense strand
auguaaagaaugugggaag

SEQ ID NO: 2454368 - RNA, 19 nt, Homo sapiens
  misc_RNA (1)...(19): siRNA sense strand
aguguaagguauguagaaa

SEQ ID NO: 2454369 - RNA, 19 nt, Homo sapiens
  misc_RNA (1)...(19): siRNA sense strand
guuuauccaaagagaguau

SEQ ID NO: 2454370 - RNA, 19 nt, Homo sapiens
  misc_RNA (1)...(19): siRNA sense strand
auguaaagaauguggaaag

SEQ ID NO: 2454371 - RNA, 19 nt, Homo sapiens
  misc_RNA (1)...(19): siRNA sense strand
cccuaugaguguaaacaau

SEQ ID NO: 2454372 - RNA, 19 nt, Homo sapiens
  misc_RNA (1)...(19): siRNA sense strand
ugucaagaaugugggaaga

SEQ ID NO: 2454373 - RNA, 19 nt, Homo sapiens
  misc_RNA (1)...(19): siRNA sense strand
cguucagggauguggcuau

SEQ ID NO: 2454374 - RNA, 19 nt, Homo sapiens
  misc_RNA (1)...(19): siRNA sense strand
cgaugugggaagaccuuua

SEQ ID NO: 2454375 - RNA, 19 nt, Homo sapiens
  misc_RNA (1)...(19): siRNA sense strand
gggucaacagggacuuaaa

SEQ ID NO: 2454376 - RNA, 19 nt, Homo sapiens
  misc_RNA (1)...(19): siRNA sense strand
ggacacuacccagaggaaa

SEQ ID NO: 2454377 - RNA, 19 nt, Homo sapiens
  misc_RNA (1)...(19): siRNA sense strand
cggcauaaaacaauccaua

SEQ ID NO: 2454378 - RNA, 19 nt, Homo sapiens
  misc_RNA (1)...(19): siRNA sense strand
gagaauucauacagguaag

SEQ ID NO: 2454379 - RNA, 19 nt, Homo sapiens
  misc_RNA (1)...(19): siRNA sense strand
gaauguaaggaguguggga

SEQ ID NO: 2454380 - RNA, 19 nt, Homo sapiens
  misc_RNA (1)...(19): siRNA sense strand
cuuacugaacacagaagaa

SEQ ID NO: 2454381 - RNA, 19 nt, Homo sapiens
  misc_RNA (1)...(19): siRNA sense strand
gaauguaaggaguguggga

SEQ ID NO: 2454382 - RNA, 19 nt, Homo sapiens
  misc_RNA (1)...(19): siRNA sense strand
caguuuauccaaagagagu

SEQ ID NO: 2454383 - RNA, 19 nt, Homo sapiens
  misc_RNA (1)...(19): siRNA sense strand
caacaugggaaaauagauu

SEQ ID NO: 2454384 - RNA, 19 nt, Homo sapiens
  misc_RNA (1)...(19): siRNA sense strand
agagaauucauacagguaa

SEQ ID NO: 2454385 - RNA, 19 nt, Homo sapiens
  misc_RNA (1)...(19): siRNA sense strand
gcgagggaugugacaggaa

SEQ ID NO: 2454386 - RNA, 19 nt, Homo sapiens
  misc_RNA (1)...(19): siRNA sense strand
ggugaaaagcccuauaaau

SEQ ID NO: 2454387 - RNA, 19 nt, Homo sapiens
  misc_RNA (1)...(19): siRNA sense strand
ccacauaggcccugggacu

SEQ ID NO: 2454388 - RNA, 19 nt, Homo sapiens
  misc_RNA (1)...(19): siRNA sense strand
aggacaggcggcagcgaua

SEQ ID NO: 2454389 - RNA, 19 nt, Homo sapiens
  misc_RNA (1)...(19): siRNA sense strand
ccgaaaaccccuacagaga

SEQ ID NO: 2454390 - RNA, 19 nt, Homo sapiens
  misc_RNA (1)...(19): siRNA sense strand
ccacaagagaagaaaugca

SEQ ID NO: 2454391 - RNA, 19 nt, Homo sapiens
  misc_RNA (1)...(19): siRNA sense strand
uggaagaaguucagcaccu

SEQ ID NO: 2454392 - RNA, 19 nt, Homo sapiens
  misc_RNA (1)...(19): siRNA sense strand
gagaggauuuacugggcca

SEQ ID NO: 2454393 - RNA, 19 nt, Homo sapiens
  misc_RNA (1)...(19): siRNA sense strand
gcuuuguagaagaacuuaa

SEQ ID NO: 2454394 - RNA, 19 nt, Homo sapiens
  misc_RNA (1)...(19): siRNA sense strand
gggcacuacuccaugcaga

SEQ ID NO: 2454395 - RNA, 19 nt, Homo sapiens
  misc_RNA (1)...(19): siRNA sense strand
aggccaucaugaaagagaa

SEQ ID NO: 2454396 - RNA, 19 nt, Homo sapiens
  misc_RNA (1)...(19): siRNA sense strand
augaaagagaagcggcuga

SEQ ID NO: 2454397 - RNA, 19 nt, Homo sapiens
  misc_RNA (1)...(19): siRNA sense strand
acaagagaagaaaugcaaa

SEQ ID NO: 2454398 - RNA, 19 nt, Homo sapiens
  misc_RNA (1)...(19): siRNA sense strand
agacauauguggcacgauc

SEQ ID NO: 2454399 - RNA, 19 nt, Homo sapiens
  misc_RNA (1)...(19): siRNA sense strand
cugaauaaggauaaagaga

SEQ ID NO: 2454400 - RNA, 19 nt, Homo sapiens
  misc_RNA (1)...(19): siRNA sense strand
agaaaggacugauggggaa

SEQ ID NO: 2454401 - RNA, 19 nt, Homo sapiens
  misc_RNA (1)...(19): siRNA sense strand
agaugaugacagugaagaa

SEQ ID NO: 2454402 - RNA, 19 nt, Homo sapiens
  misc_RNA (1)...(19): siRNA sense strand
agcagaaaucagugagaau

SEQ ID NO: 2454403 - RNA, 19 nt, Homo sapiens
  misc_RNA (1)...(19): siRNA sense strand
cggaaacggcaauggccua

SEQ ID NO: 2454404 - RNA, 19 nt, Homo sapiens
  misc_RNA (1)...(19): siRNA sense strand
ucgagaagcuugucgggau

SEQ ID NO: 2454405 - RNA, 19 nt, Homo sapiens
  misc_RNA (1)...(19): siRNA sense strand
aggaaagccagccaggaaa

SEQ ID NO: 2454406 - RNA, 19 nt, Homo sapiens
  misc_RNA (1)...(19): siRNA sense strand
gggacuagagacugcagaa

SEQ ID NO: 2454407 - RNA, 19 nt, Homo sapiens
  misc_RNA (1)...(19): siRNA sense strand
agcaauggcugaaugggua

SEQ ID NO: 2454408 - RNA, 19 nt, Homo sapiens
  misc_RNA (1)...(19): siRNA sense strand
gcaagaugguuucagcaga

SEQ ID NO: 2454409 - RNA, 19 nt, Homo sapiens
  misc_RNA (1)...(19): siRNA sense strand
cuauagauuuauuggcguu

SEQ ID NO: 2454410 - RNA, 19 nt, Homo sapiens
  misc_RNA (1)...(19): siRNA sense strand
cagaaacagaagagaccca

SEQ ID NO: 2454411 - RNA, 19 nt, Homo sapiens
  misc_RNA (1)...(19): siRNA sense strand
cuggacugaauaaggauaa

SEQ ID NO: 2454412 - RNA, 19 nt, Homo sapiens
  misc_RNA (1)...(19): siRNA sense strand
cagacuuugcgguggaaaa

SEQ ID NO: 2454413 - RNA, 19 nt, Homo sapiens
  misc_RNA (1)...(19): siRNA sense strand
aaucagugagaaucggaaa

SEQ ID NO: 2454414 - RNA, 19 nt, Homo sapiens
  misc_RNA (1)...(19): siRNA sense strand
gguugggcauggagggacu

SEQ ID NO: 2454415 - RNA, 19 nt, Homo sapiens
  misc_RNA (1)...(19): siRNA sense strand
gggaaagaguugcugaggu

SEQ ID NO: 2454416 - RNA, 19 nt, Homo sapiens
  misc_RNA (1)...(19): siRNA sense strand
aggauaaagagacagaaga

SEQ ID NO: 2454417 - RNA, 19 nt, Homo sapiens
  misc_RNA (1)...(19): siRNA sense strand
aacaacaagccgagcgaga

SEQ ID NO: 2454418 - RNA, 19 nt, Homo sapiens
  misc_RNA (1)...(19): siRNA sense strand
ccaaacugcaggaaagcca

SEQ ID NO: 2454419 - RNA, 19 nt, Homo sapiens
  misc_RNA (1)...(19): siRNA sense strand
cgagaagcuugucgggauc

SEQ ID NO: 2454420 - RNA, 19 nt, Homo sapiens
  misc_RNA (1)...(19): siRNA sense strand
uggaaaacuucuuugugaa

SEQ ID NO: 2454421 - RNA, 19 nt, Homo sapiens
  misc_RNA (1)...(19): siRNA sense strand
acuaaaucucaaacagaca

SEQ ID NO: 2454422 - RNA, 19 nt, Homo sapiens
  misc_RNA (1)...(19): siRNA sense strand
cugucagaggacuggcaaa

SEQ ID NO: 2454423 - RNA, 19 nt, Homo sapiens
  misc_RNA (1)...(19): siRNA sense strand
aguagugaauacagaccau

SEQ ID NO: 2454424 - RNA, 19 nt, Homo sapiens
  misc_RNA (1)...(19): siRNA sense strand
auaaggauaaagagacaga

SEQ ID NO: 2454425 - RNA, 19 nt, Homo sapiens
  misc_RNA (1)...(19): siRNA sense strand
uugccaaacugcaggaaag

SEQ ID NO: 2454426 - RNA, 19 nt, Homo sapiens
  misc_RNA (1)...(19): siRNA sense strand
gugcaaaggaaguggaaga

SEQ ID NO: 2454427 - RNA, 19 nt, Homo sapiens
  misc_RNA (1)...(19): siRNA sense strand
gggaagaauaucuggguca

SEQ ID NO: 2454428 - RNA, 19 nt, Homo sapiens
  misc_RNA (1)...(19): siRNA sense strand
agaauuaagcagaggagau

SEQ ID NO: 2454429 - RNA, 19 nt, Homo sapiens
  misc_RNA (1)...(19): siRNA sense strand
cuuaaaugaccaugaagaa

SEQ ID NO: 2454430 - RNA, 19 nt, Homo sapiens
  misc_RNA (1)...(19): siRNA sense strand
ccugauugccauagagaga

SEQ ID NO: 2454431 - RNA, 19 nt, Homo sapiens
  misc_RNA (1)...(19): siRNA sense strand
gggagaauggcguguggaa

SEQ ID NO: 2454432 - RNA, 19 nt, Homo sapiens
  misc_RNA (1)...(19): siRNA sense strand
aggaaguggaagaucauua

SEQ ID NO: 2454433 - RNA, 19 nt, Homo sapiens
  misc_RNA (1)...(19): siRNA sense strand
gcuuaaaugaccaugaaga

SEQ ID NO: 2454434 - RNA, 19 nt, Homo sapiens
  misc_RNA (1)...(19): siRNA sense strand
uggaacaguagaauggaaa

SEQ ID NO: 2454435 - RNA, 19 nt, Homo sapiens
  misc_RNA (1)...(19): siRNA sense strand
gaagaaaauuguuuggaga

SEQ ID NO: 2454436 - RNA, 19 nt, Homo sapiens
  misc_RNA (1)...(19): siRNA sense strand
ugguauauuuggcccgaaa

SEQ ID NO: 2454437 - RNA, 19 nt, Homo sapiens
  misc_RNA (1)...(19): siRNA sense strand
cagcaaaugugguggacag

SEQ ID NO: 2454438 - RNA, 19 nt, Homo sapiens
  misc_RNA (1)...(19): siRNA sense strand
ggagaauggcguguggaaa

SEQ ID NO: 2454439 - RNA, 19 nt, Homo sapiens
  misc_RNA (1)...(19): siRNA sense strand
cuuugaagagggagaaaca

SEQ ID NO: 2454440 - RNA, 19 nt, Homo sapiens
  misc_RNA (1)...(19): siRNA sense strand
gcaaacaugaagaggugau

SEQ ID NO: 2454441 - RNA, 19 nt, Homo sapiens
  misc_RNA (1)...(19): siRNA sense strand
cuguuuagacaaagcuuaa

SEQ ID NO: 2454442 - RNA, 19 nt, Homo sapiens
  misc_RNA (1)...(19): siRNA sense strand
gagcuagaaaauuggauaa

SEQ ID NO: 2454443 - RNA, 19 nt, Homo sapiens
  misc_RNA (1)...(19): siRNA sense strand
auaauaacccugagaaacu

SEQ ID NO: 2454444 - RNA, 19 nt, Homo sapiens
  misc_RNA (1)...(19): siRNA sense strand
gccuaaaaguagauagcau

SEQ ID NO: 2454445 - RNA, 19 nt, Homo sapiens
  misc_RNA (1)...(19): siRNA sense strand
ggaacaguagaauggaaau

SEQ ID NO: 2454446 - RNA, 19 nt, Homo sapiens
  misc_RNA (1)...(19): siRNA sense strand
ccugagaaacuuuuggaaa

SEQ ID NO: 2454447 - RNA, 19 nt, Homo sapiens
  misc_RNA (1)...(19): siRNA sense strand
uggaaauugcgaucugaua

SEQ ID NO: 2454448 - RNA, 19 nt, Homo sapiens
  misc_RNA (1)...(19): siRNA sense strand
ugucagaggagcuguugaa

SEQ ID NO: 2454449 - RNA, 19 nt, Homo sapiens
  misc_RNA (1)...(19): siRNA sense strand
gucagaaaacagaaggaaa

SEQ ID NO: 2454450 - RNA, 19 nt, Homo sapiens
  misc_RNA (1)...(19): siRNA sense strand
cuggaacaguagaauggaa

SEQ ID NO: 2454451 - RNA, 19 nt, Homo sapiens
  misc_RNA (1)...(19): siRNA sense strand
gcgaucugauacagcacaa

SEQ ID NO: 2454452 - RNA, 19 nt, Homo sapiens
  misc_RNA (1)...(19): siRNA sense strand
aguaaagucaucucagcaa

SEQ ID NO: 2454453 - RNA, 19 nt, Homo sapiens
  misc_RNA (1)...(19): siRNA sense strand
ggugauugccagaagaacu

SEQ ID NO: 2454454 - RNA, 19 nt, Homo sapiens
  misc_RNA (1)...(19): siRNA sense strand
agacacuauuaaugggcuu

SEQ ID NO: 2454455 - RNA, 19 nt, Homo sapiens
  misc_RNA (1)...(19): siRNA sense strand
aagcagaggagauggugau

SEQ ID NO: 2454456 - RNA, 19 nt, Homo sapiens
  misc_RNA (1)...(19): siRNA sense strand
gagaaguagcagacuggau

SEQ ID NO: 2454457 - RNA, 19 nt, Homo sapiens
  misc_RNA (1)...(19): siRNA sense strand
gaacuaagguuaaagaagc

SEQ ID NO: 2454458 - RNA, 19 nt, Homo sapiens
  misc_RNA (1)...(19): siRNA sense strand
guuuauucccugugaaaau

SEQ ID NO: 2454459 - RNA, 19 nt, Homo sapiens
  misc_RNA (1)...(19): siRNA sense strand
auauuuggcccgaaaggaa

SEQ ID NO: 2454460 - RNA, 19 nt, Homo sapiens
  misc_RNA (1)...(19): siRNA sense strand
cugcaaacaugaagaggug

SEQ ID NO: 2454461 - RNA, 19 nt, Homo sapiens
  misc_RNA (1)...(19): siRNA sense strand
caguggagcagcugcaaaa

SEQ ID NO: 2454462 - RNA, 19 nt, Homo sapiens
  misc_RNA (1)...(19): siRNA sense strand
ccagugaugaugagcugaa

SEQ ID NO: 2454463 - RNA, 19 nt, Homo sapiens
  misc_RNA (1)...(19): siRNA sense strand
uugaagagggagaaacaca

SEQ ID NO: 2454464 - RNA, 19 nt, Homo sapiens
  misc_RNA (1)...(19): siRNA sense strand
ggucuacagagaaaagaaa

SEQ ID NO: 2454465 - RNA, 19 nt, Homo sapiens
  misc_RNA (1)...(19): siRNA sense strand
gaaguuugaguguggguca

SEQ ID NO: 2454466 - RNA, 19 nt, Homo sapiens
  misc_RNA (1)...(19): siRNA sense strand
acccagcuguuuagacaaa

SEQ ID NO: 2454467 - RNA, 19 nt, Homo sapiens
  misc_RNA (1)...(19): siRNA sense strand
auaagagccacaaaguaaa

SEQ ID NO: 2454468 - RNA, 19 nt, Homo sapiens
  misc_RNA (1)...(19): siRNA sense strand
cugagaaacuuuuggaaac

SEQ ID NO: 2454469 - RNA, 19 nt, Homo sapiens
  misc_RNA (1)...(19): siRNA sense strand
cugugaugcaugugaagau

SEQ ID NO: 2454470 - RNA, 19 nt, Homo sapiens
  misc_RNA (1)...(19): siRNA sense strand
ccuaaaaguagauagcauu

SEQ ID NO: 2454471 - RNA, 19 nt, Homo sapiens
  misc_RNA (1)...(19): siRNA sense strand
aaguagaacugacaggcga

SEQ ID NO: 2454472 - RNA, 19 nt, Homo sapiens
  misc_RNA (1)...(19): siRNA sense strand
ggaagcagaauuaagcaga

SEQ ID NO: 2454473 - RNA, 19 nt, Homo sapiens
  misc_RNA (1)...(19): siRNA sense strand
agacaaagcuuaaaugacc

SEQ ID NO: 2454474 - RNA, 19 nt, Homo sapiens
  misc_RNA (1)...(19): siRNA sense strand
uagaacaaguagucaaacu

SEQ ID NO: 2454475 - RNA, 19 nt, Homo sapiens
  misc_RNA (1)...(19): siRNA sense strand
ccucagaaacccuaaugau

SEQ ID NO: 2454476 - RNA, 19 nt, Homo sapiens
  misc_RNA (1)...(19): siRNA sense strand
gaggugauugccagaagaa

SEQ ID NO: 2454477 - RNA, 19 nt, Homo sapiens
  misc_RNA (1)...(19): siRNA sense strand
gauuggaaacacagccuuu

SEQ ID NO: 2454478 - RNA, 19 nt, Homo sapiens
  misc_RNA (1)...(19): siRNA sense strand
gcuguuuagacaaagcuua

SEQ ID NO: 2454479 - RNA, 19 nt, Homo sapiens
  misc_RNA (1)...(19): siRNA sense strand
gcugaaaccuggagggcuu

SEQ ID NO: 2454480 - RNA, 19 nt, Homo sapiens
  misc_RNA (1)...(19): siRNA sense strand
ugauaaaggagguggacau

SEQ ID NO: 2454481 - RNA, 19 nt, Homo sapiens
  misc_RNA (1)...(19): siRNA sense strand
gggagaaugucuauggcuu

SEQ ID NO: 2454482 - RNA, 19 nt, Homo sapiens
  misc_RNA (1)...(19): siRNA sense strand
agugaagacggaagagcua

SEQ ID NO: 2454483 - RNA, 19 nt, Homo sapiens
  misc_RNA (1)...(19): siRNA sense strand
agaagaucauuaaggccaa

SEQ ID NO: 2454484 - RNA, 19 nt, Homo sapiens
  misc_RNA (1)...(19): siRNA sense strand
guaaaguggaagaggugga

SEQ ID NO: 2454485 - RNA, 19 nt, Homo sapiens
  misc_RNA (1)...(19): siRNA sense strand
ccaugaagccaaaugccaa

SEQ ID NO: 2454486 - RNA, 19 nt, Homo sapiens
  misc_RNA (1)...(19): siRNA sense strand
cagaagaucauuaaggcca

SEQ ID NO: 2454487 - RNA, 19 nt, Homo sapiens
  misc_RNA (1)...(19): siRNA sense strand
gaggaaaugcugaaggaug

SEQ ID NO: 2454488 - RNA, 19 nt, Homo sapiens
  misc_RNA (1)...(19): siRNA sense strand
gggacagcugugugaaaca

SEQ ID NO: 2454489 - RNA, 19 nt, Homo sapiens
  misc_RNA (1)...(19): siRNA sense strand
ggguaaaguggaagaggug

SEQ ID NO: 2454490 - RNA, 19 nt, Homo sapiens
  misc_RNA (1)...(19): siRNA sense strand
gaauuuaccaagugccaca

SEQ ID NO: 2454491 - RNA, 19 nt, Homo sapiens
  misc_RNA (1)...(19): siRNA sense strand
gcaucagggacguggccau

SEQ ID NO: 2454492 - RNA, 19 nt, Homo sapiens
  misc_RNA (1)...(19): siRNA sense strand
aggagaugaccucgagaga

SEQ ID NO: 2454493 - RNA, 19 nt, Homo sapiens
  misc_RNA (1)...(19): siRNA sense strand
cuguggagaagguggacau

SEQ ID NO: 2454494 - RNA, 19 nt, Homo sapiens
  misc_RNA (1)...(19): siRNA sense strand
acacagugaagacggaaga

SEQ ID NO: 2454495 - RNA, 19 nt, Homo sapiens
  misc_RNA (1)...(19): siRNA sense strand
aagggacagcugugugaaa

SEQ ID NO: 2454496 - RNA, 19 nt, Homo sapiens
  misc_RNA (1)...(19): siRNA sense strand
agcacguguucaaggacaa

SEQ ID NO: 2454497 - RNA, 19 nt, Homo sapiens
  misc_RNA (1)...(19): siRNA sense strand
gggacguggccaugaagga

SEQ ID NO: 2454498 - RNA, 19 nt, Homo sapiens
  misc_RNA (1)...(19): siRNA sense strand
uugaagacagacaguacaa

SEQ ID NO: 2454499 - RNA, 19 nt, Homo sapiens
  misc_RNA (1)...(19): siRNA sense strand
ccaagugccacaagaaaau

SEQ ID NO: 2454500 - RNA, 19 nt, Homo sapiens
  misc_RNA (1)...(19): siRNA sense strand
gggucaaguaugugaacaa

SEQ ID NO: 2454501 - RNA, 19 nt, Homo sapiens
  misc_RNA (1)...(19): siRNA sense strand
cgguaugcaugcugggcaa

SEQ ID NO: 2454502 - RNA, 19 nt, Homo sapiens
  misc_RNA (1)...(19): siRNA sense strand
uugagaaggugaagggcuu

SEQ ID NO: 2454503 - RNA, 19 nt, Homo sapiens
  misc_RNA (1)...(19): siRNA sense strand
agguggaggugguggagau

SEQ ID NO: 2454504 - RNA, 19 nt, Homo sapiens
  misc_RNA (1)...(19): siRNA sense strand
uggcacuguuugaggaaga

SEQ ID NO: 2454505 - RNA, 19 nt, Homo sapiens
  misc_RNA (1)...(19): siRNA sense strand
ccagcaaccacgagcgcua

SEQ ID NO: 2454506 - RNA, 19 nt, Homo sapiens
  misc_RNA (1)...(19): siRNA sense strand
agacugagcgggagcgaga

SEQ ID NO: 2454507 - RNA, 19 nt, Homo sapiens
  misc_RNA (1)...(19): siRNA sense strand
cagcauaaggucuggagga

SEQ ID NO: 2454508 - RNA, 19 nt, Homo sapiens
  misc_RNA (1)...(19): siRNA sense strand
gugagggcgacgagaacua

SEQ ID NO: 2454509 - RNA, 19 nt, Homo sapiens
  misc_RNA (1)...(19): siRNA sense strand
uggaaauugagaaggugaa

SEQ ID NO: 2454510 - RNA, 19 nt, Homo sapiens
  misc_RNA (1)...(19): siRNA sense strand
ggaacuugguggugggcac

SEQ ID NO: 2454511 - RNA, 19 nt, Homo sapiens
  misc_RNA (1)...(19): siRNA sense strand
gugacaucguggagaagca

SEQ ID NO: 2454512 - RNA, 19 nt, Homo sapiens
  misc_RNA (1)...(19): siRNA sense strand
acgggaaggugaaugguga

SEQ ID NO: 2454513 - RNA, 19 nt, Homo sapiens
  misc_RNA (1)...(19): siRNA sense strand
ugaccaagacugagcggga

SEQ ID NO: 2454514 - RNA, 19 nt, Homo sapiens
  misc_RNA (1)...(19): siRNA sense strand
aggccauugccaaggacaa

SEQ ID NO: 2454515 - RNA, 19 nt, Homo sapiens
  misc_RNA (1)...(19): siRNA sense strand
cgggaaggugaauggugaa

SEQ ID NO: 2454516 - RNA, 19 nt, Homo sapiens
  misc_RNA (1)...(19): siRNA sense strand
ggugaauggugaacccaca

SEQ ID NO: 2454517 - RNA, 19 nt, Homo sapiens
  misc_RNA (1)...(19): siRNA sense strand
agcauaaggucuggaggaa

SEQ ID NO: 2454518 - RNA, 19 nt, Homo sapiens
  misc_RNA (1)...(19): siRNA sense strand
aggugguggagaugcauaa

SEQ ID NO: 2454519 - RNA, 19 nt, Homo sapiens
  misc_RNA (1)...(19): siRNA sense strand
uggcccagauggaugacaa

SEQ ID NO: 2454520 - RNA, 19 nt, Homo sapiens
  misc_RNA (1)...(19): siRNA sense strand
ccaggaacagugagggcga

SEQ ID NO: 2454521 - RNA, 19 nt, Homo sapiens
  misc_RNA (1)...(19): siRNA sense strand
ccaaagagcaugaggaggc

SEQ ID NO: 2454522 - RNA, 19 nt, Homo sapiens
  misc_RNA (1)...(19): siRNA sense strand
gcauugagggugugguucu

SEQ ID NO: 2454523 - RNA, 19 nt, Homo sapiens
  misc_RNA (1)...(19): siRNA sense strand
uguaguggacaaugagaca

SEQ ID NO: 2454524 - RNA, 19 nt, Homo sapiens
  misc_RNA (1)...(19): siRNA sense strand
acagugagggcgacgagaa

SEQ ID NO: 2454525 - RNA, 19 nt, Homo sapiens
  misc_RNA (1)...(19): siRNA sense strand
gcagaauaucuuugggguu

SEQ ID NO: 2454526 - RNA, 19 nt, Homo sapiens
  misc_RNA (1)...(19): siRNA sense strand
uggaggugguggagaugca

SEQ ID NO: 2454527 - RNA, 19 nt, Homo sapiens
  misc_RNA (1)...(19): siRNA sense strand
gugccugcauugagggugu

SEQ ID NO: 2454528 - RNA, 19 nt, Homo sapiens
  misc_RNA (1)...(19): siRNA sense strand
agguggugguggccagcaa

SEQ ID NO: 2454529 - RNA, 19 nt, Homo sapiens
  misc_RNA (1)...(19): siRNA sense strand
cggagaacucggaggaaga

SEQ ID NO: 2454530 - RNA, 19 nt, Homo sapiens
  misc_RNA (1)...(19): siRNA sense strand
gcaccaggaaggaggaaaa

SEQ ID NO: 2454531 - RNA, 19 nt, Homo sapiens
  misc_RNA (1)...(19): siRNA sense strand
aggaagaagcuaauggaga

SEQ ID NO: 2454532 - RNA, 19 nt, Homo sapiens
  misc_RNA (1)...(19): siRNA sense strand
gagaagggcaggaggagga

SEQ ID NO: 2454533 - RNA, 19 nt, Homo sapiens
  misc_RNA (1)...(19): siRNA sense strand
gugacaacauucagggcuu

SEQ ID NO: 2454534 - RNA, 19 nt, Homo sapiens
  misc_RNA (1)...(19): siRNA sense strand
cggaggaagaggagugcau

SEQ ID NO: 2454535 - RNA, 19 nt, Homo sapiens
  misc_RNA (1)...(19): siRNA sense strand
acaggaaagcugaggacuu

SEQ ID NO: 2454536 - RNA, 19 nt, Homo sapiens
  misc_RNA (1)...(19): siRNA sense strand
gcaggaagaaggaagccaa

SEQ ID NO: 2454537 - RNA, 19 nt, Homo sapiens
  misc_RNA (1)...(19): siRNA sense strand
gaaccauggccgaccgcaa

SEQ ID NO: 2454538 - RNA, 19 nt, Homo sapiens
  misc_RNA (1)...(19): siRNA sense strand
ccucaucagucuuggacga

SEQ ID NO: 2454539 - RNA, 19 nt, Homo sapiens
  misc_RNA (1)...(19): siRNA sense strand
acccagagcaggugaucaa

SEQ ID NO: 2454540 - RNA, 19 nt, Homo sapiens
  misc_RNA (1)...(19): siRNA sense strand
ccgcccuaguggaggagua

SEQ ID NO: 2454541 - RNA, 19 nt, Homo sapiens
  misc_RNA (1)...(19): siRNA sense strand
cuccagaagaugauaggaa

SEQ ID NO: 2454542 - RNA, 19 nt, Homo sapiens
  misc_RNA (1)...(19): siRNA sense strand
agucgagagugcaugggaa

SEQ ID NO: 2454543 - RNA, 19 nt, Homo sapiens
  misc_RNA (1)...(19): siRNA sense strand
cggugauugaggagccuaa

SEQ ID NO: 2454544 - RNA, 19 nt, Homo sapiens
  misc_RNA (1)...(19): siRNA sense strand
gugucuacuacgaggauga

SEQ ID NO: 2454545 - RNA, 19 nt, Homo sapiens
  misc_RNA (1)...(19): siRNA sense strand
augaguacgaugacacaua

SEQ ID NO: 2454546 - RNA, 19 nt, Homo sapiens
  misc_RNA (1)...(19): siRNA sense strand
augacgacgaugaggaaga

SEQ ID NO: 2454547 - RNA, 19 nt, Homo sapiens
  misc_RNA (1)...(19): siRNA sense strand
ccuagacagagaaaugaaa

SEQ ID NO: 2454548 - RNA, 19 nt, Homo sapiens
  misc_RNA (1)...(19): siRNA sense strand
acagagaaaugaaaccaga

SEQ ID NO: 2454549 - RNA, 19 nt, Homo sapiens
  misc_RNA (1)...(19): siRNA sense strand
ccugcagugcugagagaga

SEQ ID NO: 2454550 - RNA, 19 nt, Homo sapiens
  misc_RNA (1)...(19): siRNA sense strand
acaaggaauccaaagauca

SEQ ID NO: 2454551 - RNA, 19 nt, Homo sapiens
  misc_RNA (1)...(19): siRNA sense strand
ccgaaauggagucugcaau

SEQ ID NO: 2454552 - RNA, 19 nt, Homo sapiens
  misc_RNA (1)...(19): siRNA sense strand
cuagagaagggcaggagga

SEQ ID NO: 2454553 - RNA, 19 nt, Homo sapiens
  misc_RNA (1)...(19): siRNA sense strand
cuacagaagugccuggacu

SEQ ID NO: 2454554 - RNA, 19 nt, Homo sapiens
  misc_RNA (1)...(19): siRNA sense strand
ccagaagaugauaggaaac

SEQ ID NO: 2454555 - RNA, 19 nt, Homo sapiens
  misc_RNA (1)...(19): siRNA sense strand
cuaaagacccaucggugau

SEQ ID NO: 2454556 - RNA, 19 nt, Homo sapiens
  misc_RNA (1)...(19): siRNA sense strand
gaggaaaacacgcggaguu

SEQ ID NO: 2454557 - RNA, 19 nt, Homo sapiens
  misc_RNA (1)...(19): siRNA sense strand
gcaagaggagcaaaggcau

SEQ ID NO: 2454558 - RNA, 19 nt, Homo sapiens
  misc_RNA (1)...(19): siRNA sense strand
uggccuugccucacgauaa

SEQ ID NO: 2454559 - RNA, 19 nt, Homo sapiens
  misc_RNA (1)...(19): siRNA sense strand
cagaagaugauaggaaaca

SEQ ID NO: 2454560 - RNA, 19 nt, Homo sapiens
  misc_RNA (1)...(19): siRNA sense strand
acaacgucuuccagaauga

SEQ ID NO: 2454561 - RNA, 19 nt, Homo sapiens
  misc_RNA (1)...(19): siRNA sense strand
ugaaggaccugcugccaga

SEQ ID NO: 2454562 - RNA, 19 nt, Homo sapiens
  misc_RNA (1)...(19): siRNA sense strand
ucugcgugcucuuuggaaa

SEQ ID NO: 2454563 - RNA, 19 nt, Homo sapiens
  misc_RNA (1)...(19): siRNA sense strand
cccagaagcuugaggagag

SEQ ID NO: 2454564 - RNA, 19 nt, Homo sapiens
  misc_RNA (1)...(19): siRNA sense strand
gaagaagcuaauggagauu

SEQ ID NO: 2454565 - RNA, 19 nt, Homo sapiens
  misc_RNA (1)...(19): siRNA sense strand
aggaggaggaugacgacga

SEQ ID NO: 2454566 - RNA, 19 nt, Homo sapiens
  misc_RNA (1)...(19): siRNA sense strand
agcagaaggcagaccggua

SEQ ID NO: 2454567 - RNA, 19 nt, Homo sapiens
  misc_RNA (1)...(19): siRNA sense strand
ggaugaguacgaugacaca

SEQ ID NO: 2454568 - RNA, 19 nt, Homo sapiens
  misc_RNA (1)...(19): siRNA sense strand
aggaggaugacgacgauga

SEQ ID NO: 2454569 - RNA, 19 nt, Homo sapiens
  misc_RNA (1)...(19): siRNA sense strand
caagaaaggguaccggcau

SEQ ID NO: 2454570 - RNA, 19 nt, Homo sapiens
  misc_RNA (1)...(19): siRNA sense strand
acgcggaacaauugagcaa

SEQ ID NO: 2454571 - RNA, 19 nt, Homo sapiens
  misc_RNA (1)...(19): siRNA sense strand
ggaagaauauggagagagc

SEQ ID NO: 2454572 - RNA, 19 nt, Homo sapiens
  misc_RNA (1)...(19): siRNA sense strand
ugaaggaagaauauggaga

SEQ ID NO: 2454573 - RNA, 19 nt, Homo sapiens
  misc_RNA (1)...(19): siRNA sense strand
ggccuauguuggagggagu

SEQ ID NO: 2454574 - RNA, 19 nt, Homo sapiens
  misc_RNA (1)...(19): siRNA sense strand
gaguuaaauaccugugcau

SEQ ID NO: 2454575 - RNA, 19 nt, Homo sapiens
  misc_RNA (1)...(19): siRNA sense strand
cggcaguggcugaaggaag

SEQ ID NO: 2454576 - RNA, 19 nt, Homo sapiens
  misc_RNA (1)...(19): siRNA sense strand
gaauauggagagagcccuu

SEQ ID NO: 2454577 - RNA, 19 nt, Homo sapiens
  misc_RNA (1)...(19): siRNA sense strand
caguaucggcaguggcuga

SEQ ID NO: 2454578 - RNA, 19 nt, Homo sapiens
  misc_RNA (1)...(19): siRNA sense strand
aacaauugagcaagaacaa

SEQ ID NO: 2454579 - RNA, 19 nt, Homo sapiens
  misc_RNA (1)...(19): siRNA sense strand
uugagaagcaugaggucca

SEQ ID NO: 2454580 - RNA, 19 nt, Homo sapiens
  misc_RNA (1)...(19): siRNA sense strand
aaggaagaauauggagaga

SEQ ID NO: 2454581 - RNA, 19 nt, Homo sapiens
  misc_RNA (1)...(19): siRNA sense strand
gggcaaaggaauuggguuc

SEQ ID NO: 2454582 - RNA, 19 nt, Homo sapiens
  misc_RNA (1)...(19): siRNA sense strand
auauaaggaaggugggcaa

SEQ ID NO: 2454583 - RNA, 19 nt, Homo sapiens
  misc_RNA (1)...(19): siRNA sense strand
acaaauaaggcaaggcaca

SEQ ID NO: 2454584 - RNA, 19 nt, Homo sapiens
  misc_RNA (1)...(19): siRNA sense strand
ucacuaaauggaagggaga

SEQ ID NO: 2454585 - RNA, 19 nt, Homo sapiens
  misc_RNA (1)...(19): siRNA sense strand
cugcuguacaugauagaaa

SEQ ID NO: 2454586 - RNA, 19 nt, Homo sapiens
  misc_RNA (1)...(19): siRNA sense strand
cugauaacaaccugggaga

SEQ ID NO: 2454587 - RNA, 19 nt, Homo sapiens
  misc_RNA (1)...(19): siRNA sense strand
agggcuagucguuggauuu

SEQ ID NO: 2454588 - RNA, 19 nt, Homo sapiens
  misc_RNA (1)...(19): siRNA sense strand
ggaugaaagcacuggcaug

SEQ ID NO: 2454589 - RNA, 19 nt, Homo sapiens
  misc_RNA (1)...(19): siRNA sense strand
caacaaauaaggcaaggca

SEQ ID NO: 2454590 - RNA, 19 nt, Homo sapiens
  misc_RNA (1)...(19): siRNA sense strand
gagaagugaagaagcgucu

SEQ ID NO: 2454591 - RNA, 19 nt, Homo sapiens
  misc_RNA (1)...(19): siRNA sense strand
cgacaauauaugcaaaaga

SEQ ID NO: 2454592 - RNA, 19 nt, Homo sapiens
  misc_RNA (1)...(19): siRNA sense strand
aggaaggugggcaaaggaa

SEQ ID NO: 2454593 - RNA, 19 nt, Homo sapiens
  misc_RNA (1)...(19): siRNA sense strand
auaacaacgcagugaaucu

SEQ ID NO: 2454594 - RNA, 19 nt, Homo sapiens
  misc_RNA (1)...(19): siRNA sense strand
gggaaaugcuggagggauc

SEQ ID NO: 2454595 - RNA, 19 nt, Homo sapiens
  misc_RNA (1)...(19): siRNA sense strand
gggacguggagaagggaaa

SEQ ID NO: 2454596 - RNA, 19 nt, Homo sapiens
  misc_RNA (1)...(19): siRNA sense strand
cagccaucgccaaggcaua

SEQ ID NO: 2454597 - RNA, 19 nt, Homo sapiens
  misc_RNA (1)...(19): siRNA sense strand
uguaugagcugguggugga

SEQ ID NO: 2454598 - RNA, 19 nt, Homo sapiens
  misc_RNA (1)...(19): siRNA sense strand
ccguggaccaggagcuauu

SEQ ID NO: 2454599 - RNA, 19 nt, Homo sapiens
  misc_RNA (1)...(19): siRNA sense strand
gcuucagcuucaagggcga

SEQ ID NO: 2454600 - RNA, 19 nt, Homo sapiens
  misc_RNA (1)...(19): siRNA sense strand
gaaaagaaguaccagcuga

SEQ ID NO: 2454601 - RNA, 19 nt, Homo sapiens
  misc_RNA (1)...(19): siRNA sense strand
ggagaagggaaaugcugga

SEQ ID NO: 2454602 - RNA, 19 nt, Homo sapiens
  misc_RNA (1)...(19): siRNA sense strand
ugacagaggaugaggcaag

SEQ ID NO: 2454603 - RNA, 19 nt, Homo sapiens
  misc_RNA (1)...(19): siRNA sense strand
cccuugaaacuguggacaa

SEQ ID NO: 2454604 - RNA, 19 nt, Homo sapiens
  misc_RNA (1)...(19): siRNA sense strand
ccaucuucuacgugggcaa

SEQ ID NO: 2454605 - RNA, 19 nt, Homo sapiens
  misc_RNA (1)...(19): siRNA sense strand
uggcugaaggcgagcgaca

SEQ ID NO: 2454606 - RNA, 19 nt, Homo sapiens
  misc_RNA (1)...(19): siRNA sense strand
uggaguugcugaagggacu

SEQ ID NO: 2454607 - RNA, 19 nt, Homo sapiens
  misc_RNA (1)...(19): siRNA sense strand
agaggugacaacagggaca

SEQ ID NO: 2454608 - RNA, 19 nt, Homo sapiens
  misc_RNA (1)...(19): siRNA sense strand
guaccuaggucucagggca

SEQ ID NO: 2454609 - RNA, 19 nt, Homo sapiens
  misc_RNA (1)...(19): siRNA sense strand
guguauuguggaagcccua

SEQ ID NO: 2454610 - RNA, 19 nt, Homo sapiens
  misc_RNA (1)...(19): siRNA sense strand
uguggaagcccuagggauc

SEQ ID NO: 2454611 - RNA, 19 nt, Homo sapiens
  misc_RNA (1)...(19): siRNA sense strand
acguaaaggccuuagcaua

SEQ ID NO: 2454612 - RNA, 19 nt, Homo sapiens
  misc_RNA (1)...(19): siRNA sense strand
cuuaaagggcacacggaua

SEQ ID NO: 2454613 - RNA, 19 nt, Homo sapiens
  misc_RNA (1)...(19): siRNA sense strand
aaacagagauggcacgcaa

SEQ ID NO: 2454614 - RNA, 19 nt, Homo sapiens
  misc_RNA (1)...(19): siRNA sense strand
cuauguuauucgagaugaa

SEQ ID NO: 2454615 - RNA, 19 nt, Homo sapiens
  misc_RNA (1)...(19): siRNA sense strand
ggaccuucgaacagugaaa

SEQ ID NO: 2454616 - RNA, 19 nt, Homo sapiens
  misc_RNA (1)...(19): siRNA sense strand
caauggaugaagaggaaaa

SEQ ID NO: 2454617 - RNA, 19 nt, Homo sapiens
  misc_RNA (1)...(19): siRNA sense strand
caccauacugauuggguaa

SEQ ID NO: 2454618 - RNA, 19 nt, Homo sapiens
  misc_RNA (1)...(19): siRNA sense strand
gguggaagggacaggaaga

SEQ ID NO: 2454619 - RNA, 19 nt, Homo sapiens
  misc_RNA (1)...(19): siRNA sense strand
uggagaaguacaaccgaaa

SEQ ID NO: 2454620 - RNA, 19 nt, Homo sapiens
  misc_RNA (1)...(19): siRNA sense strand
aggcaguucugaugggaca

SEQ ID NO: 2454621 - RNA, 19 nt, Homo sapiens
  misc_RNA (1)...(19): siRNA sense strand
cacauaaggauuacguaaa

SEQ ID NO: 2454622 - RNA, 19 nt, Homo sapiens
  misc_RNA (1)...(19): siRNA sense strand
cuguguuggcagaggagaa

SEQ ID NO: 2454623 - RNA, 19 nt, Homo sapiens
  misc_RNA (1)...(19): siRNA sense strand
aguugaagaucugggcaaa

SEQ ID NO: 2454624 - RNA, 19 nt, Homo sapiens
  misc_RNA (1)...(19): siRNA sense strand
gccuagaacacaugugaau

SEQ ID NO: 2454625 - RNA, 19 nt, Homo sapiens
  misc_RNA (1)...(19): siRNA sense strand
gauuuauuguacagaccua

SEQ ID NO: 2454626 - RNA, 19 nt, Homo sapiens
  misc_RNA (1)...(19): siRNA sense strand
aaguugaagaucugggcaa

SEQ ID NO: 2454627 - RNA, 19 nt, Homo sapiens
  misc_RNA (1)...(19): siRNA sense strand
gugaauacucuaacagcau

SEQ ID NO: 2454628 - RNA, 19 nt, Homo sapiens
  misc_RNA (1)...(19): siRNA sense strand
aggagaaccgagugcagaa

SEQ ID NO: 2454629 - RNA, 19 nt, Homo sapiens
  misc_RNA (1)...(19): siRNA sense strand
gaauauuggccuagaacac

SEQ ID NO: 2454630 - RNA, 19 nt, Homo sapiens
  misc_RNA (1)...(19): siRNA sense strand
guggagaaguacaaccgaa

SEQ ID NO: 2454631 - RNA, 19 nt, Homo sapiens
  misc_RNA (1)...(19): siRNA sense strand
aggauuacguaaaggccuu

SEQ ID NO: 2454632 - RNA, 19 nt, Homo sapiens
  misc_RNA (1)...(19): siRNA sense strand
cagcuggguuggacagaca

SEQ ID NO: 2454633 - RNA, 19 nt, Homo sapiens
  misc_RNA (1)...(19): siRNA sense strand
augaaguggagaaguacaa

SEQ ID NO: 2454634 - RNA, 19 nt, Homo sapiens
  misc_RNA (1)...(19): siRNA sense strand
accgagugcagaagggaaa

SEQ ID NO: 2454635 - RNA, 19 nt, Homo sapiens
  misc_RNA (1)...(19): siRNA sense strand
aagaauauggagugucaau

SEQ ID NO: 2454636 - RNA, 19 nt, Homo sapiens
  misc_RNA (1)...(19): siRNA sense strand
acaccauacugauugggua

SEQ ID NO: 2454637 - RNA, 19 nt, Homo sapiens
  misc_RNA (1)...(19): siRNA sense strand
uaaugaagcuuaaagggca

SEQ ID NO: 2454638 - RNA, 19 nt, Homo sapiens
  misc_RNA (1)...(19): siRNA sense strand
cagcagcccugauggguca

SEQ ID NO: 2454639 - RNA, 19 nt, Homo sapiens
  misc_RNA (1)...(19): siRNA sense strand
uugacaucacuguggauaa

SEQ ID NO: 2454640 - RNA, 19 nt, Homo sapiens
  misc_RNA (1)...(19): siRNA sense strand
ccgaaaaguuauggaacau

SEQ ID NO: 2454641 - RNA, 19 nt, Homo sapiens
  misc_RNA (1)...(19): siRNA sense strand
auaaagaacuaguagcauc

SEQ ID NO: 2454642 - RNA, 19 nt, Homo sapiens
  misc_RNA (1)...(19): siRNA sense strand
uccaagaacaugugcaaaa

SEQ ID NO: 2454643 - RNA, 19 nt, Homo sapiens
  misc_RNA (1)...(19): siRNA sense strand
gguucucaguagacuuaaa

SEQ ID NO: 2454644 - RNA, 19 nt, Homo sapiens
  misc_RNA (1)...(19): siRNA sense strand
ugcagaagggaaauggaua

SEQ ID NO: 2454645 - RNA, 19 nt, Homo sapiens
  misc_RNA (1)...(19): siRNA sense strand
ucuucugacacgacaguaa

SEQ ID NO: 2454646 - RNA, 19 nt, Homo sapiens
  misc_RNA (1)...(19): siRNA sense strand
uggguuggacagacaaaua

SEQ ID NO: 2454647 - RNA, 19 nt, Homo sapiens
  misc_RNA (1)...(19): siRNA sense strand
gugcaaaacuaaugaagcu

SEQ ID NO: 2454648 - RNA, 19 nt, Homo sapiens
  misc_RNA (1)...(19): siRNA sense strand
acggauaaugugaaggcau

SEQ ID NO: 2454649 - RNA, 19 nt, Homo sapiens
  misc_RNA (1)...(19): siRNA sense strand
ucucaaaccacuagcucuu

SEQ ID NO: 2454650 - RNA, 19 nt, Homo sapiens
  misc_RNA (1)...(19): siRNA sense strand
uaaagaacuaguagcauca

SEQ ID NO: 2454651 - RNA, 19 nt, Homo sapiens
  misc_RNA (1)...(19): siRNA sense strand
ccucuggagauuaugacaa

SEQ ID NO: 2454652 - RNA, 19 nt, Homo sapiens
  misc_RNA (1)...(19): siRNA sense strand
aaauauggaccuucgaaca

SEQ ID NO: 2454653 - RNA, 19 nt, Homo sapiens
  misc_RNA (1)...(19): siRNA sense strand
augugaaggcauugcuauu

SEQ ID NO: 2454654 - RNA, 19 nt, Homo sapiens
  misc_RNA (1)...(19): siRNA sense strand
caggaagauuuauuguaca

SEQ ID NO: 2454655 - RNA, 19 nt, Homo sapiens
  misc_RNA (1)...(19): siRNA sense strand
cggaggaaagugcagguuu

SEQ ID NO: 2454656 - RNA, 19 nt, Homo sapiens
  misc_RNA (1)...(19): siRNA sense strand
uggcauauugggauguauu

SEQ ID NO: 2454657 - RNA, 19 nt, Homo sapiens
  misc_RNA (1)...(19): siRNA sense strand
aaaugguguaugugccaaa

SEQ ID NO: 2454658 - RNA, 19 nt, Homo sapiens
  misc_RNA (1)...(19): siRNA sense strand
guaugggauccaagaacau

SEQ ID NO: 2454659 - RNA, 19 nt, Homo sapiens
  misc_RNA (1)...(19): siRNA sense strand
ggauccagcacuaaauaga

SEQ ID NO: 2454660 - RNA, 19 nt, Homo sapiens
  misc_RNA (1)...(19): siRNA sense strand
ggaaaaugaaguaaaccau

SEQ ID NO: 2454661 - RNA, 19 nt, Homo sapiens
  misc_RNA (1)...(19): siRNA sense strand
cugauuggguaaacgacau

SEQ ID NO: 2454662 - RNA, 19 nt, Homo sapiens
  misc_RNA (1)...(19): siRNA sense strand
ggguaaacgacauuguacu

SEQ ID NO: 2454663 - RNA, 19 nt, Homo sapiens
  misc_RNA (1)...(19): siRNA sense strand
augcagaccuauugggaca

SEQ ID NO: 2454664 - RNA, 19 nt, Homo sapiens
  misc_RNA (1)...(19): siRNA sense strand
aagaagacaagguggaaaa

SEQ ID NO: 2454665 - RNA, 19 nt, Homo sapiens
  misc_RNA (1)...(19): siRNA sense strand
agaaagaagacaaggugga

SEQ ID NO: 2454666 - RNA, 19 nt, Homo sapiens
  misc_RNA (1)...(19): siRNA sense strand
gggaagaaaagaaagaaga

SEQ ID NO: 2454667 - RNA, 19 nt, Homo sapiens
  misc_RNA (1)...(19): siRNA sense strand
agaagguagauuuggagua

SEQ ID NO: 2454668 - RNA, 19 nt, Homo sapiens
  misc_RNA (1)...(19): siRNA sense strand
acaccugaaccaaaggaaa

SEQ ID NO: 2454669 - RNA, 19 nt, Homo sapiens
  misc_RNA (1)...(19): siRNA sense strand
aguuugaagaggaggacuu

SEQ ID NO: 2454670 - RNA, 19 nt, Homo sapiens
  misc_RNA (1)...(19): siRNA sense strand
ccuucuggaguaugggaaa

SEQ ID NO: 2454671 - RNA, 19 nt, Homo sapiens
  misc_RNA (1)...(19): siRNA sense strand
gauuagggaagaaaagaaa

SEQ ID NO: 2454672 - RNA, 19 nt, Homo sapiens
  misc_RNA (1)...(19): siRNA sense strand
gguacuggcuaguggugca

SEQ ID NO: 2454673 - RNA, 19 nt, Homo sapiens
  misc_RNA (1)...(19): siRNA sense strand
gagccaacguaguggaggu

SEQ ID NO: 2454674 - RNA, 19 nt, Homo sapiens
  misc_RNA (1)...(19): siRNA sense strand
caccugaaccaaaggaaaa

SEQ ID NO: 2454675 - RNA, 19 nt, Homo sapiens
  misc_RNA (1)...(19): siRNA sense strand
acccagaggagaagguaga

SEQ ID NO: 2454676 - RNA, 19 nt, Homo sapiens
  misc_RNA (1)...(19): siRNA sense strand
acguaguggagguggcaca

SEQ ID NO: 2454677 - RNA, 19 nt, Homo sapiens
  misc_RNA (1)...(19): siRNA sense strand
aaagaagacaagguggaaa

SEQ ID NO: 2454678 - RNA, 19 nt, Homo sapiens
  misc_RNA (1)...(19): siRNA sense strand
aaccaguagcagugaaaca

SEQ ID NO: 2454679 - RNA, 19 nt, Homo sapiens
  misc_RNA (1)...(19): siRNA sense strand
aagacaagguggaaaaguu

SEQ ID NO: 2454680 - RNA, 19 nt, Homo sapiens
  misc_RNA (1)...(19): siRNA sense strand
cgaaccaccgacaggaaga

SEQ ID NO: 2454681 - RNA, 19 nt, Homo sapiens
  misc_RNA (1)...(19): siRNA sense strand
cuauggguuggcaggaaua

SEQ ID NO: 2454682 - RNA, 19 nt, Homo sapiens
  misc_RNA (1)...(19): siRNA sense strand
gaggaugagcucaaggagu

SEQ ID NO: 2454683 - RNA, 19 nt, Homo sapiens
  misc_RNA (1)...(19): siRNA sense strand
uuggagaagcacuugcaaa

SEQ ID NO: 2454684 - RNA, 19 nt, Homo sapiens
  misc_RNA (1)...(19): siRNA sense strand
gggacuugguggagaggca

SEQ ID NO: 2454685 - RNA, 19 nt, Homo sapiens
  misc_RNA (1)...(19): siRNA sense strand
ggucagagaucaaggcuac

SEQ ID NO: 2454686 - RNA, 19 nt, Homo sapiens
  misc_RNA (1)...(19): siRNA sense strand
guggagaggcaucaggcua

SEQ ID NO: 2454687 - RNA, 19 nt, Homo sapiens
  misc_RNA (1)...(19): siRNA sense strand
cugugcugcugguggacaa

SEQ ID NO: 2454688 - RNA, 19 nt, Homo sapiens
  misc_RNA (1)...(19): siRNA sense strand
acaugaaacugaagcugca

SEQ ID NO: 2454689 - RNA, 19 nt, Homo sapiens
  misc_RNA (1)...(19): siRNA sense strand
gcaagguccugguggugga

SEQ ID NO: 2454690 - RNA, 19 nt, Homo sapiens
  misc_RNA (1)...(19): siRNA sense strand
uuguagugacuguguggaa

SEQ ID NO: 2454691 - RNA, 19 nt, Homo sapiens
  misc_RNA (1)...(19): siRNA sense strand
aggucagagaucaaggcua

SEQ ID NO: 2454692 - RNA, 19 nt, Homo sapiens
  misc_RNA (1)...(19): siRNA sense strand
agaaaguacagaaggguaa

SEQ ID NO: 2454693 - RNA, 19 nt, Homo sapiens
  misc_RNA (1)...(19): siRNA sense strand
cuucaaagcagcaagcaaa

SEQ ID NO: 2454694 - RNA, 19 nt, Homo sapiens
  misc_RNA (1)...(19): siRNA sense strand
gagaagggguaguggaaau

SEQ ID NO: 2454695 - RNA, 19 nt, Homo sapiens
  misc_RNA (1)...(19): siRNA sense strand
caaccacaucagagggaaa

SEQ ID NO: 2454696 - RNA, 19 nt, Homo sapiens
  misc_RNA (1)...(19): siRNA sense strand
ggaacaaagacaagaagca

SEQ ID NO: 2454697 - RNA, 19 nt, Homo sapiens
  misc_RNA (1)...(19): siRNA sense strand
ccguagaacgugaggcuuu

SEQ ID NO: 2454698 - RNA, 19 nt, Homo sapiens
  misc_RNA (1)...(19): siRNA sense strand
cuguggauaugaaggauaa

SEQ ID NO: 2454699 - RNA, 19 nt, Homo sapiens
  misc_RNA (1)...(19): siRNA sense strand
uagcaaaggcaaaggcuga

SEQ ID NO: 2454700 - RNA, 19 nt, Homo sapiens
  misc_RNA (1)...(19): siRNA sense strand
ggaaaauagaaaagggcau

SEQ ID NO: 2454701 - RNA, 19 nt, Homo sapiens
  misc_RNA (1)...(19): siRNA sense strand
agauagagaagcugaccaa

SEQ ID NO: 2454702 - RNA, 19 nt, Homo sapiens
  misc_RNA (1)...(19): siRNA sense strand
agagagaaucgcuaauaaa

SEQ ID NO: 2454703 - RNA, 19 nt, Homo sapiens
  misc_RNA (1)...(19): siRNA sense strand
uggaggaaaggcaggauua

SEQ ID NO: 2454704 - RNA, 19 nt, Homo sapiens
  misc_RNA (1)...(19): siRNA sense strand
cugaaggcccugaaauuaa

SEQ ID NO: 2454705 - RNA, 19 nt, Homo sapiens
  misc_RNA (1)...(19): siRNA sense strand
acuugauauuggugcuaaa

SEQ ID NO: 2454706 - RNA, 19 nt, Homo sapiens
  misc_RNA (1)...(19): siRNA sense strand
caucagagggaaagaaagu

SEQ ID NO: 2454707 - RNA, 19 nt, Homo sapiens
  misc_RNA (1)...(19): siRNA sense strand
ggccuuugaaucaggaaua

SEQ ID NO: 2454708 - RNA, 19 nt, Homo sapiens
  misc_RNA (1)...(19): siRNA sense strand
ggaaauauuagcaaaggca

SEQ ID NO: 2454709 - RNA, 19 nt, Homo sapiens
  misc_RNA (1)...(19): siRNA sense strand
agagaaagcucgagcacug

SEQ ID NO: 2454710 - RNA, 19 nt, Homo sapiens
  misc_RNA (1)...(19): siRNA sense strand
guucgaggcauauuggaaa

SEQ ID NO: 2454711 - RNA, 19 nt, Homo sapiens
  misc_RNA (1)...(19): siRNA sense strand
agggaaagaaaguacagaa

SEQ ID NO: 2454712 - RNA, 19 nt, Homo sapiens
  misc_RNA (1)...(19): siRNA sense strand
aagaaaguacagaagggua

SEQ ID NO: 2454713 - RNA, 19 nt, Homo sapiens
  misc_RNA (1)...(19): siRNA sense strand
auuacaugauugagaccua

SEQ ID NO: 2454714 - RNA, 19 nt, Homo sapiens
  misc_RNA (1)...(19): siRNA sense strand
aaaaggaaagaaagggaaa

SEQ ID NO: 2454715 - RNA, 19 nt, Homo sapiens
  misc_RNA (1)...(19): siRNA sense strand
uuaagaaagaagaggaacu

SEQ ID NO: 2454716 - RNA, 19 nt, Homo sapiens
  misc_RNA (1)...(19): siRNA sense strand
uugagaacuuacagaucua

SEQ ID NO: 2454717 - RNA, 19 nt, Homo sapiens
  misc_RNA (1)...(19): siRNA sense strand
cuaaugacggcgugugcaa

SEQ ID NO: 2454718 - RNA, 19 nt, Homo sapiens
  misc_RNA (1)...(19): siRNA sense strand
gcuuggauacccugaacua

SEQ ID NO: 2454719 - RNA, 19 nt, Homo sapiens
  misc_RNA (1)...(19): siRNA sense strand
gcaaaggcugauaugacua

SEQ ID NO: 2454720 - RNA, 19 nt, Homo sapiens
  misc_RNA (1)...(19): siRNA sense strand
ccuugaacauggugcagau

SEQ ID NO: 2454721 - RNA, 19 nt, Homo sapiens
  misc_RNA (1)...(19): siRNA sense strand
cuuuaaaggaaccagauau

SEQ ID NO: 2454722 - RNA, 19 nt, Homo sapiens
  misc_RNA (1)...(19): siRNA sense strand
ccguauuacaugauugaga

SEQ ID NO: 2454723 - RNA, 19 nt, Homo sapiens
  misc_RNA (1)...(19): siRNA sense strand
aagacaagaagcagauaga

SEQ ID NO: 2454724 - RNA, 19 nt, Homo sapiens
  misc_RNA (1)...(19): siRNA sense strand
gggaaagaaaguacagaag

SEQ ID NO: 2454725 - RNA, 19 nt, Homo sapiens
  misc_RNA (1)...(19): siRNA sense strand
agcagcaagcaaagaaaua

SEQ ID NO: 2454726 - RNA, 19 nt, Homo sapiens
  misc_RNA (1)...(19): siRNA sense strand
ccuguggauaugaaggaua

SEQ ID NO: 2454727 - RNA, 19 nt, Homo sapiens
  misc_RNA (1)...(19): siRNA sense strand
aaggaaagaaagggaaauu

SEQ ID NO: 2454728 - RNA, 19 nt, Homo sapiens
  misc_RNA (1)...(19): siRNA sense strand
cagagaagguauuuucaaa

SEQ ID NO: 2454729 - RNA, 19 nt, Homo sapiens
  misc_RNA (1)...(19): siRNA sense strand
aggcaagacaccuccuaua

SEQ ID NO: 2454730 - RNA, 19 nt, Homo sapiens
  misc_RNA (1)...(19): siRNA sense strand
auuggaaagaggaggugaa

SEQ ID NO: 2454731 - RNA, 19 nt, Homo sapiens
  misc_RNA (1)...(19): siRNA sense strand
gugccauggacguugcaaa

SEQ ID NO: 2454732 - RNA, 19 nt, Homo sapiens
  misc_RNA (1)...(19): siRNA sense strand
acaaagacaagaagcagau

SEQ ID NO: 2454733 - RNA, 19 nt, Homo sapiens
  misc_RNA (1)...(19): siRNA sense strand
cagugguuauacuaagaaa

SEQ ID NO: 2454734 - RNA, 19 nt, Homo sapiens
  misc_RNA (1)...(19): siRNA sense strand
agguggacuucgacgauuu

SEQ ID NO: 2454735 - RNA, 19 nt, Homo sapiens
  misc_RNA (1)...(19): siRNA sense strand
gaaauauuagcaaaggcaa

SEQ ID NO: 2454736 - RNA, 19 nt, Homo sapiens
  misc_RNA (1)...(19): siRNA sense strand
cuucaaugugugcggaaca

SEQ ID NO: 2454737 - RNA, 19 nt, Homo sapiens
  misc_RNA (1)...(19): siRNA sense strand
ccuaugaaggaaagccaau

SEQ ID NO: 2454738 - RNA, 19 nt, Homo sapiens
  misc_RNA (1)...(19): siRNA sense strand
ccgguuuaauagagaucau

SEQ ID NO: 2454739 - RNA, 19 nt, Homo sapiens
  misc_RNA (1)...(19): siRNA sense strand
uugcaaaggcauaugcuga

SEQ ID NO: 2454740 - RNA, 19 nt, Homo sapiens
  misc_RNA (1)...(19): siRNA sense strand
guuaaagaugugugccuga

SEQ ID NO: 2454741 - RNA, 19 nt, Homo sapiens
  misc_RNA (1)...(19): siRNA sense strand
agaaaguggauaucacauu

SEQ ID NO: 2454742 - RNA, 19 nt, Homo sapiens
  misc_RNA (1)...(19): siRNA sense strand
ccgggaagccuuugcgguu

SEQ ID NO: 2454743 - RNA, 19 nt, Homo sapiens
  misc_RNA (1)...(19): siRNA sense strand
agaaauacgccgagcagag

SEQ ID NO: 2454744 - RNA, 19 nt, Homo sapiens
  misc_RNA (1)...(19): siRNA sense strand
cauugaugauucagagaag

SEQ ID NO: 2454745 - RNA, 19 nt, Homo sapiens
  misc_RNA (1)...(19): siRNA sense strand
acguuaaugcaacagauaa

SEQ ID NO: 2454746 - RNA, 19 nt, Homo sapiens
  misc_RNA (1)...(19): siRNA sense strand
gaucaggaagagggaacua

SEQ ID NO: 2454747 - RNA, 19 nt, Homo sapiens
  misc_RNA (1)...(19): siRNA sense strand
gugaugguguuggaggaaa

SEQ ID NO: 2454748 - RNA, 19 nt, Homo sapiens
  misc_RNA (1)...(19): siRNA sense strand
gaugauucagagaagguau

SEQ ID NO: 2454749 - RNA, 19 nt, Homo sapiens
  misc_RNA (1)...(19): siRNA sense strand
aggugaagugaaugcauuu

SEQ ID NO: 2454750 - RNA, 19 nt, Homo sapiens
  misc_RNA (1)...(19): siRNA sense strand
ucuuuaaaggaaccagaua

SEQ ID NO: 2454751 - RNA, 19 nt, Homo sapiens
  misc_RNA (1)...(19): siRNA sense strand
gauugagaccuacaagaau

SEQ ID NO: 2454752 - RNA, 19 nt, Homo sapiens
  misc_RNA (1)...(19): siRNA sense strand
ccuacaagaaugucacuga

SEQ ID NO: 2454753 - RNA, 19 nt, Homo sapiens
  misc_RNA (1)...(19): siRNA sense strand
agaaaguacagaaggguaa

SEQ ID NO: 2454754 - RNA, 19 nt, Homo sapiens
  misc_RNA (1)...(19): siRNA sense strand
cuucaaagcagcaagcaaa

SEQ ID NO: 2454755 - RNA, 19 nt, Homo sapiens
  misc_RNA (1)...(19): siRNA sense strand
gagaagggguaguggaaau

SEQ ID NO: 2454756 - RNA, 19 nt, Homo sapiens
  misc_RNA (1)...(19): siRNA sense strand
caaccacaucagagggaaa

SEQ ID NO: 2454757 - RNA, 19 nt, Homo sapiens
  misc_RNA (1)...(19): siRNA sense strand
ggaacaaagacaagaagca

SEQ ID NO: 2454758 - RNA, 19 nt, Homo sapiens
  misc_RNA (1)...(19): siRNA sense strand
ccguagaacgugaggcuuu

SEQ ID NO: 2454759 - RNA, 19 nt, Homo sapiens
  misc_RNA (1)...(19): siRNA sense strand
cuguggauaugaaggauaa

SEQ ID NO: 2454760 - RNA, 19 nt, Homo sapiens
  misc_RNA (1)...(19): siRNA sense strand
uagcaaaggcaaaggcuga

SEQ ID NO: 2454761 - RNA, 19 nt, Homo sapiens
  misc_RNA (1)...(19): siRNA sense strand
ggaaaauagaaaagggcau

SEQ ID NO: 2454762 - RNA, 19 nt, Homo sapiens
  misc_RNA (1)...(19): siRNA sense strand
agauagagaagcugaccaa

SEQ ID NO: 2454763 - RNA, 19 nt, Homo sapiens
  misc_RNA (1)...(19): siRNA sense strand
agagagaaucgcuaauaaa

SEQ ID NO: 2454764 - RNA, 19 nt, Homo sapiens
  misc_RNA (1)...(19): siRNA sense strand
uggaggaaaggcaggauua

SEQ ID NO: 2454765 - RNA, 19 nt, Homo sapiens
  misc_RNA (1)...(19): siRNA sense strand
cugaaggcccugaaauuaa

SEQ ID NO: 2454766 - RNA, 19 nt, Homo sapiens
  misc_RNA (1)...(19): siRNA sense strand
acuugauauuggugcuaaa

SEQ ID NO: 2454767 - RNA, 19 nt, Homo sapiens
  misc_RNA (1)...(19): siRNA sense strand
caucagagggaaagaaagu

SEQ ID NO: 2454768 - RNA, 19 nt, Homo sapiens
  misc_RNA (1)...(19): siRNA sense strand
ggccuuugaaucaggaaua

SEQ ID NO: 2454769 - RNA, 19 nt, Homo sapiens
  misc_RNA (1)...(19): siRNA sense strand
ggaaauauuagcaaaggca

SEQ ID NO: 2454770 - RNA, 19 nt, Homo sapiens
  misc_RNA (1)...(19): siRNA sense strand
agagaaagcucgagcacug

SEQ ID NO: 2454771 - RNA, 19 nt, Homo sapiens
  misc_RNA (1)...(19): siRNA sense strand
guucgaggcauauuggaaa

SEQ ID NO: 2454772 - RNA, 19 nt, Homo sapiens
  misc_RNA (1)...(19): siRNA sense strand
agggaaagaaaguacagaa

SEQ ID NO: 2454773 - RNA, 19 nt, Homo sapiens
  misc_RNA (1)...(19): siRNA sense strand
aagaaaguacagaagggua

SEQ ID NO: 2454774 - RNA, 19 nt, Homo sapiens
  misc_RNA (1)...(19): siRNA sense strand
auuacaugauugagaccua

SEQ ID NO: 2454775 - RNA, 19 nt, Homo sapiens
  misc_RNA (1)...(19): siRNA sense strand
aaaaggaaagaaagggaaa

SEQ ID NO: 2454776 - RNA, 19 nt, Homo sapiens
  misc_RNA (1)...(19): siRNA sense strand
uuaagaaagaagaggaacu

SEQ ID NO: 2454777 - RNA, 19 nt, Homo sapiens
  misc_RNA (1)...(19): siRNA sense strand
uugagaacuuacagaucua

SEQ ID NO: 2454778 - RNA, 19 nt, Homo sapiens
  misc_RNA (1)...(19): siRNA sense strand
cuaaugacggcgugugcaa

SEQ ID NO: 2454779 - RNA, 19 nt, Homo sapiens
  misc_RNA (1)...(19): siRNA sense strand
gcuuggauacccugaacua

SEQ ID NO: 2454780 - RNA, 19 nt, Homo sapiens
  misc_RNA (1)...(19): siRNA sense strand
gcaaaggcugauaugacua

SEQ ID NO: 2454781 - RNA, 19 nt, Homo sapiens
  misc_RNA (1)...(19): siRNA sense strand
ccuugaacauggugcagau

SEQ ID NO: 2454782 - RNA, 19 nt, Homo sapiens
  misc_RNA (1)...(19): siRNA sense strand
cuuuaaaggaaccagauau

SEQ ID NO: 2454783 - RNA, 19 nt, Homo sapiens
  misc_RNA (1)...(19): siRNA sense strand
ccguauuacaugauugaga

SEQ ID NO: 2454784 - RNA, 19 nt, Homo sapiens
  misc_RNA (1)...(19): siRNA sense strand
aagacaagaagcagauaga

SEQ ID NO: 2454785 - RNA, 19 nt, Homo sapiens
  misc_RNA (1)...(19): siRNA sense strand
gggaaagaaaguacagaag

SEQ ID NO: 2454786 - RNA, 19 nt, Homo sapiens
  misc_RNA (1)...(19): siRNA sense strand
agcagcaagcaaagaaaua

SEQ ID NO: 2454787 - RNA, 19 nt, Homo sapiens
  misc_RNA (1)...(19): siRNA sense strand
ccuguggauaugaaggaua

SEQ ID NO: 2454788 - RNA, 19 nt, Homo sapiens
  misc_RNA (1)...(19): siRNA sense strand
aaggaaagaaagggaaauu

SEQ ID NO: 2454789 - RNA, 19 nt, Homo sapiens
  misc_RNA (1)...(19): siRNA sense strand
cagagaagguauuuucaaa

SEQ ID NO: 2454790 - RNA, 19 nt, Homo sapiens
  misc_RNA (1)...(19): siRNA sense strand
aggcaagacaccuccuaua

SEQ ID NO: 2454791 - RNA, 19 nt, Homo sapiens
  misc_RNA (1)...(19): siRNA sense strand
auuggaaagaggaggugaa

SEQ ID NO: 2454792 - RNA, 19 nt, Homo sapiens
  misc_RNA (1)...(19): siRNA sense strand
gugccauggacguugcaaa

SEQ ID NO: 2454793 - RNA, 19 nt, Homo sapiens
  misc_RNA (1)...(19): siRNA sense strand
acaaagacaagaagcagau

SEQ ID NO: 2454794 - RNA, 19 nt, Homo sapiens
  misc_RNA (1)...(19): siRNA sense strand
cagugguuauacuaagaaa

SEQ ID NO: 2454795 - RNA, 19 nt, Homo sapiens
  misc_RNA (1)...(19): siRNA sense strand
agguggacuucgacgauuu

SEQ ID NO: 2454796 - RNA, 19 nt, Homo sapiens
  misc_RNA (1)...(19): siRNA sense strand
gaaauauuagcaaaggcaa

SEQ ID NO: 2454797 - RNA, 19 nt, Homo sapiens
  misc_RNA (1)...(19): siRNA sense strand
cuucaaugugugcggaaca

SEQ ID NO: 2454798 - RNA, 19 nt, Homo sapiens
  misc_RNA (1)...(19): siRNA sense strand
ccuaugaaggaaagccaau

SEQ ID NO: 2454799 - RNA, 19 nt, Homo sapiens
  misc_RNA (1)...(19): siRNA sense strand
ccgguuuaauagagaucau

SEQ ID NO: 2454800 - RNA, 19 nt, Homo sapiens
  misc_RNA (1)...(19): siRNA sense strand
uugcaaaggcauaugcuga

SEQ ID NO: 2454801 - RNA, 19 nt, Homo sapiens
  misc_RNA (1)...(19): siRNA sense strand
guuaaagaugugugccuga

SEQ ID NO: 2454802 - RNA, 19 nt, Homo sapiens
  misc_RNA (1)...(19): siRNA sense strand
agaaaguggauaucacauu

SEQ ID NO: 2454803 - RNA, 19 nt, Homo sapiens
  misc_RNA (1)...(19): siRNA sense strand
ccgggaagccuuugcgguu

SEQ ID NO: 2454804 - RNA, 19 nt, Homo sapiens
  misc_RNA (1)...(19): siRNA sense strand
agaaauacgccgagcagag

SEQ ID NO: 2454805 - RNA, 19 nt, Homo sapiens
  misc_RNA (1)...(19): siRNA sense strand
cauugaugauucagagaag

SEQ ID NO: 2454806 - RNA, 19 nt, Homo sapiens
  misc_RNA (1)...(19): siRNA sense strand
acguuaaugcaacagauaa

SEQ ID NO: 2454807 - RNA, 19 nt, Homo sapiens
  misc_RNA (1)...(19): siRNA sense strand
gaucaggaagagggaacua

SEQ ID NO: 2454808 - RNA, 19 nt, Homo sapiens
  misc_RNA (1)...(19): siRNA sense strand
gugaugguguuggaggaaa

SEQ ID NO: 2454809 - RNA, 19 nt, Homo sapiens
  misc_RNA (1)...(19): siRNA sense strand
gaugauucagagaagguau

SEQ ID NO: 2454810 - RNA, 19 nt, Homo sapiens
  misc_RNA (1)...(19): siRNA sense strand
aggugaagugaaugcauuu

SEQ ID NO: 2454811 - RNA, 19 nt, Homo sapiens
  misc_RNA (1)...(19): siRNA sense strand
ucuuuaaaggaaccagaua

SEQ ID NO: 2454812 - RNA, 19 nt, Homo sapiens
  misc_RNA (1)...(19): siRNA sense strand
gauugagaccuacaagaau

SEQ ID NO: 2454813 - RNA, 19 nt, Homo sapiens
  misc_RNA (1)...(19): siRNA sense strand
ccuacaagaaugucacuga

SEQ ID NO: 2454814 - RNA, 19 nt, Homo sapiens
  misc_RNA (1)...(19): siRNA sense strand
gugagaagcuucagccgua

SEQ ID NO: 2454815 - RNA, 19 nt, Homo sapiens
  misc_RNA (1)...(19): siRNA sense strand
gggaggaagacgaagggau

SEQ ID NO: 2454816 - RNA, 19 nt, Homo sapiens
  misc_RNA (1)...(19): siRNA sense strand
cugaggaauaucugaggaa

SEQ ID NO: 2454817 - RNA, 19 nt, Homo sapiens
  misc_RNA (1)...(19): siRNA sense strand
ggaggaagacgaagggaug

SEQ ID NO: 2454818 - RNA, 19 nt, Homo sapiens
  misc_RNA (1)...(19): siRNA sense strand
caaaggacuccauggccaa

SEQ ID NO: 2454819 - RNA, 19 nt, Homo sapiens
  misc_RNA (1)...(19): siRNA sense strand
ccuggaagauacugggacu

SEQ ID NO: 2454820 - RNA, 19 nt, Homo sapiens
  misc_RNA (1)...(19): siRNA sense strand
acaaaggacuccauggcca

SEQ ID NO: 2454821 - RNA, 19 nt, Homo sapiens
  misc_RNA (1)...(19): siRNA sense strand
cugugauccugcagaacau

SEQ ID NO: 2454822 - RNA, 19 nt, Homo sapiens
  misc_RNA (1)...(19): siRNA sense strand
aggaagaagcugggaagca

SEQ ID NO: 2454823 - RNA, 19 nt, Homo sapiens
  misc_RNA (1)...(19): siRNA sense strand
gggcucuggaagugugcua

SEQ ID NO: 2454824 - RNA, 19 nt, Homo sapiens
  misc_RNA (1)...(19): siRNA sense strand
gcaggaagaagcugggaag

SEQ ID NO: 2454825 - RNA, 19 nt, Homo sapiens
  misc_RNA (1)...(19): siRNA sense strand
agaagauguccauggaaau

SEQ ID NO: 2454826 - RNA, 19 nt, Homo sapiens
  misc_RNA (1)...(19): siRNA sense strand
auaccuuguuagugggcaa

SEQ ID NO: 2454827 - RNA, 19 nt, Homo sapiens
  misc_RNA (1)...(19): siRNA sense strand
cgaaagagaucccggaggu

SEQ ID NO: 2454828 - RNA, 19 nt, Homo sapiens
  misc_RNA (1)...(19): siRNA sense strand
gcgcgaaggugaugagcuc

SEQ ID NO: 2454829 - RNA, 19 nt, Homo sapiens
  misc_RNA (1)...(19): siRNA sense strand
cgauacuaccuacggcaaa

SEQ ID NO: 2454830 - RNA, 19 nt, Homo sapiens
  misc_RNA (1)...(19): siRNA sense strand
ucagcaaguggguggacua

SEQ ID NO: 2454831 - RNA, 19 nt, Homo sapiens
  misc_RNA (1)...(19): siRNA sense strand
ggguggacuauucggacaa

SEQ ID NO: 2454832 - RNA, 19 nt, Homo sapiens
  misc_RNA (1)...(19): siRNA sense strand
cggaucaagaagaaugaau

SEQ ID NO: 2454833 - RNA, 19 nt, Homo sapiens
  misc_RNA (1)...(19): siRNA sense strand
aagaagacccuguguggga

SEQ ID NO: 2454834 - RNA, 19 nt, Homo sapiens
  misc_RNA (1)...(19): siRNA sense strand
cugcacaagaggaggaaag

SEQ ID NO: 2454835 - RNA, 19 nt, Homo sapiens
  misc_RNA (1)...(19): siRNA sense strand
ugcaguacauagagcguga

SEQ ID NO: 2454836 - RNA, 19 nt, Homo sapiens
  misc_RNA (1)...(19): siRNA sense strand
aagacaaagccuacagcaa

SEQ ID NO: 2454837 - RNA, 19 nt, Homo sapiens
  misc_RNA (1)...(19): siRNA sense strand
ccagaggaauauagggacu

SEQ ID NO: 2454838 - RNA, 19 nt, Homo sapiens
  misc_RNA (1)...(19): siRNA sense strand
guuuggagugggagugaau

SEQ ID NO: 2454839 - RNA, 19 nt, Homo sapiens
  misc_RNA (1)...(19): siRNA sense strand
aaacaaagauccuacagca

SEQ ID NO: 2454840 - RNA, 19 nt, Homo sapiens
  misc_RNA (1)...(19): siRNA sense strand
aauacaagugacaggaaaa

SEQ ID NO: 2454841 - RNA, 19 nt, Homo sapiens
  misc_RNA (1)...(19): siRNA sense strand
caaagauccuacagcagca

SEQ ID NO: 2454842 - RNA, 19 nt, Homo sapiens
  misc_RNA (1)...(19): siRNA sense strand
ggacaaagaagcagaggcu

SEQ ID NO: 2454843 - RNA, 19 nt, Homo sapiens
  misc_RNA (1)...(19): siRNA sense strand
aaacaagcaaucugggcua

SEQ ID NO: 2454844 - RNA, 19 nt, Homo sapiens
  misc_RNA (1)...(19): siRNA sense strand
gaauguuaguagacggguu

SEQ ID NO: 2454845 - RNA, 19 nt, Homo sapiens
  misc_RNA (1)...(19): siRNA sense strand
gaacuauaguccaguggca

SEQ ID NO: 2454846 - RNA, 19 nt, Homo sapiens
  misc_RNA (1)...(19): siRNA sense strand
aauuaaagguacuaggucu

SEQ ID NO: 2454847 - RNA, 19 nt, Homo sapiens
  misc_RNA (1)...(19): siRNA sense strand
cuauagcagaagagcacua

SEQ ID NO: 2454848 - RNA, 19 nt, Homo sapiens
  misc_RNA (1)...(19): siRNA sense strand
cggccaucccauagucaaa

SEQ ID NO: 2454849 - RNA, 19 nt, Homo sapiens
  misc_RNA (1)...(19): siRNA sense strand
gcauaaaaugguaccaauu

SEQ ID NO: 2454850 - RNA, 19 nt, Homo sapiens
  misc_RNA (1)...(19): siRNA sense strand
gggcuauagcagaagagca

SEQ ID NO: 2454851 - RNA, 19 nt, Homo sapiens
  misc_RNA (1)...(19): siRNA sense strand
cuaugaaaguauggcaaaa

SEQ ID NO: 2454852 - RNA, 19 nt, Homo sapiens
  misc_RNA (1)...(19): siRNA sense strand
auuaaagguacuaggucuu

SEQ ID NO: 2454853 - RNA, 19 nt, Homo sapiens
  misc_RNA (1)...(19): siRNA sense strand
ccuuugaugggaagcuuaa

SEQ ID NO: 2454854 - RNA, 19 nt, Homo sapiens
  misc_RNA (1)...(19): siRNA sense strand
gagcuggaacagaugguga

SEQ ID NO: 2454855 - RNA, 19 nt, Homo sapiens
  misc_RNA (1)...(19): siRNA sense strand
cagaauccacacaggugaa

SEQ ID NO: 2454856 - RNA, 19 nt, Homo sapiens
  misc_RNA (1)...(19): siRNA sense strand
ggcuauagcagaagagcac

SEQ ID NO: 2454857 - RNA, 19 nt, Homo sapiens
  misc_RNA (1)...(19): siRNA sense strand
auauguacuuugcagacaa

SEQ ID NO: 2454858 - RNA, 19 nt, Homo sapiens
  misc_RNA (1)...(19): siRNA sense strand
cauuaagauuugugcucua

SEQ ID NO: 2454859 - RNA, 19 nt, Homo sapiens
  misc_RNA (1)...(19): siRNA sense strand
gggaggagcaugaggagga

SEQ ID NO: 2454860 - RNA, 19 nt, Homo sapiens
  misc_RNA (1)...(19): siRNA sense strand
aagaagaccuagagggaag

SEQ ID NO: 2454861 - RNA, 19 nt, Homo sapiens
  misc_RNA (1)...(19): siRNA sense strand
agacaaugaaggaaacaau

SEQ ID NO: 2454862 - RNA, 19 nt, Homo sapiens
  misc_RNA (1)...(19): siRNA sense strand
ugguagaaagcuugccaaa

SEQ ID NO: 2454863 - RNA, 19 nt, Homo sapiens
  misc_RNA (1)...(19): siRNA sense strand
uaaagaagaccuagaggga

SEQ ID NO: 2454864 - RNA, 19 nt, Homo sapiens
  misc_RNA (1)...(19): siRNA sense strand
ucgaaggagcauagcauuu

SEQ ID NO: 2454865 - RNA, 19 nt, Homo sapiens
  misc_RNA (1)...(19): siRNA sense strand
cuaguauguaguagaacaa

SEQ ID NO: 2454866 - RNA, 19 nt, Homo sapiens
  misc_RNA (1)...(19): siRNA sense strand
agguagggccucaagaaau

SEQ ID NO: 2454867 - RNA, 19 nt, Homo sapiens
  misc_RNA (1)...(19): siRNA sense strand
gugaaaacagugacauuaa

SEQ ID NO: 2454868 - RNA, 19 nt, Homo sapiens
  misc_RNA (1)...(19): siRNA sense strand
uaguagaacaacuggcuau

SEQ ID NO: 2454869 - RNA, 19 nt, Homo sapiens
  misc_RNA (1)...(19): siRNA sense strand
ggagcauagcauuuagauu

SEQ ID NO: 2454870 - RNA, 19 nt, Homo sapiens
  misc_RNA (1)...(19): siRNA sense strand
auuaaggaguacauccaaa

SEQ ID NO: 2454871 - RNA, 19 nt, Homo sapiens
  misc_RNA (1)...(19): siRNA sense strand
cagucgaguuguugccauu

SEQ ID NO: 2454872 - RNA, 19 nt, Homo sapiens
  misc_RNA (1)...(19): siRNA sense strand
acagcaguguggugagaca

SEQ ID NO: 2454873 - RNA, 19 nt, Homo sapiens
  misc_RNA (1)...(19): siRNA sense strand
uagcaugaggugugguaga

SEQ ID NO: 2454874 - RNA, 19 nt, Homo sapiens
  misc_RNA (1)...(19): siRNA sense strand
ccucgaaggagcauagcau

SEQ ID NO: 2454875 - RNA, 19 nt, Homo sapiens
  misc_RNA (1)...(19): siRNA sense strand
gaggugugguagaaagcuu

SEQ ID NO: 2454876 - RNA, 19 nt, Homo sapiens
  misc_RNA (1)...(19): siRNA sense strand
ugaaacugaaccaggaaaa

SEQ ID NO: 2454877 - RNA, 19 nt, Homo sapiens
  misc_RNA (1)...(19): siRNA sense strand
ucaauaaagaagaccuaga

SEQ ID NO: 2454878 - RNA, 19 nt, Homo sapiens
  misc_RNA (1)...(19): siRNA sense strand
ggaaguagcaugaggugug

SEQ ID NO: 2454879 - RNA, 19 nt, Homo sapiens
  misc_RNA (1)...(19): siRNA sense strand
uguauaaacagcagugguu

SEQ ID NO: 2454880 - RNA, 19 nt, Homo sapiens
  misc_RNA (1)...(19): siRNA sense strand
aggagaagaauggcgauua

SEQ ID NO: 2454881 - RNA, 19 nt, Homo sapiens
  misc_RNA (1)...(19): siRNA sense strand
agaauggcgauuacacaaa

SEQ ID NO: 2454882 - RNA, 19 nt, Homo sapiens
  misc_RNA (1)...(19): siRNA sense strand
aggaaaaccauuuguguca

SEQ ID NO: 2454883 - RNA, 19 nt, Homo sapiens
  misc_RNA (1)...(19): siRNA sense strand
aagaauggcgauuacacaa

SEQ ID NO: 2454884 - RNA, 19 nt, Homo sapiens
  misc_RNA (1)...(19): siRNA sense strand
gauaaaacccagucgaguu

SEQ ID NO: 2454885 - RNA, 19 nt, Homo sapiens
  misc_RNA (1)...(19): siRNA sense strand
ugaugcaaguggagaugga

SEQ ID NO: 2454886 - RNA, 19 nt, Homo sapiens
  misc_RNA (1)...(19): siRNA sense strand
uggcacaagcaaagagaaa

SEQ ID NO: 2454887 - RNA, 19 nt, Homo sapiens
  misc_RNA (1)...(19): siRNA sense strand
gcagugaagaugagaggaa

SEQ ID NO: 2454888 - RNA, 19 nt, Homo sapiens
  misc_RNA (1)...(19): siRNA sense strand
agauacaacaggagaagaa

SEQ ID NO: 2454889 - RNA, 19 nt, Homo sapiens
  misc_RNA (1)...(19): siRNA sense strand
auacagugggcaagagaua

SEQ ID NO: 2454890 - RNA, 19 nt, Homo sapiens
  misc_RNA (1)...(19): siRNA sense strand
auauuuacauggaggcaua

SEQ ID NO: 2454891 - RNA, 19 nt, Homo sapiens
  misc_RNA (1)...(19): siRNA sense strand
guguagaauuagcaagauu

SEQ ID NO: 2454892 - RNA, 19 nt, Homo sapiens
  misc_RNA (1)...(19): siRNA sense strand
gugcagauguacauggaau

SEQ ID NO: 2454893 - RNA, 19 nt, Homo sapiens
  misc_RNA (1)...(19): siRNA sense strand
ggauuaaggcaguuacaau

SEQ ID NO: 2454894 - RNA, 19 nt, Homo sapiens
  misc_RNA (1)...(19): siRNA sense strand
ucaaagagaaguauggaau

SEQ ID NO: 2454895 - RNA, 19 nt, Homo sapiens
  misc_RNA (1)...(19): siRNA sense strand
guacauggaauuuggucaa

SEQ ID NO: 2454896 - RNA, 19 nt, Homo sapiens
  misc_RNA (1)...(19): siRNA sense strand
ggagaagaaccaaaagaaa

SEQ ID NO: 2454897 - RNA, 19 nt, Homo sapiens
  misc_RNA (1)...(19): siRNA sense strand
gugaagaugauguuguuaa

SEQ ID NO: 2454898 - RNA, 19 nt, Homo sapiens
  misc_RNA (1)...(19): siRNA sense strand
caacaggagaagaaccaaa

SEQ ID NO: 2454899 - RNA, 19 nt, Homo sapiens
  misc_RNA (1)...(19): siRNA sense strand
gcaacaucuauaagugaaa

SEQ ID NO: 2454900 - RNA, 19 nt, Homo sapiens
  misc_RNA (1)...(19): siRNA sense strand
gcaagagauaaguuugaaa

SEQ ID NO: 2454901 - RNA, 19 nt, Homo sapiens
  misc_RNA (1)...(19): siRNA sense strand
gagaagaaccaaaagaaau

SEQ ID NO: 2454902 - RNA, 19 nt, Homo sapiens
  misc_RNA (1)...(19): siRNA sense strand
cagccaagaaguauugaaa

SEQ ID NO: 2454903 - RNA, 19 nt, Homo sapiens
  misc_RNA (1)...(19): siRNA sense strand
uguugaaucacuaggcaaa

SEQ ID NO: 2454904 - RNA, 19 nt, Homo sapiens
  misc_RNA (1)...(19): siRNA sense strand
gggcaagagauaaguuuga

SEQ ID NO: 2454905 - RNA, 19 nt, Homo sapiens
  misc_RNA (1)...(19): siRNA sense strand
gaagaugagaggaaugcaa

SEQ ID NO: 2454906 - RNA, 19 nt, Homo sapiens
  misc_RNA (1)...(19): siRNA sense strand
gugaaaccuuggaagagaa

SEQ ID NO: 2454907 - RNA, 19 nt, Homo sapiens
  misc_RNA (1)...(19): siRNA sense strand
agcagaagaccuagaaauu

SEQ ID NO: 2454908 - RNA, 19 nt, Homo sapiens
  misc_RNA (1)...(19): siRNA sense strand
ucauaaaugcagucaaaga

SEQ ID NO: 2454909 - RNA, 19 nt, Homo sapiens
  misc_RNA (1)...(19): siRNA sense strand
ugaucauaauggacacaua

SEQ ID NO: 2454910 - RNA, 19 nt, Homo sapiens
  misc_RNA (1)...(19): siRNA sense strand
uaguauugacugagaugaa

SEQ ID NO: 2454911 - RNA, 19 nt, Homo sapiens
  misc_RNA (1)...(19): siRNA sense strand
guuuaucagugcagaugua

SEQ ID NO: 2454912 - RNA, 19 nt, Homo sapiens
  misc_RNA (1)...(19): siRNA sense strand
caagcaaagagaaaggaau

SEQ ID NO: 2454913 - RNA, 19 nt, Homo sapiens
  misc_RNA (1)...(19): siRNA sense strand
cauaauggacacauagauu

SEQ ID NO: 2454914 - RNA, 19 nt, Homo sapiens
  misc_RNA (1)...(19): siRNA sense strand
caaacauaacgcaaacaaa

SEQ ID NO: 2454915 - RNA, 19 nt, Homo sapiens
  misc_RNA (1)...(19): siRNA sense strand
aguaggguguggagccaua

SEQ ID NO: 2454916 - RNA, 19 nt, Homo sapiens
  misc_RNA (1)...(19): siRNA sense strand
aggaaugauuacaguuaca

SEQ ID NO: 2454917 - RNA, 19 nt, Homo sapiens
  misc_RNA (1)...(19): siRNA sense strand
uagcagaagaccuagaaau

SEQ ID NO: 2454918 - RNA, 19 nt, Homo sapiens
  misc_RNA (1)...(19): siRNA sense strand
guguguagaauuagcaaga

SEQ ID NO: 2454919 - RNA, 19 nt, Homo sapiens
  misc_RNA (1)...(19): siRNA sense strand
guacguucuuggagacaca

SEQ ID NO: 2454920 - RNA, 19 nt, Homo sapiens
  misc_RNA (1)...(19): siRNA sense strand
gauaaauaccaguguguag

SEQ ID NO: 2454921 - RNA, 19 nt, Homo sapiens
  misc_RNA (1)...(19): siRNA sense strand
caaacuggagacaggacaa

SEQ ID NO: 2454922 - RNA, 19 nt, Homo sapiens
  misc_RNA (1)...(19): siRNA sense strand
ucuugaagcagcagauauu

SEQ ID NO: 2454923 - RNA, 19 nt, Homo sapiens
  misc_RNA (1)...(19): siRNA sense strand
cagaugaaacugcaaggaa

SEQ ID NO: 2454924 - RNA, 19 nt, Homo sapiens
  misc_RNA (1)...(19): siRNA sense strand
aucaaauccucgugccaaa

SEQ ID NO: 2454925 - RNA, 19 nt, Homo sapiens
  misc_RNA (1)...(19): siRNA sense strand
uggaauuuggucaagguua

SEQ ID NO: 2454926 - RNA, 19 nt, Homo sapiens
  misc_RNA (1)...(19): siRNA sense strand
uggaccaguuucaggagaa

SEQ ID NO: 2454927 - RNA, 19 nt, Homo sapiens
  misc_RNA (1)...(19): siRNA sense strand
cagaagaggaaauaccauu

SEQ ID NO: 2454928 - RNA, 19 nt, Homo sapiens
  misc_RNA (1)...(19): siRNA sense strand
ggugguacagggagucaaa

SEQ ID NO: 2454929 - RNA, 19 nt, Homo sapiens
  misc_RNA (1)...(19): siRNA sense strand
agaaguaaagauucaggaa

SEQ ID NO: 2454930 - RNA, 19 nt, Homo sapiens
  misc_RNA (1)...(19): siRNA sense strand
caauggugguacagggagu

SEQ ID NO: 2454931 - RNA, 19 nt, Homo sapiens
  misc_RNA (1)...(19): siRNA sense strand
agacaacugaaguaaggaa

SEQ ID NO: 2454932 - RNA, 19 nt, Homo sapiens
  misc_RNA (1)...(19): siRNA sense strand
augcagucaaagagaagua

SEQ ID NO: 2454933 - RNA, 19 nt, Homo sapiens
  misc_RNA (1)...(19): siRNA sense strand
uaauggaaugacagguuua

SEQ ID NO: 2454934 - RNA, 19 nt, Homo sapiens
  misc_RNA (1)...(19): siRNA sense strand
uugaaucacuggagaggca

SEQ ID NO: 2454935 - RNA, 19 nt, Homo sapiens
  misc_RNA (1)...(19): siRNA sense strand
ccucuugacauacgauuaa

SEQ ID NO: 2454936 - RNA, 19 nt, Homo sapiens
  misc_RNA (1)...(19): siRNA sense strand
aauucaagccuuccaauaa

SEQ ID NO: 2454937 - RNA, 19 nt, Homo sapiens
  misc_RNA (1)...(19): siRNA sense strand
gacaacugaaguaaggaaa

SEQ ID NO: 2454938 - RNA, 19 nt, Homo sapiens
  misc_RNA (1)...(19): siRNA sense strand
uggaaugacagguuuaaau

SEQ ID NO: 2454939 - RNA, 19 nt, Homo sapiens
  misc_RNA (1)...(19): siRNA sense strand
accugaaugugaagaauuu

SEQ ID NO: 2454940 - RNA, 19 nt, Homo sapiens
  misc_RNA (1)...(19): siRNA sense strand
aagcaaagagaaaggaaug

SEQ ID NO: 2454941 - RNA, 19 nt, Homo sapiens
  misc_RNA (1)...(19): siRNA sense strand
uuggagaugaucaaaguaa

SEQ ID NO: 2454942 - RNA, 19 nt, Homo sapiens
  misc_RNA (1)...(19): siRNA sense strand
gugcagggcaagaggguga

SEQ ID NO: 2454943 - RNA, 19 nt, Homo sapiens
  misc_RNA (1)...(19): siRNA sense strand
cgacaguggacuuagggaa

SEQ ID NO: 2454944 - RNA, 19 nt, Homo sapiens
  misc_RNA (1)...(19): siRNA sense strand
aguguaggcccaagggaaa

SEQ ID NO: 2454945 - RNA, 19 nt, Homo sapiens
  misc_RNA (1)...(19): siRNA sense strand
agugaguagcauagaagaa

SEQ ID NO: 2454946 - RNA, 19 nt, Homo sapiens
  misc_RNA (1)...(19): siRNA sense strand
gggcaagagggugaggaua

SEQ ID NO: 2454947 - RNA, 19 nt, Homo sapiens
  misc_RNA (1)...(19): siRNA sense strand
cugaagaagcugagauccu

SEQ ID NO: 2454948 - RNA, 19 nt, Homo sapiens
  misc_RNA (1)...(19): siRNA sense strand
aucagaaaguccagaugaa

SEQ ID NO: 2454949 - RNA, 19 nt, Homo sapiens
  misc_RNA (1)...(19): siRNA sense strand
ugcagauacaggugauaaa

SEQ ID NO: 2454950 - RNA, 19 nt, Homo sapiens
  misc_RNA (1)...(19): siRNA sense strand
acaccaugagacagauuaa

SEQ ID NO: 2454951 - RNA, 19 nt, Homo sapiens
  misc_RNA (1)...(19): siRNA sense strand
gcucgggagggaagagaga

SEQ ID NO: 2454952 - RNA, 19 nt, Homo sapiens
  misc_RNA (1)...(19): siRNA sense strand
aaguguaggcccaagggaa

SEQ ID NO: 2454953 - RNA, 19 nt, Homo sapiens
  misc_RNA (1)...(19): siRNA sense strand
augagaacaagcagaguuu

SEQ ID NO: 2454954 - RNA, 19 nt, Homo sapiens
  misc_RNA (1)...(19): siRNA sense strand
uccagaaagugcagauaca

SEQ ID NO: 2454955 - RNA, 19 nt, Homo sapiens
  misc_RNA (1)...(19): siRNA sense strand
uagccaauuggaagauaaa

SEQ ID NO: 2454956 - RNA, 19 nt, Homo sapiens
  misc_RNA (1)...(19): siRNA sense strand
gguaggaagagcagaugca

SEQ ID NO: 2454957 - RNA, 19 nt, Homo sapiens
  misc_RNA (1)...(19): siRNA sense strand
aaguaaugcugaagaagcu

SEQ ID NO: 2454958 - RNA, 19 nt, Homo sapiens
  misc_RNA (1)...(19): siRNA sense strand
gcccaagggaaacggaaga

SEQ ID NO: 2454959 - RNA, 19 nt, Homo sapiens
  misc_RNA (1)...(19): siRNA sense strand
gguagagacagaaggucca

SEQ ID NO: 2454960 - RNA, 19 nt, Homo sapiens
  misc_RNA (1)...(19): siRNA sense strand
gaagaugagaacaagcaga

SEQ ID NO: 2454961 - RNA, 19 nt, Homo sapiens
  misc_RNA (1)...(19): siRNA sense strand
guaaagaacccuuggaucc

SEQ ID NO: 2454962 - RNA, 19 nt, Homo sapiens
  misc_RNA (1)...(19): siRNA sense strand
ugacaagguaggaagagca

SEQ ID NO: 2454963 - RNA, 19 nt, Homo sapiens
  misc_RNA (1)...(19): siRNA sense strand
ggacggaaguuucuccaga

SEQ ID NO: 2454964 - RNA, 19 nt, Homo sapiens
  misc_RNA (1)...(19): siRNA sense strand
agaagcaaguguaggccca

SEQ ID NO: 2454965 - RNA, 19 nt, Homo sapiens
  misc_RNA (1)...(19): siRNA sense strand
gguuguggcuguuguggca

SEQ ID NO: 2454966 - RNA, 19 nt, Homo sapiens
  misc_RNA (1)...(19): siRNA sense strand
ccaagggaaacggaagaaa

SEQ ID NO: 2454967 - RNA, 19 nt, Homo sapiens
  misc_RNA (1)...(19): siRNA sense strand
acauggacucagacaaauu

SEQ ID NO: 2454968 - RNA, 19 nt, Homo sapiens
  misc_RNA (1)...(19): siRNA sense strand
aggauaaaacagaagauga

SEQ ID NO: 2454969 - RNA, 19 nt, Homo sapiens
  misc_RNA (1)...(19): siRNA sense strand
gguaaagaacccuuggauc

SEQ ID NO: 2454970 - RNA, 19 nt, Homo sapiens
  misc_RNA (1)...(19): siRNA sense strand
caguaaauucucaggcgca

SEQ ID NO: 2454971 - RNA, 19 nt, Homo sapiens
  misc_RNA (1)...(19): siRNA sense strand
gcaaagaccaccaagaggu

SEQ ID NO: 2454972 - RNA, 19 nt, Homo sapiens
  misc_RNA (1)...(19): siRNA sense strand
ugcuagaggaggaaacauu

SEQ ID NO: 2454973 - RNA, 19 nt, Homo sapiens
  misc_RNA (1)...(19): siRNA sense strand
gagacuuacucugggccaa

SEQ ID NO: 2454974 - RNA, 19 nt, Homo sapiens
  misc_RNA (1)...(19): siRNA sense strand
aaguccagaugaagcaaau

SEQ ID NO: 2454975 - RNA, 19 nt, Homo sapiens
  misc_RNA (1)...(19): siRNA sense strand
aagcaaauguggggaaaca

SEQ ID NO: 2454976 - RNA, 19 nt, Homo sapiens
  misc_RNA (1)...(19): siRNA sense strand
aguuuagccaauuggaaga

SEQ ID NO: 2454977 - RNA, 19 nt, Homo sapiens
  misc_RNA (1)...(19): siRNA sense strand
gagaauggccagaaggcug

SEQ ID NO: 2454978 - RNA, 19 nt, Homo sapiens
  misc_RNA (1)...(19): siRNA sense strand
cagauaaagagaagacaau

SEQ ID NO: 2454979 - RNA, 19 nt, Homo sapiens
  misc_RNA (1)...(19): siRNA sense strand
cagcaaacaacaugagaca

SEQ ID NO: 2454980 - RNA, 19 nt, Homo sapiens
  misc_RNA (1)...(19): siRNA sense strand
gguuagagcaggagcuuca

SEQ ID NO: 2454981 - RNA, 19 nt, Homo sapiens
  misc_RNA (1)...(19): siRNA sense strand
agaagaaaugagugcacua

SEQ ID NO: 2454982 - RNA, 19 nt, Homo sapiens
  misc_RNA (1)...(19): siRNA sense strand
ccuuaguacauaugaagaa

SEQ ID NO: 2454983 - RNA, 19 nt, Homo sapiens
  misc_RNA (1)...(19): siRNA sense strand
aauacaacguuauggaaca

SEQ ID NO: 2454984 - RNA, 19 nt, Homo sapiens
  misc_RNA (1)...(19): siRNA sense strand
ucagauaaagagaagacaa

SEQ ID NO: 2454985 - RNA, 19 nt, Homo sapiens
  misc_RNA (1)...(19): siRNA sense strand
uggcuaaagaagauaaaga

SEQ ID NO: 2454986 - RNA, 19 nt, Homo sapiens
  misc_RNA (1)...(19): siRNA sense strand
augcaacaagccagagaaa

SEQ ID NO: 2454987 - RNA, 19 nt, Homo sapiens
  misc_RNA (1)...(19): siRNA sense strand
gcaaacgguuagagcagga

SEQ ID NO: 2454988 - RNA, 19 nt, Homo sapiens
  misc_RNA (1)...(19): siRNA sense strand
uggccagggcagagaucaa

SEQ ID NO: 2454989 - RNA, 19 nt, Homo sapiens
  misc_RNA (1)...(19): siRNA sense strand
ugguggauguacugaggaa

SEQ ID NO: 2454990 - RNA, 19 nt, Homo sapiens
  misc_RNA (1)...(19): siRNA sense strand
acaagaaacuacggggaua

SEQ ID NO: 2454991 - RNA, 19 nt, Homo sapiens
  misc_RNA (1)...(19): siRNA sense strand
cgagccaagcauauggaaa

SEQ ID NO: 2454992 - RNA, 19 nt, Homo sapiens
  misc_RNA (1)...(19): siRNA sense strand
gugaaagagcagaaccaga

SEQ ID NO: 2454993 - RNA, 19 nt, Homo sapiens
  misc_RNA (1)...(19): siRNA sense strand
gaacgugcucugaaggcaa

SEQ ID NO: 2454994 - RNA, 19 nt, Homo sapiens
  misc_RNA (1)...(19): siRNA sense strand
auauuaacccugaagagaa

SEQ ID NO: 2454995 - RNA, 19 nt, Homo sapiens
  misc_RNA (1)...(19): siRNA sense strand
guggauguacugaggaaga

SEQ ID NO: 2454996 - RNA, 19 nt, Homo sapiens
  misc_RNA (1)...(19): siRNA sense strand
cuucagacucagauaaaga

SEQ ID NO: 2454997 - RNA, 19 nt, Homo sapiens
  misc_RNA (1)...(19): siRNA sense strand
acaugacauuacaggaauu

SEQ ID NO: 2454998 - RNA, 19 nt, Homo sapiens
  misc_RNA (1)...(19): siRNA sense strand
agacacagggauagcuauu

SEQ ID NO: 2454999 - RNA, 19 nt, Homo sapiens
  misc_RNA (1)...(19): siRNA sense strand
uguuaugucuagacugcaa

SEQ ID NO: 2455000 - RNA, 19 nt, Homo sapiens
  misc_RNA (1)...(19): siRNA sense strand
gaaaaguaugcaucggaaa

SEQ ID NO: 2455001 - RNA, 19 nt, Homo sapiens
  misc_RNA (1)...(19): siRNA sense strand
gauaaagaacagagaaaac

SEQ ID NO: 2455002 - RNA, 19 nt, Homo sapiens
  misc_RNA (1)...(19): siRNA sense strand
acuccaagagaaagaaaca

SEQ ID NO: 2455003 - RNA, 19 nt, Homo sapiens
  misc_RNA (1)...(19): siRNA sense strand
acuaauagaagaacgggau

SEQ ID NO: 2455004 - RNA, 19 nt, Homo sapiens
  misc_RNA (1)...(19): siRNA sense strand
ugguugaagaaguguauuu

SEQ ID NO: 2455005 - RNA, 19 nt, Homo sapiens
  misc_RNA (1)...(19): siRNA sense strand
cauugaggagagagaugaa

SEQ ID NO: 2455006 - RNA, 19 nt, Homo sapiens
  misc_RNA (1)...(19): siRNA sense strand
aggagagagaugaagcaau

SEQ ID NO: 2455007 - RNA, 19 nt, Homo sapiens
  misc_RNA (1)...(19): siRNA sense strand
gcuaaagaagauaaagaac

SEQ ID NO: 2455008 - RNA, 19 nt, Homo sapiens
  misc_RNA (1)...(19): siRNA sense strand
agaugaagcaauugcacga

SEQ ID NO: 2455009 - RNA, 19 nt, Homo sapiens
  misc_RNA (1)...(19): siRNA sense strand
aaagagaagacaauagcau

SEQ ID NO: 2455010 - RNA, 19 nt, Homo sapiens
  misc_RNA (1)...(19): siRNA sense strand
ccaagagaaagaaacagaa

SEQ ID NO: 2455011 - RNA, 19 nt, Homo sapiens
  misc_RNA (1)...(19): siRNA sense strand
agaagauaaagaacagaga

SEQ ID NO: 2455012 - RNA, 19 nt, Homo sapiens
  misc_RNA (1)...(19): siRNA sense strand
guuuacugcacuacugaaa

SEQ ID NO: 2455013 - RNA, 19 nt, Homo sapiens
  misc_RNA (1)...(19): siRNA sense strand
caagaaacuacggggauaa

SEQ ID NO: 2455014 - RNA, 19 nt, Homo sapiens
  misc_RNA (1)...(19): siRNA sense strand
gagugcacuaauagaagaa

SEQ ID NO: 2455015 - RNA, 19 nt, Homo sapiens
  misc_RNA (1)...(19): siRNA sense strand
aaugagaauaacugcagaa

SEQ ID NO: 2455016 - RNA, 19 nt, Homo sapiens
  misc_RNA (1)...(19): siRNA sense strand
gugcaaacgguuagagcag

SEQ ID NO: 2455017 - RNA, 19 nt, Homo sapiens
  misc_RNA (1)...(19): siRNA sense strand
agagaaagaaacagaagcu

SEQ ID NO: 2455018 - RNA, 19 nt, Homo sapiens
  misc_RNA (1)...(19): siRNA sense strand
gaagagaaugacaugacau

SEQ ID NO: 2455019 - RNA, 19 nt, Homo sapiens
  misc_RNA (1)...(19): siRNA sense strand
gucuaagugcaaacgguua

SEQ ID NO: 2455020 - RNA, 19 nt, Homo sapiens
  misc_RNA (1)...(19): siRNA sense strand
cugcaguucaacaguacaa

SEQ ID NO: 2455021 - RNA, 19 nt, Homo sapiens
  misc_RNA (1)...(19): siRNA sense strand
gaagaaaaucugaaggauc

SEQ ID NO: 2455022 - RNA, 19 nt, Homo sapiens
  misc_RNA (1)...(19): siRNA sense strand
gagcgagcaaauauggaau

SEQ ID NO: 2455023 - RNA, 19 nt, Homo sapiens
  misc_RNA (1)...(19): siRNA sense strand
uagccauugaggagagaga

SEQ ID NO: 2455024 - RNA, 19 nt, Homo sapiens
  misc_RNA (1)...(19): siRNA sense strand
caggaauuacugaacagaa

SEQ ID NO: 2455025 - RNA, 19 nt, Homo sapiens
  misc_RNA (1)...(19): siRNA sense strand
aguauaaacuggacggcaa

SEQ ID NO: 2455026 - RNA, 19 nt, Homo sapiens
  misc_RNA (1)...(19): siRNA sense strand
caggaaacaaacagagaau

SEQ ID NO: 2455027 - RNA, 19 nt, Homo sapiens
  misc_RNA (1)...(19): siRNA sense strand
acgcaugagaugaagcaua

SEQ ID NO: 2455028 - RNA, 19 nt, Homo sapiens
  misc_RNA (1)...(19): siRNA sense strand
ccaaauaggaagaagaccu

SEQ ID NO: 2455029 - RNA, 19 nt, Homo sapiens
  misc_RNA (1)...(19): siRNA sense strand
ccuccaaauaggaagaaga

SEQ ID NO: 2455030 - RNA, 19 nt, Homo sapiens
  misc_RNA (1)...(19): siRNA sense strand
gguaccacggagagggcaa

SEQ ID NO: 2455031 - RNA, 19 nt, Homo sapiens
  misc_RNA (1)...(19): siRNA sense strand
gggaaguggaagcagauca

SEQ ID NO: 2455032 - RNA, 19 nt, Homo sapiens
  misc_RNA (1)...(19): siRNA sense strand
gauacaaucugaaagacca

SEQ ID NO: 2455033 - RNA, 19 nt, Homo sapiens
  misc_RNA (1)...(19): siRNA sense strand
guucaaggaaagcgaagau

SEQ ID NO: 2455034 - RNA, 19 nt, Homo sapiens
  misc_RNA (1)...(19): siRNA sense strand
acauaguggacuuugggaa

SEQ ID NO: 2455035 - RNA, 19 nt, Homo sapiens
  misc_RNA (1)...(19): siRNA sense strand
gagaugaagcauaaggucu

SEQ ID NO: 2455036 - RNA, 19 nt, Homo sapiens
  misc_RNA (1)...(19): siRNA sense strand
ugcaggaggcacagaacaa

SEQ ID NO: 2455037 - RNA, 19 nt, Homo sapiens
  misc_RNA (1)...(19): siRNA sense strand
aguggaagcagaucagcaa

SEQ ID NO: 2455038 - RNA, 19 nt, Homo sapiens
  misc_RNA (1)...(19): siRNA sense strand
uggaagcagaucagcaaau

SEQ ID NO: 2455039 - RNA, 19 nt, Homo sapiens
  misc_RNA (1)...(19): siRNA sense strand
cggcaagaucgucaacuau

SEQ ID NO: 2455040 - RNA, 19 nt, Homo sapiens
  misc_RNA (1)...(19): siRNA sense strand
agaccucggaagagauauu

SEQ ID NO: 2455041 - RNA, 19 nt, Homo sapiens
  misc_RNA (1)...(19): siRNA sense strand
ugcagaacauaguggacuu

SEQ ID NO: 2455042 - RNA, 19 nt, Homo sapiens
  misc_RNA (1)...(19): siRNA sense strand
gugacaaggaccuggauac

SEQ ID NO: 2455043 - RNA, 19 nt, Homo sapiens
  misc_RNA (1)...(19): siRNA sense strand
acugggaaguggaagcaga

SEQ ID NO: 2455044 - RNA, 19 nt, Homo sapiens
  misc_RNA (1)...(19): siRNA sense strand
cugaaguuuccuccaaaua

SEQ ID NO: 2455045 - RNA, 19 nt, Homo sapiens
  misc_RNA (1)...(19): siRNA sense strand
aggggaagauggacgagaa

SEQ ID NO: 2455046 - RNA, 19 nt, Homo sapiens
  misc_RNA (1)...(19): siRNA sense strand
uguuggaccugcuggacau

SEQ ID NO: 2455047 - RNA, 19 nt, Homo sapiens
  misc_RNA (1)...(19): siRNA sense strand
agacacaguuggaagccau

SEQ ID NO: 2455048 - RNA, 19 nt, Homo sapiens
  misc_RNA (1)...(19): siRNA sense strand
ggcugcagguggaggacuu

SEQ ID NO: 2455049 - RNA, 19 nt, Homo sapiens
  misc_RNA (1)...(19): siRNA sense strand
aggaagaacccgagaccau

SEQ ID NO: 2455050 - RNA, 19 nt, Homo sapiens
  misc_RNA (1)...(19): siRNA sense strand
aagcaaagaccgaagagga

SEQ ID NO: 2455051 - RNA, 19 nt, Homo sapiens
  misc_RNA (1)...(19): siRNA sense strand
aggaagagcagccugggaa

SEQ ID NO: 2455052 - RNA, 19 nt, Homo sapiens
  misc_RNA (1)...(19): siRNA sense strand
cuggaacagaggaggguca

SEQ ID NO: 2455053 - RNA, 19 nt, Homo sapiens
  misc_RNA (1)...(19): siRNA sense strand
gaggagggucagagaagca

SEQ ID NO: 2455054 - RNA, 19 nt, Homo sapiens
  misc_RNA (1)...(19): siRNA sense strand
gggaauuugucuaccagga

SEQ ID NO: 2455055 - RNA, 19 nt, Homo sapiens
  misc_RNA (1)...(19): siRNA sense strand
ccggaguccagcaggaaga

SEQ ID NO: 2455056 - RNA, 19 nt, Homo sapiens
  misc_RNA (1)...(19): siRNA sense strand
gagcagaagcugaaguccu

SEQ ID NO: 2455057 - RNA, 19 nt, Homo sapiens
  misc_RNA (1)...(19): siRNA sense strand
ucgcagaggcaguccguca

SEQ ID NO: 2455058 - RNA, 19 nt, Homo sapiens
  misc_RNA (1)...(19): siRNA sense strand
ucagagaagcaaagaccga

SEQ ID NO: 2455059 - RNA, 19 nt, Homo sapiens
  misc_RNA (1)...(19): siRNA sense strand
ggaguguacgagaggcaca

SEQ ID NO: 2455060 - RNA, 19 nt, Homo sapiens
  misc_RNA (1)...(19): siRNA sense strand
acgagaaggagaaaagcua

SEQ ID NO: 2455061 - RNA, 19 nt, Homo sapiens
  misc_RNA (1)...(19): siRNA sense strand
uggagcaguuccugggcau

SEQ ID NO: 2455062 - RNA, 19 nt, Homo sapiens
  misc_RNA (1)...(19): siRNA sense strand
gaggagaaccugaagagcu

SEQ ID NO: 2455063 - RNA, 19 nt, Homo sapiens
  misc_RNA (1)...(19): siRNA sense strand
agacccacgagaaggagaa

SEQ ID NO: 2455064 - RNA, 19 nt, Homo sapiens
  misc_RNA (1)...(19): siRNA sense strand
ggaggaaggaggaggcuga

SEQ ID NO: 2455065 - RNA, 19 nt, Homo sapiens
  misc_RNA (1)...(19): siRNA sense strand
gcacaaugcacaaggccca

SEQ ID NO: 2455066 - RNA, 19 nt, Homo sapiens
  misc_RNA (1)...(19): siRNA sense strand
guggaagagcccugcacaa

SEQ ID NO: 2455067 - RNA, 19 nt, Homo sapiens
  misc_RNA (1)...(19): siRNA sense strand
ugaagaagaaggagccuga

SEQ ID NO: 2455068 - RNA, 19 nt, Homo sapiens
  misc_RNA (1)...(19): siRNA sense strand
aggagauggugcuggagau

SEQ ID NO: 2455069 - RNA, 19 nt, Homo sapiens
  misc_RNA (1)...(19): siRNA sense strand
gaaggagccugaaggagga

SEQ ID NO: 2455070 - RNA, 19 nt, Homo sapiens
  misc_RNA (1)...(19): siRNA sense strand
ccauucaggauuuggacuu

SEQ ID NO: 2455071 - RNA, 19 nt, Homo sapiens
  misc_RNA (1)...(19): siRNA sense strand
gauaaagaaucuggagaaa

SEQ ID NO: 2455072 - RNA, 19 nt, Homo sapiens
  misc_RNA (1)...(19): siRNA sense strand
uggaagaguacaagcgcaa

SEQ ID NO: 2455073 - RNA, 19 nt, Homo sapiens
  misc_RNA (1)...(19): siRNA sense strand
gagaagaagcugucggagu

SEQ ID NO: 2455074 - RNA, 19 nt, Homo sapiens
  misc_RNA (1)...(19): siRNA sense strand
ugguagaggaugcguguau

SEQ ID NO: 2455075 - RNA, 19 nt, Homo sapiens
  misc_RNA (1)...(19): siRNA sense strand
gauaagaagccuaggaagc

SEQ ID NO: 2455076 - RNA, 19 nt, Homo sapiens
  misc_RNA (1)...(19): siRNA sense strand
cauuacaagaucuggaaaa

SEQ ID NO: 2455077 - RNA, 19 nt, Homo sapiens
  misc_RNA (1)...(19): siRNA sense strand
aagccaaaccaaacaggaa

SEQ ID NO: 2455078 - RNA, 19 nt, Homo sapiens
  misc_RNA (1)...(19): siRNA sense strand
gauaaagguggaugaaaau

SEQ ID NO: 2455079 - RNA, 19 nt, Homo sapiens
  misc_RNA (1)...(19): siRNA sense strand
ggcagaaauagaugauaga

SEQ ID NO: 2455080 - RNA, 19 nt, Homo sapiens
  misc_RNA (1)...(19): siRNA sense strand
gaguuucccuggugcgcaa

SEQ ID NO: 2455081 - RNA, 19 nt, Homo sapiens
  misc_RNA (1)...(19): siRNA sense strand
cagcaguucaucagaggau

SEQ ID NO: 2455082 - RNA, 19 nt, Homo sapiens
  misc_RNA (1)...(19): siRNA sense strand
gaggaaggggccagaguuu

SEQ ID NO: 2455083 - RNA, 19 nt, Homo sapiens
  misc_RNA (1)...(19): siRNA sense strand
gaugaaaguuguaagaagc

SEQ ID NO: 2455084 - RNA, 19 nt, Homo sapiens
  misc_RNA (1)...(19): siRNA sense strand
aguguuaucuauuugggaa

SEQ ID NO: 2455085 - RNA, 19 nt, Homo sapiens
  misc_RNA (1)...(19): siRNA sense strand
ccaaaaugguagaggaugc

SEQ ID NO: 2455086 - RNA, 19 nt, Homo sapiens
  misc_RNA (1)...(19): siRNA sense strand
cguguauguugcuggcaga

SEQ ID NO: 2455087 - RNA, 19 nt, Homo sapiens
  misc_RNA (1)...(19): siRNA sense strand
cuguugaaguccaagaagu

SEQ ID NO: 2455088 - RNA, 19 nt, Homo sapiens
  misc_RNA (1)...(19): siRNA sense strand
auacagaacagcaagagga

SEQ ID NO: 2455089 - RNA, 19 nt, Homo sapiens
  misc_RNA (1)...(19): siRNA sense strand
cggaaagccaaaccaaaca

SEQ ID NO: 2455090 - RNA, 19 nt, Homo sapiens
  misc_RNA (1)...(19): siRNA sense strand
ccuaugaguacuucaccaa

SEQ ID NO: 2455091 - RNA, 19 nt, Homo sapiens
  misc_RNA (1)...(19): siRNA sense strand
cugcagaagcugacggaca

SEQ ID NO: 2455092 - RNA, 19 nt, Homo sapiens
  misc_RNA (1)...(19): siRNA sense strand
ugggaggaguagagaggca

SEQ ID NO: 2455093 - RNA, 19 nt, Homo sapiens
  misc_RNA (1)...(19): siRNA sense strand
agauggaauuugaagcuca

SEQ ID NO: 2455094 - RNA, 19 nt, Homo sapiens
  misc_RNA (1)...(19): siRNA sense strand
auuccgagguuuugauaaa

SEQ ID NO: 2455095 - RNA, 19 nt, Homo sapiens
  misc_RNA (1)...(19): siRNA sense strand
augaacuggcugugagaga

SEQ ID NO: 2455096 - RNA, 19 nt, Homo sapiens
  misc_RNA (1)...(19): siRNA sense strand
guguaaauguauuggagug

SEQ ID NO: 2455097 - RNA, 19 nt, Homo sapiens
  misc_RNA (1)...(19): siRNA sense strand
augauuauggacagaguau

SEQ ID NO: 2455098 - RNA, 19 nt, Homo sapiens
  misc_RNA (1)...(19): siRNA sense strand
cagaauaucuugcgccaga

SEQ ID NO: 2455099 - RNA, 19 nt, Homo sapiens
  misc_RNA (1)...(19): siRNA sense strand
gcauuuaaucauuggcuga

SEQ ID NO: 2455100 - RNA, 19 nt, Homo sapiens
  misc_RNA (1)...(19): siRNA sense strand
gcugaaaguuccagaggac

SEQ ID NO: 2455101 - RNA, 19 nt, Homo sapiens
  misc_RNA (1)...(19): siRNA sense strand
ggagaaagucuuaacccuu

SEQ ID NO: 2455102 - RNA, 19 nt, Homo sapiens
  misc_RNA (1)...(19): siRNA sense strand
ccaucagggacaaggccua

SEQ ID NO: 2455103 - RNA, 19 nt, Homo sapiens
  misc_RNA (1)...(19): siRNA sense strand
agguggacuguuuggauua

SEQ ID NO: 2455104 - RNA, 19 nt, Homo sapiens
  misc_RNA (1)...(19): siRNA sense strand
ggucaaggccugaaagcac

SEQ ID NO: 2455105 - RNA, 19 nt, Homo sapiens
  misc_RNA (1)...(19): siRNA sense strand
cagguaaacaagugagaac

SEQ ID NO: 2455106 - RNA, 19 nt, Homo sapiens
  misc_RNA (1)...(19): siRNA sense strand
acuccaaagaauauaguga

SEQ ID NO: 2455107 - RNA, 19 nt, Homo sapiens
  misc_RNA (1)...(19): siRNA sense strand
cgaugauauugaagacaac

SEQ ID NO: 2455108 - RNA, 19 nt, Homo sapiens
  misc_RNA (1)...(19): siRNA sense strand
cugccaauuacguguauuu

SEQ ID NO: 2455109 - RNA, 19 nt, Homo sapiens
  misc_RNA (1)...(19): siRNA sense strand
uugaagacaccaaaggaaa

SEQ ID NO: 2455110 - RNA, 19 nt, Homo sapiens
  misc_RNA (1)...(19): siRNA sense strand
gauuaugagauggaagaaa

SEQ ID NO: 2455111 - RNA, 19 nt, Homo sapiens
  misc_RNA (1)...(19): siRNA sense strand
ccaaaggaaauaauggaga

SEQ ID NO: 2455112 - RNA, 19 nt, Homo sapiens
  misc_RNA (1)...(19): siRNA sense strand
ggggcuugcaauagagaaa

SEQ ID NO: 2455113 - RNA, 19 nt, Homo sapiens
  misc_RNA (1)...(19): siRNA sense strand
auucagaacaagcaacuaa

SEQ ID NO: 2455114 - RNA, 19 nt, Homo sapiens
  misc_RNA (1)...(19): siRNA sense strand
aaauagacucugaugguca

SEQ ID NO: 2455115 - RNA, 19 nt, Homo sapiens
  misc_RNA (1)...(19): siRNA sense strand
cucuaaauuacgaggccaa

SEQ ID NO: 2455116 - RNA, 19 nt, Homo sapiens
  misc_RNA (1)...(19): siRNA sense strand
auagaaagcucucagcaga

SEQ ID NO: 2455117 - RNA, 19 nt, Homo sapiens
  misc_RNA (1)...(19): siRNA sense strand
gaauauuacaacaaggacu

SEQ ID NO: 2455118 - RNA, 19 nt, Homo sapiens
  misc_RNA (1)...(19): siRNA sense strand
guggauauguucuuggcuu

SEQ ID NO: 2455119 - RNA, 19 nt, Homo sapiens
  misc_RNA (1)...(19): siRNA sense strand
auagagaaauugaaggaug

SEQ ID NO: 2455120 - RNA, 19 nt, Homo sapiens
  misc_RNA (1)...(19): siRNA sense strand
ccuacagggacuuugggaa

SEQ ID NO: 2455121 - RNA, 19 nt, Homo sapiens
  misc_RNA (1)...(19): siRNA sense strand
gggcaauuuaggaaccuuu

SEQ ID NO: 2455122 - RNA, 19 nt, Homo sapiens
  misc_RNA (1)...(19): siRNA sense strand
cuacagggacuuugggaag

SEQ ID NO: 2455123 - RNA, 19 nt, Homo sapiens
  misc_RNA (1)...(19): siRNA sense strand
auugaagacaccaaaggaa

SEQ ID NO: 2455124 - RNA, 19 nt, Homo sapiens
  misc_RNA (1)...(19): siRNA sense strand
ggcaguacacagagcuuau

SEQ ID NO: 2455125 - RNA, 19 nt, Homo sapiens
  misc_RNA (1)...(19): siRNA sense strand
guuuagauuccauugaaga

SEQ ID NO: 2455126 - RNA, 19 nt, Homo sapiens
  misc_RNA (1)...(19): siRNA sense strand
agaacaagcaacuaagacu

SEQ ID NO: 2455127 - RNA, 19 nt, Homo sapiens
  misc_RNA (1)...(19): siRNA sense strand
ccugaaaacugcagagaau

SEQ ID NO: 2455128 - RNA, 19 nt, Homo sapiens
  misc_RNA (1)...(19): siRNA sense strand
auuuggaagugaugggaaa

SEQ ID NO: 2455129 - RNA, 19 nt, Homo sapiens
  misc_RNA (1)...(19): siRNA sense strand
ggauugaacuggaagagga

SEQ ID NO: 2455130 - RNA, 19 nt, Homo sapiens
  misc_RNA (1)...(19): siRNA sense strand
ccagguacaaggaaggaaa

SEQ ID NO: 2455131 - RNA, 19 nt, Homo sapiens
  misc_RNA (1)...(19): siRNA sense strand
gagaacagauggagagcac

SEQ ID NO: 2455132 - RNA, 19 nt, Homo sapiens
  misc_RNA (1)...(19): siRNA sense strand
ugaaaaugcaauugaggaa

SEQ ID NO: 2455133 - RNA, 19 nt, Homo sapiens
  misc_RNA (1)...(19): siRNA sense strand
auggagaacacuuuggaaa

SEQ ID NO: 2455134 - RNA, 19 nt, Homo sapiens
  misc_RNA (1)...(19): siRNA sense strand
ccagagaaagcaaaagaaa

SEQ ID NO: 2455135 - RNA, 19 nt, Homo sapiens
  misc_RNA (1)...(19): siRNA sense strand
uggagaacacuuuggaaaa

SEQ ID NO: 2455136 - RNA, 19 nt, Homo sapiens
  misc_RNA (1)...(19): siRNA sense strand
aggcauauuuggaagugau

SEQ ID NO: 2455137 - RNA, 19 nt, Homo sapiens
  misc_RNA (1)...(19): siRNA sense strand
uucagaaagaggaggcaua

SEQ ID NO: 2455138 - RNA, 19 nt, Homo sapiens
  misc_RNA (1)...(19): siRNA sense strand
ugccaagagacaacaaaua

SEQ ID NO: 2455139 - RNA, 19 nt, Homo sapiens
  misc_RNA (1)...(19): siRNA sense strand
cagagaaagcaaaagaaau

SEQ ID NO: 2455140 - RNA, 19 nt, Homo sapiens
  misc_RNA (1)...(19): siRNA sense strand
uaaccaggauaguggcaca

SEQ ID NO: 2455141 - RNA, 19 nt, Homo sapiens
  misc_RNA (1)...(19): siRNA sense strand
aggaaggaaacgauggcau

SEQ ID NO: 2455142 - RNA, 19 nt, Homo sapiens
  misc_RNA (1)...(19): siRNA sense strand
cuagaaucccuuaugaaga

SEQ ID NO: 2455143 - RNA, 19 nt, Homo sapiens
  misc_RNA (1)...(19): siRNA sense strand
gauugaacuggaagaggau

SEQ ID NO: 2455144 - RNA, 19 nt, Homo sapiens
  misc_RNA (1)...(19): siRNA sense strand
ggccaaacagguagccaga

SEQ ID NO: 2455145 - RNA, 19 nt, Homo sapiens
  misc_RNA (1)...(19): siRNA sense strand
aaauaaugagcaacaguga

SEQ ID NO: 2455146 - RNA, 19 nt, Homo sapiens
  misc_RNA (1)...(19): siRNA sense strand
uggaccauuuagagauuau

SEQ ID NO: 2455147 - RNA, 19 nt, Homo sapiens
  misc_RNA (1)...(19): siRNA sense strand
guauaaacucauggauuga

SEQ ID NO: 2455148 - RNA, 19 nt, Homo sapiens
  misc_RNA (1)...(19): siRNA sense strand
ccacaaaauaccagagccu

SEQ ID NO: 2455149 - RNA, 19 nt, Homo sapiens
  misc_RNA (1)...(19): siRNA sense strand
ggaagugaugggaaagacu

SEQ ID NO: 2455150 - RNA, 19 nt, Homo sapiens
  misc_RNA (1)...(19): siRNA sense strand
uggcacaacuuuugauaca

SEQ ID NO: 2455151 - RNA, 19 nt, Homo sapiens
  misc_RNA (1)...(19): siRNA sense strand
cauuccaaguucugggcuu

SEQ ID NO: 2455152 - RNA, 19 nt, Homo sapiens
  misc_RNA (1)...(19): siRNA sense strand
auuccaaguucugggcuua

SEQ ID NO: 2455153 - RNA, 19 nt, Homo sapiens
  misc_RNA (1)...(19): siRNA sense strand
uauuugaagacaagacaga

SEQ ID NO: 2455154 - RNA, 19 nt, Homo sapiens
  misc_RNA (1)...(19): siRNA sense strand
aggaaaguacauuguggau

SEQ ID NO: 2455155 - RNA, 19 nt, Homo sapiens
  misc_RNA (1)...(19): siRNA sense strand
caacaaacguauugagcca

SEQ ID NO: 2455156 - RNA, 19 nt, Homo sapiens
  misc_RNA (1)...(19): siRNA sense strand
aaacaaggccucagggaga

SEQ ID NO: 2455157 - RNA, 19 nt, Homo sapiens
  misc_RNA (1)...(19): siRNA sense strand
gagaauacgucuugcucca

SEQ ID NO: 2455158 - RNA, 19 nt, Homo sapiens
  misc_RNA (1)...(19): siRNA sense strand
aggagaacgucuaacgaga

SEQ ID NO: 2455159 - RNA, 19 nt, Homo sapiens
  misc_RNA (1)...(19): siRNA sense strand
augaggaggaggaggaaga

SEQ ID NO: 2455160 - RNA, 19 nt, Homo sapiens
  misc_RNA (1)...(19): siRNA sense strand
aagugaagcaggagcguga

SEQ ID NO: 2455161 - RNA, 19 nt, Homo sapiens
  misc_RNA (1)...(19): siRNA sense strand
aggaugaggaggaggagga

SEQ ID NO: 2455162 - RNA, 19 nt, Homo sapiens
  misc_RNA (1)...(19): siRNA sense strand
cagucaaagugaagcagga

SEQ ID NO: 2455163 - RNA, 19 nt, Homo sapiens
  misc_RNA (1)...(19): siRNA sense strand
gccgaagagugaagcccua

SEQ ID NO: 2455164 - RNA, 19 nt, Homo sapiens
  misc_RNA (1)...(19): siRNA sense strand
caucauugaccuuggcuca

SEQ ID NO: 2455165 - RNA, 19 nt, Homo sapiens
  misc_RNA (1)...(19): siRNA sense strand
cuccaugagucgucggaca

SEQ ID NO: 2455166 - RNA, 19 nt, Homo sapiens
  misc_RNA (1)...(19): siRNA sense strand
aagaaaaggauguacucaa

SEQ ID NO: 2455167 - RNA, 19 nt, Homo sapiens
  misc_RNA (1)...(19): siRNA sense strand
cugaaauagacaggaaaga

SEQ ID NO: 2455168 - RNA, 19 nt, Homo sapiens
  misc_RNA (1)...(19): siRNA sense strand
caacagucaaagugaagca

SEQ ID NO: 2455169 - RNA, 19 nt, Homo sapiens
  misc_RNA (1)...(19): siRNA sense strand
gggugguagugaagcagga

SEQ ID NO: 2455170 - RNA, 19 nt, Homo sapiens
  misc_RNA (1)...(19): siRNA sense strand
aggaggaggaggaagaagu

SEQ ID NO: 2455171 - RNA, 19 nt, Homo sapiens
  misc_RNA (1)...(19): siRNA sense strand
ugaccuuggcucaggcaau

SEQ ID NO: 2455172 - RNA, 19 nt, Homo sapiens
  misc_RNA (1)...(19): siRNA sense strand
augacgaggaugaggagga

SEQ ID NO: 2455173 - RNA, 19 nt, Homo sapiens
  misc_RNA (1)...(19): siRNA sense strand
aggaggaagaagugucuga

SEQ ID NO: 2455174 - RNA, 19 nt, Homo sapiens
  misc_RNA (1)...(19): siRNA sense strand
agcaggagcgugaggauca

SEQ ID NO: 2455175 - RNA, 19 nt, Homo sapiens
  misc_RNA (1)...(19): siRNA sense strand
agaaaaguguuguggaaaa

SEQ ID NO: 2455176 - RNA, 19 nt, Homo sapiens
  misc_RNA (1)...(19): siRNA sense strand
uguaaugggaagaggaaga

SEQ ID NO: 2455177 - RNA, 19 nt, Homo sapiens
  misc_RNA (1)...(19): siRNA sense strand
gggaagaggaagacggcga

SEQ ID NO: 2455178 - RNA, 19 nt, Homo sapiens
  misc_RNA (1)...(19): siRNA sense strand
ggagagagcacgagccuga

SEQ ID NO: 2455179 - RNA, 19 nt, Homo sapiens
  misc_RNA (1)...(19): siRNA sense strand
gagcugaagaugaaggaga

SEQ ID NO: 2455180 - RNA, 19 nt, Homo sapiens
  misc_RNA (1)...(19): siRNA sense strand
uggucaaguagaagugaaa

SEQ ID NO: 2455181 - RNA, 19 nt, Homo sapiens
  misc_RNA (1)...(19): siRNA sense strand
gggaagugggccaaaggaa

SEQ ID NO: 2455182 - RNA, 19 nt, Homo sapiens
  misc_RNA (1)...(19): siRNA sense strand
uugcaacuguggaaggaaa

SEQ ID NO: 2455183 - RNA, 19 nt, Homo sapiens
  misc_RNA (1)...(19): siRNA sense strand
agaucugcguugugggaau

SEQ ID NO: 2455184 - RNA, 19 nt, Homo sapiens
  misc_RNA (1)...(19): siRNA sense strand
aaggagacuuagacacaaa

SEQ ID NO: 2455185 - RNA, 19 nt, Homo sapiens
  misc_RNA (1)...(19): siRNA sense strand
cugacaaaguaaugaaagu

SEQ ID NO: 2455186 - RNA, 19 nt, Homo sapiens
  misc_RNA (1)...(19): siRNA sense strand
gagcugucgcggaagguaa

SEQ ID NO: 2455187 - RNA, 19 nt, Homo sapiens
  misc_RNA (1)...(19): siRNA sense strand
uggaaggcuuauuggauuu

SEQ ID NO: 2455188 - RNA, 19 nt, Homo sapiens
  misc_RNA (1)...(19): siRNA sense strand
ggauuguccaguuggcaaa

SEQ ID NO: 2455189 - RNA, 19 nt, Homo sapiens
  misc_RNA (1)...(19): siRNA sense strand
agauaauacuaaugccuca

SEQ ID NO: 2455190 - RNA, 19 nt, Homo sapiens
  misc_RNA (1)...(19): siRNA sense strand
gguggcuauugaugggaaa

SEQ ID NO: 2455191 - RNA, 19 nt, Homo sapiens
  misc_RNA (1)...(19): siRNA sense strand
aguaaugggaagugggcca

SEQ ID NO: 2455192 - RNA, 19 nt, Homo sapiens
  misc_RNA (1)...(19): siRNA sense strand
acaagcaggaggagauaau

SEQ ID NO: 2455193 - RNA, 19 nt, Homo sapiens
  misc_RNA (1)...(19): siRNA sense strand
aggaaaaugugcaguuaau

SEQ ID NO: 2455194 - RNA, 19 nt, Homo sapiens
  misc_RNA (1)...(19): siRNA sense strand
cuggaugggcugagacaga

SEQ ID NO: 2455195 - RNA, 19 nt, Homo sapiens
  misc_RNA (1)...(19): siRNA sense strand
ggauuucacucuucgggaa

SEQ ID NO: 2455196 - RNA, 19 nt, Homo sapiens
  misc_RNA (1)...(19): siRNA sense strand
uuaccuaaaucaggagaaa

SEQ ID NO: 2455197 - RNA, 19 nt, Homo sapiens
  misc_RNA (1)...(19): siRNA sense strand
aggagauaauccagaaguu

SEQ ID NO: 2455198 - RNA, 19 nt, Homo sapiens
  misc_RNA (1)...(19): siRNA sense strand
ccucaaacccaaggagaga

SEQ ID NO: 2455199 - RNA, 19 nt, Homo sapiens
  misc_RNA (1)...(19): siRNA sense strand
aguucauggucaaguagaa

SEQ ID NO: 2455200 - RNA, 19 nt, Homo sapiens
  misc_RNA (1)...(19): siRNA sense strand
uggaaagagaagugcgguu

SEQ ID NO: 2455201 - RNA, 19 nt, Homo sapiens
  misc_RNA (1)...(19): siRNA sense strand
aggcaggcucccaggacua

SEQ ID NO: 2455202 - RNA, 19 nt, Homo sapiens
  misc_RNA (1)...(19): siRNA sense strand
uggcaaagacuggaagcua

SEQ ID NO: 2455203 - RNA, 19 nt, Homo sapiens
  misc_RNA (1)...(19): siRNA sense strand
ugugaggagaggaguuuaa

SEQ ID NO: 2455204 - RNA, 19 nt, Homo sapiens
  misc_RNA (1)...(19): siRNA sense strand
ccacaagcaggaggagaua

SEQ ID NO: 2455205 - RNA, 19 nt, Homo sapiens
  misc_RNA (1)...(19): siRNA sense strand
ccacagugcuuaccaguca

SEQ ID NO: 2455206 - RNA, 19 nt, Homo sapiens
  misc_RNA (1)...(19): siRNA sense strand
uaaugaaaguaaugggaag

SEQ ID NO: 2455207 - RNA, 19 nt, Homo sapiens
  misc_RNA (1)...(19): siRNA sense strand
auaucaaagcagccaauua

SEQ ID NO: 2455208 - RNA, 19 nt, Homo sapiens
  misc_RNA (1)...(19): siRNA sense strand
guaaugaaaguaaugggaa

SEQ ID NO: 2455209 - RNA, 19 nt, Homo sapiens
  misc_RNA (1)...(19): siRNA sense strand
ucagaaaaccgaugccaaa

SEQ ID NO: 2455210 - RNA, 19 nt, Homo sapiens
  misc_RNA (1)...(19): siRNA sense strand
guggaaaauuggaucauau

SEQ ID NO: 2455211 - RNA, 19 nt, Homo sapiens
  misc_RNA (1)...(19): siRNA sense strand
ccagcuggucuuugguuaa

SEQ ID NO: 2455212 - RNA, 19 nt, Homo sapiens
  misc_RNA (1)...(19): siRNA sense strand
aaguggagcugucgcggaa

SEQ ID NO: 2455213 - RNA, 19 nt, Homo sapiens
  misc_RNA (1)...(19): siRNA sense strand
ucaacaugcuagaggucca

SEQ ID NO: 2455214 - RNA, 19 nt, Homo sapiens
  misc_RNA (1)...(19): siRNA sense strand
agauucggaugcugauaaa

SEQ ID NO: 2455215 - RNA, 19 nt, Homo sapiens
  misc_RNA (1)...(19): siRNA sense strand
guuguaaugggaagaggaa

SEQ ID NO: 2455216 - RNA, 19 nt, Homo sapiens
  misc_RNA (1)...(19): siRNA sense strand
aggaggacccaguagguau

SEQ ID NO: 2455217 - RNA, 19 nt, Homo sapiens
  misc_RNA (1)...(19): siRNA sense strand
ucacaauagccgagcucga

SEQ ID NO: 2455218 - RNA, 19 nt, Homo sapiens
  misc_RNA (1)...(19): siRNA sense strand
augcauauggacugagaga

SEQ ID NO: 2455219 - RNA, 19 nt, Homo sapiens
  misc_RNA (1)...(19): siRNA sense strand
uccagaaguucauggucaa

SEQ ID NO: 2455220 - RNA, 19 nt, Homo sapiens
  misc_RNA (1)...(19): siRNA sense strand
ucuuaaggcaguaacacaa

SEQ ID NO: 2455221 - RNA, 19 nt, Homo sapiens
  misc_RNA (1)...(19): siRNA sense strand
gguagaaccuccucggaac

SEQ ID NO: 2455222 - RNA, 19 nt, Homo sapiens
  misc_RNA (1)...(19): siRNA sense strand
ugaguuuagcuuugaguuu

SEQ ID NO: 2455223 - RNA, 19 nt, Homo sapiens
  misc_RNA (1)...(19): siRNA sense strand
guauuaaagucuuggaagg

SEQ ID NO: 2455224 - RNA, 19 nt, Homo sapiens
  misc_RNA (1)...(19): siRNA sense strand
augggaaagaagaggacuu

SEQ ID NO: 2455225 - RNA, 19 nt, Homo sapiens
  misc_RNA (1)...(19): siRNA sense strand
uuggaaggcuuauuggauu

SEQ ID NO: 2455226 - RNA, 19 nt, Homo sapiens
  misc_RNA (1)...(19): siRNA sense strand
aggaggagauaauccagaa

SEQ ID NO: 2455227 - RNA, 19 nt, Homo sapiens
  misc_RNA (1)...(19): siRNA sense strand
uaucuuaugccuugggaca

SEQ ID NO: 2455228 - RNA, 19 nt, Homo sapiens
  misc_RNA (1)...(19): siRNA sense strand
gcauauggacugagagagg

SEQ ID NO: 2455229 - RNA, 19 nt, Homo sapiens
  misc_RNA (1)...(19): siRNA sense strand
gauaccaggugaugaggca

SEQ ID NO: 2455230 - RNA, 19 nt, Homo sapiens
  misc_RNA (1)...(19): siRNA sense strand
acccaaugccuguccauaa

SEQ ID NO: 2455231 - RNA, 19 nt, Homo sapiens
  misc_RNA (1)...(19): siRNA sense strand
caaacuucguugaucgaca

SEQ ID NO: 2455232 - RNA, 19 nt, Homo sapiens
  misc_RNA (1)...(19): siRNA sense strand
gcagcacagccgacaacaa

SEQ ID NO: 2455233 - RNA, 19 nt, Homo sapiens
  misc_RNA (1)...(19): siRNA sense strand
uuaaagucuuggaaggcuu

SEQ ID NO: 2455234 - RNA, 19 nt, Homo sapiens
  misc_RNA (1)...(19): siRNA sense strand
ggaaacaagcaccucgaga

SEQ ID NO: 2455235 - RNA, 19 nt, Homo sapiens
  misc_RNA (1)...(19): siRNA sense strand
gggccaaaggaaucagcuu

SEQ ID NO: 2455236 - RNA, 19 nt, Homo sapiens
  misc_RNA (1)...(19): siRNA sense strand
ccuucuaaugggagcauca

SEQ ID NO: 2455237 - RNA, 19 nt, Homo sapiens
  misc_RNA (1)...(19): siRNA sense strand
augugcaguuaaugagcua

SEQ ID NO: 2455238 - RNA, 19 nt, Homo sapiens
  misc_RNA (1)...(19): siRNA sense strand
acuacagucaggaaagcaa

SEQ ID NO: 2455239 - RNA, 19 nt, Homo sapiens
  misc_RNA (1)...(19): siRNA sense strand
auucgagcgcggagcguaa

SEQ ID NO: 2455240 - RNA, 19 nt, Homo sapiens
  misc_RNA (1)...(19): siRNA sense strand
gggcuuucccugagcgcuu

SEQ ID NO: 2455241 - RNA, 19 nt, Homo sapiens
  misc_RNA (1)...(19): siRNA sense strand
cagaauggucucagggcaa

SEQ ID NO: 2455242 - RNA, 19 nt, Homo sapiens
  misc_RNA (1)...(19): siRNA sense strand
cagaggagcucgaggagga

SEQ ID NO: 2455243 - RNA, 19 nt, Homo sapiens
  misc_RNA (1)...(19): siRNA sense strand
gagacaacgaggagaacau

SEQ ID NO: 2455244 - RNA, 19 nt, Homo sapiens
  misc_RNA (1)...(19): siRNA sense strand
ccucagaaccagugcuaca

SEQ ID NO: 2455245 - RNA, 19 nt, Homo sapiens
  misc_RNA (1)...(19): siRNA sense strand
ggagagcgcuucugggaca

SEQ ID NO: 2455246 - RNA, 19 nt, Homo sapiens
  misc_RNA (1)...(19): siRNA sense strand
aggaaaaggaggcggagaa

SEQ ID NO: 2455247 - RNA, 19 nt, Homo sapiens
  misc_RNA (1)...(19): siRNA sense strand
aggcggagaaguagaaaga

SEQ ID NO: 2455248 - RNA, 19 nt, Homo sapiens
  misc_RNA (1)...(19): siRNA sense strand
aagcagaaggguuggccaa

SEQ ID NO: 2455249 - RNA, 19 nt, Homo sapiens
  misc_RNA (1)...(19): siRNA sense strand
ggacaucgcucgaggcuac

SEQ ID NO: 2455250 - RNA, 19 nt, Homo sapiens
  misc_RNA (1)...(19): siRNA sense strand
gagauguuuaagagcauaa

SEQ ID NO: 2455251 - RNA, 19 nt, Homo sapiens
  misc_RNA (1)...(19): siRNA sense strand
cuacagagagcguggacca

SEQ ID NO: 2455252 - RNA, 19 nt, Homo sapiens
  misc_RNA (1)...(19): siRNA sense strand
cagagaaacaggcaggaga

SEQ ID NO: 2455253 - RNA, 19 nt, Homo sapiens
  misc_RNA (1)...(19): siRNA sense strand
augaacaucgacagaaaua

SEQ ID NO: 2455254 - RNA, 19 nt, Homo sapiens
  misc_RNA (1)...(19): siRNA sense strand
agcuagagaucauaaggaa

SEQ ID NO: 2455255 - RNA, 19 nt, Homo sapiens
  misc_RNA (1)...(19): siRNA sense strand
uaaagaacaaggaaggaga

SEQ ID NO: 2455256 - RNA, 19 nt, Homo sapiens
  misc_RNA (1)...(19): siRNA sense strand
aguucggaauccagcauua

SEQ ID NO: 2455257 - RNA, 19 nt, Homo sapiens
  misc_RNA (1)...(19): siRNA sense strand
aggaaaggaaagaccgaca

SEQ ID NO: 2455258 - RNA, 19 nt, Homo sapiens
  misc_RNA (1)...(19): siRNA sense strand
gcucagaagaccagaggac

SEQ ID NO: 2455259 - RNA, 19 nt, Homo sapiens
  misc_RNA (1)...(19): siRNA sense strand
aguaaagaucccagagaag

SEQ ID NO: 2455260 - RNA, 19 nt, Homo sapiens
  misc_RNA (1)...(19): siRNA sense strand
cagaagcggcgaagcaaaa

SEQ ID NO: 2455261 - RNA, 19 nt, Homo sapiens
  misc_RNA (1)...(19): siRNA sense strand
ucuccgagucaaaggaauu

SEQ ID NO: 2455262 - RNA, 19 nt, Homo sapiens
  misc_RNA (1)...(19): siRNA sense strand
acucagaagcggcgaagca

SEQ ID NO: 2455263 - RNA, 19 nt, Homo sapiens
  misc_RNA (1)...(19): siRNA sense strand
ucagaagcggcgaagcaaa

SEQ ID NO: 2455264 - RNA, 19 nt, Homo sapiens
  misc_RNA (1)...(19): siRNA sense strand
aaccaaaagaggagaucaa

SEQ ID NO: 2455265 - RNA, 19 nt, Homo sapiens
  misc_RNA (1)...(19): siRNA sense strand
acaccgaagagucgagaga

SEQ ID NO: 2455266 - RNA, 19 nt, Homo sapiens
  misc_RNA (1)...(19): siRNA sense strand
uugagauguuuaagagcau

SEQ ID NO: 2455267 - RNA, 19 nt, Homo sapiens
  misc_RNA (1)...(19): siRNA sense strand
gaacaaggaaggagagacg

SEQ ID NO: 2455268 - RNA, 19 nt, Homo sapiens
  misc_RNA (1)...(19): siRNA sense strand
aggccaaagaggugacgau

SEQ ID NO: 2455269 - RNA, 19 nt, Homo sapiens
  misc_RNA (1)...(19): siRNA sense strand
ccuugaucuucgaaugcaa

SEQ ID NO: 2455270 - RNA, 19 nt, Homo sapiens
  misc_RNA (1)...(19): siRNA sense strand
gagcauaacucauuccacu

SEQ ID NO: 2455271 - RNA, 19 nt, Homo sapiens
  misc_RNA (1)...(19): siRNA sense strand
cugcggacggugagaccaa

SEQ ID NO: 2455272 - RNA, 19 nt, Homo sapiens
  misc_RNA (1)...(19): siRNA sense strand
caggacagcgcaaggguca

SEQ ID NO: 2455273 - RNA, 19 nt, Homo sapiens
  misc_RNA (1)...(19): siRNA sense strand
ccacagaguacaagcacgu

SEQ ID NO: 2455274 - RNA, 19 nt, Homo sapiens
  misc_RNA (1)...(19): siRNA sense strand
aggauagugagcagggaca

SEQ ID NO: 2455275 - RNA, 19 nt, Homo sapiens
  misc_RNA (1)...(19): siRNA sense strand
agccgacguucgagaggaa

SEQ ID NO: 2455276 - RNA, 19 nt, Homo sapiens
  misc_RNA (1)...(19): siRNA sense strand
ggcaaaggcaggacuccaa

SEQ ID NO: 2455277 - RNA, 19 nt, Homo sapiens
  misc_RNA (1)...(19): siRNA sense strand
ggacuuccaaggagagcau

SEQ ID NO: 2455278 - RNA, 19 nt, Homo sapiens
  misc_RNA (1)...(19): siRNA sense strand
gugcauggcuacagagagc

SEQ ID NO: 2455279 - RNA, 19 nt, Homo sapiens
  misc_RNA (1)...(19): siRNA sense strand
agaggugacgauagcuaaa

SEQ ID NO: 2455280 - RNA, 19 nt, Homo sapiens
  misc_RNA (1)...(19): siRNA sense strand
gcaaagcacacucaggaca

SEQ ID NO: 2455281 - RNA, 19 nt, Homo sapiens
  misc_RNA (1)...(19): siRNA sense strand
gcuacauggccaccacaaa

SEQ ID NO: 2455282 - RNA, 19 nt, Homo sapiens
  misc_RNA (1)...(19): siRNA sense strand
acgaagaaugggaaccuau

SEQ ID NO: 2455283 - RNA, 19 nt, Homo sapiens
  misc_RNA (1)...(19): siRNA sense strand
gcaguaucucggaagaaaa

SEQ ID NO: 2455284 - RNA, 19 nt, Homo sapiens
  misc_RNA (1)...(19): siRNA sense strand
acagaggacagcaggacuu

SEQ ID NO: 2455285 - RNA, 19 nt, Homo sapiens
  misc_RNA (1)...(19): siRNA sense strand
accgaagagucgagagauc

SEQ ID NO: 2455286 - RNA, 19 nt, Homo sapiens
  misc_RNA (1)...(19): siRNA sense strand
cggugauugagauguuuaa

SEQ ID NO: 2455287 - RNA, 19 nt, Homo sapiens
  misc_RNA (1)...(19): siRNA sense strand
ccuggaucuccgagucaaa

SEQ ID NO: 2455288 - RNA, 19 nt, Homo sapiens
  misc_RNA (1)...(19): siRNA sense strand
aaagaggugacgauagcua

SEQ ID NO: 2455289 - RNA, 19 nt, Homo sapiens
  misc_RNA (1)...(19): siRNA sense strand
aggcuggacacguggacau

SEQ ID NO: 2455290 - RNA, 19 nt, Homo sapiens
  misc_RNA (1)...(19): siRNA sense strand
cagugaaguaccucaucaa

SEQ ID NO: 2455291 - RNA, 19 nt, Homo sapiens
  misc_RNA (1)...(19): siRNA sense strand
ccagcauuaagaagaaauu

SEQ ID NO: 2455292 - RNA, 19 nt, Homo sapiens
  misc_RNA (1)...(19): siRNA sense strand
aguacaagcacguggaccu

SEQ ID NO: 2455293 - RNA, 19 nt, Homo sapiens
  misc_RNA (1)...(19): siRNA sense strand
ccgacguucgagaggaaga

SEQ ID NO: 2455294 - RNA, 19 nt, Homo sapiens
  misc_RNA (1)...(19): siRNA sense strand
gggaauuggacaagaggga

SEQ ID NO: 2455295 - RNA, 19 nt, Homo sapiens
  misc_RNA (1)...(19): siRNA sense strand
guaccaagaaggaggagga

SEQ ID NO: 2455296 - RNA, 19 nt, Homo sapiens
  misc_RNA (1)...(19): siRNA sense strand
cagcaggacuggaggaggu

SEQ ID NO: 2455297 - RNA, 19 nt, Homo sapiens
  misc_RNA (1)...(19): siRNA sense strand
acaaugaggaccuggccaa

SEQ ID NO: 2455298 - RNA, 19 nt, Homo sapiens
  misc_RNA (1)...(19): siRNA sense strand
cugcaagacaugugggaag

SEQ ID NO: 2455299 - RNA, 19 nt, Homo sapiens
  misc_RNA (1)...(19): siRNA sense strand
gaauuggacaagagggauc

SEQ ID NO: 2455300 - RNA, 19 nt, Homo sapiens
  misc_RNA (1)...(19): siRNA sense strand
uggcagaggcagacaguac

SEQ ID NO: 2455301 - RNA, 19 nt, Homo sapiens
  misc_RNA (1)...(19): siRNA sense strand
gcagacagacagagcagca

SEQ ID NO: 2455302 - RNA, 19 nt, Homo sapiens
  misc_RNA (1)...(19): siRNA sense strand
ccacuggggcaaaggggaa

SEQ ID NO: 2455303 - RNA, 19 nt, Homo sapiens
  misc_RNA (1)...(19): siRNA sense strand
ggacaaagaaauacagcga

SEQ ID NO: 2455304 - RNA, 19 nt, Homo sapiens
  misc_RNA (1)...(19): siRNA sense strand
acagagaaggacaaagaaa

SEQ ID NO: 2455305 - RNA, 19 nt, Homo sapiens
  misc_RNA (1)...(19): siRNA sense strand
aggcugagaaggagaagaa

SEQ ID NO: 2455306 - RNA, 19 nt, Homo sapiens
  misc_RNA (1)...(19): siRNA sense strand
ccgaaaagcaagaaaucaa

SEQ ID NO: 2455307 - RNA, 19 nt, Homo sapiens
  misc_RNA (1)...(19): siRNA sense strand
acaaagaaauacagcgacu

SEQ ID NO: 2455308 - RNA, 19 nt, Homo sapiens
  misc_RNA (1)...(19): siRNA sense strand
uggaaauacagcugaaaga

SEQ ID NO: 2455309 - RNA, 19 nt, Homo sapiens
  misc_RNA (1)...(19): siRNA sense strand
ucacaagugggaaaggaaa

SEQ ID NO: 2455310 - RNA, 19 nt, Homo sapiens
  misc_RNA (1)...(19): siRNA sense strand
uggaagagacaacgagaga

SEQ ID NO: 2455311 - RNA, 19 nt, Homo sapiens
  misc_RNA (1)...(19): siRNA sense strand
cugaagagaaagacguauu

SEQ ID NO: 2455312 - RNA, 19 nt, Homo sapiens
  misc_RNA (1)...(19): siRNA sense strand
aggaaagcugacugauaaa

SEQ ID NO: 2455313 - RNA, 19 nt, Homo sapiens
  misc_RNA (1)...(19): siRNA sense strand
cuggaagaugauaggcaua

SEQ ID NO: 2455314 - RNA, 19 nt, Homo sapiens
  misc_RNA (1)...(19): siRNA sense strand
gcugacugauaaagagaga

SEQ ID NO: 2455315 - RNA, 19 nt, Homo sapiens
  misc_RNA (1)...(19): siRNA sense strand
ugacugauaaagagagaca

SEQ ID NO: 2455316 - RNA, 19 nt, Homo sapiens
  misc_RNA (1)...(19): siRNA sense strand
ugauaaagagagacacaga

SEQ ID NO: 2455317 - RNA, 19 nt, Homo sapiens
  misc_RNA (1)...(19): siRNA sense strand
ugauauugcuaggggaaaa

SEQ ID NO: 2455318 - RNA, 19 nt, Homo sapiens
  misc_RNA (1)...(19): siRNA sense strand
uggaaugucccaagugcaa

SEQ ID NO: 2455319 - RNA, 19 nt, Homo sapiens
  misc_RNA (1)...(19): siRNA sense strand
acacagacuuuuggagaaa

SEQ ID NO: 2455320 - RNA, 19 nt, Homo sapiens
  misc_RNA (1)...(19): siRNA sense strand
aagaagggcagaugugcaa

SEQ ID NO: 2455321 - RNA, 19 nt, Homo sapiens
  misc_RNA (1)...(19): siRNA sense strand
aagaagagaagaagagauc

SEQ ID NO: 2455322 - RNA, 19 nt, Homo sapiens
  misc_RNA (1)...(19): siRNA sense strand
gagacugaaaacagagaaa

SEQ ID NO: 2455323 - RNA, 19 nt, Homo sapiens
  misc_RNA (1)...(19): siRNA sense strand
agaagaacaaacaagggua

SEQ ID NO: 2455324 - RNA, 19 nt, Homo sapiens
  misc_RNA (1)...(19): siRNA sense strand
ccuuaucugaagagaaaga

SEQ ID NO: 2455325 - RNA, 19 nt, Homo sapiens
  misc_RNA (1)...(19): siRNA sense strand
acugauaaagagagacaca

SEQ ID NO: 2455326 - RNA, 19 nt, Homo sapiens
  misc_RNA (1)...(19): siRNA sense strand
gagaaggagaagaaugcuu

SEQ ID NO: 2455327 - RNA, 19 nt, Homo sapiens
  misc_RNA (1)...(19): siRNA sense strand
ggaucgaagccuaguaacu

SEQ ID NO: 2455328 - RNA, 19 nt, Homo sapiens
  misc_RNA (1)...(19): siRNA sense strand
aguuggaauccuugaaaca

SEQ ID NO: 2455329 - RNA, 19 nt, Homo sapiens
  misc_RNA (1)...(19): siRNA sense strand
cuuaaagacaucaguggau

SEQ ID NO: 2455330 - RNA, 19 nt, Homo sapiens
  misc_RNA (1)...(19): siRNA sense strand
aaauacagcgacugagaga

SEQ ID NO: 2455331 - RNA, 19 nt, Homo sapiens
  misc_RNA (1)...(19): siRNA sense strand
agacaacgagagaaggaga

SEQ ID NO: 2455332 - RNA, 19 nt, Homo sapiens
  misc_RNA (1)...(19): siRNA sense strand
gcgggaagucuauguaaaa

SEQ ID NO: 2455333 - RNA, 19 nt, Homo sapiens
  misc_RNA (1)...(19): siRNA sense strand
augaaagccugguggaaug

SEQ ID NO: 2455334 - RNA, 19 nt, Homo sapiens
  misc_RNA (1)...(19): siRNA sense strand
gaugaaaucacaaguggga

SEQ ID NO: 2455335 - RNA, 19 nt, Homo sapiens
  misc_RNA (1)...(19): siRNA sense strand
aacuugaagaagagaagaa

SEQ ID NO: 2455336 - RNA, 19 nt, Homo sapiens
  misc_RNA (1)...(19): siRNA sense strand
gcuucaacucaucaauaaa

SEQ ID NO: 2455337 - RNA, 19 nt, Homo sapiens
  misc_RNA (1)...(19): siRNA sense strand
uuggaaaagaaaacggaaa

SEQ ID NO: 2455338 - RNA, 19 nt, Homo sapiens
  misc_RNA (1)...(19): siRNA sense strand
caaugaaagccugguggaa

SEQ ID NO: 2455339 - RNA, 19 nt, Homo sapiens
  misc_RNA (1)...(19): siRNA sense strand
auuaaaaguaaguggggau

SEQ ID NO: 2455340 - RNA, 19 nt, Homo sapiens
  misc_RNA (1)...(19): siRNA sense strand
cuugaaagcaaaaccaaua

SEQ ID NO: 2455341 - RNA, 19 nt, Homo sapiens
  misc_RNA (1)...(19): siRNA sense strand
cagggaagagaaugauauu

SEQ ID NO: 2455342 - RNA, 19 nt, Homo sapiens
  misc_RNA (1)...(19): siRNA sense strand
cagcaagaagaacaaacaa

SEQ ID NO: 2455343 - RNA, 19 nt, Homo sapiens
  misc_RNA (1)...(19): siRNA sense strand
gacaacgagagaaggagaa

SEQ ID NO: 2455344 - RNA, 19 nt, Homo sapiens
  misc_RNA (1)...(19): siRNA sense strand
acaacgagagaaggagaaa

SEQ ID NO: 2455345 - RNA, 19 nt, Homo sapiens
  misc_RNA (1)...(19): siRNA sense strand
aagagaaagacguauugaa

SEQ ID NO: 2455346 - RNA, 19 nt, Homo sapiens
  misc_RNA (1)...(19): siRNA sense strand
uggaagaugauaggcauaa

SEQ ID NO: 2455347 - RNA, 19 nt, Homo sapiens
  misc_RNA (1)...(19): siRNA sense strand
gggaaaacuugaagaagag

SEQ ID NO: 2455348 - RNA, 19 nt, Homo sapiens
  misc_RNA (1)...(19): siRNA sense strand
agagacaacgagagaagga

SEQ ID NO: 2455349 - RNA, 19 nt, Homo sapiens
  misc_RNA (1)...(19): siRNA sense strand
agcgggaagucuauguaaa

SEQ ID NO: 2455350 - RNA, 19 nt, Homo sapiens
  misc_RNA (1)...(19): siRNA sense strand
gagcagguguugaaagccu

SEQ ID NO: 2455351 - RNA, 19 nt, Homo sapiens
  misc_RNA (1)...(19): siRNA sense strand
ggcauaaaacagagaagau

SEQ ID NO: 2455352 - RNA, 19 nt, Homo sapiens
  misc_RNA (1)...(19): siRNA sense strand
cuugaagaagagaagaaga

SEQ ID NO: 2455353 - RNA, 19 nt, Homo sapiens
  misc_RNA (1)...(19): siRNA sense strand
gcuuaucaacucacagaga

SEQ ID NO: 2455354 - RNA, 19 nt, Homo sapiens
  misc_RNA (1)...(19): siRNA sense strand
uucaagaagagaagcagaa

SEQ ID NO: 2455355 - RNA, 19 nt, Homo sapiens
  misc_RNA (1)...(19): siRNA sense strand
ucuugagguugaacgacaa

SEQ ID NO: 2455356 - RNA, 19 nt, Homo sapiens
  misc_RNA (1)...(19): siRNA sense strand
agaaggacaaagaaauaca

SEQ ID NO: 2455357 - RNA, 19 nt, Homo sapiens
  misc_RNA (1)...(19): siRNA sense strand
gagaaaggagggagcaggu

SEQ ID NO: 2455358 - RNA, 19 nt, Homo sapiens
  misc_RNA (1)...(19): siRNA sense strand
gcugagaaggagaagaaug

SEQ ID NO: 2455359 - RNA, 19 nt, Homo sapiens
  misc_RNA (1)...(19): siRNA sense strand
gaagagauccgaagagcuc

SEQ ID NO: 2455360 - RNA, 19 nt, Homo sapiens
  misc_RNA (1)...(19): siRNA sense strand
cgaaaagcaagaaaucaaa

SEQ ID NO: 2455361 - RNA, 19 nt, Homo sapiens
  misc_RNA (1)...(19): siRNA sense strand
aaugaaagccugguggaau

SEQ ID NO: 2455362 - RNA, 19 nt, Homo sapiens
  misc_RNA (1)...(19): siRNA sense strand
gcaaagggcuacaagggaa

SEQ ID NO: 2455363 - RNA, 19 nt, Homo sapiens
  misc_RNA (1)...(19): siRNA sense strand
uugaagaauuagagcagaa

SEQ ID NO: 2455364 - RNA, 19 nt, Homo sapiens
  misc_RNA (1)...(19): siRNA sense strand
auaucaaggcagaagguaa

SEQ ID NO: 2455365 - RNA, 19 nt, Homo sapiens
  misc_RNA (1)...(19): siRNA sense strand
gaggaaaagcaaagggcua

SEQ ID NO: 2455366 - RNA, 19 nt, Homo sapiens
  misc_RNA (1)...(19): siRNA sense strand
ucaauaaacugaaggcuga

SEQ ID NO: 2455367 - RNA, 19 nt, Homo sapiens
  misc_RNA (1)...(19): siRNA sense strand
aguuugaagaugagaagaa

SEQ ID NO: 2455368 - RNA, 19 nt, Homo sapiens
  misc_RNA (1)...(19): siRNA sense strand
gcgcaaacacaguccacaa

SEQ ID NO: 2455369 - RNA, 19 nt, Homo sapiens
  misc_RNA (1)...(19): siRNA sense strand
ugagagaagaauugaucaa

SEQ ID NO: 2455370 - RNA, 19 nt, Homo sapiens
  misc_RNA (1)...(19): siRNA sense strand
cagagaaagucuaugcuga

SEQ ID NO: 2455371 - RNA, 19 nt, Homo sapiens
  misc_RNA (1)...(19): siRNA sense strand
uggaagaguuuaagcggca

SEQ ID NO: 2455372 - RNA, 19 nt, Homo sapiens
  misc_RNA (1)...(19): siRNA sense strand
agagaaagucuaugcugaa

SEQ ID NO: 2455373 - RNA, 19 nt, Homo sapiens
  misc_RNA (1)...(19): siRNA sense strand
ucacaaguugagagaagaa

SEQ ID NO: 2455374 - RNA, 19 nt, Homo sapiens
  misc_RNA (1)...(19): siRNA sense strand
uggaaaaggccaacagcaa

SEQ ID NO: 2455375 - RNA, 19 nt, Homo sapiens
  misc_RNA (1)...(19): siRNA sense strand
gaaguaaaggcaaggcgua

SEQ ID NO: 2455376 - RNA, 19 nt, Homo sapiens
  misc_RNA (1)...(19): siRNA sense strand
aaguaaaggcaaggcguaa

SEQ ID NO: 2455377 - RNA, 19 nt, Homo sapiens
  misc_RNA (1)...(19): siRNA sense strand
aagcagcugauuagagaua

SEQ ID NO: 2455378 - RNA, 19 nt, Homo sapiens
  misc_RNA (1)...(19): siRNA sense strand
acuaagggaucaagaaaau

SEQ ID NO: 2455379 - RNA, 19 nt, Homo sapiens
  misc_RNA (1)...(19): siRNA sense strand
gcgguaugaacaacagaua

SEQ ID NO: 2455380 - RNA, 19 nt, Homo sapiens
  misc_RNA (1)...(19): siRNA sense strand
acgacaagaauaugaaaca

SEQ ID NO: 2455381 - RNA, 19 nt, Homo sapiens
  misc_RNA (1)...(19): siRNA sense strand
gagaaacaaucaaaggagu

SEQ ID NO: 2455382 - RNA, 19 nt, Homo sapiens
  misc_RNA (1)...(19): siRNA sense strand
agaaacaaucaaaggaguu

SEQ ID NO: 2455383 - RNA, 19 nt, Homo sapiens
  misc_RNA (1)...(19): siRNA sense strand
acacaaagaauuggaguca

SEQ ID NO: 2455384 - RNA, 19 nt, Homo sapiens
  misc_RNA (1)...(19): siRNA sense strand
agaugaaaauagagcugaa

SEQ ID NO: 2455385 - RNA, 19 nt, Homo sapiens
  misc_RNA (1)...(19): siRNA sense strand
gguaugaacaacagauagu

SEQ ID NO: 2455386 - RNA, 19 nt, Homo sapiens
  misc_RNA (1)...(19): siRNA sense strand
aagcagauugagaaggaau

SEQ ID NO: 2455387 - RNA, 19 nt, Homo sapiens
  misc_RNA (1)...(19): siRNA sense strand
ugaaagaagagaacagcca

SEQ ID NO: 2455388 - RNA, 19 nt, Homo sapiens
  misc_RNA (1)...(19): siRNA sense strand
gugaacuugauaaaggaaa

SEQ ID NO: 2455389 - RNA, 19 nt, Homo sapiens
  misc_RNA (1)...(19): siRNA sense strand
cagagaugacacuggaaaa

SEQ ID NO: 2455390 - RNA, 19 nt, Homo sapiens
  misc_RNA (1)...(19): siRNA sense strand
guucaagaaacgagaugca

SEQ ID NO: 2455391 - RNA, 19 nt, Homo sapiens
  misc_RNA (1)...(19): siRNA sense strand
cccuaaaaucacagguuaa

SEQ ID NO: 2455392 - RNA, 19 nt, Homo sapiens
  misc_RNA (1)...(19): siRNA sense strand
aggaagcuuugaaggaaaa

SEQ ID NO: 2455393 - RNA, 19 nt, Homo sapiens
  misc_RNA (1)...(19): siRNA sense strand
ccaauauggagcacgaaaa

SEQ ID NO: 2455394 - RNA, 19 nt, Homo sapiens
  misc_RNA (1)...(19): siRNA sense strand
gccaauauggagcacgaaa

SEQ ID NO: 2455395 - RNA, 19 nt, Homo sapiens
  misc_RNA (1)...(19): siRNA sense strand
agaacugacuacauaucaa

SEQ ID NO: 2455396 - RNA, 19 nt, Homo sapiens
  misc_RNA (1)...(19): siRNA sense strand
cauaacgcagagaaggaua

SEQ ID NO: 2455397 - RNA, 19 nt, Homo sapiens
  misc_RNA (1)...(19): siRNA sense strand
cuuacauacgacaagaaua

SEQ ID NO: 2455398 - RNA, 19 nt, Homo sapiens
  misc_RNA (1)...(19): siRNA sense strand
cuugaaagauguuaccaga

SEQ ID NO: 2455399 - RNA, 19 nt, Homo sapiens
  misc_RNA (1)...(19): siRNA sense strand
ggaaaagaagauacucaaa

SEQ ID NO: 2455400 - RNA, 19 nt, Homo sapiens
  misc_RNA (1)...(19): siRNA sense strand
aagaauuagagcagaaugu

SEQ ID NO: 2455401 - RNA, 19 nt, Homo sapiens
  misc_RNA (1)...(19): siRNA sense strand
acagagaugacacuggaaa

SEQ ID NO: 2455402 - RNA, 19 nt, Homo sapiens
  misc_RNA (1)...(19): siRNA sense strand
accuauuacagcagcauaa

SEQ ID NO: 2455403 - RNA, 19 nt, Homo sapiens
  misc_RNA (1)...(19): siRNA sense strand
cugccaauauggagcacga

SEQ ID NO: 2455404 - RNA, 19 nt, Homo sapiens
  misc_RNA (1)...(19): siRNA sense strand
aggaaaaguuugaucuuca

SEQ ID NO: 2455405 - RNA, 19 nt, Homo sapiens
  misc_RNA (1)...(19): siRNA sense strand
gcaacaacuaagggaucaa

SEQ ID NO: 2455406 - RNA, 19 nt, Homo sapiens
  misc_RNA (1)...(19): siRNA sense strand
cagacagcgguaugaacaa

SEQ ID NO: 2455407 - RNA, 19 nt, Homo sapiens
  misc_RNA (1)...(19): siRNA sense strand
acauggaggcccagguuca

SEQ ID NO: 2455408 - RNA, 19 nt, Homo sapiens
  misc_RNA (1)...(19): siRNA sense strand
agcagauugagaaggaaua

SEQ ID NO: 2455409 - RNA, 19 nt, Homo sapiens
  misc_RNA (1)...(19): siRNA sense strand
agaacuucaaagaaagcaa

SEQ ID NO: 2455410 - RNA, 19 nt, Homo sapiens
  misc_RNA (1)...(19): siRNA sense strand
cuacaagggaacaugagau

SEQ ID NO: 2455411 - RNA, 19 nt, Homo sapiens
  misc_RNA (1)...(19): siRNA sense strand
cuucuaaggcaucuaguau

SEQ ID NO: 2455412 - RNA, 19 nt, Homo sapiens
  misc_RNA (1)...(19): siRNA sense strand
cuccaggauguuagacaaa

SEQ ID NO: 2455413 - RNA, 19 nt, Homo sapiens
  misc_RNA (1)...(19): siRNA sense strand
aauuggagucacaggaaca

SEQ ID NO: 2455414 - RNA, 19 nt, Homo sapiens
  misc_RNA (1)...(19): siRNA sense strand
gcuaagaagaaguggaaaa

SEQ ID NO: 2455415 - RNA, 19 nt, Homo sapiens
  misc_RNA (1)...(19): siRNA sense strand
gauuaaggcacuagagaca

SEQ ID NO: 2455416 - RNA, 19 nt, Homo sapiens
  misc_RNA (1)...(19): siRNA sense strand
ccugaagaaccaagugaaa

SEQ ID NO: 2455417 - RNA, 19 nt, Homo sapiens
  misc_RNA (1)...(19): siRNA sense strand
ccgagaaacugcugcguga

SEQ ID NO: 2455418 - RNA, 19 nt, Homo sapiens
  misc_RNA (1)...(19): siRNA sense strand
ccauaaagacgcugaaaau

SEQ ID NO: 2455419 - RNA, 19 nt, Homo sapiens
  misc_RNA (1)...(19): siRNA sense strand
cagagaaagaguaugacaa

SEQ ID NO: 2455420 - RNA, 19 nt, Homo sapiens
  misc_RNA (1)...(19): siRNA sense strand
ccaggugauucuagggcua

SEQ ID NO: 2455421 - RNA, 19 nt, Homo sapiens
  misc_RNA (1)...(19): siRNA sense strand
cuaccaaucacguuagaaa

SEQ ID NO: 2455422 - RNA, 19 nt, Homo sapiens
  misc_RNA (1)...(19): siRNA sense strand
cugcagacccucagagaca

SEQ ID NO: 2455423 - RNA, 19 nt, Homo sapiens
  misc_RNA (1)...(19): siRNA sense strand
ccaccagggagaaggcuaa

SEQ ID NO: 2455424 - RNA, 19 nt, Homo sapiens
  misc_RNA (1)...(19): siRNA sense strand
agaaauuuguggaggccau

SEQ ID NO: 2455425 - RNA, 19 nt, Homo sapiens
  misc_RNA (1)...(19): siRNA sense strand
ccagagagaagauggccaa

SEQ ID NO: 2455426 - RNA, 19 nt, Homo sapiens
  misc_RNA (1)...(19): siRNA sense strand
uggcagagaaagaguauga

SEQ ID NO: 2455427 - RNA, 19 nt, Homo sapiens
  misc_RNA (1)...(19): siRNA sense strand
aguacagccugaaggaaau

SEQ ID NO: 2455428 - RNA, 19 nt, Homo sapiens
  misc_RNA (1)...(19): siRNA sense strand
agacaguagaaaugggaca

SEQ ID NO: 2455429 - RNA, 19 nt, Homo sapiens
  misc_RNA (1)...(19): siRNA sense strand
ccaagaucagggaggaaau

SEQ ID NO: 2455430 - RNA, 19 nt, Homo sapiens
  misc_RNA (1)...(19): siRNA sense strand
gaagaaggaagaaggcaga

SEQ ID NO: 2455431 - RNA, 19 nt, Homo sapiens
  misc_RNA (1)...(19): siRNA sense strand
ccaccaaggucaugcagga

SEQ ID NO: 2455432 - RNA, 19 nt, Homo sapiens
  misc_RNA (1)...(19): siRNA sense strand
guggaaaacuugaagacau

SEQ ID NO: 2455433 - RNA, 19 nt, Homo sapiens
  misc_RNA (1)...(19): siRNA sense strand
uggaaaacuugaagacauu

SEQ ID NO: 2455434 - RNA, 19 nt, Homo sapiens
  misc_RNA (1)...(19): siRNA sense strand
gguauuacucagagcuaga

SEQ ID NO: 2455435 - RNA, 19 nt, Homo sapiens
  misc_RNA (1)...(19): siRNA sense strand
cugcuaagaagaaguggaa

SEQ ID NO: 2455436 - RNA, 19 nt, Homo sapiens
  misc_RNA (1)...(19): siRNA sense strand
aggcugaggaccuggagaa

SEQ ID NO: 2455437 - RNA, 19 nt, Homo sapiens
  misc_RNA (1)...(19): siRNA sense strand
ccaugaugaaugauguuaa

SEQ ID NO: 2455438 - RNA, 19 nt, Homo sapiens
  misc_RNA (1)...(19): siRNA sense strand
gcacuaccuggcagagaaa

SEQ ID NO: 2455439 - RNA, 19 nt, Homo sapiens
  misc_RNA (1)...(19): siRNA sense strand
agaagaaggaguuggagca

SEQ ID NO: 2455440 - RNA, 19 nt, Homo sapiens
  misc_RNA (1)...(19): siRNA sense strand
agaaggaguuggagcagca

SEQ ID NO: 2455441 - RNA, 19 nt, Homo sapiens
  misc_RNA (1)...(19): siRNA sense strand
gaacaaggaauucaggaca

SEQ ID NO: 2455442 - RNA, 19 nt, Homo sapiens
  misc_RNA (1)...(19): siRNA sense strand
aaagaagcugugauagaaa

SEQ ID NO: 2455443 - RNA, 19 nt, Homo sapiens
  misc_RNA (1)...(19): siRNA sense strand
ugacaaggccaaagaguac

SEQ ID NO: 2455444 - RNA, 19 nt, Homo sapiens
  misc_RNA (1)...(19): siRNA sense strand
ccauugaguaccuggaaca

SEQ ID NO: 2455445 - RNA, 19 nt, Homo sapiens
  misc_RNA (1)...(19): siRNA sense strand
uugaagacucagaaggcua

SEQ ID NO: 2455446 - RNA, 19 nt, Homo sapiens
  misc_RNA (1)...(19): siRNA sense strand
guaccuggaacaaggaauu

SEQ ID NO: 2455447 - RNA, 19 nt, Homo sapiens
  misc_RNA (1)...(19): siRNA sense strand
gggagcagacaguagaaau

SEQ ID NO: 2455448 - RNA, 19 nt, Homo sapiens
  misc_RNA (1)...(19): siRNA sense strand
ucaugaugcagcagaacua

SEQ ID NO: 2455449 - RNA, 19 nt, Homo sapiens
  misc_RNA (1)...(19): siRNA sense strand
gcacuagagacaagggaac

SEQ ID NO: 2455450 - RNA, 19 nt, Homo sapiens
  misc_RNA (1)...(19): siRNA sense strand
uucaauuacugcagaggua

SEQ ID NO: 2455451 - RNA, 19 nt, Homo sapiens
  misc_RNA (1)...(19): siRNA sense strand
cugaacaugcuaaggaaca

SEQ ID NO: 2455452 - RNA, 19 nt, Homo sapiens
  misc_RNA (1)...(19): siRNA sense strand
gggcugaugggaaaggcaa

SEQ ID NO: 2455453 - RNA, 19 nt, Homo sapiens
  misc_RNA (1)...(19): siRNA sense strand
gagacuauccagaggccau

SEQ ID NO: 2455454 - RNA, 19 nt, Homo sapiens
  misc_RNA (1)...(19): siRNA sense strand
agaaggaagaaggcagaaa

SEQ ID NO: 2455455 - RNA, 19 nt, Homo sapiens
  misc_RNA (1)...(19): siRNA sense strand
gagacaagggaacccgaaa

SEQ ID NO: 2455456 - RNA, 19 nt, Homo sapiens
  misc_RNA (1)...(19): siRNA sense strand
augacaaggccaaagagua

SEQ ID NO: 2455457 - RNA, 19 nt, Homo sapiens
  misc_RNA (1)...(19): siRNA sense strand
uagaaaugggacacagaau

SEQ ID NO: 2455458 - RNA, 19 nt, Homo sapiens
  misc_RNA (1)...(19): siRNA sense strand
cccagaagauuaauggaca

SEQ ID NO: 2455459 - RNA, 19 nt, Homo sapiens
  misc_RNA (1)...(19): siRNA sense strand
gcagagaaagaguaugaca

SEQ ID NO: 2455460 - RNA, 19 nt, Homo sapiens
  misc_RNA (1)...(19): siRNA sense strand
acaauaaggugaugcugga

SEQ ID NO: 2455461 - RNA, 19 nt, Homo sapiens
  misc_RNA (1)...(19): siRNA sense strand
ccuaugaguacaugggcuu

SEQ ID NO: 2455462 - RNA, 19 nt, Homo sapiens
  misc_RNA (1)...(19): siRNA sense strand
cugaagauuucuagaggcu

SEQ ID NO: 2455463 - RNA, 19 nt, Homo sapiens
  misc_RNA (1)...(19): siRNA sense strand
ugggaaaggcaauguacuu

SEQ ID NO: 2455464 - RNA, 19 nt, Homo sapiens
  misc_RNA (1)...(19): siRNA sense strand
ucuacuuggcucagggcaa

SEQ ID NO: 2455465 - RNA, 19 nt, Homo sapiens
  misc_RNA (1)...(19): siRNA sense strand
accugaaggacaagaaauu

SEQ ID NO: 2455466 - RNA, 19 nt, Homo sapiens
  misc_RNA (1)...(19): siRNA sense strand
gaaggaaauacgcaagaca

SEQ ID NO: 2455467 - RNA, 19 nt, Homo sapiens
  misc_RNA (1)...(19): siRNA sense strand
aggucuaugaugaggccua

SEQ ID NO: 2455468 - RNA, 19 nt, Homo sapiens
  misc_RNA (1)...(19): siRNA sense strand
ugaaguuaaagaaggucaa

SEQ ID NO: 2455469 - RNA, 19 nt, Homo sapiens
  misc_RNA (1)...(19): siRNA sense strand
ccaacugacaauaagguga

SEQ ID NO: 2455470 - RNA, 19 nt, Homo sapiens
  misc_RNA (1)...(19): siRNA sense strand
gagcuugaguacagccuga

SEQ ID NO: 2455471 - RNA, 19 nt, Homo sapiens
  misc_RNA (1)...(19): siRNA sense strand
aguugaagcgccuggccaa

SEQ ID NO: 2455472 - RNA, 19 nt, Homo sapiens
  misc_RNA (1)...(19): siRNA sense strand
acuacaaacuggccuggaa

SEQ ID NO: 2455473 - RNA, 19 nt, Homo sapiens
  misc_RNA (1)...(19): siRNA sense strand
cugaguaccggcuggaauu

SEQ ID NO: 2455474 - RNA, 19 nt, Homo sapiens
  misc_RNA (1)...(19): siRNA sense strand
gcucugaguacuuugaaaa

SEQ ID NO: 2455475 - RNA, 19 nt, Homo sapiens
  misc_RNA (1)...(19): siRNA sense strand
uggagaaagcgccagacaa

SEQ ID NO: 2455476 - RNA, 19 nt, Homo sapiens
  misc_RNA (1)...(19): siRNA sense strand
gagaagauguuccuggaca

SEQ ID NO: 2455477 - RNA, 19 nt, Homo sapiens
  misc_RNA (1)...(19): siRNA sense strand
agauguuccuggacagcaa

SEQ ID NO: 2455478 - RNA, 19 nt, Homo sapiens
  misc_RNA (1)...(19): siRNA sense strand
gcaucaaagucagcggcua

SEQ ID NO: 2455479 - RNA, 19 nt, Homo sapiens
  misc_RNA (1)...(19): siRNA sense strand
ccaagggaguagaggagac

SEQ ID NO: 2455480 - RNA, 19 nt, Homo sapiens
  misc_RNA (1)...(19): siRNA sense strand
caucaaagucagcggcuac

SEQ ID NO: 2455481 - RNA, 19 nt, Homo sapiens
  misc_RNA (1)...(19): siRNA sense strand
cgccuggacaacaaggaaa

SEQ ID NO: 2455482 - RNA, 19 nt, Homo sapiens
  misc_RNA (1)...(19): siRNA sense strand
ccuuagagauucagcagca

SEQ ID NO: 2455483 - RNA, 19 nt, Homo sapiens
  misc_RNA (1)...(19): siRNA sense strand
uggcagagcagcugaacca

SEQ ID NO: 2455484 - RNA, 19 nt, Homo sapiens
  misc_RNA (1)...(19): siRNA sense strand
ugaugagcuuagagugaga

SEQ ID NO: 2455485 - RNA, 19 nt, Homo sapiens
  misc_RNA (1)...(19): siRNA sense strand
augcgaagacugaaugaau

SEQ ID NO: 2455486 - RNA, 19 nt, Homo sapiens
  misc_RNA (1)...(19): siRNA sense strand
guguaaauguugaugagcu

SEQ ID NO: 2455487 - RNA, 19 nt, Homo sapiens
  misc_RNA (1)...(19): siRNA sense strand
ucaucacaccuuagagauu

SEQ ID NO: 2455488 - RNA, 19 nt, Homo sapiens
  misc_RNA (1)...(19): siRNA sense strand
uagagugagaaaugaggaa

SEQ ID NO: 2455489 - RNA, 19 nt, Homo sapiens
  misc_RNA (1)...(19): siRNA sense strand
acgaaugcgaagacugaau

SEQ ID NO: 2455490 - RNA, 19 nt, Homo sapiens
  misc_RNA (1)...(19): siRNA sense strand
cuaagagagcagcagaaga

SEQ ID NO: 2455491 - RNA, 19 nt, Homo sapiens
  misc_RNA (1)...(19): siRNA sense strand
gaucaaacucuguagcaac

SEQ ID NO: 2455492 - RNA, 19 nt, Homo sapiens
  misc_RNA (1)...(19): siRNA sense strand
acacauggacagcgaugau

SEQ ID NO: 2455493 - RNA, 19 nt, Homo sapiens
  misc_RNA (1)...(19): siRNA sense strand
cgcccuggcacuucagaaa

SEQ ID NO: 2455494 - RNA, 19 nt, Homo sapiens
  misc_RNA (1)...(19): siRNA sense strand
ucacaagaucucaggaaau

SEQ ID NO: 2455495 - RNA, 19 nt, Homo sapiens
  misc_RNA (1)...(19): siRNA sense strand
ggccaaagaccuuaggaga

SEQ ID NO: 2455496 - RNA, 19 nt, Homo sapiens
  misc_RNA (1)...(19): siRNA sense strand
cauaaauauucgacaggga

SEQ ID NO: 2455497 - RNA, 19 nt, Homo sapiens
  misc_RNA (1)...(19): siRNA sense strand
ccagagaaaaucagugaaa

SEQ ID NO: 2455498 - RNA, 19 nt, Homo sapiens
  misc_RNA (1)...(19): siRNA sense strand
aauacauugcccagagaaa

SEQ ID NO: 2455499 - RNA, 19 nt, Homo sapiens
  misc_RNA (1)...(19): siRNA sense strand
gcaaaaugaaagacgagaa

SEQ ID NO: 2455500 - RNA, 19 nt, Homo sapiens
  misc_RNA (1)...(19): siRNA sense strand
guauagacgaucagcugaa

SEQ ID NO: 2455501 - RNA, 19 nt, Homo sapiens
  misc_RNA (1)...(19): siRNA sense strand
uuauauauauggugcccua

SEQ ID NO: 2455502 - RNA, 19 nt, Homo sapiens
  misc_RNA (1)...(19): siRNA sense strand
gagaagaacucgaguccag

SEQ ID NO: 2455503 - RNA, 19 nt, Homo sapiens
  misc_RNA (1)...(19): siRNA sense strand
cucacaagaucucaggaaa

SEQ ID NO: 2455504 - RNA, 19 nt, Homo sapiens
  misc_RNA (1)...(19): siRNA sense strand
ggaucuagaugaaaccaga

SEQ ID NO: 2455505 - RNA, 19 nt, Homo sapiens
  misc_RNA (1)...(19): siRNA sense strand
cgugacuugaguagaauua

SEQ ID NO: 2455506 - RNA, 19 nt, Homo sapiens
  misc_RNA (1)...(19): siRNA sense strand
guagauuuggcccgagaaa

SEQ ID NO: 2455507 - RNA, 19 nt, Homo sapiens
  misc_RNA (1)...(19): siRNA sense strand
cugcagaaugggacucaua

SEQ ID NO: 2455508 - RNA, 19 nt, Homo sapiens
  misc_RNA (1)...(19): siRNA sense strand
aaaggaaagcauagguuca

SEQ ID NO: 2455509 - RNA, 19 nt, Homo sapiens
  misc_RNA (1)...(19): siRNA sense strand
agcagaugcagaagauaaa

SEQ ID NO: 2455510 - RNA, 19 nt, Homo sapiens
  misc_RNA (1)...(19): siRNA sense strand
agauuuggcccgagaaagu

SEQ ID NO: 2455511 - RNA, 19 nt, Homo sapiens
  misc_RNA (1)...(19): siRNA sense strand
gcccaggaacuguggccaa

SEQ ID NO: 2455512 - RNA, 19 nt, Homo sapiens
  misc_RNA (1)...(19): siRNA sense strand
cugugugcccggagaagaa

SEQ ID NO: 2455513 - RNA, 19 nt, Homo sapiens
  misc_RNA (1)...(19): siRNA sense strand
gcauagguucacugcagaa

SEQ ID NO: 2455514 - RNA, 19 nt, Homo sapiens
  misc_RNA (1)...(19): siRNA sense strand
cugcauagucagacccuuu

SEQ ID NO: 2455515 - RNA, 19 nt, Homo sapiens
  misc_RNA (1)...(19): siRNA sense strand
gggaaguuaggaugugauu

SEQ ID NO: 2455516 - RNA, 19 nt, Homo sapiens
  misc_RNA (1)...(19): siRNA sense strand
gugauuugacuacgaacaa

SEQ ID NO: 2455517 - RNA, 19 nt, Homo sapiens
  misc_RNA (1)...(19): siRNA sense strand
gggaagggagcaaaacaaa

SEQ ID NO: 2455518 - RNA, 19 nt, Homo sapiens
  misc_RNA (1)...(19): siRNA sense strand
accaagaagaaaagcaaua

SEQ ID NO: 2455519 - RNA, 19 nt, Homo sapiens
  misc_RNA (1)...(19): siRNA sense strand
ugcagaaaguauagacgau

SEQ ID NO: 2455520 - RNA, 19 nt, Homo sapiens
  misc_RNA (1)...(19): siRNA sense strand
cgacagggaagggagcaaa

SEQ ID NO: 2455521 - RNA, 19 nt, Homo sapiens
  misc_RNA (1)...(19): siRNA sense strand
ggugcauggauuacaaauu

SEQ ID NO: 2455522 - RNA, 19 nt, Homo sapiens
  misc_RNA (1)...(19): siRNA sense strand
accagugggaagagaacaa

SEQ ID NO: 2455523 - RNA, 19 nt, Homo sapiens
  misc_RNA (1)...(19): siRNA sense strand
aauguguaauagaaggcaa

SEQ ID NO: 2455524 - RNA, 19 nt, Homo sapiens
  misc_RNA (1)...(19): siRNA sense strand
agagaaaaucagugaaaac

SEQ ID NO: 2455525 - RNA, 19 nt, Homo sapiens
  misc_RNA (1)...(19): siRNA sense strand
cuaacagaggagaacacua

SEQ ID NO: 2455526 - RNA, 19 nt, Homo sapiens
  misc_RNA (1)...(19): siRNA sense strand
ccuucacagaacacagaaa

SEQ ID NO: 2455527 - RNA, 19 nt, Homo sapiens
  misc_RNA (1)...(19): siRNA sense strand
auaaauauucgacagggaa

SEQ ID NO: 2455528 - RNA, 19 nt, Homo sapiens
  misc_RNA (1)...(19): siRNA sense strand
aaaugaaagacgagaacag

SEQ ID NO: 2455529 - RNA, 19 nt, Homo sapiens
  misc_RNA (1)...(19): siRNA sense strand
gagugagagccuugguguu

SEQ ID NO: 2455530 - RNA, 19 nt, Homo sapiens
  misc_RNA (1)...(19): siRNA sense strand
ugcaauugaaacagccaaa

SEQ ID NO: 2455531 - RNA, 19 nt, Homo sapiens
  misc_RNA (1)...(19): siRNA sense strand
ugaaagacgagaacaggca

SEQ ID NO: 2455532 - RNA, 19 nt, Homo sapiens
  misc_RNA (1)...(19): siRNA sense strand
ccuccggauuucaguguga

SEQ ID NO: 2455533 - RNA, 19 nt, Homo sapiens
  misc_RNA (1)...(19): siRNA sense strand
gggaugagacccagggaca

SEQ ID NO: 2455534 - RNA, 19 nt, Homo sapiens
  misc_RNA (1)...(19): siRNA sense strand
aggaggaggcggaggcauu

SEQ ID NO: 2455535 - RNA, 19 nt, Homo sapiens
  misc_RNA (1)...(19): siRNA sense strand
aggcauugcuagagcucca

SEQ ID NO: 2455536 - RNA, 19 nt, Homo sapiens
  misc_RNA (1)...(19): siRNA sense strand
uggaacagcaggaggagga

SEQ ID NO: 2455537 - RNA, 19 nt, Homo sapiens
  misc_RNA (1)...(19): siRNA sense strand
agaacgaggcccugaagca

SEQ ID NO: 2455538 - RNA, 19 nt, Homo sapiens
  misc_RNA (1)...(19): siRNA sense strand
agcaggagacggagcagaa

SEQ ID NO: 2455539 - RNA, 19 nt, Homo sapiens
  misc_RNA (1)...(19): siRNA sense strand
aggcggaggcauugcuaga

SEQ ID NO: 2455540 - RNA, 19 nt, Homo sapiens
  misc_RNA (1)...(19): siRNA sense strand
ccgggaagaccuacagcau

SEQ ID NO: 2455541 - RNA, 19 nt, Homo sapiens
  misc_RNA (1)...(19): siRNA sense strand
gggaaauauccgugugcug

SEQ ID NO: 2455542 - RNA, 19 nt, Homo sapiens
  misc_RNA (1)...(19): siRNA sense strand
acaaugaggcugucaggga

SEQ ID NO: 2455543 - RNA, 19 nt, Homo sapiens
  misc_RNA (1)...(19): siRNA sense strand
gggaagaccuacagcaugg

SEQ ID NO: 2455544 - RNA, 19 nt, Homo sapiens
  misc_RNA (1)...(19): siRNA sense strand
aagcagugguggagagaau

SEQ ID NO: 2455545 - RNA, 19 nt, Homo sapiens
  misc_RNA (1)...(19): siRNA sense strand
cugcagagaaagagcgauu

SEQ ID NO: 2455546 - RNA, 19 nt, Homo sapiens
  misc_RNA (1)...(19): siRNA sense strand
ggguguaggcacagaauca

SEQ ID NO: 2455547 - RNA, 19 nt, Homo sapiens
  misc_RNA (1)...(19): siRNA sense strand
ccuuagacgucgaggaauc

SEQ ID NO: 2455548 - RNA, 19 nt, Homo sapiens
  misc_RNA (1)...(19): siRNA sense strand
uauuggaggaggagguaaa

SEQ ID NO: 2455549 - RNA, 19 nt, Homo sapiens
  misc_RNA (1)...(19): siRNA sense strand
cuugaaguacacagagaaa

SEQ ID NO: 2455550 - RNA, 19 nt, Homo sapiens
  misc_RNA (1)...(19): siRNA sense strand
acuuauggguguaggcaca

SEQ ID NO: 2455551 - RNA, 19 nt, Homo sapiens
  misc_RNA (1)...(19): siRNA sense strand
gggaagaauuggcaccuga

SEQ ID NO: 2455552 - RNA, 19 nt, Homo sapiens
  misc_RNA (1)...(19): siRNA sense strand
aaacagacauauuugguga

SEQ ID NO: 2455553 - RNA, 19 nt, Homo sapiens
  misc_RNA (1)...(19): siRNA sense strand
acagagaaagcuuggguga

SEQ ID NO: 2455554 - RNA, 19 nt, Homo sapiens
  misc_RNA (1)...(19): siRNA sense strand
aaguauaucagcaggcaau

SEQ ID NO: 2455555 - RNA, 19 nt, Homo sapiens
  misc_RNA (1)...(19): siRNA sense strand
uggagagaauauuugcaaa

SEQ ID NO: 2455556 - RNA, 19 nt, Homo sapiens
  misc_RNA (1)...(19): siRNA sense strand
ugguagaauaagagaaauc

SEQ ID NO: 2455557 - RNA, 19 nt, Homo sapiens
  misc_RNA (1)...(19): siRNA sense strand
agacuauacgggaagaauu

SEQ ID NO: 2455558 - RNA, 19 nt, Homo sapiens
  misc_RNA (1)...(19): siRNA sense strand
gaucaaagcccuuagacgu

SEQ ID NO: 2455559 - RNA, 19 nt, Homo sapiens
  misc_RNA (1)...(19): siRNA sense strand
cugacaguguugagcaaga

SEQ ID NO: 2455560 - RNA, 19 nt, Homo sapiens
  misc_RNA (1)...(19): siRNA sense strand
uguuaauguccuugguuau

SEQ ID NO: 2455561 - RNA, 19 nt, Homo sapiens
  misc_RNA (1)...(19): siRNA sense strand
agaauuggcaccugaucaa

SEQ ID NO: 2455562 - RNA, 19 nt, Homo sapiens
  misc_RNA (1)...(19): siRNA sense strand
cagcaggcaaugaagaauu

SEQ ID NO: 2455563 - RNA, 19 nt, Homo sapiens
  misc_RNA (1)...(19): siRNA sense strand
caaaaguuucugugggaau

SEQ ID NO: 2455564 - RNA, 19 nt, Homo sapiens
  misc_RNA (1)...(19): siRNA sense strand
ccucacuacuguuugggaa

SEQ ID NO: 2455565 - RNA, 19 nt, Homo sapiens
  misc_RNA (1)...(19): siRNA sense strand
cagccuucuucuuggauau

SEQ ID NO: 2455566 - RNA, 19 nt, Homo sapiens
  misc_RNA (1)...(19): siRNA sense strand
gggcuguaccugaugguca

SEQ ID NO: 2455567 - RNA, 19 nt, Homo sapiens
  misc_RNA (1)...(19): siRNA sense strand
guauagaaaugcaagacgu

SEQ ID NO: 2455568 - RNA, 19 nt, Homo sapiens
  misc_RNA (1)...(19): siRNA sense strand
cuguggaacuuaugggugu

SEQ ID NO: 2455569 - RNA, 19 nt, Homo sapiens
  misc_RNA (1)...(19): siRNA sense strand
cuuaugaauuugagcguac

SEQ ID NO: 2455570 - RNA, 19 nt, Homo sapiens
  misc_RNA (1)...(19): siRNA sense strand
ccaugguagaauaagagaa

SEQ ID NO: 2455571 - RNA, 19 nt, Homo sapiens
  misc_RNA (1)...(19): siRNA sense strand
gcuaaucaaaacagacaua

SEQ ID NO: 2455572 - RNA, 19 nt, Homo sapiens
  misc_RNA (1)...(19): siRNA sense strand
aagaaguagugaacacaca

SEQ ID NO: 2455573 - RNA, 19 nt, Homo sapiens
  misc_RNA (1)...(19): siRNA sense strand
uguaaauaucgcucgguau

SEQ ID NO: 2455574 - RNA, 19 nt, Homo sapiens
  misc_RNA (1)...(19): siRNA sense strand
agaaaacugcagagaaaga

SEQ ID NO: 2455575 - RNA, 19 nt, Homo sapiens
  misc_RNA (1)...(19): siRNA sense strand
ccugauggucacacauuua

SEQ ID NO: 2455576 - RNA, 19 nt, Homo sapiens
  misc_RNA (1)...(19): siRNA sense strand
auuuaaaggguucccaaua

SEQ ID NO: 2455577 - RNA, 19 nt, Homo sapiens
  misc_RNA (1)...(19): siRNA sense strand
agacauauuuggugagacg

SEQ ID NO: 2455578 - RNA, 19 nt, Homo sapiens
  misc_RNA (1)...(19): siRNA sense strand
ucuucuuggauauggauua

SEQ ID NO: 2455579 - RNA, 19 nt, Homo sapiens
  misc_RNA (1)...(19): siRNA sense strand
uugacgaugugaugaaaga

SEQ ID NO: 2455580 - RNA, 19 nt, Homo sapiens
  misc_RNA (1)...(19): siRNA sense strand
gcagugguggagagaauau

SEQ ID NO: 2455581 - RNA, 19 nt, Homo sapiens
  misc_RNA (1)...(19): siRNA sense strand
acuucgagcuggacggcuu

SEQ ID NO: 2455582 - RNA, 19 nt, Homo sapiens
  misc_RNA (1)...(19): siRNA sense strand
guguaggcacagaaucaaa

SEQ ID NO: 2455583 - RNA, 19 nt, Homo sapiens
  misc_RNA (1)...(19): siRNA sense strand
uguccaugguagaauaaga

SEQ ID NO: 2455584 - RNA, 19 nt, Homo sapiens
  misc_RNA (1)...(19): siRNA sense strand
cucaagaaguagugaacac

SEQ ID NO: 2455585 - RNA, 19 nt, Homo sapiens
  misc_RNA (1)...(19): siRNA sense strand
gagugaggaagcaauuaaa

SEQ ID NO: 2455586 - RNA, 19 nt, Homo sapiens
  misc_RNA (1)...(19): siRNA sense strand
gcguacaacaaguauauca

SEQ ID NO: 2455587 - RNA, 19 nt, Homo sapiens
  misc_RNA (1)...(19): siRNA sense strand
caaucaaacguuaucucaa

SEQ ID NO: 2455588 - RNA, 19 nt, Homo sapiens
  misc_RNA (1)...(19): siRNA sense strand
gaccaaggcaaaaggagua

SEQ ID NO: 2455589 - RNA, 19 nt, Homo sapiens
  misc_RNA (1)...(19): siRNA sense strand
guaccucaugcauggguua

SEQ ID NO: 2455590 - RNA, 19 nt, Homo sapiens
  misc_RNA (1)...(19): siRNA sense strand
guguauuugauuugaacga

SEQ ID NO: 2455591 - RNA, 19 nt, Homo sapiens
  misc_RNA (1)...(19): siRNA sense strand
ucauauggugcuaaucaaa

SEQ ID NO: 2455592 - RNA, 19 nt, Homo sapiens
  misc_RNA (1)...(19): siRNA sense strand
cuggaauggcgaucgguuu

SEQ ID NO: 2455593 - RNA, 19 nt, Homo sapiens
  misc_RNA (1)...(19): siRNA sense strand
guggagagaauauuugcaa

SEQ ID NO: 2455594 - RNA, 19 nt, Homo sapiens
  misc_RNA (1)...(19): siRNA sense strand
aaacaggagcaguggugca

SEQ ID NO: 2455595 - RNA, 19 nt, Homo sapiens
  misc_RNA (1)...(19): siRNA sense strand
cgaugugaugaaagaacuu

SEQ ID NO: 2455596 - RNA, 19 nt, Homo sapiens
  misc_RNA (1)...(19): siRNA sense strand
gauauggauuagaagccuu

SEQ ID NO: 2455597 - RNA, 19 nt, Homo sapiens
  misc_RNA (1)...(19): siRNA sense strand
agaaauccuugcugagacu

SEQ ID NO: 2455598 - RNA, 19 nt, Homo sapiens
  misc_RNA (1)...(19): siRNA sense strand
agaaagccuccgagcugaa

SEQ ID NO: 2455599 - RNA, 19 nt, Homo sapiens
  misc_RNA (1)...(19): siRNA sense strand
ccaugagugaggaagcaau

SEQ ID NO: 2455600 - RNA, 19 nt, Homo sapiens
  misc_RNA (1)...(19): siRNA sense strand
cgucagaggucacgggcua

SEQ ID NO: 2455601 - RNA, 19 nt, Homo sapiens
  misc_RNA (1)...(19): siRNA sense strand
gggacaagauggaggagga

SEQ ID NO: 2455602 - RNA, 19 nt, Homo sapiens
  misc_RNA (1)...(19): siRNA sense strand
cggagaagguggugaccga

SEQ ID NO: 2455603 - RNA, 19 nt, Homo sapiens
  misc_RNA (1)...(19): siRNA sense strand
gacagaagcugcagcgcaa

SEQ ID NO: 2455604 - RNA, 19 nt, Homo sapiens
  misc_RNA (1)...(19): siRNA sense strand
uggacaagaaggaggguga

SEQ ID NO: 2455605 - RNA, 19 nt, Homo sapiens
  misc_RNA (1)...(19): siRNA sense strand
ggacguugcuucugggcga

SEQ ID NO: 2455606 - RNA, 19 nt, Homo sapiens
  misc_RNA (1)...(19): siRNA sense strand
gcuuagaggcgcugccaga

SEQ ID NO: 2455607 - RNA, 19 nt, Homo sapiens
  misc_RNA (1)...(19): siRNA sense strand
uguuugagaaggugaagaa

SEQ ID NO: 2455608 - RNA, 19 nt, Homo sapiens
  misc_RNA (1)...(19): siRNA sense strand
gggcccugcaggagguuaa

SEQ ID NO: 2455609 - RNA, 19 nt, Homo sapiens
  misc_RNA (1)...(19): siRNA sense strand
uggucuauguggagaagau

SEQ ID NO: 2455610 - RNA, 19 nt, Homo sapiens
  misc_RNA (1)...(19): siRNA sense strand
ggagaaagugcuggcggaa

SEQ ID NO: 2455611 - RNA, 19 nt, Homo sapiens
  misc_RNA (1)...(19): siRNA sense strand
acaacaagcuggagacccu

SEQ ID NO: 2455612 - RNA, 19 nt, Homo sapiens
  misc_RNA (1)...(19): siRNA sense strand
aggagaaagugcuggcgga

SEQ ID NO: 2455613 - RNA, 19 nt, Homo sapiens
  misc_RNA (1)...(19): siRNA sense strand
gcgacaaccagcugagcca

SEQ ID NO: 2455614 - RNA, 19 nt, Homo sapiens
  misc_RNA (1)...(19): siRNA sense strand
gggacauuccugacgucaa

SEQ ID NO: 2455615 - RNA, 19 nt, Homo sapiens
  misc_RNA (1)...(19): siRNA sense strand
gcaggagguuaaaggccuu

SEQ ID NO: 2455616 - RNA, 19 nt, Homo sapiens
  misc_RNA (1)...(19): siRNA sense strand
cuggaggccaucugcgaua

SEQ ID NO: 2455617 - RNA, 19 nt, Homo sapiens
  misc_RNA (1)...(19): siRNA sense strand
acaagauggaggaggaaug

SEQ ID NO: 2455618 - RNA, 19 nt, Homo sapiens
  misc_RNA (1)...(19): siRNA sense strand
cgacagaagcugcagcgca

SEQ ID NO: 2455619 - RNA, 19 nt, Homo sapiens
  misc_RNA (1)...(19): siRNA sense strand
cggugcugaaaguguguaa

SEQ ID NO: 2455620 - RNA, 19 nt, Homo sapiens
  misc_RNA (1)...(19): siRNA sense strand
agggugagaaggagaaagu

SEQ ID NO: 2455621 - RNA, 19 nt, Homo sapiens
  misc_RNA (1)...(19): siRNA sense strand
agguuaaaguagagcagaa

SEQ ID NO: 2455622 - RNA, 19 nt, Homo sapiens
  misc_RNA (1)...(19): siRNA sense strand
gaagaagaguggaugggau

SEQ ID NO: 2455623 - RNA, 19 nt, Homo sapiens
  misc_RNA (1)...(19): siRNA sense strand
aaagagaagaagaguggau

SEQ ID NO: 2455624 - RNA, 19 nt, Homo sapiens
  misc_RNA (1)...(19): siRNA sense strand
guaugaaaauguauggaga

SEQ ID NO: 2455625 - RNA, 19 nt, Homo sapiens
  misc_RNA (1)...(19): siRNA sense strand
cagcuuauaaagaaagaca

SEQ ID NO: 2455626 - RNA, 19 nt, Homo sapiens
  misc_RNA (1)...(19): siRNA sense strand
gcuuauaaagaaagacacu

SEQ ID NO: 2455627 - RNA, 19 nt, Homo sapiens
  misc_RNA (1)...(19): siRNA sense strand
augauggauuggugcggaa

SEQ ID NO: 2455628 - RNA, 19 nt, Homo sapiens
  misc_RNA (1)...(19): siRNA sense strand
cugcaaacuucaggagcuu

SEQ ID NO: 2455629 - RNA, 19 nt, Homo sapiens
  misc_RNA (1)...(19): siRNA sense strand
ucaaagaggauguuccaga

SEQ ID NO: 2455630 - RNA, 19 nt, Homo sapiens
  misc_RNA (1)...(19): siRNA sense strand
caugaauagaguccagcaa

SEQ ID NO: 2455631 - RNA, 19 nt, Homo sapiens
  misc_RNA (1)...(19): siRNA sense strand
cugaaaauggagagcauca

SEQ ID NO: 2455632 - RNA, 19 nt, Homo sapiens
  misc_RNA (1)...(19): siRNA sense strand
gcugcaaacuucaggagcu

SEQ ID NO: 2455633 - RNA, 19 nt, Homo sapiens
  misc_RNA (1)...(19): siRNA sense strand
uuguuaagagagaggacau

SEQ ID NO: 2455634 - RNA, 19 nt, Homo sapiens
  misc_RNA (1)...(19): siRNA sense strand
augaaagccucaacgcaga

SEQ ID NO: 2455635 - RNA, 19 nt, Homo sapiens
  misc_RNA (1)...(19): siRNA sense strand
agguuaaaguagagcagaa

SEQ ID NO: 2455636 - RNA, 19 nt, Homo sapiens
  misc_RNA (1)...(19): siRNA sense strand
cugacaaagcaaagguaaa

SEQ ID NO: 2455637 - RNA, 19 nt, Homo sapiens
  misc_RNA (1)...(19): siRNA sense strand
gaagaagaguggaugggau

SEQ ID NO: 2455638 - RNA, 19 nt, Homo sapiens
  misc_RNA (1)...(19): siRNA sense strand
aguaaagagacaagcacua

SEQ ID NO: 2455639 - RNA, 19 nt, Homo sapiens
  misc_RNA (1)...(19): siRNA sense strand
aggacgaggagcuggagaa

SEQ ID NO: 2455640 - RNA, 19 nt, Homo sapiens
  misc_RNA (1)...(19): siRNA sense strand
aaagagaagaagaguggau

SEQ ID NO: 2455641 - RNA, 19 nt, Homo sapiens
  misc_RNA (1)...(19): siRNA sense strand
gggagaagaaccagcagga

SEQ ID NO: 2455642 - RNA, 19 nt, Homo sapiens
  misc_RNA (1)...(19): siRNA sense strand
guaugaaaauguauggaga

SEQ ID NO: 2455643 - RNA, 19 nt, Homo sapiens
  misc_RNA (1)...(19): siRNA sense strand
ccugacaaagcaaagguaa

SEQ ID NO: 2455644 - RNA, 19 nt, Homo sapiens
  misc_RNA (1)...(19): siRNA sense strand
cagcuuauaaagaaagaca

SEQ ID NO: 2455645 - RNA, 19 nt, Homo sapiens
  misc_RNA (1)...(19): siRNA sense strand
gcuuauaaagaaagacacu

SEQ ID NO: 2455646 - RNA, 19 nt, Homo sapiens
  misc_RNA (1)...(19): siRNA sense strand
agguaaauucuggcaauaa

SEQ ID NO: 2455647 - RNA, 19 nt, Homo sapiens
  misc_RNA (1)...(19): siRNA sense strand
augauggauuggugcggaa

SEQ ID NO: 2455648 - RNA, 19 nt, Homo sapiens
  misc_RNA (1)...(19): siRNA sense strand
cugcaaacuucaggagcuu

SEQ ID NO: 2455649 - RNA, 19 nt, Homo sapiens
  misc_RNA (1)...(19): siRNA sense strand
ucaaagaggauguuccaga

SEQ ID NO: 2455650 - RNA, 19 nt, Homo sapiens
  misc_RNA (1)...(19): siRNA sense strand
ggacgaggagcuggagaau

SEQ ID NO: 2455651 - RNA, 19 nt, Homo sapiens
  misc_RNA (1)...(19): siRNA sense strand
caugaauagaguccagcaa

SEQ ID NO: 2455652 - RNA, 19 nt, Homo sapiens
  misc_RNA (1)...(19): siRNA sense strand
cugaaaauggagagcauca

SEQ ID NO: 2455653 - RNA, 19 nt, Homo sapiens
  misc_RNA (1)...(19): siRNA sense strand
gcugcaaacuucaggagcu

SEQ ID NO: 2455654 - RNA, 19 nt, Homo sapiens
  misc_RNA (1)...(19): siRNA sense strand
uuguuaagagagaggacau

SEQ ID NO: 2455655 - RNA, 19 nt, Homo sapiens
  misc_RNA (1)...(19): siRNA sense strand
augaaagccucaacgcaga

SEQ ID NO: 2455656 - RNA, 19 nt, Homo sapiens
  misc_RNA (1)...(19): siRNA sense strand
aggaaaaguucguucgcaa

SEQ ID NO: 2455657 - RNA, 19 nt, Homo sapiens
  misc_RNA (1)...(19): siRNA sense strand
gaggagaaguuuaaggaga

SEQ ID NO: 2455658 - RNA, 19 nt, Homo sapiens
  misc_RNA (1)...(19): siRNA sense strand
ccaaagaaggcgacgcaca

SEQ ID NO: 2455659 - RNA, 19 nt, Homo sapiens
  misc_RNA (1)...(19): siRNA sense strand
ucaagaaagccuaccggaa

SEQ ID NO: 2455660 - RNA, 19 nt, Homo sapiens
  misc_RNA (1)...(19): siRNA sense strand
gcucaacccugaugggcga

SEQ ID NO: 2455661 - RNA, 19 nt, Homo sapiens
  misc_RNA (1)...(19): siRNA sense strand
aggagauugcagaggccua

SEQ ID NO: 2455662 - RNA, 19 nt, Homo sapiens
  misc_RNA (1)...(19): siRNA sense strand
gggccaacgaggaugagau

SEQ ID NO: 2455663 - RNA, 19 nt, Homo sapiens
  misc_RNA (1)...(19): siRNA sense strand
auaaagaacccaacgcuga

SEQ ID NO: 2455664 - RNA, 19 nt, Homo sapiens
  misc_RNA (1)...(19): siRNA sense strand
aacccaacgcugaggagaa

SEQ ID NO: 2455665 - RNA, 19 nt, Homo sapiens
  misc_RNA (1)...(19): siRNA sense strand
cgaggaugagaucaagaaa

SEQ ID NO: 2455666 - RNA, 19 nt, Homo sapiens
  misc_RNA (1)...(19): siRNA sense strand
gcuaagugaccccaagaaa

SEQ ID NO: 2455667 - RNA, 19 nt, Homo sapiens
  misc_RNA (1)...(19): siRNA sense strand
gcacauagucaucaagcgu

SEQ ID NO: 2455668 - RNA, 19 nt, Homo sapiens
  misc_RNA (1)...(19): siRNA sense strand
gcuuugacccagaugacau

SEQ ID NO: 2455669 - RNA, 19 nt, Homo sapiens
  misc_RNA (1)...(19): siRNA sense strand
acaagaauaaagaacccaa

SEQ ID NO: 2455670 - RNA, 19 nt, Homo sapiens
  misc_RNA (1)...(19): siRNA sense strand
cuagaaauguggaaggaga

SEQ ID NO: 2455671 - RNA, 19 nt, Homo sapiens
  misc_RNA (1)...(19): siRNA sense strand
ccgacagaucagagagauu

SEQ ID NO: 2455672 - RNA, 19 nt, Homo sapiens
  misc_RNA (1)...(19): siRNA sense strand
cugauagaagaaagggaua

SEQ ID NO: 2455673 - RNA, 19 nt, Homo sapiens
  misc_RNA (1)...(19): siRNA sense strand
gcuuaaugaugcugaaaau

SEQ ID NO: 2455674 - RNA, 19 nt, Homo sapiens
  misc_RNA (1)...(19): siRNA sense strand
agggauacuuugaugagaa

SEQ ID NO: 2455675 - RNA, 19 nt, Homo sapiens
  misc_RNA (1)...(19): siRNA sense strand
aagauuuacuucugggaau

SEQ ID NO: 2455676 - RNA, 19 nt, Homo sapiens
  misc_RNA (1)...(19): siRNA sense strand
agagauugcaaguggaaaa

SEQ ID NO: 2455677 - RNA, 19 nt, Homo sapiens
  misc_RNA (1)...(19): siRNA sense strand
guguauuggaagaagguuu

SEQ ID NO: 2455678 - RNA, 19 nt, Homo sapiens
  misc_RNA (1)...(19): siRNA sense strand
aagaaaagggaccgagaaa

SEQ ID NO: 2455679 - RNA, 19 nt, Homo sapiens
  misc_RNA (1)...(19): siRNA sense strand
guuaaggcaacaagagcaa

SEQ ID NO: 2455680 - RNA, 19 nt, Homo sapiens
  misc_RNA (1)...(19): siRNA sense strand
gggccaaagaggacuguau

SEQ ID NO: 2455681 - RNA, 19 nt, Homo sapiens
  misc_RNA (1)...(19): siRNA sense strand
cuugaaagaaaguuggaau

SEQ ID NO: 2455682 - RNA, 19 nt, Homo sapiens
  misc_RNA (1)...(19): siRNA sense strand
aguagaacuagaaagguua

SEQ ID NO: 2455683 - RNA, 19 nt, Homo sapiens
  misc_RNA (1)...(19): siRNA sense strand
cagacagagccucgugaaa

SEQ ID NO: 2455684 - RNA, 19 nt, Homo sapiens
  misc_RNA (1)...(19): siRNA sense strand
aaucagaacgucagcggaa

SEQ ID NO: 2455685 - RNA, 19 nt, Homo sapiens
  misc_RNA (1)...(19): siRNA sense strand
aacuauggcacaaggauaa

SEQ ID NO: 2455686 - RNA, 19 nt, Homo sapiens
  misc_RNA (1)...(19): siRNA sense strand
ucaaacagcucgaagagga

SEQ ID NO: 2455687 - RNA, 19 nt, Homo sapiens
  misc_RNA (1)...(19): siRNA sense strand
ccgagaaagagaaucacua

SEQ ID NO: 2455688 - RNA, 19 nt, Homo sapiens
  misc_RNA (1)...(19): siRNA sense strand
ccgucuacagucugaaaua

SEQ ID NO: 2455689 - RNA, 19 nt, Homo sapiens
  misc_RNA (1)...(19): siRNA sense strand
aggagaugcaagaagauau

SEQ ID NO: 2455690 - RNA, 19 nt, Homo sapiens
  misc_RNA (1)...(19): siRNA sense strand
ggaucgaauaauaagugaa

SEQ ID NO: 2455691 - RNA, 19 nt, Homo sapiens
  misc_RNA (1)...(19): siRNA sense strand
aguucaaggaccagcaaaa

SEQ ID NO: 2455692 - RNA, 19 nt, Homo sapiens
  misc_RNA (1)...(19): siRNA sense strand
ccaggauuccacagagauu

SEQ ID NO: 2455693 - RNA, 19 nt, Homo sapiens
  misc_RNA (1)...(19): siRNA sense strand
agaacuugccagacuuaaa

SEQ ID NO: 2455694 - RNA, 19 nt, Homo sapiens
  misc_RNA (1)...(19): siRNA sense strand
ggaucaaauaacaggauag

SEQ ID NO: 2455695 - RNA, 19 nt, Homo sapiens
  misc_RNA (1)...(19): siRNA sense strand
gucuacagucugaaauaaa

SEQ ID NO: 2455696 - RNA, 19 nt, Homo sapiens
  misc_RNA (1)...(19): siRNA sense strand
ccugauagaagaaagggau

SEQ ID NO: 2455697 - RNA, 19 nt, Homo sapiens
  misc_RNA (1)...(19): siRNA sense strand
agagggagcaagaaaguca

SEQ ID NO: 2455698 - RNA, 19 nt, Homo sapiens
  misc_RNA (1)...(19): siRNA sense strand
gcaagaaagucaaauggcu

SEQ ID NO: 2455699 - RNA, 19 nt, Homo sapiens
  misc_RNA (1)...(19): siRNA sense strand
gguuaaggcaacaagagca

SEQ ID NO: 2455700 - RNA, 19 nt, Homo sapiens
  misc_RNA (1)...(19): siRNA sense strand
ucagagcuucaaagagaaa

SEQ ID NO: 2455701 - RNA, 19 nt, Homo sapiens
  misc_RNA (1)...(19): siRNA sense strand
cagcugaagcagaaagaac

SEQ ID NO: 2455702 - RNA, 19 nt, Homo sapiens
  misc_RNA (1)...(19): siRNA sense strand
agauuuacuucugggaauu

SEQ ID NO: 2455703 - RNA, 19 nt, Homo sapiens
  misc_RNA (1)...(19): siRNA sense strand
uagaaauguggaaggagau

SEQ ID NO: 2455704 - RNA, 19 nt, Homo sapiens
  misc_RNA (1)...(19): siRNA sense strand
uuaaacagagggagcaaga

SEQ ID NO: 2455705 - RNA, 19 nt, Homo sapiens
  misc_RNA (1)...(19): siRNA sense strand
caaaacaacaaaccagaaa

SEQ ID NO: 2455706 - RNA, 19 nt, Homo sapiens
  misc_RNA (1)...(19): siRNA sense strand
acuuaaacagagggagcaa

SEQ ID NO: 2455707 - RNA, 19 nt, Homo sapiens
  misc_RNA (1)...(19): siRNA sense strand
uaagugaacucgaccgaca

SEQ ID NO: 2455708 - RNA, 19 nt, Homo sapiens
  misc_RNA (1)...(19): siRNA sense strand
acacagugacucuagaaga

SEQ ID NO: 2455709 - RNA, 19 nt, Homo sapiens
  misc_RNA (1)...(19): siRNA sense strand
gcaccuuguccuucagaga

SEQ ID NO: 2455710 - RNA, 19 nt, Homo sapiens
  misc_RNA (1)...(19): siRNA sense strand
ccucgugaaacguuagaau

SEQ ID NO: 2455711 - RNA, 19 nt, Homo sapiens
  misc_RNA (1)...(19): siRNA sense strand
cugcaggacucuauccgua

SEQ ID NO: 2455712 - RNA, 19 nt, Homo sapiens
  misc_RNA (1)...(19): siRNA sense strand
cuguauucaccaaguagaa

SEQ ID NO: 2455713 - RNA, 19 nt, Homo sapiens
  misc_RNA (1)...(19): siRNA sense strand
cuucuuaaggauuccauua

SEQ ID NO: 2455714 - RNA, 19 nt, Homo sapiens
  misc_RNA (1)...(19): siRNA sense strand
ggaagaaaagggaccgaga

SEQ ID NO: 2455715 - RNA, 19 nt, Homo sapiens
  misc_RNA (1)...(19): siRNA sense strand
caaacagcucgaagaggau

SEQ ID NO: 2455716 - RNA, 19 nt, Homo sapiens
  misc_RNA (1)...(19): siRNA sense strand
uggagaagcgagagcagca

SEQ ID NO: 2455717 - RNA, 19 nt, Homo sapiens
  misc_RNA (1)...(19): siRNA sense strand
gguugaacuugaaagaaag

SEQ ID NO: 2455718 - RNA, 19 nt, Homo sapiens
  misc_RNA (1)...(19): siRNA sense strand
ucgaauaauaagugaacuc

SEQ ID NO: 2455719 - RNA, 19 nt, Homo sapiens
  misc_RNA (1)...(19): siRNA sense strand
guguggaaucagagcuuca

SEQ ID NO: 2455720 - RNA, 19 nt, Homo sapiens
  misc_RNA (1)...(19): siRNA sense strand
acagagauugcaaguggaa

SEQ ID NO: 2455721 - RNA, 19 nt, Homo sapiens
  misc_RNA (1)...(19): siRNA sense strand
gaaaccagacagagggaga

SEQ ID NO: 2455722 - RNA, 19 nt, Homo sapiens
  misc_RNA (1)...(19): siRNA sense strand
agacagagggagaaaagaa

SEQ ID NO: 2455723 - RNA, 19 nt, Homo sapiens
  misc_RNA (1)...(19): siRNA sense strand
cuggaaaacagaaaugaaa

SEQ ID NO: 2455724 - RNA, 19 nt, Homo sapiens
  misc_RNA (1)...(19): siRNA sense strand
ccauauaagccaagcacuc

SEQ ID NO: 2455725 - RNA, 19 nt, Homo sapiens
  misc_RNA (1)...(19): siRNA sense strand
uggaaaaugcagucuuuaa

SEQ ID NO: 2455726 - RNA, 19 nt, Homo sapiens
  misc_RNA (1)...(19): siRNA sense strand
uggauaugucucaaggaaa

SEQ ID NO: 2455727 - RNA, 19 nt, Homo sapiens
  misc_RNA (1)...(19): siRNA sense strand
aaauauagcccuugggaug

SEQ ID NO: 2455728 - RNA, 19 nt, Homo sapiens
  misc_RNA (1)...(19): siRNA sense strand
ugggaaaaucuguggacua

SEQ ID NO: 2455729 - RNA, 19 nt, Homo sapiens
  misc_RNA (1)...(19): siRNA sense strand
uggacuacuuucugagcau

SEQ ID NO: 2455730 - RNA, 19 nt, Homo sapiens
  misc_RNA (1)...(19): siRNA sense strand
aagcagggccaguagcaau

SEQ ID NO: 2455731 - RNA, 19 nt, Homo sapiens
  misc_RNA (1)...(19): siRNA sense strand
cucuaguuauccuaagaaa

SEQ ID NO: 2455732 - RNA, 19 nt, Homo sapiens
  misc_RNA (1)...(19): siRNA sense strand
ucaucaaacaucagagaau

SEQ ID NO: 2455733 - RNA, 19 nt, Homo sapiens
  misc_RNA (1)...(19): siRNA sense strand
gugcagugaauguggaaaa

SEQ ID NO: 2455734 - RNA, 19 nt, Homo sapiens
  misc_RNA (1)...(19): siRNA sense strand
cuaccugaagcaagagaaa

SEQ ID NO: 2455735 - RNA, 19 nt, Homo sapiens
  misc_RNA (1)...(19): siRNA sense strand
aauccacacaggagagaaa

SEQ ID NO: 2455736 - RNA, 19 nt, Homo sapiens
  misc_RNA (1)...(19): siRNA sense strand
gggaaggccuuuagcagga

SEQ ID NO: 2455737 - RNA, 19 nt, Homo sapiens
  misc_RNA (1)...(19): siRNA sense strand
cgcuaugagugcagugaau

SEQ ID NO: 2455738 - RNA, 19 nt, Homo sapiens
  misc_RNA (1)...(19): siRNA sense strand
cccuaugagugcagugaau

SEQ ID NO: 2455739 - RNA, 19 nt, Homo sapiens
  misc_RNA (1)...(19): siRNA sense strand
uggaaagacauuugcccaa

SEQ ID NO: 2455740 - RNA, 19 nt, Homo sapiens
  misc_RNA (1)...(19): siRNA sense strand
aacucauacaggagagaaa

SEQ ID NO: 2455741 - RNA, 19 nt, Homo sapiens
  misc_RNA (1)...(19): siRNA sense strand
cccuaugaguguaacgaau

SEQ ID NO: 2455742 - RNA, 19 nt, Homo sapiens
  misc_RNA (1)...(19): siRNA sense strand
guguaacgaaugugcaaaa

SEQ ID NO: 2455743 - RNA, 19 nt, Homo sapiens
  misc_RNA (1)...(19): siRNA sense strand
acuuucagccagaggucaa

SEQ ID NO: 2455744 - RNA, 19 nt, Homo sapiens
  misc_RNA (1)...(19): siRNA sense strand
uuagauuacacuugcgaau

SEQ ID NO: 2455745 - RNA, 19 nt, Homo sapiens
  misc_RNA (1)...(19): siRNA sense strand
ggaaaauccuuuauccaga

SEQ ID NO: 2455746 - RNA, 19 nt, Homo sapiens
  misc_RNA (1)...(19): siRNA sense strand
ccagagaauucauacagga

SEQ ID NO: 2455747 - RNA, 19 nt, Homo sapiens
  misc_RNA (1)...(19): siRNA sense strand
agaauacauacuggagaaa

SEQ ID NO: 2455748 - RNA, 19 nt, Homo sapiens
  misc_RNA (1)...(19): siRNA sense strand
ucaccacacaccagagaau

SEQ ID NO: 2455749 - RNA, 19 nt, Homo sapiens
  misc_RNA (1)...(19): siRNA sense strand
gugcagugaauguggaaag

SEQ ID NO: 2455750 - RNA, 19 nt, Homo sapiens
  misc_RNA (1)...(19): siRNA sense strand
ggagaaacgcuaugagugc

SEQ ID NO: 2455751 - RNA, 19 nt, Homo sapiens
  misc_RNA (1)...(19): siRNA sense strand
acagaaacccagacgagca

SEQ ID NO: 2455752 - RNA, 19 nt, Homo sapiens
  misc_RNA (1)...(19): siRNA sense strand
aggcgaucucuuuggaaaa

SEQ ID NO: 2455753 - RNA, 19 nt, Homo sapiens
  misc_RNA (1)...(19): siRNA sense strand
ggcaaaacuuucagccaga

SEQ ID NO: 2455754 - RNA, 19 nt, Homo sapiens
  misc_RNA (1)...(19): siRNA sense strand
cugcaaagccagagaaagu

SEQ ID NO: 2455755 - RNA, 19 nt, Homo sapiens
  misc_RNA (1)...(19): siRNA sense strand
cggugaauuuccagggcaa

SEQ ID NO: 2455756 - RNA, 19 nt, Homo sapiens
  misc_RNA (1)...(19): siRNA sense strand
cuggaauugucgugugaaa

SEQ ID NO: 2455757 - RNA, 19 nt, Homo sapiens
  misc_RNA (1)...(19): siRNA sense strand
caaaauaauaggaaggaga

SEQ ID NO: 2455758 - RNA, 19 nt, Homo sapiens
  misc_RNA (1)...(19): siRNA sense strand
ucucaaagcugcaaagcca

SEQ ID NO: 2455759 - RNA, 19 nt, Homo sapiens
  misc_RNA (1)...(19): siRNA sense strand
auaagguggcugaggcaaa

SEQ ID NO: 2455760 - RNA, 19 nt, Homo sapiens
  misc_RNA (1)...(19): siRNA sense strand
uggacaacacagagaaaga

SEQ ID NO: 2455761 - RNA, 19 nt, Homo sapiens
  misc_RNA (1)...(19): siRNA sense strand
aggagaaagcaaagccaau

SEQ ID NO: 2455762 - RNA, 19 nt, Homo sapiens
  misc_RNA (1)...(19): siRNA sense strand
cuggauuauaucuggguua

SEQ ID NO: 2455763 - RNA, 19 nt, Homo sapiens
  misc_RNA (1)...(19): siRNA sense strand
cugcccagguggagaauga

SEQ ID NO: 2455764 - RNA, 19 nt, Homo sapiens
  misc_RNA (1)...(19): siRNA sense strand
gaagauauaagguggcuga

SEQ ID NO: 2455765 - RNA, 19 nt, Homo sapiens
  misc_RNA (1)...(19): siRNA sense strand
gcuccagauggcagugaaa

SEQ ID NO: 2455766 - RNA, 19 nt, Homo sapiens
  misc_RNA (1)...(19): siRNA sense strand
ccuucuaacuggaaagacu

SEQ ID NO: 2455767 - RNA, 19 nt, Homo sapiens
  misc_RNA (1)...(19): siRNA sense strand
ggcucugaaucuauggaaa

SEQ ID NO: 2455768 - RNA, 19 nt, Homo sapiens
  misc_RNA (1)...(19): siRNA sense strand
gaaaacaggcuuugagcau

SEQ ID NO: 2455769 - RNA, 19 nt, Homo sapiens
  misc_RNA (1)...(19): siRNA sense strand
gggagguggagaugcuuua

SEQ ID NO: 2455770 - RNA, 19 nt, Homo sapiens
  misc_RNA (1)...(19): siRNA sense strand
agguggagaaugaaggauu

SEQ ID NO: 2455771 - RNA, 19 nt, Homo sapiens
  misc_RNA (1)...(19): siRNA sense strand
gugaaaaugacgcaacaaa

SEQ ID NO: 2455772 - RNA, 19 nt, Homo sapiens
  misc_RNA (1)...(19): siRNA sense strand
guauaaaguggaauggagu

SEQ ID NO: 2455773 - RNA, 19 nt, Homo sapiens
  misc_RNA (1)...(19): siRNA sense strand
gcuuacaauaugaaaggau

SEQ ID NO: 2455774 - RNA, 19 nt, Homo sapiens
  misc_RNA (1)...(19): siRNA sense strand
ccaucagggagguggagau

SEQ ID NO: 2455775 - RNA, 19 nt, Homo sapiens
  misc_RNA (1)...(19): siRNA sense strand
ggaucaaaucaaaguucuu

SEQ ID NO: 2455776 - RNA, 19 nt, Homo sapiens
  misc_RNA (1)...(19): siRNA sense strand
gacacaagggacagaguga

SEQ ID NO: 2455777 - RNA, 19 nt, Homo sapiens
  misc_RNA (1)...(19): siRNA sense strand
cuauggaaaguguggauca

SEQ ID NO: 2455778 - RNA, 19 nt, Homo sapiens
  misc_RNA (1)...(19): siRNA sense strand
cagucgaacagcaggacau

SEQ ID NO: 2455779 - RNA, 19 nt, Homo sapiens
  misc_RNA (1)...(19): siRNA sense strand
gcuguaguaaccagguaua

SEQ ID NO: 2455780 - RNA, 19 nt, Homo sapiens
  misc_RNA (1)...(19): siRNA sense strand
ggaguauguccgaagacuu

SEQ ID NO: 2455781 - RNA, 19 nt, Homo sapiens
  misc_RNA (1)...(19): siRNA sense strand
gguauaaaguggaauggag

SEQ ID NO: 2455782 - RNA, 19 nt, Homo sapiens
  misc_RNA (1)...(19): siRNA sense strand
uauaaaguggaauggagua

SEQ ID NO: 2455783 - RNA, 19 nt, Homo sapiens
  misc_RNA (1)...(19): siRNA sense strand
ucucaagaagccugaaaca

SEQ ID NO: 2455784 - RNA, 19 nt, Homo sapiens
  misc_RNA (1)...(19): siRNA sense strand
acagaauuuacuugggaca

SEQ ID NO: 2455785 - RNA, 19 nt, Homo sapiens
  misc_RNA (1)...(19): siRNA sense strand
ggaauugucgugugaaaau

SEQ ID NO: 2455786 - RNA, 19 nt, Homo sapiens
  misc_RNA (1)...(19): siRNA sense strand
ggacacacaacuugggaag

SEQ ID NO: 2455787 - RNA, 19 nt, Homo sapiens
  misc_RNA (1)...(19): siRNA sense strand
ucuagagaggaaugggaau

SEQ ID NO: 2455788 - RNA, 19 nt, Homo sapiens
  misc_RNA (1)...(19): siRNA sense strand
caggagagggugagugaac

SEQ ID NO: 2455789 - RNA, 19 nt, Homo sapiens
  misc_RNA (1)...(19): siRNA sense strand
uuguaugugggaagauaua

SEQ ID NO: 2455790 - RNA, 19 nt, Homo sapiens
  misc_RNA (1)...(19): siRNA sense strand
gagccacaggagaaagcaa

SEQ ID NO: 2455791 - RNA, 19 nt, Homo sapiens
  misc_RNA (1)...(19): siRNA sense strand
caggagaaagcaaagccaa

SEQ ID NO: 2455792 - RNA, 19 nt, Homo sapiens
  misc_RNA (1)...(19): siRNA sense strand
ggacauggaugcugugcag

SEQ ID NO: 2455793 - RNA, 19 nt, Homo sapiens
  misc_RNA (1)...(19): siRNA sense strand
gcuugggaguggagguauc

SEQ ID NO: 2455794 - RNA, 19 nt, Homo sapiens
  misc_RNA (1)...(19): siRNA sense strand
aagacuaugacgacagaga

SEQ ID NO: 2455795 - RNA, 19 nt, Homo sapiens
  misc_RNA (1)...(19): siRNA sense strand
acaauaucuuagucaccaa

SEQ ID NO: 2455796 - RNA, 19 nt, Homo sapiens
  misc_RNA (1)...(19): siRNA sense strand
cagcaacagcacagcuaca

SEQ ID NO: 2455797 - RNA, 19 nt, Homo sapiens
  misc_RNA (1)...(19): siRNA sense strand
gcucuacagacgcaugaaa

SEQ ID NO: 2455798 - RNA, 19 nt, Homo sapiens
  misc_RNA (1)...(19): siRNA sense strand
agucaccaaugaagaucaa

SEQ ID NO: 2455799 - RNA, 19 nt, Homo sapiens
  misc_RNA (1)...(19): siRNA sense strand
acauggaaacauacucaua

SEQ ID NO: 2455800 - RNA, 19 nt, Homo sapiens
  misc_RNA (1)...(19): siRNA sense strand
cccaggagagggugaguga

SEQ ID NO: 2455801 - RNA, 19 nt, Homo sapiens
  misc_RNA (1)...(19): siRNA sense strand
aaggauucacucuggacaa

SEQ ID NO: 2455802 - RNA, 19 nt, Homo sapiens
  misc_RNA (1)...(19): siRNA sense strand
ggaaagacuaugacgacag

SEQ ID NO: 2455803 - RNA, 19 nt, Homo sapiens
  misc_RNA (1)...(19): siRNA sense strand
gcucuguggaucaaaucaa

SEQ ID NO: 2455804 - RNA, 19 nt, Homo sapiens
  misc_RNA (1)...(19): siRNA sense strand
gcucugaaucuauggaaag

SEQ ID NO: 2455805 - RNA, 19 nt, Homo sapiens
  misc_RNA (1)...(19): siRNA sense strand
uggaaagacagcugggaca

SEQ ID NO: 2455806 - RNA, 19 nt, Homo sapiens
  misc_RNA (1)...(19): siRNA sense strand
gaacacaaguacagcucca

SEQ ID NO: 2455807 - RNA, 19 nt, Homo sapiens
  misc_RNA (1)...(19): siRNA sense strand
uaggaggauucgauggcaa

SEQ ID NO: 2455808 - RNA, 19 nt, Homo sapiens
  misc_RNA (1)...(19): siRNA sense strand
gcaucaaguacaugggugu

SEQ ID NO: 2455809 - RNA, 19 nt, Homo sapiens
  misc_RNA (1)...(19): siRNA sense strand
ugaggaacgucuuugggaa

SEQ ID NO: 2455810 - RNA, 19 nt, Homo sapiens
  misc_RNA (1)...(19): siRNA sense strand
gcuccgacggcgaagaaau

SEQ ID NO: 2455811 - RNA, 19 nt, Homo sapiens
  misc_RNA (1)...(19): siRNA sense strand
guggcugggcagugaacua

SEQ ID NO: 2455812 - RNA, 19 nt, Homo sapiens
  misc_RNA (1)...(19): siRNA sense strand
gggagguuauuuaggagga

SEQ ID NO: 2455813 - RNA, 19 nt, Homo sapiens
  misc_RNA (1)...(19): siRNA sense strand
gagaagugaugacucggaa

SEQ ID NO: 2455814 - RNA, 19 nt, Homo sapiens
  misc_RNA (1)...(19): siRNA sense strand
gugaugacucggaacacaa

SEQ ID NO: 2455815 - RNA, 19 nt, Homo sapiens
  misc_RNA (1)...(19): siRNA sense strand
uguggaacguggaggagca

SEQ ID NO: 2455816 - RNA, 19 nt, Homo sapiens
  misc_RNA (1)...(19): siRNA sense strand
acguggaggagcaccgaua

SEQ ID NO: 2455817 - RNA, 19 nt, Homo sapiens
  misc_RNA (1)...(19): siRNA sense strand
gaagaaauguccaugaccu

SEQ ID NO: 2455818 - RNA, 19 nt, Homo sapiens
  misc_RNA (1)...(19): siRNA sense strand
acagaauuggagcagaaua

SEQ ID NO: 2455819 - RNA, 19 nt, Homo sapiens
  misc_RNA (1)...(19): siRNA sense strand
cgaaguauauuaugggcag

SEQ ID NO: 2455820 - RNA, 19 nt, Homo sapiens
  misc_RNA (1)...(19): siRNA sense strand
cuguaguggugacggcuga

SEQ ID NO: 2455821 - RNA, 19 nt, Homo sapiens
  misc_RNA (1)...(19): siRNA sense strand
cgucaaagucucaggagca

SEQ ID NO: 2455822 - RNA, 19 nt, Homo sapiens
  misc_RNA (1)...(19): siRNA sense strand
aggcagugaucccgaggaa

SEQ ID NO: 2455823 - RNA, 19 nt, Homo sapiens
  misc_RNA (1)...(19): siRNA sense strand
ccacagaagcuaagggccu

SEQ ID NO: 2455824 - RNA, 19 nt, Homo sapiens
  misc_RNA (1)...(19): siRNA sense strand
cugaagaggcaaagacacu

SEQ ID NO: 2455825 - RNA, 19 nt, Homo sapiens
  misc_RNA (1)...(19): siRNA sense strand
uugcagcaucacagaaaua

SEQ ID NO: 2455826 - RNA, 19 nt, Homo sapiens
  misc_RNA (1)...(19): siRNA sense strand
gcgugucaggagaggcuaa

SEQ ID NO: 2455827 - RNA, 19 nt, Homo sapiens
  misc_RNA (1)...(19): siRNA sense strand
cgugagugcaggugaaaau

SEQ ID NO: 2455828 - RNA, 19 nt, Homo sapiens
  misc_RNA (1)...(19): siRNA sense strand
acauauugacauuggcuca

SEQ ID NO: 2455829 - RNA, 19 nt, Homo sapiens
  misc_RNA (1)...(19): siRNA sense strand
ccucagacauagaucucau

SEQ ID NO: 2455830 - RNA, 19 nt, Homo sapiens
  misc_RNA (1)...(19): siRNA sense strand
gaucacaaccucagcgaag

SEQ ID NO: 2455831 - RNA, 19 nt, Homo sapiens
  misc_RNA (1)...(19): siRNA sense strand
gggaaugaauggaggcagc

SEQ ID NO: 2455832 - RNA, 19 nt, Homo sapiens
  misc_RNA (1)...(19): siRNA sense strand
cgccaagagugccgaggau

SEQ ID NO: 2455833 - RNA, 19 nt, Homo sapiens
  misc_RNA (1)...(19): siRNA sense strand
ggaugaggcuccuuccaga

SEQ ID NO: 2455834 - RNA, 19 nt, Homo sapiens
  misc_RNA (1)...(19): siRNA sense strand
aagaagaggcgaagcgaga

SEQ ID NO: 2455835 - RNA, 19 nt, Homo sapiens
  misc_RNA (1)...(19): siRNA sense strand
uggagagggaugaggaugu

SEQ ID NO: 2455836 - RNA, 19 nt, Homo sapiens
  misc_RNA (1)...(19): siRNA sense strand
gguuauuggaagaaagaau

SEQ ID NO: 2455837 - RNA, 19 nt, Homo sapiens
  misc_RNA (1)...(19): siRNA sense strand
aggauaaagaagcugguua

SEQ ID NO: 2455838 - RNA, 19 nt, Homo sapiens
  misc_RNA (1)...(19): siRNA sense strand
gcucuagcuucuugggaca

SEQ ID NO: 2455839 - RNA, 19 nt, Homo sapiens
  misc_RNA (1)...(19): siRNA sense strand
uguuauaugguauggcaaa

SEQ ID NO: 2455840 - RNA, 19 nt, Homo sapiens
  misc_RNA (1)...(19): siRNA sense strand
ggacuacguugaugcggaa

SEQ ID NO: 2455841 - RNA, 19 nt, Homo sapiens
  misc_RNA (1)...(19): siRNA sense strand
uguggaagaaggaggaaga

SEQ ID NO: 2455842 - RNA, 19 nt, Homo sapiens
  misc_RNA (1)...(19): siRNA sense strand
aagaauauaucauggagca

SEQ ID NO: 2455843 - RNA, 19 nt, Homo sapiens
  misc_RNA (1)...(19): siRNA sense strand
gcuucuugggacagacaua

SEQ ID NO: 2455844 - RNA, 19 nt, Homo sapiens
  misc_RNA (1)...(19): siRNA sense strand
cguugaugcggaaggaaga

SEQ ID NO: 2455845 - RNA, 19 nt, Homo sapiens
  misc_RNA (1)...(19): siRNA sense strand
aguauggacugcacggcua

SEQ ID NO: 2455846 - RNA, 19 nt, Homo sapiens
  misc_RNA (1)...(19): siRNA sense strand
acguggagcugguguggau

SEQ ID NO: 2455847 - RNA, 19 nt, Homo sapiens
  misc_RNA (1)...(19): siRNA sense strand
acauagacuccgauggcau

SEQ ID NO: 2455848 - RNA, 19 nt, Homo sapiens
  misc_RNA (1)...(19): siRNA sense strand
ugcaagaucaaauuggaaa

SEQ ID NO: 2455849 - RNA, 19 nt, Homo sapiens
  misc_RNA (1)...(19): siRNA sense strand
aggaggaagaacuggcuuu

SEQ ID NO: 2455850 - RNA, 19 nt, Homo sapiens
  misc_RNA (1)...(19): siRNA sense strand
cugcaagaucaaauuggaa

SEQ ID NO: 2455851 - RNA, 19 nt, Homo sapiens
  misc_RNA (1)...(19): siRNA sense strand
uggcauucuuuaauugcaa

SEQ ID NO: 2455852 - RNA, 19 nt, Homo sapiens
  misc_RNA (1)...(19): siRNA sense strand
aaguacaaucugagucauu

SEQ ID NO: 2455853 - RNA, 19 nt, Homo sapiens
  misc_RNA (1)...(19): siRNA sense strand
ucaguagagaagauagcua

SEQ ID NO: 2455854 - RNA, 19 nt, Homo sapiens
  misc_RNA (1)...(19): siRNA sense strand
ugugaagcucauuguuaua

SEQ ID NO: 2455855 - RNA, 19 nt, Homo sapiens
  misc_RNA (1)...(19): siRNA sense strand
uuuggaugaacaugggaaa

SEQ ID NO: 2455856 - RNA, 19 nt, Homo sapiens
  misc_RNA (1)...(19): siRNA sense strand
gugaaagagaaauggaaau

SEQ ID NO: 2455857 - RNA, 19 nt, Homo sapiens
  misc_RNA (1)...(19): siRNA sense strand
auggaaaucaaguggcaaa

SEQ ID NO: 2455858 - RNA, 19 nt, Homo sapiens
  misc_RNA (1)...(19): siRNA sense strand
ugugaaagagaaauggaaa

SEQ ID NO: 2455859 - RNA, 19 nt, Homo sapiens
  misc_RNA (1)...(19): siRNA sense strand
ucucaagaauggugcucaa

SEQ ID NO: 2455860 - RNA, 19 nt, Homo sapiens
  misc_RNA (1)...(19): siRNA sense strand
aggauaugaagaugaacaa

SEQ ID NO: 2455861 - RNA, 19 nt, Homo sapiens
  misc_RNA (1)...(19): siRNA sense strand
agauaauucacacaggaaa

SEQ ID NO: 2455862 - RNA, 19 nt, Homo sapiens
  misc_RNA (1)...(19): siRNA sense strand
ccagagaagacacaggaau

SEQ ID NO: 2455863 - RNA, 19 nt, Homo sapiens
  misc_RNA (1)...(19): siRNA sense strand
agccagugugaaagagaaa

SEQ ID NO: 2455864 - RNA, 19 nt, Homo sapiens
  misc_RNA (1)...(19): siRNA sense strand
aggacaaggauaugaagau

SEQ ID NO: 2455865 - RNA, 19 nt, Homo sapiens
  misc_RNA (1)...(19): siRNA sense strand
ccacaagagaagcaaacau

SEQ ID NO: 2455866 - RNA, 19 nt, Homo sapiens
  misc_RNA (1)...(19): siRNA sense strand
uagaaacaggacaaggaua

SEQ ID NO: 2455867 - RNA, 19 nt, Homo sapiens
  misc_RNA (1)...(19): siRNA sense strand
cagauaauucacacaggaa

SEQ ID NO: 2455868 - RNA, 19 nt, Homo sapiens
  misc_RNA (1)...(19): siRNA sense strand
gugugaaagagaaauggaa

SEQ ID NO: 2455869 - RNA, 19 nt, Homo sapiens
  misc_RNA (1)...(19): siRNA sense strand
aggauaugcccuuaagaga

SEQ ID NO: 2455870 - RNA, 19 nt, Homo sapiens
  misc_RNA (1)...(19): siRNA sense strand
accagagcaaugagggaaa

SEQ ID NO: 2455871 - RNA, 19 nt, Homo sapiens
  misc_RNA (1)...(19): siRNA sense strand
gugugaaccauccgagaau

SEQ ID NO: 2455872 - RNA, 19 nt, Homo sapiens
  misc_RNA (1)...(19): siRNA sense strand
ggugaugggagcagggugu

SEQ ID NO: 2455873 - RNA, 19 nt, Homo sapiens
  misc_RNA (1)...(19): siRNA sense strand
acagcaaggaugaaauuau

SEQ ID NO: 2455874 - RNA, 19 nt, Homo sapiens
  misc_RNA (1)...(19): siRNA sense strand
uggagagauucauagaaga

SEQ ID NO: 2455875 - RNA, 19 nt, Homo sapiens
  misc_RNA (1)...(19): siRNA sense strand
gugaaugcccaaaccacaa

SEQ ID NO: 2455876 - RNA, 19 nt, Homo sapiens
  misc_RNA (1)...(19): siRNA sense strand
agauacuuccuuagaaaca

SEQ ID NO: 2455877 - RNA, 19 nt, Homo sapiens
  misc_RNA (1)...(19): siRNA sense strand
cuuagaaacaggacaagga

SEQ ID NO: 2455878 - RNA, 19 nt, Homo sapiens
  misc_RNA (1)...(19): siRNA sense strand
aaggauaugaagaugaaca

SEQ ID NO: 2455879 - RNA, 19 nt, Homo sapiens
  misc_RNA (1)...(19): siRNA sense strand
uaaucaucauccaggaaga

SEQ ID NO: 2455880 - RNA, 19 nt, Homo sapiens
  misc_RNA (1)...(19): siRNA sense strand
ccaccagagcaaugaggga

SEQ ID NO: 2455881 - RNA, 19 nt, Homo sapiens
  misc_RNA (1)...(19): siRNA sense strand
auucauuucaagacagcaa

SEQ ID NO: 2455882 - RNA, 19 nt, Homo sapiens
  misc_RNA (1)...(19): siRNA sense strand
ggagaaaagccuuauacau

SEQ ID NO: 2455883 - RNA, 19 nt, Homo sapiens
  misc_RNA (1)...(19): siRNA sense strand
cugacugaugacagcauaa

SEQ ID NO: 2455884 - RNA, 19 nt, Homo sapiens
  misc_RNA (1)...(19): siRNA sense strand
gauaauucacacaggaaag

SEQ ID NO: 2455885 - RNA, 19 nt, Homo sapiens
  misc_RNA (1)...(19): siRNA sense strand
acucauggcugcaaccaga

SEQ ID NO: 2455886 - RNA, 19 nt, Homo sapiens
  misc_RNA (1)...(19): siRNA sense strand
aaauggaaaucaaguggca

SEQ ID NO: 2455887 - RNA, 19 nt, Homo sapiens
  misc_RNA (1)...(19): siRNA sense strand
aagccagugugaaagagaa

SEQ ID NO: 2455888 - RNA, 19 nt, Homo sapiens
  misc_RNA (1)...(19): siRNA sense strand
ggagagauucauagaagac

SEQ ID NO: 2455889 - RNA, 19 nt, Homo sapiens
  misc_RNA (1)...(19): siRNA sense strand
aaacuuacugacagagaaa

SEQ ID NO: 2455890 - RNA, 19 nt, Homo sapiens
  misc_RNA (1)...(19): siRNA sense strand
uagcauugccagaggacuu

SEQ ID NO: 2455891 - RNA, 19 nt, Homo sapiens
  misc_RNA (1)...(19): siRNA sense strand
cgccagaggacgaugaaga

SEQ ID NO: 2455892 - RNA, 19 nt, Homo sapiens
  misc_RNA (1)...(19): siRNA sense strand
aaaccugacacuauggaaa

SEQ ID NO: 2455893 - RNA, 19 nt, Homo sapiens
  misc_RNA (1)...(19): siRNA sense strand
gcuugaugccuuugcagaa

SEQ ID NO: 2455894 - RNA, 19 nt, Homo sapiens
  misc_RNA (1)...(19): siRNA sense strand
aguagaaacaguagaccuu

SEQ ID NO: 2455895 - RNA, 19 nt, Homo sapiens
  misc_RNA (1)...(19): siRNA sense strand
gcguguguguggugggcuu

SEQ ID NO: 2455896 - RNA, 19 nt, Homo sapiens
  misc_RNA (1)...(19): siRNA sense strand
aggaaggaaaugacccaaa

SEQ ID NO: 2455897 - RNA, 19 nt, Homo sapiens
  misc_RNA (1)...(19): siRNA sense strand
gcucaaacagauagcacca

SEQ ID NO: 2455898 - RNA, 19 nt, Homo sapiens
  misc_RNA (1)...(19): siRNA sense strand
ggacacacauagaugccau

SEQ ID NO: 2455899 - RNA, 19 nt, Homo sapiens
  misc_RNA (1)...(19): siRNA sense strand
gguuuaagacccggaggaa

SEQ ID NO: 2455900 - RNA, 19 nt, Homo sapiens
  misc_RNA (1)...(19): siRNA sense strand
cugugaaaccugacacuau

SEQ ID NO: 2455901 - RNA, 19 nt, Homo sapiens
  misc_RNA (1)...(19): siRNA sense strand
aauaaaaggcgauuggauu

SEQ ID NO: 2455902 - RNA, 19 nt, Homo sapiens
  misc_RNA (1)...(19): siRNA sense strand
cuguauuggcacuuguuaa

SEQ ID NO: 2455903 - RNA, 19 nt, Homo sapiens
  misc_RNA (1)...(19): siRNA sense strand
acucaaauagugcaguuaa

SEQ ID NO: 2455904 - RNA, 19 nt, Homo sapiens
  misc_RNA (1)...(19): siRNA sense strand
aaacauuacaccugccaau

SEQ ID NO: 2455905 - RNA, 19 nt, Homo sapiens
  misc_RNA (1)...(19): siRNA sense strand
ggaggaaggaaaugaccca

SEQ ID NO: 2455906 - RNA, 19 nt, Homo sapiens
  misc_RNA (1)...(19): siRNA sense strand
agaaacacacagaaguaga

SEQ ID NO: 2455907 - RNA, 19 nt, Homo sapiens
  misc_RNA (1)...(19): siRNA sense strand
cagaggacuugcaaggcau

SEQ ID NO: 2455908 - RNA, 19 nt, Homo sapiens
  misc_RNA (1)...(19): siRNA sense strand
acugaagaaucuaaagacu

SEQ ID NO: 2455909 - RNA, 19 nt, Homo sapiens
  misc_RNA (1)...(19): siRNA sense strand
ccaaacuuacugacagaga

SEQ ID NO: 2455910 - RNA, 19 nt, Homo sapiens
  misc_RNA (1)...(19): siRNA sense strand
uuguaaugauguugaucga

SEQ ID NO: 2455911 - RNA, 19 nt, Homo sapiens
  misc_RNA (1)...(19): siRNA sense strand
cggaaucaucagagacugu

SEQ ID NO: 2455912 - RNA, 19 nt, Homo sapiens
  misc_RNA (1)...(19): siRNA sense strand
gaauaaaaggcgauuggau

SEQ ID NO: 2455913 - RNA, 19 nt, Homo sapiens
  misc_RNA (1)...(19): siRNA sense strand
aggacgaugaagaggacga

SEQ ID NO: 2455914 - RNA, 19 nt, Homo sapiens
  misc_RNA (1)...(19): siRNA sense strand
cucagcagguggacacaaa

SEQ ID NO: 2455915 - RNA, 19 nt, Homo sapiens
  misc_RNA (1)...(19): siRNA sense strand
ccaucggaaucaucagaga

SEQ ID NO: 2455916 - RNA, 19 nt, Homo sapiens
  misc_RNA (1)...(19): siRNA sense strand
ccuaagcagguuaaaguga

SEQ ID NO: 2455917 - RNA, 19 nt, Homo sapiens
  misc_RNA (1)...(19): siRNA sense strand
uguuauucuucgacgcuau

SEQ ID NO: 2455918 - RNA, 19 nt, Homo sapiens
  misc_RNA (1)...(19): siRNA sense strand
uuagaaagauauguggcaa

SEQ ID NO: 2455919 - RNA, 19 nt, Homo sapiens
  misc_RNA (1)...(19): siRNA sense strand
aggccguggagguaauuua

SEQ ID NO: 2455920 - RNA, 19 nt, Homo sapiens
  misc_RNA (1)...(19): siRNA sense strand
ccagaggacuugcaaggca

SEQ ID NO: 2455921 - RNA, 19 nt, Homo sapiens
  misc_RNA (1)...(19): siRNA sense strand
aagaagaggaaauggcaga

SEQ ID NO: 2455922 - RNA, 19 nt, Homo sapiens
  misc_RNA (1)...(19): siRNA sense strand
gcacagugaaagcagaaaa

SEQ ID NO: 2455923 - RNA, 19 nt, Homo sapiens
  misc_RNA (1)...(19): siRNA sense strand
cagugaaagcagaaaauau

SEQ ID NO: 2455924 - RNA, 19 nt, Homo sapiens
  misc_RNA (1)...(19): siRNA sense strand
ggaccugaacugcuggcaa

SEQ ID NO: 2455925 - RNA, 19 nt, Homo sapiens
  misc_RNA (1)...(19): siRNA sense strand
uggcacagugaaagcagaa

SEQ ID NO: 2455926 - RNA, 19 nt, Homo sapiens
  misc_RNA (1)...(19): siRNA sense strand
ggaagugaaauguugcaca

SEQ ID NO: 2455927 - RNA, 19 nt, Homo sapiens
  misc_RNA (1)...(19): siRNA sense strand
aaauguugcacaagcgaga

SEQ ID NO: 2455928 - RNA, 19 nt, Homo sapiens
  misc_RNA (1)...(19): siRNA sense strand
cuguuuaugugauagcaau

SEQ ID NO: 2455929 - RNA, 19 nt, Homo sapiens
  misc_RNA (1)...(19): siRNA sense strand
aggacuguaugucuggaaa

SEQ ID NO: 2455930 - RNA, 19 nt, Homo sapiens
  misc_RNA (1)...(19): siRNA sense strand
cggccaacgugguggucau

SEQ ID NO: 2455931 - RNA, 19 nt, Homo sapiens
  misc_RNA (1)...(19): siRNA sense strand
aguccuacgccaagaacua

SEQ ID NO: 2455932 - RNA, 19 nt, Homo sapiens
  misc_RNA (1)...(19): siRNA sense strand
gcuucaccauggaggacaa

SEQ ID NO: 2455933 - RNA, 19 nt, Homo sapiens
  misc_RNA (1)...(19): siRNA sense strand
agaaggacaugcauggcua

SEQ ID NO: 2455934 - RNA, 19 nt, Homo sapiens
  misc_RNA (1)...(19): siRNA sense strand
cccaacaacaagaggguga

SEQ ID NO: 2455935 - RNA, 19 nt, Homo sapiens
  misc_RNA (1)...(19): siRNA sense strand
agaccaucgccuacgguua

SEQ ID NO: 2455936 - RNA, 19 nt, Homo sapiens
  misc_RNA (1)...(19): siRNA sense strand
gagaaaggcuaccggcacu

SEQ ID NO: 2455937 - RNA, 19 nt, Homo sapiens
  misc_RNA (1)...(19): siRNA sense strand
aacaagagggugaagggaa

SEQ ID NO: 2455938 - RNA, 19 nt, Homo sapiens
  misc_RNA (1)...(19): siRNA sense strand
ggucauugguggaggcagc

SEQ ID NO: 2455939 - RNA, 19 nt, Homo sapiens
  misc_RNA (1)...(19): siRNA sense strand
ccagugacguggaggugga

SEQ ID NO: 2455940 - RNA, 19 nt, Homo sapiens
  misc_RNA (1)...(19): siRNA sense strand
cucccugagcauugagaaa

SEQ ID NO: 2455941 - RNA, 19 nt, Homo sapiens
  misc_RNA (1)...(19): siRNA sense strand
gcccaauguccgugaucau

SEQ ID NO: 2455942 - RNA, 19 nt, Homo sapiens
  misc_RNA (1)...(19): siRNA sense strand
gugcuggagaagacaggaa

SEQ ID NO: 2455943 - RNA, 19 nt, Homo sapiens
  misc_RNA (1)...(19): siRNA sense strand
ggaaucaaguccacggucu

SEQ ID NO: 2455944 - RNA, 19 nt, Homo sapiens
  misc_RNA (1)...(19): siRNA sense strand
cagcacaacuggucccaca

SEQ ID NO: 2455945 - RNA, 19 nt, Homo sapiens
  misc_RNA (1)...(19): siRNA sense strand
aggaggugcuggacgcaga

SEQ ID NO: 2455946 - RNA, 19 nt, Homo sapiens
  misc_RNA (1)...(19): siRNA sense strand
cgaucaagaaggagugccu

SEQ ID NO: 2455947 - RNA, 19 nt, Homo sapiens
  misc_RNA (1)...(19): siRNA sense strand
auucagugccuaaaggaaa

SEQ ID NO: 2455948 - RNA, 19 nt, Homo sapiens
  misc_RNA (1)...(19): siRNA sense strand
caggaagauguuagaugaa

SEQ ID NO: 2455949 - RNA, 19 nt, Homo sapiens
  misc_RNA (1)...(19): siRNA sense strand
gcugaaggaacuuggcaga

SEQ ID NO: 2455950 - RNA, 19 nt, Homo sapiens
  misc_RNA (1)...(19): siRNA sense strand
cuacaugcugagacugaaa

SEQ ID NO: 2455951 - RNA, 19 nt, Homo sapiens
  misc_RNA (1)...(19): siRNA sense strand
gaucguuggaaguuggcaa

SEQ ID NO: 2455952 - RNA, 19 nt, Homo sapiens
  misc_RNA (1)...(19): siRNA sense strand
gggcucauucagugccuaa

SEQ ID NO: 2455953 - RNA, 19 nt, Homo sapiens
  misc_RNA (1)...(19): siRNA sense strand
aguaauaguugcucuggga

SEQ ID NO: 2455954 - RNA, 19 nt, Homo sapiens
  misc_RNA (1)...(19): siRNA sense strand
ggaaguuggcaaacaggga

SEQ ID NO: 2455955 - RNA, 19 nt, Homo sapiens
  misc_RNA (1)...(19): siRNA sense strand
guggagugcaagaguggau

SEQ ID NO: 2455956 - RNA, 19 nt, Homo sapiens
  misc_RNA (1)...(19): siRNA sense strand
gggaugaacuccacccgau

SEQ ID NO: 2455957 - RNA, 19 nt, Homo sapiens
  misc_RNA (1)...(19): siRNA sense strand
acgaauuugcaaugaaguu

SEQ ID NO: 2455958 - RNA, 19 nt, Homo sapiens
  misc_RNA (1)...(19): siRNA sense strand
caaucagccaccuggaaga

SEQ ID NO: 2455959 - RNA, 19 nt, Homo sapiens
  misc_RNA (1)...(19): siRNA sense strand
gagagaaacagaagggcau

SEQ ID NO: 2455960 - RNA, 19 nt, Homo sapiens
  misc_RNA (1)...(19): siRNA sense strand
uaacaaaguaucaggccua

SEQ ID NO: 2455961 - RNA, 19 nt, Homo sapiens
  misc_RNA (1)...(19): siRNA sense strand
uggaaaugccugaagaaaa

SEQ ID NO: 2455962 - RNA, 19 nt, Homo sapiens
  misc_RNA (1)...(19): siRNA sense strand
ucuccaaagcagugggcua

SEQ ID NO: 2455963 - RNA, 19 nt, Homo sapiens
  misc_RNA (1)...(19): siRNA sense strand
aggagagcucugagauaaa

SEQ ID NO: 2455964 - RNA, 19 nt, Homo sapiens
  misc_RNA (1)...(19): siRNA sense strand
ccucaggacuccaugggua

SEQ ID NO: 2455965 - RNA, 19 nt, Homo sapiens
  misc_RNA (1)...(19): siRNA sense strand
agugaaaagcggugaagaa

SEQ ID NO: 2455966 - RNA, 19 nt, Homo sapiens
  misc_RNA (1)...(19): siRNA sense strand
ggagagaaacagaagggca

SEQ ID NO: 2455967 - RNA, 19 nt, Homo sapiens
  misc_RNA (1)...(19): siRNA sense strand
gguguauggcugugacaau

SEQ ID NO: 2455968 - RNA, 19 nt, Homo sapiens
  misc_RNA (1)...(19): siRNA sense strand
cugcaggauuucacggcua

SEQ ID NO: 2455969 - RNA, 19 nt, Homo sapiens
  misc_RNA (1)...(19): siRNA sense strand
gaaggaguguggagaggga

SEQ ID NO: 2455970 - RNA, 19 nt, Homo sapiens
  misc_RNA (1)...(19): siRNA sense strand
ucaccuacccagaggccaa

SEQ ID NO: 2455971 - RNA, 19 nt, Homo sapiens
  misc_RNA (1)...(19): siRNA sense strand
gcucaaugaaaggaguaaa

SEQ ID NO: 2455972 - RNA, 19 nt, Homo sapiens
  misc_RNA (1)...(19): siRNA sense strand
ccuggaaaugccugaagaa

SEQ ID NO: 2455973 - RNA, 19 nt, Homo sapiens
  misc_RNA (1)...(19): siRNA sense strand
auacaaacuuuacgaggca

SEQ ID NO: 2455974 - RNA, 19 nt, Homo sapiens
  misc_RNA (1)...(19): siRNA sense strand
cgauaggaggcauguucua

SEQ ID NO: 2455975 - RNA, 19 nt, Homo sapiens
  misc_RNA (1)...(19): siRNA sense strand
cuggaaaugccugaagaaa

SEQ ID NO: 2455976 - RNA, 19 nt, Homo sapiens
  misc_RNA (1)...(19): siRNA sense strand
augaaggaguacaggaucu

SEQ ID NO: 2455977 - RNA, 19 nt, Homo sapiens
  misc_RNA (1)...(19): siRNA sense strand
gaguacaggaucuggcuga

SEQ ID NO: 2455978 - RNA, 19 nt, Homo sapiens
  misc_RNA (1)...(19): siRNA sense strand
acaugaaggaguacaggau

SEQ ID NO: 2455979 - RNA, 19 nt, Homo sapiens
  misc_RNA (1)...(19): siRNA sense strand
ccaggaaagacaaaacaaa

SEQ ID NO: 2455980 - RNA, 19 nt, Homo sapiens
  misc_RNA (1)...(19): siRNA sense strand
acgggaugcuggugggacu

SEQ ID NO: 2455981 - RNA, 19 nt, Homo sapiens
  misc_RNA (1)...(19): siRNA sense strand
cggaggaggagcaaagugu

SEQ ID NO: 2455982 - RNA, 19 nt, Homo sapiens
  misc_RNA (1)...(19): siRNA sense strand
acaaagacccauuucccua

SEQ ID NO: 2455983 - RNA, 19 nt, Homo sapiens
  misc_RNA (1)...(19): siRNA sense strand
guguggagagggacuuaaa

SEQ ID NO: 2455984 - RNA, 19 nt, Homo sapiens
  misc_RNA (1)...(19): siRNA sense strand
cucaaugaaaggaguaaaa

SEQ ID NO: 2455985 - RNA, 19 nt, Homo sapiens
  misc_RNA (1)...(19): siRNA sense strand
caacacugguagagccugu

SEQ ID NO: 2455986 - RNA, 19 nt, Homo sapiens
  misc_RNA (1)...(19): siRNA sense strand
ccacuuuccagcagauaca

SEQ ID NO: 2455987 - RNA, 19 nt, Homo sapiens
  misc_RNA (1)...(19): siRNA sense strand
caggagagaugaaggagug

SEQ ID NO: 2455988 - RNA, 19 nt, Homo sapiens
  misc_RNA (1)...(19): siRNA sense strand
acaggaaaggagagaagaa

SEQ ID NO: 2455989 - RNA, 19 nt, Homo sapiens
  misc_RNA (1)...(19): siRNA sense strand
cagaaauggcucagggaac

SEQ ID NO: 2455990 - RNA, 19 nt, Homo sapiens
  misc_RNA (1)...(19): siRNA sense strand
cgggaagcgcaacaggaaa

SEQ ID NO: 2455991 - RNA, 19 nt, Homo sapiens
  misc_RNA (1)...(19): siRNA sense strand
ccuacaacgaaguggcaga

SEQ ID NO: 2455992 - RNA, 19 nt, Homo sapiens
  misc_RNA (1)...(19): siRNA sense strand
uagaagugcugaagcggau

SEQ ID NO: 2455993 - RNA, 19 nt, Homo sapiens
  misc_RNA (1)...(19): siRNA sense strand
acgagaaugacgaggacga

SEQ ID NO: 2455994 - RNA, 19 nt, Homo sapiens
  misc_RNA (1)...(19): siRNA sense strand
uggcaagggccuacggcau

SEQ ID NO: 2455995 - RNA, 19 nt, Homo sapiens
  misc_RNA (1)...(19): siRNA sense strand
aaggagagaagaauggcaa

SEQ ID NO: 2455996 - RNA, 19 nt, Homo sapiens
  misc_RNA (1)...(19): siRNA sense strand
guggaaagacagaggagac

SEQ ID NO: 2455997 - RNA, 19 nt, Homo sapiens
  misc_RNA (1)...(19): siRNA sense strand
cgagaaggugcagaggaaa

SEQ ID NO: 2455998 - RNA, 19 nt, Homo sapiens
  misc_RNA (1)...(19): siRNA sense strand
gaagaauggcaagggccua

SEQ ID NO: 2455999 - RNA, 19 nt, Homo sapiens
  misc_RNA (1)...(19): siRNA sense strand
acaacgaaguggcagacga

SEQ ID NO: 2456000 - RNA, 19 nt, Homo sapiens
  misc_RNA (1)...(19): siRNA sense strand
acagaaauggcucagggaa

SEQ ID NO: 2456001 - RNA, 19 nt, Homo sapiens
  misc_RNA (1)...(19): siRNA sense strand
aggagacuugaaagaauaa

SEQ ID NO: 2456002 - RNA, 19 nt, Homo sapiens
  misc_RNA (1)...(19): siRNA sense strand
gggaagcagcucuugccaa

SEQ ID NO: 2456003 - RNA, 19 nt, Homo sapiens
  misc_RNA (1)...(19): siRNA sense strand
gcagauuccuggauggcaa

SEQ ID NO: 2456004 - RNA, 19 nt, Homo sapiens
  misc_RNA (1)...(19): siRNA sense strand
uggagaagccaaagaucaa

SEQ ID NO: 2456005 - RNA, 19 nt, Homo sapiens
  misc_RNA (1)...(19): siRNA sense strand
agaugaugugaaagagaaa

SEQ ID NO: 2456006 - RNA, 19 nt, Homo sapiens
  misc_RNA (1)...(19): siRNA sense strand
gaacagauggugagaggca

SEQ ID NO: 2456007 - RNA, 19 nt, Homo sapiens
  misc_RNA (1)...(19): siRNA sense strand
aggcagaugagcagagaca

SEQ ID NO: 2456008 - RNA, 19 nt, Homo sapiens
  misc_RNA (1)...(19): siRNA sense strand
aggagaaagcuuagagacu

SEQ ID NO: 2456009 - RNA, 19 nt, Homo sapiens
  misc_RNA (1)...(19): siRNA sense strand
ccuacagggaagaaugaaa

SEQ ID NO: 2456010 - RNA, 19 nt, Homo sapiens
  misc_RNA (1)...(19): siRNA sense strand
ggagaaggaacgagccaga

SEQ ID NO: 2456011 - RNA, 19 nt, Homo sapiens
  misc_RNA (1)...(19): siRNA sense strand
gaagauggcacuaaggaca

SEQ ID NO: 2456012 - RNA, 19 nt, Homo sapiens
  misc_RNA (1)...(19): siRNA sense strand
agggaagaaugaaaagaaa

SEQ ID NO: 2456013 - RNA, 19 nt, Homo sapiens
  misc_RNA (1)...(19): siRNA sense strand
augcaaugccugagaucau

SEQ ID NO: 2456014 - RNA, 19 nt, Homo sapiens
  misc_RNA (1)...(19): siRNA sense strand
cugaccaaccugaggauau

SEQ ID NO: 2456015 - RNA, 19 nt, Homo sapiens
  misc_RNA (1)...(19): siRNA sense strand
ccagaugaugugaaagaga

SEQ ID NO: 2456016 - RNA, 19 nt, Homo sapiens
  misc_RNA (1)...(19): siRNA sense strand
cagcugcagaccugagaaa

SEQ ID NO: 2456017 - RNA, 19 nt, Homo sapiens
  misc_RNA (1)...(19): siRNA sense strand
gagacugguccuuggaaca

SEQ ID NO: 2456018 - RNA, 19 nt, Homo sapiens
  misc_RNA (1)...(19): siRNA sense strand
cagauuauccacagcaaaa

SEQ ID NO: 2456019 - RNA, 19 nt, Homo sapiens
  misc_RNA (1)...(19): siRNA sense strand
aagaggagcugcagccaga

SEQ ID NO: 2456020 - RNA, 19 nt, Homo sapiens
  misc_RNA (1)...(19): siRNA sense strand
aagccaaagaucaaggaga

SEQ ID NO: 2456021 - RNA, 19 nt, Homo sapiens
  misc_RNA (1)...(19): siRNA sense strand
ggugaaaaucauuggaagu

SEQ ID NO: 2456022 - RNA, 19 nt, Homo sapiens
  misc_RNA (1)...(19): siRNA sense strand
gguucaggaagcuggaaaa

SEQ ID NO: 2456023 - RNA, 19 nt, Homo sapiens
  misc_RNA (1)...(19): siRNA sense strand
ggugaauuaugaaaagcua

SEQ ID NO: 2456024 - RNA, 19 nt, Homo sapiens
  misc_RNA (1)...(19): siRNA sense strand
cugugaagaacaaggcuga

SEQ ID NO: 2456025 - RNA, 19 nt, Homo sapiens
  misc_RNA (1)...(19): siRNA sense strand
uggcaauauucccagucaa

SEQ ID NO: 2456026 - RNA, 19 nt, Homo sapiens
  misc_RNA (1)...(19): siRNA sense strand
gcagauuccguucgggaga

SEQ ID NO: 2456027 - RNA, 19 nt, Homo sapiens
  misc_RNA (1)...(19): siRNA sense strand
acugauaaugcaaggcaga

SEQ ID NO: 2456028 - RNA, 19 nt, Homo sapiens
  misc_RNA (1)...(19): siRNA sense strand
cugagaucauggugaaaau

SEQ ID NO: 2456029 - RNA, 19 nt, Homo sapiens
  misc_RNA (1)...(19): siRNA sense strand
cuacagggaagaaugaaaa

SEQ ID NO: 2456030 - RNA, 19 nt, Homo sapiens
  misc_RNA (1)...(19): siRNA sense strand
ccaaugacugauaaugcaa

SEQ ID NO: 2456031 - RNA, 19 nt, Homo sapiens
  misc_RNA (1)...(19): siRNA sense strand
cagaaaacaaccagaaacu

SEQ ID NO: 2456032 - RNA, 19 nt, Homo sapiens
  misc_RNA (1)...(19): siRNA sense strand
accaucaagauuuggguua

SEQ ID NO: 2456033 - RNA, 19 nt, Homo sapiens
  misc_RNA (1)...(19): siRNA sense strand
cagagaacaaccagaaauc

SEQ ID NO: 2456034 - RNA, 19 nt, Homo sapiens
  misc_RNA (1)...(19): siRNA sense strand
auccagaugaugugaaaga

SEQ ID NO: 2456035 - RNA, 19 nt, Homo sapiens
  misc_RNA (1)...(19): siRNA sense strand
aagauggcacuaaggacaa

SEQ ID NO: 2456036 - RNA, 19 nt, Homo sapiens
  misc_RNA (1)...(19): siRNA sense strand
gccaaagaucaaggagaau

SEQ ID NO: 2456037 - RNA, 19 nt, Homo sapiens
  misc_RNA (1)...(19): siRNA sense strand
ucaaagaacuggaggcuga

SEQ ID NO: 2456038 - RNA, 19 nt, Homo sapiens
  misc_RNA (1)...(19): siRNA sense strand
ggauuaaccugauggccua

SEQ ID NO: 2456039 - RNA, 19 nt, Homo sapiens
  misc_RNA (1)...(19): siRNA sense strand
agugaugacuguucggaaa

SEQ ID NO: 2456040 - RNA, 19 nt, Homo sapiens
  misc_RNA (1)...(19): siRNA sense strand
ccagaagcaaggacggaaa

SEQ ID NO: 2456041 - RNA, 19 nt, Homo sapiens
  misc_RNA (1)...(19): siRNA sense strand
ggaaagugaucaagcgugu

SEQ ID NO: 2456042 - RNA, 19 nt, Homo sapiens
  misc_RNA (1)...(19): siRNA sense strand
gauuuagacuggaggcuga

SEQ ID NO: 2456043 - RNA, 19 nt, Homo sapiens
  misc_RNA (1)...(19): siRNA sense strand
ccaagagaguccagaggga

SEQ ID NO: 2456044 - RNA, 19 nt, Homo sapiens
  misc_RNA (1)...(19): siRNA sense strand
guaaacaagagaacagcaa

SEQ ID NO: 2456045 - RNA, 19 nt, Homo sapiens
  misc_RNA (1)...(19): siRNA sense strand
cggaaaugugugauggaga

SEQ ID NO: 2456046 - RNA, 19 nt, Homo sapiens
  misc_RNA (1)...(19): siRNA sense strand
ggggagaaagagaggcaaa

SEQ ID NO: 2456047 - RNA, 19 nt, Homo sapiens
  misc_RNA (1)...(19): siRNA sense strand
gagaagaauuucaaggaag

SEQ ID NO: 2456048 - RNA, 19 nt, Homo sapiens
  misc_RNA (1)...(19): siRNA sense strand
gagaaugagaaggcagaaa

SEQ ID NO: 2456049 - RNA, 19 nt, Homo sapiens
  misc_RNA (1)...(19): siRNA sense strand
cagaaaugugugauggaga

SEQ ID NO: 2456050 - RNA, 19 nt, Homo sapiens
  misc_RNA (1)...(19): siRNA sense strand
caaugaaugaagaaggaga

SEQ ID NO: 2456051 - RNA, 19 nt, Homo sapiens
  misc_RNA (1)...(19): siRNA sense strand
gagcagaaugagaaugaga

SEQ ID NO: 2456052 - RNA, 19 nt, Homo sapiens
  misc_RNA (1)...(19): siRNA sense strand
cccaaaggcugguggagga

SEQ ID NO: 2456053 - RNA, 19 nt, Homo sapiens
  misc_RNA (1)...(19): siRNA sense strand
aaggagaaucagaagaaau

SEQ ID NO: 2456054 - RNA, 19 nt, Homo sapiens
  misc_RNA (1)...(19): siRNA sense strand
aagcaaggacggaaaguga

SEQ ID NO: 2456055 - RNA, 19 nt, Homo sapiens
  misc_RNA (1)...(19): siRNA sense strand
agucacuaaugaaggagaa

SEQ ID NO: 2456056 - RNA, 19 nt, Homo sapiens
  misc_RNA (1)...(19): siRNA sense strand
agucacuaaugaaggagaa

SEQ ID NO: 2456057 - RNA, 19 nt, Homo sapiens
  misc_RNA (1)...(19): siRNA sense strand
agauagacccagauuacua

SEQ ID NO: 2456058 - RNA, 19 nt, Homo sapiens
  misc_RNA (1)...(19): siRNA sense strand
agaauacguuacaggaaaa

SEQ ID NO: 2456059 - RNA, 19 nt, Homo sapiens
  misc_RNA (1)...(19): siRNA sense strand
acuaccaggugaaggagaa

SEQ ID NO: 2456060 - RNA, 19 nt, Homo sapiens
  misc_RNA (1)...(19): siRNA sense strand
acuaccaggugaaggagaa

SEQ ID NO: 2456061 - RNA, 19 nt, Homo sapiens
  misc_RNA (1)...(19): siRNA sense strand
gggaaacaaaugggaacaa

SEQ ID NO: 2456062 - RNA, 19 nt, Homo sapiens
  misc_RNA (1)...(19): siRNA sense strand
gagaaaacaagguggagau

SEQ ID NO: 2456063 - RNA, 19 nt, Homo sapiens
  misc_RNA (1)...(19): siRNA sense strand
agaaacagggagaggagga

SEQ ID NO: 2456064 - RNA, 19 nt, Homo sapiens
  misc_RNA (1)...(19): siRNA sense strand
ggagaaguaccaagagagu

SEQ ID NO: 2456065 - RNA, 19 nt, Homo sapiens
  misc_RNA (1)...(19): siRNA sense strand
accaagacaaggagaagua

SEQ ID NO: 2456066 - RNA, 19 nt, Homo sapiens
  misc_RNA (1)...(19): siRNA sense strand
aaugaaugaagaaggagaa

SEQ ID NO: 2456067 - RNA, 19 nt, Homo sapiens
  misc_RNA (1)...(19): siRNA sense strand
aggagaaucagaagagcuu

SEQ ID NO: 2456068 - RNA, 19 nt, Homo sapiens
  misc_RNA (1)...(19): siRNA sense strand
uccagaacguagaggguca

SEQ ID NO: 2456069 - RNA, 19 nt, Homo sapiens
  misc_RNA (1)...(19): siRNA sense strand
aaucagaagaaaugcccaa

SEQ ID NO: 2456070 - RNA, 19 nt, Homo sapiens
  misc_RNA (1)...(19): siRNA sense strand
gggaagagacaaagagacc

SEQ ID NO: 2456071 - RNA, 19 nt, Homo sapiens
  misc_RNA (1)...(19): siRNA sense strand
gggaaaacccaagaggaaa

SEQ ID NO: 2456072 - RNA, 19 nt, Homo sapiens
  misc_RNA (1)...(19): siRNA sense strand
gaaaagaaggcgaacguga

SEQ ID NO: 2456073 - RNA, 19 nt, Homo sapiens
  misc_RNA (1)...(19): siRNA sense strand
cuacgauggcugauggaga

SEQ ID NO: 2456074 - RNA, 19 nt, Homo sapiens
  misc_RNA (1)...(19): siRNA sense strand
caagaggaaaagaagaaaa

SEQ ID NO: 2456075 - RNA, 19 nt, Homo sapiens
  misc_RNA (1)...(19): siRNA sense strand
aauagaugaaggagaauca

SEQ ID NO: 2456076 - RNA, 19 nt, Homo sapiens
  misc_RNA (1)...(19): siRNA sense strand
gagaggaccccguggaauu

SEQ ID NO: 2456077 - RNA, 19 nt, Homo sapiens
  misc_RNA (1)...(19): siRNA sense strand
ucgcagagauccagaacgu

SEQ ID NO: 2456078 - RNA, 19 nt, Homo sapiens
  misc_RNA (1)...(19): siRNA sense strand
uuacagaagcuuccagaau

SEQ ID NO: 2456079 - RNA, 19 nt, Homo sapiens
  misc_RNA (1)...(19): siRNA sense strand
ccuagcaagauguggguca

SEQ ID NO: 2456080 - RNA, 19 nt, Homo sapiens
  misc_RNA (1)...(19): siRNA sense strand
ccuagcaagacguggguca

SEQ ID NO: 2456081 - RNA, 19 nt, Homo sapiens
  misc_RNA (1)...(19): siRNA sense strand
gccugauccuccaagaaua

SEQ ID NO: 2456082 - RNA, 19 nt, Homo sapiens
  misc_RNA (1)...(19): siRNA sense strand
uggcaaguggagacagcaa

SEQ ID NO: 2456083 - RNA, 19 nt, Homo sapiens
  misc_RNA (1)...(19): siRNA sense strand
cccaaugaaugaagaagga

SEQ ID NO: 2456084 - RNA, 19 nt, Homo sapiens
  misc_RNA (1)...(19): siRNA sense strand
cccaagaggaaaagaagaa

SEQ ID NO: 2456085 - RNA, 19 nt, Homo sapiens
  misc_RNA (1)...(19): siRNA sense strand
cgaacgugaaucugaaaga

SEQ ID NO: 2456086 - RNA, 19 nt, Homo sapiens
  misc_RNA (1)...(19): siRNA sense strand
gcugauggagaauggauuu

SEQ ID NO: 2456087 - RNA, 19 nt, Homo sapiens
  misc_RNA (1)...(19): siRNA sense strand
agaugaaggagaaucagaa

SEQ ID NO: 2456088 - RNA, 19 nt, Homo sapiens
  misc_RNA (1)...(19): siRNA sense strand
uccagagggaagagacaaa

SEQ ID NO: 2456089 - RNA, 19 nt, Homo sapiens
  misc_RNA (1)...(19): siRNA sense strand
gugacaagagugauguauu

SEQ ID NO: 2456090 - RNA, 19 nt, Homo sapiens
  misc_RNA (1)...(19): siRNA sense strand
agaagauagacccagauua

SEQ ID NO: 2456091 - RNA, 19 nt, Homo sapiens
  misc_RNA (1)...(19): siRNA sense strand
ggaaagaucgguaagguca

SEQ ID NO: 2456092 - RNA, 19 nt, Homo sapiens
  misc_RNA (1)...(19): siRNA sense strand
auguagaaauugaggagga

SEQ ID NO: 2456093 - RNA, 19 nt, Homo sapiens
  misc_RNA (1)...(19): siRNA sense strand
uggaaaagguaaagaaacu

SEQ ID NO: 2456094 - RNA, 19 nt, Homo sapiens
  misc_RNA (1)...(19): siRNA sense strand
uagaaauugaggaggaaga

SEQ ID NO: 2456095 - RNA, 19 nt, Homo sapiens
  misc_RNA (1)...(19): siRNA sense strand
aggaagaauucugggaaaa

SEQ ID NO: 2456096 - RNA, 19 nt, Homo sapiens
  misc_RNA (1)...(19): siRNA sense strand
gggaaguucaagaggcaca

SEQ ID NO: 2456097 - RNA, 19 nt, Homo sapiens
  misc_RNA (1)...(19): siRNA sense strand
gcaucaaagcuguggaaag

SEQ ID NO: 2456098 - RNA, 19 nt, Homo sapiens
  misc_RNA (1)...(19): siRNA sense strand
gccaaaggauuaauggaca

SEQ ID NO: 2456099 - RNA, 19 nt, Homo sapiens
  misc_RNA (1)...(19): siRNA sense strand
guuaaaggaaagaucggua

SEQ ID NO: 2456100 - RNA, 19 nt, Homo sapiens
  misc_RNA (1)...(19): siRNA sense strand
ccuuauagagaaauggaga

SEQ ID NO: 2456101 - RNA, 19 nt, Homo sapiens
  misc_RNA (1)...(19): siRNA sense strand
cuucaagaaauaagacaga

SEQ ID NO: 2456102 - RNA, 19 nt, Homo sapiens
  misc_RNA (1)...(19): siRNA sense strand
gcuuacaggacaaagaaca

SEQ ID NO: 2456103 - RNA, 19 nt, Homo sapiens
  misc_RNA (1)...(19): siRNA sense strand
uguagaaauugaggaggaa

SEQ ID NO: 2456104 - RNA, 19 nt, Homo sapiens
  misc_RNA (1)...(19): siRNA sense strand
ggcucgaauuccugaaaga

SEQ ID NO: 2456105 - RNA, 19 nt, Homo sapiens
  misc_RNA (1)...(19): siRNA sense strand
aaguauggguggauggagu

SEQ ID NO: 2456106 - RNA, 19 nt, Homo sapiens
  misc_RNA (1)...(19): siRNA sense strand
uggauggaguucagaggau

SEQ ID NO: 2456107 - RNA, 19 nt, Homo sapiens
  misc_RNA (1)...(19): siRNA sense strand
auuuacaggaggugccaaa

SEQ ID NO: 2456108 - RNA, 19 nt, Homo sapiens
  misc_RNA (1)...(19): siRNA sense strand
aggacaaagaacaggaacu

SEQ ID NO: 2456109 - RNA, 19 nt, Homo sapiens
  misc_RNA (1)...(19): siRNA sense strand
ggucgaacuggaagguaca

SEQ ID NO: 2456110 - RNA, 19 nt, Homo sapiens
  misc_RNA (1)...(19): siRNA sense strand
gaugaguugaagaagcuaa

SEQ ID NO: 2456111 - RNA, 19 nt, Homo sapiens
  misc_RNA (1)...(19): siRNA sense strand
ggaggaagaauucugggaa

SEQ ID NO: 2456112 - RNA, 19 nt, Homo sapiens
  misc_RNA (1)...(19): siRNA sense strand
acgggaaguucaagaggca

SEQ ID NO: 2456113 - RNA, 19 nt, Homo sapiens
  misc_RNA (1)...(19): siRNA sense strand
agagaaauggagagauacu

SEQ ID NO: 2456114 - RNA, 19 nt, Homo sapiens
  misc_RNA (1)...(19): siRNA sense strand
ggcacaggucaaugaggaa

SEQ ID NO: 2456115 - RNA, 19 nt, Homo sapiens
  misc_RNA (1)...(19): siRNA sense strand
aauuguccgucuagagcaa

SEQ ID NO: 2456116 - RNA, 19 nt, Homo sapiens
  misc_RNA (1)...(19): siRNA sense strand
uucaagaggcacaggucaa

SEQ ID NO: 2456117 - RNA, 19 nt, Homo sapiens
  misc_RNA (1)...(19): siRNA sense strand
caaaaggagggaaccgaaa

SEQ ID NO: 2456118 - RNA, 19 nt, Homo sapiens
  misc_RNA (1)...(19): siRNA sense strand
gagcaaaaguauaauucca

SEQ ID NO: 2456119 - RNA, 19 nt, Homo sapiens
  misc_RNA (1)...(19): siRNA sense strand
ugacuaaggaguugcggca

SEQ ID NO: 2456120 - RNA, 19 nt, Homo sapiens
  misc_RNA (1)...(19): siRNA sense strand
acaaagaacaggaacugga

SEQ ID NO: 2456121 - RNA, 19 nt, Homo sapiens
  misc_RNA (1)...(19): siRNA sense strand
cagacagggacaaaaguua

SEQ ID NO: 2456122 - RNA, 19 nt, Homo sapiens
  misc_RNA (1)...(19): siRNA sense strand
aggcacaggucaaugagga

SEQ ID NO: 2456123 - RNA, 19 nt, Homo sapiens
  misc_RNA (1)...(19): siRNA sense strand
agauacugaaagacacuua

SEQ ID NO: 2456124 - RNA, 19 nt, Homo sapiens
  misc_RNA (1)...(19): siRNA sense strand
gugcugaauaacugcaaaa

SEQ ID NO: 2456125 - RNA, 19 nt, Homo sapiens
  misc_RNA (1)...(19): siRNA sense strand
ccaaccuugaagaggaaau

SEQ ID NO: 2456126 - RNA, 19 nt, Homo sapiens
  misc_RNA (1)...(19): siRNA sense strand
agguacacccuuauagaga

SEQ ID NO: 2456127 - RNA, 19 nt, Homo sapiens
  misc_RNA (1)...(19): siRNA sense strand
gcagaugaguugaagaagc

SEQ ID NO: 2456128 - RNA, 19 nt, Homo sapiens
  misc_RNA (1)...(19): siRNA sense strand
aggucgaacuggaagguac

SEQ ID NO: 2456129 - RNA, 19 nt, Homo sapiens
  misc_RNA (1)...(19): siRNA sense strand
caggaggugccaaaggauu

SEQ ID NO: 2456130 - RNA, 19 nt, Homo sapiens
  misc_RNA (1)...(19): siRNA sense strand
agcaauaggucgaacugga

SEQ ID NO: 2456131 - RNA, 19 nt, Homo sapiens
  misc_RNA (1)...(19): siRNA sense strand
ggaagaauucugggaaaau

SEQ ID NO: 2456132 - RNA, 19 nt, Homo sapiens
  misc_RNA (1)...(19): siRNA sense strand
auuacagauugaacaggaa

SEQ ID NO: 2456133 - RNA, 19 nt, Homo sapiens
  misc_RNA (1)...(19): siRNA sense strand
agaacuuuauacaggcaga

SEQ ID NO: 2456134 - RNA, 19 nt, Homo sapiens
  misc_RNA (1)...(19): siRNA sense strand
gaggauuguuuguggaguc

SEQ ID NO: 2456135 - RNA, 19 nt, Homo sapiens
  misc_RNA (1)...(19): siRNA sense strand
ccauugaaauagaggccuc

SEQ ID NO: 2456136 - RNA, 19 nt, Homo sapiens
  misc_RNA (1)...(19): siRNA sense strand
gugaagaaaaugagggaaa

SEQ ID NO: 2456137 - RNA, 19 nt, Homo sapiens
  misc_RNA (1)...(19): siRNA sense strand
gcuugaaaggcuuagggaa

SEQ ID NO: 2456138 - RNA, 19 nt, Homo sapiens
  misc_RNA (1)...(19): siRNA sense strand
cuugaaaggcuuagggaag

SEQ ID NO: 2456139 - RNA, 19 nt, Homo sapiens
  misc_RNA (1)...(19): siRNA sense strand
ccgaagaaggcguaagcca

SEQ ID NO: 2456140 - RNA, 19 nt, Homo sapiens
  misc_RNA (1)...(19): siRNA sense strand
gcguaagccaggaagcaga

SEQ ID NO: 2456141 - RNA, 19 nt, Homo sapiens
  misc_RNA (1)...(19): siRNA sense strand
ggacacacccguuaggcau

SEQ ID NO: 2456142 - RNA, 19 nt, Homo sapiens
  misc_RNA (1)...(19): siRNA sense strand
ugauaagaggaguagauga

SEQ ID NO: 2456143 - RNA, 19 nt, Homo sapiens
  misc_RNA (1)...(19): siRNA sense strand
agggaaaaccacagaacau

SEQ ID NO: 2456144 - RNA, 19 nt, Homo sapiens
  misc_RNA (1)...(19): siRNA sense strand
aaggcuuagggaagagaua

SEQ ID NO: 2456145 - RNA, 19 nt, Homo sapiens
  misc_RNA (1)...(19): siRNA sense strand
gaagaaaugauaagaggag

SEQ ID NO: 2456146 - RNA, 19 nt, Homo sapiens
  misc_RNA (1)...(19): siRNA sense strand
aagaggaguagaugagcuu

SEQ ID NO: 2456147 - RNA, 19 nt, Homo sapiens
  misc_RNA (1)...(19): siRNA sense strand
ccguaauacaguaggacaa

SEQ ID NO: 2456148 - RNA, 19 nt, Homo sapiens
  misc_RNA (1)...(19): siRNA sense strand
cggagaagugcgacaacaa

SEQ ID NO: 2456149 - RNA, 19 nt, Homo sapiens
  misc_RNA (1)...(19): siRNA sense strand
aaauucagacugugagaaa

SEQ ID NO: 2456150 - RNA, 19 nt, Homo sapiens
  misc_RNA (1)...(19): siRNA sense strand
gcaagaugcccgaggaacu

SEQ ID NO: 2456151 - RNA, 19 nt, Homo sapiens
  misc_RNA (1)...(19): siRNA sense strand
ggagaaaaccagaauacaa

SEQ ID NO: 2456152 - RNA, 19 nt, Homo sapiens
  misc_RNA (1)...(19): siRNA sense strand
guucauaaggaaauggauu

SEQ ID NO: 2456153 - RNA, 19 nt, Homo sapiens
  misc_RNA (1)...(19): siRNA sense strand
ccuguaagcauauggagaa

SEQ ID NO: 2456154 - RNA, 19 nt, Homo sapiens
  misc_RNA (1)...(19): siRNA sense strand
ccuuaaaagagaagcggaa

SEQ ID NO: 2456155 - RNA, 19 nt, Homo sapiens
  misc_RNA (1)...(19): siRNA sense strand
ggguguauugggugggcua

SEQ ID NO: 2456156 - RNA, 19 nt, Homo sapiens
  misc_RNA (1)...(19): siRNA sense strand
acuuaacugccgaaggaaa

SEQ ID NO: 2456157 - RNA, 19 nt, Homo sapiens
  misc_RNA (1)...(19): siRNA sense strand
aguaaguggacgagaaaau

SEQ ID NO: 2456158 - RNA, 19 nt, Homo sapiens
  misc_RNA (1)...(19): siRNA sense strand
ucacauaugaaauggauca

SEQ ID NO: 2456159 - RNA, 19 nt, Homo sapiens
  misc_RNA (1)...(19): siRNA sense strand
gggagcgaccuaaaggaaa

SEQ ID NO: 2456160 - RNA, 19 nt, Homo sapiens
  misc_RNA (1)...(19): siRNA sense strand
ccuugaauauacugaugaa

SEQ ID NO: 2456161 - RNA, 19 nt, Homo sapiens
  misc_RNA (1)...(19): siRNA sense strand
uuaaaagagaagcggaaaa

SEQ ID NO: 2456162 - RNA, 19 nt, Homo sapiens
  misc_RNA (1)...(19): siRNA sense strand
ccuuacauaucuacaacaa

SEQ ID NO: 2456163 - RNA, 19 nt, Homo sapiens
  misc_RNA (1)...(19): siRNA sense strand
gaccauguucauaaggaaa

SEQ ID NO: 2456164 - RNA, 19 nt, Homo sapiens
  misc_RNA (1)...(19): siRNA sense strand
uugugaaauucuuggugua

SEQ ID NO: 2456165 - RNA, 19 nt, Homo sapiens
  misc_RNA (1)...(19): siRNA sense strand
cuucagaaugguuugcaaa

SEQ ID NO: 2456166 - RNA, 19 nt, Homo sapiens
  misc_RNA (1)...(19): siRNA sense strand
gcuuauucauuuggaacaa

SEQ ID NO: 2456167 - RNA, 19 nt, Homo sapiens
  misc_RNA (1)...(19): siRNA sense strand
ugcaguaaguggacgagaa

SEQ ID NO: 2456168 - RNA, 19 nt, Homo sapiens
  misc_RNA (1)...(19): siRNA sense strand
ucauggaaccaauggaaaa

SEQ ID NO: 2456169 - RNA, 19 nt, Homo sapiens
  misc_RNA (1)...(19): siRNA sense strand
cguaauacaguaggacaaa

SEQ ID NO: 2456170 - RNA, 19 nt, Homo sapiens
  misc_RNA (1)...(19): siRNA sense strand
ggauuauguuucagcagca

SEQ ID NO: 2456171 - RNA, 19 nt, Homo sapiens
  misc_RNA (1)...(19): siRNA sense strand
ugagacacuaauaaggaaa

SEQ ID NO: 2456172 - RNA, 19 nt, Homo sapiens
  misc_RNA (1)...(19): siRNA sense strand
ugaccauguucauaaggaa

SEQ ID NO: 2456173 - RNA, 19 nt, Homo sapiens
  misc_RNA (1)...(19): siRNA sense strand
ccucaagugcucaguucua

SEQ ID NO: 2456174 - RNA, 19 nt, Homo sapiens
  misc_RNA (1)...(19): siRNA sense strand
agauauugcuuugggugua

SEQ ID NO: 2456175 - RNA, 19 nt, Homo sapiens
  misc_RNA (1)...(19): siRNA sense strand
cuaaaggaaagguucuuaa

SEQ ID NO: 2456176 - RNA, 19 nt, Homo sapiens
  misc_RNA (1)...(19): siRNA sense strand
gacacagagacaaggcuaa

SEQ ID NO: 2456177 - RNA, 19 nt, Homo sapiens
  misc_RNA (1)...(19): siRNA sense strand
uggcugugccuguguuaaa

SEQ ID NO: 2456178 - RNA, 19 nt, Homo sapiens
  misc_RNA (1)...(19): siRNA sense strand
gaaaauuuguguagccaga

SEQ ID NO: 2456179 - RNA, 19 nt, Homo sapiens
  misc_RNA (1)...(19): siRNA sense strand
acacagagacaaggcuaaa

SEQ ID NO: 2456180 - RNA, 19 nt, Homo sapiens
  misc_RNA (1)...(19): siRNA sense strand
ggaucauggagaagcacau

SEQ ID NO: 2456181 - RNA, 19 nt, Homo sapiens
  misc_RNA (1)...(19): siRNA sense strand
cuuaacugccgaaggaaaa

SEQ ID NO: 2456182 - RNA, 19 nt, Homo sapiens
  misc_RNA (1)...(19): siRNA sense strand
agacacagagacaaggcua

SEQ ID NO: 2456183 - RNA, 19 nt, Homo sapiens
  misc_RNA (1)...(19): siRNA sense strand
uuuacagacaguugugaaa

SEQ ID NO: 2456184 - RNA, 19 nt, Homo sapiens
  misc_RNA (1)...(19): siRNA sense strand
cauucaugguagaucagua

SEQ ID NO: 2456185 - RNA, 19 nt, Homo sapiens
  misc_RNA (1)...(19): siRNA sense strand
auuugaugcauguggacua

SEQ ID NO: 2456186 - RNA, 19 nt, Homo sapiens
  misc_RNA (1)...(19): siRNA sense strand
agauaaaauucgacaguuc

SEQ ID NO: 2456187 - RNA, 19 nt, Homo sapiens
  misc_RNA (1)...(19): siRNA sense strand
uuguguagccagagagguu

SEQ ID NO: 2456188 - RNA, 19 nt, Homo sapiens
  misc_RNA (1)...(19): siRNA sense strand
uggaauucauggaaccaau

SEQ ID NO: 2456189 - RNA, 19 nt, Homo sapiens
  misc_RNA (1)...(19): siRNA sense strand
agauauuugugaaccaaga

SEQ ID NO: 2456190 - RNA, 19 nt, Homo sapiens
  misc_RNA (1)...(19): siRNA sense strand
aaagagaagcggaaaauuu

SEQ ID NO: 2456191 - RNA, 19 nt, Homo sapiens
  misc_RNA (1)...(19): siRNA sense strand
gauucaagaacuuagcauu

SEQ ID NO: 2456192 - RNA, 19 nt, Homo sapiens
  misc_RNA (1)...(19): siRNA sense strand
ccagaugagacaacauuau

SEQ ID NO: 2456193 - RNA, 19 nt, Homo sapiens
  misc_RNA (1)...(19): siRNA sense strand
ggagcuaaccagaggcaag

SEQ ID NO: 2456194 - RNA, 19 nt, Homo sapiens
  misc_RNA (1)...(19): siRNA sense strand
ccuaugauauaagaggaaa

SEQ ID NO: 2456195 - RNA, 19 nt, Homo sapiens
  misc_RNA (1)...(19): siRNA sense strand
agaaaaugacuuaggaacu

SEQ ID NO: 2456196 - RNA, 19 nt, Homo sapiens
  misc_RNA (1)...(19): siRNA sense strand
caguaggacaaaagaauuu

SEQ ID NO: 2456197 - RNA, 19 nt, Homo sapiens
  misc_RNA (1)...(19): siRNA sense strand
guguaugucuaccaggauu

SEQ ID NO: 2456198 - RNA, 19 nt, Homo sapiens
  misc_RNA (1)...(19): siRNA sense strand
ggaugcaguaaguggacga

SEQ ID NO: 2456199 - RNA, 19 nt, Homo sapiens
  misc_RNA (1)...(19): siRNA sense strand
gaagaggcgcauugggagu

SEQ ID NO: 2456200 - RNA, 19 nt, Homo sapiens
  misc_RNA (1)...(19): siRNA sense strand
cagaaaacaugaaaggugu

SEQ ID NO: 2456201 - RNA, 19 nt, Homo sapiens
  misc_RNA (1)...(19): siRNA sense strand
gaagauggcuggaacugca

SEQ ID NO: 2456202 - RNA, 19 nt, Homo sapiens
  misc_RNA (1)...(19): siRNA sense strand
aggugagggugguguacga

SEQ ID NO: 2456203 - RNA, 19 nt, Homo sapiens
  misc_RNA (1)...(19): siRNA sense strand
uuuuggagguugugggauu

SEQ ID NO: 2456204 - RNA, 19 nt, Homo sapiens
  misc_RNA (1)...(19): siRNA sense strand
uggucagacuuuugagauu

SEQ ID NO: 2456205 - RNA, 19 nt, Homo sapiens
  misc_RNA (1)...(19): siRNA sense strand
gcgacaacaaccaguacuu

SEQ ID NO: 2456206 - RNA, 19 nt, Homo sapiens
  misc_RNA (1)...(19): siRNA sense strand
uguagcaaaugaauggaau

SEQ ID NO: 2456207 - RNA, 19 nt, Homo sapiens
  misc_RNA (1)...(19): siRNA sense strand
gagcagaguauaaaagcau

SEQ ID NO: 2456208 - RNA, 19 nt, Homo sapiens
  misc_RNA (1)...(19): siRNA sense strand
aagagacauuaauggaaca

SEQ ID NO: 2456209 - RNA, 19 nt, Homo sapiens
  misc_RNA (1)...(19): siRNA sense strand
acguagaauuucagcugca

SEQ ID NO: 2456210 - RNA, 19 nt, Homo sapiens
  misc_RNA (1)...(19): siRNA sense strand
ggaaauauucauugggcuu

SEQ ID NO: 2456211 - RNA, 19 nt, Homo sapiens
  misc_RNA (1)...(19): siRNA sense strand
uguugaaguaccuggaaua

SEQ ID NO: 2456212 - RNA, 19 nt, Homo sapiens
  misc_RNA (1)...(19): siRNA sense strand
ccugaugcgaagaaagcua

SEQ ID NO: 2456213 - RNA, 19 nt, Homo sapiens
  misc_RNA (1)...(19): siRNA sense strand
aggacaauauggaacaaaa

SEQ ID NO: 2456214 - RNA, 19 nt, Homo sapiens
  misc_RNA (1)...(19): siRNA sense strand
ggacugaagccauguggga

SEQ ID NO: 2456215 - RNA, 19 nt, Homo sapiens
  misc_RNA (1)...(19): siRNA sense strand
augcgaagaaagcuagaaa

SEQ ID NO: 2456216 - RNA, 19 nt, Homo sapiens
  misc_RNA (1)...(19): siRNA sense strand
ugaaggaagcaaaagguaa

SEQ ID NO: 2456217 - RNA, 19 nt, Homo sapiens
  misc_RNA (1)...(19): siRNA sense strand
gagaagaggccauugagca

SEQ ID NO: 2456218 - RNA, 19 nt, Homo sapiens
  misc_RNA (1)...(19): siRNA sense strand
ggaggaucauucuaggcaa

SEQ ID NO: 2456219 - RNA, 19 nt, Homo sapiens
  misc_RNA (1)...(19): siRNA sense strand
caaagauggguaagagcga

SEQ ID NO: 2456220 - RNA, 19 nt, Homo sapiens
  misc_RNA (1)...(19): siRNA sense strand
agcaaaagguaaucaggaa

SEQ ID NO: 2456221 - RNA, 19 nt, Homo sapiens
  misc_RNA (1)...(19): siRNA sense strand
guaugagauaugaagucua

SEQ ID NO: 2456222 - RNA, 19 nt, Homo sapiens
  misc_RNA (1)...(19): siRNA sense strand
uuuaagcaaagauggguaa

SEQ ID NO: 2456223 - RNA, 19 nt, Homo sapiens
  misc_RNA (1)...(19): siRNA sense strand
cuguugaaguaccuggaau

SEQ ID NO: 2456224 - RNA, 19 nt, Homo sapiens
  misc_RNA (1)...(19): siRNA sense strand
caacaggacugaagccaug

SEQ ID NO: 2456225 - RNA, 19 nt, Homo sapiens
  misc_RNA (1)...(19): siRNA sense strand
gcgaagaaagcuagaaaag

SEQ ID NO: 2456226 - RNA, 19 nt, Homo sapiens
  misc_RNA (1)...(19): siRNA sense strand
acaaaaggacacagacaga

SEQ ID NO: 2456227 - RNA, 19 nt, Homo sapiens
  misc_RNA (1)...(19): siRNA sense strand
ucuugauggcugucauuaa

SEQ ID NO: 2456228 - RNA, 19 nt, Homo sapiens
  misc_RNA (1)...(19): siRNA sense strand
cugaggacaauauggaaca

SEQ ID NO: 2456229 - RNA, 19 nt, Homo sapiens
  misc_RNA (1)...(19): siRNA sense strand
ggucagaggaagaugggaa

SEQ ID NO: 2456230 - RNA, 19 nt, Homo sapiens
  misc_RNA (1)...(19): siRNA sense strand
cuauguauuugaagggaaa

SEQ ID NO: 2456231 - RNA, 19 nt, Homo sapiens
  misc_RNA (1)...(19): siRNA sense strand
ugucagugaugcugggaaa

SEQ ID NO: 2456232 - RNA, 19 nt, Homo sapiens
  misc_RNA (1)...(19): siRNA sense strand
gggaaagaaaggacagauu

SEQ ID NO: 2456233 - RNA, 19 nt, Homo sapiens
  misc_RNA (1)...(19): siRNA sense strand
gggcugagcaacauggaaa

SEQ ID NO: 2456234 - RNA, 19 nt, Homo sapiens
  misc_RNA (1)...(19): siRNA sense strand
gaggaagaugggaaagaaa

SEQ ID NO: 2456235 - RNA, 19 nt, Homo sapiens
  misc_RNA (1)...(19): siRNA sense strand
gggaaauacacaugugaga

SEQ ID NO: 2456236 - RNA, 19 nt, Homo sapiens
  misc_RNA (1)...(19): siRNA sense strand
aagaaauggaguaacgaaa

SEQ ID NO: 2456237 - RNA, 19 nt, Homo sapiens
  misc_RNA (1)...(19): siRNA sense strand
gggaaauaucaguguguca

SEQ ID NO: 2456238 - RNA, 19 nt, Homo sapiens
  misc_RNA (1)...(19): siRNA sense strand
gagaagugaaacugaacaa

SEQ ID NO: 2456239 - RNA, 19 nt, Homo sapiens
  misc_RNA (1)...(19): siRNA sense strand
ccagaaacacagucggcaa

SEQ ID NO: 2456240 - RNA, 19 nt, Homo sapiens
  misc_RNA (1)...(19): siRNA sense strand
ggguacgugucuucagaaa

SEQ ID NO: 2456241 - RNA, 19 nt, Homo sapiens
  misc_RNA (1)...(19): siRNA sense strand
gcuaaaaggaagaagcauu

SEQ ID NO: 2456242 - RNA, 19 nt, Homo sapiens
  misc_RNA (1)...(19): siRNA sense strand
aguaauauaucguggccuu

SEQ ID NO: 2456243 - RNA, 19 nt, Homo sapiens
  misc_RNA (1)...(19): siRNA sense strand
augcaaagaaauggaguaa

SEQ ID NO: 2456244 - RNA, 19 nt, Homo sapiens
  misc_RNA (1)...(19): siRNA sense strand
cuuuggaucugaagaacaa

SEQ ID NO: 2456245 - RNA, 19 nt, Homo sapiens
  misc_RNA (1)...(19): siRNA sense strand
ccuauguauuugaagggaa

SEQ ID NO: 2456246 - RNA, 19 nt, Homo sapiens
  misc_RNA (1)...(19): siRNA sense strand
gacugauacuccaaggaaa

SEQ ID NO: 2456247 - RNA, 19 nt, Homo sapiens
  misc_RNA (1)...(19): siRNA sense strand
ugaaauacucccugaacau

SEQ ID NO: 2456248 - RNA, 19 nt, Homo sapiens
  misc_RNA (1)...(19): siRNA sense strand
ggaacaacagagucagcua

SEQ ID NO: 2456249 - RNA, 19 nt, Homo sapiens
  misc_RNA (1)...(19): siRNA sense strand
gaacuguaaccaagggaga

SEQ ID NO: 2456250 - RNA, 19 nt, Homo sapiens
  misc_RNA (1)...(19): siRNA sense strand
gcaggaaguauuucagcaa

SEQ ID NO: 2456251 - RNA, 19 nt, Homo sapiens
  misc_RNA (1)...(19): siRNA sense strand
acugauacuccaaggaaau

SEQ ID NO: 2456252 - RNA, 19 nt, Homo sapiens
  misc_RNA (1)...(19): siRNA sense strand
caucuagaccugagugaca

SEQ ID NO: 2456253 - RNA, 19 nt, Homo sapiens
  misc_RNA (1)...(19): siRNA sense strand
caacaauauuucagagcuc

SEQ ID NO: 2456254 - RNA, 19 nt, Homo sapiens
  misc_RNA (1)...(19): siRNA sense strand
ccaacacagaugagaccaa

SEQ ID NO: 2456255 - RNA, 19 nt, Homo sapiens
  misc_RNA (1)...(19): siRNA sense strand
gggaaauguguauggcuca

SEQ ID NO: 2456256 - RNA, 19 nt, Homo sapiens
  misc_RNA (1)...(19): siRNA sense strand
agacuuuggaucugaagaa

SEQ ID NO: 2456257 - RNA, 19 nt, Homo sapiens
  misc_RNA (1)...(19): siRNA sense strand
ccuucaaagccuucgagaa

SEQ ID NO: 2456258 - RNA, 19 nt, Homo sapiens
  misc_RNA (1)...(19): siRNA sense strand
gcucugaagucucugaaaa

SEQ ID NO: 2456259 - RNA, 19 nt, Homo sapiens
  misc_RNA (1)...(19): siRNA sense strand
caacaugacaguaguggga

SEQ ID NO: 2456260 - RNA, 19 nt, Homo sapiens
  misc_RNA (1)...(19): siRNA sense strand
gcccaguuacauaaagaaa

SEQ ID NO: 2456261 - RNA, 19 nt, Homo sapiens
  misc_RNA (1)...(19): siRNA sense strand
aguaauucuuucaugggua

SEQ ID NO: 2456262 - RNA, 19 nt, Homo sapiens
  misc_RNA (1)...(19): siRNA sense strand
gucagaggaagaugggaaa

SEQ ID NO: 2456263 - RNA, 19 nt, Homo sapiens
  misc_RNA (1)...(19): siRNA sense strand
gugcauugcuggaggaagc

SEQ ID NO: 2456264 - RNA, 19 nt, Homo sapiens
  misc_RNA (1)...(19): siRNA sense strand
ggacuauugaagacaugaa

SEQ ID NO: 2456265 - RNA, 19 nt, Homo sapiens
  misc_RNA (1)...(19): siRNA sense strand
cgucgguugccucgaguaa

SEQ ID NO: 2456266 - RNA, 19 nt, Homo sapiens
  misc_RNA (1)...(19): siRNA sense strand
cagaaacacagucggcaau

SEQ ID NO: 2456267 - RNA, 19 nt, Homo sapiens
  misc_RNA (1)...(19): siRNA sense strand
augugaugcccgaggauga

SEQ ID NO: 2456268 - RNA, 19 nt, Homo sapiens
  misc_RNA (1)...(19): siRNA sense strand
gcucagaacagugcaggaa

SEQ ID NO: 2456269 - RNA, 19 nt, Homo sapiens
  misc_RNA (1)...(19): siRNA sense strand
aaugcaaagaaauggagua

SEQ ID NO: 2456270 - RNA, 19 nt, Homo sapiens
  misc_RNA (1)...(19): siRNA sense strand
uaacaaccuaacagagauu

SEQ ID NO: 2456271 - RNA, 19 nt, Homo sapiens
  misc_RNA (1)...(19): siRNA sense strand
cugacaggcaggaugggua

SEQ ID NO: 2456272 - RNA, 19 nt, Homo sapiens
  misc_RNA (1)...(19): siRNA sense strand
ugacaauagcagugaagcu

SEQ ID NO: 2456273 - RNA, 19 nt, Homo sapiens
  misc_RNA (1)...(19): siRNA sense strand
cagaggaagaugggaaaga

SEQ ID NO: 2456274 - RNA, 19 nt, Homo sapiens
  misc_RNA (1)...(19): siRNA sense strand
ucguggaugugaagauaga

SEQ ID NO: 2456275 - RNA, 19 nt, Homo sapiens
  misc_RNA (1)...(19): siRNA sense strand
caaugaaggaccuggaaug

SEQ ID NO: 2456276 - RNA, 19 nt, Homo sapiens
  misc_RNA (1)...(19): siRNA sense strand
aaaugaagaaacugcaaca

SEQ ID NO: 2456277 - RNA, 19 nt, Homo sapiens
  misc_RNA (1)...(19): siRNA sense strand
cuaaaaggaagaagcauuu

SEQ ID NO: 2456278 - RNA, 19 nt, Homo sapiens
  misc_RNA (1)...(19): siRNA sense strand
acuguaaccaagggagaaa

SEQ ID NO: 2456279 - RNA, 19 nt, Homo sapiens
  misc_RNA (1)...(19): siRNA sense strand
ccuaacagagauuaccaaa

SEQ ID NO: 2456280 - RNA, 19 nt, Homo sapiens
  misc_RNA (1)...(19): siRNA sense strand
gauagaggacauuggggua

SEQ ID NO: 2456281 - RNA, 19 nt, Homo sapiens
  misc_RNA (1)...(19): siRNA sense strand
aaagaaauggaguaacgaa

SEQ ID NO: 2456282 - RNA, 19 nt, Homo sapiens
  misc_RNA (1)...(19): siRNA sense strand
gguuagaugauucaagcuu

SEQ ID NO: 2456283 - RNA, 19 nt, Homo sapiens
  misc_RNA (1)...(19): siRNA sense strand
augaagaaacugcaacaau

SEQ ID NO: 2456284 - RNA, 19 nt, Homo sapiens
  misc_RNA (1)...(19): siRNA sense strand
acuuaagucacaacagauu

SEQ ID NO: 2456285 - RNA, 19 nt, Homo sapiens
  misc_RNA (1)...(19): siRNA sense strand
ucagaacagugcaggaagu

SEQ ID NO: 2456286 - RNA, 19 nt, Homo sapiens
  misc_RNA (1)...(19): siRNA sense strand
aguagugggaccugccaua

SEQ ID NO: 2456287 - RNA, 19 nt, Homo sapiens
  misc_RNA (1)...(19): siRNA sense strand
agacuuggacucuggguca

SEQ ID NO: 2456288 - RNA, 19 nt, Homo sapiens
  misc_RNA (1)...(19): siRNA sense strand
cuucagcaguacuggcaga

SEQ ID NO: 2456289 - RNA, 19 nt, Homo sapiens
  misc_RNA (1)...(19): siRNA sense strand
cuucagcaguacuggcaga

SEQ ID NO: 2456290 - RNA, 19 nt, Homo sapiens
  misc_RNA (1)...(19): siRNA sense strand
aggcaaaaucagacagaau

SEQ ID NO: 2456291 - RNA, 19 nt, Homo sapiens
  misc_RNA (1)...(19): siRNA sense strand
gugccgacaccaagaggaa

SEQ ID NO: 2456292 - RNA, 19 nt, Homo sapiens
  misc_RNA (1)...(19): siRNA sense strand
gauuguuguggaugagaau

SEQ ID NO: 2456293 - RNA, 19 nt, Homo sapiens
  misc_RNA (1)...(19): siRNA sense strand
gccgacaccaagaggaauu

SEQ ID NO: 2456294 - RNA, 19 nt, Homo sapiens
  misc_RNA (1)...(19): siRNA sense strand
agucacguuuccuggguau

SEQ ID NO: 2456295 - RNA, 19 nt, Homo sapiens
  misc_RNA (1)...(19): siRNA sense strand
ucuaucaccacaaggcaaa

SEQ ID NO: 2456296 - RNA, 19 nt, Homo sapiens
  misc_RNA (1)...(19): siRNA sense strand
guguaaagaauguggcaaa

SEQ ID NO: 2456297 - RNA, 19 nt, Homo sapiens
  misc_RNA (1)...(19): siRNA sense strand
auguaaagaaugugggaaa

SEQ ID NO: 2456298 - RNA, 19 nt, Homo sapiens
  misc_RNA (1)...(19): siRNA sense strand
aauucauaguggagagaaa

SEQ ID NO: 2456299 - RNA, 19 nt, Homo sapiens
  misc_RNA (1)...(19): siRNA sense strand
auguaaagaauguggcaaa

SEQ ID NO: 2456300 - RNA, 19 nt, Homo sapiens
  misc_RNA (1)...(19): siRNA sense strand
ggaaggagguuuugggaga

SEQ ID NO: 2456301 - RNA, 19 nt, Homo sapiens
  misc_RNA (1)...(19): siRNA sense strand
augcaaugaaugugggaau

SEQ ID NO: 2456302 - RNA, 19 nt, Homo sapiens
  misc_RNA (1)...(19): siRNA sense strand
agacauuagaagagagacu

SEQ ID NO: 2456303 - RNA, 19 nt, Homo sapiens
  misc_RNA (1)...(19): siRNA sense strand
caaugauauuucagaccaa

SEQ ID NO: 2456304 - RNA, 19 nt, Homo sapiens
  misc_RNA (1)...(19): siRNA sense strand
auguagugagugugagaaa

SEQ ID NO: 2456305 - RNA, 19 nt, Homo sapiens
  misc_RNA (1)...(19): siRNA sense strand
ugugagggcaugaaggaaa

SEQ ID NO: 2456306 - RNA, 19 nt, Homo sapiens
  misc_RNA (1)...(19): siRNA sense strand
augcagugaaugugguaaa

SEQ ID NO: 2456307 - RNA, 19 nt, Homo sapiens
  misc_RNA (1)...(19): siRNA sense strand
augugaggaaugugggaaa

SEQ ID NO: 2456308 - RNA, 19 nt, Homo sapiens
  misc_RNA (1)...(19): siRNA sense strand
gguuccaagaggaugaaua

SEQ ID NO: 2456309 - RNA, 19 nt, Homo sapiens
  misc_RNA (1)...(19): siRNA sense strand
gagaagucacacuggagaa

SEQ ID NO: 2456310 - RNA, 19 nt, Homo sapiens
  misc_RNA (1)...(19): siRNA sense strand
gaauaugcaaggagcugaa

SEQ ID NO: 2456311 - RNA, 19 nt, Homo sapiens
  misc_RNA (1)...(19): siRNA sense strand
ccuuacauaugcagugaau

SEQ ID NO: 2456312 - RNA, 19 nt, Homo sapiens
  misc_RNA (1)...(19): siRNA sense strand
uuauuaaacaccagcgaau

SEQ ID NO: 2456313 - RNA, 19 nt, Homo sapiens
  misc_RNA (1)...(19): siRNA sense strand
agucugcaucagugggaaa

SEQ ID NO: 2456314 - RNA, 19 nt, Homo sapiens
  misc_RNA (1)...(19): siRNA sense strand
ggagcugaagagagagaca

SEQ ID NO: 2456315 - RNA, 19 nt, Homo sapiens
  misc_RNA (1)...(19): siRNA sense strand
cagugggaaacaaguaaua

SEQ ID NO: 2456316 - RNA, 19 nt, Homo sapiens
  misc_RNA (1)...(19): siRNA sense strand
gugagggcaugaaggaaaa

SEQ ID NO: 2456317 - RNA, 19 nt, Homo sapiens
  misc_RNA (1)...(19): siRNA sense strand
gaccaaaguaaauguccaa

SEQ ID NO: 2456318 - RNA, 19 nt, Homo sapiens
  misc_RNA (1)...(19): siRNA sense strand
agaauguggcaaagcguuu

SEQ ID NO: 2456319 - RNA, 19 nt, Homo sapiens
  misc_RNA (1)...(19): siRNA sense strand
ccuuauucaucaucagaga

SEQ ID NO: 2456320 - RNA, 19 nt, Homo sapiens
  misc_RNA (1)...(19): siRNA sense strand
aacucauacuggagagaga

SEQ ID NO: 2456321 - RNA, 19 nt, Homo sapiens
  misc_RNA (1)...(19): siRNA sense strand
augugacgaaugugggaaa

SEQ ID NO: 2456322 - RNA, 19 nt, Homo sapiens
  misc_RNA (1)...(19): siRNA sense strand
cccuacaaaugcagugaau

SEQ ID NO: 2456323 - RNA, 19 nt, Homo sapiens
  misc_RNA (1)...(19): siRNA sense strand
gcuggguaaacaagaacaa

SEQ ID NO: 2456324 - RNA, 19 nt, Homo sapiens
  misc_RNA (1)...(19): siRNA sense strand
cgaauucauacuggagaaa

SEQ ID NO: 2456325 - RNA, 19 nt, Homo sapiens
  misc_RNA (1)...(19): siRNA sense strand
cucuauaaauguagugagu

SEQ ID NO: 2456326 - RNA, 19 nt, Homo sapiens
  misc_RNA (1)...(19): siRNA sense strand
caucagugggaaacaagua

SEQ ID NO: 2456327 - RNA, 19 nt, Homo sapiens
  misc_RNA (1)...(19): siRNA sense strand
augugagcagugugggaaa

SEQ ID NO: 2456328 - RNA, 19 nt, Homo sapiens
  misc_RNA (1)...(19): siRNA sense strand
aaauguagugagugugaga

SEQ ID NO: 2456329 - RNA, 19 nt, Homo sapiens
  misc_RNA (1)...(19): siRNA sense strand
gaguguauugaguguggaa

SEQ ID NO: 2456330 - RNA, 19 nt, Homo sapiens
  misc_RNA (1)...(19): siRNA sense strand
cccugaaauuauuagucaa

SEQ ID NO: 2456331 - RNA, 19 nt, Homo sapiens
  misc_RNA (1)...(19): siRNA sense strand
ggaugugagcaguguggga

SEQ ID NO: 2456332 - RNA, 19 nt, Homo sapiens
  misc_RNA (1)...(19): siRNA sense strand
gagaauucacacuggggaa

SEQ ID NO: 2456333 - RNA, 19 nt, Homo sapiens
  misc_RNA (1)...(19): siRNA sense strand
aauucauacuggagagaag

SEQ ID NO: 2456334 - RNA, 19 nt, Homo sapiens
  misc_RNA (1)...(19): siRNA sense strand
ccuuaugaguguauugagu

SEQ ID NO: 2456335 - RNA, 19 nt, Homo sapiens
  misc_RNA (1)...(19): siRNA sense strand
agaccaaaguaaaugucca

SEQ ID NO: 2456336 - RNA, 19 nt, Homo sapiens
  misc_RNA (1)...(19): siRNA sense strand
agagacauuagaagagaga

SEQ ID NO: 2456337 - RNA, 19 nt, Homo sapiens
  misc_RNA (1)...(19): siRNA sense strand
gagcaggaugucuguaaaa

SEQ ID NO: 2456338 - RNA, 19 nt, Homo sapiens
  misc_RNA (1)...(19): siRNA sense strand
acacucaaaucuuacgcaa

SEQ ID NO: 2456339 - RNA, 19 nt, Homo sapiens
  misc_RNA (1)...(19): siRNA sense strand
uuacgcaacaucagagaau

SEQ ID NO: 2456340 - RNA, 19 nt, Homo sapiens
  misc_RNA (1)...(19): siRNA sense strand
gagaauucauaguggagag

SEQ ID NO: 2456341 - RNA, 19 nt, Homo sapiens
  misc_RNA (1)...(19): siRNA sense strand
agugaaaccauauggaugu

SEQ ID NO: 2456342 - RNA, 19 nt, Homo sapiens
  misc_RNA (1)...(19): siRNA sense strand
gagugaaaccauauggaug

SEQ ID NO: 2456343 - RNA, 19 nt, Homo sapiens
  misc_RNA (1)...(19): siRNA sense strand
caggcuggguaaacaagaa

SEQ ID NO: 2456344 - RNA, 19 nt, Homo sapiens
  misc_RNA (1)...(19): siRNA sense strand
agaagucacacuggagaaa

SEQ ID NO: 2456345 - RNA, 19 nt, Homo sapiens
  misc_RNA (1)...(19): siRNA sense strand
gugaaaagacagugagaca

SEQ ID NO: 2456346 - RNA, 19 nt, Homo sapiens
  misc_RNA (1)...(19): siRNA sense strand
caguagagcauaaggagau

SEQ ID NO: 2456347 - RNA, 19 nt, Homo sapiens
  misc_RNA (1)...(19): siRNA sense strand
acacuaugucugagaguau

SEQ ID NO: 2456348 - RNA, 19 nt, Homo sapiens
  misc_RNA (1)...(19): siRNA sense strand
gagggaauucagaggaaau

SEQ ID NO: 2456349 - RNA, 19 nt, Homo sapiens
  misc_RNA (1)...(19): siRNA sense strand
ggauggaagcacauaacaa

SEQ ID NO: 2456350 - RNA, 19 nt, Homo sapiens
  misc_RNA (1)...(19): siRNA sense strand
aagagaugaccauggaaua

SEQ ID NO: 2456351 - RNA, 19 nt, Homo sapiens
  misc_RNA (1)...(19): siRNA sense strand
cugaagagaagcuaugaaa

SEQ ID NO: 2456352 - RNA, 19 nt, Homo sapiens
  misc_RNA (1)...(19): siRNA sense strand
aggagaaguuacaagaaaa

SEQ ID NO: 2456353 - RNA, 19 nt, Homo sapiens
  misc_RNA (1)...(19): siRNA sense strand
aggcuuuguuagaaggaau

SEQ ID NO: 2456354 - RNA, 19 nt, Homo sapiens
  misc_RNA (1)...(19): siRNA sense strand
ucugaaauugagagguuaa

SEQ ID NO: 2456355 - RNA, 19 nt, Homo sapiens
  misc_RNA (1)...(19): siRNA sense strand
ggagaauuauauugaggca

SEQ ID NO: 2456356 - RNA, 19 nt, Homo sapiens
  misc_RNA (1)...(19): siRNA sense strand
agaggaauuccgucagaaa

SEQ ID NO: 2456357 - RNA, 19 nt, Homo sapiens
  misc_RNA (1)...(19): siRNA sense strand
agauacaaaugaagccaau

SEQ ID NO: 2456358 - RNA, 19 nt, Homo sapiens
  misc_RNA (1)...(19): siRNA sense strand
gaguuacaucagcgagaua

SEQ ID NO: 2456359 - RNA, 19 nt, Homo sapiens
  misc_RNA (1)...(19): siRNA sense strand
uguagaagcuauaaggcca

SEQ ID NO: 2456360 - RNA, 19 nt, Homo sapiens
  misc_RNA (1)...(19): siRNA sense strand
ugucaaucggaaacagaaa

SEQ ID NO: 2456361 - RNA, 19 nt, Homo sapiens
  misc_RNA (1)...(19): siRNA sense strand
ccaacacacagcagaacaa

SEQ ID NO: 2456362 - RNA, 19 nt, Homo sapiens
  misc_RNA (1)...(19): siRNA sense strand
cuacaggagcagcagcaaa

SEQ ID NO: 2456363 - RNA, 19 nt, Homo sapiens
  misc_RNA (1)...(19): siRNA sense strand
caggaagaaaagagagaau

SEQ ID NO: 2456364 - RNA, 19 nt, Homo sapiens
  misc_RNA (1)...(19): siRNA sense strand
agggaagaucggucugaaa

SEQ ID NO: 2456365 - RNA, 19 nt, Homo sapiens
  misc_RNA (1)...(19): siRNA sense strand
agccaagaacuaauggaaa

SEQ ID NO: 2456366 - RNA, 19 nt, Homo sapiens
  misc_RNA (1)...(19): siRNA sense strand
agguagaagaacaugaaaa

SEQ ID NO: 2456367 - RNA, 19 nt, Homo sapiens
  misc_RNA (1)...(19): siRNA sense strand
gcaguagagcauaaggaga

SEQ ID NO: 2456368 - RNA, 19 nt, Homo sapiens
  misc_RNA (1)...(19): siRNA sense strand
cuagaaacuugcuugaaaa

SEQ ID NO: 2456369 - RNA, 19 nt, Homo sapiens
  misc_RNA (1)...(19): siRNA sense strand
caagagaugaccauggaau

SEQ ID NO: 2456370 - RNA, 19 nt, Homo sapiens
  misc_RNA (1)...(19): siRNA sense strand
cgucagaaaucgcuggacu

SEQ ID NO: 2456371 - RNA, 19 nt, Homo sapiens
  misc_RNA (1)...(19): siRNA sense strand
ccagaauacaaaaggagaa

SEQ ID NO: 2456372 - RNA, 19 nt, Homo sapiens
  misc_RNA (1)...(19): siRNA sense strand
uggguuuacaugaggcaaa

SEQ ID NO: 2456373 - RNA, 19 nt, Homo sapiens
  misc_RNA (1)...(19): siRNA sense strand
cagagauaauucaggcuca

SEQ ID NO: 2456374 - RNA, 19 nt, Homo sapiens
  misc_RNA (1)...(19): siRNA sense strand
aauacaaaaucgagggcau

SEQ ID NO: 2456375 - RNA, 19 nt, Homo sapiens
  misc_RNA (1)...(19): siRNA sense strand
aaggaaugaagauggaaau

SEQ ID NO: 2456376 - RNA, 19 nt, Homo sapiens
  misc_RNA (1)...(19): siRNA sense strand
augagggaauucagaggaa

SEQ ID NO: 2456377 - RNA, 19 nt, Homo sapiens
  misc_RNA (1)...(19): siRNA sense strand
aauuagagucuguggaacu

SEQ ID NO: 2456378 - RNA, 19 nt, Homo sapiens
  misc_RNA (1)...(19): siRNA sense strand
ucaagaauacagaguucaa

SEQ ID NO: 2456379 - RNA, 19 nt, Homo sapiens
  misc_RNA (1)...(19): siRNA sense strand
cacauaaggagguuggaau

SEQ ID NO: 2456380 - RNA, 19 nt, Homo sapiens
  misc_RNA (1)...(19): siRNA sense strand
gcaucagcagguagaagaa

SEQ ID NO: 2456381 - RNA, 19 nt, Homo sapiens
  misc_RNA (1)...(19): siRNA sense strand
uggaauauaagcaggaguu

SEQ ID NO: 2456382 - RNA, 19 nt, Homo sapiens
  misc_RNA (1)...(19): siRNA sense strand
aagcagaacuacaggagcu

SEQ ID NO: 2456383 - RNA, 19 nt, Homo sapiens
  misc_RNA (1)...(19): siRNA sense strand
gaaacagaaauuagagucu

SEQ ID NO: 2456384 - RNA, 19 nt, Homo sapiens
  misc_RNA (1)...(19): siRNA sense strand
cauaaugguggcucauaaa

SEQ ID NO: 2456385 - RNA, 19 nt, Homo sapiens
  misc_RNA (1)...(19): siRNA sense strand
ugaagaggauggaagcaca

SEQ ID NO: 2456386 - RNA, 19 nt, Homo sapiens
  misc_RNA (1)...(19): siRNA sense strand
auugagagguuaacugcaa

SEQ ID NO: 2456387 - RNA, 19 nt, Homo sapiens
  misc_RNA (1)...(19): siRNA sense strand
guucaauagcuaccagauu

SEQ ID NO: 2456388 - RNA, 19 nt, Homo sapiens
  misc_RNA (1)...(19): siRNA sense strand
ugcaaaaggcagaagacaa

SEQ ID NO: 2456389 - RNA, 19 nt, Homo sapiens
  misc_RNA (1)...(19): siRNA sense strand
guaugaaugaccaagaaga

SEQ ID NO: 2456390 - RNA, 19 nt, Homo sapiens
  misc_RNA (1)...(19): siRNA sense strand
aagcaggaguugaagaaac

SEQ ID NO: 2456391 - RNA, 19 nt, Homo sapiens
  misc_RNA (1)...(19): siRNA sense strand
ugaauacaaagcagagauu

SEQ ID NO: 2456392 - RNA, 19 nt, Homo sapiens
  misc_RNA (1)...(19): siRNA sense strand
aucaacaacuacagaaaga

SEQ ID NO: 2456393 - RNA, 19 nt, Homo sapiens
  misc_RNA (1)...(19): siRNA sense strand
auucagaggaaauaccaaa

SEQ ID NO: 2456394 - RNA, 19 nt, Homo sapiens
  misc_RNA (1)...(19): siRNA sense strand
gcuauaaggccacgggaag

SEQ ID NO: 2456395 - RNA, 19 nt, Homo sapiens
  misc_RNA (1)...(19): siRNA sense strand
ucugaaauggugaugaaau

SEQ ID NO: 2456396 - RNA, 19 nt, Homo sapiens
  misc_RNA (1)...(19): siRNA sense strand
aaaccaacacacagcagaa

SEQ ID NO: 2456397 - RNA, 19 nt, Homo sapiens
  misc_RNA (1)...(19): siRNA sense strand
auaagcaggaguugaagaa

SEQ ID NO: 2456398 - RNA, 19 nt, Homo sapiens
  misc_RNA (1)...(19): siRNA sense strand
acaugaggccagaauacaa

SEQ ID NO: 2456399 - RNA, 19 nt, Homo sapiens
  misc_RNA (1)...(19): siRNA sense strand
cuugaaggcaguuuggaau

SEQ ID NO: 2456400 - RNA, 19 nt, Homo sapiens
  misc_RNA (1)...(19): siRNA sense strand
cguguaaacagcugagcca

SEQ ID NO: 2456401 - RNA, 19 nt, Homo sapiens
  misc_RNA (1)...(19): siRNA sense strand
acagcugagccaagaacua

SEQ ID NO: 2456402 - RNA, 19 nt, Homo sapiens
  misc_RNA (1)...(19): siRNA sense strand
gaacugaagaggauggaag

SEQ ID NO: 2456403 - RNA, 19 nt, Homo sapiens
  misc_RNA (1)...(19): siRNA sense strand
agacaugauggaauaaaga

SEQ ID NO: 2456404 - RNA, 19 nt, Homo sapiens
  misc_RNA (1)...(19): siRNA sense strand
gaauacaaaaggagaaguu

SEQ ID NO: 2456405 - RNA, 19 nt, Homo sapiens
  misc_RNA (1)...(19): siRNA sense strand
ugggaagagaguugggaaa

SEQ ID NO: 2456406 - RNA, 19 nt, Homo sapiens
  misc_RNA (1)...(19): siRNA sense strand
ccugagaugaagagagaga

SEQ ID NO: 2456407 - RNA, 19 nt, Homo sapiens
  misc_RNA (1)...(19): siRNA sense strand
gggaagagaguugggaaaa

SEQ ID NO: 2456408 - RNA, 19 nt, Homo sapiens
  misc_RNA (1)...(19): siRNA sense strand
gcagaagaggccagggucu

SEQ ID NO: 2456409 - RNA, 19 nt, Homo sapiens
  misc_RNA (1)...(19): siRNA sense strand
gcaggauggcagaggaauc

SEQ ID NO: 2456410 - RNA, 19 nt, Homo sapiens
  misc_RNA (1)...(19): siRNA sense strand
augaagagagagagcagga

SEQ ID NO: 2456411 - RNA, 19 nt, Homo sapiens
  misc_RNA (1)...(19): siRNA sense strand
gugggaagagaguugggaa

SEQ ID NO: 2456412 - RNA, 19 nt, Homo sapiens
  misc_RNA (1)...(19): siRNA sense strand
ggguuagggagaugccaga

SEQ ID NO: 2456413 - RNA, 19 nt, Homo sapiens
  misc_RNA (1)...(19): siRNA sense strand
agaggaaucaccagcucaa

SEQ ID NO: 2456414 - RNA, 19 nt, Homo sapiens
  misc_RNA (1)...(19): siRNA sense strand
gcuaacacgcgcacgggaa

SEQ ID NO: 2456415 - RNA, 19 nt, Homo sapiens
  misc_RNA (1)...(19): siRNA sense strand
agagaagucccaaaggcua

SEQ ID NO: 2456416 - RNA, 19 nt, Homo sapiens
  misc_RNA (1)...(19): siRNA sense strand
ccgaggaggauuggguuaa

SEQ ID NO: 2456417 - RNA, 19 nt, Homo sapiens
  misc_RNA (1)...(19): siRNA sense strand
uggguuaagcuuugcaaau

SEQ ID NO: 2456418 - RNA, 19 nt, Homo sapiens
  misc_RNA (1)...(19): siRNA sense strand
cccgaggaggauuggguua

SEQ ID NO: 2456419 - RNA, 19 nt, Homo sapiens
  misc_RNA (1)...(19): siRNA sense strand
guuuaagaaccuagggaau

SEQ ID NO: 2456420 - RNA, 19 nt, Homo sapiens
  misc_RNA (1)...(19): siRNA sense strand
ucgugaagaaagagucaaa

SEQ ID NO: 2456421 - RNA, 19 nt, Homo sapiens
  misc_RNA (1)...(19): siRNA sense strand
aguuuaagaaccuagggaa

SEQ ID NO: 2456422 - RNA, 19 nt, Homo sapiens
  misc_RNA (1)...(19): siRNA sense strand
ucuaagacgcagagaccca

SEQ ID NO: 2456423 - RNA, 19 nt, Homo sapiens
  misc_RNA (1)...(19): siRNA sense strand
ccuaaaucuaagacgcaga

SEQ ID NO: 2456424 - RNA, 19 nt, Homo sapiens
  misc_RNA (1)...(19): siRNA sense strand
gcuggagaguugauggcaa

SEQ ID NO: 2456425 - RNA, 19 nt, Homo sapiens
  misc_RNA (1)...(19): siRNA sense strand
ccauuauagagcuggaauu

SEQ ID NO: 2456426 - RNA, 19 nt, Homo sapiens
  misc_RNA (1)...(19): siRNA sense strand
aggucaaagucaaccaaau

SEQ ID NO: 2456427 - RNA, 19 nt, Homo sapiens
  misc_RNA (1)...(19): siRNA sense strand
agaagaaaguaucagcaca

SEQ ID NO: 2456428 - RNA, 19 nt, Homo sapiens
  misc_RNA (1)...(19): siRNA sense strand
cagagguagaagaaaguau

SEQ ID NO: 2456429 - RNA, 19 nt, Homo sapiens
  misc_RNA (1)...(19): siRNA sense strand
cgagcuugaggguggcaaa

SEQ ID NO: 2456430 - RNA, 19 nt, Homo sapiens
  misc_RNA (1)...(19): siRNA sense strand
agagcuggaauuaggcaaa

SEQ ID NO: 2456431 - RNA, 19 nt, Homo sapiens
  misc_RNA (1)...(19): siRNA sense strand
ccaaauucuggaagagcca

SEQ ID NO: 2456432 - RNA, 19 nt, Homo sapiens
  misc_RNA (1)...(19): siRNA sense strand
gaagaaaguaucagcacac

SEQ ID NO: 2456433 - RNA, 19 nt, Homo sapiens
  misc_RNA (1)...(19): siRNA sense strand
cauuaagcuugaugggcua

SEQ ID NO: 2456434 - RNA, 19 nt, Homo sapiens
  misc_RNA (1)...(19): siRNA sense strand
augaagaagcagaggaguu

SEQ ID NO: 2456435 - RNA, 19 nt, Homo sapiens
  misc_RNA (1)...(19): siRNA sense strand
cagcagauguccuggcaga

SEQ ID NO: 2456436 - RNA, 19 nt, Homo sapiens
  misc_RNA (1)...(19): siRNA sense strand
ugaugaaaccauggagaaa

SEQ ID NO: 2456437 - RNA, 19 nt, Homo sapiens
  misc_RNA (1)...(19): siRNA sense strand
acacaauagagaugaugaa

SEQ ID NO: 2456438 - RNA, 19 nt, Homo sapiens
  misc_RNA (1)...(19): siRNA sense strand
gggcagaggaagaguugga

SEQ ID NO: 2456439 - RNA, 19 nt, Homo sapiens
  misc_RNA (1)...(19): siRNA sense strand
gugcuauuguacuggcuaa

SEQ ID NO: 2456440 - RNA, 19 nt, Homo sapiens
  misc_RNA (1)...(19): siRNA sense strand
gaggaguugaugaggaaga

SEQ ID NO: 2456441 - RNA, 19 nt, Homo sapiens
  misc_RNA (1)...(19): siRNA sense strand
acauaugagucuaggcagu

SEQ ID NO: 2456442 - RNA, 19 nt, Homo sapiens
  misc_RNA (1)...(19): siRNA sense strand
uguugauggcucaggcaaa

SEQ ID NO: 2456443 - RNA, 19 nt, Homo sapiens
  misc_RNA (1)...(19): siRNA sense strand
gcagaggaguugaugagga

SEQ ID NO: 2456444 - RNA, 19 nt, Homo sapiens
  misc_RNA (1)...(19): siRNA sense strand
cuacagaaggguuugaaaa

SEQ ID NO: 2456445 - RNA, 19 nt, Homo sapiens
  misc_RNA (1)...(19): siRNA sense strand
uggaaagaauacagucaca

SEQ ID NO: 2456446 - RNA, 19 nt, Homo sapiens
  misc_RNA (1)...(19): siRNA sense strand
aagcaagacacaauagaga

SEQ ID NO: 2456447 - RNA, 19 nt, Homo sapiens
  misc_RNA (1)...(19): siRNA sense strand
ggaaguugaauguggcuca

SEQ ID NO: 2456448 - RNA, 19 nt, Homo sapiens
  misc_RNA (1)...(19): siRNA sense strand
gugaauuuggugauaggaa

SEQ ID NO: 2456449 - RNA, 19 nt, Homo sapiens
  misc_RNA (1)...(19): siRNA sense strand
uugaugaggaagauugaaa

SEQ ID NO: 2456450 - RNA, 19 nt, Homo sapiens
  misc_RNA (1)...(19): siRNA sense strand
gaagcauaucgcugagauu

SEQ ID NO: 2456451 - RNA, 19 nt, Homo sapiens
  misc_RNA (1)...(19): siRNA sense strand
gcuaugagcagcugggcca

SEQ ID NO: 2456452 - RNA, 19 nt, Homo sapiens
  misc_RNA (1)...(19): siRNA sense strand
augaugaaaccauggagaa

SEQ ID NO: 2456453 - RNA, 19 nt, Homo sapiens
  misc_RNA (1)...(19): siRNA sense strand
ugagauuauaggauggaau

SEQ ID NO: 2456454 - RNA, 19 nt, Homo sapiens
  misc_RNA (1)...(19): siRNA sense strand
acuucauggcagaaacaua

SEQ ID NO: 2456455 - RNA, 19 nt, Homo sapiens
  misc_RNA (1)...(19): siRNA sense strand
acaaauacaaagaagccau

SEQ ID NO: 2456456 - RNA, 19 nt, Homo sapiens
  misc_RNA (1)...(19): siRNA sense strand
acaggaagcaagacacaau

SEQ ID NO: 2456457 - RNA, 19 nt, Homo sapiens
  misc_RNA (1)...(19): siRNA sense strand
ucuagaacacugugaacuu

SEQ ID NO: 2456458 - RNA, 19 nt, Homo sapiens
  misc_RNA (1)...(19): siRNA sense strand
aaugcauguuggaaagaau

SEQ ID NO: 2456459 - RNA, 19 nt, Homo sapiens
  misc_RNA (1)...(19): siRNA sense strand
agauugaaaaggaggaaga

SEQ ID NO: 2456460 - RNA, 19 nt, Homo sapiens
  misc_RNA (1)...(19): siRNA sense strand
gggcauugauguucgcagu

SEQ ID NO: 2456461 - RNA, 19 nt, Homo sapiens
  misc_RNA (1)...(19): siRNA sense strand
ccuuaaggcagcuauagaa

SEQ ID NO: 2456462 - RNA, 19 nt, Homo sapiens
  misc_RNA (1)...(19): siRNA sense strand
cccuggaagaagaaagaau

SEQ ID NO: 2456463 - RNA, 19 nt, Homo sapiens
  misc_RNA (1)...(19): siRNA sense strand
agaaugagaccgauggcca

SEQ ID NO: 2456464 - RNA, 19 nt, Homo sapiens
  misc_RNA (1)...(19): siRNA sense strand
cacccagggcagaggaaga

SEQ ID NO: 2456465 - RNA, 19 nt, Homo sapiens
  misc_RNA (1)...(19): siRNA sense strand
ccggaaacuuaccauacaa

SEQ ID NO: 2456466 - RNA, 19 nt, Homo sapiens
  misc_RNA (1)...(19): siRNA sense strand
cuacuggaaucuugaaaau

SEQ ID NO: 2456467 - RNA, 19 nt, Homo sapiens
  misc_RNA (1)...(19): siRNA sense strand
caaccuuaaggcagcuaua

SEQ ID NO: 2456468 - RNA, 19 nt, Homo sapiens
  misc_RNA (1)...(19): siRNA sense strand
ccuacagaaggguuugaaa

SEQ ID NO: 2456469 - RNA, 19 nt, Homo sapiens
  misc_RNA (1)...(19): siRNA sense strand
gcaggaaaacaaauacaaa

SEQ ID NO: 2456470 - RNA, 19 nt, Homo sapiens
  misc_RNA (1)...(19): siRNA sense strand
guuggaaagaauacaguca

SEQ ID NO: 2456471 - RNA, 19 nt, Homo sapiens
  misc_RNA (1)...(19): siRNA sense strand
gcaugaccacugagggcau

SEQ ID NO: 2456472 - RNA, 19 nt, Homo sapiens
  misc_RNA (1)...(19): siRNA sense strand
uuauugugccaaaggaaau

SEQ ID NO: 2456473 - RNA, 19 nt, Homo sapiens
  misc_RNA (1)...(19): siRNA sense strand
agaccgauggccagaucaa

SEQ ID NO: 2456474 - RNA, 19 nt, Homo sapiens
  misc_RNA (1)...(19): siRNA sense strand
aggaagaguuggacccugu

SEQ ID NO: 2456475 - RNA, 19 nt, Homo sapiens
  misc_RNA (1)...(19): siRNA sense strand
cagugaaugaauaugauga

SEQ ID NO: 2456476 - RNA, 19 nt, Homo sapiens
  misc_RNA (1)...(19): siRNA sense strand
augaugacccagauaagaa

SEQ ID NO: 2456477 - RNA, 19 nt, Homo sapiens
  misc_RNA (1)...(19): siRNA sense strand
gaacugcagcggagcccua

SEQ ID NO: 2456478 - RNA, 19 nt, Homo sapiens
  misc_RNA (1)...(19): siRNA sense strand
ucaaguacagcgagggcga

SEQ ID NO: 2456479 - RNA, 19 nt, Homo sapiens
  misc_RNA (1)...(19): siRNA sense strand
ccauacaaguacaggaagc

SEQ ID NO: 2456480 - RNA, 19 nt, Homo sapiens
  misc_RNA (1)...(19): siRNA sense strand
ccuuccuucuccuggauaa

SEQ ID NO: 2456481 - RNA, 19 nt, Homo sapiens
  misc_RNA (1)...(19): siRNA sense strand
acaaguacaggaagcaaga

SEQ ID NO: 2456482 - RNA, 19 nt, Homo sapiens
  misc_RNA (1)...(19): siRNA sense strand
aggcagugaaugaauauga

SEQ ID NO: 2456483 - RNA, 19 nt, Homo sapiens
  misc_RNA (1)...(19): siRNA sense strand
augcauguuggaaagaaua

SEQ ID NO: 2456484 - RNA, 19 nt, Homo sapiens
  misc_RNA (1)...(19): siRNA sense strand
agugauaagcugugaguuu

SEQ ID NO: 2456485 - RNA, 19 nt, Homo sapiens
  misc_RNA (1)...(19): siRNA sense strand
acguaauggcaaagagcaa

SEQ ID NO: 2456486 - RNA, 19 nt, Homo sapiens
  misc_RNA (1)...(19): siRNA sense strand
aagaaauacuacaggcauu

SEQ ID NO: 2456487 - RNA, 19 nt, Homo sapiens
  misc_RNA (1)...(19): siRNA sense strand
ccaacauggaagaaauaaa

SEQ ID NO: 2456488 - RNA, 19 nt, Homo sapiens
  misc_RNA (1)...(19): siRNA sense strand
ggugagaaagugagaccaa

SEQ ID NO: 2456489 - RNA, 19 nt, Homo sapiens
  misc_RNA (1)...(19): siRNA sense strand
gcagaugagcagacagaau

SEQ ID NO: 2456490 - RNA, 19 nt, Homo sapiens
  misc_RNA (1)...(19): siRNA sense strand
cggcauaaccccacaguaa

SEQ ID NO: 2456491 - RNA, 19 nt, Homo sapiens
  misc_RNA (1)...(19): siRNA sense strand
acaaagccaucgagggcaa

SEQ ID NO: 2456492 - RNA, 19 nt, Homo sapiens
  misc_RNA (1)...(19): siRNA sense strand
ugaugagaagggugagaaa

SEQ ID NO: 2456493 - RNA, 19 nt, Homo sapiens
  misc_RNA (1)...(19): siRNA sense strand
ugguacaaguugaugagaa

SEQ ID NO: 2456494 - RNA, 19 nt, Homo sapiens
  misc_RNA (1)...(19): siRNA sense strand
accaauagaggaagugaaa

SEQ ID NO: 2456495 - RNA, 19 nt, Homo sapiens
  misc_RNA (1)...(19): siRNA sense strand
ucgaagacgacgagaagau

SEQ ID NO: 2456496 - RNA, 19 nt, Homo sapiens
  misc_RNA (1)...(19): siRNA sense strand
gauaaugaagaguugacaa

SEQ ID NO: 2456497 - RNA, 19 nt, Homo sapiens
  misc_RNA (1)...(19): siRNA sense strand
gagaagggugagaaaguga

SEQ ID NO: 2456498 - RNA, 19 nt, Homo sapiens
  misc_RNA (1)...(19): siRNA sense strand
ccaaaguauggcaagaaau

SEQ ID NO: 2456499 - RNA, 19 nt, Homo sapiens
  misc_RNA (1)...(19): siRNA sense strand
gggcuauaccucagggagu

SEQ ID NO: 2456500 - RNA, 19 nt, Homo sapiens
  misc_RNA (1)...(19): siRNA sense strand
guuuaaauccuaaugccaa

SEQ ID NO: 2456501 - RNA, 19 nt, Homo sapiens
  misc_RNA (1)...(19): siRNA sense strand
auggacaguugaacagaua

SEQ ID NO: 2456502 - RNA, 19 nt, Homo sapiens
  misc_RNA (1)...(19): siRNA sense strand
uugccaacauggaagaaau

SEQ ID NO: 2456503 - RNA, 19 nt, Homo sapiens
  misc_RNA (1)...(19): siRNA sense strand
uagagagauuccugaaaca

SEQ ID NO: 2456504 - RNA, 19 nt, Homo sapiens
  misc_RNA (1)...(19): siRNA sense strand
caucaagaaugccagguga

SEQ ID NO: 2456505 - RNA, 19 nt, Homo sapiens
  misc_RNA (1)...(19): siRNA sense strand
gacucgacguaauggcaaa

SEQ ID NO: 2456506 - RNA, 19 nt, Homo sapiens
  misc_RNA (1)...(19): siRNA sense strand
augagaagggugagaaagu

SEQ ID NO: 2456507 - RNA, 19 nt, Homo sapiens
  misc_RNA (1)...(19): siRNA sense strand
caggggagcagcaggaaaa

SEQ ID NO: 2456508 - RNA, 19 nt, Homo sapiens
  misc_RNA (1)...(19): siRNA sense strand
acugaaagcucuuggcaug

SEQ ID NO: 2456509 - RNA, 19 nt, Homo sapiens
  misc_RNA (1)...(19): siRNA sense strand
aagaaauugcuccuggaaa

SEQ ID NO: 2456510 - RNA, 19 nt, Homo sapiens
  misc_RNA (1)...(19): siRNA sense strand
acccagaucaccaaaguaa

SEQ ID NO: 2456511 - RNA, 19 nt, Homo sapiens
  misc_RNA (1)...(19): siRNA sense strand
uuaaaacauuucagggcaa

SEQ ID NO: 2456512 - RNA, 19 nt, Homo sapiens
  misc_RNA (1)...(19): siRNA sense strand
cugagaacuccguugagaa

SEQ ID NO: 2456513 - RNA, 19 nt, Homo sapiens
  misc_RNA (1)...(19): siRNA sense strand
caccaauagaggaagugaa

SEQ ID NO: 2456514 - RNA, 19 nt, Homo sapiens
  misc_RNA (1)...(19): siRNA sense strand
acacaauagcaacugguau

SEQ ID NO: 2456515 - RNA, 19 nt, Homo sapiens
  misc_RNA (1)...(19): siRNA sense strand
cccaguaacucauggaacu

SEQ ID NO: 2456516 - RNA, 19 nt, Homo sapiens
  misc_RNA (1)...(19): siRNA sense strand
caauagaggaagugaaagg

SEQ ID NO: 2456517 - RNA, 19 nt, Homo sapiens
  misc_RNA (1)...(19): siRNA sense strand
acaggaaccccgaaaguua

SEQ ID NO: 2456518 - RNA, 19 nt, Homo sapiens
  misc_RNA (1)...(19): siRNA sense strand
gcaagggcuaguaaggauu

SEQ ID NO: 2456519 - RNA, 19 nt, Homo sapiens
  misc_RNA (1)...(19): siRNA sense strand
gguagcaucuaaaggaacu

SEQ ID NO: 2456520 - RNA, 19 nt, Homo sapiens
  misc_RNA (1)...(19): siRNA sense strand
uugagaaaccacaugagaa

SEQ ID NO: 2456521 - RNA, 19 nt, Homo sapiens
  misc_RNA (1)...(19): siRNA sense strand
ugccaacauggaagaaaua

SEQ ID NO: 2456522 - RNA, 19 nt, Homo sapiens
  misc_RNA (1)...(19): siRNA sense strand
cuugaaguguuaagaucuu

SEQ ID NO: 2456523 - RNA, 19 nt, Homo sapiens
  misc_RNA (1)...(19): siRNA sense strand
ugagaaaccacaugagaag

SEQ ID NO: 2456524 - RNA, 19 nt, Homo sapiens
  misc_RNA (1)...(19): siRNA sense strand
cagauauaguucaagaaac

SEQ ID NO: 2456525 - RNA, 19 nt, Homo sapiens
  misc_RNA (1)...(19): siRNA sense strand
ggagaaagcaauucagcag

SEQ ID NO: 2456526 - RNA, 19 nt, Homo sapiens
  misc_RNA (1)...(19): siRNA sense strand
gguuuaaauccuaaugcca

SEQ ID NO: 2456527 - RNA, 19 nt, Homo sapiens
  misc_RNA (1)...(19): siRNA sense strand
cuacagaagaccuaaaaga

SEQ ID NO: 2456528 - RNA, 19 nt, Homo sapiens
  misc_RNA (1)...(19): siRNA sense strand
agagauuccugaaacaaca

SEQ ID NO: 2456529 - RNA, 19 nt, Homo sapiens
  misc_RNA (1)...(19): siRNA sense strand
cgugugaagccucaguuua

SEQ ID NO: 2456530 - RNA, 19 nt, Homo sapiens
  misc_RNA (1)...(19): siRNA sense strand
gagcagacagaaugcacuu

SEQ ID NO: 2456531 - RNA, 19 nt, Homo sapiens
  misc_RNA (1)...(19): siRNA sense strand
agcaagggcuaguaaggau

SEQ ID NO: 2456532 - RNA, 19 nt, Homo sapiens
  misc_RNA (1)...(19): siRNA sense strand
auaugauguuuccggagaa

SEQ ID NO: 2456533 - RNA, 19 nt, Homo sapiens
  misc_RNA (1)...(19): siRNA sense strand
aacaacaccaauagaggaa

SEQ ID NO: 2456534 - RNA, 19 nt, Homo sapiens
  misc_RNA (1)...(19): siRNA sense strand
agucagacacagaugcaca

SEQ ID NO: 2456535 - RNA, 19 nt, Homo sapiens
  misc_RNA (1)...(19): siRNA sense strand
cuuugcagguggaacagaa

SEQ ID NO: 2456536 - RNA, 19 nt, Homo sapiens
  misc_RNA (1)...(19): siRNA sense strand
acaagaaauacuacaggca

SEQ ID NO: 2456537 - RNA, 19 nt, Homo sapiens
  misc_RNA (1)...(19): siRNA sense strand
acagaagaccuaaaagaau

SEQ ID NO: 2456538 - RNA, 19 nt, Homo sapiens
  misc_RNA (1)...(19): siRNA sense strand
aaguugaugagaaggguga

SEQ ID NO: 2456539 - RNA, 19 nt, Homo sapiens
  misc_RNA (1)...(19): siRNA sense strand
caaugguaguuuugugaau

SEQ ID NO: 2456540 - RNA, 19 nt, Homo sapiens
  misc_RNA (1)...(19): siRNA sense strand
cagaagcaagggcuaguaa

SEQ ID NO: 2456541 - RNA, 19 nt, Homo sapiens
  misc_RNA (1)...(19): siRNA sense strand
agugauaagcugugaguuu

SEQ ID NO: 2456542 - RNA, 19 nt, Homo sapiens
  misc_RNA (1)...(19): siRNA sense strand
acguaauggcaaagagcaa

SEQ ID NO: 2456543 - RNA, 19 nt, Homo sapiens
  misc_RNA (1)...(19): siRNA sense strand
aagaaauacuacaggcauu

SEQ ID NO: 2456544 - RNA, 19 nt, Homo sapiens
  misc_RNA (1)...(19): siRNA sense strand
ccaacauggaagaaauaaa

SEQ ID NO: 2456545 - RNA, 19 nt, Homo sapiens
  misc_RNA (1)...(19): siRNA sense strand
ggugagaaagugagaccaa

SEQ ID NO: 2456546 - RNA, 19 nt, Homo sapiens
  misc_RNA (1)...(19): siRNA sense strand
gcagaugagcagacagaau

SEQ ID NO: 2456547 - RNA, 19 nt, Homo sapiens
  misc_RNA (1)...(19): siRNA sense strand
cggcauaaccccacaguaa

SEQ ID NO: 2456548 - RNA, 19 nt, Homo sapiens
  misc_RNA (1)...(19): siRNA sense strand
acaaagccaucgagggcaa

SEQ ID NO: 2456549 - RNA, 19 nt, Homo sapiens
  misc_RNA (1)...(19): siRNA sense strand
ugaugagaagggugagaaa

SEQ ID NO: 2456550 - RNA, 19 nt, Homo sapiens
  misc_RNA (1)...(19): siRNA sense strand
ugguacaaguugaugagaa

SEQ ID NO: 2456551 - RNA, 19 nt, Homo sapiens
  misc_RNA (1)...(19): siRNA sense strand
accaauagaggaagugaaa

SEQ ID NO: 2456552 - RNA, 19 nt, Homo sapiens
  misc_RNA (1)...(19): siRNA sense strand
ucgaagacgacgagaagau

SEQ ID NO: 2456553 - RNA, 19 nt, Homo sapiens
  misc_RNA (1)...(19): siRNA sense strand
gauaaugaagaguugacaa

SEQ ID NO: 2456554 - RNA, 19 nt, Homo sapiens
  misc_RNA (1)...(19): siRNA sense strand
gagaagggugagaaaguga

SEQ ID NO: 2456555 - RNA, 19 nt, Homo sapiens
  misc_RNA (1)...(19): siRNA sense strand
ccaaaguauggcaagaaau

SEQ ID NO: 2456556 - RNA, 19 nt, Homo sapiens
  misc_RNA (1)...(19): siRNA sense strand
gggcuauaccucagggagu

SEQ ID NO: 2456557 - RNA, 19 nt, Homo sapiens
  misc_RNA (1)...(19): siRNA sense strand
guuuaaauccuaaugccaa

SEQ ID NO: 2456558 - RNA, 19 nt, Homo sapiens
  misc_RNA (1)...(19): siRNA sense strand
auggacaguugaacagaua

SEQ ID NO: 2456559 - RNA, 19 nt, Homo sapiens
  misc_RNA (1)...(19): siRNA sense strand
uugccaacauggaagaaau

SEQ ID NO: 2456560 - RNA, 19 nt, Homo sapiens
  misc_RNA (1)...(19): siRNA sense strand
uagagagauuccugaaaca

SEQ ID NO: 2456561 - RNA, 19 nt, Homo sapiens
  misc_RNA (1)...(19): siRNA sense strand
caucaagaaugccagguga

SEQ ID NO: 2456562 - RNA, 19 nt, Homo sapiens
  misc_RNA (1)...(19): siRNA sense strand
gacucgacguaauggcaaa

SEQ ID NO: 2456563 - RNA, 19 nt, Homo sapiens
  misc_RNA (1)...(19): siRNA sense strand
augagaagggugagaaagu

SEQ ID NO: 2456564 - RNA, 19 nt, Homo sapiens
  misc_RNA (1)...(19): siRNA sense strand
caggggagcagcaggaaaa

SEQ ID NO: 2456565 - RNA, 19 nt, Homo sapiens
  misc_RNA (1)...(19): siRNA sense strand
acugaaagcucuuggcaug

SEQ ID NO: 2456566 - RNA, 19 nt, Homo sapiens
  misc_RNA (1)...(19): siRNA sense strand
aagaaauugcuccuggaaa

SEQ ID NO: 2456567 - RNA, 19 nt, Homo sapiens
  misc_RNA (1)...(19): siRNA sense strand
acccagaucaccaaaguaa

SEQ ID NO: 2456568 - RNA, 19 nt, Homo sapiens
  misc_RNA (1)...(19): siRNA sense strand
uuaaaacauuucagggcaa

SEQ ID NO: 2456569 - RNA, 19 nt, Homo sapiens
  misc_RNA (1)...(19): siRNA sense strand
cugagaacuccguugagaa

SEQ ID NO: 2456570 - RNA, 19 nt, Homo sapiens
  misc_RNA (1)...(19): siRNA sense strand
caccaauagaggaagugaa

SEQ ID NO: 2456571 - RNA, 19 nt, Homo sapiens
  misc_RNA (1)...(19): siRNA sense strand
acacaauagcaacugguau

SEQ ID NO: 2456572 - RNA, 19 nt, Homo sapiens
  misc_RNA (1)...(19): siRNA sense strand
cccaguaacucauggaacu

SEQ ID NO: 2456573 - RNA, 19 nt, Homo sapiens
  misc_RNA (1)...(19): siRNA sense strand
caauagaggaagugaaagg

SEQ ID NO: 2456574 - RNA, 19 nt, Homo sapiens
  misc_RNA (1)...(19): siRNA sense strand
acaggaaccccgaaaguua

SEQ ID NO: 2456575 - RNA, 19 nt, Homo sapiens
  misc_RNA (1)...(19): siRNA sense strand
gcaagggcuaguaaggauu

SEQ ID NO: 2456576 - RNA, 19 nt, Homo sapiens
  misc_RNA (1)...(19): siRNA sense strand
gguagcaucuaaaggaacu

SEQ ID NO: 2456577 - RNA, 19 nt, Homo sapiens
  misc_RNA (1)...(19): siRNA sense strand
uugagaaaccacaugagaa

SEQ ID NO: 2456578 - RNA, 19 nt, Homo sapiens
  misc_RNA (1)...(19): siRNA sense strand
ugccaacauggaagaaaua

SEQ ID NO: 2456579 - RNA, 19 nt, Homo sapiens
  misc_RNA (1)...(19): siRNA sense strand
cuugaaguguuaagaucuu

SEQ ID NO: 2456580 - RNA, 19 nt, Homo sapiens
  misc_RNA (1)...(19): siRNA sense strand
ugagaaaccacaugagaag

SEQ ID NO: 2456581 - RNA, 19 nt, Homo sapiens
  misc_RNA (1)...(19): siRNA sense strand
cagauauaguucaagaaac

SEQ ID NO: 2456582 - RNA, 19 nt, Homo sapiens
  misc_RNA (1)...(19): siRNA sense strand
ggagaaagcaauucagcag

SEQ ID NO: 2456583 - RNA, 19 nt, Homo sapiens
  misc_RNA (1)...(19): siRNA sense strand
gguuuaaauccuaaugcca

SEQ ID NO: 2456584 - RNA, 19 nt, Homo sapiens
  misc_RNA (1)...(19): siRNA sense strand
cuacagaagaccuaaaaga

SEQ ID NO: 2456585 - RNA, 19 nt, Homo sapiens
  misc_RNA (1)...(19): siRNA sense strand
agagauuccugaaacaaca

SEQ ID NO: 2456586 - RNA, 19 nt, Homo sapiens
  misc_RNA (1)...(19): siRNA sense strand
cgugugaagccucaguuua

SEQ ID NO: 2456587 - RNA, 19 nt, Homo sapiens
  misc_RNA (1)...(19): siRNA sense strand
gagcagacagaaugcacuu

SEQ ID NO: 2456588 - RNA, 19 nt, Homo sapiens
  misc_RNA (1)...(19): siRNA sense strand
agcaagggcuaguaaggau

SEQ ID NO: 2456589 - RNA, 19 nt, Homo sapiens
  misc_RNA (1)...(19): siRNA sense strand
auaugauguuuccggagaa

SEQ ID NO: 2456590 - RNA, 19 nt, Homo sapiens
  misc_RNA (1)...(19): siRNA sense strand
aacaacaccaauagaggaa

SEQ ID NO: 2456591 - RNA, 19 nt, Homo sapiens
  misc_RNA (1)...(19): siRNA sense strand
agucagacacagaugcaca

SEQ ID NO: 2456592 - RNA, 19 nt, Homo sapiens
  misc_RNA (1)...(19): siRNA sense strand
cuuugcagguggaacagaa

SEQ ID NO: 2456593 - RNA, 19 nt, Homo sapiens
  misc_RNA (1)...(19): siRNA sense strand
acaagaaauacuacaggca

SEQ ID NO: 2456594 - RNA, 19 nt, Homo sapiens
  misc_RNA (1)...(19): siRNA sense strand
acagaagaccuaaaagaau

SEQ ID NO: 2456595 - RNA, 19 nt, Homo sapiens
  misc_RNA (1)...(19): siRNA sense strand
aaguugaugagaaggguga

SEQ ID NO: 2456596 - RNA, 19 nt, Homo sapiens
  misc_RNA (1)...(19): siRNA sense strand
caaugguaguuuugugaau

SEQ ID NO: 2456597 - RNA, 19 nt, Homo sapiens
  misc_RNA (1)...(19): siRNA sense strand
cagaagcaagggcuaguaa

SEQ ID NO: 2456598 - RNA, 19 nt, Homo sapiens
  misc_RNA (1)...(19): siRNA sense strand
agugauaagcugugaguuu

SEQ ID NO: 2456599 - RNA, 19 nt, Homo sapiens
  misc_RNA (1)...(19): siRNA sense strand
acguaauggcaaagagcaa

SEQ ID NO: 2456600 - RNA, 19 nt, Homo sapiens
  misc_RNA (1)...(19): siRNA sense strand
aagaaauacuacaggcauu

SEQ ID NO: 2456601 - RNA, 19 nt, Homo sapiens
  misc_RNA (1)...(19): siRNA sense strand
ccaacauggaagaaauaaa

SEQ ID NO: 2456602 - RNA, 19 nt, Homo sapiens
  misc_RNA (1)...(19): siRNA sense strand
ggugagaaagugagaccaa

SEQ ID NO: 2456603 - RNA, 19 nt, Homo sapiens
  misc_RNA (1)...(19): siRNA sense strand
gcagaugagcagacagaau

SEQ ID NO: 2456604 - RNA, 19 nt, Homo sapiens
  misc_RNA (1)...(19): siRNA sense strand
cggcauaaccccacaguaa

SEQ ID NO: 2456605 - RNA, 19 nt, Homo sapiens
  misc_RNA (1)...(19): siRNA sense strand
acaaagccaucgagggcaa

SEQ ID NO: 2456606 - RNA, 19 nt, Homo sapiens
  misc_RNA (1)...(19): siRNA sense strand
ugaugagaagggugagaaa

SEQ ID NO: 2456607 - RNA, 19 nt, Homo sapiens
  misc_RNA (1)...(19): siRNA sense strand
ugguacaaguugaugagaa

SEQ ID NO: 2456608 - RNA, 19 nt, Homo sapiens
  misc_RNA (1)...(19): siRNA sense strand
accaauagaggaagugaaa

SEQ ID NO: 2456609 - RNA, 19 nt, Homo sapiens
  misc_RNA (1)...(19): siRNA sense strand
ucgaagacgacgagaagau

SEQ ID NO: 2456610 - RNA, 19 nt, Homo sapiens
  misc_RNA (1)...(19): siRNA sense strand
gauaaugaagaguugacaa

SEQ ID NO: 2456611 - RNA, 19 nt, Homo sapiens
  misc_RNA (1)...(19): siRNA sense strand
gagaagggugagaaaguga

SEQ ID NO: 2456612 - RNA, 19 nt, Homo sapiens
  misc_RNA (1)...(19): siRNA sense strand
ccaaaguauggcaagaaau

SEQ ID NO: 2456613 - RNA, 19 nt, Homo sapiens
  misc_RNA (1)...(19): siRNA sense strand
gggcuauaccucagggagu

SEQ ID NO: 2456614 - RNA, 19 nt, Homo sapiens
  misc_RNA (1)...(19): siRNA sense strand
guuuaaauccuaaugccaa

SEQ ID NO: 2456615 - RNA, 19 nt, Homo sapiens
  misc_RNA (1)...(19): siRNA sense strand
auggacaguugaacagaua

SEQ ID NO: 2456616 - RNA, 19 nt, Homo sapiens
  misc_RNA (1)...(19): siRNA sense strand
uugccaacauggaagaaau

SEQ ID NO: 2456617 - RNA, 19 nt, Homo sapiens
  misc_RNA (1)...(19): siRNA sense strand
uagagagauuccugaaaca

SEQ ID NO: 2456618 - RNA, 19 nt, Homo sapiens
  misc_RNA (1)...(19): siRNA sense strand
caucaagaaugccagguga

SEQ ID NO: 2456619 - RNA, 19 nt, Homo sapiens
  misc_RNA (1)...(19): siRNA sense strand
gacucgacguaauggcaaa

SEQ ID NO: 2456620 - RNA, 19 nt, Homo sapiens
  misc_RNA (1)...(19): siRNA sense strand
augagaagggugagaaagu

SEQ ID NO: 2456621 - RNA, 19 nt, Homo sapiens
  misc_RNA (1)...(19): siRNA sense strand
caggggagcagcaggaaaa

SEQ ID NO: 2456622 - RNA, 19 nt, Homo sapiens
  misc_RNA (1)...(19): siRNA sense strand
acugaaagcucuuggcaug

SEQ ID NO: 2456623 - RNA, 19 nt, Homo sapiens
  misc_RNA (1)...(19): siRNA sense strand
aagaaauugcuccuggaaa

SEQ ID NO: 2456624 - RNA, 19 nt, Homo sapiens
  misc_RNA (1)...(19): siRNA sense strand
acccagaucaccaaaguaa

SEQ ID NO: 2456625 - RNA, 19 nt, Homo sapiens
  misc_RNA (1)...(19): siRNA sense strand
uuaaaacauuucagggcaa

SEQ ID NO: 2456626 - RNA, 19 nt, Homo sapiens
  misc_RNA (1)...(19): siRNA sense strand
cugagaacuccguugagaa

SEQ ID NO: 2456627 - RNA, 19 nt, Homo sapiens
  misc_RNA (1)...(19): siRNA sense strand
caccaauagaggaagugaa

SEQ ID NO: 2456628 - RNA, 19 nt, Homo sapiens
  misc_RNA (1)...(19): siRNA sense strand
acacaauagcaacugguau

SEQ ID NO: 2456629 - RNA, 19 nt, Homo sapiens
  misc_RNA (1)...(19): siRNA sense strand
cccaguaacucauggaacu

SEQ ID NO: 2456630 - RNA, 19 nt, Homo sapiens
  misc_RNA (1)...(19): siRNA sense strand
caauagaggaagugaaagg

SEQ ID NO: 2456631 - RNA, 19 nt, Homo sapiens
  misc_RNA (1)...(19): siRNA sense strand
acaggaaccccgaaaguua

SEQ ID NO: 2456632 - RNA, 19 nt, Homo sapiens
  misc_RNA (1)...(19): siRNA sense strand
gcaagggcuaguaaggauu

SEQ ID NO: 2456633 - RNA, 19 nt, Homo sapiens
  misc_RNA (1)...(19): siRNA sense strand
gguagcaucuaaaggaacu

SEQ ID NO: 2456634 - RNA, 19 nt, Homo sapiens
  misc_RNA (1)...(19): siRNA sense strand
uugagaaaccacaugagaa

SEQ ID NO: 2456635 - RNA, 19 nt, Homo sapiens
  misc_RNA (1)...(19): siRNA sense strand
ugccaacauggaagaaaua

SEQ ID NO: 2456636 - RNA, 19 nt, Homo sapiens
  misc_RNA (1)...(19): siRNA sense strand
cuugaaguguuaagaucuu

SEQ ID NO: 2456637 - RNA, 19 nt, Homo sapiens
  misc_RNA (1)...(19): siRNA sense strand
ugagaaaccacaugagaag

SEQ ID NO: 2456638 - RNA, 19 nt, Homo sapiens
  misc_RNA (1)...(19): siRNA sense strand
cagauauaguucaagaaac

SEQ ID NO: 2456639 - RNA, 19 nt, Homo sapiens
  misc_RNA (1)...(19): siRNA sense strand
ggagaaagcaauucagcag

SEQ ID NO: 2456640 - RNA, 19 nt, Homo sapiens
  misc_RNA (1)...(19): siRNA sense strand
gguuuaaauccuaaugcca

SEQ ID NO: 2456641 - RNA, 19 nt, Homo sapiens
  misc_RNA (1)...(19): siRNA sense strand
cuacagaagaccuaaaaga

SEQ ID NO: 2456642 - RNA, 19 nt, Homo sapiens
  misc_RNA (1)...(19): siRNA sense strand
agagauuccugaaacaaca

SEQ ID NO: 2456643 - RNA, 19 nt, Homo sapiens
  misc_RNA (1)...(19): siRNA sense strand
cgugugaagccucaguuua

SEQ ID NO: 2456644 - RNA, 19 nt, Homo sapiens
  misc_RNA (1)...(19): siRNA sense strand
gagcagacagaaugcacuu

SEQ ID NO: 2456645 - RNA, 19 nt, Homo sapiens
  misc_RNA (1)...(19): siRNA sense strand
agcaagggcuaguaaggau

SEQ ID NO: 2456646 - RNA, 19 nt, Homo sapiens
  misc_RNA (1)...(19): siRNA sense strand
auaugauguuuccggagaa

SEQ ID NO: 2456647 - RNA, 19 nt, Homo sapiens
  misc_RNA (1)...(19): siRNA sense strand
aacaacaccaauagaggaa

SEQ ID NO: 2456648 - RNA, 19 nt, Homo sapiens
  misc_RNA (1)...(19): siRNA sense strand
agucagacacagaugcaca

SEQ ID NO: 2456649 - RNA, 19 nt, Homo sapiens
  misc_RNA (1)...(19): siRNA sense strand
cuuugcagguggaacagaa

SEQ ID NO: 2456650 - RNA, 19 nt, Homo sapiens
  misc_RNA (1)...(19): siRNA sense strand
acaagaaauacuacaggca

SEQ ID NO: 2456651 - RNA, 19 nt, Homo sapiens
  misc_RNA (1)...(19): siRNA sense strand
acagaagaccuaaaagaau

SEQ ID NO: 2456652 - RNA, 19 nt, Homo sapiens
  misc_RNA (1)...(19): siRNA sense strand
aaguugaugagaaggguga

SEQ ID NO: 2456653 - RNA, 19 nt, Homo sapiens
  misc_RNA (1)...(19): siRNA sense strand
caaugguaguuuugugaau

SEQ ID NO: 2456654 - RNA, 19 nt, Homo sapiens
  misc_RNA (1)...(19): siRNA sense strand
cagaagcaagggcuaguaa

SEQ ID NO: 2456655 - RNA, 19 nt, Homo sapiens
  misc_RNA (1)...(19): siRNA sense strand
gauaauagugggauggaca

SEQ ID NO: 2456656 - RNA, 19 nt, Homo sapiens
  misc_RNA (1)...(19): siRNA sense strand
cguuaauggcagaaauauu

SEQ ID NO: 2456657 - RNA, 19 nt, Homo sapiens
  misc_RNA (1)...(19): siRNA sense strand
ggauauacaucacaggguu

SEQ ID NO: 2456658 - RNA, 19 nt, Homo sapiens
  misc_RNA (1)...(19): siRNA sense strand
augaagagggcuuugcaaa

SEQ ID NO: 2456659 - RNA, 19 nt, Homo sapiens
  misc_RNA (1)...(19): siRNA sense strand
caaagaaguagcugaggca

SEQ ID NO: 2456660 - RNA, 19 nt, Homo sapiens
  misc_RNA (1)...(19): siRNA sense strand
ugaagagggcuuugcaaaa

SEQ ID NO: 2456661 - RNA, 19 nt, Homo sapiens
  misc_RNA (1)...(19): siRNA sense strand
uggccaaugaagagggcuu

SEQ ID NO: 2456662 - RNA, 19 nt, Homo sapiens
  misc_RNA (1)...(19): siRNA sense strand
gagucaaagagggugguaa

SEQ ID NO: 2456663 - RNA, 19 nt, Homo sapiens
  misc_RNA (1)...(19): siRNA sense strand
gagggugguaagaggaaaa

SEQ ID NO: 2456664 - RNA, 19 nt, Homo sapiens
  misc_RNA (1)...(19): siRNA sense strand
aggauuaaacggaggugga

SEQ ID NO: 2456665 - RNA, 19 nt, Homo sapiens
  misc_RNA (1)...(19): siRNA sense strand
uuguaaauaguguggccaa

SEQ ID NO: 2456666 - RNA, 19 nt, Homo sapiens
  misc_RNA (1)...(19): siRNA sense strand
agucaaagagggugguaag

SEQ ID NO: 2456667 - RNA, 19 nt, Homo sapiens
  misc_RNA (1)...(19): siRNA sense strand
aagaaagagaagcugaaga

SEQ ID NO: 2456668 - RNA, 19 nt, Homo sapiens
  misc_RNA (1)...(19): siRNA sense strand
cuaugaaguucuaggacug

SEQ ID NO: 2456669 - RNA, 19 nt, Homo sapiens
  misc_RNA (1)...(19): siRNA sense strand
cuauggaaacagaaacaga

SEQ ID NO: 2456670 - RNA, 19 nt, Homo sapiens
  misc_RNA (1)...(19): siRNA sense strand
gcaaaagaaugcagcugga

SEQ ID NO: 2456671 - RNA, 19 nt, Homo sapiens
  misc_RNA (1)...(19): siRNA sense strand
cgcuugaggaccuguuaaa

SEQ ID NO: 2456672 - RNA, 19 nt, Homo sapiens
  misc_RNA (1)...(19): siRNA sense strand
aagcugaagauaauggaga

SEQ ID NO: 2456673 - RNA, 19 nt, Homo sapiens
  misc_RNA (1)...(19): siRNA sense strand
uguaaauaguguggccaau

SEQ ID NO: 2456674 - RNA, 19 nt, Homo sapiens
  misc_RNA (1)...(19): siRNA sense strand
ugaaaggauuagaggucau

SEQ ID NO: 2456675 - RNA, 19 nt, Homo sapiens
  misc_RNA (1)...(19): siRNA sense strand
cugacuugauggaggaaaa

SEQ ID NO: 2456676 - RNA, 19 nt, Homo sapiens
  misc_RNA (1)...(19): siRNA sense strand
cuucaaagaaauaccaaca

SEQ ID NO: 2456677 - RNA, 19 nt, Homo sapiens
  misc_RNA (1)...(19): siRNA sense strand
agaaaauuccgaagaucaa

SEQ ID NO: 2456678 - RNA, 19 nt, Homo sapiens
  misc_RNA (1)...(19): siRNA sense strand
ucucacagcuaaaggagca

SEQ ID NO: 2456679 - RNA, 19 nt, Homo sapiens
  misc_RNA (1)...(19): siRNA sense strand
gccuaaaaccauuggccaa

SEQ ID NO: 2456680 - RNA, 19 nt, Homo sapiens
  misc_RNA (1)...(19): siRNA sense strand
ucagaagagcaaagaaaau

SEQ ID NO: 2456681 - RNA, 19 nt, Homo sapiens
  misc_RNA (1)...(19): siRNA sense strand
uguucuacugaaaggauua

SEQ ID NO: 2456682 - RNA, 19 nt, Homo sapiens
  misc_RNA (1)...(19): siRNA sense strand
ggacaucaucagaagagca

SEQ ID NO: 2456683 - RNA, 19 nt, Homo sapiens
  misc_RNA (1)...(19): siRNA sense strand
uguaguaggaaaaggagaa

SEQ ID NO: 2456684 - RNA, 19 nt, Homo sapiens
  misc_RNA (1)...(19): siRNA sense strand
ggauaaaacaggaaguaug

SEQ ID NO: 2456685 - RNA, 19 nt, Homo sapiens
  misc_RNA (1)...(19): siRNA sense strand
cuaaaggagcagaggagac

SEQ ID NO: 2456686 - RNA, 19 nt, Homo sapiens
  misc_RNA (1)...(19): siRNA sense strand
augcauaguuucauccaga

SEQ ID NO: 2456687 - RNA, 19 nt, Homo sapiens
  misc_RNA (1)...(19): siRNA sense strand
caauaaucgcgaugguacu

SEQ ID NO: 2456688 - RNA, 19 nt, Homo sapiens
  misc_RNA (1)...(19): siRNA sense strand
aagaaaauuccgaagauca

SEQ ID NO: 2456689 - RNA, 19 nt, Homo sapiens
  misc_RNA (1)...(19): siRNA sense strand
ccuucagaggccagcacaa

SEQ ID NO: 2456690 - RNA, 19 nt, Homo sapiens
  misc_RNA (1)...(19): siRNA sense strand
acugaaaggauuagagguc

SEQ ID NO: 2456691 - RNA, 19 nt, Homo sapiens
  misc_RNA (1)...(19): siRNA sense strand
ugaaaggauuagaggucau

SEQ ID NO: 2456692 - RNA, 19 nt, Homo sapiens
  misc_RNA (1)...(19): siRNA sense strand
cugacuugauggaggaaaa

SEQ ID NO: 2456693 - RNA, 19 nt, Homo sapiens
  misc_RNA (1)...(19): siRNA sense strand
cuucaaagaaauaccaaca

SEQ ID NO: 2456694 - RNA, 19 nt, Homo sapiens
  misc_RNA (1)...(19): siRNA sense strand
agaaaauuccgaagaucaa

SEQ ID NO: 2456695 - RNA, 19 nt, Homo sapiens
  misc_RNA (1)...(19): siRNA sense strand
ucucacagcuaaaggagca

SEQ ID NO: 2456696 - RNA, 19 nt, Homo sapiens
  misc_RNA (1)...(19): siRNA sense strand
gccuaaaaccauuggccaa

SEQ ID NO: 2456697 - RNA, 19 nt, Homo sapiens
  misc_RNA (1)...(19): siRNA sense strand
ucagaagagcaaagaaaau

SEQ ID NO: 2456698 - RNA, 19 nt, Homo sapiens
  misc_RNA (1)...(19): siRNA sense strand
uguucuacugaaaggauua

SEQ ID NO: 2456699 - RNA, 19 nt, Homo sapiens
  misc_RNA (1)...(19): siRNA sense strand
ggacaucaucagaagagca

SEQ ID NO: 2456700 - RNA, 19 nt, Homo sapiens
  misc_RNA (1)...(19): siRNA sense strand
uguaguaggaaaaggagaa

SEQ ID NO: 2456701 - RNA, 19 nt, Homo sapiens
  misc_RNA (1)...(19): siRNA sense strand
ggauaaaacaggaaguaug

SEQ ID NO: 2456702 - RNA, 19 nt, Homo sapiens
  misc_RNA (1)...(19): siRNA sense strand
cuaaaggagcagaggagac

SEQ ID NO: 2456703 - RNA, 19 nt, Homo sapiens
  misc_RNA (1)...(19): siRNA sense strand
augcauaguuucauccaga

SEQ ID NO: 2456704 - RNA, 19 nt, Homo sapiens
  misc_RNA (1)...(19): siRNA sense strand
caauaaucgcgaugguacu

SEQ ID NO: 2456705 - RNA, 19 nt, Homo sapiens
  misc_RNA (1)...(19): siRNA sense strand
aagaaaauuccgaagauca

SEQ ID NO: 2456706 - RNA, 19 nt, Homo sapiens
  misc_RNA (1)...(19): siRNA sense strand
ccuucagaggccagcacaa

SEQ ID NO: 2456707 - RNA, 19 nt, Homo sapiens
  misc_RNA (1)...(19): siRNA sense strand
acugaaaggauuagagguc

SEQ ID NO: 2456708 - RNA, 19 nt, Homo sapiens
  misc_RNA (1)...(19): siRNA sense strand
ggacaaggauaucaaauaa

SEQ ID NO: 2456709 - RNA, 19 nt, Homo sapiens
  misc_RNA (1)...(19): siRNA sense strand
ugaaaggauuagaggucau

SEQ ID NO: 2456710 - RNA, 19 nt, Homo sapiens
  misc_RNA (1)...(19): siRNA sense strand
aggacaaggauaucaaaua

SEQ ID NO: 2456711 - RNA, 19 nt, Homo sapiens
  misc_RNA (1)...(19): siRNA sense strand
ucaccaaggacaaggauau

SEQ ID NO: 2456712 - RNA, 19 nt, Homo sapiens
  misc_RNA (1)...(19): siRNA sense strand
cugacuugauggaggaaaa

SEQ ID NO: 2456713 - RNA, 19 nt, Homo sapiens
  misc_RNA (1)...(19): siRNA sense strand
cuucaaagaaauaccaaca

SEQ ID NO: 2456714 - RNA, 19 nt, Homo sapiens
  misc_RNA (1)...(19): siRNA sense strand
agaaaauuccgaagaucaa

SEQ ID NO: 2456715 - RNA, 19 nt, Homo sapiens
  misc_RNA (1)...(19): siRNA sense strand
ccaaggacaaggauaucaa

SEQ ID NO: 2456716 - RNA, 19 nt, Homo sapiens
  misc_RNA (1)...(19): siRNA sense strand
ucucacagcuaaaggagca

SEQ ID NO: 2456717 - RNA, 19 nt, Homo sapiens
  misc_RNA (1)...(19): siRNA sense strand
gccuaaaaccauuggccaa

SEQ ID NO: 2456718 - RNA, 19 nt, Homo sapiens
  misc_RNA (1)...(19): siRNA sense strand
ucagaagagcaaagaaaau

SEQ ID NO: 2456719 - RNA, 19 nt, Homo sapiens
  misc_RNA (1)...(19): siRNA sense strand
uguucuacugaaaggauua

SEQ ID NO: 2456720 - RNA, 19 nt, Homo sapiens
  misc_RNA (1)...(19): siRNA sense strand
ggacaucaucagaagagca

SEQ ID NO: 2456721 - RNA, 19 nt, Homo sapiens
  misc_RNA (1)...(19): siRNA sense strand
uguaguaggaaaaggagaa

SEQ ID NO: 2456722 - RNA, 19 nt, Homo sapiens
  misc_RNA (1)...(19): siRNA sense strand
ggauaaaacaggaaguaug

SEQ ID NO: 2456723 - RNA, 19 nt, Homo sapiens
  misc_RNA (1)...(19): siRNA sense strand
cuaaaggagcagaggagac

SEQ ID NO: 2456724 - RNA, 19 nt, Homo sapiens
  misc_RNA (1)...(19): siRNA sense strand
augcauaguuucauccaga

SEQ ID NO: 2456725 - RNA, 19 nt, Homo sapiens
  misc_RNA (1)...(19): siRNA sense strand
caauaaucgcgaugguacu

SEQ ID NO: 2456726 - RNA, 19 nt, Homo sapiens
  misc_RNA (1)...(19): siRNA sense strand
aagaaaauuccgaagauca

SEQ ID NO: 2456727 - RNA, 19 nt, Homo sapiens
  misc_RNA (1)...(19): siRNA sense strand
ccuucagaggccagcacaa

SEQ ID NO: 2456728 - RNA, 19 nt, Homo sapiens
  misc_RNA (1)...(19): siRNA sense strand
acugaaaggauuagagguc

SEQ ID NO: 2456729 - RNA, 19 nt, Homo sapiens
  misc_RNA (1)...(19): siRNA sense strand
ggacaaggauaucaaauaa

SEQ ID NO: 2456730 - RNA, 19 nt, Homo sapiens
  misc_RNA (1)...(19): siRNA sense strand
ugaaaggauuagaggucau

SEQ ID NO: 2456731 - RNA, 19 nt, Homo sapiens
  misc_RNA (1)...(19): siRNA sense strand
aggacaaggauaucaaaua

SEQ ID NO: 2456732 - RNA, 19 nt, Homo sapiens
  misc_RNA (1)...(19): siRNA sense strand
ucaccaaggacaaggauau

SEQ ID NO: 2456733 - RNA, 19 nt, Homo sapiens
  misc_RNA (1)...(19): siRNA sense strand
cugacuugauggaggaaaa

SEQ ID NO: 2456734 - RNA, 19 nt, Homo sapiens
  misc_RNA (1)...(19): siRNA sense strand
cuucaaagaaauaccaaca

SEQ ID NO: 2456735 - RNA, 19 nt, Homo sapiens
  misc_RNA (1)...(19): siRNA sense strand
agaaaauuccgaagaucaa

SEQ ID NO: 2456736 - RNA, 19 nt, Homo sapiens
  misc_RNA (1)...(19): siRNA sense strand
ccaaggacaaggauaucaa

SEQ ID NO: 2456737 - RNA, 19 nt, Homo sapiens
  misc_RNA (1)...(19): siRNA sense strand
ucucacagcuaaaggagca

SEQ ID NO: 2456738 - RNA, 19 nt, Homo sapiens
  misc_RNA (1)...(19): siRNA sense strand
gccuaaaaccauuggccaa

SEQ ID NO: 2456739 - RNA, 19 nt, Homo sapiens
  misc_RNA (1)...(19): siRNA sense strand
ucagaagagcaaagaaaau

SEQ ID NO: 2456740 - RNA, 19 nt, Homo sapiens
  misc_RNA (1)...(19): siRNA sense strand
uguucuacugaaaggauua

SEQ ID NO: 2456741 - RNA, 19 nt, Homo sapiens
  misc_RNA (1)...(19): siRNA sense strand
ggacaucaucagaagagca

SEQ ID NO: 2456742 - RNA, 19 nt, Homo sapiens
  misc_RNA (1)...(19): siRNA sense strand
uguaguaggaaaaggagaa

SEQ ID NO: 2456743 - RNA, 19 nt, Homo sapiens
  misc_RNA (1)...(19): siRNA sense strand
ggauaaaacaggaaguaug

SEQ ID NO: 2456744 - RNA, 19 nt, Homo sapiens
  misc_RNA (1)...(19): siRNA sense strand
cuaaaggagcagaggagac

SEQ ID NO: 2456745 - RNA, 19 nt, Homo sapiens
  misc_RNA (1)...(19): siRNA sense strand
augcauaguuucauccaga

SEQ ID NO: 2456746 - RNA, 19 nt, Homo sapiens
  misc_RNA (1)...(19): siRNA sense strand
caauaaucgcgaugguacu

SEQ ID NO: 2456747 - RNA, 19 nt, Homo sapiens
  misc_RNA (1)...(19): siRNA sense strand
aagaaaauuccgaagauca

SEQ ID NO: 2456748 - RNA, 19 nt, Homo sapiens
  misc_RNA (1)...(19): siRNA sense strand
ccuucagaggccagcacaa

SEQ ID NO: 2456749 - RNA, 19 nt, Homo sapiens
  misc_RNA (1)...(19): siRNA sense strand
acugaaaggauuagagguc

SEQ ID NO: 2456750 - RNA, 19 nt, Homo sapiens
  misc_RNA (1)...(19): siRNA sense strand
ugaaaagagcauugacaaa

SEQ ID NO: 2456751 - RNA, 19 nt, Homo sapiens
  misc_RNA (1)...(19): siRNA sense strand
gcugaaauuccuaggagau

SEQ ID NO: 2456752 - RNA, 19 nt, Homo sapiens
  misc_RNA (1)...(19): siRNA sense strand
acaagaaagaucagcaaaa

SEQ ID NO: 2456753 - RNA, 19 nt, Homo sapiens
  misc_RNA (1)...(19): siRNA sense strand
gcacaggagaagauggcau

SEQ ID NO: 2456754 - RNA, 19 nt, Homo sapiens
  misc_RNA (1)...(19): siRNA sense strand
auucagaaaguguggauuu

SEQ ID NO: 2456755 - RNA, 19 nt, Homo sapiens
  misc_RNA (1)...(19): siRNA sense strand
ugacaagaaagaucagcaa

SEQ ID NO: 2456756 - RNA, 19 nt, Homo sapiens
  misc_RNA (1)...(19): siRNA sense strand
ggagaaugcugucggugga

SEQ ID NO: 2456757 - RNA, 19 nt, Homo sapiens
  misc_RNA (1)...(19): siRNA sense strand
uggauuuggagcugagcaa

SEQ ID NO: 2456758 - RNA, 19 nt, Homo sapiens
  misc_RNA (1)...(19): siRNA sense strand
uggcugagguguggagaau

SEQ ID NO: 2456759 - RNA, 19 nt, Homo sapiens
  misc_RNA (1)...(19): siRNA sense strand
aggaugaguucuaagcaca

SEQ ID NO: 2456760 - RNA, 19 nt, Homo sapiens
  misc_RNA (1)...(19): siRNA sense strand
auggugagcuaaaggguga

SEQ ID NO: 2456761 - RNA, 19 nt, Homo sapiens
  misc_RNA (1)...(19): siRNA sense strand
aggcagacguuucaggcau

SEQ ID NO: 2456762 - RNA, 19 nt, Homo sapiens
  misc_RNA (1)...(19): siRNA sense strand
cugaggaagcugcagaaau

SEQ ID NO: 2456763 - RNA, 19 nt, Homo sapiens
  misc_RNA (1)...(19): siRNA sense strand
gucuauaagccacgcgcaa

SEQ ID NO: 2456764 - RNA, 19 nt, Homo sapiens
  misc_RNA (1)...(19): siRNA sense strand
aggccauuguugagaaacu

SEQ ID NO: 2456765 - RNA, 19 nt, Homo sapiens
  misc_RNA (1)...(19): siRNA sense strand
acccugaggcugaaguaua

SEQ ID NO: 2456766 - RNA, 19 nt, Homo sapiens
  misc_RNA (1)...(19): siRNA sense strand
ccagcgaucagcaggagaa

SEQ ID NO: 2456767 - RNA, 19 nt, Homo sapiens
  misc_RNA (1)...(19): siRNA sense strand
agaaggugccagaaauuau

SEQ ID NO: 2456768 - RNA, 19 nt, Homo sapiens
  misc_RNA (1)...(19): siRNA sense strand
ugccagaaauuaugggagu

SEQ ID NO: 2456769 - RNA, 19 nt, Homo sapiens
  misc_RNA (1)...(19): siRNA sense strand
gguuuucaauggugagcua

SEQ ID NO: 2456770 - RNA, 19 nt, Homo sapiens
  misc_RNA (1)...(19): siRNA sense strand
uuacccagauacaggaaau

SEQ ID NO: 2456771 - RNA, 19 nt, Homo sapiens
  misc_RNA (1)...(19): siRNA sense strand
acugcuaacuuuggcgaaa

SEQ ID NO: 2456772 - RNA, 19 nt, Homo sapiens
  misc_RNA (1)...(19): siRNA sense strand
gccuagaguccgccaacaa

SEQ ID NO: 2456773 - RNA, 19 nt, Homo sapiens
  misc_RNA (1)...(19): siRNA sense strand
acccaaguacacagauaua

SEQ ID NO: 2456774 - RNA, 19 nt, Homo sapiens
  misc_RNA (1)...(19): siRNA sense strand
cuuaccaucaagaguauaa

SEQ ID NO: 2456775 - RNA, 19 nt, Homo sapiens
  misc_RNA (1)...(19): siRNA sense strand
cuccagaguuuggugguaa

SEQ ID NO: 2456776 - RNA, 19 nt, Homo sapiens
  misc_RNA (1)...(19): siRNA sense strand
uccagaguuuggugguaaa

SEQ ID NO: 2456777 - RNA, 19 nt, Homo sapiens
  misc_RNA (1)...(19): siRNA sense strand
uuugagaaggugccagaaa

SEQ ID NO: 2456778 - RNA, 19 nt, Homo sapiens
  misc_RNA (1)...(19): siRNA sense strand
ccgcuaaaugcuucuacaa

SEQ ID NO: 2456779 - RNA, 19 nt, Homo sapiens
  misc_RNA (1)...(19): siRNA sense strand
uggaaaaucuugacaccau

SEQ ID NO: 2456780 - RNA, 19 nt, Homo sapiens
  misc_RNA (1)...(19): siRNA sense strand
cuguagucaggaagaagua

SEQ ID NO: 2456781 - RNA, 19 nt, Homo sapiens
  misc_RNA (1)...(19): siRNA sense strand
aggaaaagguggcugagga

SEQ ID NO: 2456782 - RNA, 19 nt, Homo sapiens
  misc_RNA (1)...(19): siRNA sense strand
cgggaaaguggcuccaaga

SEQ ID NO: 2456783 - RNA, 19 nt, Homo sapiens
  misc_RNA (1)...(19): siRNA sense strand
ucuaaaggccagaaggaaa

SEQ ID NO: 2456784 - RNA, 19 nt, Homo sapiens
  misc_RNA (1)...(19): siRNA sense strand
cuaaaguaacugugguaaa

SEQ ID NO: 2456785 - RNA, 19 nt, Homo sapiens
  misc_RNA (1)...(19): siRNA sense strand
cuaaaggccagaaggaaau

SEQ ID NO: 2456786 - RNA, 19 nt, Homo sapiens
  misc_RNA (1)...(19): siRNA sense strand
ggaugacacacuuggcaaa

SEQ ID NO: 2456787 - RNA, 19 nt, Homo sapiens
  misc_RNA (1)...(19): siRNA sense strand
caagagaagcccaggcaca

SEQ ID NO: 2456788 - RNA, 19 nt, Homo sapiens
  misc_RNA (1)...(19): siRNA sense strand
agagaaaugguguggauga

SEQ ID NO: 2456789 - RNA, 19 nt, Homo sapiens
  misc_RNA (1)...(19): siRNA sense strand
ugguaaaagaaaaggagaa

SEQ ID NO: 2456790 - RNA, 19 nt, Homo sapiens
  misc_RNA (1)...(19): siRNA sense strand
gguaaauucuauuaagcca

SEQ ID NO: 2456791 - RNA, 19 nt, Homo sapiens
  misc_RNA (1)...(19): siRNA sense strand
uaggaaacuuagagaaacu

SEQ ID NO: 2456792 - RNA, 19 nt, Homo sapiens
  misc_RNA (1)...(19): siRNA sense strand
caguccaagcagacagaaa

SEQ ID NO: 2456793 - RNA, 19 nt, Homo sapiens
  misc_RNA (1)...(19): siRNA sense strand
ccaaauacugcuggagaau

SEQ ID NO: 2456794 - RNA, 19 nt, Homo sapiens
  misc_RNA (1)...(19): siRNA sense strand
aggcaacuacuuaggaaau

SEQ ID NO: 2456795 - RNA, 19 nt, Homo sapiens
  misc_RNA (1)...(19): siRNA sense strand
gcuggagaauacuggaaga

SEQ ID NO: 2456796 - RNA, 19 nt, Homo sapiens
  misc_RNA (1)...(19): siRNA sense strand
aagagaaagcaaucaagaa

SEQ ID NO: 2456797 - RNA, 19 nt, Homo sapiens
  misc_RNA (1)...(19): siRNA sense strand
ccucagacaaagaagacau

SEQ ID NO: 2456798 - RNA, 19 nt, Homo sapiens
  misc_RNA (1)...(19): siRNA sense strand
ccaaaaguuucuucaacaa

SEQ ID NO: 2456799 - RNA, 19 nt, Homo sapiens
  misc_RNA (1)...(19): siRNA sense strand
aagagaaacauuuggaagu

SEQ ID NO: 2456800 - RNA, 19 nt, Homo sapiens
  misc_RNA (1)...(19): siRNA sense strand
ggaucgugagcuugaaauu

SEQ ID NO: 2456801 - RNA, 19 nt, Homo sapiens
  misc_RNA (1)...(19): siRNA sense strand
gaagagaugcuauggcuca

SEQ ID NO: 2456802 - RNA, 19 nt, Homo sapiens
  misc_RNA (1)...(19): siRNA sense strand
ggaaaaggaaagaacucua

SEQ ID NO: 2456803 - RNA, 19 nt, Homo sapiens
  misc_RNA (1)...(19): siRNA sense strand
cuuugacaacuaaggguaa

SEQ ID NO: 2456804 - RNA, 19 nt, Homo sapiens
  misc_RNA (1)...(19): siRNA sense strand
ugaaagaagagcaagaacu

SEQ ID NO: 2456805 - RNA, 19 nt, Homo sapiens
  misc_RNA (1)...(19): siRNA sense strand
ucaguaacagagaggaaau

SEQ ID NO: 2456806 - RNA, 19 nt, Homo sapiens
  misc_RNA (1)...(19): siRNA sense strand
gcuauugagacucggaaga

SEQ ID NO: 2456807 - RNA, 19 nt, Homo sapiens
  misc_RNA (1)...(19): siRNA sense strand
aggaaacaucgaucauaaa

SEQ ID NO: 2456808 - RNA, 19 nt, Homo sapiens
  misc_RNA (1)...(19): siRNA sense strand
uugugaaagaagagcaaga

SEQ ID NO: 2456809 - RNA, 19 nt, Homo sapiens
  misc_RNA (1)...(19): siRNA sense strand
aaauacagagcuuggaaaa

SEQ ID NO: 2456810 - RNA, 19 nt, Homo sapiens
  misc_RNA (1)...(19): siRNA sense strand
gcauucugacaguggguau

SEQ ID NO: 2456811 - RNA, 19 nt, Homo sapiens
  misc_RNA (1)...(19): siRNA sense strand
caucauaaauuggaagcca

SEQ ID NO: 2456812 - RNA, 19 nt, Homo sapiens
  misc_RNA (1)...(19): siRNA sense strand
aguaaaacaccuucaacaa

SEQ ID NO: 2456813 - RNA, 19 nt, Homo sapiens
  misc_RNA (1)...(19): siRNA sense strand
aagaagaccaagaaaagaa

SEQ ID NO: 2456814 - RNA, 19 nt, Homo sapiens
  misc_RNA (1)...(19): siRNA sense strand
uuaggaaaucccaggaaaa

SEQ ID NO: 2456815 - RNA, 19 nt, Homo sapiens
  misc_RNA (1)...(19): siRNA sense strand
gcaagaacuaccaccaaaa

SEQ ID NO: 2456816 - RNA, 19 nt, Homo sapiens
  misc_RNA (1)...(19): siRNA sense strand
caucgaauacucucagcaa

SEQ ID NO: 2456817 - RNA, 19 nt, Homo sapiens
  misc_RNA (1)...(19): siRNA sense strand
cuuaggcauuugaaagcua

SEQ ID NO: 2456818 - RNA, 19 nt, Homo sapiens
  misc_RNA (1)...(19): siRNA sense strand
cauuugaaagcuauaggaa

SEQ ID NO: 2456819 - RNA, 19 nt, Homo sapiens
  misc_RNA (1)...(19): siRNA sense strand
aaggcaacuacuuaggaaa

SEQ ID NO: 2456820 - RNA, 19 nt, Homo sapiens
  misc_RNA (1)...(19): siRNA sense strand
ucacagaagcaacugaaaa

SEQ ID NO: 2456821 - RNA, 19 nt, Homo sapiens
  misc_RNA (1)...(19): siRNA sense strand
ucagaggagccuuugcaaa

SEQ ID NO: 2456822 - RNA, 19 nt, Homo sapiens
  misc_RNA (1)...(19): siRNA sense strand
cgucaccuacagaaggaaa

SEQ ID NO: 2456823 - RNA, 19 nt, Homo sapiens
  misc_RNA (1)...(19): siRNA sense strand
gcaacaugagguacaguca

SEQ ID NO: 2456824 - RNA, 19 nt, Homo sapiens
  misc_RNA (1)...(19): siRNA sense strand
cucuaaaguaacuguggua

SEQ ID NO: 2456825 - RNA, 19 nt, Homo sapiens
  misc_RNA (1)...(19): siRNA sense strand
acugaagacuaaagauauc

SEQ ID NO: 2456826 - RNA, 19 nt, Homo sapiens
  misc_RNA (1)...(19): siRNA sense strand
agguugaacugcagagccu

SEQ ID NO: 2456827 - RNA, 19 nt, Homo sapiens
  misc_RNA (1)...(19): siRNA sense strand
uaccaaagcaagaggauuc

SEQ ID NO: 2456828 - RNA, 19 nt, Homo sapiens
  misc_RNA (1)...(19): siRNA sense strand
aaucuaaaggccagaagga

SEQ ID NO: 2456829 - RNA, 19 nt, Homo sapiens
  misc_RNA (1)...(19): siRNA sense strand
aagauguucuaguaagaga

SEQ ID NO: 2456830 - RNA, 19 nt, Homo sapiens
  misc_RNA (1)...(19): siRNA sense strand
caguaggguccacgaggaa

SEQ ID NO: 2456831 - RNA, 19 nt, Homo sapiens
  misc_RNA (1)...(19): siRNA sense strand
uggagaugcccaugggaaa

SEQ ID NO: 2456832 - RNA, 19 nt, Homo sapiens
  misc_RNA (1)...(19): siRNA sense strand
guggagaugcccaugggaa

SEQ ID NO: 2456833 - RNA, 19 nt, Homo sapiens
  misc_RNA (1)...(19): siRNA sense strand
gguccugcacggugagcuu

SEQ ID NO: 2456834 - RNA, 19 nt, Homo sapiens
  misc_RNA (1)...(19): siRNA sense strand
cugaagaagcccagaacaa

SEQ ID NO: 2456835 - RNA, 19 nt, Homo sapiens
  misc_RNA (1)...(19): siRNA sense strand
cugaugugucugaggaaua

SEQ ID NO: 2456836 - RNA, 19 nt, Homo sapiens
  misc_RNA (1)...(19): siRNA sense strand
uuuaaaucaucgagaccaa

SEQ ID NO: 2456837 - RNA, 19 nt, Homo sapiens
  misc_RNA (1)...(19): siRNA sense strand
gggagaaaauacagcucaa

SEQ ID NO: 2456838 - RNA, 19 nt, Homo sapiens
  misc_RNA (1)...(19): siRNA sense strand
ggagauaccaggaacccaa

SEQ ID NO: 2456839 - RNA, 19 nt, Homo sapiens
  misc_RNA (1)...(19): siRNA sense strand
ccuaagaaaugucuggcau

SEQ ID NO: 2456840 - RNA, 19 nt, Homo sapiens
  misc_RNA (1)...(19): siRNA sense strand
caauauaucuugcaagcca

SEQ ID NO: 2456841 - RNA, 19 nt, Homo sapiens
  misc_RNA (1)...(19): siRNA sense strand
aagccaucuuccaaggaua

SEQ ID NO: 2456842 - RNA, 19 nt, Homo sapiens
  misc_RNA (1)...(19): siRNA sense strand
ggauauugguggggcacaa

SEQ ID NO: 2456843 - RNA, 19 nt, Homo sapiens
  misc_RNA (1)...(19): siRNA sense strand
uguuguggauuguaggaau

SEQ ID NO: 2456844 - RNA, 19 nt, Homo sapiens
  misc_RNA (1)...(19): siRNA sense strand
uguagaacgauuucagaau

SEQ ID NO: 2456845 - RNA, 19 nt, Homo sapiens
  misc_RNA (1)...(19): siRNA sense strand
guuaguucucagcggauua

SEQ ID NO: 2456846 - RNA, 19 nt, Homo sapiens
  misc_RNA (1)...(19): siRNA sense strand
cuucagaugcuguagcuau

SEQ ID NO: 2456847 - RNA, 19 nt, Homo sapiens
  misc_RNA (1)...(19): siRNA sense strand
agagauaaguauaagcuuc

SEQ ID NO: 2456848 - RNA, 19 nt, Homo sapiens
  misc_RNA (1)...(19): siRNA sense strand
caacaauagucaucgacgu

SEQ ID NO: 2456849 - RNA, 19 nt, Homo sapiens
  misc_RNA (1)...(19): siRNA sense strand
cccaaagcugccuaagaaa

SEQ ID NO: 2456850 - RNA, 19 nt, Homo sapiens
  misc_RNA (1)...(19): siRNA sense strand
uugcaagccaagagggcca

SEQ ID NO: 2456851 - RNA, 19 nt, Homo sapiens
  misc_RNA (1)...(19): siRNA sense strand
ccucauuagcauggauuau

SEQ ID NO: 2456852 - RNA, 19 nt, Homo sapiens
  misc_RNA (1)...(19): siRNA sense strand
gcguggccauagugggcaa

SEQ ID NO: 2456853 - RNA, 19 nt, Homo sapiens
  misc_RNA (1)...(19): siRNA sense strand
aggaauucacugaggccuu

SEQ ID NO: 2456854 - RNA, 19 nt, Homo sapiens
  misc_RNA (1)...(19): siRNA sense strand
agaaagugccagcugccaa

SEQ ID NO: 2456855 - RNA, 19 nt, Homo sapiens
  misc_RNA (1)...(19): siRNA sense strand
cgaccaugguggacagccu

SEQ ID NO: 2456856 - RNA, 19 nt, Homo sapiens
  misc_RNA (1)...(19): siRNA sense strand
cgucuauucaggaaaccua

SEQ ID NO: 2456857 - RNA, 19 nt, Homo sapiens
  misc_RNA (1)...(19): siRNA sense strand
ccuugggagacuggagaua

SEQ ID NO: 2456858 - RNA, 19 nt, Homo sapiens
  misc_RNA (1)...(19): siRNA sense strand
gugugugacauguggcaaa

SEQ ID NO: 2456859 - RNA, 19 nt, Homo sapiens
  misc_RNA (1)...(19): siRNA sense strand
gcgagaucugugagaagaa

SEQ ID NO: 2456860 - RNA, 19 nt, Homo sapiens
  misc_RNA (1)...(19): siRNA sense strand
gggccaaggugaagcugga

SEQ ID NO: 2456861 - RNA, 19 nt, Homo sapiens
  misc_RNA (1)...(19): siRNA sense strand
ccaacaugcucaaggccca

SEQ ID NO: 2456862 - RNA, 19 nt, Homo sapiens
  misc_RNA (1)...(19): siRNA sense strand
acggcuacgcagagaagaa

SEQ ID NO: 2456863 - RNA, 19 nt, Homo sapiens
  misc_RNA (1)...(19): siRNA sense strand
acacaggagagaagccgua

SEQ ID NO: 2456864 - RNA, 19 nt, Homo sapiens
  misc_RNA (1)...(19): siRNA sense strand
ggaaaguccuucaagcgca

SEQ ID NO: 2456865 - RNA, 19 nt, Homo sapiens
  misc_RNA (1)...(19): siRNA sense strand
ggucccuccaugagcauaa

SEQ ID NO: 2456866 - RNA, 19 nt, Homo sapiens
  misc_RNA (1)...(19): siRNA sense strand
gcuuccugcuggagagcga

SEQ ID NO: 2456867 - RNA, 19 nt, Homo sapiens
  misc_RNA (1)...(19): siRNA sense strand
gcgggaggaugaacgccaa

SEQ ID NO: 2456868 - RNA, 19 nt, Homo sapiens
  misc_RNA (1)...(19): siRNA sense strand
gcggcaaggacuucaacau

SEQ ID NO: 2456869 - RNA, 19 nt, Homo sapiens
  misc_RNA (1)...(19): siRNA sense strand
ggauaaaucucaagcugga

SEQ ID NO: 2456870 - RNA, 19 nt, Homo sapiens
  misc_RNA (1)...(19): siRNA sense strand
uguuaaagccaucgugaau

SEQ ID NO: 2456871 - RNA, 19 nt, Homo sapiens
  misc_RNA (1)...(19): siRNA sense strand
cuccuaaagaagagucaaa

SEQ ID NO: 2456872 - RNA, 19 nt, Homo sapiens
  misc_RNA (1)...(19): siRNA sense strand
cggcauucuuccuccuaaa

SEQ ID NO: 2456873 - RNA, 19 nt, Homo sapiens
  misc_RNA (1)...(19): siRNA sense strand
ggaagaacuugaauggaag

SEQ ID NO: 2456874 - RNA, 19 nt, Homo sapiens
  misc_RNA (1)...(19): siRNA sense strand
ccagaaaagacaugguaga

SEQ ID NO: 2456875 - RNA, 19 nt, Homo sapiens
  misc_RNA (1)...(19): siRNA sense strand
cagaaagaagcaaugguga

SEQ ID NO: 2456876 - RNA, 19 nt, Homo sapiens
  misc_RNA (1)...(19): siRNA sense strand
ugaagauacagaauggaau

SEQ ID NO: 2456877 - RNA, 19 nt, Homo sapiens
  misc_RNA (1)...(19): siRNA sense strand
uggaaagcucuuaagaaaa

SEQ ID NO: 2456878 - RNA, 19 nt, Homo sapiens
  misc_RNA (1)...(19): siRNA sense strand
cagaagaagaugugugggu

SEQ ID NO: 2456879 - RNA, 19 nt, Homo sapiens
  misc_RNA (1)...(19): siRNA sense strand
augaagauacagaauggaa

SEQ ID NO: 2456880 - RNA, 19 nt, Homo sapiens
  misc_RNA (1)...(19): siRNA sense strand
guuuacagaaagaagcaau

SEQ ID NO: 2456881 - RNA, 19 nt, Homo sapiens
  misc_RNA (1)...(19): siRNA sense strand
cagugauaaugaaccaaau

SEQ ID NO: 2456882 - RNA, 19 nt, Homo sapiens
  misc_RNA (1)...(19): siRNA sense strand
cuggaaaucaguaugugaa

SEQ ID NO: 2456883 - RNA, 19 nt, Homo sapiens
  misc_RNA (1)...(19): siRNA sense strand
aagaagauaugcaggcugu

SEQ ID NO: 2456884 - RNA, 19 nt, Homo sapiens
  misc_RNA (1)...(19): siRNA sense strand
uggaaaucaguaugugaau

SEQ ID NO: 2456885 - RNA, 19 nt, Homo sapiens
  misc_RNA (1)...(19): siRNA sense strand
agauagaagccaaauucau

SEQ ID NO: 2456886 - RNA, 19 nt, Homo sapiens
  misc_RNA (1)...(19): siRNA sense strand
agaaaagacaugguagaua

SEQ ID NO: 2456887 - RNA, 19 nt, Homo sapiens
  misc_RNA (1)...(19): siRNA sense strand
gaaagaagcgguuacagga

SEQ ID NO: 2456888 - RNA, 19 nt, Homo sapiens
  misc_RNA (1)...(19): siRNA sense strand
uggaagaaaaccccagaaa

SEQ ID NO: 2456889 - RNA, 19 nt, Homo sapiens
  misc_RNA (1)...(19): siRNA sense strand
aggaauggaaagcucuuaa

SEQ ID NO: 2456890 - RNA, 19 nt, Homo sapiens
  misc_RNA (1)...(19): siRNA sense strand
cccaaugaagauacagaau

SEQ ID NO: 2456891 - RNA, 19 nt, Homo sapiens
  misc_RNA (1)...(19): siRNA sense strand
uguuaugcaccuagugaaa

SEQ ID NO: 2456892 - RNA, 19 nt, Homo sapiens
  misc_RNA (1)...(19): siRNA sense strand
caaugugggcagaggccua

SEQ ID NO: 2456893 - RNA, 19 nt, Homo sapiens
  misc_RNA (1)...(19): siRNA sense strand
caaacaaauacgagggaug

SEQ ID NO: 2456894 - RNA, 19 nt, Homo sapiens
  misc_RNA (1)...(19): siRNA sense strand
caacugggcuuccgggaca

SEQ ID NO: 2456895 - RNA, 19 nt, Homo sapiens
  misc_RNA (1)...(19): siRNA sense strand
ggucuucauaggagccaaa

SEQ ID NO: 2456896 - RNA, 19 nt, Homo sapiens
  misc_RNA (1)...(19): siRNA sense strand
gccaaagaccucaggggua

SEQ ID NO: 2456897 - RNA, 19 nt, Homo sapiens
  misc_RNA (1)...(19): siRNA sense strand
acgcaaaacaacugggcuu

SEQ ID NO: 2456898 - RNA, 19 nt, Homo sapiens
  misc_RNA (1)...(19): siRNA sense strand
cugcagagcucguggguga

SEQ ID NO: 2456899 - RNA, 19 nt, Homo sapiens
  misc_RNA (1)...(19): siRNA sense strand
gcccaaaaccuuacagcaa

SEQ ID NO: 2456900 - RNA, 19 nt, Homo sapiens
  misc_RNA (1)...(19): siRNA sense strand
agauaaaagcccagaagga

SEQ ID NO: 2456901 - RNA, 19 nt, Homo sapiens
  misc_RNA (1)...(19): siRNA sense strand
guggagauguggugcgacu

SEQ ID NO: 2456902 - RNA, 19 nt, Homo sapiens
  misc_RNA (1)...(19): siRNA sense strand
ugaauauugugaagcccaa

SEQ ID NO: 2456903 - RNA, 19 nt, Homo sapiens
  misc_RNA (1)...(19): siRNA sense strand
auguguaaugguaggcuua

SEQ ID NO: 2456904 - RNA, 19 nt, Homo sapiens
  misc_RNA (1)...(19): siRNA sense strand
aaaggguggcugaggaaaa

SEQ ID NO: 2456905 - RNA, 19 nt, Homo sapiens
  misc_RNA (1)...(19): siRNA sense strand
uggaaaggguggcugagga

SEQ ID NO: 2456906 - RNA, 19 nt, Homo sapiens
  misc_RNA (1)...(19): siRNA sense strand
ucucagugaacgaggaugu

SEQ ID NO: 2456907 - RNA, 19 nt, Homo sapiens
  misc_RNA (1)...(19): siRNA sense strand
ucggauggugguuggagaa

SEQ ID NO: 2456908 - RNA, 19 nt, Homo sapiens
  misc_RNA (1)...(19): siRNA sense strand
aguucauacaggugagaaa

SEQ ID NO: 2456909 - RNA, 19 nt, Homo sapiens
  misc_RNA (1)...(19): siRNA sense strand
aguccacacaggagagaaa

SEQ ID NO: 2456910 - RNA, 19 nt, Homo sapiens
  misc_RNA (1)...(19): siRNA sense strand
aguccacacaggagagaaa

SEQ ID NO: 2456911 - RNA, 19 nt, Homo sapiens
  misc_RNA (1)...(19): siRNA sense strand
agucagaguucgagccugu

SEQ ID NO: 2456912 - RNA, 19 nt, Homo sapiens
  misc_RNA (1)...(19): siRNA sense strand
auacaggagagaaggucua

SEQ ID NO: 2456913 - RNA, 19 nt, Homo sapiens
  misc_RNA (1)...(19): siRNA sense strand
ggagagaccauacaggaga

SEQ ID NO: 2456914 - RNA, 19 nt, Homo sapiens
  misc_RNA (1)...(19): siRNA sense strand
acacaguggagaagcccua

SEQ ID NO: 2456915 - RNA, 19 nt, Homo sapiens
  misc_RNA (1)...(19): siRNA sense strand
ggucuauaaaugugaugau

SEQ ID NO: 2456916 - RNA, 19 nt, Homo sapiens
  misc_RNA (1)...(19): siRNA sense strand
agaccauacaggagagaag

SEQ ID NO: 2456917 - RNA, 19 nt, Homo sapiens
  misc_RNA (1)...(19): siRNA sense strand
ggcuuuaguaauaguucaa

SEQ ID NO: 2456918 - RNA, 19 nt, Homo sapiens
  misc_RNA (1)...(19): siRNA sense strand
uccacacaaaggagagaaa

SEQ ID NO: 2456919 - RNA, 19 nt, Homo sapiens
  misc_RNA (1)...(19): siRNA sense strand
ucauaggaguggagaacau

SEQ ID NO: 2456920 - RNA, 19 nt, Homo sapiens
  misc_RNA (1)...(19): siRNA sense strand
uggagaacaugcacaauua

SEQ ID NO: 2456921 - RNA, 19 nt, Homo sapiens
  misc_RNA (1)...(19): siRNA sense strand
ccaaguuacucgagucuau

SEQ ID NO: 2456922 - RNA, 19 nt, Homo sapiens
  misc_RNA (1)...(19): siRNA sense strand
aagaaauagccucgagaca

SEQ ID NO: 2456923 - RNA, 19 nt, Homo sapiens
  misc_RNA (1)...(19): siRNA sense strand
gcuacagcuucguggccaa

SEQ ID NO: 2456924 - RNA, 19 nt, Homo sapiens
  misc_RNA (1)...(19): siRNA sense strand
guaugaaagaacagagcca

SEQ ID NO: 2456925 - RNA, 19 nt, Homo sapiens
  misc_RNA (1)...(19): siRNA sense strand
cgaaauucaugaugggaug

SEQ ID NO: 2456926 - RNA, 19 nt, Homo sapiens
  misc_RNA (1)...(19): siRNA sense strand
gcgaaauucaugaugggau

SEQ ID NO: 2456927 - RNA, 19 nt, Homo sapiens
  misc_RNA (1)...(19): siRNA sense strand
gaguggagaacaugcacaa

SEQ ID NO: 2456928 - RNA, 19 nt, Homo sapiens
  misc_RNA (1)...(19): siRNA sense strand
uaguuuggcuugcgaaauu

SEQ ID NO: 2456929 - RNA, 19 nt, Homo sapiens
  misc_RNA (1)...(19): siRNA sense strand
ggacaauauucugcugauu

SEQ ID NO: 2456930 - RNA, 19 nt, Homo sapiens
  misc_RNA (1)...(19): siRNA sense strand
uggugaaaauggaaaagaa

SEQ ID NO: 2456931 - RNA, 19 nt, Homo sapiens
  misc_RNA (1)...(19): siRNA sense strand
gcucuuaguuugugggcug

SEQ ID NO: 2456932 - RNA, 19 nt, Homo sapiens
  misc_RNA (1)...(19): siRNA sense strand
aguaacucaaguagcaaua

SEQ ID NO: 2456933 - RNA, 19 nt, Homo sapiens
  misc_RNA (1)...(19): siRNA sense strand
cucaaguagcaauaaguua

SEQ ID NO: 2456934 - RNA, 19 nt, Homo sapiens
  misc_RNA (1)...(19): siRNA sense strand
ucaucauaggaguggagaa

SEQ ID NO: 2456935 - RNA, 19 nt, Homo sapiens
  misc_RNA (1)...(19): siRNA sense strand
gcuguaaggcgcaugccaa

SEQ ID NO: 2456936 - RNA, 19 nt, Homo sapiens
  misc_RNA (1)...(19): siRNA sense strand
cuggaguauuugaguuaca

SEQ ID NO: 2456937 - RNA, 19 nt, Homo sapiens
  misc_RNA (1)...(19): siRNA sense strand
ucuuguacaaaguggaauu

SEQ ID NO: 2456938 - RNA, 19 nt, Homo sapiens
  misc_RNA (1)...(19): siRNA sense strand
acaacauugaugagcauuu

SEQ ID NO: 2456939 - RNA, 19 nt, Homo sapiens
  misc_RNA (1)...(19): siRNA sense strand
guggagaacaugcacaauu

SEQ ID NO: 2456940 - RNA, 19 nt, Homo sapiens
  misc_RNA (1)...(19): siRNA sense strand
ggauguuucggaaggauga

SEQ ID NO: 2456941 - RNA, 19 nt, Homo sapiens
  misc_RNA (1)...(19): siRNA sense strand
acuaguuuggcuugcgaaa

SEQ ID NO: 2456942 - RNA, 19 nt, Homo sapiens
  misc_RNA (1)...(19): siRNA sense strand
gaacugacuuccucacaga

SEQ ID NO: 2456943 - RNA, 19 nt, Homo sapiens
  misc_RNA (1)...(19): siRNA sense strand
gcuagcagccauuugguuu

SEQ ID NO: 2456944 - RNA, 19 nt, Homo sapiens
  misc_RNA (1)...(19): siRNA sense strand
guuugaugaaggagaaaau

SEQ ID NO: 2456945 - RNA, 19 nt, Homo sapiens
  misc_RNA (1)...(19): siRNA sense strand
uaucuuugacuauggacaa

SEQ ID NO: 2456946 - RNA, 19 nt, Homo sapiens
  misc_RNA (1)...(19): siRNA sense strand
gugaaaauggaaaagaaga

SEQ ID NO: 2456947 - RNA, 19 nt, Homo sapiens
  misc_RNA (1)...(19): siRNA sense strand
agacacaguaugaaagaac

SEQ ID NO: 2456948 - RNA, 19 nt, Homo sapiens
  misc_RNA (1)...(19): siRNA sense strand
caucauaggaguggagaac

SEQ ID NO: 2456949 - RNA, 19 nt, Homo sapiens
  misc_RNA (1)...(19): siRNA sense strand
auggaaaagaagagacaca

SEQ ID NO: 2456950 - RNA, 19 nt, Homo sapiens
  misc_RNA (1)...(19): siRNA sense strand
aguacaacauugaugagca

SEQ ID NO: 2456951 - RNA, 19 nt, Homo sapiens
  misc_RNA (1)...(19): siRNA sense strand
gggucaaaauggaucaaaa

SEQ ID NO: 2456952 - RNA, 19 nt, Homo sapiens
  misc_RNA (1)...(19): siRNA sense strand
ucuuaaagcaaaugaggau

SEQ ID NO: 2456953 - RNA, 19 nt, Homo sapiens
  misc_RNA (1)...(19): siRNA sense strand
auaaggaagaauagcacaa

SEQ ID NO: 2456954 - RNA, 19 nt, Homo sapiens
  misc_RNA (1)...(19): siRNA sense strand
agagacugaacaaggaaua

SEQ ID NO: 2456955 - RNA, 19 nt, Homo sapiens
  misc_RNA (1)...(19): siRNA sense strand
aggaauaccaagagauuuu

SEQ ID NO: 2456956 - RNA, 19 nt, Homo sapiens
  misc_RNA (1)...(19): siRNA sense strand
agagaaaucuauaugagga

SEQ ID NO: 2456957 - RNA, 19 nt, Homo sapiens
  misc_RNA (1)...(19): siRNA sense strand
ugaaagaaauguaucagga

SEQ ID NO: 2456958 - RNA, 19 nt, Homo sapiens
  misc_RNA (1)...(19): siRNA sense strand
auuccugagcucugagaaa

SEQ ID NO: 2456959 - RNA, 19 nt, Homo sapiens
  misc_RNA (1)...(19): siRNA sense strand
auuuagagagacugaacaa

SEQ ID NO: 2456960 - RNA, 19 nt, Homo sapiens
  misc_RNA (1)...(19): siRNA sense strand
ugguuaacucugaggacau

SEQ ID NO: 2456961 - RNA, 19 nt, Homo sapiens
  misc_RNA (1)...(19): siRNA sense strand
caagaaaaucagagaaauc

SEQ ID NO: 2456962 - RNA, 19 nt, Homo sapiens
  misc_RNA (1)...(19): siRNA sense strand
aggcaaacaaagaagaugu

SEQ ID NO: 2456963 - RNA, 19 nt, Homo sapiens
  misc_RNA (1)...(19): siRNA sense strand
ugaggaacaccgggagaaa

SEQ ID NO: 2456964 - RNA, 19 nt, Homo sapiens
  misc_RNA (1)...(19): siRNA sense strand
ggacugguguacaggcuca

SEQ ID NO: 2456965 - RNA, 19 nt, Homo sapiens
  misc_RNA (1)...(19): siRNA sense strand
aggaaugaguauaggaagc

SEQ ID NO: 2456966 - RNA, 19 nt, Homo sapiens
  misc_RNA (1)...(19): siRNA sense strand
aagaaauguaucaggaacu

SEQ ID NO: 2456967 - RNA, 19 nt, Homo sapiens
  misc_RNA (1)...(19): siRNA sense strand
aucaggaacuaauggaaau

SEQ ID NO: 2456968 - RNA, 19 nt, Homo sapiens
  misc_RNA (1)...(19): siRNA sense strand
ugaaaguggaagugugagu

SEQ ID NO: 2456969 - RNA, 19 nt, Homo sapiens
  misc_RNA (1)...(19): siRNA sense strand
cuccagagaaguuggguca

SEQ ID NO: 2456970 - RNA, 19 nt, Homo sapiens
  misc_RNA (1)...(19): siRNA sense strand
acccauaggcaaacaaaga

SEQ ID NO: 2456971 - RNA, 19 nt, Homo sapiens
  misc_RNA (1)...(19): siRNA sense strand
ccgaaaauggacuucaaaa

SEQ ID NO: 2456972 - RNA, 19 nt, Homo sapiens
  misc_RNA (1)...(19): siRNA sense strand
cuauaugaggagggaagaa

SEQ ID NO: 2456973 - RNA, 19 nt, Homo sapiens
  misc_RNA (1)...(19): siRNA sense strand
gcgucaucuguuugaacua

SEQ ID NO: 2456974 - RNA, 19 nt, Homo sapiens
  misc_RNA (1)...(19): siRNA sense strand
gaaacaaauaugugggacc

SEQ ID NO: 2456975 - RNA, 19 nt, Homo sapiens
  misc_RNA (1)...(19): siRNA sense strand
gcugaggaacaccgggaga

SEQ ID NO: 2456976 - RNA, 19 nt, Homo sapiens
  misc_RNA (1)...(19): siRNA sense strand
aggaacaccgggagaaacu

SEQ ID NO: 2456977 - RNA, 19 nt, Homo sapiens
  misc_RNA (1)...(19): siRNA sense strand
gugacauggacaagagucu

SEQ ID NO: 2456978 - RNA, 19 nt, Homo sapiens
  misc_RNA (1)...(19): siRNA sense strand
guucagcagcagcgggaaa

SEQ ID NO: 2456979 - RNA, 19 nt, Homo sapiens
  misc_RNA (1)...(19): siRNA sense strand
cugcagagcugggaggaga

SEQ ID NO: 2456980 - RNA, 19 nt, Homo sapiens
  misc_RNA (1)...(19): siRNA sense strand
agaaagggcugccggagga

SEQ ID NO: 2456981 - RNA, 19 nt, Homo sapiens
  misc_RNA (1)...(19): siRNA sense strand
aggacgaggacgaggaaac

SEQ ID NO: 2456982 - RNA, 19 nt, Homo sapiens
  misc_RNA (1)...(19): siRNA sense strand
gagcgcaggcguaaggaga

SEQ ID NO: 2456983 - RNA, 19 nt, Homo sapiens
  misc_RNA (1)...(19): siRNA sense strand
ccaacaggcugcagagcug

SEQ ID NO: 2456984 - RNA, 19 nt, Homo sapiens
  misc_RNA (1)...(19): siRNA sense strand
agaucaugcagcuggugaa

SEQ ID NO: 2456985 - RNA, 19 nt, Homo sapiens
  misc_RNA (1)...(19): siRNA sense strand
gguaugacguucuggagcu

SEQ ID NO: 2456986 - RNA, 19 nt, Homo sapiens
  misc_RNA (1)...(19): siRNA sense strand
uggaagagaucaugcagcu

SEQ ID NO: 2456987 - RNA, 19 nt, Homo sapiens
  misc_RNA (1)...(19): siRNA sense strand
ggucagauuacuacgggau

SEQ ID NO: 2456988 - RNA, 19 nt, Homo sapiens
  misc_RNA (1)...(19): siRNA sense strand
guggaaggcugcaaggcga

SEQ ID NO: 2456989 - RNA, 19 nt, Homo sapiens
  misc_RNA (1)...(19): siRNA sense strand
gcgaguaucuggaugguag

SEQ ID NO: 2456990 - RNA, 19 nt, Homo sapiens
  misc_RNA (1)...(19): siRNA sense strand
ccgacugggcuguuggaga

SEQ ID NO: 2456991 - RNA, 19 nt, Homo sapiens
  misc_RNA (1)...(19): siRNA sense strand
ccgcaggcuguuuguggaa

SEQ ID NO: 2456992 - RNA, 19 nt, Homo sapiens
  misc_RNA (1)...(19): siRNA sense strand
gaggauuacuucagcagca

SEQ ID NO: 2456993 - RNA, 19 nt, Homo sapiens
  misc_RNA (1)...(19): siRNA sense strand
aguucauggucacggagaa

SEQ ID NO: 2456994 - RNA, 19 nt, Homo sapiens
  misc_RNA (1)...(19): siRNA sense strand
aagaaagagaagagaagaa

SEQ ID NO: 2456995 - RNA, 19 nt, Homo sapiens
  misc_RNA (1)...(19): siRNA sense strand
ucgaaagggaagagaagaa

SEQ ID NO: 2456996 - RNA, 19 nt, Homo sapiens
  misc_RNA (1)...(19): siRNA sense strand
cagaaaugaaagaaagaga

SEQ ID NO: 2456997 - RNA, 19 nt, Homo sapiens
  misc_RNA (1)...(19): siRNA sense strand
aguuaaaguuggccagaga

SEQ ID NO: 2456998 - RNA, 19 nt, Homo sapiens
  misc_RNA (1)...(19): siRNA sense strand
agagaagagaagaaggcua

SEQ ID NO: 2456999 - RNA, 19 nt, Homo sapiens
  misc_RNA (1)...(19): siRNA sense strand
gaacaacgcuacaggccuu

SEQ ID NO: 2457000 - RNA, 19 nt, Homo sapiens
  misc_RNA (1)...(19): siRNA sense strand
caccgaaguauuagaacaa

SEQ ID NO: 2457001 - RNA, 19 nt, Homo sapiens
  misc_RNA (1)...(19): siRNA sense strand
gggaagagaagaaaagaga

SEQ ID NO: 2457002 - RNA, 19 nt, Homo sapiens
  misc_RNA (1)...(19): siRNA sense strand
aggcuaaccucgaaaggga

SEQ ID NO: 2457003 - RNA, 19 nt, Homo sapiens
  misc_RNA (1)...(19): siRNA sense strand
ggagcucagaagagaggaa

SEQ ID NO: 2457004 - RNA, 19 nt, Homo sapiens
  misc_RNA (1)...(19): siRNA sense strand
aagaaauggaucugugaca

SEQ ID NO: 2457005 - RNA, 19 nt, Homo sapiens
  misc_RNA (1)...(19): siRNA sense strand
agaacaauuccgaagugaa

SEQ ID NO: 2457006 - RNA, 19 nt, Homo sapiens
  misc_RNA (1)...(19): siRNA sense strand
aggcagaaagcaauaucaa

SEQ ID NO: 2457007 - RNA, 19 nt, Homo sapiens
  misc_RNA (1)...(19): siRNA sense strand
aaccaaucgaugaguuaaa

SEQ ID NO: 2457008 - RNA, 19 nt, Homo sapiens
  misc_RNA (1)...(19): siRNA sense strand
gaaagggaagagaagaaaa

SEQ ID NO: 2457009 - RNA, 19 nt, Homo sapiens
  misc_RNA (1)...(19): siRNA sense strand
ccucgaaagggaagagaag

SEQ ID NO: 2457010 - RNA, 19 nt, Homo sapiens
  misc_RNA (1)...(19): siRNA sense strand
cuguaggaaaucaguacua

SEQ ID NO: 2457011 - RNA, 19 nt, Homo sapiens
  misc_RNA (1)...(19): siRNA sense strand
ccgagauaucaccgaagua

SEQ ID NO: 2457012 - RNA, 19 nt, Homo sapiens
  misc_RNA (1)...(19): siRNA sense strand
ccaucaaugcauuuaucaa

SEQ ID NO: 2457013 - RNA, 19 nt, Homo sapiens
  misc_RNA (1)...(19): siRNA sense strand
caacguugcggguggcaga

SEQ ID NO: 2457014 - RNA, 19 nt, Homo sapiens
  misc_RNA (1)...(19): siRNA sense strand
gagaggaauggcugcaaaa

SEQ ID NO: 2457015 - RNA, 19 nt, Homo sapiens
  misc_RNA (1)...(19): siRNA sense strand
cuggaggaguuugcagaaa

SEQ ID NO: 2457016 - RNA, 19 nt, Homo sapiens
  misc_RNA (1)...(19): siRNA sense strand
aaguauuagaacaacgcua

SEQ ID NO: 2457017 - RNA, 19 nt, Homo sapiens
  misc_RNA (1)...(19): siRNA sense strand
augcaauggcugucaggau

SEQ ID NO: 2457018 - RNA, 19 nt, Homo sapiens
  misc_RNA (1)...(19): siRNA sense strand
ucuuaggcagaaagcaaua

SEQ ID NO: 2457019 - RNA, 19 nt, Homo sapiens
  misc_RNA (1)...(19): siRNA sense strand
ggacagaguucacagacca

SEQ ID NO: 2457020 - RNA, 19 nt, Homo sapiens
  misc_RNA (1)...(19): siRNA sense strand
cggagguggccgugaagau

SEQ ID NO: 2457021 - RNA, 19 nt, Homo sapiens
  misc_RNA (1)...(19): siRNA sense strand
guuaaggagcugugcacga

SEQ ID NO: 2457022 - RNA, 19 nt, Homo sapiens
  misc_RNA (1)...(19): siRNA sense strand
aggccaaugccgagcggau

SEQ ID NO: 2457023 - RNA, 19 nt, Homo sapiens
  misc_RNA (1)...(19): siRNA sense strand
gggcuuggggcuaggagua

SEQ ID NO: 2457024 - RNA, 19 nt, Homo sapiens
  misc_RNA (1)...(19): siRNA sense strand
gcaucagccgcuuggccaa

SEQ ID NO: 2457025 - RNA, 19 nt, Homo sapiens
  misc_RNA (1)...(19): siRNA sense strand
cagcugauggagacagaga

SEQ ID NO: 2457026 - RNA, 19 nt, Homo sapiens
  misc_RNA (1)...(19): siRNA sense strand
ccggcauagcccagagcau

SEQ ID NO: 2457027 - RNA, 19 nt, Homo sapiens
  misc_RNA (1)...(19): siRNA sense strand
acguggaggcagugaugau

SEQ ID NO: 2457028 - RNA, 19 nt, Homo sapiens
  misc_RNA (1)...(19): siRNA sense strand
agacagagcccgaggguag

SEQ ID NO: 2457029 - RNA, 19 nt, Homo sapiens
  misc_RNA (1)...(19): siRNA sense strand
ugcuaaagaaggaggagaa

SEQ ID NO: 2457030 - RNA, 19 nt, Homo sapiens
  misc_RNA (1)...(19): siRNA sense strand
ccaagaaagagaaggagga

SEQ ID NO: 2457031 - RNA, 19 nt, Homo sapiens
  misc_RNA (1)...(19): siRNA sense strand
agaccaagaaagagaagga

SEQ ID NO: 2457032 - RNA, 19 nt, Homo sapiens
  misc_RNA (1)...(19): siRNA sense strand
agaaagagaaggaggaccu

SEQ ID NO: 2457033 - RNA, 19 nt, Homo sapiens
  misc_RNA (1)...(19): siRNA sense strand
aagccaaagcggaagaaaa

SEQ ID NO: 2457034 - RNA, 19 nt, Homo sapiens
  misc_RNA (1)...(19): siRNA sense strand
agaaggaggagaaggagga

SEQ ID NO: 2457035 - RNA, 19 nt, Homo sapiens
  misc_RNA (1)...(19): siRNA sense strand
acagugacaaagugggcaa

SEQ ID NO: 2457036 - RNA, 19 nt, Homo sapiens
  misc_RNA (1)...(19): siRNA sense strand
aggagaaggaggagccagu

SEQ ID NO: 2457037 - RNA, 19 nt, Homo sapiens
  misc_RNA (1)...(19): siRNA sense strand
agacccugacagugacaaa

SEQ ID NO: 2457038 - RNA, 19 nt, Homo sapiens
  misc_RNA (1)...(19): siRNA sense strand
caaucuugugcaucggaaa

SEQ ID NO: 2457039 - RNA, 19 nt, Homo sapiens
  misc_RNA (1)...(19): siRNA sense strand
acgugaacugccugaagaa

SEQ ID NO: 2457040 - RNA, 19 nt, Homo sapiens
  misc_RNA (1)...(19): siRNA sense strand
gcauauggauucagugccu

SEQ ID NO: 2457041 - RNA, 19 nt, Homo sapiens
  misc_RNA (1)...(19): siRNA sense strand
aacuauaaauguugccaga

SEQ ID NO: 2457042 - RNA, 19 nt, Homo sapiens
  misc_RNA (1)...(19): siRNA sense strand
ugguacuggagaauaauaa

SEQ ID NO: 2457043 - RNA, 19 nt, Homo sapiens
  misc_RNA (1)...(19): siRNA sense strand
auaaauguugccagaguga

SEQ ID NO: 2457044 - RNA, 19 nt, Homo sapiens
  misc_RNA (1)...(19): siRNA sense strand
gagugaaaacugcagcaaa

SEQ ID NO: 2457045 - RNA, 19 nt, Homo sapiens
  misc_RNA (1)...(19): siRNA sense strand
gcaccaagaucacgggcga

SEQ ID NO: 2457046 - RNA, 19 nt, Homo sapiens
  misc_RNA (1)...(19): siRNA sense strand
ucgucuggcuggagcugaa

SEQ ID NO: 2457047 - RNA, 19 nt, Homo sapiens
  misc_RNA (1)...(19): siRNA sense strand
agauugugaagaaggauga

SEQ ID NO: 2457048 - RNA, 19 nt, Homo sapiens
  misc_RNA (1)...(19): siRNA sense strand
gggcgugagcuccaggaau

SEQ ID NO: 2457049 - RNA, 19 nt, Homo sapiens
  misc_RNA (1)...(19): siRNA sense strand
agaaagagcaugaagcaga

SEQ ID NO: 2457050 - RNA, 19 nt, Homo sapiens
  misc_RNA (1)...(19): siRNA sense strand
caacauaacuagagaccuc

SEQ ID NO: 2457051 - RNA, 19 nt, Homo sapiens
  misc_RNA (1)...(19): siRNA sense strand
cagccuacaugaagcgcaa

SEQ ID NO: 2457052 - RNA, 19 nt, Homo sapiens
  misc_RNA (1)...(19): siRNA sense strand
cggauaucaaagaggccaa

SEQ ID NO: 2457053 - RNA, 19 nt, Homo sapiens
  misc_RNA (1)...(19): siRNA sense strand
auccauaaccacagaaaga

SEQ ID NO: 2457054 - RNA, 19 nt, Homo sapiens
  misc_RNA (1)...(19): siRNA sense strand
caccauaccuggagcgugu

SEQ ID NO: 2457055 - RNA, 19 nt, Homo sapiens
  misc_RNA (1)...(19): siRNA sense strand
ugacaguaaaggagaccau

SEQ ID NO: 2457056 - RNA, 19 nt, Homo sapiens
  misc_RNA (1)...(19): siRNA sense strand
gugugaaacagcaagccaa

SEQ ID NO: 2457057 - RNA, 19 nt, Homo sapiens
  misc_RNA (1)...(19): siRNA sense strand
cuggagugcugcugaggau

SEQ ID NO: 2457058 - RNA, 19 nt, Homo sapiens
  misc_RNA (1)...(19): siRNA sense strand
uggacgacuucaaagggaa

SEQ ID NO: 2457059 - RNA, 19 nt, Homo sapiens
  misc_RNA (1)...(19): siRNA sense strand
augaaauggugcugcggga

SEQ ID NO: 2457060 - RNA, 19 nt, Homo sapiens
  misc_RNA (1)...(19): siRNA sense strand
aguauuacguagcagguca

SEQ ID NO: 2457061 - RNA, 19 nt, Homo sapiens
  misc_RNA (1)...(19): siRNA sense strand
gggaaaaggagaccaccaa

SEQ ID NO: 2457062 - RNA, 19 nt, Homo sapiens
  misc_RNA (1)...(19): siRNA sense strand
auaccuggagcgugugaaa

SEQ ID NO: 2457063 - RNA, 19 nt, Homo sapiens
  misc_RNA (1)...(19): siRNA sense strand
ccccaauggcacagagcua

SEQ ID NO: 2457064 - RNA, 19 nt, Homo sapiens
  misc_RNA (1)...(19): siRNA sense strand
acaacaaccguuugagagu

SEQ ID NO: 2457065 - RNA, 19 nt, Homo sapiens
  misc_RNA (1)...(19): siRNA sense strand
uggaagauauggagggugc

SEQ ID NO: 2457066 - RNA, 19 nt, Homo sapiens
  misc_RNA (1)...(19): siRNA sense strand
cagaauggcaagaugucca

SEQ ID NO: 2457067 - RNA, 19 nt, Homo sapiens
  misc_RNA (1)...(19): siRNA sense strand
augauggugaggagaagaa

SEQ ID NO: 2457068 - RNA, 19 nt, Homo sapiens
  misc_RNA (1)...(19): siRNA sense strand
cgagagaacuggauugcgu

SEQ ID NO: 2457069 - RNA, 19 nt, Homo sapiens
  misc_RNA (1)...(19): siRNA sense strand
ugugcaaacccgagagaac

SEQ ID NO: 2457070 - RNA, 19 nt, Homo sapiens
  misc_RNA (1)...(19): siRNA sense strand
ggaaacagauuaaagccaa

SEQ ID NO: 2457071 - RNA, 19 nt, Homo sapiens
  misc_RNA (1)...(19): siRNA sense strand
ggaaaguguugauuggaca

SEQ ID NO: 2457072 - RNA, 19 nt, Homo sapiens
  misc_RNA (1)...(19): siRNA sense strand
acaugaaggcauugagaca

SEQ ID NO: 2457073 - RNA, 19 nt, Homo sapiens
  misc_RNA (1)...(19): siRNA sense strand
acucaugguaguagaagaa

SEQ ID NO: 2457074 - RNA, 19 nt, Homo sapiens
  misc_RNA (1)...(19): siRNA sense strand
aguggaugauuuaggacaa

SEQ ID NO: 2457075 - RNA, 19 nt, Homo sapiens
  misc_RNA (1)...(19): siRNA sense strand
uggagaaaugguugaggaa

SEQ ID NO: 2457076 - RNA, 19 nt, Homo sapiens
  misc_RNA (1)...(19): siRNA sense strand
ccucaauggaaaagaagua

SEQ ID NO: 2457077 - RNA, 19 nt, Homo sapiens
  misc_RNA (1)...(19): siRNA sense strand
ucaugguaguagaagaaau

SEQ ID NO: 2457078 - RNA, 19 nt, Homo sapiens
  misc_RNA (1)...(19): siRNA sense strand
cuuccugacauuugugaaa

SEQ ID NO: 2457079 - RNA, 19 nt, Homo sapiens
  misc_RNA (1)...(19): siRNA sense strand
cuuaaaacacagaagagua

SEQ ID NO: 2457080 - RNA, 19 nt, Homo sapiens
  misc_RNA (1)...(19): siRNA sense strand
gcucccgguuuuagagaaa

SEQ ID NO: 2457081 - RNA, 19 nt, Homo sapiens
  misc_RNA (1)...(19): siRNA sense strand
cagaagaaucuaagagagc

SEQ ID NO: 2457082 - RNA, 19 nt, Homo sapiens
  misc_RNA (1)...(19): siRNA sense strand
uggaaaagaaguaguggau

SEQ ID NO: 2457083 - RNA, 19 nt, Homo sapiens
  misc_RNA (1)...(19): siRNA sense strand
agauuaaagccaagcauac

SEQ ID NO: 2457084 - RNA, 19 nt, Homo sapiens
  misc_RNA (1)...(19): siRNA sense strand
gacucaugguaguagaaga

SEQ ID NO: 2457085 - RNA, 19 nt, Homo sapiens
  misc_RNA (1)...(19): siRNA sense strand
gguaauggugugagucgga

SEQ ID NO: 2457086 - RNA, 19 nt, Homo sapiens
  misc_RNA (1)...(19): siRNA sense strand
gaagaaucuaagagagccu

SEQ ID NO: 2457087 - RNA, 19 nt, Homo sapiens
  misc_RNA (1)...(19): siRNA sense strand
ucaguaugaaccugggcaa

SEQ ID NO: 2457088 - RNA, 19 nt, Homo sapiens
  misc_RNA (1)...(19): siRNA sense strand
aggaaacagauuaaagcca

SEQ ID NO: 2457089 - RNA, 19 nt, Homo sapiens
  misc_RNA (1)...(19): siRNA sense strand
guagauaaagauaagccau

SEQ ID NO: 2457090 - RNA, 19 nt, Homo sapiens
  misc_RNA (1)...(19): siRNA sense strand
ccaagaaagccaaagccaa

SEQ ID NO: 2457091 - RNA, 19 nt, Homo sapiens
  misc_RNA (1)...(19): siRNA sense strand
cugccuugguugaggauau

SEQ ID NO: 2457092 - RNA, 19 nt, Homo sapiens
  misc_RNA (1)...(19): siRNA sense strand
uggcagaacuggacaggca

SEQ ID NO: 2457093 - RNA, 19 nt, Homo sapiens
  misc_RNA (1)...(19): siRNA sense strand
aagccaaagccaaagggaa

SEQ ID NO: 2457094 - RNA, 19 nt, Homo sapiens
  misc_RNA (1)...(19): siRNA sense strand
gucccaaaccagagugaau

SEQ ID NO: 2457095 - RNA, 19 nt, Homo sapiens
  misc_RNA (1)...(19): siRNA sense strand
acuuggaagaggugaauga

SEQ ID NO: 2457096 - RNA, 19 nt, Homo sapiens
  misc_RNA (1)...(19): siRNA sense strand
ucaacuuggaagaggugaa

SEQ ID NO: 2457097 - RNA, 19 nt, Homo sapiens
  misc_RNA (1)...(19): siRNA sense strand
auagaagcucucaaggaua

SEQ ID NO: 2457098 - RNA, 19 nt, Homo sapiens
  misc_RNA (1)...(19): siRNA sense strand
acaacauggccauaggcaa

SEQ ID NO: 2457099 - RNA, 19 nt, Homo sapiens
  misc_RNA (1)...(19): siRNA sense strand
ccgaugacacaguggcaga

SEQ ID NO: 2457100 - RNA, 19 nt, Homo sapiens
  misc_RNA (1)...(19): siRNA sense strand
gauuaaagugcuuccgcau

SEQ ID NO: 2457101 - RNA, 19 nt, Homo sapiens
  misc_RNA (1)...(19): siRNA sense strand
aggugaaugaagaaaugaa

SEQ ID NO: 2457102 - RNA, 19 nt, Homo sapiens
  misc_RNA (1)...(19): siRNA sense strand
ugaaagacaacauggccau

SEQ ID NO: 2457103 - RNA, 19 nt, Homo sapiens
  misc_RNA (1)...(19): siRNA sense strand
aucaaggcuauaagagaaa

SEQ ID NO: 2457104 - RNA, 19 nt, Homo sapiens
  misc_RNA (1)...(19): siRNA sense strand
ccauuuugcuaccaagaaa

SEQ ID NO: 2457105 - RNA, 19 nt, Homo sapiens
  misc_RNA (1)...(19): siRNA sense strand
aagccaaagggaaaggaca

SEQ ID NO: 2457106 - RNA, 19 nt, Homo sapiens
  misc_RNA (1)...(19): siRNA sense strand
aagaggugaaugaagaaau

SEQ ID NO: 2457107 - RNA, 19 nt, Homo sapiens
  misc_RNA (1)...(19): siRNA sense strand
ccaagaaagccaaagccaa

SEQ ID NO: 2457108 - RNA, 19 nt, Homo sapiens
  misc_RNA (1)...(19): siRNA sense strand
cugccuugguugaggauau

SEQ ID NO: 2457109 - RNA, 19 nt, Homo sapiens
  misc_RNA (1)...(19): siRNA sense strand
aagccaaagccaaagggaa

SEQ ID NO: 2457110 - RNA, 19 nt, Homo sapiens
  misc_RNA (1)...(19): siRNA sense strand
gucccaaaccagagugaau

SEQ ID NO: 2457111 - RNA, 19 nt, Homo sapiens
  misc_RNA (1)...(19): siRNA sense strand
acuuggaagaggugaauga

SEQ ID NO: 2457112 - RNA, 19 nt, Homo sapiens
  misc_RNA (1)...(19): siRNA sense strand
ucaacuuggaagaggugaa

SEQ ID NO: 2457113 - RNA, 19 nt, Homo sapiens
  misc_RNA (1)...(19): siRNA sense strand
auagaagcucucaaggaua

SEQ ID NO: 2457114 - RNA, 19 nt, Homo sapiens
  misc_RNA (1)...(19): siRNA sense strand
acaacauggccauaggcaa

SEQ ID NO: 2457115 - RNA, 19 nt, Homo sapiens
  misc_RNA (1)...(19): siRNA sense strand
gauuaaagugcuuccgcau

SEQ ID NO: 2457116 - RNA, 19 nt, Homo sapiens
  misc_RNA (1)...(19): siRNA sense strand
aggugaaugaagaaaugaa

SEQ ID NO: 2457117 - RNA, 19 nt, Homo sapiens
  misc_RNA (1)...(19): siRNA sense strand
ugaaagacaacauggccau

SEQ ID NO: 2457118 - RNA, 19 nt, Homo sapiens
  misc_RNA (1)...(19): siRNA sense strand
ccauuuugcuaccaagaaa

SEQ ID NO: 2457119 - RNA, 19 nt, Homo sapiens
  misc_RNA (1)...(19): siRNA sense strand
aagccaaagggaaaggaca

SEQ ID NO: 2457120 - RNA, 19 nt, Homo sapiens
  misc_RNA (1)...(19): siRNA sense strand
aagaggugaaugaagaaau

SEQ ID NO: 2457121 - RNA, 19 nt, Homo sapiens
  misc_RNA (1)...(19): siRNA sense strand
ccaagaaagccaaagccaa

SEQ ID NO: 2457122 - RNA, 19 nt, Homo sapiens
  misc_RNA (1)...(19): siRNA sense strand
cugccuugguugaggauau

SEQ ID NO: 2457123 - RNA, 19 nt, Homo sapiens
  misc_RNA (1)...(19): siRNA sense strand
uggcagaacuggacaggca

SEQ ID NO: 2457124 - RNA, 19 nt, Homo sapiens
  misc_RNA (1)...(19): siRNA sense strand
aagccaaagccaaagggaa

SEQ ID NO: 2457125 - RNA, 19 nt, Homo sapiens
  misc_RNA (1)...(19): siRNA sense strand
gucccaaaccagagugaau

SEQ ID NO: 2457126 - RNA, 19 nt, Homo sapiens
  misc_RNA (1)...(19): siRNA sense strand
acuuggaagaggugaauga

SEQ ID NO: 2457127 - RNA, 19 nt, Homo sapiens
  misc_RNA (1)...(19): siRNA sense strand
ucaacuuggaagaggugaa

SEQ ID NO: 2457128 - RNA, 19 nt, Homo sapiens
  misc_RNA (1)...(19): siRNA sense strand
auagaagcucucaaggaua

SEQ ID NO: 2457129 - RNA, 19 nt, Homo sapiens
  misc_RNA (1)...(19): siRNA sense strand
acaacauggccauaggcaa

SEQ ID NO: 2457130 - RNA, 19 nt, Homo sapiens
  misc_RNA (1)...(19): siRNA sense strand
ccgaugacacaguggcaga

SEQ ID NO: 2457131 - RNA, 19 nt, Homo sapiens
  misc_RNA (1)...(19): siRNA sense strand
gauuaaagugcuuccgcau

SEQ ID NO: 2457132 - RNA, 19 nt, Homo sapiens
  misc_RNA (1)...(19): siRNA sense strand
aggugaaugaagaaaugaa

SEQ ID NO: 2457133 - RNA, 19 nt, Homo sapiens
  misc_RNA (1)...(19): siRNA sense strand
ugaaagacaacauggccau

SEQ ID NO: 2457134 - RNA, 19 nt, Homo sapiens
  misc_RNA (1)...(19): siRNA sense strand
aucaaggcuauaagagaaa

SEQ ID NO: 2457135 - RNA, 19 nt, Homo sapiens
  misc_RNA (1)...(19): siRNA sense strand
ccauuuugcuaccaagaaa

SEQ ID NO: 2457136 - RNA, 19 nt, Homo sapiens
  misc_RNA (1)...(19): siRNA sense strand
aagccaaagggaaaggaca

SEQ ID NO: 2457137 - RNA, 19 nt, Homo sapiens
  misc_RNA (1)...(19): siRNA sense strand
aagaggugaaugaagaaau

SEQ ID NO: 2457138 - RNA, 19 nt, Homo sapiens
  misc_RNA (1)...(19): siRNA sense strand
guggcuaauuccaggacaa

SEQ ID NO: 2457139 - RNA, 19 nt, Homo sapiens
  misc_RNA (1)...(19): siRNA sense strand
gggcagcagaagaggccaa

SEQ ID NO: 2457140 - RNA, 19 nt, Homo sapiens
  misc_RNA (1)...(19): siRNA sense strand
cugacagagaagaggagua

SEQ ID NO: 2457141 - RNA, 19 nt, Homo sapiens
  misc_RNA (1)...(19): siRNA sense strand
gcuuauggucggaggagca

SEQ ID NO: 2457142 - RNA, 19 nt, Homo sapiens
  misc_RNA (1)...(19): siRNA sense strand
agacagguauagaagccaa

SEQ ID NO: 2457143 - RNA, 19 nt, Homo sapiens
  misc_RNA (1)...(19): siRNA sense strand
caggacaagagcaggaaca

SEQ ID NO: 2457144 - RNA, 19 nt, Homo sapiens
  misc_RNA (1)...(19): siRNA sense strand
ccauucgaacugagaguau

SEQ ID NO: 2457145 - RNA, 19 nt, Homo sapiens
  misc_RNA (1)...(19): siRNA sense strand
gcggaggacucaaggugca

SEQ ID NO: 2457146 - RNA, 19 nt, Homo sapiens
  misc_RNA (1)...(19): siRNA sense strand
agcaggaacauguggagua

SEQ ID NO: 2457147 - RNA, 19 nt, Homo sapiens
  misc_RNA (1)...(19): siRNA sense strand
gggcuguguaccuggguga

SEQ ID NO: 2457148 - RNA, 19 nt, Homo sapiens
  misc_RNA (1)...(19): siRNA sense strand
cgguagugacuguacucua

SEQ ID NO: 2457149 - RNA, 19 nt, Homo sapiens
  misc_RNA (1)...(19): siRNA sense strand
aagaagaauguggugguaa

SEQ ID NO: 2457150 - RNA, 19 nt, Homo sapiens
  misc_RNA (1)...(19): siRNA sense strand
ggagagaaacauuacagga

SEQ ID NO: 2457151 - RNA, 19 nt, Homo sapiens
  misc_RNA (1)...(19): siRNA sense strand
gcguggagguugcagagga

SEQ ID NO: 2457152 - RNA, 19 nt, Homo sapiens
  misc_RNA (1)...(19): siRNA sense strand
cuggggaagcugaggacaa

SEQ ID NO: 2457153 - RNA, 19 nt, Homo sapiens
  misc_RNA (1)...(19): siRNA sense strand
aguauuacacagagccaga

SEQ ID NO: 2457154 - RNA, 19 nt, Homo sapiens
  misc_RNA (1)...(19): siRNA sense strand
ccaagaagaaugugguggu

SEQ ID NO: 2457155 - RNA, 19 nt, Homo sapiens
  misc_RNA (1)...(19): siRNA sense strand
ggacaagugcuuugggaga

SEQ ID NO: 2457156 - RNA, 19 nt, Homo sapiens
  misc_RNA (1)...(19): siRNA sense strand
gggugaaggagaaggccaa

SEQ ID NO: 2457157 - RNA, 19 nt, Homo sapiens
  misc_RNA (1)...(19): siRNA sense strand
cugaaguccaaaaggauaa

SEQ ID NO: 2457158 - RNA, 19 nt, Homo sapiens
  misc_RNA (1)...(19): siRNA sense strand
ccuuaaugcacaugcuaca

SEQ ID NO: 2457159 - RNA, 19 nt, Homo sapiens
  misc_RNA (1)...(19): siRNA sense strand
gcggcagacagcuggagaa

SEQ ID NO: 2457160 - RNA, 19 nt, Homo sapiens
  misc_RNA (1)...(19): siRNA sense strand
ugaccgagguggagaggac

SEQ ID NO: 2457161 - RNA, 19 nt, Homo sapiens
  misc_RNA (1)...(19): siRNA sense strand
cugcugacuuggaucggaa

SEQ ID NO: 2457162 - RNA, 19 nt, Homo sapiens
  misc_RNA (1)...(19): siRNA sense strand
cugaaaugucguugccuga

SEQ ID NO: 2457163 - RNA, 19 nt, Homo sapiens
  misc_RNA (1)...(19): siRNA sense strand
ugcuuaaguugcagacgaa

SEQ ID NO: 2457164 - RNA, 19 nt, Homo sapiens
  misc_RNA (1)...(19): siRNA sense strand
aggaauucagccugcuuaa

SEQ ID NO: 2457165 - RNA, 19 nt, Homo sapiens
  misc_RNA (1)...(19): siRNA sense strand
augagauacaagagguuga

SEQ ID NO: 2457166 - RNA, 19 nt, Homo sapiens
  misc_RNA (1)...(19): siRNA sense strand
ccugaaguccaaaaggaua

SEQ ID NO: 2457167 - RNA, 19 nt, Homo sapiens
  misc_RNA (1)...(19): siRNA sense strand
uacaagagguugaggagcu

SEQ ID NO: 2457168 - RNA, 19 nt, Homo sapiens
  misc_RNA (1)...(19): siRNA sense strand
acacaacacccucuggcaa

SEQ ID NO: 2457169 - RNA, 19 nt, Homo sapiens
  misc_RNA (1)...(19): siRNA sense strand
agguugaggagcuugacaa

SEQ ID NO: 2457170 - RNA, 19 nt, Homo sapiens
  misc_RNA (1)...(19): siRNA sense strand
cagaagaggcugcaggcaa

SEQ ID NO: 2457171 - RNA, 19 nt, Homo sapiens
  misc_RNA (1)...(19): siRNA sense strand
ccagaaaggagaaagcaga

SEQ ID NO: 2457172 - RNA, 19 nt, Homo sapiens
  misc_RNA (1)...(19): siRNA sense strand
gggcaggccagaaaggaga

SEQ ID NO: 2457173 - RNA, 19 nt, Homo sapiens
  misc_RNA (1)...(19): siRNA sense strand
acucggagaugcuggccaa

SEQ ID NO: 2457174 - RNA, 19 nt, Homo sapiens
  misc_RNA (1)...(19): siRNA sense strand
gcgaagugcucauccgcga

SEQ ID NO: 2457175 - RNA, 19 nt, Homo sapiens
  misc_RNA (1)...(19): siRNA sense strand
ggaaccuggaccuggagaa

SEQ ID NO: 2457176 - RNA, 19 nt, Homo sapiens
  misc_RNA (1)...(19): siRNA sense strand
aggcggaccuggaagagga

SEQ ID NO: 2457177 - RNA, 19 nt, Homo sapiens
  misc_RNA (1)...(19): siRNA sense strand
uggccaagcuccaugagga

SEQ ID NO: 2457178 - RNA, 19 nt, Homo sapiens
  misc_RNA (1)...(19): siRNA sense strand
acucagaccucgugcccaa

SEQ ID NO: 2457179 - RNA, 19 nt, Homo sapiens
  misc_RNA (1)...(19): siRNA sense strand
gugcugaccuggaggggaa

SEQ ID NO: 2457180 - RNA, 19 nt, Homo sapiens
  misc_RNA (1)...(19): siRNA sense strand
gcgagugcuuccagcgcau

SEQ ID NO: 2457181 - RNA, 19 nt, Homo sapiens
  misc_RNA (1)...(19): siRNA sense strand
ucaaccaggcagugcggaa

SEQ ID NO: 2457182 - RNA, 19 nt, Homo sapiens
  misc_RNA (1)...(19): siRNA sense strand
ccuuaugagugcagggaau

SEQ ID NO: 2457183 - RNA, 19 nt, Homo sapiens
  misc_RNA (1)...(19): siRNA sense strand
ccuuaugagugcagggaau

SEQ ID NO: 2457184 - RNA, 19 nt, Homo sapiens
  misc_RNA (1)...(19): siRNA sense strand
gugcaaugaaugugggaga

SEQ ID NO: 2457185 - RNA, 19 nt, Homo sapiens
  misc_RNA (1)...(19): siRNA sense strand
gugcaaugaaugugggaga

SEQ ID NO: 2457186 - RNA, 19 nt, Homo sapiens
  misc_RNA (1)...(19): siRNA sense strand
augcagugaaugugggaaa

SEQ ID NO: 2457187 - RNA, 19 nt, Homo sapiens
  misc_RNA (1)...(19): siRNA sense strand
acguaugaaugcagugaau

SEQ ID NO: 2457188 - RNA, 19 nt, Homo sapiens
  misc_RNA (1)...(19): siRNA sense strand
gugcagugaauguggaaaa

SEQ ID NO: 2457189 - RNA, 19 nt, Homo sapiens
  misc_RNA (1)...(19): siRNA sense strand
gugcagugaauguggaaaa

SEQ ID NO: 2457190 - RNA, 19 nt, Homo sapiens
  misc_RNA (1)...(19): siRNA sense strand
guguaguaacuguggaaaa

SEQ ID NO: 2457191 - RNA, 19 nt, Homo sapiens
  misc_RNA (1)...(19): siRNA sense strand
ggaaaauccuuuagccgua

SEQ ID NO: 2457192 - RNA, 19 nt, Homo sapiens
  misc_RNA (1)...(19): siRNA sense strand
ggguguaguaacuguggaa

SEQ ID NO: 2457193 - RNA, 19 nt, Homo sapiens
  misc_RNA (1)...(19): siRNA sense strand
ggaaaauucuauagccaca

SEQ ID NO: 2457194 - RNA, 19 nt, Homo sapiens
  misc_RNA (1)...(19): siRNA sense strand
aguucacacuggagaaaga

SEQ ID NO: 2457195 - RNA, 19 nt, Homo sapiens
  misc_RNA (1)...(19): siRNA sense strand
augugaugcuggagaacuu

SEQ ID NO: 2457196 - RNA, 19 nt, Homo sapiens
  misc_RNA (1)...(19): siRNA sense strand
gcguguucauacuggagaa

SEQ ID NO: 2457197 - RNA, 19 nt, Homo sapiens
  misc_RNA (1)...(19): siRNA sense strand
cagaccaugaggagggcua

SEQ ID NO: 2457198 - RNA, 19 nt, Homo sapiens
  misc_RNA (1)...(19): siRNA sense strand
ucaugaaacaucagagagu

SEQ ID NO: 2457199 - RNA, 19 nt, Homo sapiens
  misc_RNA (1)...(19): siRNA sense strand
augcagugaauguggaaaa

SEQ ID NO: 2457200 - RNA, 19 nt, Homo sapiens
  misc_RNA (1)...(19): siRNA sense strand
ccuuacaagugcagcgacu

SEQ ID NO: 2457201 - RNA, 19 nt, Homo sapiens
  misc_RNA (1)...(19): siRNA sense strand
cuucaugccugcuugggaa

SEQ ID NO: 2457202 - RNA, 19 nt, Homo sapiens
  misc_RNA (1)...(19): siRNA sense strand
ccucaugaaacaucagaga

SEQ ID NO: 2457203 - RNA, 19 nt, Homo sapiens
  misc_RNA (1)...(19): siRNA sense strand
cuuccaagacccaugaaau

SEQ ID NO: 2457204 - RNA, 19 nt, Homo sapiens
  misc_RNA (1)...(19): siRNA sense strand
acuccagccucaugaaaca

SEQ ID NO: 2457205 - RNA, 19 nt, Homo sapiens
  misc_RNA (1)...(19): siRNA sense strand
guuaaacaucagaggguuc

SEQ ID NO: 2457206 - RNA, 19 nt, Homo sapiens
  misc_RNA (1)...(19): siRNA sense strand
ggagaaaggccuuacgggu

SEQ ID NO: 2457207 - RNA, 19 nt, Homo sapiens
  misc_RNA (1)...(19): siRNA sense strand
gagcaaagccuuaugagug

SEQ ID NO: 2457208 - RNA, 19 nt, Homo sapiens
  misc_RNA (1)...(19): siRNA sense strand
gagcaaagccuuaugagug

SEQ ID NO: 2457209 - RNA, 19 nt, Homo sapiens
  misc_RNA (1)...(19): siRNA sense strand
ggucagaaauauuuacuug

SEQ ID NO: 2457210 - RNA, 19 nt, Homo sapiens
  misc_RNA (1)...(19): siRNA sense strand
agaaaggccuuacgggugu

SEQ ID NO: 2457211 - RNA, 19 nt, Homo sapiens
  misc_RNA (1)...(19): siRNA sense strand
ucauugaacaccagagagu

SEQ ID NO: 2457212 - RNA, 19 nt, Homo sapiens
  misc_RNA (1)...(19): siRNA sense strand
gugcagggaaugugggaag

SEQ ID NO: 2457213 - RNA, 19 nt, Homo sapiens
  misc_RNA (1)...(19): siRNA sense strand
agucaugggaggagcccuu

SEQ ID NO: 2457214 - RNA, 19 nt, Homo sapiens
  misc_RNA (1)...(19): siRNA sense strand
aagccuuuggucagaaaua

SEQ ID NO: 2457215 - RNA, 19 nt, Homo sapiens
  misc_RNA (1)...(19): siRNA sense strand
cuaugugaccuuugaggau

SEQ ID NO: 2457216 - RNA, 19 nt, Homo sapiens
  misc_RNA (1)...(19): siRNA sense strand
gaaauaacccagcuggagu

SEQ ID NO: 2457217 - RNA, 19 nt, Homo sapiens
  misc_RNA (1)...(19): siRNA sense strand
ccaaauaguucacacugga

SEQ ID NO: 2457218 - RNA, 19 nt, Homo sapiens
  misc_RNA (1)...(19): siRNA sense strand
cagagaaguccuugcaaag

SEQ ID NO: 2457219 - RNA, 19 nt, Homo sapiens
  misc_RNA (1)...(19): siRNA sense strand
acacaggagagaagucaca

SEQ ID NO: 2457220 - RNA, 19 nt, Homo sapiens
  misc_RNA (1)...(19): siRNA sense strand
acaggagagaagucacaua

SEQ ID NO: 2457221 - RNA, 19 nt, Homo sapiens
  misc_RNA (1)...(19): siRNA sense strand
guggaaaauucuauagcca

SEQ ID NO: 2457222 - RNA, 19 nt, Homo sapiens
  misc_RNA (1)...(19): siRNA sense strand
ccuuuuaagugcaaugaau

SEQ ID NO: 2457223 - RNA, 19 nt, Homo sapiens
  misc_RNA (1)...(19): siRNA sense strand
ccuuuuaagugcaaugaau

SEQ ID NO: 2457224 - RNA, 19 nt, Homo sapiens
  misc_RNA (1)...(19): siRNA sense strand
ccgccaucguucaggagaa

SEQ ID NO: 2457225 - RNA, 19 nt, Homo sapiens
  misc_RNA (1)...(19): siRNA sense strand
gcuuguggcuggaagacca

SEQ ID NO: 2457226 - RNA, 19 nt, Homo sapiens
  misc_RNA (1)...(19): siRNA sense strand
gcaucaucgaagaagguga

SEQ ID NO: 2457227 - RNA, 19 nt, Homo sapiens
  misc_RNA (1)...(19): siRNA sense strand
gcgaguucacaaauagcua

SEQ ID NO: 2457228 - RNA, 19 nt, Homo sapiens
  misc_RNA (1)...(19): siRNA sense strand
ugccaaaagggaacggaaa

SEQ ID NO: 2457229 - RNA, 19 nt, Homo sapiens
  misc_RNA (1)...(19): siRNA sense strand
uguccaaagcugagaagaa

SEQ ID NO: 2457230 - RNA, 19 nt, Homo sapiens
  misc_RNA (1)...(19): siRNA sense strand
ggaacaagguuaaagccga

SEQ ID NO: 2457231 - RNA, 19 nt, Homo sapiens
  misc_RNA (1)...(19): siRNA sense strand
caucauaggugguggagac

SEQ ID NO: 2457232 - RNA, 19 nt, Homo sapiens
  misc_RNA (1)...(19): siRNA sense strand
cauccugggcggagcuaaa

SEQ ID NO: 2457233 - RNA, 19 nt, Homo sapiens
  misc_RNA (1)...(19): siRNA sense strand
ggagaaagccugugccaac

SEQ ID NO: 2457234 - RNA, 19 nt, Homo sapiens
  misc_RNA (1)...(19): siRNA sense strand
ucaaaucucugcugggcaa

SEQ ID NO: 2457235 - RNA, 19 nt, Homo sapiens
  misc_RNA (1)...(19): siRNA sense strand
ugaugaagaaggagcugaa

SEQ ID NO: 2457236 - RNA, 19 nt, Homo sapiens
  misc_RNA (1)...(19): siRNA sense strand
gcuucugggaacaagguua

SEQ ID NO: 2457237 - RNA, 19 nt, Homo sapiens
  misc_RNA (1)...(19): siRNA sense strand
caauaauaugcuggacaaa

SEQ ID NO: 2457238 - RNA, 19 nt, Homo sapiens
  misc_RNA (1)...(19): siRNA sense strand
gaugauuauugguggugga

SEQ ID NO: 2457239 - RNA, 19 nt, Homo sapiens
  misc_RNA (1)...(19): siRNA sense strand
cuucugggaacaagguuaa

SEQ ID NO: 2457240 - RNA, 19 nt, Homo sapiens
  misc_RNA (1)...(19): siRNA sense strand
uggagcuccuggaagguaa

SEQ ID NO: 2457241 - RNA, 19 nt, Homo sapiens
  misc_RNA (1)...(19): siRNA sense strand
cugucauccugcuggagaa

SEQ ID NO: 2457242 - RNA, 19 nt, Homo sapiens
  misc_RNA (1)...(19): siRNA sense strand
cauaggugguggagacacu

SEQ ID NO: 2457243 - RNA, 19 nt, Homo sapiens
  misc_RNA (1)...(19): siRNA sense strand
gauuaaggcugcuguccca

SEQ ID NO: 2457244 - RNA, 19 nt, Homo sapiens
  misc_RNA (1)...(19): siRNA sense strand
acaaagucaaugagaugau

SEQ ID NO: 2457245 - RNA, 19 nt, Homo sapiens
  misc_RNA (1)...(19): siRNA sense strand
ccaaauggaacacggagga

SEQ ID NO: 2457246 - RNA, 19 nt, Homo sapiens
  misc_RNA (1)...(19): siRNA sense strand
aaauggaacacggaggaua

SEQ ID NO: 2457247 - RNA, 19 nt, Homo sapiens
  misc_RNA (1)...(19): siRNA sense strand
cagccaaaauagaagcuuu

SEQ ID NO: 2457248 - RNA, 19 nt, Homo sapiens
  misc_RNA (1)...(19): siRNA sense strand
agaaguaugcugaggcugu

SEQ ID NO: 2457249 - RNA, 19 nt, Homo sapiens
  misc_RNA (1)...(19): siRNA sense strand
gguccugaaagcagcaaga

SEQ ID NO: 2457250 - RNA, 19 nt, Homo sapiens
  misc_RNA (1)...(19): siRNA sense strand
gaaaagaugcuucugggaa

SEQ ID NO: 2457251 - RNA, 19 nt, Homo sapiens
  misc_RNA (1)...(19): siRNA sense strand
cuaaaguugcagacaagau

SEQ ID NO: 2457252 - RNA, 19 nt, Homo sapiens
  misc_RNA (1)...(19): siRNA sense strand
ggcuuuaaauauaugggua

SEQ ID NO: 2457253 - RNA, 19 nt, Homo sapiens
  misc_RNA (1)...(19): siRNA sense strand
guggaagacgagagacuca

SEQ ID NO: 2457254 - RNA, 19 nt, Homo sapiens
  misc_RNA (1)...(19): siRNA sense strand
cuguggaagacgagagacu

SEQ ID NO: 2457255 - RNA, 19 nt, Homo sapiens
  misc_RNA (1)...(19): siRNA sense strand
cgcuauaaaggcugaauga

SEQ ID NO: 2457256 - RNA, 19 nt, Homo sapiens
  misc_RNA (1)...(19): siRNA sense strand
ggaucauagaccuggccau

SEQ ID NO: 2457257 - RNA, 19 nt, Homo sapiens
  misc_RNA (1)...(19): siRNA sense strand
gggagagaaacaagggaga

SEQ ID NO: 2457258 - RNA, 19 nt, Homo sapiens
  misc_RNA (1)...(19): siRNA sense strand
gaacaggaauucugggagu

SEQ ID NO: 2457259 - RNA, 19 nt, Homo sapiens
  misc_RNA (1)...(19): siRNA sense strand
cuggugaccgggagagaaa

SEQ ID NO: 2457260 - RNA, 19 nt, Homo sapiens
  misc_RNA (1)...(19): siRNA sense strand
ggaagaagagcaugccuga

SEQ ID NO: 2457261 - RNA, 19 nt, Homo sapiens
  misc_RNA (1)...(19): siRNA sense strand
ggcacugggaacaggaauu

SEQ ID NO: 2457262 - RNA, 19 nt, Homo sapiens
  misc_RNA (1)...(19): siRNA sense strand
ggagaagccuuuagagugg

SEQ ID NO: 2457263 - RNA, 19 nt, Homo sapiens
  misc_RNA (1)...(19): siRNA sense strand
ccaucauccuagugggcaa

SEQ ID NO: 2457264 - RNA, 19 nt, Homo sapiens
  misc_RNA (1)...(19): siRNA sense strand
cggccaagaaccugaggaa

SEQ ID NO: 2457265 - RNA, 19 nt, Homo sapiens
  misc_RNA (1)...(19): siRNA sense strand
gaggagauccacaaggcaa

SEQ ID NO: 2457266 - RNA, 19 nt, Homo sapiens
  misc_RNA (1)...(19): siRNA sense strand
aggagauccacaaggcaaa

SEQ ID NO: 2457267 - RNA, 19 nt, Homo sapiens
  misc_RNA (1)...(19): siRNA sense strand
ucuaugacccugaggccaa

SEQ ID NO: 2457268 - RNA, 19 nt, Homo sapiens
  misc_RNA (1)...(19): siRNA sense strand
auugagaagauucgaacua

SEQ ID NO: 2457269 - RNA, 19 nt, Homo sapiens
  misc_RNA (1)...(19): siRNA sense strand
ucgacacggugcaggucaa

SEQ ID NO: 2457270 - RNA, 19 nt, Homo sapiens
  misc_RNA (1)...(19): siRNA sense strand
gugagaagaggcuggacca

SEQ ID NO: 2457271 - RNA, 19 nt, Homo sapiens
  misc_RNA (1)...(19): siRNA sense strand
uggaccaggagaagggaca

SEQ ID NO: 2457272 - RNA, 19 nt, Homo sapiens
  misc_RNA (1)...(19): siRNA sense strand
gagaaguacuugauccucu

SEQ ID NO: 2457273 - RNA, 19 nt, Homo sapiens
  misc_RNA (1)...(19): siRNA sense strand
ugaaauagacagacgguca

SEQ ID NO: 2457274 - RNA, 19 nt, Homo sapiens
  misc_RNA (1)...(19): siRNA sense strand
aggaaauugccaagcuaaa

SEQ ID NO: 2457275 - RNA, 19 nt, Homo sapiens
  misc_RNA (1)...(19): siRNA sense strand
aggaaaaggaccaaauaaa

SEQ ID NO: 2457276 - RNA, 19 nt, Homo sapiens
  misc_RNA (1)...(19): siRNA sense strand
uggaccauauguagggaaa

SEQ ID NO: 2457277 - RNA, 19 nt, Homo sapiens
  misc_RNA (1)...(19): siRNA sense strand
gagaagaggaaauugccaa

SEQ ID NO: 2457278 - RNA, 19 nt, Homo sapiens
  misc_RNA (1)...(19): siRNA sense strand
uuaagagagaagaggaaau

SEQ ID NO: 2457279 - RNA, 19 nt, Homo sapiens
  misc_RNA (1)...(19): siRNA sense strand
cugcaaauacaauucgaaa

SEQ ID NO: 2457280 - RNA, 19 nt, Homo sapiens
  misc_RNA (1)...(19): siRNA sense strand
uggccuggauacagugaaa

SEQ ID NO: 2457281 - RNA, 19 nt, Homo sapiens
  misc_RNA (1)...(19): siRNA sense strand
uggaggaguuaaagaggau

SEQ ID NO: 2457282 - RNA, 19 nt, Homo sapiens
  misc_RNA (1)...(19): siRNA sense strand
ccauacagggacaggguga

SEQ ID NO: 2457283 - RNA, 19 nt, Homo sapiens
  misc_RNA (1)...(19): siRNA sense strand
ccucaagcuguuucagaua

SEQ ID NO: 2457284 - RNA, 19 nt, Homo sapiens
  misc_RNA (1)...(19): siRNA sense strand
cgaaagacacauagcagca

SEQ ID NO: 2457285 - RNA, 19 nt, Homo sapiens
  misc_RNA (1)...(19): siRNA sense strand
gccuggauacagugaaaua

SEQ ID NO: 2457286 - RNA, 19 nt, Homo sapiens
  misc_RNA (1)...(19): siRNA sense strand
uaucaaacccgguggacca

SEQ ID NO: 2457287 - RNA, 19 nt, Homo sapiens
  misc_RNA (1)...(19): siRNA sense strand
acacauagcagcagcacca

SEQ ID NO: 2457288 - RNA, 19 nt, Homo sapiens
  misc_RNA (1)...(19): siRNA sense strand
aggaccagcaagacaaaua

SEQ ID NO: 2457289 - RNA, 19 nt, Homo sapiens
  misc_RNA (1)...(19): siRNA sense strand
augcagaguaugaugagua

SEQ ID NO: 2457290 - RNA, 19 nt, Homo sapiens
  misc_RNA (1)...(19): siRNA sense strand
uaucaaacuagaugcacaa

SEQ ID NO: 2457291 - RNA, 19 nt, Homo sapiens
  misc_RNA (1)...(19): siRNA sense strand
gcucaaaagaguaucagaa

SEQ ID NO: 2457292 - RNA, 19 nt, Homo sapiens
  misc_RNA (1)...(19): siRNA sense strand
uaugaugaguacagagcuu

SEQ ID NO: 2457293 - RNA, 19 nt, Homo sapiens
  misc_RNA (1)...(19): siRNA sense strand
ggauacagugaaauagaca

SEQ ID NO: 2457294 - RNA, 19 nt, Homo sapiens
  misc_RNA (1)...(19): siRNA sense strand
acaagaaaccggagcuacu

SEQ ID NO: 2457295 - RNA, 19 nt, Homo sapiens
  misc_RNA (1)...(19): siRNA sense strand
aacuagaugcacaaagaaa

SEQ ID NO: 2457296 - RNA, 19 nt, Homo sapiens
  misc_RNA (1)...(19): siRNA sense strand
cuaaaguguccaaagccua

SEQ ID NO: 2457297 - RNA, 19 nt, Homo sapiens
  misc_RNA (1)...(19): siRNA sense strand
caaaugugggcaaagacaa

SEQ ID NO: 2457298 - RNA, 19 nt, Homo sapiens
  misc_RNA (1)...(19): siRNA sense strand
aaagaaugacccaggcaga

SEQ ID NO: 2457299 - RNA, 19 nt, Homo sapiens
  misc_RNA (1)...(19): siRNA sense strand
ccugagaggaaaaggucaa

SEQ ID NO: 2457300 - RNA, 19 nt, Homo sapiens
  misc_RNA (1)...(19): siRNA sense strand
auacagugaaauagacaga

SEQ ID NO: 2457301 - RNA, 19 nt, Homo sapiens
  misc_RNA (1)...(19): siRNA sense strand
gcuuuuggauucagaguuu

SEQ ID NO: 2457302 - RNA, 19 nt, Homo sapiens
  misc_RNA (1)...(19): siRNA sense strand
ucaaaaggcuaauagguga

SEQ ID NO: 2457303 - RNA, 19 nt, Homo sapiens
  misc_RNA (1)...(19): siRNA sense strand
ugaauuugaccaacagcaa

SEQ ID NO: 2457304 - RNA, 19 nt, Homo sapiens
  misc_RNA (1)...(19): siRNA sense strand
cuacaagaaaccggagcua

SEQ ID NO: 2457305 - RNA, 19 nt, Homo sapiens
  misc_RNA (1)...(19): siRNA sense strand
augagcaacgccagaauua

SEQ ID NO: 2457306 - RNA, 19 nt, Homo sapiens
  misc_RNA (1)...(19): siRNA sense strand
gagacuuaccagagccaca

SEQ ID NO: 2457307 - RNA, 19 nt, Homo sapiens
  misc_RNA (1)...(19): siRNA sense strand
cccugaaggccuacaagaa

SEQ ID NO: 2457308 - RNA, 19 nt, Homo sapiens
  misc_RNA (1)...(19): siRNA sense strand
ucuaugaggaccagcaaga

SEQ ID NO: 2457309 - RNA, 19 nt, Homo sapiens
  misc_RNA (1)...(19): siRNA sense strand
ggaaaaggaggaagaucuu

SEQ ID NO: 2457310 - RNA, 19 nt, Homo sapiens
  misc_RNA (1)...(19): siRNA sense strand
uuaucaaacuagaugcaca

SEQ ID NO: 2457311 - RNA, 19 nt, Homo sapiens
  misc_RNA (1)...(19): siRNA sense strand
aaggcuaauaggugaauuu

SEQ ID NO: 2457312 - RNA, 19 nt, Homo sapiens
  misc_RNA (1)...(19): siRNA sense strand
ccaacagcaagcagaguca

SEQ ID NO: 2457313 - RNA, 19 nt, Homo sapiens
  misc_RNA (1)...(19): siRNA sense strand
gcucaauugccugggauuu

SEQ ID NO: 2457314 - RNA, 19 nt, Homo sapiens
  misc_RNA (1)...(19): siRNA sense strand
cuuaagagagaagaggaaa

SEQ ID NO: 2457315 - RNA, 19 nt, Homo sapiens
  misc_RNA (1)...(19): siRNA sense strand
cagaagauaaagcagucua

SEQ ID NO: 2457316 - RNA, 19 nt, Homo sapiens
  misc_RNA (1)...(19): siRNA sense strand
aggaaaaggaggaagaucu

SEQ ID NO: 2457317 - RNA, 19 nt, Homo sapiens
  misc_RNA (1)...(19): siRNA sense strand
cgccagaauuauaaggaug

SEQ ID NO: 2457318 - RNA, 19 nt, Homo sapiens
  misc_RNA (1)...(19): siRNA sense strand
gccagaauuauaaggauga

SEQ ID NO: 2457319 - RNA, 19 nt, Homo sapiens
  misc_RNA (1)...(19): siRNA sense strand
gcucacaucaaaaggcuaa

SEQ ID NO: 2457320 - RNA, 19 nt, Homo sapiens
  misc_RNA (1)...(19): siRNA sense strand
uugaaucccaccagugaaa

SEQ ID NO: 2457321 - RNA, 19 nt, Homo sapiens
  misc_RNA (1)...(19): siRNA sense strand
acuucaaugcagaguauga

SEQ ID NO: 2457322 - RNA, 19 nt, Homo sapiens
  misc_RNA (1)...(19): siRNA sense strand
aauugaacucccagauuau

SEQ ID NO: 2457323 - RNA, 19 nt, Homo sapiens
  misc_RNA (1)...(19): siRNA sense strand
agaugacacgagaaagaau

SEQ ID NO: 2457324 - RNA, 19 nt, Homo sapiens
  misc_RNA (1)...(19): siRNA sense strand
agcacgacauugagacuau

SEQ ID NO: 2457325 - RNA, 19 nt, Homo sapiens
  misc_RNA (1)...(19): siRNA sense strand
cccaauuaccaugaagaaa

SEQ ID NO: 2457326 - RNA, 19 nt, Homo sapiens
  misc_RNA (1)...(19): siRNA sense strand
guggaggaguuaaagagga

SEQ ID NO: 2457327 - RNA, 19 nt, Homo sapiens
  misc_RNA (1)...(19): siRNA sense strand
gaaaguuuauggaggaauu

SEQ ID NO: 2457328 - RNA, 19 nt, Homo sapiens
  misc_RNA (1)...(19): siRNA sense strand
ccaccauguucaauagaaa

SEQ ID NO: 2457329 - RNA, 19 nt, Homo sapiens
  misc_RNA (1)...(19): siRNA sense strand
auagaaaguuuauggagga

SEQ ID NO: 2457330 - RNA, 19 nt, Homo sapiens
  misc_RNA (1)...(19): siRNA sense strand
agaaauauaugguggucuc

SEQ ID NO: 2457331 - RNA, 19 nt, Homo sapiens
  misc_RNA (1)...(19): siRNA sense strand
gcggcagcugacagaaaua

SEQ ID NO: 2457332 - RNA, 19 nt, Homo sapiens
  misc_RNA (1)...(19): siRNA sense strand
cucaagagcucuacuccaa

SEQ ID NO: 2457333 - RNA, 19 nt, Homo sapiens
  misc_RNA (1)...(19): siRNA sense strand
ccaagaaggcccugaggac

SEQ ID NO: 2457334 - RNA, 19 nt, Homo sapiens
  misc_RNA (1)...(19): siRNA sense strand
uagaaaguuuauggaggaa

SEQ ID NO: 2457335 - RNA, 19 nt, Homo sapiens
  misc_RNA (1)...(19): siRNA sense strand
cccagaacaucccgggaga

SEQ ID NO: 2457336 - RNA, 19 nt, Homo sapiens
  misc_RNA (1)...(19): siRNA sense strand
uggauaagcucuaugaccu

SEQ ID NO: 2457337 - RNA, 19 nt, Homo sapiens
  misc_RNA (1)...(19): siRNA sense strand
gaaaguuuauggaggaauu

SEQ ID NO: 2457338 - RNA, 19 nt, Homo sapiens
  misc_RNA (1)...(19): siRNA sense strand
ccaccauguucaauagaaa

SEQ ID NO: 2457339 - RNA, 19 nt, Homo sapiens
  misc_RNA (1)...(19): siRNA sense strand
auagaaaguuuauggagga

SEQ ID NO: 2457340 - RNA, 19 nt, Homo sapiens
  misc_RNA (1)...(19): siRNA sense strand
agaaauauaugguggucuc

SEQ ID NO: 2457341 - RNA, 19 nt, Homo sapiens
  misc_RNA (1)...(19): siRNA sense strand
gcggcagcugacagaaaua

SEQ ID NO: 2457342 - RNA, 19 nt, Homo sapiens
  misc_RNA (1)...(19): siRNA sense strand
cucaagagcucuacuccaa

SEQ ID NO: 2457343 - RNA, 19 nt, Homo sapiens
  misc_RNA (1)...(19): siRNA sense strand
ccaagaaggcccugaggac

SEQ ID NO: 2457344 - RNA, 19 nt, Homo sapiens
  misc_RNA (1)...(19): siRNA sense strand
uagaaaguuuauggaggaa

SEQ ID NO: 2457345 - RNA, 19 nt, Homo sapiens
  misc_RNA (1)...(19): siRNA sense strand
cccagaacaucccgggaga

SEQ ID NO: 2457346 - RNA, 19 nt, Homo sapiens
  misc_RNA (1)...(19): siRNA sense strand
uggauaagcucuaugaccu

SEQ ID NO: 2457347 - RNA, 19 nt, Homo sapiens
  misc_RNA (1)...(19): siRNA sense strand
ugguggaagaguugaagaa

SEQ ID NO: 2457348 - RNA, 19 nt, Homo sapiens
  misc_RNA (1)...(19): siRNA sense strand
ggaggaagcguaaggcuga

SEQ ID NO: 2457349 - RNA, 19 nt, Homo sapiens
  misc_RNA (1)...(19): siRNA sense strand
ccgagaagcgagagaagcu

SEQ ID NO: 2457350 - RNA, 19 nt, Homo sapiens
  misc_RNA (1)...(19): siRNA sense strand
ccacaaaagaaaagccaaa

SEQ ID NO: 2457351 - RNA, 19 nt, Homo sapiens
  misc_RNA (1)...(19): siRNA sense strand
cagcagaaaaguuggguaa

SEQ ID NO: 2457352 - RNA, 19 nt, Homo sapiens
  misc_RNA (1)...(19): siRNA sense strand
acucagacuugaagagaca

SEQ ID NO: 2457353 - RNA, 19 nt, Homo sapiens
  misc_RNA (1)...(19): siRNA sense strand
agaguuaccaagaaagaaa

SEQ ID NO: 2457354 - RNA, 19 nt, Homo sapiens
  misc_RNA (1)...(19): siRNA sense strand
cuuaaaaguugcagaauca

SEQ ID NO: 2457355 - RNA, 19 nt, Homo sapiens
  misc_RNA (1)...(19): siRNA sense strand
ggaagagauaugucagaau

SEQ ID NO: 2457356 - RNA, 19 nt, Homo sapiens
  misc_RNA (1)...(19): siRNA sense strand
agaugucaguaguaggaaa

SEQ ID NO: 2457357 - RNA, 19 nt, Homo sapiens
  misc_RNA (1)...(19): siRNA sense strand
aagaaaagccaaagcacua

SEQ ID NO: 2457358 - RNA, 19 nt, Homo sapiens
  misc_RNA (1)...(19): siRNA sense strand
ggaaaugccuugcugccua

SEQ ID NO: 2457359 - RNA, 19 nt, Homo sapiens
  misc_RNA (1)...(19): siRNA sense strand
uugaauggauguggagaaa

SEQ ID NO: 2457360 - RNA, 19 nt, Homo sapiens
  misc_RNA (1)...(19): siRNA sense strand
agucacaaccagauaacaa

SEQ ID NO: 2457361 - RNA, 19 nt, Homo sapiens
  misc_RNA (1)...(19): siRNA sense strand
caucacaaguaauagucaa

SEQ ID NO: 2457362 - RNA, 19 nt, Homo sapiens
  misc_RNA (1)...(19): siRNA sense strand
cuuaagaagacuaucagaa

SEQ ID NO: 2457363 - RNA, 19 nt, Homo sapiens
  misc_RNA (1)...(19): siRNA sense strand
cuaucugacucuaggcauu

SEQ ID NO: 2457364 - RNA, 19 nt, Homo sapiens
  misc_RNA (1)...(19): siRNA sense strand
auaacaaaguagaggcugu

SEQ ID NO: 2457365 - RNA, 19 nt, Homo sapiens
  misc_RNA (1)...(19): siRNA sense strand
accuauagcuuuaagauca

SEQ ID NO: 2457366 - RNA, 19 nt, Homo sapiens
  misc_RNA (1)...(19): siRNA sense strand
gguccaagaaccaagauga

SEQ ID NO: 2457367 - RNA, 19 nt, Homo sapiens
  misc_RNA (1)...(19): siRNA sense strand
auuccaaggcauaggucua

SEQ ID NO: 2457368 - RNA, 19 nt, Homo sapiens
  misc_RNA (1)...(19): siRNA sense strand
cauucaggauccuaauaaa

SEQ ID NO: 2457369 - RNA, 19 nt, Homo sapiens
  misc_RNA (1)...(19): siRNA sense strand
gcuuuagaucacucaaaua

SEQ ID NO: 2457370 - RNA, 19 nt, Homo sapiens
  misc_RNA (1)...(19): siRNA sense strand
cagcaucaugguauagaua

SEQ ID NO: 2457371 - RNA, 19 nt, Homo sapiens
  misc_RNA (1)...(19): siRNA sense strand
aguccaaauagaaguacaa

SEQ ID NO: 2457372 - RNA, 19 nt, Homo sapiens
  misc_RNA (1)...(19): siRNA sense strand
aaacaagaauucaugggau

SEQ ID NO: 2457373 - RNA, 19 nt, Homo sapiens
  misc_RNA (1)...(19): siRNA sense strand
uuugaauggauguggagaa

SEQ ID NO: 2457374 - RNA, 19 nt, Homo sapiens
  misc_RNA (1)...(19): siRNA sense strand
aguaauagucaaagcaaac

SEQ ID NO: 2457375 - RNA, 19 nt, Homo sapiens
  misc_RNA (1)...(19): siRNA sense strand
uugcaauaguccaaauaga

SEQ ID NO: 2457376 - RNA, 19 nt, Homo sapiens
  misc_RNA (1)...(19): siRNA sense strand
acaacguaacacagagcua

SEQ ID NO: 2457377 - RNA, 19 nt, Homo sapiens
  misc_RNA (1)...(19): siRNA sense strand
caagaauucaugggauaaa

SEQ ID NO: 2457378 - RNA, 19 nt, Homo sapiens
  misc_RNA (1)...(19): siRNA sense strand
gcucugaccacaaaagaaa

SEQ ID NO: 2457379 - RNA, 19 nt, Homo sapiens
  misc_RNA (1)...(19): siRNA sense strand
acaagaauucaugggauaa

SEQ ID NO: 2457380 - RNA, 19 nt, Homo sapiens
  misc_RNA (1)...(19): siRNA sense strand
ucuaaguccuaguguugaa

SEQ ID NO: 2457381 - RNA, 19 nt, Homo sapiens
  misc_RNA (1)...(19): siRNA sense strand
uggaaguugcuuagauaca

SEQ ID NO: 2457382 - RNA, 19 nt, Homo sapiens
  misc_RNA (1)...(19): siRNA sense strand
ugaacaaguuucuggcagu

SEQ ID NO: 2457383 - RNA, 19 nt, Homo sapiens
  misc_RNA (1)...(19): siRNA sense strand
aguucuugaaagugagauu

SEQ ID NO: 2457384 - RNA, 19 nt, Homo sapiens
  misc_RNA (1)...(19): siRNA sense strand
ccuauagcuuuaagaucau

SEQ ID NO: 2457385 - RNA, 19 nt, Homo sapiens
  misc_RNA (1)...(19): siRNA sense strand
caauauuguagguggucca

SEQ ID NO: 2457386 - RNA, 19 nt, Homo sapiens
  misc_RNA (1)...(19): siRNA sense strand
aagugcuucucuaggauaa

SEQ ID NO: 2457387 - RNA, 19 nt, Homo sapiens
  misc_RNA (1)...(19): siRNA sense strand
cagcuucagaacaaaguaa

SEQ ID NO: 2457388 - RNA, 19 nt, Homo sapiens
  misc_RNA (1)...(19): siRNA sense strand
ugaaaaugacaaacagcaa

SEQ ID NO: 2457389 - RNA, 19 nt, Homo sapiens
  misc_RNA (1)...(19): siRNA sense strand
cagaaaaucagaagcccua

SEQ ID NO: 2457390 - RNA, 19 nt, Homo sapiens
  misc_RNA (1)...(19): siRNA sense strand
caaugauacaacucagaau

SEQ ID NO: 2457391 - RNA, 19 nt, Homo sapiens
  misc_RNA (1)...(19): siRNA sense strand
uugacaacucuguguuaua

SEQ ID NO: 2457392 - RNA, 19 nt, Homo sapiens
  misc_RNA (1)...(19): siRNA sense strand
caacuguaaaggaaaucua

SEQ ID NO: 2457393 - RNA, 19 nt, Homo sapiens
  misc_RNA (1)...(19): siRNA sense strand
agaaccaagaugacaguuu

SEQ ID NO: 2457394 - RNA, 19 nt, Homo sapiens
  misc_RNA (1)...(19): siRNA sense strand
cagcagaacagaaagucca

SEQ ID NO: 2457395 - RNA, 19 nt, Homo sapiens
  misc_RNA (1)...(19): siRNA sense strand
ggauaaacagagcuuucaa

SEQ ID NO: 2457396 - RNA, 19 nt, Homo sapiens
  misc_RNA (1)...(19): siRNA sense strand
cagaaaaguuggguaaaga

SEQ ID NO: 2457397 - RNA, 19 nt, Homo sapiens
  misc_RNA (1)...(19): siRNA sense strand
ucucugaaagccugaacaa

SEQ ID NO: 2457398 - RNA, 19 nt, Homo sapiens
  misc_RNA (1)...(19): siRNA sense strand
ccaccaaacaagaauucau

SEQ ID NO: 2457399 - RNA, 19 nt, Homo sapiens
  misc_RNA (1)...(19): siRNA sense strand
uagacaaggaaccaauaaa

SEQ ID NO: 2457400 - RNA, 19 nt, Homo sapiens
  misc_RNA (1)...(19): siRNA sense strand
caaguaauagucaaagcaa

SEQ ID NO: 2457401 - RNA, 19 nt, Homo sapiens
  misc_RNA (1)...(19): siRNA sense strand
cuuuagaaacucuuugcaa

SEQ ID NO: 2457402 - RNA, 19 nt, Homo sapiens
  misc_RNA (1)...(19): siRNA sense strand
uugcuaaagaaauggacau

SEQ ID NO: 2457403 - RNA, 19 nt, Homo sapiens
  misc_RNA (1)...(19): siRNA sense strand
uggaaaugccaauuacaga

SEQ ID NO: 2457404 - RNA, 19 nt, Homo sapiens
  misc_RNA (1)...(19): siRNA sense strand
gguacauucaggauccuaa

SEQ ID NO: 2457405 - RNA, 19 nt, Homo sapiens
  misc_RNA (1)...(19): siRNA sense strand
gcaacugagauuaccaaaa

SEQ ID NO: 2457406 - RNA, 19 nt, Homo sapiens
  misc_RNA (1)...(19): siRNA sense strand
ggauggugacccucaaauu

SEQ ID NO: 2457407 - RNA, 19 nt, Homo sapiens
  misc_RNA (1)...(19): siRNA sense strand
ucugaaagccugaacaagu

SEQ ID NO: 2457408 - RNA, 19 nt, Homo sapiens
  misc_RNA (1)...(19): siRNA sense strand
aagaagacuaucagaaucu

SEQ ID NO: 2457409 - RNA, 19 nt, Homo sapiens
  misc_RNA (1)...(19): siRNA sense strand
aguacuugcucuccagaau

SEQ ID NO: 2457410 - RNA, 19 nt, Homo sapiens
  misc_RNA (1)...(19): siRNA sense strand
cccugaucaacaagaguua

SEQ ID NO: 2457411 - RNA, 19 nt, Homo sapiens
  misc_RNA (1)...(19): siRNA sense strand
accaagaaagaaacugaaa

SEQ ID NO: 2457412 - RNA, 19 nt, Homo sapiens
  misc_RNA (1)...(19): siRNA sense strand
cuccagaauucaaguuuua

SEQ ID NO: 2457413 - RNA, 19 nt, Homo sapiens
  misc_RNA (1)...(19): siRNA sense strand
ugucaaguuacgugagcaa

SEQ ID NO: 2457414 - RNA, 19 nt, Homo sapiens
  misc_RNA (1)...(19): siRNA sense strand
aaauaagaacacaguggau

SEQ ID NO: 2457415 - RNA, 19 nt, Homo sapiens
  misc_RNA (1)...(19): siRNA sense strand
uggagaacaaaguugacua

SEQ ID NO: 2457416 - RNA, 19 nt, Homo sapiens
  misc_RNA (1)...(19): siRNA sense strand
aggauaugcggaucugaaa

SEQ ID NO: 2457417 - RNA, 19 nt, Homo sapiens
  misc_RNA (1)...(19): siRNA sense strand
gauuggugaagcuggagaa

SEQ ID NO: 2457418 - RNA, 19 nt, Homo sapiens
  misc_RNA (1)...(19): siRNA sense strand
auaagaacacaguggaugu

SEQ ID NO: 2457419 - RNA, 19 nt, Homo sapiens
  misc_RNA (1)...(19): siRNA sense strand
aggaauuggaagagugaua

SEQ ID NO: 2457420 - RNA, 19 nt, Homo sapiens
  misc_RNA (1)...(19): siRNA sense strand
auacacaauaugagggaau

SEQ ID NO: 2457421 - RNA, 19 nt, Homo sapiens
  misc_RNA (1)...(19): siRNA sense strand
agucacacuuggagcagaa

SEQ ID NO: 2457422 - RNA, 19 nt, Homo sapiens
  misc_RNA (1)...(19): siRNA sense strand
acuuggagcagaaggcaua

SEQ ID NO: 2457423 - RNA, 19 nt, Homo sapiens
  misc_RNA (1)...(19): siRNA sense strand
acauaaauggaguccuaaa

SEQ ID NO: 2457424 - RNA, 19 nt, Homo sapiens
  misc_RNA (1)...(19): siRNA sense strand
cagaaaauguacuggcaca

SEQ ID NO: 2457425 - RNA, 19 nt, Homo sapiens
  misc_RNA (1)...(19): siRNA sense strand
gauuugauggcuugggcua

SEQ ID NO: 2457426 - RNA, 19 nt, Homo sapiens
  misc_RNA (1)...(19): siRNA sense strand
uggauuugguauuggacuu

SEQ ID NO: 2457427 - RNA, 19 nt, Homo sapiens
  misc_RNA (1)...(19): siRNA sense strand
aauaugagggaaugagaga

SEQ ID NO: 2457428 - RNA, 19 nt, Homo sapiens
  misc_RNA (1)...(19): siRNA sense strand
uggaaaggaaugggaagua

SEQ ID NO: 2457429 - RNA, 19 nt, Homo sapiens
  misc_RNA (1)...(19): siRNA sense strand
auacuuuacccauuggaaa

SEQ ID NO: 2457430 - RNA, 19 nt, Homo sapiens
  misc_RNA (1)...(19): siRNA sense strand
ucgagauaauacuggcauu

SEQ ID NO: 2457431 - RNA, 19 nt, Homo sapiens
  misc_RNA (1)...(19): siRNA sense strand
cggacggauuugauggcuu

SEQ ID NO: 2457432 - RNA, 19 nt, Homo sapiens
  misc_RNA (1)...(19): siRNA sense strand
ccauaaggcaggaggaagg

SEQ ID NO: 2457433 - RNA, 19 nt, Homo sapiens
  misc_RNA (1)...(19): siRNA sense strand
cauuuauuguccagggagu

SEQ ID NO: 2457434 - RNA, 19 nt, Homo sapiens
  misc_RNA (1)...(19): siRNA sense strand
gaauuuacaccuuugccaa

SEQ ID NO: 2457435 - RNA, 19 nt, Homo sapiens
  misc_RNA (1)...(19): siRNA sense strand
cagugcagagugagauaau

SEQ ID NO: 2457436 - RNA, 19 nt, Homo sapiens
  misc_RNA (1)...(19): siRNA sense strand
ugggagugccucauagcaa

SEQ ID NO: 2457437 - RNA, 19 nt, Homo sapiens
  misc_RNA (1)...(19): siRNA sense strand
guuuaaaaucggaggaaaa

SEQ ID NO: 2457438 - RNA, 19 nt, Homo sapiens
  misc_RNA (1)...(19): siRNA sense strand
uggaagagggugagggaca

SEQ ID NO: 2457439 - RNA, 19 nt, Homo sapiens
  misc_RNA (1)...(19): siRNA sense strand
aggaagaagaagaugacaa

SEQ ID NO: 2457440 - RNA, 19 nt, Homo sapiens
  misc_RNA (1)...(19): siRNA sense strand
auguacaaguggugcaaua

SEQ ID NO: 2457441 - RNA, 19 nt, Homo sapiens
  misc_RNA (1)...(19): siRNA sense strand
ggagagaccucaaggccau

SEQ ID NO: 2457442 - RNA, 19 nt, Homo sapiens
  misc_RNA (1)...(19): siRNA sense strand
gugucauggugcugguaaa

SEQ ID NO: 2457443 - RNA, 19 nt, Homo sapiens
  misc_RNA (1)...(19): siRNA sense strand
cagaaguacaagagcaaga

SEQ ID NO: 2457444 - RNA, 19 nt, Homo sapiens
  misc_RNA (1)...(19): siRNA sense strand
gcaucuuuggagaggaaua

SEQ ID NO: 2457445 - RNA, 19 nt, Homo sapiens
  misc_RNA (1)...(19): siRNA sense strand
gugcugacuuucugggcaa

SEQ ID NO: 2457446 - RNA, 19 nt, Homo sapiens
  misc_RNA (1)...(19): siRNA sense strand
gggacaaagaugcugggaa

SEQ ID NO: 2457447 - RNA, 19 nt, Homo sapiens
  misc_RNA (1)...(19): siRNA sense strand
aggacaugcuagaggacga

SEQ ID NO: 2457448 - RNA, 19 nt, Homo sapiens
  misc_RNA (1)...(19): siRNA sense strand
gaugacaaggacagugaaa

SEQ ID NO: 2457449 - RNA, 19 nt, Homo sapiens
  misc_RNA (1)...(19): siRNA sense strand
caucagaaguacaagagca

SEQ ID NO: 2457450 - RNA, 19 nt, Homo sapiens
  misc_RNA (1)...(19): siRNA sense strand
cauuaauacccaaagaaca

SEQ ID NO: 2457451 - RNA, 19 nt, Homo sapiens
  misc_RNA (1)...(19): siRNA sense strand
ugcuagaggacgaggaaga

SEQ ID NO: 2457452 - RNA, 19 nt, Homo sapiens
  misc_RNA (1)...(19): siRNA sense strand
agaaggaacgagaggagau

SEQ ID NO: 2457453 - RNA, 19 nt, Homo sapiens
  misc_RNA (1)...(19): siRNA sense strand
ucgcaucuuuggagaggaa

SEQ ID NO: 2457454 - RNA, 19 nt, Homo sapiens
  misc_RNA (1)...(19): siRNA sense strand
aaguacaagagcaagauua

SEQ ID NO: 2457455 - RNA, 19 nt, Homo sapiens
  misc_RNA (1)...(19): siRNA sense strand
aggaacgagaggagauauu

SEQ ID NO: 2457456 - RNA, 19 nt, Homo sapiens
  misc_RNA (1)...(19): siRNA sense strand
gaaagucaucagagcggaa

SEQ ID NO: 2457457 - RNA, 19 nt, Homo sapiens
  misc_RNA (1)...(19): siRNA sense strand
aggacgaggaagaagaaga

SEQ ID NO: 2457458 - RNA, 19 nt, Homo sapiens
  misc_RNA (1)...(19): siRNA sense strand
aggaagaguuggaaaagau

SEQ ID NO: 2457459 - RNA, 19 nt, Homo sapiens
  misc_RNA (1)...(19): siRNA sense strand
aguacaagagcaagauuau

SEQ ID NO: 2457460 - RNA, 19 nt, Homo sapiens
  misc_RNA (1)...(19): siRNA sense strand
accugaaagaugugggauu

SEQ ID NO: 2457461 - RNA, 19 nt, Homo sapiens
  misc_RNA (1)...(19): siRNA sense strand
agaaguacauugaagagga

SEQ ID NO: 2457462 - RNA, 19 nt, Homo sapiens
  misc_RNA (1)...(19): siRNA sense strand
caaguaaguuucagaccca

SEQ ID NO: 2457463 - RNA, 19 nt, Homo sapiens
  misc_RNA (1)...(19): siRNA sense strand
agugacaguuuaugaugaa

SEQ ID NO: 2457464 - RNA, 19 nt, Homo sapiens
  misc_RNA (1)...(19): siRNA sense strand
acgaggaagaagaagauga

SEQ ID NO: 2457465 - RNA, 19 nt, Homo sapiens
  misc_RNA (1)...(19): siRNA sense strand
ugacuaugauuuuggacua

SEQ ID NO: 2457466 - RNA, 19 nt, Homo sapiens
  misc_RNA (1)...(19): siRNA sense strand
augaggaagaguuggaaaa

SEQ ID NO: 2457467 - RNA, 19 nt, Homo sapiens
  misc_RNA (1)...(19): siRNA sense strand
uggaaaagaucaaguaagu

SEQ ID NO: 2457468 - RNA, 19 nt, Homo sapiens
  misc_RNA (1)...(19): siRNA sense strand
gauccauaugugaaguuua

SEQ ID NO: 2457469 - RNA, 19 nt, Homo sapiens
  misc_RNA (1)...(19): siRNA sense strand
gacccaaaguuuacgccua

SEQ ID NO: 2457470 - RNA, 19 nt, Homo sapiens
  misc_RNA (1)...(19): siRNA sense strand
ugggauuucuccaggugaa

SEQ ID NO: 2457471 - RNA, 19 nt, Homo sapiens
  misc_RNA (1)...(19): siRNA sense strand
gaaggagaguccagggaug

SEQ ID NO: 2457472 - RNA, 19 nt, Homo sapiens
  misc_RNA (1)...(19): siRNA sense strand
aguccagggaugugacaau

SEQ ID NO: 2457473 - RNA, 19 nt, Homo sapiens
  misc_RNA (1)...(19): siRNA sense strand
aguacauugaagaggaaaa

SEQ ID NO: 2457474 - RNA, 19 nt, Homo sapiens
  misc_RNA (1)...(19): siRNA sense strand
gggcaucagaaguacaaga

SEQ ID NO: 2457475 - RNA, 19 nt, Homo sapiens
  misc_RNA (1)...(19): siRNA sense strand
cugccgacgucacuggaaa

SEQ ID NO: 2457476 - RNA, 19 nt, Homo sapiens
  misc_RNA (1)...(19): siRNA sense strand
aucagaaguacaagagcaa

SEQ ID NO: 2457477 - RNA, 19 nt, Homo sapiens
  misc_RNA (1)...(19): siRNA sense strand
guuucagacccaaaguuua

SEQ ID NO: 2457478 - RNA, 19 nt, Homo sapiens
  misc_RNA (1)...(19): siRNA sense strand
agauaauacacaagaaccu

SEQ ID NO: 2457479 - RNA, 19 nt, Homo sapiens
  misc_RNA (1)...(19): siRNA sense strand
gugugguagaacugaacaa

SEQ ID NO: 2457480 - RNA, 19 nt, Homo sapiens
  misc_RNA (1)...(19): siRNA sense strand
ggaauguaccagcuggaca

SEQ ID NO: 2457481 - RNA, 19 nt, Homo sapiens
  misc_RNA (1)...(19): siRNA sense strand
gcuggaagagggugaggga

SEQ ID NO: 2457482 - RNA, 19 nt, Homo sapiens
  misc_RNA (1)...(19): siRNA sense strand
gugucaguguccagaacau

SEQ ID NO: 2457483 - RNA, 19 nt, Homo sapiens
  misc_RNA (1)...(19): siRNA sense strand
gggaugugacaaugcuaau

SEQ ID NO: 2457484 - RNA, 19 nt, Homo sapiens
  misc_RNA (1)...(19): siRNA sense strand
gggagagaccucaaggcca

SEQ ID NO: 2457485 - RNA, 19 nt, Homo sapiens
  misc_RNA (1)...(19): siRNA sense strand
uuaugaagaaagaggagga

SEQ ID NO: 2457486 - RNA, 19 nt, Homo sapiens
  misc_RNA (1)...(19): siRNA sense strand
ugaagaaagaggaggaguc

SEQ ID NO: 2457487 - RNA, 19 nt, Homo sapiens
  misc_RNA (1)...(19): siRNA sense strand
aaauauagcccauugagga

SEQ ID NO: 2457488 - RNA, 19 nt, Homo sapiens
  misc_RNA (1)...(19): siRNA sense strand
cugaaaagugccugcaauu

SEQ ID NO: 2457489 - RNA, 19 nt, Homo sapiens
  misc_RNA (1)...(19): siRNA sense strand
aaugaggaagaguuggaaa

SEQ ID NO: 2457490 - RNA, 19 nt, Homo sapiens
  misc_RNA (1)...(19): siRNA sense strand
aagaugacaaagaugacaa

SEQ ID NO: 2457491 - RNA, 19 nt, Homo sapiens
  misc_RNA (1)...(19): siRNA sense strand
cauugaggauauuucacaa

SEQ ID NO: 2457492 - RNA, 19 nt, Homo sapiens
  misc_RNA (1)...(19): siRNA sense strand
gggucaaaguuuagcugcu

SEQ ID NO: 2457493 - RNA, 19 nt, Homo sapiens
  misc_RNA (1)...(19): siRNA sense strand
cccaaagaacagaaguaca

SEQ ID NO: 2457494 - RNA, 19 nt, Homo sapiens
  misc_RNA (1)...(19): siRNA sense strand
uggaguugcagcuggaaga

SEQ ID NO: 2457495 - RNA, 19 nt, Homo sapiens
  misc_RNA (1)...(19): siRNA sense strand
aguuuaaaaucggaggaaa

SEQ ID NO: 2457496 - RNA, 19 nt, Homo sapiens
  misc_RNA (1)...(19): siRNA sense strand
acacaauuggaguuaaaca

SEQ ID NO: 2457497 - RNA, 19 nt, Homo sapiens
  misc_RNA (1)...(19): siRNA sense strand
aguaaguuucagacccaaa

SEQ ID NO: 2457498 - RNA, 19 nt, Homo sapiens
  misc_RNA (1)...(19): siRNA sense strand
ucgaagaagaggagauaaa

SEQ ID NO: 2457499 - RNA, 19 nt, Homo sapiens
  misc_RNA (1)...(19): siRNA sense strand
gagaauauuuagaugggaa

SEQ ID NO: 2457500 - RNA, 19 nt, Homo sapiens
  misc_RNA (1)...(19): siRNA sense strand
agacggagauggagggaga

SEQ ID NO: 2457501 - RNA, 19 nt, Homo sapiens
  misc_RNA (1)...(19): siRNA sense strand
gcucuauaacauugagaaa

SEQ ID NO: 2457502 - RNA, 19 nt, Homo sapiens
  misc_RNA (1)...(19): siRNA sense strand
cagaagaggaggaggcaga

SEQ ID NO: 2457503 - RNA, 19 nt, Homo sapiens
  misc_RNA (1)...(19): siRNA sense strand
caaagugggaagagggcaa

SEQ ID NO: 2457504 - RNA, 19 nt, Homo sapiens
  misc_RNA (1)...(19): siRNA sense strand
gaugagaaguuucgggaga

SEQ ID NO: 2457505 - RNA, 19 nt, Homo sapiens
  misc_RNA (1)...(19): siRNA sense strand
aggacaaauucgaugaaau

SEQ ID NO: 2457506 - RNA, 19 nt, Homo sapiens
  misc_RNA (1)...(19): siRNA sense strand
gguggaacgccaagagcua

SEQ ID NO: 2457507 - RNA, 19 nt, Homo sapiens
  misc_RNA (1)...(19): siRNA sense strand
cagcagaagaggaagauca

SEQ ID NO: 2457508 - RNA, 19 nt, Homo sapiens
  misc_RNA (1)...(19): siRNA sense strand
cagaaagccaugaggcauu

SEQ ID NO: 2457509 - RNA, 19 nt, Homo sapiens
  misc_RNA (1)...(19): siRNA sense strand
ucagcuaaaccaagagaaa

SEQ ID NO: 2457510 - RNA, 19 nt, Homo sapiens
  misc_RNA (1)...(19): siRNA sense strand
cugaagaagccuagggacu

SEQ ID NO: 2457511 - RNA, 19 nt, Homo sapiens
  misc_RNA (1)...(19): siRNA sense strand
ggauggaagaacaggugaa

SEQ ID NO: 2457512 - RNA, 19 nt, Homo sapiens
  misc_RNA (1)...(19): siRNA sense strand
agcuaaaccaagagaaauu

SEQ ID NO: 2457513 - RNA, 19 nt, Homo sapiens
  misc_RNA (1)...(19): siRNA sense strand
aguuacagcaggaguuaaa

SEQ ID NO: 2457514 - RNA, 19 nt, Homo sapiens
  misc_RNA (1)...(19): siRNA sense strand
ugaaugaagaggaggcgaa

SEQ ID NO: 2457515 - RNA, 19 nt, Homo sapiens
  misc_RNA (1)...(19): siRNA sense strand
gcuauagauaucagagaga

SEQ ID NO: 2457516 - RNA, 19 nt, Homo sapiens
  misc_RNA (1)...(19): siRNA sense strand
agaucaagcuggagcagga

SEQ ID NO: 2457517 - RNA, 19 nt, Homo sapiens
  misc_RNA (1)...(19): siRNA sense strand
agggcaagcagaagagaau

SEQ ID NO: 2457518 - RNA, 19 nt, Homo sapiens
  misc_RNA (1)...(19): siRNA sense strand
gugaagaaugugaugaaaa

SEQ ID NO: 2457519 - RNA, 19 nt, Homo sapiens
  misc_RNA (1)...(19): siRNA sense strand
gcugaagaagagagaugaa

SEQ ID NO: 2457520 - RNA, 19 nt, Homo sapiens
  misc_RNA (1)...(19): siRNA sense strand
aggugaagaaugugaugaa

SEQ ID NO: 2457521 - RNA, 19 nt, Homo sapiens
  misc_RNA (1)...(19): siRNA sense strand
gugaggaggaucaaagcaa

SEQ ID NO: 2457522 - RNA, 19 nt, Homo sapiens
  misc_RNA (1)...(19): siRNA sense strand
agaauaaacucaucagcga

SEQ ID NO: 2457523 - RNA, 19 nt, Homo sapiens
  misc_RNA (1)...(19): siRNA sense strand
aaguagaggacuaugagaa

SEQ ID NO: 2457524 - RNA, 19 nt, Homo sapiens
  misc_RNA (1)...(19): siRNA sense strand
agauaaagcgucaaaggau

SEQ ID NO: 2457525 - RNA, 19 nt, Homo sapiens
  misc_RNA (1)...(19): siRNA sense strand
gggaaaugcucaauaccca

SEQ ID NO: 2457526 - RNA, 19 nt, Homo sapiens
  misc_RNA (1)...(19): siRNA sense strand
augugaaggauuugaagaa

SEQ ID NO: 2457527 - RNA, 19 nt, Homo sapiens
  misc_RNA (1)...(19): siRNA sense strand
auucaaggagcuacagaaa

SEQ ID NO: 2457528 - RNA, 19 nt, Homo sapiens
  misc_RNA (1)...(19): siRNA sense strand
aagaaagccgauugaaauu

SEQ ID NO: 2457529 - RNA, 19 nt, Homo sapiens
  misc_RNA (1)...(19): siRNA sense strand
gagucgaagaagaggagau

SEQ ID NO: 2457530 - RNA, 19 nt, Homo sapiens
  misc_RNA (1)...(19): siRNA sense strand
ccgcggaaccagaguccua

SEQ ID NO: 2457531 - RNA, 19 nt, Homo sapiens
  misc_RNA (1)...(19): siRNA sense strand
cacagauaguagaagaaau

SEQ ID NO: 2457532 - RNA, 19 nt, Homo sapiens
  misc_RNA (1)...(19): siRNA sense strand
uggaauugaaagugaggau

SEQ ID NO: 2457533 - RNA, 19 nt, Homo sapiens
  misc_RNA (1)...(19): siRNA sense strand
cgcugaggguacagaagaa

SEQ ID NO: 2457534 - RNA, 19 nt, Homo sapiens
  misc_RNA (1)...(19): siRNA sense strand
cagaauuggagcuggcaga

SEQ ID NO: 2457535 - RNA, 19 nt, Homo sapiens
  misc_RNA (1)...(19): siRNA sense strand
acaggagagucgaagaaga

SEQ ID NO: 2457536 - RNA, 19 nt, Homo sapiens
  misc_RNA (1)...(19): siRNA sense strand
aagaggagauaaagcguca

SEQ ID NO: 2457537 - RNA, 19 nt, Homo sapiens
  misc_RNA (1)...(19): siRNA sense strand
uaauuaaaucccagcagaa

SEQ ID NO: 2457538 - RNA, 19 nt, Homo sapiens
  misc_RNA (1)...(19): siRNA sense strand
cagaagaaugugcgugaca

SEQ ID NO: 2457539 - RNA, 19 nt, Homo sapiens
  misc_RNA (1)...(19): siRNA sense strand
agucgaagaagaggagaua

SEQ ID NO: 2457540 - RNA, 19 nt, Homo sapiens
  misc_RNA (1)...(19): siRNA sense strand
gugaaggauuugaagaaac

SEQ ID NO: 2457541 - RNA, 19 nt, Homo sapiens
  misc_RNA (1)...(19): siRNA sense strand
gcauggagaaggcgagcau

SEQ ID NO: 2457542 - RNA, 19 nt, Homo sapiens
  misc_RNA (1)...(19): siRNA sense strand
ucacaggagagucgaagaa

SEQ ID NO: 2457543 - RNA, 19 nt, Homo sapiens
  misc_RNA (1)...(19): siRNA sense strand
gccaguaauaagaagaaau

SEQ ID NO: 2457544 - RNA, 19 nt, Homo sapiens
  misc_RNA (1)...(19): siRNA sense strand
caaauauccagguggcuau

SEQ ID NO: 2457545 - RNA, 19 nt, Homo sapiens
  misc_RNA (1)...(19): siRNA sense strand
cugaacaggcagaggaucu

SEQ ID NO: 2457546 - RNA, 19 nt, Homo sapiens
  misc_RNA (1)...(19): siRNA sense strand
gguuccucauagagagcaa

SEQ ID NO: 2457547 - RNA, 19 nt, Homo sapiens
  misc_RNA (1)...(19): siRNA sense strand
gcgaagaauacaacaugau

SEQ ID NO: 2457548 - RNA, 19 nt, Homo sapiens
  misc_RNA (1)...(19): siRNA sense strand
agaaagcauuugaggugga

SEQ ID NO: 2457549 - RNA, 19 nt, Homo sapiens
  misc_RNA (1)...(19): siRNA sense strand
gcaugaagaaaguagagga

SEQ ID NO: 2457550 - RNA, 19 nt, Homo sapiens
  misc_RNA (1)...(19): siRNA sense strand
gugcugaagaagagagaug

SEQ ID NO: 2457551 - RNA, 19 nt, Homo sapiens
  misc_RNA (1)...(19): siRNA sense strand
augggaagaaggagaguga

SEQ ID NO: 2457552 - RNA, 19 nt, Homo sapiens
  misc_RNA (1)...(19): siRNA sense strand
augccaaagagcuggagua

SEQ ID NO: 2457553 - RNA, 19 nt, Homo sapiens
  misc_RNA (1)...(19): siRNA sense strand
cuucagcagaggaaagcaa

SEQ ID NO: 2457554 - RNA, 19 nt, Homo sapiens
  misc_RNA (1)...(19): siRNA sense strand
agaaggagagugaggagga

SEQ ID NO: 2457555 - RNA, 19 nt, Homo sapiens
  misc_RNA (1)...(19): siRNA sense strand
ccaagcugcugcuggaaaa

SEQ ID NO: 2457556 - RNA, 19 nt, Homo sapiens
  misc_RNA (1)...(19): siRNA sense strand
ucgugaaagcugaaagaaa

SEQ ID NO: 2457557 - RNA, 19 nt, Homo sapiens
  misc_RNA (1)...(19): siRNA sense strand
agagagauggacagggaaa

SEQ ID NO: 2457558 - RNA, 19 nt, Homo sapiens
  misc_RNA (1)...(19): siRNA sense strand
ggagaaauauggagaggcu

SEQ ID NO: 2457559 - RNA, 19 nt, Homo sapiens
  misc_RNA (1)...(19): siRNA sense strand
gcagagagauggacaggga

SEQ ID NO: 2457560 - RNA, 19 nt, Homo sapiens
  misc_RNA (1)...(19): siRNA sense strand
gcgcagagcuaaaaggaga

SEQ ID NO: 2457561 - RNA, 19 nt, Homo sapiens
  misc_RNA (1)...(19): siRNA sense strand
agaaauauggagaggcuga

SEQ ID NO: 2457562 - RNA, 19 nt, Homo sapiens
  misc_RNA (1)...(19): siRNA sense strand
guacuaaaguucaugcuga

SEQ ID NO: 2457563 - RNA, 19 nt, Homo sapiens
  misc_RNA (1)...(19): siRNA sense strand
agugcagaagagagagaaa

SEQ ID NO: 2457564 - RNA, 19 nt, Homo sapiens
  misc_RNA (1)...(19): siRNA sense strand
ucaaagaugcagugaggga

SEQ ID NO: 2457565 - RNA, 19 nt, Homo sapiens
  misc_RNA (1)...(19): siRNA sense strand
agagcuaaaaggagaaaua

SEQ ID NO: 2457566 - RNA, 19 nt, Homo sapiens
  misc_RNA (1)...(19): siRNA sense strand
auacauugggagaagagaa

SEQ ID NO: 2457567 - RNA, 19 nt, Homo sapiens
  misc_RNA (1)...(19): siRNA sense strand
ugagaaaacagaagugaau

SEQ ID NO: 2457568 - RNA, 19 nt, Homo sapiens
  misc_RNA (1)...(19): siRNA sense strand
cuacauuucugaaggccuu

SEQ ID NO: 2457569 - RNA, 19 nt, Homo sapiens
  misc_RNA (1)...(19): siRNA sense strand
uagaauaaucacugaagga

SEQ ID NO: 2457570 - RNA, 19 nt, Homo sapiens
  misc_RNA (1)...(19): siRNA sense strand
agaaguaggcguaugggau

SEQ ID NO: 2457571 - RNA, 19 nt, Homo sapiens
  misc_RNA (1)...(19): siRNA sense strand
aaggaaagucuguggcgau

SEQ ID NO: 2457572 - RNA, 19 nt, Homo sapiens
  misc_RNA (1)...(19): siRNA sense strand
gaucaaagaugcagugagg

SEQ ID NO: 2457573 - RNA, 19 nt, Homo sapiens
  misc_RNA (1)...(19): siRNA sense strand
aaguaggcguaugggauaa

SEQ ID NO: 2457574 - RNA, 19 nt, Homo sapiens
  misc_RNA (1)...(19): siRNA sense strand
cuguggcgauucagauaaa

SEQ ID NO: 2457575 - RNA, 19 nt, Homo sapiens
  misc_RNA (1)...(19): siRNA sense strand
uggaaguggcaauggcaga

SEQ ID NO: 2457576 - RNA, 19 nt, Homo sapiens
  misc_RNA (1)...(19): siRNA sense strand
uagcaacagcccaggauga

SEQ ID NO: 2457577 - RNA, 19 nt, Homo sapiens
  misc_RNA (1)...(19): siRNA sense strand
aggaaagucuguggcgauu

SEQ ID NO: 2457578 - RNA, 19 nt, Homo sapiens
  misc_RNA (1)...(19): siRNA sense strand
aggccuucauccuagaaua

SEQ ID NO: 2457579 - RNA, 19 nt, Homo sapiens
  misc_RNA (1)...(19): siRNA sense strand
ugaucaaaggaccaaauaa

SEQ ID NO: 2457580 - RNA, 19 nt, Homo sapiens
  misc_RNA (1)...(19): siRNA sense strand
aggacuuguauaugaguau

SEQ ID NO: 2457581 - RNA, 19 nt, Homo sapiens
  misc_RNA (1)...(19): siRNA sense strand
gcgauucagauaaaggauu

SEQ ID NO: 2457582 - RNA, 19 nt, Homo sapiens
  misc_RNA (1)...(19): siRNA sense strand
ccuuagaugcucuuucaaa

SEQ ID NO: 2457583 - RNA, 19 nt, Homo sapiens
  misc_RNA (1)...(19): siRNA sense strand
gucaaaguaagcagagaga

SEQ ID NO: 2457584 - RNA, 19 nt, Homo sapiens
  misc_RNA (1)...(19): siRNA sense strand
augaguauacauugggaga

SEQ ID NO: 2457585 - RNA, 19 nt, Homo sapiens
  misc_RNA (1)...(19): siRNA sense strand
gugaaagcugaaagaaaau

SEQ ID NO: 2457586 - RNA, 19 nt, Homo sapiens
  misc_RNA (1)...(19): siRNA sense strand
ccuaaucauuggagagcug

SEQ ID NO: 2457587 - RNA, 19 nt, Homo sapiens
  misc_RNA (1)...(19): siRNA sense strand
uuggaagaagucaaaguaa

SEQ ID NO: 2457588 - RNA, 19 nt, Homo sapiens
  misc_RNA (1)...(19): siRNA sense strand
cauuagaguaugagaaaac

SEQ ID NO: 2457589 - RNA, 19 nt, Homo sapiens
  misc_RNA (1)...(19): siRNA sense strand
gggacaugcaggacuugua

SEQ ID NO: 2457590 - RNA, 19 nt, Homo sapiens
  misc_RNA (1)...(19): siRNA sense strand
cauugggagaagagaaguu

SEQ ID NO: 2457591 - RNA, 19 nt, Homo sapiens
  misc_RNA (1)...(19): siRNA sense strand
ggugaugguacgacuucua

SEQ ID NO: 2457592 - RNA, 19 nt, Homo sapiens
  misc_RNA (1)...(19): siRNA sense strand
cuuagaugcucuuucaaaa

SEQ ID NO: 2457593 - RNA, 19 nt, Homo sapiens
  misc_RNA (1)...(19): siRNA sense strand
gggauaacuauuguguaaa

SEQ ID NO: 2457594 - RNA, 19 nt, Homo sapiens
  misc_RNA (1)...(19): siRNA sense strand
caggucagcuugugggugu

SEQ ID NO: 2457595 - RNA, 19 nt, Homo sapiens
  misc_RNA (1)...(19): siRNA sense strand
ccaagauugcacagcuaaa

SEQ ID NO: 2457596 - RNA, 19 nt, Homo sapiens
  misc_RNA (1)...(19): siRNA sense strand
ccugaaagguauugcgcag

SEQ ID NO: 2457597 - RNA, 19 nt, Homo sapiens
  misc_RNA (1)...(19): siRNA sense strand
aaccaagaccauacagcaa

SEQ ID NO: 2457598 - RNA, 19 nt, Homo sapiens
  misc_RNA (1)...(19): siRNA sense strand
guuccucaugacagggaua

SEQ ID NO: 2457599 - RNA, 19 nt, Homo sapiens
  misc_RNA (1)...(19): siRNA sense strand
augaaugcagagaggauaa

SEQ ID NO: 2457600 - RNA, 19 nt, Homo sapiens
  misc_RNA (1)...(19): siRNA sense strand
aggcaauggaggagaggca

SEQ ID NO: 2457601 - RNA, 19 nt, Homo sapiens
  misc_RNA (1)...(19): siRNA sense strand
agauugguccacugggaaa

SEQ ID NO: 2457602 - RNA, 19 nt, Homo sapiens
  misc_RNA (1)...(19): siRNA sense strand
ucaugaaugcagagaggau

SEQ ID NO: 2457603 - RNA, 19 nt, Homo sapiens
  misc_RNA (1)...(19): siRNA sense strand
gugaaugagacgaggccca

SEQ ID NO: 2457604 - RNA, 19 nt, Homo sapiens
  misc_RNA (1)...(19): siRNA sense strand
ggucgagguccaaagaaaa

SEQ ID NO: 2457605 - RNA, 19 nt, Homo sapiens
  misc_RNA (1)...(19): siRNA sense strand
uggcgugaacccagaagaa

SEQ ID NO: 2457606 - RNA, 19 nt, Homo sapiens
  misc_RNA (1)...(19): siRNA sense strand
cugcaugcacaguggcuuu

SEQ ID NO: 2457607 - RNA, 19 nt, Homo sapiens
  misc_RNA (1)...(19): siRNA sense strand
cgggaagcuaugaugaaca

SEQ ID NO: 2457608 - RNA, 19 nt, Homo sapiens
  misc_RNA (1)...(19): siRNA sense strand
cuguacaguuucaaugaca

SEQ ID NO: 2457609 - RNA, 19 nt, Homo sapiens
  misc_RNA (1)...(19): siRNA sense strand
gaaaagaacuuguuggaga

SEQ ID NO: 2457610 - RNA, 19 nt, Homo sapiens
  misc_RNA (1)...(19): siRNA sense strand
agaaaguggcacagaaaau

SEQ ID NO: 2457611 - RNA, 19 nt, Homo sapiens
  misc_RNA (1)...(19): siRNA sense strand
cugaaauggacaagaaaug

SEQ ID NO: 2457612 - RNA, 19 nt, Homo sapiens
  misc_RNA (1)...(19): siRNA sense strand
guacauagaauuaaggcgu

SEQ ID NO: 2457613 - RNA, 19 nt, Homo sapiens
  misc_RNA (1)...(19): siRNA sense strand
acauagaauuaaggcguau

SEQ ID NO: 2457614 - RNA, 19 nt, Homo sapiens
  misc_RNA (1)...(19): siRNA sense strand
uugaauuaccugaagacau

SEQ ID NO: 2457615 - RNA, 19 nt, Homo sapiens
  misc_RNA (1)...(19): siRNA sense strand
gaaauuacugaaauggaca

SEQ ID NO: 2457616 - RNA, 19 nt, Homo sapiens
  misc_RNA (1)...(19): siRNA sense strand
acugaaauggacaagaaau

SEQ ID NO: 2457617 - RNA, 19 nt, Homo sapiens
  misc_RNA (1)...(19): siRNA sense strand
cgacaaaugauguuuucaa

SEQ ID NO: 2457618 - RNA, 19 nt, Homo sapiens
  misc_RNA (1)...(19): siRNA sense strand
aauacaaacuugcaggugu

SEQ ID NO: 2457619 - RNA, 19 nt, Homo sapiens
  misc_RNA (1)...(19): siRNA sense strand
agugaaagcaggaaagaaa

SEQ ID NO: 2457620 - RNA, 19 nt, Homo sapiens
  misc_RNA (1)...(19): siRNA sense strand
cugcaagaauauagagcaa

SEQ ID NO: 2457621 - RNA, 19 nt, Homo sapiens
  misc_RNA (1)...(19): siRNA sense strand
ggcaaaggacaaagggaaa

SEQ ID NO: 2457622 - RNA, 19 nt, Homo sapiens
  misc_RNA (1)...(19): siRNA sense strand
ggacaaagggaaaaggaaa

SEQ ID NO: 2457623 - RNA, 19 nt, Homo sapiens
  misc_RNA (1)...(19): siRNA sense strand
cuuuagaaaccuagagaau

SEQ ID NO: 2457624 - RNA, 19 nt, Homo sapiens
  misc_RNA (1)...(19): siRNA sense strand
cagaaaaggcaaaggacaa

SEQ ID NO: 2457625 - RNA, 19 nt, Homo sapiens
  misc_RNA (1)...(19): siRNA sense strand
aggcaaaggacaaagggaa

SEQ ID NO: 2457626 - RNA, 19 nt, Homo sapiens
  misc_RNA (1)...(19): siRNA sense strand
uagcaaaccaagaggaaga

SEQ ID NO: 2457627 - RNA, 19 nt, Homo sapiens
  misc_RNA (1)...(19): siRNA sense strand
ugauagaaggcguggauau

SEQ ID NO: 2457628 - RNA, 19 nt, Homo sapiens
  misc_RNA (1)...(19): siRNA sense strand
aggcaaagaaggauaaaga

SEQ ID NO: 2457629 - RNA, 19 nt, Homo sapiens
  misc_RNA (1)...(19): siRNA sense strand
aggagaaguuggaaguaau

SEQ ID NO: 2457630 - RNA, 19 nt, Homo sapiens
  misc_RNA (1)...(19): siRNA sense strand
aagaaagagaagaaggcaa

SEQ ID NO: 2457631 - RNA, 19 nt, Homo sapiens
  misc_RNA (1)...(19): siRNA sense strand
agaaaggaacaaaggagaa

SEQ ID NO: 2457632 - RNA, 19 nt, Homo sapiens
  misc_RNA (1)...(19): siRNA sense strand
cguugaagaaggaggguca

SEQ ID NO: 2457633 - RNA, 19 nt, Homo sapiens
  misc_RNA (1)...(19): siRNA sense strand
ugauugaaccacaaagaaa

SEQ ID NO: 2457634 - RNA, 19 nt, Homo sapiens
  misc_RNA (1)...(19): siRNA sense strand
cggaaugaggugcagauaa

SEQ ID NO: 2457635 - RNA, 19 nt, Homo sapiens
  misc_RNA (1)...(19): siRNA sense strand
cggcauugguucaucgaau

SEQ ID NO: 2457636 - RNA, 19 nt, Homo sapiens
  misc_RNA (1)...(19): siRNA sense strand
agauaaagcaugaagagga

SEQ ID NO: 2457637 - RNA, 19 nt, Homo sapiens
  misc_RNA (1)...(19): siRNA sense strand
agaagaaggcaaagaagga

SEQ ID NO: 2457638 - RNA, 19 nt, Homo sapiens
  misc_RNA (1)...(19): siRNA sense strand
ggaauuucucucaggacua

SEQ ID NO: 2457639 - RNA, 19 nt, Homo sapiens
  misc_RNA (1)...(19): siRNA sense strand
ccaucaagaaugaccuaaa

SEQ ID NO: 2457640 - RNA, 19 nt, Homo sapiens
  misc_RNA (1)...(19): siRNA sense strand
aagaaggcaaagaaggaua

SEQ ID NO: 2457641 - RNA, 19 nt, Homo sapiens
  misc_RNA (1)...(19): siRNA sense strand
ggacagcggaauagauaca

SEQ ID NO: 2457642 - RNA, 19 nt, Homo sapiens
  misc_RNA (1)...(19): siRNA sense strand
agaaaggaaagaaaggcaa

SEQ ID NO: 2457643 - RNA, 19 nt, Homo sapiens
  misc_RNA (1)...(19): siRNA sense strand
ugggaaauacccuggcaaa

SEQ ID NO: 2457644 - RNA, 19 nt, Homo sapiens
  misc_RNA (1)...(19): siRNA sense strand
ccaucgagucucuguauaa

SEQ ID NO: 2457645 - RNA, 19 nt, Homo sapiens
  misc_RNA (1)...(19): siRNA sense strand
ggaaguaauaaaaggaaga

SEQ ID NO: 2457646 - RNA, 19 nt, Homo sapiens
  misc_RNA (1)...(19): siRNA sense strand
cuacaguaauccaggcuga

SEQ ID NO: 2457647 - RNA, 19 nt, Homo sapiens
  misc_RNA (1)...(19): siRNA sense strand
aaauaaggaagaagacgaa

SEQ ID NO: 2457648 - RNA, 19 nt, Homo sapiens
  misc_RNA (1)...(19): siRNA sense strand
agaauauagagcaaagcaa

SEQ ID NO: 2457649 - RNA, 19 nt, Homo sapiens
  misc_RNA (1)...(19): siRNA sense strand
caguguacaaagaggaaga

SEQ ID NO: 2457650 - RNA, 19 nt, Homo sapiens
  misc_RNA (1)...(19): siRNA sense strand
acguaaaguaugugcagau

SEQ ID NO: 2457651 - RNA, 19 nt, Homo sapiens
  misc_RNA (1)...(19): siRNA sense strand
ugagagaagaggagaugau

SEQ ID NO: 2457652 - RNA, 19 nt, Homo sapiens
  misc_RNA (1)...(19): siRNA sense strand
gauugaaccacaaagaaau

SEQ ID NO: 2457653 - RNA, 19 nt, Homo sapiens
  misc_RNA (1)...(19): siRNA sense strand
gaagaggacuacagggaag

SEQ ID NO: 2457654 - RNA, 19 nt, Homo sapiens
  misc_RNA (1)...(19): siRNA sense strand
cucuaacauugcugggaaa

SEQ ID NO: 2457655 - RNA, 19 nt, Homo sapiens
  misc_RNA (1)...(19): siRNA sense strand
acgaauacugaucaggaaa

SEQ ID NO: 2457656 - RNA, 19 nt, Homo sapiens
  misc_RNA (1)...(19): siRNA sense strand
aagaaaggaacaaaggaga

SEQ ID NO: 2457657 - RNA, 19 nt, Homo sapiens
  misc_RNA (1)...(19): siRNA sense strand
acauauagucgaagugguu

SEQ ID NO: 2457658 - RNA, 19 nt, Homo sapiens
  misc_RNA (1)...(19): siRNA sense strand
auauagucgaagugguuaa

SEQ ID NO: 2457659 - RNA, 19 nt, Homo sapiens
  misc_RNA (1)...(19): siRNA sense strand
acaacagguuauugaggau

SEQ ID NO: 2457660 - RNA, 19 nt, Homo sapiens
  misc_RNA (1)...(19): siRNA sense strand
cauagcaaaccaagaggaa

SEQ ID NO: 2457661 - RNA, 19 nt, Homo sapiens
  misc_RNA (1)...(19): siRNA sense strand
uugaugaguugaugagaca

SEQ ID NO: 2457662 - RNA, 19 nt, Homo sapiens
  misc_RNA (1)...(19): siRNA sense strand
ccucuaacauugcugggaa

SEQ ID NO: 2457663 - RNA, 19 nt, Homo sapiens
  misc_RNA (1)...(19): siRNA sense strand
gggaaauacccuggcaaaa

SEQ ID NO: 2457664 - RNA, 19 nt, Homo sapiens
  misc_RNA (1)...(19): siRNA sense strand
ccaaaacuccucuggguaa

SEQ ID NO: 2457665 - RNA, 19 nt, Homo sapiens
  misc_RNA (1)...(19): siRNA sense strand
guaauaaaaggaagagaga

SEQ ID NO: 2457666 - RNA, 19 nt, Homo sapiens
  misc_RNA (1)...(19): siRNA sense strand
agaaggcaaagaaggauaa

SEQ ID NO: 2457667 - RNA, 19 nt, Homo sapiens
  misc_RNA (1)...(19): siRNA sense strand
uagaaggcguggauaucaa

SEQ ID NO: 2457668 - RNA, 19 nt, Homo sapiens
  misc_RNA (1)...(19): siRNA sense strand
accaagaggaagaagaaaa

SEQ ID NO: 2457669 - RNA, 19 nt, Homo sapiens
  misc_RNA (1)...(19): siRNA sense strand
gcaaaguuuaccagaaaau

SEQ ID NO: 2457670 - RNA, 19 nt, Homo sapiens
  misc_RNA (1)...(19): siRNA sense strand
agcaaaucauugaacgcaa

SEQ ID NO: 2457671 - RNA, 19 nt, Homo sapiens
  misc_RNA (1)...(19): siRNA sense strand
acaggaggcagcacagaaa

SEQ ID NO: 2457672 - RNA, 19 nt, Homo sapiens
  misc_RNA (1)...(19): siRNA sense strand
gcaaaggacaaagggaaaa

SEQ ID NO: 2457673 - RNA, 19 nt, Homo sapiens
  misc_RNA (1)...(19): siRNA sense strand
gauaaagcaugaagaggac

SEQ ID NO: 2457674 - RNA, 19 nt, Homo sapiens
  misc_RNA (1)...(19): siRNA sense strand
caaaccaagaggaagaaga

SEQ ID NO: 2457675 - RNA, 19 nt, Homo sapiens
  misc_RNA (1)...(19): siRNA sense strand
agaucaggauacagguuga

SEQ ID NO: 2457676 - RNA, 19 nt, Homo sapiens
  misc_RNA (1)...(19): siRNA sense strand
gcccagugaaagcaggaaa

SEQ ID NO: 2457677 - RNA, 19 nt, Homo sapiens
  misc_RNA (1)...(19): siRNA sense strand
cgaaugagcugaauggcau

SEQ ID NO: 2457678 - RNA, 19 nt, Homo sapiens
  misc_RNA (1)...(19): siRNA sense strand
gugaagaaccagcuggaca

SEQ ID NO: 2457679 - RNA, 19 nt, Homo sapiens
  misc_RNA (1)...(19): siRNA sense strand
agaacuaucucaaggcuca

SEQ ID NO: 2457680 - RNA, 19 nt, Homo sapiens
  misc_RNA (1)...(19): siRNA sense strand
agguagaguacuuggacca

SEQ ID NO: 2457681 - RNA, 19 nt, Homo sapiens
  misc_RNA (1)...(19): siRNA sense strand
gggucuauuucaagagucu

SEQ ID NO: 2457682 - RNA, 19 nt, Homo sapiens
  misc_RNA (1)...(19): siRNA sense strand
cugaaacuacugagugcaa

SEQ ID NO: 2457683 - RNA, 19 nt, Homo sapiens
  misc_RNA (1)...(19): siRNA sense strand
gcgaaugagcugaauggca

SEQ ID NO: 2457684 - RNA, 19 nt, Homo sapiens
  misc_RNA (1)...(19): siRNA sense strand
guuuaagaugcgucaguuu

SEQ ID NO: 2457685 - RNA, 19 nt, Homo sapiens
  misc_RNA (1)...(19): siRNA sense strand
ugaagaaccagcuggacau

SEQ ID NO: 2457686 - RNA, 19 nt, Homo sapiens
  misc_RNA (1)...(19): siRNA sense strand
caguggaggcccagaaagu

SEQ ID NO: 2457687 - RNA, 19 nt, Homo sapiens
  misc_RNA (1)...(19): siRNA sense strand
caguggaccagaagcacaa

SEQ ID NO: 2457688 - RNA, 19 nt, Homo sapiens
  misc_RNA (1)...(19): siRNA sense strand
cuuccagaguggugucaau

SEQ ID NO: 2457689 - RNA, 19 nt, Homo sapiens
  misc_RNA (1)...(19): siRNA sense strand
agaugaaguuauugugaag

SEQ ID NO: 2457690 - RNA, 19 nt, Homo sapiens
  misc_RNA (1)...(19): siRNA sense strand
caguggaccugauugggua

SEQ ID NO: 2457691 - RNA, 19 nt, Homo sapiens
  misc_RNA (1)...(19): siRNA sense strand
gguacaacuuucagcugga

SEQ ID NO: 2457692 - RNA, 19 nt, Homo sapiens
  misc_RNA (1)...(19): siRNA sense strand
auuacagagugcuuacaaa

SEQ ID NO: 2457693 - RNA, 19 nt, Homo sapiens
  misc_RNA (1)...(19): siRNA sense strand
gugacaggaauuagccgaa

SEQ ID NO: 2457694 - RNA, 19 nt, Homo sapiens
  misc_RNA (1)...(19): siRNA sense strand
ccaagaaguaugguggaga

SEQ ID NO: 2457695 - RNA, 19 nt, Homo sapiens
  misc_RNA (1)...(19): siRNA sense strand
ugacagugaucgagggaga

SEQ ID NO: 2457696 - RNA, 19 nt, Homo sapiens
  misc_RNA (1)...(19): siRNA sense strand
cuucaaacauaguggggaa

SEQ ID NO: 2457697 - RNA, 19 nt, Homo sapiens
  misc_RNA (1)...(19): siRNA sense strand
cagaaggaggacagaacaa

SEQ ID NO: 2457698 - RNA, 19 nt, Homo sapiens
  misc_RNA (1)...(19): siRNA sense strand
acacagagcuaaaaggcaa

SEQ ID NO: 2457699 - RNA, 19 nt, Homo sapiens
  misc_RNA (1)...(19): siRNA sense strand
gggaaagcucacucggauu

SEQ ID NO: 2457700 - RNA, 19 nt, Homo sapiens
  misc_RNA (1)...(19): siRNA sense strand
agaacaacuccgaagaaaa

SEQ ID NO: 2457701 - RNA, 19 nt, Homo sapiens
  misc_RNA (1)...(19): siRNA sense strand
cgguggaaggugaggagau

SEQ ID NO: 2457702 - RNA, 19 nt, Homo sapiens
  misc_RNA (1)...(19): siRNA sense strand
agggagagguugcgaccau

SEQ ID NO: 2457703 - RNA, 19 nt, Homo sapiens
  misc_RNA (1)...(19): siRNA sense strand
aagggaacacagagcuaaa

SEQ ID NO: 2457704 - RNA, 19 nt, Homo sapiens
  misc_RNA (1)...(19): siRNA sense strand
cuggaaaccugcagaccca

SEQ ID NO: 2457705 - RNA, 19 nt, Homo sapiens
  misc_RNA (1)...(19): siRNA sense strand
ccgaagaaaagaaagagua

SEQ ID NO: 2457706 - RNA, 19 nt, Homo sapiens
  misc_RNA (1)...(19): siRNA sense strand
aaucaaugcagaaggagga

SEQ ID NO: 2457707 - RNA, 19 nt, Homo sapiens
  misc_RNA (1)...(19): siRNA sense strand
uggaaggugaggagauuga

SEQ ID NO: 2457708 - RNA, 19 nt, Homo sapiens
  misc_RNA (1)...(19): siRNA sense strand
agcuauaaucaaugcagaa

SEQ ID NO: 2457709 - RNA, 19 nt, Homo sapiens
  misc_RNA (1)...(19): siRNA sense strand
caggaaaguuacaccacca

SEQ ID NO: 2457710 - RNA, 19 nt, Homo sapiens
  misc_RNA (1)...(19): siRNA sense strand
ugccagacauaaagguaca

SEQ ID NO: 2457711 - RNA, 19 nt, Homo sapiens
  misc_RNA (1)...(19): siRNA sense strand
gccaagucaauaagaguga

SEQ ID NO: 2457712 - RNA, 19 nt, Homo sapiens
  misc_RNA (1)...(19): siRNA sense strand
acacugcgguggaagguga

SEQ ID NO: 2457713 - RNA, 19 nt, Homo sapiens
  misc_RNA (1)...(19): siRNA sense strand
cagcuauaaucaaugcaga

SEQ ID NO: 2457714 - RNA, 19 nt, Homo sapiens
  misc_RNA (1)...(19): siRNA sense strand
ggacagaacaacuccgaag

SEQ ID NO: 2457715 - RNA, 19 nt, Homo sapiens
  misc_RNA (1)...(19): siRNA sense strand
cagugaacucaaaguauca

SEQ ID NO: 2457716 - RNA, 19 nt, Homo sapiens
  misc_RNA (1)...(19): siRNA sense strand
ugagagucgaugaugaaau

SEQ ID NO: 2457717 - RNA, 19 nt, Homo sapiens
  misc_RNA (1)...(19): siRNA sense strand
caaaggagccgaugacgca

SEQ ID NO: 2457718 - RNA, 19 nt, Homo sapiens
  misc_RNA (1)...(19): siRNA sense strand
caucaguugccaagucaau

SEQ ID NO: 2457719 - RNA, 19 nt, Homo sapiens
  misc_RNA (1)...(19): siRNA sense strand
gugacgacucugugauuca

SEQ ID NO: 2457720 - RNA, 19 nt, Homo sapiens
  misc_RNA (1)...(19): siRNA sense strand
aucgauauccagagagaca

SEQ ID NO: 2457721 - RNA, 19 nt, Homo sapiens
  misc_RNA (1)...(19): siRNA sense strand
agagugaacaagaggguca

SEQ ID NO: 2457722 - RNA, 19 nt, Homo sapiens
  misc_RNA (1)...(19): siRNA sense strand
gaucaaggacccagugcca

SEQ ID NO: 2457723 - RNA, 19 nt, Homo sapiens
  misc_RNA (1)...(19): siRNA sense strand
aagaagcaggagagaguga

SEQ ID NO: 2457724 - RNA, 19 nt, Homo sapiens
  misc_RNA (1)...(19): siRNA sense strand
uuggaaaggcugggagcua

SEQ ID NO: 2457725 - RNA, 19 nt, Homo sapiens
  misc_RNA (1)...(19): siRNA sense strand
gcauugagguggcugagga

SEQ ID NO: 2457726 - RNA, 19 nt, Homo sapiens
  misc_RNA (1)...(19): siRNA sense strand
agcaggagagagugaacaa

SEQ ID NO: 2457727 - RNA, 19 nt, Homo sapiens
  misc_RNA (1)...(19): siRNA sense strand
cuaggaaaggagaccacaa

SEQ ID NO: 2457728 - RNA, 19 nt, Homo sapiens
  misc_RNA (1)...(19): siRNA sense strand
cuccagaagaugaaguaca

SEQ ID NO: 2457729 - RNA, 19 nt, Homo sapiens
  misc_RNA (1)...(19): siRNA sense strand
cgugaaagucaguggugaa

SEQ ID NO: 2457730 - RNA, 19 nt, Homo sapiens
  misc_RNA (1)...(19): siRNA sense strand
cugaagaaguacagagcca

SEQ ID NO: 2457731 - RNA, 19 nt, Homo sapiens
  misc_RNA (1)...(19): siRNA sense strand
agaacaacuccaaggaaau

SEQ ID NO: 2457732 - RNA, 19 nt, Homo sapiens
  misc_RNA (1)...(19): siRNA sense strand
augaugggcccaagagaaa

SEQ ID NO: 2457733 - RNA, 19 nt, Homo sapiens
  misc_RNA (1)...(19): siRNA sense strand
aguacagagccaagagcaa

SEQ ID NO: 2457734 - RNA, 19 nt, Homo sapiens
  misc_RNA (1)...(19): siRNA sense strand
cagugaaacgggagacuau

SEQ ID NO: 2457735 - RNA, 19 nt, Homo sapiens
  misc_RNA (1)...(19): siRNA sense strand
aaguggaggacaagagaau

SEQ ID NO: 2457736 - RNA, 19 nt, Homo sapiens
  misc_RNA (1)...(19): siRNA sense strand
acaacaagcguaagaccaa

SEQ ID NO: 2457737 - RNA, 19 nt, Homo sapiens
  misc_RNA (1)...(19): siRNA sense strand
cguccuaaagagagaugaa

SEQ ID NO: 2457738 - RNA, 19 nt, Homo sapiens
  misc_RNA (1)...(19): siRNA sense strand
ggacaagagaauaaggaag

SEQ ID NO: 2457739 - RNA, 19 nt, Homo sapiens
  misc_RNA (1)...(19): siRNA sense strand
gauuauaacuggugagugg

SEQ ID NO: 2457740 - RNA, 19 nt, Homo sapiens
  misc_RNA (1)...(19): siRNA sense strand
agacuauggcaacgugaaa

SEQ ID NO: 2457741 - RNA, 19 nt, Homo sapiens
  misc_RNA (1)...(19): siRNA sense strand
gaacuuacuaucugggaca

SEQ ID NO: 2457742 - RNA, 19 nt, Homo sapiens
  misc_RNA (1)...(19): siRNA sense strand
cagaagacucagaggauac

SEQ ID NO: 2457743 - RNA, 19 nt, Homo sapiens
  misc_RNA (1)...(19): siRNA sense strand
acaaagagucaccgcagaa

SEQ ID NO: 2457744 - RNA, 19 nt, Homo sapiens
  misc_RNA (1)...(19): siRNA sense strand
uccuaaagagagaugaaua

SEQ ID NO: 2457745 - RNA, 19 nt, Homo sapiens
  misc_RNA (1)...(19): siRNA sense strand
aagaagaaguccaggagcu

SEQ ID NO: 2457746 - RNA, 19 nt, Homo sapiens
  misc_RNA (1)...(19): siRNA sense strand
gaguuagauuugagugagu

SEQ ID NO: 2457747 - RNA, 19 nt, Homo sapiens
  misc_RNA (1)...(19): siRNA sense strand
guguuaacccucaguggaa

SEQ ID NO: 2457748 - RNA, 19 nt, Homo sapiens
  misc_RNA (1)...(19): siRNA sense strand
cggaacaacaagcguaaga

SEQ ID NO: 2457749 - RNA, 19 nt, Homo sapiens
  misc_RNA (1)...(19): siRNA sense strand
ggcccaagagaaagggauu

SEQ ID NO: 2457750 - RNA, 19 nt, Homo sapiens
  misc_RNA (1)...(19): siRNA sense strand
agaauaaggaagcugaaaa

SEQ ID NO: 2457751 - RNA, 19 nt, Homo sapiens
  misc_RNA (1)...(19): siRNA sense strand
ggcaaaacguuucaagcaa

SEQ ID NO: 2457752 - RNA, 19 nt, Homo sapiens
  misc_RNA (1)...(19): siRNA sense strand
gcuuggacuuagacgguca

SEQ ID NO: 2457753 - RNA, 19 nt, Homo sapiens
  misc_RNA (1)...(19): siRNA sense strand
caugaugggcccaagagaa

SEQ ID NO: 2457754 - RNA, 19 nt, Homo sapiens
  misc_RNA (1)...(19): siRNA sense strand
caucagaucucaaugacca

SEQ ID NO: 2457755 - RNA, 19 nt, Homo sapiens
  misc_RNA (1)...(19): siRNA sense strand
gugaaagucaguggugaaa

SEQ ID NO: 2457756 - RNA, 19 nt, Homo sapiens
  misc_RNA (1)...(19): siRNA sense strand
agccauacccagcuggaaa

SEQ ID NO: 2457757 - RNA, 19 nt, Homo sapiens
  misc_RNA (1)...(19): siRNA sense strand
aaaacguagaagugggaaa

SEQ ID NO: 2457758 - RNA, 19 nt, Homo sapiens
  misc_RNA (1)...(19): siRNA sense strand
gacacugggcggagcuaua

SEQ ID NO: 2457759 - RNA, 19 nt, Homo sapiens
  misc_RNA (1)...(19): siRNA sense strand
ccauaggagaugaaaagaa

SEQ ID NO: 2457760 - RNA, 19 nt, Homo sapiens
  misc_RNA (1)...(19): siRNA sense strand
cugaguuagauuugaguga

SEQ ID NO: 2457761 - RNA, 19 nt, Homo sapiens
  misc_RNA (1)...(19): siRNA sense strand
cuacaaaacuggugggcug

SEQ ID NO: 2457762 - RNA, 19 nt, Homo sapiens
  misc_RNA (1)...(19): siRNA sense strand
ccugacaagucccggaaca

SEQ ID NO: 2457763 - RNA, 19 nt, Homo sapiens
  misc_RNA (1)...(19): siRNA sense strand
uggaagagacugaagaaag

SEQ ID NO: 2457764 - RNA, 19 nt, Homo sapiens
  misc_RNA (1)...(19): siRNA sense strand
gagcagcgccuuuggcaga

SEQ ID NO: 2457765 - RNA, 19 nt, Homo sapiens
  misc_RNA (1)...(19): siRNA sense strand
gaauguuugccuagaacuu

SEQ ID NO: 2457766 - RNA, 19 nt, Homo sapiens
  misc_RNA (1)...(19): siRNA sense strand
aagaaaaggcaaaacguuu

SEQ ID NO: 2457767 - RNA, 19 nt, Homo sapiens
  misc_RNA (1)...(19): siRNA sense strand
aggacaagagaauaaggaa

SEQ ID NO: 2457768 - RNA, 19 nt, Homo sapiens
  misc_RNA (1)...(19): siRNA sense strand
caacauuuucggaguuuaa

SEQ ID NO: 2457769 - RNA, 19 nt, Homo sapiens
  misc_RNA (1)...(19): siRNA sense strand
uauuagaucaugagaagga

SEQ ID NO: 2457770 - RNA, 19 nt, Homo sapiens
  misc_RNA (1)...(19): siRNA sense strand
aagaaguccaggagcugaa

SEQ ID NO: 2457771 - RNA, 19 nt, Homo sapiens
  misc_RNA (1)...(19): siRNA sense strand
uguucaucaaagaggcaaa

SEQ ID NO: 2457772 - RNA, 19 nt, Homo sapiens
  misc_RNA (1)...(19): siRNA sense strand
agggauuucuucuuagcaa

SEQ ID NO: 2457773 - RNA, 19 nt, Homo sapiens
  misc_RNA (1)...(19): siRNA sense strand
cuaucaacuaccagccuua

SEQ ID NO: 2457774 - RNA, 19 nt, Homo sapiens
  misc_RNA (1)...(19): siRNA sense strand
ucaucaaagaggcaaagaa

SEQ ID NO: 2457775 - RNA, 19 nt, Homo sapiens
  misc_RNA (1)...(19): siRNA sense strand
ccgucuggcaaguggccua

SEQ ID NO: 2457776 - RNA, 19 nt, Homo sapiens
  misc_RNA (1)...(19): siRNA sense strand
gggaaagaagaaggaguca

SEQ ID NO: 2457777 - RNA, 19 nt, Homo sapiens
  misc_RNA (1)...(19): siRNA sense strand
augaacucuuagaagcaaa

SEQ ID NO: 2457778 - RNA, 19 nt, Homo sapiens
  misc_RNA (1)...(19): siRNA sense strand
gaaaagaaacagaggacag

SEQ ID NO: 2457779 - RNA, 19 nt, Homo sapiens
  misc_RNA (1)...(19): siRNA sense strand
agagaauaaggaagcugaa

SEQ ID NO: 2457780 - RNA, 19 nt, Homo sapiens
  misc_RNA (1)...(19): siRNA sense strand
gggaagaaggccagccaug

SEQ ID NO: 2457781 - RNA, 19 nt, Homo sapiens
  misc_RNA (1)...(19): siRNA sense strand
cuuggaagagacugaagaa

SEQ ID NO: 2457782 - RNA, 19 nt, Homo sapiens
  misc_RNA (1)...(19): siRNA sense strand
uacuagaaguguucaucaa

SEQ ID NO: 2457783 - RNA, 19 nt, Homo sapiens
  misc_RNA (1)...(19): siRNA sense strand
cagcagaguuuguguucac

SEQ ID NO: 2457784 - RNA, 19 nt, Homo sapiens
  misc_RNA (1)...(19): siRNA sense strand
aaaugaacucuuagaagca

SEQ ID NO: 2457785 - RNA, 19 nt, Homo sapiens
  misc_RNA (1)...(19): siRNA sense strand
aaacgggagacuauggcaa

SEQ ID NO: 2457786 - RNA, 19 nt, Homo sapiens
  misc_RNA (1)...(19): siRNA sense strand
ugaucgauuuggacguaau

SEQ ID NO: 2457787 - RNA, 19 nt, Homo sapiens
  misc_RNA (1)...(19): siRNA sense strand
ucacagaaaccugggccua

SEQ ID NO: 2457788 - RNA, 19 nt, Homo sapiens
  misc_RNA (1)...(19): siRNA sense strand
ucgcaguuaucuacaaaca

SEQ ID NO: 2457789 - RNA, 19 nt, Homo sapiens
  misc_RNA (1)...(19): siRNA sense strand
agaaacuacuggagcgcca

SEQ ID NO: 2457790 - RNA, 19 nt, Homo sapiens
  misc_RNA (1)...(19): siRNA sense strand
cgucuauaggaucggguga

SEQ ID NO: 2457791 - RNA, 19 nt, Homo sapiens
  misc_RNA (1)...(19): siRNA sense strand
ggaagaaggacaacaguua

SEQ ID NO: 2457792 - RNA, 19 nt, Homo sapiens
  misc_RNA (1)...(19): siRNA sense strand
agacagauucucagaguaa

SEQ ID NO: 2457793 - RNA, 19 nt, Homo sapiens
  misc_RNA (1)...(19): siRNA sense strand
gaaccaacacggaaagaaa

SEQ ID NO: 2457794 - RNA, 19 nt, Homo sapiens
  misc_RNA (1)...(19): siRNA sense strand
cagcaaagauuaggaugaa

SEQ ID NO: 2457795 - RNA, 19 nt, Homo sapiens
  misc_RNA (1)...(19): siRNA sense strand
uaggaugaauguagaucaa

SEQ ID NO: 2457796 - RNA, 19 nt, Homo sapiens
  misc_RNA (1)...(19): siRNA sense strand
ggaaauuucaagagcagga

SEQ ID NO: 2457797 - RNA, 19 nt, Homo sapiens
  misc_RNA (1)...(19): siRNA sense strand
gcacggcagcuuaagguaa

SEQ ID NO: 2457798 - RNA, 19 nt, Homo sapiens
  misc_RNA (1)...(19): siRNA sense strand
uaacauacauggaggcauc

SEQ ID NO: 2457799 - RNA, 19 nt, Homo sapiens
  misc_RNA (1)...(19): siRNA sense strand
uaacacaggaagaaggaca

SEQ ID NO: 2457800 - RNA, 19 nt, Homo sapiens
  misc_RNA (1)...(19): siRNA sense strand
ucagcaaagauuaggauga

SEQ ID NO: 2457801 - RNA, 19 nt, Homo sapiens
  misc_RNA (1)...(19): siRNA sense strand
agucacagauagaggcagu

SEQ ID NO: 2457802 - RNA, 19 nt, Homo sapiens
  misc_RNA (1)...(19): siRNA sense strand
ccaugagagaacaguauau

SEQ ID NO: 2457803 - RNA, 19 nt, Homo sapiens
  misc_RNA (1)...(19): siRNA sense strand
guauaugaggacuggcgaa

SEQ ID NO: 2457804 - RNA, 19 nt, Homo sapiens
  misc_RNA (1)...(19): siRNA sense strand
agaucaagcuuuccaugaa

SEQ ID NO: 2457805 - RNA, 19 nt, Homo sapiens
  misc_RNA (1)...(19): siRNA sense strand
cagcaggacaagaagaguu

SEQ ID NO: 2457806 - RNA, 19 nt, Homo sapiens
  misc_RNA (1)...(19): siRNA sense strand
ggaucaucaaagacaggua

SEQ ID NO: 2457807 - RNA, 19 nt, Homo sapiens
  misc_RNA (1)...(19): siRNA sense strand
gcaaagauuaggaugaaug

SEQ ID NO: 2457808 - RNA, 19 nt, Homo sapiens
  misc_RNA (1)...(19): siRNA sense strand
gaucaucaaagacagguaa

SEQ ID NO: 2457809 - RNA, 19 nt, Homo sapiens
  misc_RNA (1)...(19): siRNA sense strand
caagaagaguuuggagcca

SEQ ID NO: 2457810 - RNA, 19 nt, Homo sapiens
  misc_RNA (1)...(19): siRNA sense strand
acauggaggcaucagcaaa

SEQ ID NO: 2457811 - RNA, 19 nt, Homo sapiens
  misc_RNA (1)...(19): siRNA sense strand
caggaaauuucaagagcag

SEQ ID NO: 2457812 - RNA, 19 nt, Homo sapiens
  misc_RNA (1)...(19): siRNA sense strand
gaauguagaucaagcuuuc

SEQ ID NO: 2457813 - RNA, 19 nt, Homo sapiens
  misc_RNA (1)...(19): siRNA sense strand
caaagcagugugugauaga

SEQ ID NO: 2457814 - RNA, 19 nt, Homo sapiens
  misc_RNA (1)...(19): siRNA sense strand
aguuuggagccaugagaga

SEQ ID NO: 2457815 - RNA, 19 nt, Homo sapiens
  misc_RNA (1)...(19): siRNA sense strand
agauuaggaugaauguaga

SEQ ID NO: 2457816 - RNA, 19 nt, Homo sapiens
  misc_RNA (1)...(19): siRNA sense strand
uguccggguuaucaggaaa

SEQ ID NO: 2457817 - RNA, 19 nt, Homo sapiens
  misc_RNA (1)...(19): siRNA sense strand
accagaaccaacacggaaa

SEQ ID NO: 2457818 - RNA, 19 nt, Homo sapiens
  misc_RNA (1)...(19): siRNA sense strand
gguaacacaggaagaagga

SEQ ID NO: 2457819 - RNA, 19 nt, Homo sapiens
  misc_RNA (1)...(19): siRNA sense strand
cggcuagauauuuuggaua

SEQ ID NO: 2457820 - RNA, 19 nt, Homo sapiens
  misc_RNA (1)...(19): siRNA sense strand
aguaaaggaucgugaugag

SEQ ID NO: 2457821 - RNA, 19 nt, Homo sapiens
  misc_RNA (1)...(19): siRNA sense strand
cgugaugaguucccaauga

SEQ ID NO: 2457822 - RNA, 19 nt, Homo sapiens
  misc_RNA (1)...(19): siRNA sense strand
guaauaaagcagaucugga

SEQ ID NO: 2457823 - RNA, 19 nt, Homo sapiens
  misc_RNA (1)...(19): siRNA sense strand
gaguaaaggaucgugauga

SEQ ID NO: 2457824 - RNA, 19 nt, Homo sapiens
  misc_RNA (1)...(19): siRNA sense strand
cuucccaggcauugagaaa

SEQ ID NO: 2457825 - RNA, 19 nt, Homo sapiens
  misc_RNA (1)...(19): siRNA sense strand
ccauagucgggaauacaaa

SEQ ID NO: 2457826 - RNA, 19 nt, Homo sapiens
  misc_RNA (1)...(19): siRNA sense strand
agugaucggcauuggaaau

SEQ ID NO: 2457827 - RNA, 19 nt, Homo sapiens
  misc_RNA (1)...(19): siRNA sense strand
gugcaaagugugaggaagc

SEQ ID NO: 2457828 - RNA, 19 nt, Homo sapiens
  misc_RNA (1)...(19): siRNA sense strand
ugagaaauuugaaggcugu

SEQ ID NO: 2457829 - RNA, 19 nt, Homo sapiens
  misc_RNA (1)...(19): siRNA sense strand
uuuuaagacugaagugcaa

SEQ ID NO: 2457830 - RNA, 19 nt, Homo sapiens
  misc_RNA (1)...(19): siRNA sense strand
ucuacaaaucugugaccau

SEQ ID NO: 2457831 - RNA, 19 nt, Homo sapiens
  misc_RNA (1)...(19): siRNA sense strand
ugaagagaaacaagagacu

SEQ ID NO: 2457832 - RNA, 19 nt, Homo sapiens
  misc_RNA (1)...(19): siRNA sense strand
aucaauacuuccaaggaga

SEQ ID NO: 2457833 - RNA, 19 nt, Homo sapiens
  misc_RNA (1)...(19): siRNA sense strand
ggucuuaguuugcagugga

SEQ ID NO: 2457834 - RNA, 19 nt, Homo sapiens
  misc_RNA (1)...(19): siRNA sense strand
uuguggagacugaagagaa

SEQ ID NO: 2457835 - RNA, 19 nt, Homo sapiens
  misc_RNA (1)...(19): siRNA sense strand
ccgaauaagcugucagacu

SEQ ID NO: 2457836 - RNA, 19 nt, Homo sapiens
  misc_RNA (1)...(19): siRNA sense strand
ccaucuucauauaagguaa

SEQ ID NO: 2457837 - RNA, 19 nt, Homo sapiens
  misc_RNA (1)...(19): siRNA sense strand
cuuugauagugaagaauga

SEQ ID NO: 2457838 - RNA, 19 nt, Homo sapiens
  misc_RNA (1)...(19): siRNA sense strand
aguagagauugauggaaaa

SEQ ID NO: 2457839 - RNA, 19 nt, Homo sapiens
  misc_RNA (1)...(19): siRNA sense strand
uggauaaaguggacgucau

SEQ ID NO: 2457840 - RNA, 19 nt, Homo sapiens
  misc_RNA (1)...(19): siRNA sense strand
acaucauggugguuggaau

SEQ ID NO: 2457841 - RNA, 19 nt, Homo sapiens
  misc_RNA (1)...(19): siRNA sense strand
gguuggaauuacaggagca

SEQ ID NO: 2457842 - RNA, 19 nt, Homo sapiens
  misc_RNA (1)...(19): siRNA sense strand
ggauggaaaaguuuagaaa

SEQ ID NO: 2457843 - RNA, 19 nt, Homo sapiens
  misc_RNA (1)...(19): siRNA sense strand
agagauugauggaaaacaa

SEQ ID NO: 2457844 - RNA, 19 nt, Homo sapiens
  misc_RNA (1)...(19): siRNA sense strand
ggacauaucuaaacagcag

SEQ ID NO: 2457845 - RNA, 19 nt, Homo sapiens
  misc_RNA (1)...(19): siRNA sense strand
ugucauucaagaagaggua

SEQ ID NO: 2457846 - RNA, 19 nt, Homo sapiens
  misc_RNA (1)...(19): siRNA sense strand
uggaagaaagcaugcucua

SEQ ID NO: 2457847 - RNA, 19 nt, Homo sapiens
  misc_RNA (1)...(19): siRNA sense strand
augugucaguggauggaaa

SEQ ID NO: 2457848 - RNA, 19 nt, Homo sapiens
  misc_RNA (1)...(19): siRNA sense strand
cuguguagguucuggagca

SEQ ID NO: 2457849 - RNA, 19 nt, Homo sapiens
  misc_RNA (1)...(19): siRNA sense strand
cuugaaaauuuggaggaaa

SEQ ID NO: 2457850 - RNA, 19 nt, Homo sapiens
  misc_RNA (1)...(19): siRNA sense strand
gggaguacucagacauuca

SEQ ID NO: 2457851 - RNA, 19 nt, Homo sapiens
  misc_RNA (1)...(19): siRNA sense strand
caggagcagcugugguaau

SEQ ID NO: 2457852 - RNA, 19 nt, Homo sapiens
  misc_RNA (1)...(19): siRNA sense strand
guuucugaauacaaaggaa

SEQ ID NO: 2457853 - RNA, 19 nt, Homo sapiens
  misc_RNA (1)...(19): siRNA sense strand
accuguaaauaguggugua

SEQ ID NO: 2457854 - RNA, 19 nt, Homo sapiens
  misc_RNA (1)...(19): siRNA sense strand
cugcaaaccacuagccagu

SEQ ID NO: 2457855 - RNA, 19 nt, Homo sapiens
  misc_RNA (1)...(19): siRNA sense strand
uggaaaacaaguucagcaa

SEQ ID NO: 2457856 - RNA, 19 nt, Homo sapiens
  misc_RNA (1)...(19): siRNA sense strand
aaaggaugucacugaaauu

SEQ ID NO: 2457857 - RNA, 19 nt, Homo sapiens
  misc_RNA (1)...(19): siRNA sense strand
cagagaaaagagcugaaaa

SEQ ID NO: 2457858 - RNA, 19 nt, Homo sapiens
  misc_RNA (1)...(19): siRNA sense strand
ccgugagaaccaagaguaa

SEQ ID NO: 2457859 - RNA, 19 nt, Homo sapiens
  misc_RNA (1)...(19): siRNA sense strand
gguacaaagaagaaagcca

SEQ ID NO: 2457860 - RNA, 19 nt, Homo sapiens
  misc_RNA (1)...(19): siRNA sense strand
acaagaagaagguagaaaa

SEQ ID NO: 2457861 - RNA, 19 nt, Homo sapiens
  misc_RNA (1)...(19): siRNA sense strand
uuggaaaugcucagaacaa

SEQ ID NO: 2457862 - RNA, 19 nt, Homo sapiens
  misc_RNA (1)...(19): siRNA sense strand
uggacuugcuaaaggaaca

SEQ ID NO: 2457863 - RNA, 19 nt, Homo sapiens
  misc_RNA (1)...(19): siRNA sense strand
agaaaaucuuccagugcaa

SEQ ID NO: 2457864 - RNA, 19 nt, Homo sapiens
  misc_RNA (1)...(19): siRNA sense strand
gagaaagcugcuagaaaau

SEQ ID NO: 2457865 - RNA, 19 nt, Homo sapiens
  misc_RNA (1)...(19): siRNA sense strand
uggacaagaagaagguaga

SEQ ID NO: 2457866 - RNA, 19 nt, Homo sapiens
  misc_RNA (1)...(19): siRNA sense strand
cuaacaaagcugaccugaa

SEQ ID NO: 2457867 - RNA, 19 nt, Homo sapiens
  misc_RNA (1)...(19): siRNA sense strand
gggcaggcucacauggcaa

SEQ ID NO: 2457868 - RNA, 19 nt, Homo sapiens
  misc_RNA (1)...(19): siRNA sense strand
cuuugcaggaagauagaaa

SEQ ID NO: 2457869 - RNA, 19 nt, Homo sapiens
  misc_RNA (1)...(19): siRNA sense strand
gaaccaagaguaagcggau

SEQ ID NO: 2457870 - RNA, 19 nt, Homo sapiens
  misc_RNA (1)...(19): siRNA sense strand
ggccaucagcagagcagaa

SEQ ID NO: 2457871 - RNA, 19 nt, Homo sapiens
  misc_RNA (1)...(19): siRNA sense strand
gccuaugggaucaggaaca

SEQ ID NO: 2457872 - RNA, 19 nt, Homo sapiens
  misc_RNA (1)...(19): siRNA sense strand
gcagaagcgagcuggcaga

SEQ ID NO: 2457873 - RNA, 19 nt, Homo sapiens
  misc_RNA (1)...(19): siRNA sense strand
gcucacauggcaagcggua

SEQ ID NO: 2457874 - RNA, 19 nt, Homo sapiens
  misc_RNA (1)...(19): siRNA sense strand
acaagaaauggaagaagca

SEQ ID NO: 2457875 - RNA, 19 nt, Homo sapiens
  misc_RNA (1)...(19): siRNA sense strand
agaaauggaagaagcagga

SEQ ID NO: 2457876 - RNA, 19 nt, Homo sapiens
  misc_RNA (1)...(19): siRNA sense strand
cagggcaagaggaggaaga

SEQ ID NO: 2457877 - RNA, 19 nt, Homo sapiens
  misc_RNA (1)...(19): siRNA sense strand
uggccaacgggcugaggaa

SEQ ID NO: 2457878 - RNA, 19 nt, Homo sapiens
  misc_RNA (1)...(19): siRNA sense strand
aagaggaggaagagccuga

SEQ ID NO: 2457879 - RNA, 19 nt, Homo sapiens
  misc_RNA (1)...(19): siRNA sense strand
gauugaagaaccagccuca

SEQ ID NO: 2457880 - RNA, 19 nt, Homo sapiens
  misc_RNA (1)...(19): siRNA sense strand
gggccugguacaaagaaga

SEQ ID NO: 2457881 - RNA, 19 nt, Homo sapiens
  misc_RNA (1)...(19): siRNA sense strand
aaucuaugcuuauggccau

SEQ ID NO: 2457882 - RNA, 19 nt, Homo sapiens
  misc_RNA (1)...(19): siRNA sense strand
uggaaggcaucgagcgaaa

SEQ ID NO: 2457883 - RNA, 19 nt, Homo sapiens
  misc_RNA (1)...(19): siRNA sense strand
ucaacgagcaggaggcaaa

SEQ ID NO: 2457884 - RNA, 19 nt, Homo sapiens
  misc_RNA (1)...(19): siRNA sense strand
ugguaaagguggaaaacua

SEQ ID NO: 2457885 - RNA, 19 nt, Homo sapiens
  misc_RNA (1)...(19): siRNA sense strand
gagaauugguaaaggugga

SEQ ID NO: 2457886 - RNA, 19 nt, Homo sapiens
  misc_RNA (1)...(19): siRNA sense strand
cagagaaagccuugguuga

SEQ ID NO: 2457887 - RNA, 19 nt, Homo sapiens
  misc_RNA (1)...(19): siRNA sense strand
guaugaaaccacagacaca

SEQ ID NO: 2457888 - RNA, 19 nt, Homo sapiens
  misc_RNA (1)...(19): siRNA sense strand
guaagagaccugagaggga

SEQ ID NO: 2457889 - RNA, 19 nt, Homo sapiens
  misc_RNA (1)...(19): siRNA sense strand
augacuaugucuucagaaa

SEQ ID NO: 2457890 - RNA, 19 nt, Homo sapiens
  misc_RNA (1)...(19): siRNA sense strand
ugauaacaauguauggcaa

SEQ ID NO: 2457891 - RNA, 19 nt, Homo sapiens
  misc_RNA (1)...(19): siRNA sense strand
gcgcaagcccaauggacau

SEQ ID NO: 2457892 - RNA, 19 nt, Homo sapiens
  misc_RNA (1)...(19): siRNA sense strand
gagacgaugcccuggacaa

SEQ ID NO: 2457893 - RNA, 19 nt, Homo sapiens
  misc_RNA (1)...(19): siRNA sense strand
cggagaagcagcaggccau

SEQ ID NO: 2457894 - RNA, 19 nt, Homo sapiens
  misc_RNA (1)...(19): siRNA sense strand
cauugggcguugugaauau

SEQ ID NO: 2457895 - RNA, 19 nt, Homo sapiens
  misc_RNA (1)...(19): siRNA sense strand
agugaagcuuagugcggua

SEQ ID NO: 2457896 - RNA, 19 nt, Homo sapiens
  misc_RNA (1)...(19): siRNA sense strand
ugaugguguuaaacgaaua

SEQ ID NO: 2457897 - RNA, 19 nt, Homo sapiens
  misc_RNA (1)...(19): siRNA sense strand
guaacuaucaacugggaga

SEQ ID NO: 2457898 - RNA, 19 nt, Homo sapiens
  misc_RNA (1)...(19): siRNA sense strand
cugaugaaccuaacagauu

SEQ ID NO: 2457899 - RNA, 19 nt, Homo sapiens
  misc_RNA (1)...(19): siRNA sense strand
ucccaaaggaucaggucua

SEQ ID NO: 2457900 - RNA, 19 nt, Homo sapiens
  misc_RNA (1)...(19): siRNA sense strand
gcuugaaugaugagaccau

SEQ ID NO: 2457901 - RNA, 19 nt, Homo sapiens
  misc_RNA (1)...(19): siRNA sense strand
ucuuguugaugguguuaaa

SEQ ID NO: 2457902 - RNA, 19 nt, Homo sapiens
  misc_RNA (1)...(19): siRNA sense strand
gauaacaauguauggcaau

SEQ ID NO: 2457903 - RNA, 19 nt, Homo sapiens
  misc_RNA (1)...(19): siRNA sense strand
cucugaagcucaagggcau

SEQ ID NO: 2457904 - RNA, 19 nt, Homo sapiens
  misc_RNA (1)...(19): siRNA sense strand
uggcccgauugaagaguaa

SEQ ID NO: 2457905 - RNA, 19 nt, Homo sapiens
  misc_RNA (1)...(19): siRNA sense strand
cgucaauuucggagucuuu

SEQ ID NO: 2457906 - RNA, 19 nt, Homo sapiens
  misc_RNA (1)...(19): siRNA sense strand
uguuaaacgaauacuggaa

SEQ ID NO: 2457907 - RNA, 19 nt, Homo sapiens
  misc_RNA (1)...(19): siRNA sense strand
gggaccaagugcagaaauc

SEQ ID NO: 2457908 - RNA, 19 nt, Homo sapiens
  misc_RNA (1)...(19): siRNA sense strand
gcguaaggaagcuagugaa

SEQ ID NO: 2457909 - RNA, 19 nt, Homo sapiens
  misc_RNA (1)...(19): siRNA sense strand
cagagaugauccagcagau

SEQ ID NO: 2457910 - RNA, 19 nt, Homo sapiens
  misc_RNA (1)...(19): siRNA sense strand
uaggagaggaugaagauca

SEQ ID NO: 2457911 - RNA, 19 nt, Homo sapiens
  misc_RNA (1)...(19): siRNA sense strand
aggaugaagaucaguauga

SEQ ID NO: 2457912 - RNA, 19 nt, Homo sapiens
  misc_RNA (1)...(19): siRNA sense strand
gcccagauguuuagcacca

SEQ ID NO: 2457913 - RNA, 19 nt, Homo sapiens
  misc_RNA (1)...(19): siRNA sense strand
ucagaagaucccuguuuaa

SEQ ID NO: 2457914 - RNA, 19 nt, Homo sapiens
  misc_RNA (1)...(19): siRNA sense strand
guuaaacgaauacuggaaa

SEQ ID NO: 2457915 - RNA, 19 nt, Homo sapiens
  misc_RNA (1)...(19): siRNA sense strand
uggauuuaggagaggauga

SEQ ID NO: 2457916 - RNA, 19 nt, Homo sapiens
  misc_RNA (1)...(19): siRNA sense strand
ggauuuaggagaggaugaa

SEQ ID NO: 2457917 - RNA, 19 nt, Homo sapiens
  misc_RNA (1)...(19): siRNA sense strand
gcaucuuacucuuccgaga

SEQ ID NO: 2457918 - RNA, 19 nt, Homo sapiens
  misc_RNA (1)...(19): siRNA sense strand
cagaaauccucuaagcugu

SEQ ID NO: 2457919 - RNA, 19 nt, Homo sapiens
  misc_RNA (1)...(19): siRNA sense strand
gagcaggaggcaaagcgaa

SEQ ID NO: 2457920 - RNA, 19 nt, Homo sapiens
  misc_RNA (1)...(19): siRNA sense strand
ucaacgacucaaugaagaa

SEQ ID NO: 2457921 - RNA, 19 nt, Homo sapiens
  misc_RNA (1)...(19): siRNA sense strand
ugagagauggccuggaaga

SEQ ID NO: 2457922 - RNA, 19 nt, Homo sapiens
  misc_RNA (1)...(19): siRNA sense strand
gguaaugagaagcuagagu

SEQ ID NO: 2457923 - RNA, 19 nt, Homo sapiens
  misc_RNA (1)...(19): siRNA sense strand
guauuaacaaucaguccaa

SEQ ID NO: 2457924 - RNA, 19 nt, Homo sapiens
  misc_RNA (1)...(19): siRNA sense strand
gugcaggagggaaggcuga

SEQ ID NO: 2457925 - RNA, 19 nt, Homo sapiens
  misc_RNA (1)...(19): siRNA sense strand
ugccagcacugaugagcaa

SEQ ID NO: 2457926 - RNA, 19 nt, Homo sapiens
  misc_RNA (1)...(19): siRNA sense strand
gagaggucccaaaggauca

SEQ ID NO: 2457927 - RNA, 19 nt, Homo sapiens
  misc_RNA (1)...(19): siRNA sense strand
cgaaaucuucuuacgaaaa

SEQ ID NO: 2457928 - RNA, 19 nt, Homo sapiens
  misc_RNA (1)...(19): siRNA sense strand
ugcaaacagcuguaugaaa

SEQ ID NO: 2457929 - RNA, 19 nt, Homo sapiens
  misc_RNA (1)...(19): siRNA sense strand
guacaguagcguaaggaag

SEQ ID NO: 2457930 - RNA, 19 nt, Homo sapiens
  misc_RNA (1)...(19): siRNA sense strand
gggcaauugagcucuggua

SEQ ID NO: 2457931 - RNA, 19 nt, Homo sapiens
  misc_RNA (1)...(19): siRNA sense strand
ccacucgacuccaggcaga

SEQ ID NO: 2457932 - RNA, 19 nt, Homo sapiens
  misc_RNA (1)...(19): siRNA sense strand
gcuugauauugcuuaauga

SEQ ID NO: 2457933 - RNA, 19 nt, Homo sapiens
  misc_RNA (1)...(19): siRNA sense strand
cuuauggcgugaauagcaa

SEQ ID NO: 2457934 - RNA, 19 nt, Homo sapiens
  misc_RNA (1)...(19): siRNA sense strand
cuuuaaccaagcacagaaa

SEQ ID NO: 2457935 - RNA, 19 nt, Homo sapiens
  misc_RNA (1)...(19): siRNA sense strand
gcuucaggaaagaaucuaa

SEQ ID NO: 2457936 - RNA, 19 nt, Homo sapiens
  misc_RNA (1)...(19): siRNA sense strand
gaaugaugaaagucagcau

SEQ ID NO: 2457937 - RNA, 19 nt, Homo sapiens
  misc_RNA (1)...(19): siRNA sense strand
cuagagaaucugugcaaac

SEQ ID NO: 2457938 - RNA, 19 nt, Homo sapiens
  misc_RNA (1)...(19): siRNA sense strand
uaaaacaggcuucaggaaa

SEQ ID NO: 2457939 - RNA, 19 nt, Homo sapiens
  misc_RNA (1)...(19): siRNA sense strand
agaucagccuucuuagauu

SEQ ID NO: 2457940 - RNA, 19 nt, Homo sapiens
  misc_RNA (1)...(19): siRNA sense strand
gguacaguagcguaaggaa

SEQ ID NO: 2457941 - RNA, 19 nt, Homo sapiens
  misc_RNA (1)...(19): siRNA sense strand
aagaaacaguauugugaac

SEQ ID NO: 2457942 - RNA, 19 nt, Homo sapiens
  misc_RNA (1)...(19): siRNA sense strand
uuggaacagcgaauagaua

SEQ ID NO: 2457943 - RNA, 19 nt, Homo sapiens
  misc_RNA (1)...(19): siRNA sense strand
cuucaggaaagaaucuaaa

SEQ ID NO: 2457944 - RNA, 19 nt, Homo sapiens
  misc_RNA (1)...(19): siRNA sense strand
acugagagauggccuggaa

SEQ ID NO: 2457945 - RNA, 19 nt, Homo sapiens
  misc_RNA (1)...(19): siRNA sense strand
uggaacagcgaauagauau

SEQ ID NO: 2457946 - RNA, 19 nt, Homo sapiens
  misc_RNA (1)...(19): siRNA sense strand
caguuauaugccagaauca

SEQ ID NO: 2457947 - RNA, 19 nt, Homo sapiens
  misc_RNA (1)...(19): siRNA sense strand
gguuuacauuauuggagca

SEQ ID NO: 2457948 - RNA, 19 nt, Homo sapiens
  misc_RNA (1)...(19): siRNA sense strand
gcucugaagcucaagggca

SEQ ID NO: 2457949 - RNA, 19 nt, Homo sapiens
  misc_RNA (1)...(19): siRNA sense strand
uggcccaacuagagaaucu

SEQ ID NO: 2457950 - RNA, 19 nt, Homo sapiens
  misc_RNA (1)...(19): siRNA sense strand
gcaaugacaugaugagcug

SEQ ID NO: 2457951 - RNA, 19 nt, Homo sapiens
  misc_RNA (1)...(19): siRNA sense strand
ggacauggaugaagagauu

SEQ ID NO: 2457952 - RNA, 19 nt, Homo sapiens
  misc_RNA (1)...(19): siRNA sense strand
uggaagaacagguagauaa

SEQ ID NO: 2457953 - RNA, 19 nt, Homo sapiens
  misc_RNA (1)...(19): siRNA sense strand
ccuuaauugucaugagcaa

SEQ ID NO: 2457954 - RNA, 19 nt, Homo sapiens
  misc_RNA (1)...(19): siRNA sense strand
cggaagagauacuuggaga

SEQ ID NO: 2457955 - RNA, 19 nt, Homo sapiens
  misc_RNA (1)...(19): siRNA sense strand
ggaagaacagguagauaau

SEQ ID NO: 2457956 - RNA, 19 nt, Homo sapiens
  misc_RNA (1)...(19): siRNA sense strand
cagcagaagagaaaggaca

SEQ ID NO: 2457957 - RNA, 19 nt, Homo sapiens
  misc_RNA (1)...(19): siRNA sense strand
caggagaaguggagcagga

SEQ ID NO: 2457958 - RNA, 19 nt, Homo sapiens
  misc_RNA (1)...(19): siRNA sense strand
acauggaugaagagauuaa

SEQ ID NO: 2457959 - RNA, 19 nt, Homo sapiens
  misc_RNA (1)...(19): siRNA sense strand
cagcaaaaguuacucauaa

SEQ ID NO: 2457960 - RNA, 19 nt, Homo sapiens
  misc_RNA (1)...(19): siRNA sense strand
agagaacaucaaagagcua

SEQ ID NO: 2457961 - RNA, 19 nt, Homo sapiens
  misc_RNA (1)...(19): siRNA sense strand
caucacaauguuuggaaga

SEQ ID NO: 2457962 - RNA, 19 nt, Homo sapiens
  misc_RNA (1)...(19): siRNA sense strand
uggacaaacagacggaaga

SEQ ID NO: 2457963 - RNA, 19 nt, Homo sapiens
  misc_RNA (1)...(19): siRNA sense strand
guuuggaagaacagguaga

SEQ ID NO: 2457964 - RNA, 19 nt, Homo sapiens
  misc_RNA (1)...(19): siRNA sense strand
cagagauagagaacaucaa

SEQ ID NO: 2457965 - RNA, 19 nt, Homo sapiens
  misc_RNA (1)...(19): siRNA sense strand
augacuaccaucuuagaaa

SEQ ID NO: 2457966 - RNA, 19 nt, Homo sapiens
  misc_RNA (1)...(19): siRNA sense strand
aaaaugaagcagaugacua

SEQ ID NO: 2457967 - RNA, 19 nt, Homo sapiens
  misc_RNA (1)...(19): siRNA sense strand
gacuaccaucuuagaaaua

SEQ ID NO: 2457968 - RNA, 19 nt, Homo sapiens
  misc_RNA (1)...(19): siRNA sense strand
aagauuuggacauggauga

SEQ ID NO: 2457969 - RNA, 19 nt, Homo sapiens
  misc_RNA (1)...(19): siRNA sense strand
acaucaaagagcuaugcaa

SEQ ID NO: 2457970 - RNA, 19 nt, Homo sapiens
  misc_RNA (1)...(19): siRNA sense strand
guccaaaaggggaguguuu

SEQ ID NO: 2457971 - RNA, 19 nt, Homo sapiens
  misc_RNA (1)...(19): siRNA sense strand
guguuaaaagaauggacaa

SEQ ID NO: 2457972 - RNA, 19 nt, Homo sapiens
  misc_RNA (1)...(19): siRNA sense strand
uugaaguaucugagaagua

SEQ ID NO: 2457973 - RNA, 19 nt, Homo sapiens
  misc_RNA (1)...(19): siRNA sense strand
aaacaaaaucugaugggaa

SEQ ID NO: 2457974 - RNA, 19 nt, Homo sapiens
  misc_RNA (1)...(19): siRNA sense strand
ggaacuaacucuuggacag

SEQ ID NO: 2457975 - RNA, 19 nt, Homo sapiens
  misc_RNA (1)...(19): siRNA sense strand
ccuuaguguuucugaggau

SEQ ID NO: 2457976 - RNA, 19 nt, Homo sapiens
  misc_RNA (1)...(19): siRNA sense strand
accucuaacuguuggcaaa

SEQ ID NO: 2457977 - RNA, 19 nt, Homo sapiens
  misc_RNA (1)...(19): siRNA sense strand
cagaaaaggaccaagugaa

SEQ ID NO: 2457978 - RNA, 19 nt, Homo sapiens
  misc_RNA (1)...(19): siRNA sense strand
cugaaaugaccacagcaaa

SEQ ID NO: 2457979 - RNA, 19 nt, Homo sapiens
  misc_RNA (1)...(19): siRNA sense strand
acugaaaugaccacagcaa

SEQ ID NO: 2457980 - RNA, 19 nt, Homo sapiens
  misc_RNA (1)...(19): siRNA sense strand
gugucugauagaagagauu

SEQ ID NO: 2457981 - RNA, 19 nt, Homo sapiens
  misc_RNA (1)...(19): siRNA sense strand
agaugaagaugccagccua

SEQ ID NO: 2457982 - RNA, 19 nt, Homo sapiens
  misc_RNA (1)...(19): siRNA sense strand
gguuaauggagaugggaaa

SEQ ID NO: 2457983 - RNA, 19 nt, Homo sapiens
  misc_RNA (1)...(19): siRNA sense strand
augcaaugaaugugggaaa

SEQ ID NO: 2457984 - RNA, 19 nt, Homo sapiens
  misc_RNA (1)...(19): siRNA sense strand
gcugcaugcaagagagaaa

SEQ ID NO: 2457985 - RNA, 19 nt, Homo sapiens
  misc_RNA (1)...(19): siRNA sense strand
aguucauacaggagagaaa

SEQ ID NO: 2457986 - RNA, 19 nt, Homo sapiens
  misc_RNA (1)...(19): siRNA sense strand
augcaguauaugugggaaa

SEQ ID NO: 2457987 - RNA, 19 nt, Homo sapiens
  misc_RNA (1)...(19): siRNA sense strand
aaaccacacaggagagaaa

SEQ ID NO: 2457988 - RNA, 19 nt, Homo sapiens
  misc_RNA (1)...(19): siRNA sense strand
augcagugauuguggaaaa

SEQ ID NO: 2457989 - RNA, 19 nt, Homo sapiens
  misc_RNA (1)...(19): siRNA sense strand
gggaaaauacugaaaucaa

SEQ ID NO: 2457990 - RNA, 19 nt, Homo sapiens
  misc_RNA (1)...(19): siRNA sense strand
cguuccaagcagagagcaa

SEQ ID NO: 2457991 - RNA, 19 nt, Homo sapiens
  misc_RNA (1)...(19): siRNA sense strand
ucauuaaccaccagagaau

SEQ ID NO: 2457992 - RNA, 19 nt, Homo sapiens
  misc_RNA (1)...(19): siRNA sense strand
auguguagguucagucaaa

SEQ ID NO: 2457993 - RNA, 19 nt, Homo sapiens
  misc_RNA (1)...(19): siRNA sense strand
augcaaugaauguggaaaa

SEQ ID NO: 2457994 - RNA, 19 nt, Homo sapiens
  misc_RNA (1)...(19): siRNA sense strand
aauucacacaggagagaaa

SEQ ID NO: 2457995 - RNA, 19 nt, Homo sapiens
  misc_RNA (1)...(19): siRNA sense strand
aaugaaauccacagccaaa

SEQ ID NO: 2457996 - RNA, 19 nt, Homo sapiens
  misc_RNA (1)...(19): siRNA sense strand
ggguuaauggagaugggaa

SEQ ID NO: 2457997 - RNA, 19 nt, Homo sapiens
  misc_RNA (1)...(19): siRNA sense strand
aguagaauuugcacagaau

SEQ ID NO: 2457998 - RNA, 19 nt, Homo sapiens
  misc_RNA (1)...(19): siRNA sense strand
gggaaaucucauuguacau

SEQ ID NO: 2457999 - RNA, 19 nt, Homo sapiens
  misc_RNA (1)...(19): siRNA sense strand
augcucugauugugggaaa

SEQ ID NO: 2458000 - RNA, 19 nt, Homo sapiens
  misc_RNA (1)...(19): siRNA sense strand
auacaggagagaagucaua

SEQ ID NO: 2458001 - RNA, 19 nt, Homo sapiens
  misc_RNA (1)...(19): siRNA sense strand
aacucauacaggagagaaa

SEQ ID NO: 2458002 - RNA, 19 nt, Homo sapiens
  misc_RNA (1)...(19): siRNA sense strand
guuuagucaaccagaacaa

SEQ ID NO: 2458003 - RNA, 19 nt, Homo sapiens
  misc_RNA (1)...(19): siRNA sense strand
aggauaaagacucuguuaa

SEQ ID NO: 2458004 - RNA, 19 nt, Homo sapiens
  misc_RNA (1)...(19): siRNA sense strand
uacucacacuggagagaaa

SEQ ID NO: 2458005 - RNA, 19 nt, Homo sapiens
  misc_RNA (1)...(19): siRNA sense strand
gugaucucauacaggauaa

SEQ ID NO: 2458006 - RNA, 19 nt, Homo sapiens
  misc_RNA (1)...(19): siRNA sense strand
ggagaaaccucauggaugc

SEQ ID NO: 2458007 - RNA, 19 nt, Homo sapiens
  misc_RNA (1)...(19): siRNA sense strand
agccagaagacauguuuaa

SEQ ID NO: 2458008 - RNA, 19 nt, Homo sapiens
  misc_RNA (1)...(19): siRNA sense strand
acauaaugcauuuggaaac

SEQ ID NO: 2458009 - RNA, 19 nt, Homo sapiens
  misc_RNA (1)...(19): siRNA sense strand
ucagagagucauagcuuau

SEQ ID NO: 2458010 - RNA, 19 nt, Homo sapiens
  misc_RNA (1)...(19): siRNA sense strand
uaguagaauuugcacagaa

SEQ ID NO: 2458011 - RNA, 19 nt, Homo sapiens
  misc_RNA (1)...(19): siRNA sense strand
ggacaguagaaaaugaaau

SEQ ID NO: 2458012 - RNA, 19 nt, Homo sapiens
  misc_RNA (1)...(19): siRNA sense strand
caucauucaucagaggaaa

SEQ ID NO: 2458013 - RNA, 19 nt, Homo sapiens
  misc_RNA (1)...(19): siRNA sense strand
ccagagaacucauacagga

SEQ ID NO: 2458014 - RNA, 19 nt, Homo sapiens
  misc_RNA (1)...(19): siRNA sense strand
gguucagucaaauuggaaa

SEQ ID NO: 2458015 - RNA, 19 nt, Homo sapiens
  misc_RNA (1)...(19): siRNA sense strand
guucagucaaauuggaaaa

SEQ ID NO: 2458016 - RNA, 19 nt, Homo sapiens
  misc_RNA (1)...(19): siRNA sense strand
gggagaaaccucauggaug

SEQ ID NO: 2458017 - RNA, 19 nt, Homo sapiens
  misc_RNA (1)...(19): siRNA sense strand
agggaaaucucauuguaca

SEQ ID NO: 2458018 - RNA, 19 nt, Homo sapiens
  misc_RNA (1)...(19): siRNA sense strand
cauuugacuuacaugggaa

SEQ ID NO: 2458019 - RNA, 19 nt, Homo sapiens
  misc_RNA (1)...(19): siRNA sense strand
augcacugaaugugacaaa

SEQ ID NO: 2458020 - RNA, 19 nt, Homo sapiens
  misc_RNA (1)...(19): siRNA sense strand
ccacauggaugcagccugu

SEQ ID NO: 2458021 - RNA, 19 nt, Homo sapiens
  misc_RNA (1)...(19): siRNA sense strand
augcacugaaugugacaaa

SEQ ID NO: 2458022 - RNA, 19 nt, Homo sapiens
  misc_RNA (1)...(19): siRNA sense strand
cgaauucauacuggagaaa

SEQ ID NO: 2458023 - RNA, 19 nt, Homo sapiens
  misc_RNA (1)...(19): siRNA sense strand
cagaacaaaagguaugaaa

SEQ ID NO: 2458024 - RNA, 19 nt, Homo sapiens
  misc_RNA (1)...(19): siRNA sense strand
guauguacugaguguggaa

SEQ ID NO: 2458025 - RNA, 19 nt, Homo sapiens
  misc_RNA (1)...(19): siRNA sense strand
agagaaaccacacaggaga

SEQ ID NO: 2458026 - RNA, 19 nt, Homo sapiens
  misc_RNA (1)...(19): siRNA sense strand
cccuauauaugcaaugaau

SEQ ID NO: 2458027 - RNA, 19 nt, Homo sapiens
  misc_RNA (1)...(19): siRNA sense strand
acaucauucaucagaggaa

SEQ ID NO: 2458028 - RNA, 19 nt, Homo sapiens
  misc_RNA (1)...(19): siRNA sense strand
acaggagagaagucauaua

SEQ ID NO: 2458029 - RNA, 19 nt, Homo sapiens
  misc_RNA (1)...(19): siRNA sense strand
acaggagagaagucauaua

SEQ ID NO: 2458030 - RNA, 19 nt, Homo sapiens
  misc_RNA (1)...(19): siRNA sense strand
augccgugauuguggaaaa

SEQ ID NO: 2458031 - RNA, 19 nt, Homo sapiens
  misc_RNA (1)...(19): siRNA sense strand
auauauaugccgugauugu

SEQ ID NO: 2458032 - RNA, 19 nt, Homo sapiens
  misc_RNA (1)...(19): siRNA sense strand
gagagaaaccacauggaug

SEQ ID NO: 2458033 - RNA, 19 nt, Homo sapiens
  misc_RNA (1)...(19): siRNA sense strand
uuuaauaucccaucagaga

SEQ ID NO: 2458034 - RNA, 19 nt, Homo sapiens
  misc_RNA (1)...(19): siRNA sense strand
gagccagccuguugccaga

SEQ ID NO: 2458035 - RNA, 19 nt, Homo sapiens
  misc_RNA (1)...(19): siRNA sense strand
ucauuaaucaucagagagu

SEQ ID NO: 2458036 - RNA, 19 nt, Homo sapiens
  misc_RNA (1)...(19): siRNA sense strand
ucacugaacaccagagaac

SEQ ID NO: 2458037 - RNA, 19 nt, Homo sapiens
  misc_RNA (1)...(19): siRNA sense strand
ggaaaauccugcucacaca

SEQ ID NO: 2458038 - RNA, 19 nt, Homo sapiens
  misc_RNA (1)...(19): siRNA sense strand
cacaauucauuaagcauca

SEQ ID NO: 2458039 - RNA, 19 nt, Homo sapiens
  misc_RNA (1)...(19): siRNA sense strand
gaacagaacuucagcgaga

SEQ ID NO: 2458040 - RNA, 19 nt, Homo sapiens
  misc_RNA (1)...(19): siRNA sense strand
caagaaacuuugauggcua

SEQ ID NO: 2458041 - RNA, 19 nt, Homo sapiens
  misc_RNA (1)...(19): siRNA sense strand
cagaagaaaaggagaaaau

SEQ ID NO: 2458042 - RNA, 19 nt, Homo sapiens
  misc_RNA (1)...(19): siRNA sense strand
cgacaugggucuuacgaca

SEQ ID NO: 2458043 - RNA, 19 nt, Homo sapiens
  misc_RNA (1)...(19): siRNA sense strand
ccugacaaugguagggaaa

SEQ ID NO: 2458044 - RNA, 19 nt, Homo sapiens
  misc_RNA (1)...(19): siRNA sense strand
aagcaguccuacauggaaa

SEQ ID NO: 2458045 - RNA, 19 nt, Homo sapiens
  misc_RNA (1)...(19): siRNA sense strand
aagccaaaguacaggacau

SEQ ID NO: 2458046 - RNA, 19 nt, Homo sapiens
  misc_RNA (1)...(19): siRNA sense strand
gcacaaaucaagcagccaa

SEQ ID NO: 2458047 - RNA, 19 nt, Homo sapiens
  misc_RNA (1)...(19): siRNA sense strand
ugaccauaguggacaggaa

SEQ ID NO: 2458048 - RNA, 19 nt, Homo sapiens
  misc_RNA (1)...(19): siRNA sense strand
aguuaaaccuccuccacaa

SEQ ID NO: 2458049 - RNA, 19 nt, Homo sapiens
  misc_RNA (1)...(19): siRNA sense strand
uaacagaagaaaaggagaa

SEQ ID NO: 2458050 - RNA, 19 nt, Homo sapiens
  misc_RNA (1)...(19): siRNA sense strand
agugaugccucuugcacaa

SEQ ID NO: 2458051 - RNA, 19 nt, Homo sapiens
  misc_RNA (1)...(19): siRNA sense strand
ucguagucuugcaggagaa

SEQ ID NO: 2458052 - RNA, 19 nt, Homo sapiens
  misc_RNA (1)...(19): siRNA sense strand
gcaccuuaguggaacacau

SEQ ID NO: 2458053 - RNA, 19 nt, Homo sapiens
  misc_RNA (1)...(19): siRNA sense strand
ucucaugguccgagugaca

SEQ ID NO: 2458054 - RNA, 19 nt, Homo sapiens
  misc_RNA (1)...(19): siRNA sense strand
caccaaacgaaccggcaaa

SEQ ID NO: 2458055 - RNA, 19 nt, Homo sapiens
  misc_RNA (1)...(19): siRNA sense strand
ugacaaugguagggaaagu

SEQ ID NO: 2458056 - RNA, 19 nt, Homo sapiens
  misc_RNA (1)...(19): siRNA sense strand
gugauaacuuugcugaaaa

SEQ ID NO: 2458057 - RNA, 19 nt, Homo sapiens
  misc_RNA (1)...(19): siRNA sense strand
gggaguuuccacagugauu

SEQ ID NO: 2458058 - RNA, 19 nt, Homo sapiens
  misc_RNA (1)...(19): siRNA sense strand
acuggaagagauugaacaa

SEQ ID NO: 2458059 - RNA, 19 nt, Homo sapiens
  misc_RNA (1)...(19): siRNA sense strand
guacauuaucaguugcuau

SEQ ID NO: 2458060 - RNA, 19 nt, Homo sapiens
  misc_RNA (1)...(19): siRNA sense strand
cauggaaaguguugugacu

SEQ ID NO: 2458061 - RNA, 19 nt, Homo sapiens
  misc_RNA (1)...(19): siRNA sense strand
ggggagaaacugaagccaa

SEQ ID NO: 2458062 - RNA, 19 nt, Homo sapiens
  misc_RNA (1)...(19): siRNA sense strand
ggaagaugaagaauggcuu

SEQ ID NO: 2458063 - RNA, 19 nt, Homo sapiens
  misc_RNA (1)...(19): siRNA sense strand
agguugaaauuguaacaca

SEQ ID NO: 2458064 - RNA, 19 nt, Homo sapiens
  misc_RNA (1)...(19): siRNA sense strand
uggaaugcuucuagucaca

SEQ ID NO: 2458065 - RNA, 19 nt, Homo sapiens
  misc_RNA (1)...(19): siRNA sense strand
uggacaggaagaugaagaa

SEQ ID NO: 2458066 - RNA, 19 nt, Homo sapiens
  misc_RNA (1)...(19): siRNA sense strand
gagaaaauagucuggguca

SEQ ID NO: 2458067 - RNA, 19 nt, Homo sapiens
  misc_RNA (1)...(19): siRNA sense strand
guggacaggaagaugaaga

SEQ ID NO: 2458068 - RNA, 19 nt, Homo sapiens
  misc_RNA (1)...(19): siRNA sense strand
acaccgaaaccguuggaga

SEQ ID NO: 2458069 - RNA, 19 nt, Homo sapiens
  misc_RNA (1)...(19): siRNA sense strand
gcaaaucgaugggcggaga

SEQ ID NO: 2458070 - RNA, 19 nt, Homo sapiens
  misc_RNA (1)...(19): siRNA sense strand
cauuggaucuucuggcaca

SEQ ID NO: 2458071 - RNA, 19 nt, Homo sapiens
  misc_RNA (1)...(19): siRNA sense strand
gugaggauucugacaguga

SEQ ID NO: 2458072 - RNA, 19 nt, Homo sapiens
  misc_RNA (1)...(19): siRNA sense strand
aaacugaagccaaaguaca

SEQ ID NO: 2458073 - RNA, 19 nt, Homo sapiens
  misc_RNA (1)...(19): siRNA sense strand
gcggcagcauaccaagaaa

SEQ ID NO: 2458074 - RNA, 19 nt, Homo sapiens
  misc_RNA (1)...(19): siRNA sense strand
gcccaauucgagcggcuaa

SEQ ID NO: 2458075 - RNA, 19 nt, Homo sapiens
  misc_RNA (1)...(19): siRNA sense strand
ucguuguacugguggaguu

SEQ ID NO: 2458076 - RNA, 19 nt, Homo sapiens
  misc_RNA (1)...(19): siRNA sense strand
cagaagaugauguugccau

SEQ ID NO: 2458077 - RNA, 19 nt, Homo sapiens
  misc_RNA (1)...(19): siRNA sense strand
cggaacagaacuucagcga

SEQ ID NO: 2458078 - RNA, 19 nt, Homo sapiens
  misc_RNA (1)...(19): siRNA sense strand
gcuuuuaauacaaguggaa

SEQ ID NO: 2458079 - RNA, 19 nt, Homo sapiens
  misc_RNA (1)...(19): siRNA sense strand
acaaauuucacccagcaaa

SEQ ID NO: 2458080 - RNA, 19 nt, Homo sapiens
  misc_RNA (1)...(19): siRNA sense strand
guccacaguuccaguucaa

SEQ ID NO: 2458081 - RNA, 19 nt, Homo sapiens
  misc_RNA (1)...(19): siRNA sense strand
ccacaguuccaguucaaaa

SEQ ID NO: 2458082 - RNA, 19 nt, Homo sapiens
  misc_RNA (1)...(19): siRNA sense strand
gaucgaggcuugugcccau

SEQ ID NO: 2458083 - RNA, 19 nt, Homo sapiens
  misc_RNA (1)...(19): siRNA sense strand
gccuaauaucugcguagaa

SEQ ID NO: 2458084 - RNA, 19 nt, Homo sapiens
  misc_RNA (1)...(19): siRNA sense strand
cggucuuaguccuggguaa

SEQ ID NO: 2458085 - RNA, 19 nt, Homo sapiens
  misc_RNA (1)...(19): siRNA sense strand
gcaaaaucaccaaagggaa

SEQ ID NO: 2458086 - RNA, 19 nt, Homo sapiens
  misc_RNA (1)...(19): siRNA sense strand
gcagcaugugggagcgcua

SEQ ID NO: 2458087 - RNA, 19 nt, Homo sapiens
  misc_RNA (1)...(19): siRNA sense strand
cugcugaccaggagaagau

SEQ ID NO: 2458088 - RNA, 19 nt, Homo sapiens
  misc_RNA (1)...(19): siRNA sense strand
ggguaacaagcgagaccuu

SEQ ID NO: 2458089 - RNA, 19 nt, Homo sapiens
  misc_RNA (1)...(19): siRNA sense strand
cuaucaagcucugggacau

SEQ ID NO: 2458090 - RNA, 19 nt, Homo sapiens
  misc_RNA (1)...(19): siRNA sense strand
aggagaagauugaggccuc

SEQ ID NO: 2458091 - RNA, 19 nt, Homo sapiens
  misc_RNA (1)...(19): siRNA sense strand
ccucuaagaacgagcucca

SEQ ID NO: 2458092 - RNA, 19 nt, Homo sapiens
  misc_RNA (1)...(19): siRNA sense strand
augagaaggagcugauuga

SEQ ID NO: 2458093 - RNA, 19 nt, Homo sapiens
  misc_RNA (1)...(19): siRNA sense strand
ggaaggaggagauggagcu

SEQ ID NO: 2458094 - RNA, 19 nt, Homo sapiens
  misc_RNA (1)...(19): siRNA sense strand
cuucaguacucgggcaaga

SEQ ID NO: 2458095 - RNA, 19 nt, Homo sapiens
  misc_RNA (1)...(19): siRNA sense strand
cauccaggaccgagagauc

SEQ ID NO: 2458096 - RNA, 19 nt, Homo sapiens
  misc_RNA (1)...(19): siRNA sense strand
cacucgaagucacggagaa

SEQ ID NO: 2458097 - RNA, 19 nt, Homo sapiens
  misc_RNA (1)...(19): siRNA sense strand
agauaagguguuuggaaaa

SEQ ID NO: 2458098 - RNA, 19 nt, Homo sapiens
  misc_RNA (1)...(19): siRNA sense strand
cagcgggaggagaaggaaa

SEQ ID NO: 2458099 - RNA, 19 nt, Homo sapiens
  misc_RNA (1)...(19): siRNA sense strand
cgaacaaggaaaaggaaca

SEQ ID NO: 2458100 - RNA, 19 nt, Homo sapiens
  misc_RNA (1)...(19): siRNA sense strand
auguacaacacaaggcaaa

SEQ ID NO: 2458101 - RNA, 19 nt, Homo sapiens
  misc_RNA (1)...(19): siRNA sense strand
ggcugaauucccagauaaa

SEQ ID NO: 2458102 - RNA, 19 nt, Homo sapiens
  misc_RNA (1)...(19): siRNA sense strand
agagaaaggacgacaggca

SEQ ID NO: 2458103 - RNA, 19 nt, Homo sapiens
  misc_RNA (1)...(19): siRNA sense strand
aagagaaagaggagcuaca

SEQ ID NO: 2458104 - RNA, 19 nt, Homo sapiens
  misc_RNA (1)...(19): siRNA sense strand
ccugcaagauccaugggua

SEQ ID NO: 2458105 - RNA, 19 nt, Homo sapiens
  misc_RNA (1)...(19): siRNA sense strand
ccgaggacuguuugaggaa

SEQ ID NO: 2458106 - RNA, 19 nt, Homo sapiens
  misc_RNA (1)...(19): siRNA sense strand
agaaaggacgacaggcaga

SEQ ID NO: 2458107 - RNA, 19 nt, Homo sapiens
  misc_RNA (1)...(19): siRNA sense strand
ggugcaaauauacgaagaa

SEQ ID NO: 2458108 - RNA, 19 nt, Homo sapiens
  misc_RNA (1)...(19): siRNA sense strand
cgcaucagaggcagagaaa

SEQ ID NO: 2458109 - RNA, 19 nt, Homo sapiens
  misc_RNA (1)...(19): siRNA sense strand
agagagaggacgacaggca

SEQ ID NO: 2458110 - RNA, 19 nt, Homo sapiens
  misc_RNA (1)...(19): siRNA sense strand
uaaagaaaguccauccgua

SEQ ID NO: 2458111 - RNA, 19 nt, Homo sapiens
  misc_RNA (1)...(19): siRNA sense strand
agcaaugggaucagcaauu

SEQ ID NO: 2458112 - RNA, 19 nt, Homo sapiens
  misc_RNA (1)...(19): siRNA sense strand
ggcaaaugguuuauccuca

SEQ ID NO: 2458113 - RNA, 19 nt, Homo sapiens
  misc_RNA (1)...(19): siRNA sense strand
ugcaaauauacgaagaaga

SEQ ID NO: 2458114 - RNA, 19 nt, Homo sapiens
  misc_RNA (1)...(19): siRNA sense strand
ccgcaucagaggcagagaa

SEQ ID NO: 2458115 - RNA, 19 nt, Homo sapiens
  misc_RNA (1)...(19): siRNA sense strand
cugcaagauccauggguac

SEQ ID NO: 2458116 - RNA, 19 nt, Homo sapiens
  misc_RNA (1)...(19): siRNA sense strand
aggacgacaggcagagaga

SEQ ID NO: 2458117 - RNA, 19 nt, Homo sapiens
  misc_RNA (1)...(19): siRNA sense strand
gcgccgaaugagagagaaa

SEQ ID NO: 2458118 - RNA, 19 nt, Homo sapiens
  misc_RNA (1)...(19): siRNA sense strand
ucauagugguagugauaau

SEQ ID NO: 2458119 - RNA, 19 nt, Homo sapiens
  misc_RNA (1)...(19): siRNA sense strand
gaagaacguuugagggcuu

SEQ ID NO: 2458120 - RNA, 19 nt, Homo sapiens
  misc_RNA (1)...(19): siRNA sense strand
gagugauggagaagacaaa

SEQ ID NO: 2458121 - RNA, 19 nt, Homo sapiens
  misc_RNA (1)...(19): siRNA sense strand
guucugaccaugaggacaa

SEQ ID NO: 2458122 - RNA, 19 nt, Homo sapiens
  misc_RNA (1)...(19): siRNA sense strand
ccagaauagaaguagaaau

SEQ ID NO: 2458123 - RNA, 19 nt, Homo sapiens
  misc_RNA (1)...(19): siRNA sense strand
cagugauagugaagaugaa

SEQ ID NO: 2458124 - RNA, 19 nt, Homo sapiens
  misc_RNA (1)...(19): siRNA sense strand
aggcagugauagugaagau

SEQ ID NO: 2458125 - RNA, 19 nt, Homo sapiens
  misc_RNA (1)...(19): siRNA sense strand
ccgagaugaagaaggaaau

SEQ ID NO: 2458126 - RNA, 19 nt, Homo sapiens
  misc_RNA (1)...(19): siRNA sense strand
cagaugaugaagaggaaca

SEQ ID NO: 2458127 - RNA, 19 nt, Homo sapiens
  misc_RNA (1)...(19): siRNA sense strand
augaagaggaacaggauca

SEQ ID NO: 2458128 - RNA, 19 nt, Homo sapiens
  misc_RNA (1)...(19): siRNA sense strand
gccgagaugaagaaggaaa

SEQ ID NO: 2458129 - RNA, 19 nt, Homo sapiens
  misc_RNA (1)...(19): siRNA sense strand
gugaaagugaucaggauga

SEQ ID NO: 2458130 - RNA, 19 nt, Homo sapiens
  misc_RNA (1)...(19): siRNA sense strand
augaagaggaagaagauga

SEQ ID NO: 2458131 - RNA, 19 nt, Homo sapiens
  misc_RNA (1)...(19): siRNA sense strand
ggauuuauuuggaggugca

SEQ ID NO: 2458132 - RNA, 19 nt, Homo sapiens
  misc_RNA (1)...(19): siRNA sense strand
gagaaaagcagaagaugau

SEQ ID NO: 2458133 - RNA, 19 nt, Homo sapiens
  misc_RNA (1)...(19): siRNA sense strand
gaagaugaugauaaagcaa

SEQ ID NO: 2458134 - RNA, 19 nt, Homo sapiens
  misc_RNA (1)...(19): siRNA sense strand
cgaugaagaggaagaagau

SEQ ID NO: 2458135 - RNA, 19 nt, Homo sapiens
  misc_RNA (1)...(19): siRNA sense strand
aagaggugauucaggacaa

SEQ ID NO: 2458136 - RNA, 19 nt, Homo sapiens
  misc_RNA (1)...(19): siRNA sense strand
agaugaagaaggaaaugaa

SEQ ID NO: 2458137 - RNA, 19 nt, Homo sapiens
  misc_RNA (1)...(19): siRNA sense strand
gaugaagaacacaggcauu

SEQ ID NO: 2458138 - RNA, 19 nt, Homo sapiens
  misc_RNA (1)...(19): siRNA sense strand
auucagaagcggauaguga

SEQ ID NO: 2458139 - RNA, 19 nt, Homo sapiens
  misc_RNA (1)...(19): siRNA sense strand
ccaaaagauaauaguggaa

SEQ ID NO: 2458140 - RNA, 19 nt, Homo sapiens
  misc_RNA (1)...(19): siRNA sense strand
ggcuaauucugaugaugaa

SEQ ID NO: 2458141 - RNA, 19 nt, Homo sapiens
  misc_RNA (1)...(19): siRNA sense strand
cggaaagagaaaagcagaa

SEQ ID NO: 2458142 - RNA, 19 nt, Homo sapiens
  misc_RNA (1)...(19): siRNA sense strand
cagaagaagauaaagcuca

SEQ ID NO: 2458143 - RNA, 19 nt, Homo sapiens
  misc_RNA (1)...(19): siRNA sense strand
auaaggaacuguuuggaga

SEQ ID NO: 2458144 - RNA, 19 nt, Homo sapiens
  misc_RNA (1)...(19): siRNA sense strand
cugauaaugaugaugagaa

SEQ ID NO: 2458145 - RNA, 19 nt, Homo sapiens
  misc_RNA (1)...(19): siRNA sense strand
agaaguagaaauacccaaa

SEQ ID NO: 2458146 - RNA, 19 nt, Homo sapiens
  misc_RNA (1)...(19): siRNA sense strand
agaaaugcuggaugaagaa

SEQ ID NO: 2458147 - RNA, 19 nt, Homo sapiens
  misc_RNA (1)...(19): siRNA sense strand
guacuggucuacagggaca

SEQ ID NO: 2458148 - RNA, 19 nt, Homo sapiens
  misc_RNA (1)...(19): siRNA sense strand
agauagguguucaaagaca

SEQ ID NO: 2458149 - RNA, 19 nt, Homo sapiens
  misc_RNA (1)...(19): siRNA sense strand
agggaucagaagaagauaa

SEQ ID NO: 2458150 - RNA, 19 nt, Homo sapiens
  misc_RNA (1)...(19): siRNA sense strand
caguaaugccucuggaagu

SEQ ID NO: 2458151 - RNA, 19 nt, Homo sapiens
  misc_RNA (1)...(19): siRNA sense strand
agagaaaagcagaagauga

SEQ ID NO: 2458152 - RNA, 19 nt, Homo sapiens
  misc_RNA (1)...(19): siRNA sense strand
ggagugauggagaagacaa

SEQ ID NO: 2458153 - RNA, 19 nt, Homo sapiens
  misc_RNA (1)...(19): siRNA sense strand
ggcacaaggaucugaugaa

SEQ ID NO: 2458154 - RNA, 19 nt, Homo sapiens
  misc_RNA (1)...(19): siRNA sense strand
agaccagaauagaaguaga

SEQ ID NO: 2458155 - RNA, 19 nt, Homo sapiens
  misc_RNA (1)...(19): siRNA sense strand
acgaaugaaacgcaagaau

SEQ ID NO: 2458156 - RNA, 19 nt, Homo sapiens
  misc_RNA (1)...(19): siRNA sense strand
gaugauaucucuucaggga

SEQ ID NO: 2458157 - RNA, 19 nt, Homo sapiens
  misc_RNA (1)...(19): siRNA sense strand
augaaguguuugaugugua

SEQ ID NO: 2458158 - RNA, 19 nt, Homo sapiens
  misc_RNA (1)...(19): siRNA sense strand
agacacagaagauuagaau

SEQ ID NO: 2458159 - RNA, 19 nt, Homo sapiens
  misc_RNA (1)...(19): siRNA sense strand
acaaccaaguaauaaggaa

SEQ ID NO: 2458160 - RNA, 19 nt, Homo sapiens
  misc_RNA (1)...(19): siRNA sense strand
gagaggaacgagccagaau

SEQ ID NO: 2458161 - RNA, 19 nt, Homo sapiens
  misc_RNA (1)...(19): siRNA sense strand
caaagauuacucaaagcaa

SEQ ID NO: 2458162 - RNA, 19 nt, Homo sapiens
  misc_RNA (1)...(19): siRNA sense strand
gcagagaagauaaaaguga

SEQ ID NO: 2458163 - RNA, 19 nt, Homo sapiens
  misc_RNA (1)...(19): siRNA sense strand
gagaugacagugaggacga

SEQ ID NO: 2458164 - RNA, 19 nt, Homo sapiens
  misc_RNA (1)...(19): siRNA sense strand
gccgaaugagagagaaaca

SEQ ID NO: 2458165 - RNA, 19 nt, Homo sapiens
  misc_RNA (1)...(19): siRNA sense strand
gaugaagaagguagaacca

SEQ ID NO: 2458166 - RNA, 19 nt, Homo sapiens
  misc_RNA (1)...(19): siRNA sense strand
acgccgagaugaagaagga

SEQ ID NO: 2458167 - RNA, 19 nt, Homo sapiens
  misc_RNA (1)...(19): siRNA sense strand
gauacgaugaggaggagga

SEQ ID NO: 2458168 - RNA, 19 nt, Homo sapiens
  misc_RNA (1)...(19): siRNA sense strand
ccucagauguagaucagca

SEQ ID NO: 2458169 - RNA, 19 nt, Homo sapiens
  misc_RNA (1)...(19): siRNA sense strand
aagaggaagaagaugauga

SEQ ID NO: 2458170 - RNA, 19 nt, Homo sapiens
  misc_RNA (1)...(19): siRNA sense strand
augaugaagacgaagguca

SEQ ID NO: 2458171 - RNA, 19 nt, Homo sapiens
  misc_RNA (1)...(19): siRNA sense strand
cugaggaggaaaaggcuaa

SEQ ID NO: 2458172 - RNA, 19 nt, Homo sapiens
  misc_RNA (1)...(19): siRNA sense strand
aagugaaagugaucaggau

SEQ ID NO: 2458173 - RNA, 19 nt, Homo sapiens
  misc_RNA (1)...(19): siRNA sense strand
gaacacagaugaugaggag

SEQ ID NO: 2458174 - RNA, 19 nt, Homo sapiens
  misc_RNA (1)...(19): siRNA sense strand
ugaugagagacaacagcua

SEQ ID NO: 2458175 - RNA, 19 nt, Homo sapiens
  misc_RNA (1)...(19): siRNA sense strand
aggaagaagaugaugauug

SEQ ID NO: 2458176 - RNA, 19 nt, Homo sapiens
  misc_RNA (1)...(19): siRNA sense strand
aggcuaauucugaugauga

SEQ ID NO: 2458177 - RNA, 19 nt, Homo sapiens
  misc_RNA (1)...(19): siRNA sense strand
uuacaaagcugccaggaga

SEQ ID NO: 2458178 - RNA, 19 nt, Homo sapiens
  misc_RNA (1)...(19): siRNA sense strand
auguaugguuugacagauu

SEQ ID NO: 2458179 - RNA, 19 nt, Homo sapiens
  misc_RNA (1)...(19): siRNA sense strand
ugguacugcagaugaguua

SEQ ID NO: 2458180 - RNA, 19 nt, Homo sapiens
  misc_RNA (1)...(19): siRNA sense strand
aucaagaagaacaggauau

SEQ ID NO: 2458181 - RNA, 19 nt, Homo sapiens
  misc_RNA (1)...(19): siRNA sense strand
caggauauuaauaggagga

SEQ ID NO: 2458182 - RNA, 19 nt, Homo sapiens
  misc_RNA (1)...(19): siRNA sense strand
cugccaggagaaauggaaa

SEQ ID NO: 2458183 - RNA, 19 nt, Homo sapiens
  misc_RNA (1)...(19): siRNA sense strand
cagaaagggcccaggagca

SEQ ID NO: 2458184 - RNA, 19 nt, Homo sapiens
  misc_RNA (1)...(19): siRNA sense strand
aguuaaagacugcagaaca

SEQ ID NO: 2458185 - RNA, 19 nt, Homo sapiens
  misc_RNA (1)...(19): siRNA sense strand
augaaguggagaagagaca

SEQ ID NO: 2458186 - RNA, 19 nt, Homo sapiens
  misc_RNA (1)...(19): siRNA sense strand
accuagaacauguggauuu

SEQ ID NO: 2458187 - RNA, 19 nt, Homo sapiens
  misc_RNA (1)...(19): siRNA sense strand
aggaagccgagaagagcaa

SEQ ID NO: 2458188 - RNA, 19 nt, Homo sapiens
  misc_RNA (1)...(19): siRNA sense strand
augaggaacagaagaaaca

SEQ ID NO: 2458189 - RNA, 19 nt, Homo sapiens
  misc_RNA (1)...(19): siRNA sense strand
agaacaaaucaacgagcau

SEQ ID NO: 2458190 - RNA, 19 nt, Homo sapiens
  misc_RNA (1)...(19): siRNA sense strand
acagaagaaaccaagggaa

SEQ ID NO: 2458191 - RNA, 19 nt, Homo sapiens
  misc_RNA (1)...(19): siRNA sense strand
uugaauaugaggaacagaa

SEQ ID NO: 2458192 - RNA, 19 nt, Homo sapiens
  misc_RNA (1)...(19): siRNA sense strand
aagaaacagaagaaaccaa

SEQ ID NO: 2458193 - RNA, 19 nt, Homo sapiens
  misc_RNA (1)...(19): siRNA sense strand
agaagaaaccaagggaaaa

SEQ ID NO: 2458194 - RNA, 19 nt, Homo sapiens
  misc_RNA (1)...(19): siRNA sense strand
uugucaagauugugggcca

SEQ ID NO: 2458195 - RNA, 19 nt, Homo sapiens
  misc_RNA (1)...(19): siRNA sense strand
aacagaagaaacagaagaa

SEQ ID NO: 2458196 - RNA, 19 nt, Homo sapiens
  misc_RNA (1)...(19): siRNA sense strand
cagaacaaaucaacgagca

SEQ ID NO: 2458197 - RNA, 19 nt, Homo sapiens
  misc_RNA (1)...(19): siRNA sense strand
gcucugaccuccaagacca

SEQ ID NO: 2458198 - RNA, 19 nt, Homo sapiens
  misc_RNA (1)...(19): siRNA sense strand
cuauaaucaccuaccaauu

SEQ ID NO: 2458199 - RNA, 19 nt, Homo sapiens
  misc_RNA (1)...(19): siRNA sense strand
gaugggaaugagugggcau

SEQ ID NO: 2458200 - RNA, 19 nt, Homo sapiens
  misc_RNA (1)...(19): siRNA sense strand
cagcaggaggucauggaca

SEQ ID NO: 2458201 - RNA, 19 nt, Homo sapiens
  misc_RNA (1)...(19): siRNA sense strand
ucuuaaugucgguugguga

SEQ ID NO: 2458202 - RNA, 19 nt, Homo sapiens
  misc_RNA (1)...(19): siRNA sense strand
gcuucaacuccgagcagga

SEQ ID NO: 2458203 - RNA, 19 nt, Homo sapiens
  misc_RNA (1)...(19): siRNA sense strand
cugcagaacaaaucaacga

SEQ ID NO: 2458204 - RNA, 19 nt, Homo sapiens
  misc_RNA (1)...(19): siRNA sense strand
agcacaaaucugagagaaa

SEQ ID NO: 2458205 - RNA, 19 nt, Homo sapiens
  misc_RNA (1)...(19): siRNA sense strand
ggaagauaucagaaggaau

SEQ ID NO: 2458206 - RNA, 19 nt, Homo sapiens
  misc_RNA (1)...(19): siRNA sense strand
augaggugguuuagacaaa

SEQ ID NO: 2458207 - RNA, 19 nt, Homo sapiens
  misc_RNA (1)...(19): siRNA sense strand
gaagaaaauagcuuggaaa

SEQ ID NO: 2458208 - RNA, 19 nt, Homo sapiens
  misc_RNA (1)...(19): siRNA sense strand
cuggaaauggugagcacaa

SEQ ID NO: 2458209 - RNA, 19 nt, Homo sapiens
  misc_RNA (1)...(19): siRNA sense strand
ggucauuauccauggaguu

SEQ ID NO: 2458210 - RNA, 19 nt, Homo sapiens
  misc_RNA (1)...(19): siRNA sense strand
uugccaaaucugagaguga

SEQ ID NO: 2458211 - RNA, 19 nt, Homo sapiens
  misc_RNA (1)...(19): siRNA sense strand
ucgcaugggaaauugauaa

SEQ ID NO: 2458212 - RNA, 19 nt, Homo sapiens
  misc_RNA (1)...(19): siRNA sense strand
ccucaugggaagaauaaaa

SEQ ID NO: 2458213 - RNA, 19 nt, Homo sapiens
  misc_RNA (1)...(19): siRNA sense strand
uauauaagccucaugggaa

SEQ ID NO: 2458214 - RNA, 19 nt, Homo sapiens
  misc_RNA (1)...(19): siRNA sense strand
guaaaaucuuucugcacaa

SEQ ID NO: 2458215 - RNA, 19 nt, Homo sapiens
  misc_RNA (1)...(19): siRNA sense strand
auuaaacagcggaaaguau

SEQ ID NO: 2458216 - RNA, 19 nt, Homo sapiens
  misc_RNA (1)...(19): siRNA sense strand
gccuaacguugcagaaaca

SEQ ID NO: 2458217 - RNA, 19 nt, Homo sapiens
  misc_RNA (1)...(19): siRNA sense strand
cgacuaguacaucggaaau

SEQ ID NO: 2458218 - RNA, 19 nt, Homo sapiens
  misc_RNA (1)...(19): siRNA sense strand
caggcaaugcaaagaaaca

SEQ ID NO: 2458219 - RNA, 19 nt, Homo sapiens
  misc_RNA (1)...(19): siRNA sense strand
ccucuuuaucugcuggaaa

SEQ ID NO: 2458220 - RNA, 19 nt, Homo sapiens
  misc_RNA (1)...(19): siRNA sense strand
accuauuacccaagaagaa

SEQ ID NO: 2458221 - RNA, 19 nt, Homo sapiens
  misc_RNA (1)...(19): siRNA sense strand
uggaaauggugagcacaaa

SEQ ID NO: 2458222 - RNA, 19 nt, Homo sapiens
  misc_RNA (1)...(19): siRNA sense strand
cgaaacacaaaucaggcaa

SEQ ID NO: 2458223 - RNA, 19 nt, Homo sapiens
  misc_RNA (1)...(19): siRNA sense strand
uggagaaucaaguagaaaa

SEQ ID NO: 2458224 - RNA, 19 nt, Homo sapiens
  misc_RNA (1)...(19): siRNA sense strand
aaucugagagugaagacaa

SEQ ID NO: 2458225 - RNA, 19 nt, Homo sapiens
  misc_RNA (1)...(19): siRNA sense strand
cgcaugggaaauugauaaa

SEQ ID NO: 2458226 - RNA, 19 nt, Homo sapiens
  misc_RNA (1)...(19): siRNA sense strand
cgaccacaguauaagacuu

SEQ ID NO: 2458227 - RNA, 19 nt, Homo sapiens
  misc_RNA (1)...(19): siRNA sense strand
acaaaucaggcaaugcaaa

SEQ ID NO: 2458228 - RNA, 19 nt, Homo sapiens
  misc_RNA (1)...(19): siRNA sense strand
gagaaggaacagugguuac

SEQ ID NO: 2458229 - RNA, 19 nt, Homo sapiens
  misc_RNA (1)...(19): siRNA sense strand
cagugauuacgaugggaau

SEQ ID NO: 2458230 - RNA, 19 nt, Homo sapiens
  misc_RNA (1)...(19): siRNA sense strand
agagaaagucaccugaaga

SEQ ID NO: 2458231 - RNA, 19 nt, Homo sapiens
  misc_RNA (1)...(19): siRNA sense strand
cauuagacaagaaucacaa

SEQ ID NO: 2458232 - RNA, 19 nt, Homo sapiens
  misc_RNA (1)...(19): siRNA sense strand
cuauaaaacuccaaaucca

SEQ ID NO: 2458233 - RNA, 19 nt, Homo sapiens
  misc_RNA (1)...(19): siRNA sense strand
gcuggaaauaauucaucaa

SEQ ID NO: 2458234 - RNA, 19 nt, Homo sapiens
  misc_RNA (1)...(19): siRNA sense strand
auauaagccucaugggaag

SEQ ID NO: 2458235 - RNA, 19 nt, Homo sapiens
  misc_RNA (1)...(19): siRNA sense strand
cucuuuaucugcuggaaau

SEQ ID NO: 2458236 - RNA, 19 nt, Homo sapiens
  misc_RNA (1)...(19): siRNA sense strand
guauuagaccucagacgau

SEQ ID NO: 2458237 - RNA, 19 nt, Homo sapiens
  misc_RNA (1)...(19): siRNA sense strand
gugacucauacacgggaaa

SEQ ID NO: 2458238 - RNA, 19 nt, Homo sapiens
  misc_RNA (1)...(19): siRNA sense strand
agauauuaaacagcggaaa

SEQ ID NO: 2458239 - RNA, 19 nt, Homo sapiens
  misc_RNA (1)...(19): siRNA sense strand
gcggaaaguauuagaccuc

SEQ ID NO: 2458240 - RNA, 19 nt, Homo sapiens
  misc_RNA (1)...(19): siRNA sense strand
uguucaaagaagacagaaa

SEQ ID NO: 2458241 - RNA, 19 nt, Homo sapiens
  misc_RNA (1)...(19): siRNA sense strand
gaguagaagaugaagacau

SEQ ID NO: 2458242 - RNA, 19 nt, Homo sapiens
  misc_RNA (1)...(19): siRNA sense strand
cuaaagaacucaaagagca

SEQ ID NO: 2458243 - RNA, 19 nt, Homo sapiens
  misc_RNA (1)...(19): siRNA sense strand
uugauaaagaccacagaaa

SEQ ID NO: 2458244 - RNA, 19 nt, Homo sapiens
  misc_RNA (1)...(19): siRNA sense strand
cguucagaguugauaaaga

SEQ ID NO: 2458245 - RNA, 19 nt, Homo sapiens
  misc_RNA (1)...(19): siRNA sense strand
cggaggaagacaaagaaaa

SEQ ID NO: 2458246 - RNA, 19 nt, Homo sapiens
  misc_RNA (1)...(19): siRNA sense strand
cagaauuacaguaugccaa

SEQ ID NO: 2458247 - RNA, 19 nt, Homo sapiens
  misc_RNA (1)...(19): siRNA sense strand
ugauaaagaccacagaaaa

SEQ ID NO: 2458248 - RNA, 19 nt, Homo sapiens
  misc_RNA (1)...(19): siRNA sense strand
gauauauguucuagcagga

SEQ ID NO: 2458249 - RNA, 19 nt, Homo sapiens
  misc_RNA (1)...(19): siRNA sense strand
acaguaugccaaugagcua

SEQ ID NO: 2458250 - RNA, 19 nt, Homo sapiens
  misc_RNA (1)...(19): siRNA sense strand
aggaauugaggaacagauu

SEQ ID NO: 2458251 - RNA, 19 nt, Homo sapiens
  misc_RNA (1)...(19): siRNA sense strand
ccucugggaagcaggaauu

SEQ ID NO: 2458252 - RNA, 19 nt, Homo sapiens
  misc_RNA (1)...(19): siRNA sense strand
caaugagcuaggaguagaa

SEQ ID NO: 2458253 - RNA, 19 nt, Homo sapiens
  misc_RNA (1)...(19): siRNA sense strand
uaucaguagcaauccgaaa

SEQ ID NO: 2458254 - RNA, 19 nt, Homo sapiens
  misc_RNA (1)...(19): siRNA sense strand
ugagcuaggaguagaagau

SEQ ID NO: 2458255 - RNA, 19 nt, Homo sapiens
  misc_RNA (1)...(19): siRNA sense strand
agcuaggaguagaagauga

SEQ ID NO: 2458256 - RNA, 19 nt, Homo sapiens
  misc_RNA (1)...(19): siRNA sense strand
ugccaaugagcuaggagua

SEQ ID NO: 2458257 - RNA, 19 nt, Homo sapiens
  misc_RNA (1)...(19): siRNA sense strand
gauaaagaccacagaaaac

SEQ ID NO: 2458258 - RNA, 19 nt, Homo sapiens
  misc_RNA (1)...(19): siRNA sense strand
gaaagaaaucaaagccucu

SEQ ID NO: 2458259 - RNA, 19 nt, Homo sapiens
  misc_RNA (1)...(19): siRNA sense strand
ucggaggaagacaaagaaa

SEQ ID NO: 2458260 - RNA, 19 nt, Homo sapiens
  misc_RNA (1)...(19): siRNA sense strand
ggcugugcuguguggaaua

SEQ ID NO: 2458261 - RNA, 19 nt, Homo sapiens
  misc_RNA (1)...(19): siRNA sense strand
aaagaagcccagaacaaaa

SEQ ID NO: 2458262 - RNA, 19 nt, Homo sapiens
  misc_RNA (1)...(19): siRNA sense strand
ggaacagauucuccagcca

SEQ ID NO: 2458263 - RNA, 19 nt, Homo sapiens
  misc_RNA (1)...(19): siRNA sense strand
cugaagagacugagggacu

SEQ ID NO: 2458264 - RNA, 19 nt, Homo sapiens
  misc_RNA (1)...(19): siRNA sense strand
gggaguaucuggagcgccu

SEQ ID NO: 2458265 - RNA, 19 nt, Homo sapiens
  misc_RNA (1)...(19): siRNA sense strand
agagcauggagaagaggua

SEQ ID NO: 2458266 - RNA, 19 nt, Homo sapiens
  misc_RNA (1)...(19): siRNA sense strand
guaccaaagagcaggugga

SEQ ID NO: 2458267 - RNA, 19 nt, Homo sapiens
  misc_RNA (1)...(19): siRNA sense strand
uggccaagucaaagcugaa

SEQ ID NO: 2458268 - RNA, 19 nt, Homo sapiens
  misc_RNA (1)...(19): siRNA sense strand
gcaaggaggugcacgcucu

SEQ ID NO: 2458269 - RNA, 19 nt, Homo sapiens
  misc_RNA (1)...(19): siRNA sense strand
ggaaaauaucacaagcaaa

SEQ ID NO: 2458270 - RNA, 19 nt, Homo sapiens
  misc_RNA (1)...(19): siRNA sense strand
auacauggacagagcggaa

SEQ ID NO: 2458271 - RNA, 19 nt, Homo sapiens
  misc_RNA (1)...(19): siRNA sense strand
aguuacagaaguuuggaua

SEQ ID NO: 2458272 - RNA, 19 nt, Homo sapiens
  misc_RNA (1)...(19): siRNA sense strand
cuucaauacaugaccgaga

SEQ ID NO: 2458273 - RNA, 19 nt, Homo sapiens
  misc_RNA (1)...(19): siRNA sense strand
ccaaauacauggacagagc

SEQ ID NO: 2458274 - RNA, 19 nt, Homo sapiens
  misc_RNA (1)...(19): siRNA sense strand
uaaagaaguacuuggacca

SEQ ID NO: 2458275 - RNA, 19 nt, Homo sapiens
  misc_RNA (1)...(19): siRNA sense strand
gcauugagcaagugcagca

SEQ ID NO: 2458276 - RNA, 19 nt, Homo sapiens
  misc_RNA (1)...(19): siRNA sense strand
cugcagguucugaaaggua

SEQ ID NO: 2458277 - RNA, 19 nt, Homo sapiens
  misc_RNA (1)...(19): siRNA sense strand
gcgaauaccuuaaugagac

SEQ ID NO: 2458278 - RNA, 19 nt, Homo sapiens
  misc_RNA (1)...(19): siRNA sense strand
gagcacagcugcagccacu

SEQ ID NO: 2458279 - RNA, 19 nt, Homo sapiens
  misc_RNA (1)...(19): siRNA sense strand
caguagaacuagauucgga

SEQ ID NO: 2458280 - RNA, 19 nt, Homo sapiens
  misc_RNA (1)...(19): siRNA sense strand
gauuaagauuggaagggga

SEQ ID NO: 2458281 - RNA, 19 nt, Homo sapiens
  misc_RNA (1)...(19): siRNA sense strand
gcagcaaaguagaggccug

SEQ ID NO: 2458282 - RNA, 19 nt, Homo sapiens
  misc_RNA (1)...(19): siRNA sense strand
cugcagccacugugcuaaa

SEQ ID NO: 2458283 - RNA, 19 nt, Homo sapiens
  misc_RNA (1)...(19): siRNA sense strand
agguuucaguuaugaguca

SEQ ID NO: 2458284 - RNA, 19 nt, Homo sapiens
  misc_RNA (1)...(19): siRNA sense strand
gguucugaaagguaccaaa

SEQ ID NO: 2458285 - RNA, 19 nt, Homo sapiens
  misc_RNA (1)...(19): siRNA sense strand
aauagaagagaaugcaaca

SEQ ID NO: 2458286 - RNA, 19 nt, Homo sapiens
  misc_RNA (1)...(19): siRNA sense strand
augaaggcauugagcaagu

SEQ ID NO: 2458287 - RNA, 19 nt, Homo sapiens
  misc_RNA (1)...(19): siRNA sense strand
aagaaauagaagagucacu

SEQ ID NO: 2458288 - RNA, 19 nt, Homo sapiens
  misc_RNA (1)...(19): siRNA sense strand
agaagaagaaucaggacaa

SEQ ID NO: 2458289 - RNA, 19 nt, Homo sapiens
  misc_RNA (1)...(19): siRNA sense strand
caguaaacaccgaagggaa

SEQ ID NO: 2458290 - RNA, 19 nt, Homo sapiens
  misc_RNA (1)...(19): siRNA sense strand
ggaacaggaaagaaagcaa

SEQ ID NO: 2458291 - RNA, 19 nt, Homo sapiens
  misc_RNA (1)...(19): siRNA sense strand
gugcaguccuucagggaga

SEQ ID NO: 2458292 - RNA, 19 nt, Homo sapiens
  misc_RNA (1)...(19): siRNA sense strand
aguccaaagaagagcagaa

SEQ ID NO: 2458293 - RNA, 19 nt, Homo sapiens
  misc_RNA (1)...(19): siRNA sense strand
cagagaaguugaugaggca

SEQ ID NO: 2458294 - RNA, 19 nt, Homo sapiens
  misc_RNA (1)...(19): siRNA sense strand
cuggauauugagaaggaaa

SEQ ID NO: 2458295 - RNA, 19 nt, Homo sapiens
  misc_RNA (1)...(19): siRNA sense strand
gcuacagaaacuugaagaa

SEQ ID NO: 2458296 - RNA, 19 nt, Homo sapiens
  misc_RNA (1)...(19): siRNA sense strand
ugugaggagcagugugaua

SEQ ID NO: 2458297 - RNA, 19 nt, Homo sapiens
  misc_RNA (1)...(19): siRNA sense strand
agguuaaaucggagugaca

SEQ ID NO: 2458298 - RNA, 19 nt, Homo sapiens
  misc_RNA (1)...(19): siRNA sense strand
cacaagaagaagaagaaga

SEQ ID NO: 2458299 - RNA, 19 nt, Homo sapiens
  misc_RNA (1)...(19): siRNA sense strand
uagaagaacaacacaggaa

SEQ ID NO: 2458300 - RNA, 19 nt, Homo sapiens
  misc_RNA (1)...(19): siRNA sense strand
agaaagcaacugugccaaa

SEQ ID NO: 2458301 - RNA, 19 nt, Homo sapiens
  misc_RNA (1)...(19): siRNA sense strand
ugguugacaaagagacaaa

SEQ ID NO: 2458302 - RNA, 19 nt, Homo sapiens
  misc_RNA (1)...(19): siRNA sense strand
cagaagacacugaggguag

SEQ ID NO: 2458303 - RNA, 19 nt, Homo sapiens
  misc_RNA (1)...(19): siRNA sense strand
agaugaaugaagacgggaa

SEQ ID NO: 2458304 - RNA, 19 nt, Homo sapiens
  misc_RNA (1)...(19): siRNA sense strand
gugaagaggauguagccau

SEQ ID NO: 2458305 - RNA, 19 nt, Homo sapiens
  misc_RNA (1)...(19): siRNA sense strand
aagaauuagcacaagaaga

SEQ ID NO: 2458306 - RNA, 19 nt, Homo sapiens
  misc_RNA (1)...(19): siRNA sense strand
caggcgugcuggaggauga

SEQ ID NO: 2458307 - RNA, 19 nt, Homo sapiens
  misc_RNA (1)...(19): siRNA sense strand
cagucaguccuuagaagaa

SEQ ID NO: 2458308 - RNA, 19 nt, Homo sapiens
  misc_RNA (1)...(19): siRNA sense strand
agauuggaagagagaagaa

SEQ ID NO: 2458309 - RNA, 19 nt, Homo sapiens
  misc_RNA (1)...(19): siRNA sense strand
acuuagaacuggaccuuca

SEQ ID NO: 2458310 - RNA, 19 nt, Homo sapiens
  misc_RNA (1)...(19): siRNA sense strand
gaacugcagauguggaaaa

SEQ ID NO: 2458311 - RNA, 19 nt, Homo sapiens
  misc_RNA (1)...(19): siRNA sense strand
cagauaggacucagauaca

SEQ ID NO: 2458312 - RNA, 19 nt, Homo sapiens
  misc_RNA (1)...(19): siRNA sense strand
aagaagaagaagaagaauc

SEQ ID NO: 2458313 - RNA, 19 nt, Homo sapiens
  misc_RNA (1)...(19): siRNA sense strand
aagaagaagaaucaggaca

SEQ ID NO: 2458314 - RNA, 19 nt, Homo sapiens
  misc_RNA (1)...(19): siRNA sense strand
agagauugagauuggaaga

SEQ ID NO: 2458315 - RNA, 19 nt, Homo sapiens
  misc_RNA (1)...(19): siRNA sense strand
aguucaaguuucaugguga

SEQ ID NO: 2458316 - RNA, 19 nt, Homo sapiens
  misc_RNA (1)...(19): siRNA sense strand
agcacaagaagaagaagaa

SEQ ID NO: 2458317 - RNA, 19 nt, Homo sapiens
  misc_RNA (1)...(19): siRNA sense strand
augaaaacgagguggucaa

SEQ ID NO: 2458318 - RNA, 19 nt, Homo sapiens
  misc_RNA (1)...(19): siRNA sense strand
uagcacaagaagaagaaga

SEQ ID NO: 2458319 - RNA, 19 nt, Homo sapiens
  misc_RNA (1)...(19): siRNA sense strand
aggauaaagaccuuaauga

SEQ ID NO: 2458320 - RNA, 19 nt, Homo sapiens
  misc_RNA (1)...(19): siRNA sense strand
cugaacaguccaaagaaga

SEQ ID NO: 2458321 - RNA, 19 nt, Homo sapiens
  misc_RNA (1)...(19): siRNA sense strand
uggccgagagauugagauu

SEQ ID NO: 2458322 - RNA, 19 nt, Homo sapiens
  misc_RNA (1)...(19): siRNA sense strand
guucaaguuucauggugau

SEQ ID NO: 2458323 - RNA, 19 nt, Homo sapiens
  misc_RNA (1)...(19): siRNA sense strand
ugagauuggaagagagaag

SEQ ID NO: 2458324 - RNA, 19 nt, Homo sapiens
  misc_RNA (1)...(19): siRNA sense strand
aucagauagauguggauua

SEQ ID NO: 2458325 - RNA, 19 nt, Homo sapiens
  misc_RNA (1)...(19): siRNA sense strand
cuagugugccugagaugaa

SEQ ID NO: 2458326 - RNA, 19 nt, Homo sapiens
  misc_RNA (1)...(19): siRNA sense strand
cgccgcaguuugaggguca

SEQ ID NO: 2458327 - RNA, 19 nt, Homo sapiens
  misc_RNA (1)...(19): siRNA sense strand
cgugaaacaaccuagugaa

SEQ ID NO: 2458328 - RNA, 19 nt, Homo sapiens
  misc_RNA (1)...(19): siRNA sense strand
gauaggacucagauacaau

SEQ ID NO: 2458329 - RNA, 19 nt, Homo sapiens
  misc_RNA (1)...(19): siRNA sense strand
aaagaaagcaacugugcca

SEQ ID NO: 2458330 - RNA, 19 nt, Homo sapiens
  misc_RNA (1)...(19): siRNA sense strand
gauuggaagagagaagaaa

SEQ ID NO: 2458331 - RNA, 19 nt, Homo sapiens
  misc_RNA (1)...(19): siRNA sense strand
acucagauacaaugcaaaa

SEQ ID NO: 2458332 - RNA, 19 nt, Homo sapiens
  misc_RNA (1)...(19): siRNA sense strand
acaagaauuagcacaagaa

SEQ ID NO: 2458333 - RNA, 19 nt, Homo sapiens
  misc_RNA (1)...(19): siRNA sense strand
agagacaaacacugaugaa

SEQ ID NO: 2458334 - RNA, 19 nt, Homo sapiens
  misc_RNA (1)...(19): siRNA sense strand
uggaggaacugaaagcuca

SEQ ID NO: 2458335 - RNA, 19 nt, Homo sapiens
  misc_RNA (1)...(19): siRNA sense strand
cgagagauugagauuggaa

SEQ ID NO: 2458336 - RNA, 19 nt, Homo sapiens
  misc_RNA (1)...(19): siRNA sense strand
uggauauugagaaggaaaa

SEQ ID NO: 2458337 - RNA, 19 nt, Homo sapiens
  misc_RNA (1)...(19): siRNA sense strand
augaagacgggaacaggaa

SEQ ID NO: 2458338 - RNA, 19 nt, Homo sapiens
  misc_RNA (1)...(19): siRNA sense strand
gugagaaacuccaccgaac

SEQ ID NO: 2458339 - RNA, 19 nt, Homo sapiens
  misc_RNA (1)...(19): siRNA sense strand
gaagaaaagagcugcuaca

SEQ ID NO: 2458340 - RNA, 19 nt, Homo sapiens
  misc_RNA (1)...(19): siRNA sense strand
agagaaaagcgguuacauu

SEQ ID NO: 2458341 - RNA, 19 nt, Homo sapiens
  misc_RNA (1)...(19): siRNA sense strand
gggcacuggauauugagaa

SEQ ID NO: 2458342 - RNA, 19 nt, Homo sapiens
  misc_RNA (1)...(19): siRNA sense strand
agaagaacaacacaggaau

SEQ ID NO: 2458343 - RNA, 19 nt, Homo sapiens
  misc_RNA (1)...(19): siRNA sense strand
ugaagcaagcugagaagca

SEQ ID NO: 2458344 - RNA, 19 nt, Homo sapiens
  misc_RNA (1)...(19): siRNA sense strand
cugagaagcaggcugaaca

SEQ ID NO: 2458345 - RNA, 19 nt, Homo sapiens
  misc_RNA (1)...(19): siRNA sense strand
cagaggauaaagaccuuaa

SEQ ID NO: 2458346 - RNA, 19 nt, Homo sapiens
  misc_RNA (1)...(19): siRNA sense strand
cuauagacuuggaugcagu

SEQ ID NO: 2458347 - RNA, 19 nt, Homo sapiens
  misc_RNA (1)...(19): siRNA sense strand
ggcuaacaaugcuaagaga

SEQ ID NO: 2458348 - RNA, 19 nt, Homo sapiens
  misc_RNA (1)...(19): siRNA sense strand
ccuagaagcugaaaggcag

SEQ ID NO: 2458349 - RNA, 19 nt, Homo sapiens
  misc_RNA (1)...(19): siRNA sense strand
agauugagauuggaagaga

SEQ ID NO: 2458350 - RNA, 19 nt, Homo sapiens
  misc_RNA (1)...(19): siRNA sense strand
aguaaacaccgaagggaag

SEQ ID NO: 2458351 - RNA, 19 nt, Homo sapiens
  misc_RNA (1)...(19): siRNA sense strand
cucaugaaauuguggcuga

SEQ ID NO: 2458352 - RNA, 19 nt, Homo sapiens
  misc_RNA (1)...(19): siRNA sense strand
augaaauuguggcugaaaa

SEQ ID NO: 2458353 - RNA, 19 nt, Homo sapiens
  misc_RNA (1)...(19): siRNA sense strand
cugcauucgaccugagaaa

SEQ ID NO: 2458354 - RNA, 19 nt, Homo sapiens
  misc_RNA (1)...(19): siRNA sense strand
uggaggagucagaggguuu

SEQ ID NO: 2458355 - RNA, 19 nt, Homo sapiens
  misc_RNA (1)...(19): siRNA sense strand
ugagaaagccaguggagcu

SEQ ID NO: 2458356 - RNA, 19 nt, Homo sapiens
  misc_RNA (1)...(19): siRNA sense strand
agucaacuacagagcacaa

SEQ ID NO: 2458357 - RNA, 19 nt, Homo sapiens
  misc_RNA (1)...(19): siRNA sense strand
gggcaagaauggagcuguc

SEQ ID NO: 2458358 - RNA, 19 nt, Homo sapiens
  misc_RNA (1)...(19): siRNA sense strand
cuacagagcacaagccagu

SEQ ID NO: 2458359 - RNA, 19 nt, Homo sapiens
  misc_RNA (1)...(19): siRNA sense strand
ccauuaacaaggaacccaa

SEQ ID NO: 2458360 - RNA, 19 nt, Homo sapiens
  misc_RNA (1)...(19): siRNA sense strand
cagauggugaagaaggcua

SEQ ID NO: 2458361 - RNA, 19 nt, Homo sapiens
  misc_RNA (1)...(19): siRNA sense strand
agguggaugggaaggagua

SEQ ID NO: 2458362 - RNA, 19 nt, Homo sapiens
  misc_RNA (1)...(19): siRNA sense strand
gaucacagcccuagagguc

SEQ ID NO: 2458363 - RNA, 19 nt, Homo sapiens
  misc_RNA (1)...(19): siRNA sense strand
agccaguggagcuuggaaa

SEQ ID NO: 2458364 - RNA, 19 nt, Homo sapiens
  misc_RNA (1)...(19): siRNA sense strand
gcgcagaccauguggccua

SEQ ID NO: 2458365 - RNA, 19 nt, Homo sapiens
  misc_RNA (1)...(19): siRNA sense strand
uggaaaugucccuggcaga

SEQ ID NO: 2458366 - RNA, 19 nt, Homo sapiens
  misc_RNA (1)...(19): siRNA sense strand
gcacaagcacugucagcca

SEQ ID NO: 2458367 - RNA, 19 nt, Homo sapiens
  misc_RNA (1)...(19): siRNA sense strand
aggcagaauaccagcggca

SEQ ID NO: 2458368 - RNA, 19 nt, Homo sapiens
  misc_RNA (1)...(19): siRNA sense strand
ugugaacgcuguagccgaa

SEQ ID NO: 2458369 - RNA, 19 nt, Homo sapiens
  misc_RNA (1)...(19): siRNA sense strand
cagugauugcuuugcagaa

SEQ ID NO: 2458370 - RNA, 19 nt, Homo sapiens
  misc_RNA (1)...(19): siRNA sense strand
ccaagaaccuccuggacuc

SEQ ID NO: 2458371 - RNA, 19 nt, Homo sapiens
  misc_RNA (1)...(19): siRNA sense strand
aggacuaucaggcgaguga

SEQ ID NO: 2458372 - RNA, 19 nt, Homo sapiens
  misc_RNA (1)...(19): siRNA sense strand
agaaagugcgugugggcgu

SEQ ID NO: 2458373 - RNA, 19 nt, Homo sapiens
  misc_RNA (1)...(19): siRNA sense strand
gagaagagcgaguugguga

SEQ ID NO: 2458374 - RNA, 19 nt, Homo sapiens
  misc_RNA (1)...(19): siRNA sense strand
gagcagagcuggauggacc

SEQ ID NO: 2458375 - RNA, 19 nt, Homo sapiens
  misc_RNA (1)...(19): siRNA sense strand
caaugauggagaagagcga

SEQ ID NO: 2458376 - RNA, 19 nt, Homo sapiens
  misc_RNA (1)...(19): siRNA sense strand
gcaaaguggucguaccugu

SEQ ID NO: 2458377 - RNA, 19 nt, Homo sapiens
  misc_RNA (1)...(19): siRNA sense strand
acuucugccuggagauauu

SEQ ID NO: 2458378 - RNA, 19 nt, Homo sapiens
  misc_RNA (1)...(19): siRNA sense strand
agaagagcgaguuggugaa

SEQ ID NO: 2458379 - RNA, 19 nt, Homo sapiens
  misc_RNA (1)...(19): siRNA sense strand
acgcggugcuguugggcau

SEQ ID NO: 2458380 - RNA, 19 nt, Homo sapiens
  misc_RNA (1)...(19): siRNA sense strand
ggacaaaaggagggcaaca

SEQ ID NO: 2458381 - RNA, 19 nt, Homo sapiens
  misc_RNA (1)...(19): siRNA sense strand
ccgccaacaccucaggcaa

SEQ ID NO: 2458382 - RNA, 19 nt, Homo sapiens
  misc_RNA (1)...(19): siRNA sense strand
gccuggagauauugcccua

SEQ ID NO: 2458383 - RNA, 19 nt, Homo sapiens
  misc_RNA (1)...(19): siRNA sense strand
ggacaaagaugaagaggcu

SEQ ID NO: 2458384 - RNA, 19 nt, Homo sapiens
  misc_RNA (1)...(19): siRNA sense strand
gggaguaucguuaaggaga

SEQ ID NO: 2458385 - RNA, 19 nt, Homo sapiens
  misc_RNA (1)...(19): siRNA sense strand
cacaaaaguaugagaauga

SEQ ID NO: 2458386 - RNA, 19 nt, Homo sapiens
  misc_RNA (1)...(19): siRNA sense strand
aggcuuaucaugagaagau

SEQ ID NO: 2458387 - RNA, 19 nt, Homo sapiens
  misc_RNA (1)...(19): siRNA sense strand
cgaagaugaggcuggaaca

SEQ ID NO: 2458388 - RNA, 19 nt, Homo sapiens
  misc_RNA (1)...(19): siRNA sense strand
gcugcaagaccuagagacu

SEQ ID NO: 2458389 - RNA, 19 nt, Homo sapiens
  misc_RNA (1)...(19): siRNA sense strand
gggcaaacuaugaaaagau

SEQ ID NO: 2458390 - RNA, 19 nt, Homo sapiens
  misc_RNA (1)...(19): siRNA sense strand
cacuauucagacagagaaa

SEQ ID NO: 2458391 - RNA, 19 nt, Homo sapiens
  misc_RNA (1)...(19): siRNA sense strand
auguagaaacaguaaccaa

SEQ ID NO: 2458392 - RNA, 19 nt, Homo sapiens
  misc_RNA (1)...(19): siRNA sense strand
uuguauccaaggugggaaa

SEQ ID NO: 2458393 - RNA, 19 nt, Homo sapiens
  misc_RNA (1)...(19): siRNA sense strand
agauauagaagucaggcuu

SEQ ID NO: 2458394 - RNA, 19 nt, Homo sapiens
  misc_RNA (1)...(19): siRNA sense strand
accuagagacugugauuga

SEQ ID NO: 2458395 - RNA, 19 nt, Homo sapiens
  misc_RNA (1)...(19): siRNA sense strand
agacugugauugaaggacu

SEQ ID NO: 2458396 - RNA, 19 nt, Homo sapiens
  misc_RNA (1)...(19): siRNA sense strand
accagaaaucagauagaga

SEQ ID NO: 2458397 - RNA, 19 nt, Homo sapiens
  misc_RNA (1)...(19): siRNA sense strand
gaaaucagauagagacggu

SEQ ID NO: 2458398 - RNA, 19 nt, Homo sapiens
  misc_RNA (1)...(19): siRNA sense strand
aggagauaacccagggaaa

SEQ ID NO: 2458399 - RNA, 19 nt, Homo sapiens
  misc_RNA (1)...(19): siRNA sense strand
aggcagagacagaggagau

SEQ ID NO: 2458400 - RNA, 19 nt, Homo sapiens
  misc_RNA (1)...(19): siRNA sense strand
ccaugaagcuacuggcuca

SEQ ID NO: 2458401 - RNA, 19 nt, Homo sapiens
  misc_RNA (1)...(19): siRNA sense strand
uuguagaggcagagacaga

SEQ ID NO: 2458402 - RNA, 19 nt, Homo sapiens
  misc_RNA (1)...(19): siRNA sense strand
ccucauagaaacagugacu

SEQ ID NO: 2458403 - RNA, 19 nt, Homo sapiens
  misc_RNA (1)...(19): siRNA sense strand
gugauagugacaugggauu

SEQ ID NO: 2458404 - RNA, 19 nt, Homo sapiens
  misc_RNA (1)...(19): siRNA sense strand
aagagaaccaugaggaagu

SEQ ID NO: 2458405 - RNA, 19 nt, Homo sapiens
  misc_RNA (1)...(19): siRNA sense strand
aaaaggaaggggauagaaa

SEQ ID NO: 2458406 - RNA, 19 nt, Homo sapiens
  misc_RNA (1)...(19): siRNA sense strand
aauuugaagacgaaaguga

SEQ ID NO: 2458407 - RNA, 19 nt, Homo sapiens
  misc_RNA (1)...(19): siRNA sense strand
cagcaacucaagaagaaaa

SEQ ID NO: 2458408 - RNA, 19 nt, Homo sapiens
  misc_RNA (1)...(19): siRNA sense strand
uguuguagaggcagagaca

SEQ ID NO: 2458409 - RNA, 19 nt, Homo sapiens
  misc_RNA (1)...(19): siRNA sense strand
ggggauagaaagauggcau

SEQ ID NO: 2458410 - RNA, 19 nt, Homo sapiens
  misc_RNA (1)...(19): siRNA sense strand
gaaagauggcauagagcug

SEQ ID NO: 2458411 - RNA, 19 nt, Homo sapiens
  misc_RNA (1)...(19): siRNA sense strand
acuugauguuguagaggca

SEQ ID NO: 2458412 - RNA, 19 nt, Homo sapiens
  misc_RNA (1)...(19): siRNA sense strand
aggauauccaagagaacca

SEQ ID NO: 2458413 - RNA, 19 nt, Homo sapiens
  misc_RNA (1)...(19): siRNA sense strand
uucaaaugcagguggauga

SEQ ID NO: 2458414 - RNA, 19 nt, Homo sapiens
  misc_RNA (1)...(19): siRNA sense strand
aagaagcguggcauggaaa

SEQ ID NO: 2458415 - RNA, 19 nt, Homo sapiens
  misc_RNA (1)...(19): siRNA sense strand
uggccaagcuggagcguga

SEQ ID NO: 2458416 - RNA, 19 nt, Homo sapiens
  misc_RNA (1)...(19): siRNA sense strand
aggaaaugauggagaggcu

SEQ ID NO: 2458417 - RNA, 19 nt, Homo sapiens
  misc_RNA (1)...(19): siRNA sense strand
ccauggaacaacugagaca

SEQ ID NO: 2458418 - RNA, 19 nt, Homo sapiens
  misc_RNA (1)...(19): siRNA sense strand
gagcaggaaaugauggaga

SEQ ID NO: 2458419 - RNA, 19 nt, Homo sapiens
  misc_RNA (1)...(19): siRNA sense strand
aggcaaaacacuagcugaa

SEQ ID NO: 2458420 - RNA, 19 nt, Homo sapiens
  misc_RNA (1)...(19): siRNA sense strand
caagaaaaggagaggcaga

SEQ ID NO: 2458421 - RNA, 19 nt, Homo sapiens
  misc_RNA (1)...(19): siRNA sense strand
auggaacaacugagacaaa

SEQ ID NO: 2458422 - RNA, 19 nt, Homo sapiens
  misc_RNA (1)...(19): siRNA sense strand
gaaaugauggagaggcuca

SEQ ID NO: 2458423 - RNA, 19 nt, Homo sapiens
  misc_RNA (1)...(19): siRNA sense strand
cucaagaacaauuaggcaa

SEQ ID NO: 2458424 - RNA, 19 nt, Homo sapiens
  misc_RNA (1)...(19): siRNA sense strand
gaacaauuaggcaaggaga

SEQ ID NO: 2458425 - RNA, 19 nt, Homo sapiens
  misc_RNA (1)...(19): siRNA sense strand
ggaaaaucuaguuaggaau

SEQ ID NO: 2458426 - RNA, 19 nt, Homo sapiens
  misc_RNA (1)...(19): siRNA sense strand
aaggagaggcagagaauac

SEQ ID NO: 2458427 - RNA, 19 nt, Homo sapiens
  misc_RNA (1)...(19): siRNA sense strand
uaggcaaggagaugagaau

SEQ ID NO: 2458428 - RNA, 19 nt, Homo sapiens
  misc_RNA (1)...(19): siRNA sense strand
aguuggaaaugcaagaaaa

SEQ ID NO: 2458429 - RNA, 19 nt, Homo sapiens
  misc_RNA (1)...(19): siRNA sense strand
gcaccuaacuugagcagag

SEQ ID NO: 2458430 - RNA, 19 nt, Homo sapiens
  misc_RNA (1)...(19): siRNA sense strand
gacaaaaggaaauggccaa

SEQ ID NO: 2458431 - RNA, 19 nt, Homo sapiens
  misc_RNA (1)...(19): siRNA sense strand
aguggaagaacuugaugaa

SEQ ID NO: 2458432 - RNA, 19 nt, Homo sapiens
  misc_RNA (1)...(19): siRNA sense strand
agaacuacagagagcucaa

SEQ ID NO: 2458433 - RNA, 19 nt, Homo sapiens
  misc_RNA (1)...(19): siRNA sense strand
aggagaugagaaugaauau

SEQ ID NO: 2458434 - RNA, 19 nt, Homo sapiens
  misc_RNA (1)...(19): siRNA sense strand
aacacuagacucaggcaaa

SEQ ID NO: 2458435 - RNA, 19 nt, Homo sapiens
  misc_RNA (1)...(19): siRNA sense strand
uggagaggcucaaagcaga

SEQ ID NO: 2458436 - RNA, 19 nt, Homo sapiens
  misc_RNA (1)...(19): siRNA sense strand
ccaguggauccgauagaau

SEQ ID NO: 2458437 - RNA, 19 nt, Homo sapiens
  misc_RNA (1)...(19): siRNA sense strand
aggaaauggccaagcugga

SEQ ID NO: 2458438 - RNA, 19 nt, Homo sapiens
  misc_RNA (1)...(19): siRNA sense strand
agagaauacaagaacuaca

SEQ ID NO: 2458439 - RNA, 19 nt, Homo sapiens
  misc_RNA (1)...(19): siRNA sense strand
gaggcagagaauacaagaa

SEQ ID NO: 2458440 - RNA, 19 nt, Homo sapiens
  misc_RNA (1)...(19): siRNA sense strand
uggaagaacuugaugaacc

SEQ ID NO: 2458441 - RNA, 19 nt, Homo sapiens
  misc_RNA (1)...(19): siRNA sense strand
gcucaagaacaauuaggca

SEQ ID NO: 2458442 - RNA, 19 nt, Homo sapiens
  misc_RNA (1)...(19): siRNA sense strand
caacacuagacucaggcaa

SEQ ID NO: 2458443 - RNA, 19 nt, Homo sapiens
  misc_RNA (1)...(19): siRNA sense strand
ucaacaugauagaggaaaa

SEQ ID NO: 2458444 - RNA, 19 nt, Homo sapiens
  misc_RNA (1)...(19): siRNA sense strand
agggaugaauuuugggaua

SEQ ID NO: 2458445 - RNA, 19 nt, Homo sapiens
  misc_RNA (1)...(19): siRNA sense strand
cggaaagagauuugggaug

SEQ ID NO: 2458446 - RNA, 19 nt, Homo sapiens
  misc_RNA (1)...(19): siRNA sense strand
ugauagaggaaaagagcga

SEQ ID NO: 2458447 - RNA, 19 nt, Homo sapiens
  misc_RNA (1)...(19): siRNA sense strand
acccaacaccaguggagaa

SEQ ID NO: 2458448 - RNA, 19 nt, Homo sapiens
  misc_RNA (1)...(19): siRNA sense strand
aggaaaagagcgacauaga

SEQ ID NO: 2458449 - RNA, 19 nt, Homo sapiens
  misc_RNA (1)...(19): siRNA sense strand
ccggaaagagauuugggau

SEQ ID NO: 2458450 - RNA, 19 nt, Homo sapiens
  misc_RNA (1)...(19): siRNA sense strand
cugaagaucccaaaggacu

SEQ ID NO: 2458451 - RNA, 19 nt, Homo sapiens
  misc_RNA (1)...(19): siRNA sense strand
gcuaaaugaugaagggaag

SEQ ID NO: 2458452 - RNA, 19 nt, Homo sapiens
  misc_RNA (1)...(19): siRNA sense strand
ccauggaaucagagaagau

SEQ ID NO: 2458453 - RNA, 19 nt, Homo sapiens
  misc_RNA (1)...(19): siRNA sense strand
agcuaaaugaugaagggaa

SEQ ID NO: 2458454 - RNA, 19 nt, Homo sapiens
  misc_RNA (1)...(19): siRNA sense strand
ucagagaagcaggaggaaa

SEQ ID NO: 2458455 - RNA, 19 nt, Homo sapiens
  misc_RNA (1)...(19): siRNA sense strand
ugaaagaucuaaaggagcu

SEQ ID NO: 2458456 - RNA, 19 nt, Homo sapiens
  misc_RNA (1)...(19): siRNA sense strand
ccauuaguacugugagcau

SEQ ID NO: 2458457 - RNA, 19 nt, Homo sapiens
  misc_RNA (1)...(19): siRNA sense strand
acauauuccgggaugaaau

SEQ ID NO: 2458458 - RNA, 19 nt, Homo sapiens
  misc_RNA (1)...(19): siRNA sense strand
guugaaagaucuaaaggag

SEQ ID NO: 2458459 - RNA, 19 nt, Homo sapiens
  misc_RNA (1)...(19): siRNA sense strand
gagaaauaaaaguggccau

SEQ ID NO: 2458460 - RNA, 19 nt, Homo sapiens
  misc_RNA (1)...(19): siRNA sense strand
augcuuacuuucuagacaa

SEQ ID NO: 2458461 - RNA, 19 nt, Homo sapiens
  misc_RNA (1)...(19): siRNA sense strand
agaagguccaugugguuau

SEQ ID NO: 2458462 - RNA, 19 nt, Homo sapiens
  misc_RNA (1)...(19): siRNA sense strand
acugaaugacaauggcuua

SEQ ID NO: 2458463 - RNA, 19 nt, Homo sapiens
  misc_RNA (1)...(19): siRNA sense strand
ucaucaaaucaaacaggaa

SEQ ID NO: 2458464 - RNA, 19 nt, Homo sapiens
  misc_RNA (1)...(19): siRNA sense strand
aggacaaacagaacaacau

SEQ ID NO: 2458465 - RNA, 19 nt, Homo sapiens
  misc_RNA (1)...(19): siRNA sense strand
ccacuaccgcagacggcaa

SEQ ID NO: 2458466 - RNA, 19 nt, Homo sapiens
  misc_RNA (1)...(19): siRNA sense strand
gauaagucacucuugggaa

SEQ ID NO: 2458467 - RNA, 19 nt, Homo sapiens
  misc_RNA (1)...(19): siRNA sense strand
cauguuaagaauuaggaca

SEQ ID NO: 2458468 - RNA, 19 nt, Homo sapiens
  misc_RNA (1)...(19): siRNA sense strand
auuaggacaaacagaacaa

SEQ ID NO: 2458469 - RNA, 19 nt, Homo sapiens
  misc_RNA (1)...(19): siRNA sense strand
caggaagaagccauggauu

SEQ ID NO: 2458470 - RNA, 19 nt, Homo sapiens
  misc_RNA (1)...(19): siRNA sense strand
cuugaaacugaaugacaau

SEQ ID NO: 2458471 - RNA, 19 nt, Homo sapiens
  misc_RNA (1)...(19): siRNA sense strand
ccaucaagaagacugggaa

SEQ ID NO: 2458472 - RNA, 19 nt, Homo sapiens
  misc_RNA (1)...(19): siRNA sense strand
gugagauacagauaaguca

SEQ ID NO: 2458473 - RNA, 19 nt, Homo sapiens
  misc_RNA (1)...(19): siRNA sense strand
gggagaugaaggagagugu

SEQ ID NO: 2458474 - RNA, 19 nt, Homo sapiens
  misc_RNA (1)...(19): siRNA sense strand
gacaagaacgugcgggaga

SEQ ID NO: 2458475 - RNA, 19 nt, Homo sapiens
  misc_RNA (1)...(19): siRNA sense strand
gagacaagaacgugcggga

SEQ ID NO: 2458476 - RNA, 19 nt, Homo sapiens
  misc_RNA (1)...(19): siRNA sense strand
cgucccagcuagagccaga

SEQ ID NO: 2458477 - RNA, 19 nt, Homo sapiens
  misc_RNA (1)...(19): siRNA sense strand
aggugguggugcagacauu

SEQ ID NO: 2458478 - RNA, 19 nt, Homo sapiens
  misc_RNA (1)...(19): siRNA sense strand
agaacgugcgggagaugaa

SEQ ID NO: 2458479 - RNA, 19 nt, Homo sapiens
  misc_RNA (1)...(19): siRNA sense strand
ccgagauggaccaguucua

SEQ ID NO: 2458480 - RNA, 19 nt, Homo sapiens
  misc_RNA (1)...(19): siRNA sense strand
gugcgggagaugaaggaga

SEQ ID NO: 2458481 - RNA, 19 nt, Homo sapiens
  misc_RNA (1)...(19): siRNA sense strand
acgcacagaugcaggccuu

SEQ ID NO: 2458482 - RNA, 19 nt, Homo sapiens
  misc_RNA (1)...(19): siRNA sense strand
ccuucgugucugagaguca

SEQ ID NO: 2458483 - RNA, 19 nt, Homo sapiens
  misc_RNA (1)...(19): siRNA sense strand
cagcacauggagaagaaca

SEQ ID NO: 2458484 - RNA, 19 nt, Homo sapiens
  misc_RNA (1)...(19): siRNA sense strand
acgugaaggcucuggagga

SEQ ID NO: 2458485 - RNA, 19 nt, Homo sapiens
  misc_RNA (1)...(19): siRNA sense strand
acggcuggcucuacggcaa

SEQ ID NO: 2458486 - RNA, 19 nt, Homo sapiens
  misc_RNA (1)...(19): siRNA sense strand
ggaaauggcuucaugggau

SEQ ID NO: 2458487 - RNA, 19 nt, Homo sapiens
  misc_RNA (1)...(19): siRNA sense strand
uuuaugaggaacagagaaa

SEQ ID NO: 2458488 - RNA, 19 nt, Homo sapiens
  misc_RNA (1)...(19): siRNA sense strand
aaaccaaaauggaggaaau

SEQ ID NO: 2458489 - RNA, 19 nt, Homo sapiens
  misc_RNA (1)...(19): siRNA sense strand
ugcaauagagagagagaau

SEQ ID NO: 2458490 - RNA, 19 nt, Homo sapiens
  misc_RNA (1)...(19): siRNA sense strand
aguugaagaccaugcauaa

SEQ ID NO: 2458491 - RNA, 19 nt, Homo sapiens
  misc_RNA (1)...(19): siRNA sense strand
gugcuuaaggagagcggaa

SEQ ID NO: 2458492 - RNA, 19 nt, Homo sapiens
  misc_RNA (1)...(19): siRNA sense strand
gaguaucaagaauggguaa

SEQ ID NO: 2458493 - RNA, 19 nt, Homo sapiens
  misc_RNA (1)...(19): siRNA sense strand
acucaaauuuccuguucaa

SEQ ID NO: 2458494 - RNA, 19 nt, Homo sapiens
  misc_RNA (1)...(19): siRNA sense strand
ucaugcaggaauugggaaa

SEQ ID NO: 2458495 - RNA, 19 nt, Homo sapiens
  misc_RNA (1)...(19): siRNA sense strand
augauaugucagaggaaau

SEQ ID NO: 2458496 - RNA, 19 nt, Homo sapiens
  misc_RNA (1)...(19): siRNA sense strand
agcaagaccuagaaaauaa

SEQ ID NO: 2458497 - RNA, 19 nt, Homo sapiens
  misc_RNA (1)...(19): siRNA sense strand
gggccaaagcuuaugcuga

SEQ ID NO: 2458498 - RNA, 19 nt, Homo sapiens
  misc_RNA (1)...(19): siRNA sense strand
ccagcaagaccuagaaaau

SEQ ID NO: 2458499 - RNA, 19 nt, Homo sapiens
  misc_RNA (1)...(19): siRNA sense strand
ggaaauuaaaguucagcca

SEQ ID NO: 2458500 - RNA, 19 nt, Homo sapiens
  misc_RNA (1)...(19): siRNA sense strand
aggaaaugaugauaagacu

SEQ ID NO: 2458501 - RNA, 19 nt, Homo sapiens
  misc_RNA (1)...(19): siRNA sense strand
caguugaagaccaugcaua

SEQ ID NO: 2458502 - RNA, 19 nt, Homo sapiens
  misc_RNA (1)...(19): siRNA sense strand
acgagagagacaagguauu

SEQ ID NO: 2458503 - RNA, 19 nt, Homo sapiens
  misc_RNA (1)...(19): siRNA sense strand
gguaauaaaacuucaccaa

SEQ ID NO: 2458504 - RNA, 19 nt, Homo sapiens
  misc_RNA (1)...(19): siRNA sense strand
gcaugcaaggccugaagaa

SEQ ID NO: 2458505 - RNA, 19 nt, Homo sapiens
  misc_RNA (1)...(19): siRNA sense strand
uggaggaauuucuaggaca

SEQ ID NO: 2458506 - RNA, 19 nt, Homo sapiens
  misc_RNA (1)...(19): siRNA sense strand
gaaggauuuaugaggaaca

SEQ ID NO: 2458507 - RNA, 19 nt, Homo sapiens
  misc_RNA (1)...(19): siRNA sense strand
caucacaacaauaagcauu

SEQ ID NO: 2458508 - RNA, 19 nt, Homo sapiens
  misc_RNA (1)...(19): siRNA sense strand
gugaaagagauguggagcu

SEQ ID NO: 2458509 - RNA, 19 nt, Homo sapiens
  misc_RNA (1)...(19): siRNA sense strand
acuccgaaauauacucaaa

SEQ ID NO: 2458510 - RNA, 19 nt, Homo sapiens
  misc_RNA (1)...(19): siRNA sense strand
caagguauugaaauggaaa

SEQ ID NO: 2458511 - RNA, 19 nt, Homo sapiens
  misc_RNA (1)...(19): siRNA sense strand
auggaggaaaugaugauaa

SEQ ID NO: 2458512 - RNA, 19 nt, Homo sapiens
  misc_RNA (1)...(19): siRNA sense strand
gacucaguuuauagaagaa

SEQ ID NO: 2458513 - RNA, 19 nt, Homo sapiens
  misc_RNA (1)...(19): siRNA sense strand
cgauuaugauagagaugcu

SEQ ID NO: 2458514 - RNA, 19 nt, Homo sapiens
  misc_RNA (1)...(19): siRNA sense strand
gaaauuaaaguucagccaa

SEQ ID NO: 2458515 - RNA, 19 nt, Homo sapiens
  misc_RNA (1)...(19): siRNA sense strand
uguggaugaccaugugaaa

SEQ ID NO: 2458516 - RNA, 19 nt, Homo sapiens
  misc_RNA (1)...(19): siRNA sense strand
cauuaugggacuccgaaau

SEQ ID NO: 2458517 - RNA, 19 nt, Homo sapiens
  misc_RNA (1)...(19): siRNA sense strand
ccaugcauaauuugagauu

SEQ ID NO: 2458518 - RNA, 19 nt, Homo sapiens
  misc_RNA (1)...(19): siRNA sense strand
ggaggaauuucuaggacag

SEQ ID NO: 2458519 - RNA, 19 nt, Homo sapiens
  misc_RNA (1)...(19): siRNA sense strand
ccagcugggaugaagauuu

SEQ ID NO: 2458520 - RNA, 19 nt, Homo sapiens
  misc_RNA (1)...(19): siRNA sense strand
acugauuggugaaagagau

SEQ ID NO: 2458521 - RNA, 19 nt, Homo sapiens
  misc_RNA (1)...(19): siRNA sense strand
acaagguauugaaauggaa

SEQ ID NO: 2458522 - RNA, 19 nt, Homo sapiens
  misc_RNA (1)...(19): siRNA sense strand
ccuuagugaggaaauuaaa

SEQ ID NO: 2458523 - RNA, 19 nt, Homo sapiens
  misc_RNA (1)...(19): siRNA sense strand
auucugcaauagagagaga

SEQ ID NO: 2458524 - RNA, 19 nt, Homo sapiens
  misc_RNA (1)...(19): siRNA sense strand
ccaaaauggaggaaaugau

SEQ ID NO: 2458525 - RNA, 19 nt, Homo sapiens
  misc_RNA (1)...(19): siRNA sense strand
gcuuaaggagagcggaacu

SEQ ID NO: 2458526 - RNA, 19 nt, Homo sapiens
  misc_RNA (1)...(19): siRNA sense strand
gugaaguagauuuacauca

SEQ ID NO: 2458527 - RNA, 19 nt, Homo sapiens
  misc_RNA (1)...(19): siRNA sense strand
gagcccaguugaagaccau

SEQ ID NO: 2458528 - RNA, 19 nt, Homo sapiens
  misc_RNA (1)...(19): siRNA sense strand
acuugauucuggaaaccaa

SEQ ID NO: 2458529 - RNA, 19 nt, Homo sapiens
  misc_RNA (1)...(19): siRNA sense strand
ccaugacaucacaacaaua

SEQ ID NO: 2458530 - RNA, 19 nt, Homo sapiens
  misc_RNA (1)...(19): siRNA sense strand
ugaaaucaggugaaguaga

SEQ ID NO: 2458531 - RNA, 19 nt, Homo sapiens
  misc_RNA (1)...(19): siRNA sense strand
agauguguaccaugacuua

SEQ ID NO: 2458532 - RNA, 19 nt, Homo sapiens
  misc_RNA (1)...(19): siRNA sense strand
acuuaggagcccaguugaa

SEQ ID NO: 2458533 - RNA, 19 nt, Homo sapiens
  misc_RNA (1)...(19): siRNA sense strand
agauucugcaauagagaga

SEQ ID NO: 2458534 - RNA, 19 nt, Homo sapiens
  misc_RNA (1)...(19): siRNA sense strand
cugagaggaacuauuuaaa

SEQ ID NO: 2458535 - RNA, 19 nt, Homo sapiens
  misc_RNA (1)...(19): siRNA sense strand
caugugaaaucgggaaaca

SEQ ID NO: 2458536 - RNA, 19 nt, Homo sapiens
  misc_RNA (1)...(19): siRNA sense strand
ggguacaguuccagggcaa

SEQ ID NO: 2458537 - RNA, 19 nt, Homo sapiens
  misc_RNA (1)...(19): siRNA sense strand
cccaauggcucgauggcaa

SEQ ID NO: 2458538 - RNA, 19 nt, Homo sapiens
  misc_RNA (1)...(19): siRNA sense strand
uguuaagauuccagugaga

SEQ ID NO: 2458539 - RNA, 19 nt, Homo sapiens
  misc_RNA (1)...(19): siRNA sense strand
gaaaguuacugcauggaca

SEQ ID NO: 2458540 - RNA, 19 nt, Homo sapiens
  misc_RNA (1)...(19): siRNA sense strand
agugauuaacaauggcaaa

SEQ ID NO: 2458541 - RNA, 19 nt, Homo sapiens
  misc_RNA (1)...(19): siRNA sense strand
augcauucagagugauuaa

SEQ ID NO: 2458542 - RNA, 19 nt, Homo sapiens
  misc_RNA (1)...(19): siRNA sense strand
ccgaagacgccuauggaug

SEQ ID NO: 2458543 - RNA, 19 nt, Homo sapiens
  misc_RNA (1)...(19): siRNA sense strand
ccuaauggggcuggagaua

SEQ ID NO: 2458544 - RNA, 19 nt, Homo sapiens
  misc_RNA (1)...(19): siRNA sense strand
ugaagauuuacgagagaaa

SEQ ID NO: 2458545 - RNA, 19 nt, Homo sapiens
  misc_RNA (1)...(19): siRNA sense strand
uggaauugaucucgccaaa

SEQ ID NO: 2458546 - RNA, 19 nt, Homo sapiens
  misc_RNA (1)...(19): siRNA sense strand
gcgaagacuuggagcccga

SEQ ID NO: 2458547 - RNA, 19 nt, Homo sapiens
  misc_RNA (1)...(19): siRNA sense strand
ggaaaugaggauagcgcca

SEQ ID NO: 2458548 - RNA, 19 nt, Homo sapiens
  misc_RNA (1)...(19): siRNA sense strand
cuuuaaucgccuugacuua

SEQ ID NO: 2458549 - RNA, 19 nt, Homo sapiens
  misc_RNA (1)...(19): siRNA sense strand
gagaauuauguccgugaaa

SEQ ID NO: 2458550 - RNA, 19 nt, Homo sapiens
  misc_RNA (1)...(19): siRNA sense strand
gcuguuuacaauagagcaa

SEQ ID NO: 2458551 - RNA, 19 nt, Homo sapiens
  misc_RNA (1)...(19): siRNA sense strand
ugaguuugaaucagagaaa

SEQ ID NO: 2458552 - RNA, 19 nt, Homo sapiens
  misc_RNA (1)...(19): siRNA sense strand
caggcugggaagaaagaaa

SEQ ID NO: 2458553 - RNA, 19 nt, Homo sapiens
  misc_RNA (1)...(19): siRNA sense strand
gauuugaagggguggauua

SEQ ID NO: 2458554 - RNA, 19 nt, Homo sapiens
  misc_RNA (1)...(19): siRNA sense strand
cauuguacguagcggauga

SEQ ID NO: 2458555 - RNA, 19 nt, Homo sapiens
  misc_RNA (1)...(19): siRNA sense strand
acgccuucuuggagggauu

SEQ ID NO: 2458556 - RNA, 19 nt, Homo sapiens
  misc_RNA (1)...(19): siRNA sense strand
acucaguggcacagaccaa

SEQ ID NO: 2458557 - RNA, 19 nt, Homo sapiens
  misc_RNA (1)...(19): siRNA sense strand
aaaugaggauagcgccaaa

SEQ ID NO: 2458558 - RNA, 19 nt, Homo sapiens
  misc_RNA (1)...(19): siRNA sense strand
gaguccuaucggagaauua

SEQ ID NO: 2458559 - RNA, 19 nt, Homo sapiens
  misc_RNA (1)...(19): siRNA sense strand
gugauguggaugugaauga

SEQ ID NO: 2458560 - RNA, 19 nt, Homo sapiens
  misc_RNA (1)...(19): siRNA sense strand
gcggaugagaauagagaac

SEQ ID NO: 2458561 - RNA, 19 nt, Homo sapiens
  misc_RNA (1)...(19): siRNA sense strand
ccguauucucagaguaaaa

SEQ ID NO: 2458562 - RNA, 19 nt, Homo sapiens
  misc_RNA (1)...(19): siRNA sense strand
cagagaaaggucuugacua

SEQ ID NO: 2458563 - RNA, 19 nt, Homo sapiens
  misc_RNA (1)...(19): siRNA sense strand
ggucagaaauaauggucac

SEQ ID NO: 2458564 - RNA, 19 nt, Homo sapiens
  misc_RNA (1)...(19): siRNA sense strand
ccaaugggucagaaauaau

SEQ ID NO: 2458565 - RNA, 19 nt, Homo sapiens
  misc_RNA (1)...(19): siRNA sense strand
ugaacaggguccagaagca

SEQ ID NO: 2458566 - RNA, 19 nt, Homo sapiens
  misc_RNA (1)...(19): siRNA sense strand
uuuccgaagacgagggaga

SEQ ID NO: 2458567 - RNA, 19 nt, Homo sapiens
  misc_RNA (1)...(19): siRNA sense strand
ccuccuggcugggaagaaa

SEQ ID NO: 2458568 - RNA, 19 nt, Homo sapiens
  misc_RNA (1)...(19): siRNA sense strand
agucucgaguuaagggauu

SEQ ID NO: 2458569 - RNA, 19 nt, Homo sapiens
  misc_RNA (1)...(19): siRNA sense strand
gucccuuacuccagagaau

SEQ ID NO: 2458570 - RNA, 19 nt, Homo sapiens
  misc_RNA (1)...(19): siRNA sense strand
cagagaauuuaagcagaaa

SEQ ID NO: 2458571 - RNA, 19 nt, Homo sapiens
  misc_RNA (1)...(19): siRNA sense strand
ccuauacauuuaaggacuu

SEQ ID NO: 2458572 - RNA, 19 nt, Homo sapiens
  misc_RNA (1)...(19): siRNA sense strand
ccucagaccaagaagucau

SEQ ID NO: 2458573 - RNA, 19 nt, Homo sapiens
  misc_RNA (1)...(19): siRNA sense strand
aaucauaacaaucgaacca

SEQ ID NO: 2458574 - RNA, 19 nt, Homo sapiens
  misc_RNA (1)...(19): siRNA sense strand
aauggauccuggagaauga

SEQ ID NO: 2458575 - RNA, 19 nt, Homo sapiens
  misc_RNA (1)...(19): siRNA sense strand
uggaaaaugcucaaggauu

SEQ ID NO: 2458576 - RNA, 19 nt, Homo sapiens
  misc_RNA (1)...(19): siRNA sense strand
gagacgacuuccugggcca

SEQ ID NO: 2458577 - RNA, 19 nt, Homo sapiens
  misc_RNA (1)...(19): siRNA sense strand
acaaagucacacagagcuu

SEQ ID NO: 2458578 - RNA, 19 nt, Homo sapiens
  misc_RNA (1)...(19): siRNA sense strand
cagugauccguaugugaaa

SEQ ID NO: 2458579 - RNA, 19 nt, Homo sapiens
  misc_RNA (1)...(19): siRNA sense strand
cauaacaaucgaaccacaa

SEQ ID NO: 2458580 - RNA, 19 nt, Homo sapiens
  misc_RNA (1)...(19): siRNA sense strand
ccacaaacaguaacaacca

SEQ ID NO: 2458581 - RNA, 19 nt, Homo sapiens
  misc_RNA (1)...(19): siRNA sense strand
ccuucuucauugaucauaa

SEQ ID NO: 2458582 - RNA, 19 nt, Homo sapiens
  misc_RNA (1)...(19): siRNA sense strand
acauauuugaagaguccua

SEQ ID NO: 2458583 - RNA, 19 nt, Homo sapiens
  misc_RNA (1)...(19): siRNA sense strand
gcauagacgaagaaaacuu

SEQ ID NO: 2458584 - RNA, 19 nt, Homo sapiens
  misc_RNA (1)...(19): siRNA sense strand
gugaaugacuggagacagc

SEQ ID NO: 2458585 - RNA, 19 nt, Homo sapiens
  misc_RNA (1)...(19): siRNA sense strand
cuuacuaugucaaccacaa

SEQ ID NO: 2458586 - RNA, 19 nt, Homo sapiens
  misc_RNA (1)...(19): siRNA sense strand
caucaguggccuauguaca

SEQ ID NO: 2458587 - RNA, 19 nt, Homo sapiens
  misc_RNA (1)...(19): siRNA sense strand
cuucauugaucauaacaca

SEQ ID NO: 2458588 - RNA, 19 nt, Homo sapiens
  misc_RNA (1)...(19): siRNA sense strand
ucagaggaacuaagcagaa

SEQ ID NO: 2458589 - RNA, 19 nt, Homo sapiens
  misc_RNA (1)...(19): siRNA sense strand
gaaauggauccuggagaau

SEQ ID NO: 2458590 - RNA, 19 nt, Homo sapiens
  misc_RNA (1)...(19): siRNA sense strand
ggaugugaaugacuggaga

SEQ ID NO: 2458591 - RNA, 19 nt, Homo sapiens
  misc_RNA (1)...(19): siRNA sense strand
cgacagaagauccaaccau

SEQ ID NO: 2458592 - RNA, 19 nt, Homo sapiens
  misc_RNA (1)...(19): siRNA sense strand
ggacaucuuuggagccagu

SEQ ID NO: 2458593 - RNA, 19 nt, Homo sapiens
  misc_RNA (1)...(19): siRNA sense strand
gggaagaaagaauucacuu

SEQ ID NO: 2458594 - RNA, 19 nt, Homo sapiens
  misc_RNA (1)...(19): siRNA sense strand
uguccaaagagauguucaa

SEQ ID NO: 2458595 - RNA, 19 nt, Homo sapiens
  misc_RNA (1)...(19): siRNA sense strand
uuugaagauuuacgagaga

SEQ ID NO: 2458596 - RNA, 19 nt, Homo sapiens
  misc_RNA (1)...(19): siRNA sense strand
cggacaauaacaucagaca

SEQ ID NO: 2458597 - RNA, 19 nt, Homo sapiens
  misc_RNA (1)...(19): siRNA sense strand
ggguccagaagcagaugaa

SEQ ID NO: 2458598 - RNA, 19 nt, Homo sapiens
  misc_RNA (1)...(19): siRNA sense strand
cuauuuacaagaacggcua

SEQ ID NO: 2458599 - RNA, 19 nt, Homo sapiens
  misc_RNA (1)...(19): siRNA sense strand
ucccguauucucagaguaa

SEQ ID NO: 2458600 - RNA, 19 nt, Homo sapiens
  misc_RNA (1)...(19): siRNA sense strand
cauaacacaaagacuacaa

SEQ ID NO: 2458601 - RNA, 19 nt, Homo sapiens
  misc_RNA (1)...(19): siRNA sense strand
ccuuugaagauuuacgaga

SEQ ID NO: 2458602 - RNA, 19 nt, Homo sapiens
  misc_RNA (1)...(19): siRNA sense strand
cccuauacauuuaaggacu

SEQ ID NO: 2458603 - RNA, 19 nt, Homo sapiens
  misc_RNA (1)...(19): siRNA sense strand
ccuacaaggugaugagcga

SEQ ID NO: 2458604 - RNA, 19 nt, Homo sapiens
  misc_RNA (1)...(19): siRNA sense strand
ccgagaugguggcggucaa

SEQ ID NO: 2458605 - RNA, 19 nt, Homo sapiens
  misc_RNA (1)...(19): siRNA sense strand
aggccaagccggugacaca

SEQ ID NO: 2458606 - RNA, 19 nt, Homo sapiens
  misc_RNA (1)...(19): siRNA sense strand
cacaaagggugcagccgaa

SEQ ID NO: 2458607 - RNA, 19 nt, Homo sapiens
  misc_RNA (1)...(19): siRNA sense strand
gcguccgaauggaggagaa

SEQ ID NO: 2458608 - RNA, 19 nt, Homo sapiens
  misc_RNA (1)...(19): siRNA sense strand
uacaaggugaugagcgaaa

SEQ ID NO: 2458609 - RNA, 19 nt, Homo sapiens
  misc_RNA (1)...(19): siRNA sense strand
gcuaugacgaugagcagga

SEQ ID NO: 2458610 - RNA, 19 nt, Homo sapiens
  misc_RNA (1)...(19): siRNA sense strand
uccgaauggaggagaauuu

SEQ ID NO: 2458611 - RNA, 19 nt, Homo sapiens
  misc_RNA (1)...(19): siRNA sense strand
ggcucaagggcaaggugua

SEQ ID NO: 2458612 - RNA, 19 nt, Homo sapiens
  misc_RNA (1)...(19): siRNA sense strand
cggagaacccagagcugca

SEQ ID NO: 2458613 - RNA, 19 nt, Homo sapiens
  misc_RNA (1)...(19): siRNA sense strand
uggaagaggaccaggagga

SEQ ID NO: 2458614 - RNA, 19 nt, Homo sapiens
  misc_RNA (1)...(19): siRNA sense strand
uggaagaggaccaggagga

SEQ ID NO: 2458615 - RNA, 19 nt, Homo sapiens
  misc_RNA (1)...(19): siRNA sense strand
gcauugaggugcacagcca

SEQ ID NO: 2458616 - RNA, 19 nt, Homo sapiens
  misc_RNA (1)...(19): siRNA sense strand
ugaagaugcuagagcgugu

SEQ ID NO: 2458617 - RNA, 19 nt, Homo sapiens
  misc_RNA (1)...(19): siRNA sense strand
aggccagacucgugugacu

SEQ ID NO: 2458618 - RNA, 19 nt, Homo sapiens
  misc_RNA (1)...(19): siRNA sense strand
agcaagaagccguggugga

SEQ ID NO: 2458619 - RNA, 19 nt, Homo sapiens
  misc_RNA (1)...(19): siRNA sense strand
ccacacagggcaaggcagu

SEQ ID NO: 2458620 - RNA, 19 nt, Homo sapiens
  misc_RNA (1)...(19): siRNA sense strand
ccaaagacuccgaaagcca

SEQ ID NO: 2458621 - RNA, 19 nt, Homo sapiens
  misc_RNA (1)...(19): siRNA sense strand
acuucuaccugauggacaa

SEQ ID NO: 2458622 - RNA, 19 nt, Homo sapiens
  misc_RNA (1)...(19): siRNA sense strand
gggcaagacagaccgggua

SEQ ID NO: 2458623 - RNA, 19 nt, Homo sapiens
  misc_RNA (1)...(19): siRNA sense strand
cuggugaagaucauagaaa

SEQ ID NO: 2458624 - RNA, 19 nt, Homo sapiens
  misc_RNA (1)...(19): siRNA sense strand
gggcuaauauggauccaga

SEQ ID NO: 2458625 - RNA, 19 nt, Homo sapiens
  misc_RNA (1)...(19): siRNA sense strand
ugaaggagaugucaggaga

SEQ ID NO: 2458626 - RNA, 19 nt, Homo sapiens
  misc_RNA (1)...(19): siRNA sense strand
uccgaaagccagugaugaa

SEQ ID NO: 2458627 - RNA, 19 nt, Homo sapiens
  misc_RNA (1)...(19): siRNA sense strand
cagaaagccagauggggaa

SEQ ID NO: 2458628 - RNA, 19 nt, Homo sapiens
  misc_RNA (1)...(19): siRNA sense strand
gcagaaagccagaugggga

SEQ ID NO: 2458629 - RNA, 19 nt, Homo sapiens
  misc_RNA (1)...(19): siRNA sense strand
guaccaacagagaagaaaa

SEQ ID NO: 2458630 - RNA, 19 nt, Homo sapiens
  misc_RNA (1)...(19): siRNA sense strand
ggguguucguugugaccuu

SEQ ID NO: 2458631 - RNA, 19 nt, Homo sapiens
  misc_RNA (1)...(19): siRNA sense strand
cucugggacuuaagacaaa

SEQ ID NO: 2458632 - RNA, 19 nt, Homo sapiens
  misc_RNA (1)...(19): siRNA sense strand
agagaaaggugcugcgcag

SEQ ID NO: 2458633 - RNA, 19 nt, Homo sapiens
  misc_RNA (1)...(19): siRNA sense strand
ugucaggagagaagcccaa

SEQ ID NO: 2458634 - RNA, 19 nt, Homo sapiens
  misc_RNA (1)...(19): siRNA sense strand
agggcagggugaaggagau

SEQ ID NO: 2458635 - RNA, 19 nt, Homo sapiens
  misc_RNA (1)...(19): siRNA sense strand
gagucgauuaucagugaau

SEQ ID NO: 2458636 - RNA, 19 nt, Homo sapiens
  misc_RNA (1)...(19): siRNA sense strand
gacuuaagacaaaggcuga

SEQ ID NO: 2458637 - RNA, 19 nt, Homo sapiens
  misc_RNA (1)...(19): siRNA sense strand
ucaaagaguugcugccuga

SEQ ID NO: 2458638 - RNA, 19 nt, Homo sapiens
  misc_RNA (1)...(19): siRNA sense strand
gggccauggaggacaaaga

SEQ ID NO: 2458639 - RNA, 19 nt, Homo sapiens
  misc_RNA (1)...(19): siRNA sense strand
gugacuggugggaggaauu

SEQ ID NO: 2458640 - RNA, 19 nt, Homo sapiens
  misc_RNA (1)...(19): siRNA sense strand
cgaaauccgcugaugguga

SEQ ID NO: 2458641 - RNA, 19 nt, Homo sapiens
  misc_RNA (1)...(19): siRNA sense strand
ggacaucccugaagaccca

SEQ ID NO: 2458642 - RNA, 19 nt, Homo sapiens
  misc_RNA (1)...(19): siRNA sense strand
agcagcaguuucagagaau

SEQ ID NO: 2458643 - RNA, 19 nt, Homo sapiens
  misc_RNA (1)...(19): siRNA sense strand
cguccaauuaugucaguga

SEQ ID NO: 2458644 - RNA, 19 nt, Homo sapiens
  misc_RNA (1)...(19): siRNA sense strand
aggacaaagagaagacgga

SEQ ID NO: 2458645 - RNA, 19 nt, Homo sapiens
  misc_RNA (1)...(19): siRNA sense strand
gcaaguaccuggagucggu

SEQ ID NO: 2458646 - RNA, 19 nt, Homo sapiens
  misc_RNA (1)...(19): siRNA sense strand
ccgacuuugcugaugggaa

SEQ ID NO: 2458647 - RNA, 19 nt, Homo sapiens
  misc_RNA (1)...(19): siRNA sense strand
aguuaaauaggacgggaaa

SEQ ID NO: 2458648 - RNA, 19 nt, Homo sapiens
  misc_RNA (1)...(19): siRNA sense strand
aguuaaaggcccagaugau

SEQ ID NO: 2458649 - RNA, 19 nt, Homo sapiens
  misc_RNA (1)...(19): siRNA sense strand
cccugaacgugguggacaa

SEQ ID NO: 2458650 - RNA, 19 nt, Homo sapiens
  misc_RNA (1)...(19): siRNA sense strand
agagaaacggagucugaaa

SEQ ID NO: 2458651 - RNA, 19 nt, Homo sapiens
  misc_RNA (1)...(19): siRNA sense strand
aaggagaagugaagugcau

SEQ ID NO: 2458652 - RNA, 19 nt, Homo sapiens
  misc_RNA (1)...(19): siRNA sense strand
agaucaaggaaucgaauuu

SEQ ID NO: 2458653 - RNA, 19 nt, Homo sapiens
  misc_RNA (1)...(19): siRNA sense strand
cagagaaaggaaugcaaga

SEQ ID NO: 2458654 - RNA, 19 nt, Homo sapiens
  misc_RNA (1)...(19): siRNA sense strand
ccauauacgggcagcugua

SEQ ID NO: 2458655 - RNA, 19 nt, Homo sapiens
  misc_RNA (1)...(19): siRNA sense strand
ucaucaggauacagagaca

SEQ ID NO: 2458656 - RNA, 19 nt, Homo sapiens
  misc_RNA (1)...(19): siRNA sense strand
auacagagacaucgguaau

SEQ ID NO: 2458657 - RNA, 19 nt, Homo sapiens
  misc_RNA (1)...(19): siRNA sense strand
aaguuaaauaggacgggaa

SEQ ID NO: 2458658 - RNA, 19 nt, Homo sapiens
  misc_RNA (1)...(19): siRNA sense strand
ccgaaagagacaucgcaau

SEQ ID NO: 2458659 - RNA, 19 nt, Homo sapiens
  misc_RNA (1)...(19): siRNA sense strand
gggaacacugugaagaaca

SEQ ID NO: 2458660 - RNA, 19 nt, Homo sapiens
  misc_RNA (1)...(19): siRNA sense strand
gaauggaugacaaaggaga

SEQ ID NO: 2458661 - RNA, 19 nt, Homo sapiens
  misc_RNA (1)...(19): siRNA sense strand
ugcccaaguuugagauuga

SEQ ID NO: 2458662 - RNA, 19 nt, Homo sapiens
  misc_RNA (1)...(19): siRNA sense strand
ucauaacagaucaaggaau

SEQ ID NO: 2458663 - RNA, 19 nt, Homo sapiens
  misc_RNA (1)...(19): siRNA sense strand
cgagaaggugccuguaaaa

SEQ ID NO: 2458664 - RNA, 19 nt, Homo sapiens
  misc_RNA (1)...(19): siRNA sense strand
ugucagccuucguggaaaa

SEQ ID NO: 2458665 - RNA, 19 nt, Homo sapiens
  misc_RNA (1)...(19): siRNA sense strand
guuaagugagucagacaga

SEQ ID NO: 2458666 - RNA, 19 nt, Homo sapiens
  misc_RNA (1)...(19): siRNA sense strand
aaggaaugcaagaugguca

SEQ ID NO: 2458667 - RNA, 19 nt, Homo sapiens
  misc_RNA (1)...(19): siRNA sense strand
ggauacagagacaucggua

SEQ ID NO: 2458668 - RNA, 19 nt, Homo sapiens
  misc_RNA (1)...(19): siRNA sense strand
gccucauaaauuugugaua

SEQ ID NO: 2458669 - RNA, 19 nt, Homo sapiens
  misc_RNA (1)...(19): siRNA sense strand
cgugguaguuaaaggccca

SEQ ID NO: 2458670 - RNA, 19 nt, Homo sapiens
  misc_RNA (1)...(19): siRNA sense strand
augacaaaggagaagugaa

SEQ ID NO: 2458671 - RNA, 19 nt, Homo sapiens
  misc_RNA (1)...(19): siRNA sense strand
acagauguuaagugaguca

SEQ ID NO: 2458672 - RNA, 19 nt, Homo sapiens
  misc_RNA (1)...(19): siRNA sense strand
gcgacuuucaacagcaaau

SEQ ID NO: 2458673 - RNA, 19 nt, Homo sapiens
  misc_RNA (1)...(19): siRNA sense strand
augccaacauucuaggauu

SEQ ID NO: 2458674 - RNA, 19 nt, Homo sapiens
  misc_RNA (1)...(19): siRNA sense strand
uuaaauaggacgggaaagu

SEQ ID NO: 2458675 - RNA, 19 nt, Homo sapiens
  misc_RNA (1)...(19): siRNA sense strand
aggcccagaugauaggaau

SEQ ID NO: 2458676 - RNA, 19 nt, Homo sapiens
  misc_RNA (1)...(19): siRNA sense strand
agugaagugcauuaaguuu

SEQ ID NO: 2458677 - RNA, 19 nt, Homo sapiens
  misc_RNA (1)...(19): siRNA sense strand
aauacacacaggagugcaa

SEQ ID NO: 2458678 - RNA, 19 nt, Homo sapiens
  misc_RNA (1)...(19): siRNA sense strand
agacuaagaaugccaacau

SEQ ID NO: 2458679 - RNA, 19 nt, Homo sapiens
  misc_RNA (1)...(19): siRNA sense strand
uggacaugcugaagcgacu

SEQ ID NO: 2458680 - RNA, 19 nt, Homo sapiens
  misc_RNA (1)...(19): siRNA sense strand
ugacaacauuucugcacga

SEQ ID NO: 2458681 - RNA, 19 nt, Homo sapiens
  misc_RNA (1)...(19): siRNA sense strand
aagcagaguaagcaggaaa

SEQ ID NO: 2458682 - RNA, 19 nt, Homo sapiens
  misc_RNA (1)...(19): siRNA sense strand
uugaugaacaagauggaaa

SEQ ID NO: 2458683 - RNA, 19 nt, Homo sapiens
  misc_RNA (1)...(19): siRNA sense strand
agauggaauacuuggaauu

SEQ ID NO: 2458684 - RNA, 19 nt, Homo sapiens
  misc_RNA (1)...(19): siRNA sense strand
caccaaaggaaaagggaga

SEQ ID NO: 2458685 - RNA, 19 nt, Homo sapiens
  misc_RNA (1)...(19): siRNA sense strand
aggaaaagggagaagacau

SEQ ID NO: 2458686 - RNA, 19 nt, Homo sapiens
  misc_RNA (1)...(19): siRNA sense strand
cacuauaaucacugcagaa

SEQ ID NO: 2458687 - RNA, 19 nt, Homo sapiens
  misc_RNA (1)...(19): siRNA sense strand
ccagaccagagaagggcua

SEQ ID NO: 2458688 - RNA, 19 nt, Homo sapiens
  misc_RNA (1)...(19): siRNA sense strand
gaauggaacccgaggagga

SEQ ID NO: 2458689 - RNA, 19 nt, Homo sapiens
  misc_RNA (1)...(19): siRNA sense strand
aggaagagagagugguuca

SEQ ID NO: 2458690 - RNA, 19 nt, Homo sapiens
  misc_RNA (1)...(19): siRNA sense strand
ggcuggagucaaaggaaaa

SEQ ID NO: 2458691 - RNA, 19 nt, Homo sapiens
  misc_RNA (1)...(19): siRNA sense strand
uguuaauauuggaaggaag

SEQ ID NO: 2458692 - RNA, 19 nt, Homo sapiens
  misc_RNA (1)...(19): siRNA sense strand
ucaaaguagaagaugcuau

SEQ ID NO: 2458693 - RNA, 19 nt, Homo sapiens
  misc_RNA (1)...(19): siRNA sense strand
aaguagaagaugcuaucaa

SEQ ID NO: 2458694 - RNA, 19 nt, Homo sapiens
  misc_RNA (1)...(19): siRNA sense strand
gaaccaagaccgaaagcac

SEQ ID NO: 2458695 - RNA, 19 nt, Homo sapiens
  misc_RNA (1)...(19): siRNA sense strand
auuggaaggaagagagagu

SEQ ID NO: 2458696 - RNA, 19 nt, Homo sapiens
  misc_RNA (1)...(19): siRNA sense strand
guucaaaguagaagaugcu

SEQ ID NO: 2458697 - RNA, 19 nt, Homo sapiens
  misc_RNA (1)...(19): siRNA sense strand
caaaggaaaacuaggcaga

SEQ ID NO: 2458698 - RNA, 19 nt, Homo sapiens
  misc_RNA (1)...(19): siRNA sense strand
accuguacaugcagaguau

SEQ ID NO: 2458699 - RNA, 19 nt, Homo sapiens
  misc_RNA (1)...(19): siRNA sense strand
gguucaaaguagaagaugc

SEQ ID NO: 2458700 - RNA, 19 nt, Homo sapiens
  misc_RNA (1)...(19): siRNA sense strand
gaauggaacccgaggagga

SEQ ID NO: 2458701 - RNA, 19 nt, Homo sapiens
  misc_RNA (1)...(19): siRNA sense strand
aggaagagagagugguuca

SEQ ID NO: 2458702 - RNA, 19 nt, Homo sapiens
  misc_RNA (1)...(19): siRNA sense strand
ggcuggagucaaaggaaaa

SEQ ID NO: 2458703 - RNA, 19 nt, Homo sapiens
  misc_RNA (1)...(19): siRNA sense strand
uguuaauauuggaaggaag

SEQ ID NO: 2458704 - RNA, 19 nt, Homo sapiens
  misc_RNA (1)...(19): siRNA sense strand
ucaaaguagaagaugcuau

SEQ ID NO: 2458705 - RNA, 19 nt, Homo sapiens
  misc_RNA (1)...(19): siRNA sense strand
aaguagaagaugcuaucaa

SEQ ID NO: 2458706 - RNA, 19 nt, Homo sapiens
  misc_RNA (1)...(19): siRNA sense strand
gaaccaagaccgaaagcac

SEQ ID NO: 2458707 - RNA, 19 nt, Homo sapiens
  misc_RNA (1)...(19): siRNA sense strand
auuggaaggaagagagagu

SEQ ID NO: 2458708 - RNA, 19 nt, Homo sapiens
  misc_RNA (1)...(19): siRNA sense strand
guucaaaguagaagaugcu

SEQ ID NO: 2458709 - RNA, 19 nt, Homo sapiens
  misc_RNA (1)...(19): siRNA sense strand
caaaggaaaacuaggcaga

SEQ ID NO: 2458710 - RNA, 19 nt, Homo sapiens
  misc_RNA (1)...(19): siRNA sense strand
accuguacaugcagaguau

SEQ ID NO: 2458711 - RNA, 19 nt, Homo sapiens
  misc_RNA (1)...(19): siRNA sense strand
gguucaaaguagaagaugc

SEQ ID NO: 2458712 - RNA, 19 nt, Homo sapiens
  misc_RNA (1)...(19): siRNA sense strand
ggcuaaaguuggagguaau

SEQ ID NO: 2458713 - RNA, 19 nt, Homo sapiens
  misc_RNA (1)...(19): siRNA sense strand
cagauaaggaauugguaaa

SEQ ID NO: 2458714 - RNA, 19 nt, Homo sapiens
  misc_RNA (1)...(19): siRNA sense strand
cagcagagaugaauggcaa

SEQ ID NO: 2458715 - RNA, 19 nt, Homo sapiens
  misc_RNA (1)...(19): siRNA sense strand
aauuaaaugcccugaggaa

SEQ ID NO: 2458716 - RNA, 19 nt, Homo sapiens
  misc_RNA (1)...(19): siRNA sense strand
cugaagauggaucgaguaa

SEQ ID NO: 2458717 - RNA, 19 nt, Homo sapiens
  misc_RNA (1)...(19): siRNA sense strand
gaauggaagaugaugggaa

SEQ ID NO: 2458718 - RNA, 19 nt, Homo sapiens
  misc_RNA (1)...(19): siRNA sense strand
aggcuaaaguuggagguaa

SEQ ID NO: 2458719 - RNA, 19 nt, Homo sapiens
  misc_RNA (1)...(19): siRNA sense strand
guacauaaucggaggugca

SEQ ID NO: 2458720 - RNA, 19 nt, Homo sapiens
  misc_RNA (1)...(19): siRNA sense strand
uggcuauaacagagaggaa

SEQ ID NO: 2458721 - RNA, 19 nt, Homo sapiens
  misc_RNA (1)...(19): siRNA sense strand
uggaagaugaugggaaaua

SEQ ID NO: 2458722 - RNA, 19 nt, Homo sapiens
  misc_RNA (1)...(19): siRNA sense strand
cagcguagcaucugggaga

SEQ ID NO: 2458723 - RNA, 19 nt, Homo sapiens
  misc_RNA (1)...(19): siRNA sense strand
uuaaaugcccugaggaaaa

SEQ ID NO: 2458724 - RNA, 19 nt, Homo sapiens
  misc_RNA (1)...(19): siRNA sense strand
gagaauggccauaagcaga

SEQ ID NO: 2458725 - RNA, 19 nt, Homo sapiens
  misc_RNA (1)...(19): siRNA sense strand
cagauaaguagcaguucaa

SEQ ID NO: 2458726 - RNA, 19 nt, Homo sapiens
  misc_RNA (1)...(19): siRNA sense strand
gaaaauaauaccuggacuu

SEQ ID NO: 2458727 - RNA, 19 nt, Homo sapiens
  misc_RNA (1)...(19): siRNA sense strand
cauaaucggaggugcagaa

SEQ ID NO: 2458728 - RNA, 19 nt, Homo sapiens
  misc_RNA (1)...(19): siRNA sense strand
ugggaggauucgauggcaa

SEQ ID NO: 2458729 - RNA, 19 nt, Homo sapiens
  misc_RNA (1)...(19): siRNA sense strand
uccaaaugcuacaguacaa

SEQ ID NO: 2458730 - RNA, 19 nt, Homo sapiens
  misc_RNA (1)...(19): siRNA sense strand
cuguugaagucuuguugaa

SEQ ID NO: 2458731 - RNA, 19 nt, Homo sapiens
  misc_RNA (1)...(19): siRNA sense strand
auuugauguuugaggauga

SEQ ID NO: 2458732 - RNA, 19 nt, Homo sapiens
  misc_RNA (1)...(19): siRNA sense strand
guacaaagcccuaagcaug

SEQ ID NO: 2458733 - RNA, 19 nt, Homo sapiens
  misc_RNA (1)...(19): siRNA sense strand
cagcaauggcaaauuauau

SEQ ID NO: 2458734 - RNA, 19 nt, Homo sapiens
  misc_RNA (1)...(19): siRNA sense strand
ggaaccuacuagauggaca

SEQ ID NO: 2458735 - RNA, 19 nt, Homo sapiens
  misc_RNA (1)...(19): siRNA sense strand
ucuuaagcuuccaaggcua

SEQ ID NO: 2458736 - RNA, 19 nt, Homo sapiens
  misc_RNA (1)...(19): siRNA sense strand
acauucaguuugugcagaa

SEQ ID NO: 2458737 - RNA, 19 nt, Homo sapiens
  misc_RNA (1)...(19): siRNA sense strand
gaguuuaagcuuugagaug

SEQ ID NO: 2458738 - RNA, 19 nt, Homo sapiens
  misc_RNA (1)...(19): siRNA sense strand
guuuaagcuuugagaugca

SEQ ID NO: 2458739 - RNA, 19 nt, Homo sapiens
  misc_RNA (1)...(19): siRNA sense strand
aagaugagcuaaucgaaaa

SEQ ID NO: 2458740 - RNA, 19 nt, Homo sapiens
  misc_RNA (1)...(19): siRNA sense strand
gagagauguaugauucaaa

SEQ ID NO: 2458741 - RNA, 19 nt, Homo sapiens
  misc_RNA (1)...(19): siRNA sense strand
gggaggauucgauggcaau

SEQ ID NO: 2458742 - RNA, 19 nt, Homo sapiens
  misc_RNA (1)...(19): siRNA sense strand
uggcugugcuggaugguau

SEQ ID NO: 2458743 - RNA, 19 nt, Homo sapiens
  misc_RNA (1)...(19): siRNA sense strand
gaugcaacaagaugagcua

SEQ ID NO: 2458744 - RNA, 19 nt, Homo sapiens
  misc_RNA (1)...(19): siRNA sense strand
uggcuguucuuaauggaaa

SEQ ID NO: 2458745 - RNA, 19 nt, Homo sapiens
  misc_RNA (1)...(19): siRNA sense strand
acuagaaaugaauggaaga

SEQ ID NO: 2458746 - RNA, 19 nt, Homo sapiens
  misc_RNA (1)...(19): siRNA sense strand
ggagguaaugcuugaagau

SEQ ID NO: 2458747 - RNA, 19 nt, Homo sapiens
  misc_RNA (1)...(19): siRNA sense strand
ugggaacagcagagaugaa

SEQ ID NO: 2458748 - RNA, 19 nt, Homo sapiens
  misc_RNA (1)...(19): siRNA sense strand
gauugcaacuguagggaac

SEQ ID NO: 2458749 - RNA, 19 nt, Homo sapiens
  misc_RNA (1)...(19): siRNA sense strand
agucuauaaccuugaguca

SEQ ID NO: 2458750 - RNA, 19 nt, Homo sapiens
  misc_RNA (1)...(19): siRNA sense strand
uagugauccucauggaauu

SEQ ID NO: 2458751 - RNA, 19 nt, Homo sapiens
  misc_RNA (1)...(19): siRNA sense strand
auuaaaugcccugaggaaa

SEQ ID NO: 2458752 - RNA, 19 nt, Homo sapiens
  misc_RNA (1)...(19): siRNA sense strand
cugaagaggaggaguuucu

SEQ ID NO: 2458753 - RNA, 19 nt, Homo sapiens
  misc_RNA (1)...(19): siRNA sense strand
ccuaagcaugaguggaaaa

SEQ ID NO: 2458754 - RNA, 19 nt, Homo sapiens
  misc_RNA (1)...(19): siRNA sense strand
ugguauauucugugucauu

SEQ ID NO: 2458755 - RNA, 19 nt, Homo sapiens
  misc_RNA (1)...(19): siRNA sense strand
cgaacagucgaaugcuaua

SEQ ID NO: 2458756 - RNA, 19 nt, Homo sapiens
  misc_RNA (1)...(19): siRNA sense strand
gcuauaacagagaggaaug

SEQ ID NO: 2458757 - RNA, 19 nt, Homo sapiens
  misc_RNA (1)...(19): siRNA sense strand
ugauccaacuagaaaugaa

SEQ ID NO: 2458758 - RNA, 19 nt, Homo sapiens
  misc_RNA (1)...(19): siRNA sense strand
aguacaaagcccuaagcau

SEQ ID NO: 2458759 - RNA, 19 nt, Homo sapiens
  misc_RNA (1)...(19): siRNA sense strand
ccugaguuguggagagaug

SEQ ID NO: 2458760 - RNA, 19 nt, Homo sapiens
  misc_RNA (1)...(19): siRNA sense strand
cugugagcuuggugguuau

SEQ ID NO: 2458761 - RNA, 19 nt, Homo sapiens
  misc_RNA (1)...(19): siRNA sense strand
ccaucaguuguguggaaau

SEQ ID NO: 2458762 - RNA, 19 nt, Homo sapiens
  misc_RNA (1)...(19): siRNA sense strand
cuuauauucaggagcauuu

SEQ ID NO: 2458763 - RNA, 19 nt, Homo sapiens
  misc_RNA (1)...(19): siRNA sense strand
aguuggagguaaugcuuga

SEQ ID NO: 2458764 - RNA, 19 nt, Homo sapiens
  misc_RNA (1)...(19): siRNA sense strand
gcaucugggagaauggaga

SEQ ID NO: 2458765 - RNA, 19 nt, Homo sapiens
  misc_RNA (1)...(19): siRNA sense strand
ugcucugaauggaaaguua

SEQ ID NO: 2458766 - RNA, 19 nt, Homo sapiens
  misc_RNA (1)...(19): siRNA sense strand
gcucugauccauaugguca

SEQ ID NO: 2458767 - RNA, 19 nt, Homo sapiens
  misc_RNA (1)...(19): siRNA sense strand
ggauugcaacuguagggaa

SEQ ID NO: 2458768 - RNA, 19 nt, Homo sapiens
  misc_RNA (1)...(19): siRNA sense strand
uggcaaugaauuucugaau

SEQ ID NO: 2458769 - RNA, 19 nt, Homo sapiens
  misc_RNA (1)...(19): siRNA sense strand
aguugaaagcagauaagga

SEQ ID NO: 2458770 - RNA, 19 nt, Homo sapiens
  misc_RNA (1)...(19): siRNA sense strand
cuaugugguagguggauca

SEQ ID NO: 2458771 - RNA, 19 nt, Homo sapiens
  misc_RNA (1)...(19): siRNA sense strand
ugccaucaguuguguggaa

SEQ ID NO: 2458772 - RNA, 19 nt, Homo sapiens
  misc_RNA (1)...(19): siRNA sense strand
ugagaaaacagaagacaaa

SEQ ID NO: 2458773 - RNA, 19 nt, Homo sapiens
  misc_RNA (1)...(19): siRNA sense strand
auuuagagcaagagaauca

SEQ ID NO: 2458774 - RNA, 19 nt, Homo sapiens
  misc_RNA (1)...(19): siRNA sense strand
acuugagaauggagaaaga

SEQ ID NO: 2458775 - RNA, 19 nt, Homo sapiens
  misc_RNA (1)...(19): siRNA sense strand
gacuaaaagaacuggaaua

SEQ ID NO: 2458776 - RNA, 19 nt, Homo sapiens
  misc_RNA (1)...(19): siRNA sense strand
gacuauugugauugagaaa

SEQ ID NO: 2458777 - RNA, 19 nt, Homo sapiens
  misc_RNA (1)...(19): siRNA sense strand
gaaaaguggagaagcuaaa

SEQ ID NO: 2458778 - RNA, 19 nt, Homo sapiens
  misc_RNA (1)...(19): siRNA sense strand
caauaagaaaaguggagaa

SEQ ID NO: 2458779 - RNA, 19 nt, Homo sapiens
  misc_RNA (1)...(19): siRNA sense strand
gcagagaauuggaggaagc

SEQ ID NO: 2458780 - RNA, 19 nt, Homo sapiens
  misc_RNA (1)...(19): siRNA sense strand
ccucauaaagcgucaguca

SEQ ID NO: 2458781 - RNA, 19 nt, Homo sapiens
  misc_RNA (1)...(19): siRNA sense strand
uugagaauggagaaagaua

SEQ ID NO: 2458782 - RNA, 19 nt, Homo sapiens
  misc_RNA (1)...(19): siRNA sense strand
aggugauaauucaggauga

SEQ ID NO: 2458783 - RNA, 19 nt, Homo sapiens
  misc_RNA (1)...(19): siRNA sense strand
auggagaaagauagagaga

SEQ ID NO: 2458784 - RNA, 19 nt, Homo sapiens
  misc_RNA (1)...(19): siRNA sense strand
cuggaauauuguaaacgua

SEQ ID NO: 2458785 - RNA, 19 nt, Homo sapiens
  misc_RNA (1)...(19): siRNA sense strand
guaauuuagagcaagagaa

SEQ ID NO: 2458786 - RNA, 19 nt, Homo sapiens
  misc_RNA (1)...(19): siRNA sense strand
cacuaucagacauggaaua

SEQ ID NO: 2458787 - RNA, 19 nt, Homo sapiens
  misc_RNA (1)...(19): siRNA sense strand
aggcauuggaagaaaacaa

SEQ ID NO: 2458788 - RNA, 19 nt, Homo sapiens
  misc_RNA (1)...(19): siRNA sense strand
ggcccaauguugcaggcua

SEQ ID NO: 2458789 - RNA, 19 nt, Homo sapiens
  misc_RNA (1)...(19): siRNA sense strand
aaacuugagaauggagaaa

SEQ ID NO: 2458790 - RNA, 19 nt, Homo sapiens
  misc_RNA (1)...(19): siRNA sense strand
ggcuaaaauggaugagauu

SEQ ID NO: 2458791 - RNA, 19 nt, Homo sapiens
  misc_RNA (1)...(19): siRNA sense strand
ugaucugagccguaagaau

SEQ ID NO: 2458792 - RNA, 19 nt, Homo sapiens
  misc_RNA (1)...(19): siRNA sense strand
cauaguggaucaagccaga

SEQ ID NO: 2458793 - RNA, 19 nt, Homo sapiens
  misc_RNA (1)...(19): siRNA sense strand
gaggaagcaaacaggacuu

SEQ ID NO: 2458794 - RNA, 19 nt, Homo sapiens
  misc_RNA (1)...(19): siRNA sense strand
gagagaaggaaguuguagu

SEQ ID NO: 2458795 - RNA, 19 nt, Homo sapiens
  misc_RNA (1)...(19): siRNA sense strand
acagugggcccaugaacaa

SEQ ID NO: 2458796 - RNA, 19 nt, Homo sapiens
  misc_RNA (1)...(19): siRNA sense strand
cagaccacuauuaggaaau

SEQ ID NO: 2458797 - RNA, 19 nt, Homo sapiens
  misc_RNA (1)...(19): siRNA sense strand
ggugauaauucaggaugau

SEQ ID NO: 2458798 - RNA, 19 nt, Homo sapiens
  misc_RNA (1)...(19): siRNA sense strand
agaaaaguggagaagcuaa

SEQ ID NO: 2458799 - RNA, 19 nt, Homo sapiens
  misc_RNA (1)...(19): siRNA sense strand
caaauaaucaccagcagca

SEQ ID NO: 2458800 - RNA, 19 nt, Homo sapiens
  misc_RNA (1)...(19): siRNA sense strand
acuacacggagaugguaaa

SEQ ID NO: 2458801 - RNA, 19 nt, Homo sapiens
  misc_RNA (1)...(19): siRNA sense strand
uaagaaaaguggagaagcu

SEQ ID NO: 2458802 - RNA, 19 nt, Homo sapiens
  misc_RNA (1)...(19): siRNA sense strand
ggaauacagacuaaaagaa

SEQ ID NO: 2458803 - RNA, 19 nt, Homo sapiens
  misc_RNA (1)...(19): siRNA sense strand
gcaaagaacuacugggcau

SEQ ID NO: 2458804 - RNA, 19 nt, Homo sapiens
  misc_RNA (1)...(19): siRNA sense strand
ccaugaagaucacagggaa

SEQ ID NO: 2458805 - RNA, 19 nt, Homo sapiens
  misc_RNA (1)...(19): siRNA sense strand
gggaauggaucuuuggugu

SEQ ID NO: 2458806 - RNA, 19 nt, Homo sapiens
  misc_RNA (1)...(19): siRNA sense strand
uggucaugcuggugugcua

SEQ ID NO: 2458807 - RNA, 19 nt, Homo sapiens
  misc_RNA (1)...(19): siRNA sense strand
aggaagaacuccagcaccu

SEQ ID NO: 2458808 - RNA, 19 nt, Homo sapiens
  misc_RNA (1)...(19): siRNA sense strand
aggaaggagcugaguaauc

SEQ ID NO: 2458809 - RNA, 19 nt, Homo sapiens
  misc_RNA (1)...(19): siRNA sense strand
ggaccgguauuaucgggaa

SEQ ID NO: 2458810 - RNA, 19 nt, Homo sapiens
  misc_RNA (1)...(19): siRNA sense strand
gcucauggcagguggacag

SEQ ID NO: 2458811 - RNA, 19 nt, Homo sapiens
  misc_RNA (1)...(19): siRNA sense strand
caugaagaucacagggaac

SEQ ID NO: 2458812 - RNA, 19 nt, Homo sapiens
  misc_RNA (1)...(19): siRNA sense strand
ccuuucaggguguggucua

SEQ ID NO: 2458813 - RNA, 19 nt, Homo sapiens
  misc_RNA (1)...(19): siRNA sense strand
gcaaagaacuacugggcau

SEQ ID NO: 2458814 - RNA, 19 nt, Homo sapiens
  misc_RNA (1)...(19): siRNA sense strand
ccaugaagaucacagggaa

SEQ ID NO: 2458815 - RNA, 19 nt, Homo sapiens
  misc_RNA (1)...(19): siRNA sense strand
gggaauggaucuuuggugu

SEQ ID NO: 2458816 - RNA, 19 nt, Homo sapiens
  misc_RNA (1)...(19): siRNA sense strand
uggucaugcuggugugcua

SEQ ID NO: 2458817 - RNA, 19 nt, Homo sapiens
  misc_RNA (1)...(19): siRNA sense strand
aggaagaacuccagcaccu

SEQ ID NO: 2458818 - RNA, 19 nt, Homo sapiens
  misc_RNA (1)...(19): siRNA sense strand
aggaaggagcugaguaauc

SEQ ID NO: 2458819 - RNA, 19 nt, Homo sapiens
  misc_RNA (1)...(19): siRNA sense strand
ggaccgguauuaucgggaa

SEQ ID NO: 2458820 - RNA, 19 nt, Homo sapiens
  misc_RNA (1)...(19): siRNA sense strand
gcucauggcagguggacag

SEQ ID NO: 2458821 - RNA, 19 nt, Homo sapiens
  misc_RNA (1)...(19): siRNA sense strand
caugaagaucacagggaac

SEQ ID NO: 2458822 - RNA, 19 nt, Homo sapiens
  misc_RNA (1)...(19): siRNA sense strand
ccuuucaggguguggucua

SEQ ID NO: 2458823 - RNA, 19 nt, Homo sapiens
  misc_RNA (1)...(19): siRNA sense strand
gugcagaagcucaagguca

SEQ ID NO: 2458824 - RNA, 19 nt, Homo sapiens
  misc_RNA (1)...(19): siRNA sense strand
ccgaccagcaagagcgaga

SEQ ID NO: 2458825 - RNA, 19 nt, Homo sapiens
  misc_RNA (1)...(19): siRNA sense strand
ugugugagaacauggacaa

SEQ ID NO: 2458826 - RNA, 19 nt, Homo sapiens
  misc_RNA (1)...(19): siRNA sense strand
aggagguggagcagaugaa

SEQ ID NO: 2458827 - RNA, 19 nt, Homo sapiens
  misc_RNA (1)...(19): siRNA sense strand
ugauaagcguggagacaau

SEQ ID NO: 2458828 - RNA, 19 nt, Homo sapiens
  misc_RNA (1)...(19): siRNA sense strand
uguaagugcccuugugaaa

SEQ ID NO: 2458829 - RNA, 19 nt, Homo sapiens
  misc_RNA (1)...(19): siRNA sense strand
aggaaacccaugaaagaaa

SEQ ID NO: 2458830 - RNA, 19 nt, Homo sapiens
  misc_RNA (1)...(19): siRNA sense strand
gcagacaauuugcaggcua

SEQ ID NO: 2458831 - RNA, 19 nt, Homo sapiens
  misc_RNA (1)...(19): siRNA sense strand
agguuuaauagcaggaaau

SEQ ID NO: 2458832 - RNA, 19 nt, Homo sapiens
  misc_RNA (1)...(19): siRNA sense strand
aaguaauggcagacaauuu

SEQ ID NO: 2458833 - RNA, 19 nt, Homo sapiens
  misc_RNA (1)...(19): siRNA sense strand
aagaaguaauggcagacaa

SEQ ID NO: 2458834 - RNA, 19 nt, Homo sapiens
  misc_RNA (1)...(19): siRNA sense strand
agaauauaucccaaagcaa

SEQ ID NO: 2458835 - RNA, 19 nt, Homo sapiens
  misc_RNA (1)...(19): siRNA sense strand
uggaauauagguugucaaa

SEQ ID NO: 2458836 - RNA, 19 nt, Homo sapiens
  misc_RNA (1)...(19): siRNA sense strand
gaacaaagguuaucgucgu

SEQ ID NO: 2458837 - RNA, 19 nt, Homo sapiens
  misc_RNA (1)...(19): siRNA sense strand
agaaguaauggcagacaau

SEQ ID NO: 2458838 - RNA, 19 nt, Homo sapiens
  misc_RNA (1)...(19): siRNA sense strand
aacaagaaguaauggcaga

SEQ ID NO: 2458839 - RNA, 19 nt, Homo sapiens
  misc_RNA (1)...(19): siRNA sense strand
agacaaggaaacaggggua

SEQ ID NO: 2458840 - RNA, 19 nt, Homo sapiens
  misc_RNA (1)...(19): siRNA sense strand
ggauaauggugguucugga

SEQ ID NO: 2458841 - RNA, 19 nt, Homo sapiens
  misc_RNA (1)...(19): siRNA sense strand
cuuaagagagaguaaauca

SEQ ID NO: 2458842 - RNA, 19 nt, Homo sapiens
  misc_RNA (1)...(19): siRNA sense strand
gaucaaaugaagcagcaga

SEQ ID NO: 2458843 - RNA, 19 nt, Homo sapiens
  misc_RNA (1)...(19): siRNA sense strand
augaauuucuugggcaaua

SEQ ID NO: 2458844 - RNA, 19 nt, Homo sapiens
  misc_RNA (1)...(19): siRNA sense strand
cuaucgaagaaguuaggaa

SEQ ID NO: 2458845 - RNA, 19 nt, Homo sapiens
  misc_RNA (1)...(19): siRNA sense strand
guaacauaaaagaggguau

SEQ ID NO: 2458846 - RNA, 19 nt, Homo sapiens
  misc_RNA (1)...(19): siRNA sense strand
gagauugacugcugggaug

SEQ ID NO: 2458847 - RNA, 19 nt, Homo sapiens
  misc_RNA (1)...(19): siRNA sense strand
guggagacaaucaagacaa

SEQ ID NO: 2458848 - RNA, 19 nt, Homo sapiens
  misc_RNA (1)...(19): siRNA sense strand
uuauacgaaagcugagaaa

SEQ ID NO: 2458849 - RNA, 19 nt, Homo sapiens
  misc_RNA (1)...(19): siRNA sense strand
augcaugaacaaagguuau

SEQ ID NO: 2458850 - RNA, 19 nt, Homo sapiens
  misc_RNA (1)...(19): siRNA sense strand
cuacacacucacaagcaaa

SEQ ID NO: 2458851 - RNA, 19 nt, Homo sapiens
  misc_RNA (1)...(19): siRNA sense strand
aagguuuaauagcaggaaa

SEQ ID NO: 2458852 - RNA, 19 nt, Homo sapiens
  misc_RNA (1)...(19): siRNA sense strand
ccagaaugggugagagccu

SEQ ID NO: 2458853 - RNA, 19 nt, Homo sapiens
  misc_RNA (1)...(19): siRNA sense strand
cugaaacaaggaagaauca

SEQ ID NO: 2458854 - RNA, 19 nt, Homo sapiens
  misc_RNA (1)...(19): siRNA sense strand
gggagacacaagcccgaaa

SEQ ID NO: 2458855 - RNA, 19 nt, Homo sapiens
  misc_RNA (1)...(19): siRNA sense strand
gcugaaacaaggaagaauc

SEQ ID NO: 2458856 - RNA, 19 nt, Homo sapiens
  misc_RNA (1)...(19): siRNA sense strand
acgugaaugucuacuguuu

SEQ ID NO: 2458857 - RNA, 19 nt, Homo sapiens
  misc_RNA (1)...(19): siRNA sense strand
ggaucugcaaaaugggaaa

SEQ ID NO: 2458858 - RNA, 19 nt, Homo sapiens
  misc_RNA (1)...(19): siRNA sense strand
gacaaucaagacaaggaaa

SEQ ID NO: 2458859 - RNA, 19 nt, Homo sapiens
  misc_RNA (1)...(19): siRNA sense strand
ggucaagguuuaauagcag

SEQ ID NO: 2458860 - RNA, 19 nt, Homo sapiens
  misc_RNA (1)...(19): siRNA sense strand
augcagcugagaugaguaa

SEQ ID NO: 2458861 - RNA, 19 nt, Homo sapiens
  misc_RNA (1)...(19): siRNA sense strand
cgaagaaguuaggaaagca

SEQ ID NO: 2458862 - RNA, 19 nt, Homo sapiens
  misc_RNA (1)...(19): siRNA sense strand
gagacaaucaagacaagga

SEQ ID NO: 2458863 - RNA, 19 nt, Homo sapiens
  misc_RNA (1)...(19): siRNA sense strand
ugacuucagagguggaaaa

SEQ ID NO: 2458864 - RNA, 19 nt, Homo sapiens
  misc_RNA (1)...(19): siRNA sense strand
gaauauaucccaaagcaac

SEQ ID NO: 2458865 - RNA, 19 nt, Homo sapiens
  misc_RNA (1)...(19): siRNA sense strand
cuuuaacccaaguaacaua

SEQ ID NO: 2458866 - RNA, 19 nt, Homo sapiens
  misc_RNA (1)...(19): siRNA sense strand
agacaaucaagacaaggaa

SEQ ID NO: 2458867 - RNA, 19 nt, Homo sapiens
  misc_RNA (1)...(19): siRNA sense strand
aagcagcagacucguguaa

SEQ ID NO: 2458868 - RNA, 19 nt, Homo sapiens
  misc_RNA (1)...(19): siRNA sense strand
auguuugguacgucagaua

SEQ ID NO: 2458869 - RNA, 19 nt, Homo sapiens
  misc_RNA (1)...(19): siRNA sense strand
aggaagaaucaccauagaa

SEQ ID NO: 2458870 - RNA, 19 nt, Homo sapiens
  misc_RNA (1)...(19): siRNA sense strand
cgugaaugucuacuguuua

SEQ ID NO: 2458871 - RNA, 19 nt, Homo sapiens
  misc_RNA (1)...(19): siRNA sense strand
gggauauguaagugcccuu

SEQ ID NO: 2458872 - RNA, 19 nt, Homo sapiens
  misc_RNA (1)...(19): siRNA sense strand
cuaacaaaggugauucauu

SEQ ID NO: 2458873 - RNA, 19 nt, Homo sapiens
  misc_RNA (1)...(19): siRNA sense strand
guuuauguuugguacguca

SEQ ID NO: 2458874 - RNA, 19 nt, Homo sapiens
  misc_RNA (1)...(19): siRNA sense strand
uguuaauggcuuagacaaa

SEQ ID NO: 2458875 - RNA, 19 nt, Homo sapiens
  misc_RNA (1)...(19): siRNA sense strand
agacaaagcuggaagcacu

SEQ ID NO: 2458876 - RNA, 19 nt, Homo sapiens
  misc_RNA (1)...(19): siRNA sense strand
aggcagaauccauugacaa

SEQ ID NO: 2458877 - RNA, 19 nt, Homo sapiens
  misc_RNA (1)...(19): siRNA sense strand
auuacugacaugagcgaua

SEQ ID NO: 2458878 - RNA, 19 nt, Homo sapiens
  misc_RNA (1)...(19): siRNA sense strand
cuuaagaaacauugagaag

SEQ ID NO: 2458879 - RNA, 19 nt, Homo sapiens
  misc_RNA (1)...(19): siRNA sense strand
guguuaauggcuuagacaa

SEQ ID NO: 2458880 - RNA, 19 nt, Homo sapiens
  misc_RNA (1)...(19): siRNA sense strand
cuuugaggaaggugauauu

SEQ ID NO: 2458881 - RNA, 19 nt, Homo sapiens
  misc_RNA (1)...(19): siRNA sense strand
aguggguguuaauggcuua

SEQ ID NO: 2458882 - RNA, 19 nt, Homo sapiens
  misc_RNA (1)...(19): siRNA sense strand
acuuaaagaaggagcagaa

SEQ ID NO: 2458883 - RNA, 19 nt, Homo sapiens
  misc_RNA (1)...(19): siRNA sense strand
gaaugaagaaagaggggaa

SEQ ID NO: 2458884 - RNA, 19 nt, Homo sapiens
  misc_RNA (1)...(19): siRNA sense strand
gaguuagagaggugaucaa

SEQ ID NO: 2458885 - RNA, 19 nt, Homo sapiens
  misc_RNA (1)...(19): siRNA sense strand
acuuuaaugcacagagauu

SEQ ID NO: 2458886 - RNA, 19 nt, Homo sapiens
  misc_RNA (1)...(19): siRNA sense strand
aagaaggagcagaacaaaa

SEQ ID NO: 2458887 - RNA, 19 nt, Homo sapiens
  misc_RNA (1)...(19): siRNA sense strand
ugaaaguacugcuggcucu

SEQ ID NO: 2458888 - RNA, 19 nt, Homo sapiens
  misc_RNA (1)...(19): siRNA sense strand
uuaaagaaggagcagaaca

SEQ ID NO: 2458889 - RNA, 19 nt, Homo sapiens
  misc_RNA (1)...(19): siRNA sense strand
gauggaaauugcaggcuga

SEQ ID NO: 2458890 - RNA, 19 nt, Homo sapiens
  misc_RNA (1)...(19): siRNA sense strand
aggaaggagugcuuggaga

SEQ ID NO: 2458891 - RNA, 19 nt, Homo sapiens
  misc_RNA (1)...(19): siRNA sense strand
ggaaaaugcaggaaggagu

SEQ ID NO: 2458892 - RNA, 19 nt, Homo sapiens
  misc_RNA (1)...(19): siRNA sense strand
gcgaaaagcuggaacgaca

SEQ ID NO: 2458893 - RNA, 19 nt, Homo sapiens
  misc_RNA (1)...(19): siRNA sense strand
ugucaagauuggagaggga

SEQ ID NO: 2458894 - RNA, 19 nt, Homo sapiens
  misc_RNA (1)...(19): siRNA sense strand
uguaaaugagauugagcaa

SEQ ID NO: 2458895 - RNA, 19 nt, Homo sapiens
  misc_RNA (1)...(19): siRNA sense strand
agguggauguagagaucaa

SEQ ID NO: 2458896 - RNA, 19 nt, Homo sapiens
  misc_RNA (1)...(19): siRNA sense strand
ugaugaaagcagagacuga

SEQ ID NO: 2458897 - RNA, 19 nt, Homo sapiens
  misc_RNA (1)...(19): siRNA sense strand
guaaaagagcugaaagaga

SEQ ID NO: 2458898 - RNA, 19 nt, Homo sapiens
  misc_RNA (1)...(19): siRNA sense strand
ucaugaugguggagcaaga

SEQ ID NO: 2458899 - RNA, 19 nt, Homo sapiens
  misc_RNA (1)...(19): siRNA sense strand
ccauguggaaagcggauaa

SEQ ID NO: 2458900 - RNA, 19 nt, Homo sapiens
  misc_RNA (1)...(19): siRNA sense strand
caguaaaagagcugaaaga

SEQ ID NO: 2458901 - RNA, 19 nt, Homo sapiens
  misc_RNA (1)...(19): siRNA sense strand
cagaaaucacagaugaaga

SEQ ID NO: 2458902 - RNA, 19 nt, Homo sapiens
  misc_RNA (1)...(19): siRNA sense strand
ugguggagcaagagaacau

SEQ ID NO: 2458903 - RNA, 19 nt, Homo sapiens
  misc_RNA (1)...(19): siRNA sense strand
ccaagaacugagacagaca

SEQ ID NO: 2458904 - RNA, 19 nt, Homo sapiens
  misc_RNA (1)...(19): siRNA sense strand
ucaagauuggagagggaau

SEQ ID NO: 2458905 - RNA, 19 nt, Homo sapiens
  misc_RNA (1)...(19): siRNA sense strand
aagcagagacugagcgaag

SEQ ID NO: 2458906 - RNA, 19 nt, Homo sapiens
  misc_RNA (1)...(19): siRNA sense strand
acagaguaauggagggaug

SEQ ID NO: 2458907 - RNA, 19 nt, Homo sapiens
  misc_RNA (1)...(19): siRNA sense strand
gagagggaaugcuggcaga

SEQ ID NO: 2458908 - RNA, 19 nt, Homo sapiens
  misc_RNA (1)...(19): siRNA sense strand
agccaagaacugagacaga

SEQ ID NO: 2458909 - RNA, 19 nt, Homo sapiens
  misc_RNA (1)...(19): siRNA sense strand
cuuuauggaagcagcagaa

SEQ ID NO: 2458910 - RNA, 19 nt, Homo sapiens
  misc_RNA (1)...(19): siRNA sense strand
agaugaagacaacagcaua

SEQ ID NO: 2458911 - RNA, 19 nt, Homo sapiens
  misc_RNA (1)...(19): siRNA sense strand
ucaaacugaagaagagaga

SEQ ID NO: 2458912 - RNA, 19 nt, Homo sapiens
  misc_RNA (1)...(19): siRNA sense strand
cagaugaagacaacagcau

SEQ ID NO: 2458913 - RNA, 19 nt, Homo sapiens
  misc_RNA (1)...(19): siRNA sense strand
gcacaguaaaagagcugaa

SEQ ID NO: 2458914 - RNA, 19 nt, Homo sapiens
  misc_RNA (1)...(19): siRNA sense strand
cagcaaaguggaugauauc

SEQ ID NO: 2458915 - RNA, 19 nt, Homo sapiens
  misc_RNA (1)...(19): siRNA sense strand
gugacaauguuacaggaca

SEQ ID NO: 2458916 - RNA, 19 nt, Homo sapiens
  misc_RNA (1)...(19): siRNA sense strand
acuuugaggauuuccguaa

SEQ ID NO: 2458917 - RNA, 19 nt, Homo sapiens
  misc_RNA (1)...(19): siRNA sense strand
gcugaggcugacugcgaaa

SEQ ID NO: 2458918 - RNA, 19 nt, Homo sapiens
  misc_RNA (1)...(19): siRNA sense strand
agggaaugcuggcagacuu

SEQ ID NO: 2458919 - RNA, 19 nt, Homo sapiens
  misc_RNA (1)...(19): siRNA sense strand
agcagaaaucacagaugaa

SEQ ID NO: 2458920 - RNA, 19 nt, Homo sapiens
  misc_RNA (1)...(19): siRNA sense strand
ggcgaaggacuuugaggau

SEQ ID NO: 2458921 - RNA, 19 nt, Homo sapiens
  misc_RNA (1)...(19): siRNA sense strand
gacagagagcugaggcuga

SEQ ID NO: 2458922 - RNA, 19 nt, Homo sapiens
  misc_RNA (1)...(19): siRNA sense strand
ucaacuaagcgaggagcaa

SEQ ID NO: 2458923 - RNA, 19 nt, Homo sapiens
  misc_RNA (1)...(19): siRNA sense strand
cugcaguagaccaggggaa

SEQ ID NO: 2458924 - RNA, 19 nt, Homo sapiens
  misc_RNA (1)...(19): siRNA sense strand
ggagccaagaacugagaca

SEQ ID NO: 2458925 - RNA, 19 nt, Homo sapiens
  misc_RNA (1)...(19): siRNA sense strand
ugggcacgccacagaguaa

SEQ ID NO: 2458926 - RNA, 19 nt, Homo sapiens
  misc_RNA (1)...(19): siRNA sense strand
ccaaggugguugagcgccu

SEQ ID NO: 2458927 - RNA, 19 nt, Homo sapiens
  misc_RNA (1)...(19): siRNA sense strand
aagagaaauuccucagagu

SEQ ID NO: 2458928 - RNA, 19 nt, Homo sapiens
  misc_RNA (1)...(19): siRNA sense strand
agucuuuggcccuacaaua

SEQ ID NO: 2458929 - RNA, 19 nt, Homo sapiens
  misc_RNA (1)...(19): siRNA sense strand
aaggaaaugaaguccaauu

SEQ ID NO: 2458930 - RNA, 19 nt, Homo sapiens
  misc_RNA (1)...(19): siRNA sense strand
augaauccauaguugcaaa

SEQ ID NO: 2458931 - RNA, 19 nt, Homo sapiens
  misc_RNA (1)...(19): siRNA sense strand
accaggagccgaaggaaaa

SEQ ID NO: 2458932 - RNA, 19 nt, Homo sapiens
  misc_RNA (1)...(19): siRNA sense strand
ccacagaguaauggaggga

SEQ ID NO: 2458933 - RNA, 19 nt, Homo sapiens
  misc_RNA (1)...(19): siRNA sense strand
ucucagugaaggaaaugaa

SEQ ID NO: 2458934 - RNA, 19 nt, Homo sapiens
  misc_RNA (1)...(19): siRNA sense strand
gagcugaggcugacugcga

SEQ ID NO: 2458935 - RNA, 19 nt, Homo sapiens
  misc_RNA (1)...(19): siRNA sense strand
cuuugaggauuuccguaaa

SEQ ID NO: 2458936 - RNA, 19 nt, Homo sapiens
  misc_RNA (1)...(19): siRNA sense strand
uguugugcauuguguaaau

SEQ ID NO: 2458937 - RNA, 19 nt, Homo sapiens
  misc_RNA (1)...(19): siRNA sense strand
aaaagagcugaaagagaaa

SEQ ID NO: 2458938 - RNA, 19 nt, Homo sapiens
  misc_RNA (1)...(19): siRNA sense strand
aguucaugaugguggagca

SEQ ID NO: 2458939 - RNA, 19 nt, Homo sapiens
  misc_RNA (1)...(19): siRNA sense strand
gcaaaggaguguugaggca

SEQ ID NO: 2458940 - RNA, 19 nt, Homo sapiens
  misc_RNA (1)...(19): siRNA sense strand
ccaccaucuuauagagagu

SEQ ID NO: 2458941 - RNA, 19 nt, Homo sapiens
  misc_RNA (1)...(19): siRNA sense strand
aaaggaguguugaggcaca

SEQ ID NO: 2458942 - RNA, 19 nt, Homo sapiens
  misc_RNA (1)...(19): siRNA sense strand
gccaggugacugaaagcaa

SEQ ID NO: 2458943 - RNA, 19 nt, Homo sapiens
  misc_RNA (1)...(19): siRNA sense strand
aagagagccuugaggugga

SEQ ID NO: 2458944 - RNA, 19 nt, Homo sapiens
  misc_RNA (1)...(19): siRNA sense strand
cuuuauuaaucgagaugga

SEQ ID NO: 2458945 - RNA, 19 nt, Homo sapiens
  misc_RNA (1)...(19): siRNA sense strand
uugaagaaguuguggagcu

SEQ ID NO: 2458946 - RNA, 19 nt, Homo sapiens
  misc_RNA (1)...(19): siRNA sense strand
cguuggauuuuaaggaauu

SEQ ID NO: 2458947 - RNA, 19 nt, Homo sapiens
  misc_RNA (1)...(19): siRNA sense strand
aaaacacaguggagcacaa

SEQ ID NO: 2458948 - RNA, 19 nt, Homo sapiens
  misc_RNA (1)...(19): siRNA sense strand
ggguaaagucaaggggaaa

SEQ ID NO: 2458949 - RNA, 19 nt, Homo sapiens
  misc_RNA (1)...(19): siRNA sense strand
aggguaaagucaaggggaa

SEQ ID NO: 2458950 - RNA, 19 nt, Homo sapiens
  misc_RNA (1)...(19): siRNA sense strand
gagauugagaggaaggaca

SEQ ID NO: 2458951 - RNA, 19 nt, Homo sapiens
  misc_RNA (1)...(19): siRNA sense strand
gguaaagucaaggggaaaa

SEQ ID NO: 2458952 - RNA, 19 nt, Homo sapiens
  misc_RNA (1)...(19): siRNA sense strand
ggggaaaaggagauugaga

SEQ ID NO: 2458953 - RNA, 19 nt, Homo sapiens
  misc_RNA (1)...(19): siRNA sense strand
aauuaagagccgaaaguga

SEQ ID NO: 2458954 - RNA, 19 nt, Homo sapiens
  misc_RNA (1)...(19): siRNA sense strand
ccacauugguugaucgugu

SEQ ID NO: 2458955 - RNA, 19 nt, Homo sapiens
  misc_RNA (1)...(19): siRNA sense strand
aagcaaauuaagagccgaa

SEQ ID NO: 2458956 - RNA, 19 nt, Homo sapiens
  misc_RNA (1)...(19): siRNA sense strand
cuuuggaggcucugaacaa

SEQ ID NO: 2458957 - RNA, 19 nt, Homo sapiens
  misc_RNA (1)...(19): siRNA sense strand
gaucaacgauguagcagga

SEQ ID NO: 2458958 - RNA, 19 nt, Homo sapiens
  misc_RNA (1)...(19): siRNA sense strand
ugaaaagaguagaaaagca

SEQ ID NO: 2458959 - RNA, 19 nt, Homo sapiens
  misc_RNA (1)...(19): siRNA sense strand
agauaagacagcuggaaag

SEQ ID NO: 2458960 - RNA, 19 nt, Homo sapiens
  misc_RNA (1)...(19): siRNA sense strand
ggaacugaaaagaguagaa

SEQ ID NO: 2458961 - RNA, 19 nt, Homo sapiens
  misc_RNA (1)...(19): siRNA sense strand
cauucaaacaccggauuaa

SEQ ID NO: 2458962 - RNA, 19 nt, Homo sapiens
  misc_RNA (1)...(19): siRNA sense strand
ucaacgauguagcaggaga

SEQ ID NO: 2458963 - RNA, 19 nt, Homo sapiens
  misc_RNA (1)...(19): siRNA sense strand
augcugaaucugaggcuga

SEQ ID NO: 2458964 - RNA, 19 nt, Homo sapiens
  misc_RNA (1)...(19): siRNA sense strand
gcucugaacaacaugggau

SEQ ID NO: 2458965 - RNA, 19 nt, Homo sapiens
  misc_RNA (1)...(19): siRNA sense strand
agucaacccugauggggaa

SEQ ID NO: 2458966 - RNA, 19 nt, Homo sapiens
  misc_RNA (1)...(19): siRNA sense strand
ggguaaaacacaugccuau

SEQ ID NO: 2458967 - RNA, 19 nt, Homo sapiens
  misc_RNA (1)...(19): siRNA sense strand
gauaaaagggagaaggagu

SEQ ID NO: 2458968 - RNA, 19 nt, Homo sapiens
  misc_RNA (1)...(19): siRNA sense strand
auaaaagggagaaggagua

SEQ ID NO: 2458969 - RNA, 19 nt, Homo sapiens
  misc_RNA (1)...(19): siRNA sense strand
ggagaaggaguauggggua

SEQ ID NO: 2458970 - RNA, 19 nt, Homo sapiens
  misc_RNA (1)...(19): siRNA sense strand
gcaauggagacucaggcua

SEQ ID NO: 2458971 - RNA, 19 nt, Homo sapiens
  misc_RNA (1)...(19): siRNA sense strand
aaucaagauaaaagggaga

SEQ ID NO: 2458972 - RNA, 19 nt, Homo sapiens
  misc_RNA (1)...(19): siRNA sense strand
gcugcaaagucggggacaa

SEQ ID NO: 2458973 - RNA, 19 nt, Homo sapiens
  misc_RNA (1)...(19): siRNA sense strand
uggaaaggguguaccgaga

SEQ ID NO: 2458974 - RNA, 19 nt, Homo sapiens
  misc_RNA (1)...(19): siRNA sense strand
agcuaaaggacgaggaaug

SEQ ID NO: 2458975 - RNA, 19 nt, Homo sapiens
  misc_RNA (1)...(19): siRNA sense strand
acacaauccuguuugcaga

SEQ ID NO: 2458976 - RNA, 19 nt, Homo sapiens
  misc_RNA (1)...(19): siRNA sense strand
ggaucaccgcagugugcaa

SEQ ID NO: 2458977 - RNA, 19 nt, Homo sapiens
  misc_RNA (1)...(19): siRNA sense strand
gggagcagcuagaacagga

SEQ ID NO: 2458978 - RNA, 19 nt, Homo sapiens
  misc_RNA (1)...(19): siRNA sense strand
aagcaggcggcaucagaaa

SEQ ID NO: 2458979 - RNA, 19 nt, Homo sapiens
  misc_RNA (1)...(19): siRNA sense strand
ccuugaagacacuggucau

SEQ ID NO: 2458980 - RNA, 19 nt, Homo sapiens
  misc_RNA (1)...(19): siRNA sense strand
aggagaugucacuggccaa

SEQ ID NO: 2458981 - RNA, 19 nt, Homo sapiens
  misc_RNA (1)...(19): siRNA sense strand
cagacgaggaggacguaga

SEQ ID NO: 2458982 - RNA, 19 nt, Homo sapiens
  misc_RNA (1)...(19): siRNA sense strand
accuuaugaaccaggaaua

SEQ ID NO: 2458983 - RNA, 19 nt, Homo sapiens
  misc_RNA (1)...(19): siRNA sense strand
cagagaagaaaauguacaa

SEQ ID NO: 2458984 - RNA, 19 nt, Homo sapiens
  misc_RNA (1)...(19): siRNA sense strand
acgaggaggacguagacuu

SEQ ID NO: 2458985 - RNA, 19 nt, Homo sapiens
  misc_RNA (1)...(19): siRNA sense strand
caacuaugcgccaggagga

SEQ ID NO: 2458986 - RNA, 19 nt, Homo sapiens
  misc_RNA (1)...(19): siRNA sense strand
cgggaggacuacagccgua

SEQ ID NO: 2458987 - RNA, 19 nt, Homo sapiens
  misc_RNA (1)...(19): siRNA sense strand
acgaagaggcggugcugau

SEQ ID NO: 2458988 - RNA, 19 nt, Homo sapiens
  misc_RNA (1)...(19): siRNA sense strand
aggcggugcugauggcaga

SEQ ID NO: 2458989 - RNA, 19 nt, Homo sapiens
  misc_RNA (1)...(19): siRNA sense strand
gggaacaagcccaggacca

SEQ ID NO: 2458990 - RNA, 19 nt, Homo sapiens
  misc_RNA (1)...(19): siRNA sense strand
ccaccaaggagguccggaa

SEQ ID NO: 2458991 - RNA, 19 nt, Homo sapiens
  misc_RNA (1)...(19): siRNA sense strand
ccaccuacaaccaagggua

SEQ ID NO: 2458992 - RNA, 19 nt, Homo sapiens
  misc_RNA (1)...(19): siRNA sense strand
gcuucaugacgucggagua

SEQ ID NO: 2458993 - RNA, 19 nt, Homo sapiens
  misc_RNA (1)...(19): siRNA sense strand
ccauaugaguguaaagaau

SEQ ID NO: 2458994 - RNA, 19 nt, Homo sapiens
  misc_RNA (1)...(19): siRNA sense strand
aauucauacuggugagaaa

SEQ ID NO: 2458995 - RNA, 19 nt, Homo sapiens
  misc_RNA (1)...(19): siRNA sense strand
guguaagcagugugggaaa

SEQ ID NO: 2458996 - RNA, 19 nt, Homo sapiens
  misc_RNA (1)...(19): siRNA sense strand
ccuuaaacaacaucagaaa

SEQ ID NO: 2458997 - RNA, 19 nt, Homo sapiens
  misc_RNA (1)...(19): siRNA sense strand
cccuauaaauguaaggaau

SEQ ID NO: 2458998 - RNA, 19 nt, Homo sapiens
  misc_RNA (1)...(19): siRNA sense strand
ccuuaaagcccaucagaga

SEQ ID NO: 2458999 - RNA, 19 nt, Homo sapiens
  misc_RNA (1)...(19): siRNA sense strand
uguaaggaguguaagaaaa

SEQ ID NO: 2459000 - RNA, 19 nt, Homo sapiens
  misc_RNA (1)...(19): siRNA sense strand
guguaaagaaugugggaag

SEQ ID NO: 2459001 - RNA, 19 nt, Homo sapiens
  misc_RNA (1)...(19): siRNA sense strand
ccuccaaguagcugggauu

SEQ ID NO: 2459002 - RNA, 19 nt, Homo sapiens
  misc_RNA (1)...(19): siRNA sense strand
auguaaggaguguaagaaa

SEQ ID NO: 2459003 - RNA, 19 nt, Homo sapiens
  misc_RNA (1)...(19): siRNA sense strand
gaauguaaggaguguaaaa

SEQ ID NO: 2459004 - RNA, 19 nt, Homo sapiens
  misc_RNA (1)...(19): siRNA sense strand
augaauguaaggaguguaa

SEQ ID NO: 2459005 - RNA, 19 nt, Homo sapiens
  misc_RNA (1)...(19): siRNA sense strand
ggauuacagauuuggauuu

SEQ ID NO: 2459006 - RNA, 19 nt, Homo sapiens
  misc_RNA (1)...(19): siRNA sense strand
cccuaugaauguaaagaau

SEQ ID NO: 2459007 - RNA, 19 nt, Homo sapiens
  misc_RNA (1)...(19): siRNA sense strand
aauucauacugguggaaaa

SEQ ID NO: 2459008 - RNA, 19 nt, Homo sapiens
  misc_RNA (1)...(19): siRNA sense strand
guacagaaugugggaagaa

SEQ ID NO: 2459009 - RNA, 19 nt, Homo sapiens
  misc_RNA (1)...(19): siRNA sense strand
ucuuagaauucaucagaga

SEQ ID NO: 2459010 - RNA, 19 nt, Homo sapiens
  misc_RNA (1)...(19): siRNA sense strand
ccuuuagcuugcauggaua

SEQ ID NO: 2459011 - RNA, 19 nt, Homo sapiens
  misc_RNA (1)...(19): siRNA sense strand
agaauucauaggagcauaa

SEQ ID NO: 2459012 - RNA, 19 nt, Homo sapiens
  misc_RNA (1)...(19): siRNA sense strand
uugaauguaaggaguguaa

SEQ ID NO: 2459013 - RNA, 19 nt, Homo sapiens
  misc_RNA (1)...(19): siRNA sense strand
gaauguaggcaguguggga

SEQ ID NO: 2459014 - RNA, 19 nt, Homo sapiens
  misc_RNA (1)...(19): siRNA sense strand
gagaguucacacugguaaa

SEQ ID NO: 2459015 - RNA, 19 nt, Homo sapiens
  misc_RNA (1)...(19): siRNA sense strand
aagaaugugggaagggcua

SEQ ID NO: 2459016 - RNA, 19 nt, Homo sapiens
  misc_RNA (1)...(19): siRNA sense strand
cccuaugaauguacagaau

SEQ ID NO: 2459017 - RNA, 19 nt, Homo sapiens
  misc_RNA (1)...(19): siRNA sense strand
ugacugugcaucagagauu

SEQ ID NO: 2459018 - RNA, 19 nt, Homo sapiens
  misc_RNA (1)...(19): siRNA sense strand
gagaauucauaaaggugga

SEQ ID NO: 2459019 - RNA, 19 nt, Homo sapiens
  misc_RNA (1)...(19): siRNA sense strand
ccuuauucaacaucggaaa

SEQ ID NO: 2459020 - RNA, 19 nt, Homo sapiens
  misc_RNA (1)...(19): siRNA sense strand
agauauauccucuacacaa

SEQ ID NO: 2459021 - RNA, 19 nt, Homo sapiens
  misc_RNA (1)...(19): siRNA sense strand
cuaugaauguacagaaugu

SEQ ID NO: 2459022 - RNA, 19 nt, Homo sapiens
  misc_RNA (1)...(19): siRNA sense strand
cccuaugaauguaagguau

SEQ ID NO: 2459023 - RNA, 19 nt, Homo sapiens
  misc_RNA (1)...(19): siRNA sense strand
aacucauacuggcgagaaa

SEQ ID NO: 2459024 - RNA, 19 nt, Homo sapiens
  misc_RNA (1)...(19): siRNA sense strand
uauucacacugguaagaaa

SEQ ID NO: 2459025 - RNA, 19 nt, Homo sapiens
  misc_RNA (1)...(19): siRNA sense strand
ccuuuaaaauguauggcua

SEQ ID NO: 2459026 - RNA, 19 nt, Homo sapiens
  misc_RNA (1)...(19): siRNA sense strand
cccuaugaaugcaaggaau

SEQ ID NO: 2459027 - RNA, 19 nt, Homo sapiens
  misc_RNA (1)...(19): siRNA sense strand
auguaaagaaugugggaag

SEQ ID NO: 2459028 - RNA, 19 nt, Homo sapiens
  misc_RNA (1)...(19): siRNA sense strand
ggugggaagccguaugaau

SEQ ID NO: 2459029 - RNA, 19 nt, Homo sapiens
  misc_RNA (1)...(19): siRNA sense strand
auguaaagaauguggaaag

SEQ ID NO: 2459030 - RNA, 19 nt, Homo sapiens
  misc_RNA (1)...(19): siRNA sense strand
gggauuacagauuuggauu

SEQ ID NO: 2459031 - RNA, 19 nt, Homo sapiens
  misc_RNA (1)...(19): siRNA sense strand
ucaacuuacucuacaucaa

SEQ ID NO: 2459032 - RNA, 19 nt, Homo sapiens
  misc_RNA (1)...(19): siRNA sense strand
cagaaugugggaagaacuu

SEQ ID NO: 2459033 - RNA, 19 nt, Homo sapiens
  misc_RNA (1)...(19): siRNA sense strand
caaugugggaagaccuaua

SEQ ID NO: 2459034 - RNA, 19 nt, Homo sapiens
  misc_RNA (1)...(19): siRNA sense strand
guuucaugucauugagaga

SEQ ID NO: 2459035 - RNA, 19 nt, Homo sapiens
  misc_RNA (1)...(19): siRNA sense strand
augcaaagagugugggaag

SEQ ID NO: 2459036 - RNA, 19 nt, Homo sapiens
  misc_RNA (1)...(19): siRNA sense strand
agguggacaucuuagaauu

SEQ ID NO: 2459037 - RNA, 19 nt, Homo sapiens
  misc_RNA (1)...(19): siRNA sense strand
guauagaaaucuuacucga

SEQ ID NO: 2459038 - RNA, 19 nt, Homo sapiens
  misc_RNA (1)...(19): siRNA sense strand
acacaacuucagagcauau

SEQ ID NO: 2459039 - RNA, 19 nt, Homo sapiens
  misc_RNA (1)...(19): siRNA sense strand
gagaguucauacuggcgaa

SEQ ID NO: 2459040 - RNA, 19 nt, Homo sapiens
  misc_RNA (1)...(19): siRNA sense strand
cagagaauucauaggagca

SEQ ID NO: 2459041 - RNA, 19 nt, Homo sapiens
  misc_RNA (1)...(19): siRNA sense strand
cuucagagcauauauaaga

SEQ ID NO: 2459042 - RNA, 19 nt, Homo sapiens
  misc_RNA (1)...(19): siRNA sense strand
aggaaugugggaaggccua

SEQ ID NO: 2459043 - RNA, 19 nt, Homo sapiens
  misc_RNA (1)...(19): siRNA sense strand
cggcaucagaauauucaua

SEQ ID NO: 2459044 - RNA, 19 nt, Homo sapiens
  misc_RNA (1)...(19): siRNA sense strand
cagauaugguucagcccuu

SEQ ID NO: 2459045 - RNA, 19 nt, Homo sapiens
  misc_RNA (1)...(19): siRNA sense strand
agugugagauaaucagcua

SEQ ID NO: 2459046 - RNA, 19 nt, Homo sapiens
  misc_RNA (1)...(19): siRNA sense strand
agcauauauaagagagaga

SEQ ID NO: 2459047 - RNA, 19 nt, Homo sapiens
  misc_RNA (1)...(19): siRNA sense strand
cuaugaaugcaaagagugu

SEQ ID NO: 2459048 - RNA, 19 nt, Homo sapiens
  misc_RNA (1)...(19): siRNA sense strand
agagcauauauaagagaga

SEQ ID NO: 2459049 - RNA, 19 nt, Homo sapiens
  misc_RNA (1)...(19): siRNA sense strand
uguaaggaaugugggaaga

SEQ ID NO: 2459050 - RNA, 19 nt, Homo sapiens
  misc_RNA (1)...(19): siRNA sense strand
aggaaugugggaagacuuu

SEQ ID NO: 2459051 - RNA, 19 nt, Homo sapiens
  misc_RNA (1)...(19): siRNA sense strand
auacugaugagaagccaua

SEQ ID NO: 2459052 - RNA, 19 nt, Homo sapiens
  misc_RNA (1)...(19): siRNA sense strand
uguaaggaaugugggaaga

SEQ ID NO: 2459053 - RNA, 19 nt, Homo sapiens
  misc_RNA (1)...(19): siRNA sense strand
uagucaagguggacaucuu

SEQ ID NO: 2459054 - RNA, 19 nt, Homo sapiens
  misc_RNA (1)...(19): siRNA sense strand
ccuauaaauguaaggaaug

SEQ ID NO: 2459055 - RNA, 19 nt, Homo sapiens
  misc_RNA (1)...(19): siRNA sense strand
guguguaagcaguguggga

SEQ ID NO: 2459056 - RNA, 19 nt, Homo sapiens
  misc_RNA (1)...(19): siRNA sense strand
cggaagaggacaagagcga

SEQ ID NO: 2459057 - RNA, 19 nt, Homo sapiens
  misc_RNA (1)...(19): siRNA sense strand
guaagaauguucagaggga

SEQ ID NO: 2459058 - RNA, 19 nt, Homo sapiens
  misc_RNA (1)...(19): siRNA sense strand
ggacaagacaauaaaggga

SEQ ID NO: 2459059 - RNA, 19 nt, Homo sapiens
  misc_RNA (1)...(19): siRNA sense strand
aagaagaagccuuugaaau

SEQ ID NO: 2459060 - RNA, 19 nt, Homo sapiens
  misc_RNA (1)...(19): siRNA sense strand
ggaaagacuauaaggagca

SEQ ID NO: 2459061 - RNA, 19 nt, Homo sapiens
  misc_RNA (1)...(19): siRNA sense strand
cagaaaagagccuggcaaa

SEQ ID NO: 2459062 - RNA, 19 nt, Homo sapiens
  misc_RNA (1)...(19): siRNA sense strand
gcaagaacgauuaugaaaa

SEQ ID NO: 2459063 - RNA, 19 nt, Homo sapiens
  misc_RNA (1)...(19): siRNA sense strand
gcaaagaacaucuggugga

SEQ ID NO: 2459064 - RNA, 19 nt, Homo sapiens
  misc_RNA (1)...(19): siRNA sense strand
cagaauauggcuuggccua

SEQ ID NO: 2459065 - RNA, 19 nt, Homo sapiens
  misc_RNA (1)...(19): siRNA sense strand
ggggagguauguugggaaa

SEQ ID NO: 2459066 - RNA, 19 nt, Homo sapiens
  misc_RNA (1)...(19): siRNA sense strand
gggagaagaaauuagugaa

SEQ ID NO: 2459067 - RNA, 19 nt, Homo sapiens
  misc_RNA (1)...(19): siRNA sense strand
guuucagagacuagagaau

SEQ ID NO: 2459068 - RNA, 19 nt, Homo sapiens
  misc_RNA (1)...(19): siRNA sense strand
ggugaaaacagaauacaaa

SEQ ID NO: 2459069 - RNA, 19 nt, Homo sapiens
  misc_RNA (1)...(19): siRNA sense strand
ggguuuaguuccucugcaa

SEQ ID NO: 2459070 - RNA, 19 nt, Homo sapiens
  misc_RNA (1)...(19): siRNA sense strand
agugggaguucuuggguuu

SEQ ID NO: 2459071 - RNA, 19 nt, Homo sapiens
  misc_RNA (1)...(19): siRNA sense strand
ggguaaccgguaauggaaa

SEQ ID NO: 2459072 - RNA, 19 nt, Homo sapiens
  misc_RNA (1)...(19): siRNA sense strand
cuaccacagaggaaggaaa

SEQ ID NO: 2459073 - RNA, 19 nt, Homo sapiens
  misc_RNA (1)...(19): siRNA sense strand
gguaaccgguaauggaaaa

SEQ ID NO: 2459074 - RNA, 19 nt, Homo sapiens
  misc_RNA (1)...(19): siRNA sense strand
agaaggagaaacagcagaa

SEQ ID NO: 2459075 - RNA, 19 nt, Homo sapiens
  misc_RNA (1)...(19): siRNA sense strand
cgccagaugugucggaaga

SEQ ID NO: 2459076 - RNA, 19 nt, Homo sapiens
  misc_RNA (1)...(19): siRNA sense strand
aauacaaagccacagaaua

SEQ ID NO: 2459077 - RNA, 19 nt, Homo sapiens
  misc_RNA (1)...(19): siRNA sense strand
guauccaggaagucagaaa

SEQ ID NO: 2459078 - RNA, 19 nt, Homo sapiens
  misc_RNA (1)...(19): siRNA sense strand
gggaaagacuauaaggagc

SEQ ID NO: 2459079 - RNA, 19 nt, Homo sapiens
  misc_RNA (1)...(19): siRNA sense strand
ccagaagucaggacagaga

SEQ ID NO: 2459080 - RNA, 19 nt, Homo sapiens
  misc_RNA (1)...(19): siRNA sense strand
caagagagaugaugagccu

SEQ ID NO: 2459081 - RNA, 19 nt, Homo sapiens
  misc_RNA (1)...(19): siRNA sense strand
guaaggaagcaauggggaa

SEQ ID NO: 2459082 - RNA, 19 nt, Homo sapiens
  misc_RNA (1)...(19): siRNA sense strand
uuagaggacaagacaauaa

SEQ ID NO: 2459083 - RNA, 19 nt, Homo sapiens
  misc_RNA (1)...(19): siRNA sense strand
gugacaagguccuggugca

SEQ ID NO: 2459084 - RNA, 19 nt, Homo sapiens
  misc_RNA (1)...(19): siRNA sense strand
agcaagaacgauuaugaaa

SEQ ID NO: 2459085 - RNA, 19 nt, Homo sapiens
  misc_RNA (1)...(19): siRNA sense strand
gagcaacuuaucaggguuu

SEQ ID NO: 2459086 - RNA, 19 nt, Homo sapiens
  misc_RNA (1)...(19): siRNA sense strand
gcuagagaaugacagggaa

SEQ ID NO: 2459087 - RNA, 19 nt, Homo sapiens
  misc_RNA (1)...(19): siRNA sense strand
ucugguaggcccaagaaua

SEQ ID NO: 2459088 - RNA, 19 nt, Homo sapiens
  misc_RNA (1)...(19): siRNA sense strand
cgauuuacaagguugggua

SEQ ID NO: 2459089 - RNA, 19 nt, Homo sapiens
  misc_RNA (1)...(19): siRNA sense strand
agagcagggagaagaaauu

SEQ ID NO: 2459090 - RNA, 19 nt, Homo sapiens
  misc_RNA (1)...(19): siRNA sense strand
cugcacuaccacagaggaa

SEQ ID NO: 2459091 - RNA, 19 nt, Homo sapiens
  misc_RNA (1)...(19): siRNA sense strand
augcuaaacugcagccaga

SEQ ID NO: 2459092 - RNA, 19 nt, Homo sapiens
  misc_RNA (1)...(19): siRNA sense strand
augaacagaaagaugcaaa

SEQ ID NO: 2459093 - RNA, 19 nt, Homo sapiens
  misc_RNA (1)...(19): siRNA sense strand
acuacuugacugugaagaa

SEQ ID NO: 2459094 - RNA, 19 nt, Homo sapiens
  misc_RNA (1)...(19): siRNA sense strand
cgaaaguggugaaaacaga

SEQ ID NO: 2459095 - RNA, 19 nt, Homo sapiens
  misc_RNA (1)...(19): siRNA sense strand
aggacaagagcgaggacca

SEQ ID NO: 2459096 - RNA, 19 nt, Homo sapiens
  misc_RNA (1)...(19): siRNA sense strand
gugugaaguauuugaaagu

SEQ ID NO: 2459097 - RNA, 19 nt, Homo sapiens
  misc_RNA (1)...(19): siRNA sense strand
ggaucaagauguggagacu

SEQ ID NO: 2459098 - RNA, 19 nt, Homo sapiens
  misc_RNA (1)...(19): siRNA sense strand
cugaaaaguggcaguacaa

SEQ ID NO: 2459099 - RNA, 19 nt, Homo sapiens
  misc_RNA (1)...(19): siRNA sense strand
cuuauguucccgagaguuu

SEQ ID NO: 2459100 - RNA, 19 nt, Homo sapiens
  misc_RNA (1)...(19): siRNA sense strand
cugguaggcccaagaauau

SEQ ID NO: 2459101 - RNA, 19 nt, Homo sapiens
  misc_RNA (1)...(19): siRNA sense strand
ccgggaaagaugaggaaag

SEQ ID NO: 2459102 - RNA, 19 nt, Homo sapiens
  misc_RNA (1)...(19): siRNA sense strand
gugacagaauuuaacaaga

SEQ ID NO: 2459103 - RNA, 19 nt, Homo sapiens
  misc_RNA (1)...(19): siRNA sense strand
acaauaaagggauguauca

SEQ ID NO: 2459104 - RNA, 19 nt, Homo sapiens
  misc_RNA (1)...(19): siRNA sense strand
acacgaaaguggugaaaac

SEQ ID NO: 2459105 - RNA, 19 nt, Homo sapiens
  misc_RNA (1)...(19): siRNA sense strand
acaucugugugaagccaaa

SEQ ID NO: 2459106 - RNA, 19 nt, Homo sapiens
  misc_RNA (1)...(19): siRNA sense strand
aucaagauguggagacuga

SEQ ID NO: 2459107 - RNA, 19 nt, Homo sapiens
  misc_RNA (1)...(19): siRNA sense strand
gggaaagagcagggagaag

SEQ ID NO: 2459108 - RNA, 19 nt, Homo sapiens
  misc_RNA (1)...(19): siRNA sense strand
ccacagaggaaggaaauca

SEQ ID NO: 2459109 - RNA, 19 nt, Homo sapiens
  misc_RNA (1)...(19): siRNA sense strand
ugcacaauucucugggaaa

SEQ ID NO: 2459110 - RNA, 19 nt, Homo sapiens
  misc_RNA (1)...(19): siRNA sense strand
ccaugagcaagaacgauua

SEQ ID NO: 2459111 - RNA, 19 nt, Homo sapiens
  misc_RNA (1)...(19): siRNA sense strand
cuuccucccuaauggguaa

SEQ ID NO: 2459112 - RNA, 19 nt, Homo sapiens
  misc_RNA (1)...(19): siRNA sense strand
aagacuauaaggagcagaa

SEQ ID NO: 2459113 - RNA, 19 nt, Homo sapiens
  misc_RNA (1)...(19): siRNA sense strand
cagaaaugaaagugacaag

SEQ ID NO: 2459114 - RNA, 19 nt, Homo sapiens
  misc_RNA (1)...(19): siRNA sense strand
acgaagcagcagaguuaau

SEQ ID NO: 2459115 - RNA, 19 nt, Homo sapiens
  misc_RNA (1)...(19): siRNA sense strand
cuguacaauuucagcacuu

SEQ ID NO: 2459116 - RNA, 19 nt, Homo sapiens
  misc_RNA (1)...(19): siRNA sense strand
cugaagggccacagaggaa

SEQ ID NO: 2459117 - RNA, 19 nt, Homo sapiens
  misc_RNA (1)...(19): siRNA sense strand
ugggauggauucagggcaa

SEQ ID NO: 2459118 - RNA, 19 nt, Homo sapiens
  misc_RNA (1)...(19): siRNA sense strand
cugaggugccugaggacaa

SEQ ID NO: 2459119 - RNA, 19 nt, Homo sapiens
  misc_RNA (1)...(19): siRNA sense strand
augaugaaauacugggcua

SEQ ID NO: 2459120 - RNA, 19 nt, Homo sapiens
  misc_RNA (1)...(19): siRNA sense strand
cgggaauccuaaugggaac

SEQ ID NO: 2459121 - RNA, 19 nt, Homo sapiens
  misc_RNA (1)...(19): siRNA sense strand
ccugcaucgcccugggaua

SEQ ID NO: 2459122 - RNA, 19 nt, Homo sapiens
  misc_RNA (1)...(19): siRNA sense strand
cggaagaugaugaaauacu

SEQ ID NO: 2459123 - RNA, 19 nt, Homo sapiens
  misc_RNA (1)...(19): siRNA sense strand
augauuaugagaagaguga

SEQ ID NO: 2459124 - RNA, 19 nt, Homo sapiens
  misc_RNA (1)...(19): siRNA sense strand
gagaaggagccacggagga

SEQ ID NO: 2459125 - RNA, 19 nt, Homo sapiens
  misc_RNA (1)...(19): siRNA sense strand
auuugcaccuuguggcuaa

SEQ ID NO: 2459126 - RNA, 19 nt, Homo sapiens
  misc_RNA (1)...(19): siRNA sense strand
ccgggaauccuaaugggaa

SEQ ID NO: 2459127 - RNA, 19 nt, Homo sapiens
  misc_RNA (1)...(19): siRNA sense strand
cggacagagacucaaagaa

SEQ ID NO: 2459128 - RNA, 19 nt, Homo sapiens
  misc_RNA (1)...(19): siRNA sense strand
agaucuauugucucagaaa

SEQ ID NO: 2459129 - RNA, 19 nt, Homo sapiens
  misc_RNA (1)...(19): siRNA sense strand
ccaaggagcugcugacccu

SEQ ID NO: 2459130 - RNA, 19 nt, Homo sapiens
  misc_RNA (1)...(19): siRNA sense strand
ggaccaaauugaaaggcaa

SEQ ID NO: 2459131 - RNA, 19 nt, Homo sapiens
  misc_RNA (1)...(19): siRNA sense strand
caagaaaaggaaagagaua

SEQ ID NO: 2459132 - RNA, 19 nt, Homo sapiens
  misc_RNA (1)...(19): siRNA sense strand
gggagaagcagguuggaga

SEQ ID NO: 2459133 - RNA, 19 nt, Homo sapiens
  misc_RNA (1)...(19): siRNA sense strand
guugaagagcugaaagaau

SEQ ID NO: 2459134 - RNA, 19 nt, Homo sapiens
  misc_RNA (1)...(19): siRNA sense strand
agaaacagacauaguggaa

SEQ ID NO: 2459135 - RNA, 19 nt, Homo sapiens
  misc_RNA (1)...(19): siRNA sense strand
ugugaaaggucgagcucuu

SEQ ID NO: 2459136 - RNA, 19 nt, Homo sapiens
  misc_RNA (1)...(19): siRNA sense strand
aguacaaagcagacaguau

SEQ ID NO: 2459137 - RNA, 19 nt, Homo sapiens
  misc_RNA (1)...(19): siRNA sense strand
ugauaaaggauguagagau

SEQ ID NO: 2459138 - RNA, 19 nt, Homo sapiens
  misc_RNA (1)...(19): siRNA sense strand
ucaccagggucaugggauu

SEQ ID NO: 2459139 - RNA, 19 nt, Homo sapiens
  misc_RNA (1)...(19): siRNA sense strand
gcgccauggacaaggagaa

SEQ ID NO: 2459140 - RNA, 19 nt, Homo sapiens
  misc_RNA (1)...(19): siRNA sense strand
aggaagaaguggcaaagau

SEQ ID NO: 2459141 - RNA, 19 nt, Homo sapiens
  misc_RNA (1)...(19): siRNA sense strand
cuguagaacauaugacauu

SEQ ID NO: 2459142 - RNA, 19 nt, Homo sapiens
  misc_RNA (1)...(19): siRNA sense strand
gaggauugugcuuguguaa

SEQ ID NO: 2459143 - RNA, 19 nt, Homo sapiens
  misc_RNA (1)...(19): siRNA sense strand
uggaacagcagaaggaaaa

SEQ ID NO: 2459144 - RNA, 19 nt, Homo sapiens
  misc_RNA (1)...(19): siRNA sense strand
cgguugaagagcugaaaga

SEQ ID NO: 2459145 - RNA, 19 nt, Homo sapiens
  misc_RNA (1)...(19): siRNA sense strand
ggaacugggaaucgaguau

SEQ ID NO: 2459146 - RNA, 19 nt, Homo sapiens
  misc_RNA (1)...(19): siRNA sense strand
gauugaaagaccuguagaa

SEQ ID NO: 2459147 - RNA, 19 nt, Homo sapiens
  misc_RNA (1)...(19): siRNA sense strand
aggcaaagaggcagagacu

SEQ ID NO: 2459148 - RNA, 19 nt, Homo sapiens
  misc_RNA (1)...(19): siRNA sense strand
cugaauaugauggaagaaa

SEQ ID NO: 2459149 - RNA, 19 nt, Homo sapiens
  misc_RNA (1)...(19): siRNA sense strand
gagcugaaagaauuggaaa

SEQ ID NO: 2459150 - RNA, 19 nt, Homo sapiens
  misc_RNA (1)...(19): siRNA sense strand
gaugaaagaggaaggcuga

SEQ ID NO: 2459151 - RNA, 19 nt, Homo sapiens
  misc_RNA (1)...(19): siRNA sense strand
gucaggaagaaguggcaaa

SEQ ID NO: 2459152 - RNA, 19 nt, Homo sapiens
  misc_RNA (1)...(19): siRNA sense strand
aggaaucgccauuggaaga

SEQ ID NO: 2459153 - RNA, 19 nt, Homo sapiens
  misc_RNA (1)...(19): siRNA sense strand
gcguauaugauaaggaauc

SEQ ID NO: 2459154 - RNA, 19 nt, Homo sapiens
  misc_RNA (1)...(19): siRNA sense strand
ccauggacaaggagaauca

SEQ ID NO: 2459155 - RNA, 19 nt, Homo sapiens
  misc_RNA (1)...(19): siRNA sense strand
ugaugaaagucaggaagaa

SEQ ID NO: 2459156 - RNA, 19 nt, Homo sapiens
  misc_RNA (1)...(19): siRNA sense strand
ggugaaugggagagaugau

SEQ ID NO: 2459157 - RNA, 19 nt, Homo sapiens
  misc_RNA (1)...(19): siRNA sense strand
gaagaagaacauaccggua

SEQ ID NO: 2459158 - RNA, 19 nt, Homo sapiens
  misc_RNA (1)...(19): siRNA sense strand
uggacaaggagaaucauua

SEQ ID NO: 2459159 - RNA, 19 nt, Homo sapiens
  misc_RNA (1)...(19): siRNA sense strand
uggucuggaucuugaggaa

SEQ ID NO: 2459160 - RNA, 19 nt, Homo sapiens
  misc_RNA (1)...(19): siRNA sense strand
gcugaaagaauuggaaaga

SEQ ID NO: 2459161 - RNA, 19 nt, Homo sapiens
  misc_RNA (1)...(19): siRNA sense strand
cgugcuggcuucuggaauu

SEQ ID NO: 2459162 - RNA, 19 nt, Homo sapiens
  misc_RNA (1)...(19): siRNA sense strand
agacaagggaucuguuuau

SEQ ID NO: 2459163 - RNA, 19 nt, Homo sapiens
  misc_RNA (1)...(19): siRNA sense strand
ugaaagaggaaggcugaaa

SEQ ID NO: 2459164 - RNA, 19 nt, Homo sapiens
  misc_RNA (1)...(19): siRNA sense strand
ggaauggaugugaaccaaa

SEQ ID NO: 2459165 - RNA, 19 nt, Homo sapiens
  misc_RNA (1)...(19): siRNA sense strand
guccaguaaccuugguaua

SEQ ID NO: 2459166 - RNA, 19 nt, Homo sapiens
  misc_RNA (1)...(19): siRNA sense strand
ggacaaaacauucugguga

SEQ ID NO: 2459167 - RNA, 19 nt, Homo sapiens
  misc_RNA (1)...(19): siRNA sense strand
uuggaagacagaagaaauu

SEQ ID NO: 2459168 - RNA, 19 nt, Homo sapiens
  misc_RNA (1)...(19): siRNA sense strand
uuggaacagcagaaggaaa

SEQ ID NO: 2459169 - RNA, 19 nt, Homo sapiens
  misc_RNA (1)...(19): siRNA sense strand
aggauguagagaugcauaa

SEQ ID NO: 2459170 - RNA, 19 nt, Homo sapiens
  misc_RNA (1)...(19): siRNA sense strand
uugaaagaccuguagaaca

SEQ ID NO: 2459171 - RNA, 19 nt, Homo sapiens
  misc_RNA (1)...(19): siRNA sense strand
agaugcuugugaugggaaa

SEQ ID NO: 2459172 - RNA, 19 nt, Homo sapiens
  misc_RNA (1)...(19): siRNA sense strand
ggucaugggauucagucaa

SEQ ID NO: 2459173 - RNA, 19 nt, Homo sapiens
  misc_RNA (1)...(19): siRNA sense strand
ggauugaccagaaggacca

SEQ ID NO: 2459174 - RNA, 19 nt, Homo sapiens
  misc_RNA (1)...(19): siRNA sense strand
gcaaagaugauaaaggaug

SEQ ID NO: 2459175 - RNA, 19 nt, Homo sapiens
  misc_RNA (1)...(19): siRNA sense strand
gaugggaaauuucaggcaa

SEQ ID NO: 2459176 - RNA, 19 nt, Homo sapiens
  misc_RNA (1)...(19): siRNA sense strand
augggaaauuucaggcaau

SEQ ID NO: 2459177 - RNA, 19 nt, Homo sapiens
  misc_RNA (1)...(19): siRNA sense strand
gcgauuuggaggacaccua

SEQ ID NO: 2459178 - RNA, 19 nt, Homo sapiens
  misc_RNA (1)...(19): siRNA sense strand
gaauuucaauggauggaca

SEQ ID NO: 2459179 - RNA, 19 nt, Homo sapiens
  misc_RNA (1)...(19): siRNA sense strand
cuggaauggaugugaacca

SEQ ID NO: 2459180 - RNA, 19 nt, Homo sapiens
  misc_RNA (1)...(19): siRNA sense strand
gcugguaggcaaagaggca

SEQ ID NO: 2459181 - RNA, 19 nt, Homo sapiens
  misc_RNA (1)...(19): siRNA sense strand
guuuaugaucagcaaggaa

SEQ ID NO: 2459182 - RNA, 19 nt, Homo sapiens
  misc_RNA (1)...(19): siRNA sense strand
cagacauaguggaagugau

SEQ ID NO: 2459183 - RNA, 19 nt, Homo sapiens
  misc_RNA (1)...(19): siRNA sense strand
auacaguguugcugauuca

SEQ ID NO: 2459184 - RNA, 19 nt, Homo sapiens
  misc_RNA (1)...(19): siRNA sense strand
ggagaagcagguuggagau

SEQ ID NO: 2459185 - RNA, 19 nt, Homo sapiens
  misc_RNA (1)...(19): siRNA sense strand
gacaaaacauucuggugaa

SEQ ID NO: 2459186 - RNA, 19 nt, Homo sapiens
  misc_RNA (1)...(19): siRNA sense strand
aaaagaagauugaagcaga

SEQ ID NO: 2459187 - RNA, 19 nt, Homo sapiens
  misc_RNA (1)...(19): siRNA sense strand
ccauuggaagacagaagaa

SEQ ID NO: 2459188 - RNA, 19 nt, Homo sapiens
  misc_RNA (1)...(19): siRNA sense strand
guuaguuggaacagcagaa

SEQ ID NO: 2459189 - RNA, 19 nt, Homo sapiens
  misc_RNA (1)...(19): siRNA sense strand
gauggaagaaaaugacaaa

SEQ ID NO: 2459190 - RNA, 19 nt, Homo sapiens
  misc_RNA (1)...(19): siRNA sense strand
auguagagaugcauaacuu

SEQ ID NO: 2459191 - RNA, 19 nt, Homo sapiens
  misc_RNA (1)...(19): siRNA sense strand
aaauaaaguccuagaugcu

SEQ ID NO: 2459192 - RNA, 19 nt, Homo sapiens
  misc_RNA (1)...(19): siRNA sense strand
accuaaaguggaagcgauu

SEQ ID NO: 2459193 - RNA, 19 nt, Homo sapiens
  misc_RNA (1)...(19): siRNA sense strand
aagaaguggcaaagaugau

SEQ ID NO: 2459194 - RNA, 19 nt, Homo sapiens
  misc_RNA (1)...(19): siRNA sense strand
ggaaaggaaccaaggcuca

SEQ ID NO: 2459195 - RNA, 19 nt, Homo sapiens
  misc_RNA (1)...(19): siRNA sense strand
aaaccaaacucuagccucu

SEQ ID NO: 2459196 - RNA, 19 nt, Homo sapiens
  misc_RNA (1)...(19): siRNA sense strand
cugcaagaugggagugguu

SEQ ID NO: 2459197 - RNA, 19 nt, Homo sapiens
  misc_RNA (1)...(19): siRNA sense strand
accaaggcucagagaagaa

SEQ ID NO: 2459198 - RNA, 19 nt, Homo sapiens
  misc_RNA (1)...(19): siRNA sense strand
gcuugaaagaggagauaaa

SEQ ID NO: 2459199 - RNA, 19 nt, Homo sapiens
  misc_RNA (1)...(19): siRNA sense strand
acaacuagguauggagaaa

SEQ ID NO: 2459200 - RNA, 19 nt, Homo sapiens
  misc_RNA (1)...(19): siRNA sense strand
gugaaaaugaagagaggua

SEQ ID NO: 2459201 - RNA, 19 nt, Homo sapiens
  misc_RNA (1)...(19): siRNA sense strand
ucacaguaaaccugagaua

SEQ ID NO: 2459202 - RNA, 19 nt, Homo sapiens
  misc_RNA (1)...(19): siRNA sense strand
acaguaaaccugagauaau

SEQ ID NO: 2459203 - RNA, 19 nt, Homo sapiens
  misc_RNA (1)...(19): siRNA sense strand
cccaauaaucauaggaaga

SEQ ID NO: 2459204 - RNA, 19 nt, Homo sapiens
  misc_RNA (1)...(19): siRNA sense strand
gguuacaaaugaaggacuu

SEQ ID NO: 2459205 - RNA, 19 nt, Homo sapiens
  misc_RNA (1)...(19): siRNA sense strand
aauucaagaugcagaagaa

SEQ ID NO: 2459206 - RNA, 19 nt, Homo sapiens
  misc_RNA (1)...(19): siRNA sense strand
cauaauuucagaagaggaa

SEQ ID NO: 2459207 - RNA, 19 nt, Homo sapiens
  misc_RNA (1)...(19): siRNA sense strand
caggaaugguacagagagu

SEQ ID NO: 2459208 - RNA, 19 nt, Homo sapiens
  misc_RNA (1)...(19): siRNA sense strand
ccaaauggugguagagguu

SEQ ID NO: 2459209 - RNA, 19 nt, Homo sapiens
  misc_RNA (1)...(19): siRNA sense strand
auaaaguaguauuggcaga

SEQ ID NO: 2459210 - RNA, 19 nt, Homo sapiens
  misc_RNA (1)...(19): siRNA sense strand
uugaaagaccugauaacaa

SEQ ID NO: 2459211 - RNA, 19 nt, Homo sapiens
  misc_RNA (1)...(19): siRNA sense strand
uggaaaucugcuugguaaa

SEQ ID NO: 2459212 - RNA, 19 nt, Homo sapiens
  misc_RNA (1)...(19): siRNA sense strand
auaagaaagccauguacaa

SEQ ID NO: 2459213 - RNA, 19 nt, Homo sapiens
  misc_RNA (1)...(19): siRNA sense strand
gggaagaguaauucaagau

SEQ ID NO: 2459214 - RNA, 19 nt, Homo sapiens
  misc_RNA (1)...(19): siRNA sense strand
ugaaaaugccacaugaaaa

SEQ ID NO: 2459215 - RNA, 19 nt, Homo sapiens
  misc_RNA (1)...(19): siRNA sense strand
guauuagaaaugugccaua

SEQ ID NO: 2459216 - RNA, 19 nt, Homo sapiens
  misc_RNA (1)...(19): siRNA sense strand
aaguaguauuggcagauua

SEQ ID NO: 2459217 - RNA, 19 nt, Homo sapiens
  misc_RNA (1)...(19): siRNA sense strand
ccgaaauucuucaacaaaa

SEQ ID NO: 2459218 - RNA, 19 nt, Homo sapiens
  misc_RNA (1)...(19): siRNA sense strand
cucaagaauaugugaaaga

SEQ ID NO: 2459219 - RNA, 19 nt, Homo sapiens
  misc_RNA (1)...(19): siRNA sense strand
ccaacgagagauagagcau

SEQ ID NO: 2459220 - RNA, 19 nt, Homo sapiens
  misc_RNA (1)...(19): siRNA sense strand
cuucuaucuuggagcuuua

SEQ ID NO: 2459221 - RNA, 19 nt, Homo sapiens
  misc_RNA (1)...(19): siRNA sense strand
caauagaggccaaggaccu

SEQ ID NO: 2459222 - RNA, 19 nt, Homo sapiens
  misc_RNA (1)...(19): siRNA sense strand
aguaauaguggaaggggaa

SEQ ID NO: 2459223 - RNA, 19 nt, Homo sapiens
  misc_RNA (1)...(19): siRNA sense strand
guuaauagcuugaaagagg

SEQ ID NO: 2459224 - RNA, 19 nt, Homo sapiens
  misc_RNA (1)...(19): siRNA sense strand
ggucaaacaacuagguaug

SEQ ID NO: 2459225 - RNA, 19 nt, Homo sapiens
  misc_RNA (1)...(19): siRNA sense strand
ucguagaaauccagcagau

SEQ ID NO: 2459226 - RNA, 19 nt, Homo sapiens
  misc_RNA (1)...(19): siRNA sense strand
agauuuaggaacuguggaa

SEQ ID NO: 2459227 - RNA, 19 nt, Homo sapiens
  misc_RNA (1)...(19): siRNA sense strand
cuguguggguucaguuuaa

SEQ ID NO: 2459228 - RNA, 19 nt, Homo sapiens
  misc_RNA (1)...(19): siRNA sense strand
auggagaaaugaacaggua

SEQ ID NO: 2459229 - RNA, 19 nt, Homo sapiens
  misc_RNA (1)...(19): siRNA sense strand
cucaauugauagugggcau

SEQ ID NO: 2459230 - RNA, 19 nt, Homo sapiens
  misc_RNA (1)...(19): siRNA sense strand
gggucaucguauuuguuua

SEQ ID NO: 2459231 - RNA, 19 nt, Homo sapiens
  misc_RNA (1)...(19): siRNA sense strand
cguaauaugaacaucaaga

SEQ ID NO: 2459232 - RNA, 19 nt, Homo sapiens
  misc_RNA (1)...(19): siRNA sense strand
ccacagacaacaaugccaa

SEQ ID NO: 2459233 - RNA, 19 nt, Homo sapiens
  misc_RNA (1)...(19): siRNA sense strand
ucagaagaggaaaggaaaa

SEQ ID NO: 2459234 - RNA, 19 nt, Homo sapiens
  misc_RNA (1)...(19): siRNA sense strand
ggagaaaugaacagguauc

SEQ ID NO: 2459235 - RNA, 19 nt, Homo sapiens
  misc_RNA (1)...(19): siRNA sense strand
gaaaccaguaauaguggaa

SEQ ID NO: 2459236 - RNA, 19 nt, Homo sapiens
  misc_RNA (1)...(19): siRNA sense strand
ccagauuugcagaaggaca

SEQ ID NO: 2459237 - RNA, 19 nt, Homo sapiens
  misc_RNA (1)...(19): siRNA sense strand
cagcaaaauaccaugaaau

SEQ ID NO: 2459238 - RNA, 19 nt, Homo sapiens
  misc_RNA (1)...(19): siRNA sense strand
cguacauuaagaagcauua

SEQ ID NO: 2459239 - RNA, 19 nt, Homo sapiens
  misc_RNA (1)...(19): siRNA sense strand
guuuggaaguugcaaucaa

SEQ ID NO: 2459240 - RNA, 19 nt, Homo sapiens
  misc_RNA (1)...(19): siRNA sense strand
agacuacaucaaacagaaa

SEQ ID NO: 2459241 - RNA, 19 nt, Homo sapiens
  misc_RNA (1)...(19): siRNA sense strand
ggaccaugcuaaugagggu

SEQ ID NO: 2459242 - RNA, 19 nt, Homo sapiens
  misc_RNA (1)...(19): siRNA sense strand
gauaagaaagccauguaca

SEQ ID NO: 2459243 - RNA, 19 nt, Homo sapiens
  misc_RNA (1)...(19): siRNA sense strand
auuuaggaacuguggaaga

SEQ ID NO: 2459244 - RNA, 19 nt, Homo sapiens
  misc_RNA (1)...(19): siRNA sense strand
aguggaaggggaagaguaa

SEQ ID NO: 2459245 - RNA, 19 nt, Homo sapiens
  misc_RNA (1)...(19): siRNA sense strand
ucuucauucucaugguaua

SEQ ID NO: 2459246 - RNA, 19 nt, Homo sapiens
  misc_RNA (1)...(19): siRNA sense strand
gauggaaauacgaucacua

SEQ ID NO: 2459247 - RNA, 19 nt, Homo sapiens
  misc_RNA (1)...(19): siRNA sense strand
aaaugaaggacuuggucuu

SEQ ID NO: 2459248 - RNA, 19 nt, Homo sapiens
  misc_RNA (1)...(19): siRNA sense strand
aagaucaggaggaggugaa

SEQ ID NO: 2459249 - RNA, 19 nt, Homo sapiens
  misc_RNA (1)...(19): siRNA sense strand
agauaucuagugauggaaa

SEQ ID NO: 2459250 - RNA, 19 nt, Homo sapiens
  misc_RNA (1)...(19): siRNA sense strand
aagaguaauucaagaugca

SEQ ID NO: 2459251 - RNA, 19 nt, Homo sapiens
  misc_RNA (1)...(19): siRNA sense strand
gaguaauucaagaugcaga

SEQ ID NO: 2459252 - RNA, 19 nt, Homo sapiens
  misc_RNA (1)...(19): siRNA sense strand
caguaauaguggaagggga

SEQ ID NO: 2459253 - RNA, 19 nt, Homo sapiens
  misc_RNA (1)...(19): siRNA sense strand
gaagagagguacucaccca

SEQ ID NO: 2459254 - RNA, 19 nt, Homo sapiens
  misc_RNA (1)...(19): siRNA sense strand
cuacugaauaugacagcau

SEQ ID NO: 2459255 - RNA, 19 nt, Homo sapiens
  misc_RNA (1)...(19): siRNA sense strand
gcagaaggacacaucaaaa

SEQ ID NO: 2459256 - RNA, 19 nt, Homo sapiens
  misc_RNA (1)...(19): siRNA sense strand
acaacagugguuugggaau

SEQ ID NO: 2459257 - RNA, 19 nt, Homo sapiens
  misc_RNA (1)...(19): siRNA sense strand
aguaauucaagaugcagaa

SEQ ID NO: 2459258 - RNA, 19 nt, Homo sapiens
  misc_RNA (1)...(19): siRNA sense strand
agacugaaaccguacaaca

SEQ ID NO: 2459259 - RNA, 19 nt, Homo sapiens
  misc_RNA (1)...(19): siRNA sense strand
gguauggagaaaaugaaaa

SEQ ID NO: 2459260 - RNA, 19 nt, Homo sapiens
  misc_RNA (1)...(19): siRNA sense strand
ccauguacaaagcaggaau

SEQ ID NO: 2459261 - RNA, 19 nt, Homo sapiens
  misc_RNA (1)...(19): siRNA sense strand
cauaauggagaaaugaaca

SEQ ID NO: 2459262 - RNA, 19 nt, Homo sapiens
  misc_RNA (1)...(19): siRNA sense strand
cugcagugccugagcaaca

SEQ ID NO: 2459263 - RNA, 19 nt, Homo sapiens
  misc_RNA (1)...(19): siRNA sense strand
aggaugugcuugauggaga

SEQ ID NO: 2459264 - RNA, 19 nt, Homo sapiens
  misc_RNA (1)...(19): siRNA sense strand
gaaaauaucuagaacggga

SEQ ID NO: 2459265 - RNA, 19 nt, Homo sapiens
  misc_RNA (1)...(19): siRNA sense strand
caucugaguucaagaccca

SEQ ID NO: 2459266 - RNA, 19 nt, Homo sapiens
  misc_RNA (1)...(19): siRNA sense strand
cgaggugaaccgagugaca

SEQ ID NO: 2459267 - RNA, 19 nt, Homo sapiens
  misc_RNA (1)...(19): siRNA sense strand
cuuaagagaauuugccuca

SEQ ID NO: 2459268 - RNA, 19 nt, Homo sapiens
  misc_RNA (1)...(19): siRNA sense strand
cguggaagaguuugcaaaa

SEQ ID NO: 2459269 - RNA, 19 nt, Homo sapiens
  misc_RNA (1)...(19): siRNA sense strand
ugugcuugauggagaugaa

SEQ ID NO: 2459270 - RNA, 19 nt, Homo sapiens
  misc_RNA (1)...(19): siRNA sense strand
agagaauuugccucagaaa

SEQ ID NO: 2459271 - RNA, 19 nt, Homo sapiens
  misc_RNA (1)...(19): siRNA sense strand
auucagaccauauggacuu

SEQ ID NO: 2459272 - RNA, 19 nt, Homo sapiens
  misc_RNA (1)...(19): siRNA sense strand
ggccgacagauguggagaa

SEQ ID NO: 2459273 - RNA, 19 nt, Homo sapiens
  misc_RNA (1)...(19): siRNA sense strand
ucguggaagaguuugcaaa

SEQ ID NO: 2459274 - RNA, 19 nt, Homo sapiens
  misc_RNA (1)...(19): siRNA sense strand
cugcagugccugagcaaca

SEQ ID NO: 2459275 - RNA, 19 nt, Homo sapiens
  misc_RNA (1)...(19): siRNA sense strand
aggaugugcuugauggaga

SEQ ID NO: 2459276 - RNA, 19 nt, Homo sapiens
  misc_RNA (1)...(19): siRNA sense strand
gaaaauaucuagaacggga

SEQ ID NO: 2459277 - RNA, 19 nt, Homo sapiens
  misc_RNA (1)...(19): siRNA sense strand
caucugaguucaagaccca

SEQ ID NO: 2459278 - RNA, 19 nt, Homo sapiens
  misc_RNA (1)...(19): siRNA sense strand
cgaggugaaccgagugaca

SEQ ID NO: 2459279 - RNA, 19 nt, Homo sapiens
  misc_RNA (1)...(19): siRNA sense strand
cuuaagagaauuugccuca

SEQ ID NO: 2459280 - RNA, 19 nt, Homo sapiens
  misc_RNA (1)...(19): siRNA sense strand
cguggaagaguuugcaaaa

SEQ ID NO: 2459281 - RNA, 19 nt, Homo sapiens
  misc_RNA (1)...(19): siRNA sense strand
ugugcuugauggagaugaa

SEQ ID NO: 2459282 - RNA, 19 nt, Homo sapiens
  misc_RNA (1)...(19): siRNA sense strand
agagaauuugccucagaaa

SEQ ID NO: 2459283 - RNA, 19 nt, Homo sapiens
  misc_RNA (1)...(19): siRNA sense strand
auucagaccauauggacuu

SEQ ID NO: 2459284 - RNA, 19 nt, Homo sapiens
  misc_RNA (1)...(19): siRNA sense strand
ggccgacagauguggagaa

SEQ ID NO: 2459285 - RNA, 19 nt, Homo sapiens
  misc_RNA (1)...(19): siRNA sense strand
ucguggaagaguuugcaaa

SEQ ID NO: 2459286 - RNA, 19 nt, Homo sapiens
  misc_RNA (1)...(19): siRNA sense strand
ugccauuaauguggagaaa

SEQ ID NO: 2459287 - RNA, 19 nt, Homo sapiens
  misc_RNA (1)...(19): siRNA sense strand
gccacgaggccgagaaacu

SEQ ID NO: 2459288 - RNA, 19 nt, Homo sapiens
  misc_RNA (1)...(19): siRNA sense strand
aaguacacguucagcccua

SEQ ID NO: 2459289 - RNA, 19 nt, Homo sapiens
  misc_RNA (1)...(19): siRNA sense strand
gccucaaguccguggagaa

SEQ ID NO: 2459290 - RNA, 19 nt, Homo sapiens
  misc_RNA (1)...(19): siRNA sense strand
cggaggagccccaggaaau

SEQ ID NO: 2459291 - RNA, 19 nt, Homo sapiens
  misc_RNA (1)...(19): siRNA sense strand
cagcauggccagugggaug

SEQ ID NO: 2459292 - RNA, 19 nt, Homo sapiens
  misc_RNA (1)...(19): siRNA sense strand
aaauggaagugaacgguca

SEQ ID NO: 2459293 - RNA, 19 nt, Homo sapiens
  misc_RNA (1)...(19): siRNA sense strand
agaaggaggccgagcccau

SEQ ID NO: 2459294 - RNA, 19 nt, Homo sapiens
  misc_RNA (1)...(19): siRNA sense strand
ccagcaauggugagagcuu

SEQ ID NO: 2459295 - RNA, 19 nt, Homo sapiens
  misc_RNA (1)...(19): siRNA sense strand
aggacgacgcugagcugaa

SEQ ID NO: 2459296 - RNA, 19 nt, Homo sapiens
  misc_RNA (1)...(19): siRNA sense strand
auaacaaggagauugguau

SEQ ID NO: 2459297 - RNA, 19 nt, Homo sapiens
  misc_RNA (1)...(19): siRNA sense strand
cggacuuccuggagcacca

SEQ ID NO: 2459298 - RNA, 19 nt, Homo sapiens
  misc_RNA (1)...(19): siRNA sense strand
ccauggaggacgacgcuga

SEQ ID NO: 2459299 - RNA, 19 nt, Homo sapiens
  misc_RNA (1)...(19): siRNA sense strand
ugucgguguucgagcccaa

SEQ ID NO: 2459300 - RNA, 19 nt, Homo sapiens
  misc_RNA (1)...(19): siRNA sense strand
uggccuacgacgacaagaa

SEQ ID NO: 2459301 - RNA, 19 nt, Homo sapiens
  misc_RNA (1)...(19): siRNA sense strand
augacgacauggacgagaa

SEQ ID NO: 2459302 - RNA, 19 nt, Homo sapiens
  misc_RNA (1)...(19): siRNA sense strand
ugaucaaaauggaagugaa

SEQ ID NO: 2459303 - RNA, 19 nt, Homo sapiens
  misc_RNA (1)...(19): siRNA sense strand
agagugaccgccugagcaa

SEQ ID NO: 2459304 - RNA, 19 nt, Homo sapiens
  misc_RNA (1)...(19): siRNA sense strand
gagaccagcgugugcgaga

SEQ ID NO: 2459305 - RNA, 19 nt, Homo sapiens
  misc_RNA (1)...(19): siRNA sense strand
ugaagcaccgcaagggcaa

SEQ ID NO: 2459306 - RNA, 19 nt, Homo sapiens
  misc_RNA (1)...(19): siRNA sense strand
ccaccaagggcaaccucaa

SEQ ID NO: 2459307 - RNA, 19 nt, Homo sapiens
  misc_RNA (1)...(19): siRNA sense strand
agaacaucgacaagaagau

SEQ ID NO: 2459308 - RNA, 19 nt, Homo sapiens
  misc_RNA (1)...(19): siRNA sense strand
aggaauaagcaaagguguu

SEQ ID NO: 2459309 - RNA, 19 nt, Homo sapiens
  misc_RNA (1)...(19): siRNA sense strand
guguggacuucaugagcaa

SEQ ID NO: 2459310 - RNA, 19 nt, Homo sapiens
  misc_RNA (1)...(19): siRNA sense strand
agucagagaaagaggacca

SEQ ID NO: 2459311 - RNA, 19 nt, Homo sapiens
  misc_RNA (1)...(19): siRNA sense strand
gcaagaaugugcugccuca

SEQ ID NO: 2459312 - RNA, 19 nt, Homo sapiens
  misc_RNA (1)...(19): siRNA sense strand
gggaaaguucauuggccau

SEQ ID NO: 2459313 - RNA, 19 nt, Homo sapiens
  misc_RNA (1)...(19): siRNA sense strand
uggagcagucagagaaaga

SEQ ID NO: 2459314 - RNA, 19 nt, Homo sapiens
  misc_RNA (1)...(19): siRNA sense strand
ucuccgaggaauaagcaaa

SEQ ID NO: 2459315 - RNA, 19 nt, Homo sapiens
  misc_RNA (1)...(19): siRNA sense strand
aguggagcagucagagaaa

SEQ ID NO: 2459316 - RNA, 19 nt, Homo sapiens
  misc_RNA (1)...(19): siRNA sense strand
gcaugauacucaaagguug

SEQ ID NO: 2459317 - RNA, 19 nt, Homo sapiens
  misc_RNA (1)...(19): siRNA sense strand
aggaaguggagcagucaga

SEQ ID NO: 2459318 - RNA, 19 nt, Homo sapiens
  misc_RNA (1)...(19): siRNA sense strand
guaaagaaauuaagagcga

SEQ ID NO: 2459319 - RNA, 19 nt, Homo sapiens
  misc_RNA (1)...(19): siRNA sense strand
cauaaauggacuaggacaa

SEQ ID NO: 2459320 - RNA, 19 nt, Homo sapiens
  misc_RNA (1)...(19): siRNA sense strand
caaugaagcuacuaggcaa

SEQ ID NO: 2459321 - RNA, 19 nt, Homo sapiens
  misc_RNA (1)...(19): siRNA sense strand
aggacaaaucuuagaaaca

SEQ ID NO: 2459322 - RNA, 19 nt, Homo sapiens
  misc_RNA (1)...(19): siRNA sense strand
acagaaaagcaguggacaa

SEQ ID NO: 2459323 - RNA, 19 nt, Homo sapiens
  misc_RNA (1)...(19): siRNA sense strand
ugauagucucucuggaaua

SEQ ID NO: 2459324 - RNA, 19 nt, Homo sapiens
  misc_RNA (1)...(19): siRNA sense strand
agagaaaccugauggccuu

SEQ ID NO: 2459325 - RNA, 19 nt, Homo sapiens
  misc_RNA (1)...(19): siRNA sense strand
cagccaagguggagagcuc

SEQ ID NO: 2459326 - RNA, 19 nt, Homo sapiens
  misc_RNA (1)...(19): siRNA sense strand
aaagaaauuaagagcgaca

SEQ ID NO: 2459327 - RNA, 19 nt, Homo sapiens
  misc_RNA (1)...(19): siRNA sense strand
guauuuaggugcugggaag

SEQ ID NO: 2459328 - RNA, 19 nt, Homo sapiens
  misc_RNA (1)...(19): siRNA sense strand
aggaagugcgcuggagaaa

SEQ ID NO: 2459329 - RNA, 19 nt, Homo sapiens
  misc_RNA (1)...(19): siRNA sense strand
aaagcgaggaggaggaaaa

SEQ ID NO: 2459330 - RNA, 19 nt, Homo sapiens
  misc_RNA (1)...(19): siRNA sense strand
gaugacacugagagaacaa

SEQ ID NO: 2459331 - RNA, 19 nt, Homo sapiens
  misc_RNA (1)...(19): siRNA sense strand
agaaauuaagagcgacaau

SEQ ID NO: 2459332 - RNA, 19 nt, Homo sapiens
  misc_RNA (1)...(19): siRNA sense strand
guaaaagaguagcggucau

SEQ ID NO: 2459333 - RNA, 19 nt, Homo sapiens
  misc_RNA (1)...(19): siRNA sense strand
aggaaaugcaaaggaagaa

SEQ ID NO: 2459334 - RNA, 19 nt, Homo sapiens
  misc_RNA (1)...(19): siRNA sense strand
uuccagaagaagauguaaa

SEQ ID NO: 2459335 - RNA, 19 nt, Homo sapiens
  misc_RNA (1)...(19): siRNA sense strand
ggacaauggccuuagagcu

SEQ ID NO: 2459336 - RNA, 19 nt, Homo sapiens
  misc_RNA (1)...(19): siRNA sense strand
cgcaaagcgaggaggagga

SEQ ID NO: 2459337 - RNA, 19 nt, Homo sapiens
  misc_RNA (1)...(19): siRNA sense strand
gucauaaggcugaagggau

SEQ ID NO: 2459338 - RNA, 19 nt, Homo sapiens
  misc_RNA (1)...(19): siRNA sense strand
aaggaagugcgcuggagaa

SEQ ID NO: 2459339 - RNA, 19 nt, Homo sapiens
  misc_RNA (1)...(19): siRNA sense strand
aggaugacacugagagaac

SEQ ID NO: 2459340 - RNA, 19 nt, Homo sapiens
  misc_RNA (1)...(19): siRNA sense strand
aaacagacuugguuccaga

SEQ ID NO: 2459341 - RNA, 19 nt, Homo sapiens
  misc_RNA (1)...(19): siRNA sense strand
augugagaaacaaggacaa

SEQ ID NO: 2459342 - RNA, 19 nt, Homo sapiens
  misc_RNA (1)...(19): siRNA sense strand
gaacaaaucgauugguccu

SEQ ID NO: 2459343 - RNA, 19 nt, Homo sapiens
  misc_RNA (1)...(19): siRNA sense strand
ccaagaucccagucacaau

SEQ ID NO: 2459344 - RNA, 19 nt, Homo sapiens
  misc_RNA (1)...(19): siRNA sense strand
caacauaguaaaagaguag

SEQ ID NO: 2459345 - RNA, 19 nt, Homo sapiens
  misc_RNA (1)...(19): siRNA sense strand
cuggaauaaguuugcagaa

SEQ ID NO: 2459346 - RNA, 19 nt, Homo sapiens
  misc_RNA (1)...(19): siRNA sense strand
ugaucagaguauuguuaca

SEQ ID NO: 2459347 - RNA, 19 nt, Homo sapiens
  misc_RNA (1)...(19): siRNA sense strand
augcaaaggaagaacaucu

SEQ ID NO: 2459348 - RNA, 19 nt, Homo sapiens
  misc_RNA (1)...(19): siRNA sense strand
uguuagagaccacuggauu

SEQ ID NO: 2459349 - RNA, 19 nt, Homo sapiens
  misc_RNA (1)...(19): siRNA sense strand
gguuccagaagaagaugua

SEQ ID NO: 2459350 - RNA, 19 nt, Homo sapiens
  misc_RNA (1)...(19): siRNA sense strand
ucacaauuaucaccgggua

SEQ ID NO: 2459351 - RNA, 19 nt, Homo sapiens
  misc_RNA (1)...(19): siRNA sense strand
gguauuuaggugcugggaa

SEQ ID NO: 2459352 - RNA, 19 nt, Homo sapiens
  misc_RNA (1)...(19): siRNA sense strand
gggaauggugaggaagaaa

SEQ ID NO: 2459353 - RNA, 19 nt, Homo sapiens
  misc_RNA (1)...(19): siRNA sense strand
ccgcaaggagguuggcgaa

SEQ ID NO: 2459354 - RNA, 19 nt, Homo sapiens
  misc_RNA (1)...(19): siRNA sense strand
gcucaaagaaagcaagcca

SEQ ID NO: 2459355 - RNA, 19 nt, Homo sapiens
  misc_RNA (1)...(19): siRNA sense strand
gggaagagggagaacgucu

SEQ ID NO: 2459356 - RNA, 19 nt, Homo sapiens
  misc_RNA (1)...(19): siRNA sense strand
caauaaugcuggugugguc

SEQ ID NO: 2459357 - RNA, 19 nt, Homo sapiens
  misc_RNA (1)...(19): siRNA sense strand
acaucaacacgcaaagcaa

SEQ ID NO: 2459358 - RNA, 19 nt, Homo sapiens
  misc_RNA (1)...(19): siRNA sense strand
cugggaauggugaggaaga

SEQ ID NO: 2459359 - RNA, 19 nt, Homo sapiens
  misc_RNA (1)...(19): siRNA sense strand
ucaaagaaagcaagccaca

SEQ ID NO: 2459360 - RNA, 19 nt, Homo sapiens
  misc_RNA (1)...(19): siRNA sense strand
gcugaaaaggauggaauua

SEQ ID NO: 2459361 - RNA, 19 nt, Homo sapiens
  misc_RNA (1)...(19): siRNA sense strand
caggaaagaaauugagccu

SEQ ID NO: 2459362 - RNA, 19 nt, Homo sapiens
  misc_RNA (1)...(19): siRNA sense strand
cggcugaaagaguccgcaa

SEQ ID NO: 2459363 - RNA, 19 nt, Homo sapiens
  misc_RNA (1)...(19): siRNA sense strand
agcugggaauggugaggaa

SEQ ID NO: 2459364 - RNA, 19 nt, Homo sapiens
  misc_RNA (1)...(19): siRNA sense strand
cugaaaaggauggaauuaa

SEQ ID NO: 2459365 - RNA, 19 nt, Homo sapiens
  misc_RNA (1)...(19): siRNA sense strand
uggaaggugcauaagggaa

SEQ ID NO: 2459366 - RNA, 19 nt, Homo sapiens
  misc_RNA (1)...(19): siRNA sense strand
caucaaaacuguucggacu

SEQ ID NO: 2459367 - RNA, 19 nt, Homo sapiens
  misc_RNA (1)...(19): siRNA sense strand
auuuauucauggaggaagu

SEQ ID NO: 2459368 - RNA, 19 nt, Homo sapiens
  misc_RNA (1)...(19): siRNA sense strand
acugcuauggugagauuua

SEQ ID NO: 2459369 - RNA, 19 nt, Homo sapiens
  misc_RNA (1)...(19): siRNA sense strand
ccaaagacuggaaggugca

SEQ ID NO: 2459370 - RNA, 19 nt, Homo sapiens
  misc_RNA (1)...(19): siRNA sense strand
auucaagacauuacugcua

SEQ ID NO: 2459371 - RNA, 19 nt, Homo sapiens
  misc_RNA (1)...(19): siRNA sense strand
gggaacgagcaaugggaau

SEQ ID NO: 2459372 - RNA, 19 nt, Homo sapiens
  misc_RNA (1)...(19): siRNA sense strand
aaucagagacuuaagguga

SEQ ID NO: 2459373 - RNA, 19 nt, Homo sapiens
  misc_RNA (1)...(19): siRNA sense strand
cuccaaaguaugagcccaa

SEQ ID NO: 2459374 - RNA, 19 nt, Homo sapiens
  misc_RNA (1)...(19): siRNA sense strand
cagaagacaagaugaaaau

SEQ ID NO: 2459375 - RNA, 19 nt, Homo sapiens
  misc_RNA (1)...(19): siRNA sense strand
auacacacaaagugaagaa

SEQ ID NO: 2459376 - RNA, 19 nt, Homo sapiens
  misc_RNA (1)...(19): siRNA sense strand
ucagaagacaagaugaaaa

SEQ ID NO: 2459377 - RNA, 19 nt, Homo sapiens
  misc_RNA (1)...(19): siRNA sense strand
ccaccugagaacagcggaa

SEQ ID NO: 2459378 - RNA, 19 nt, Homo sapiens
  misc_RNA (1)...(19): siRNA sense strand
ccauggagcaacuguaaaa

SEQ ID NO: 2459379 - RNA, 19 nt, Homo sapiens
  misc_RNA (1)...(19): siRNA sense strand
guguagauguucuucgaga

SEQ ID NO: 2459380 - RNA, 19 nt, Homo sapiens
  misc_RNA (1)...(19): siRNA sense strand
gggacaacauccaggagcu

SEQ ID NO: 2459381 - RNA, 19 nt, Homo sapiens
  misc_RNA (1)...(19): siRNA sense strand
gggcauuauaauuucaaca

SEQ ID NO: 2459382 - RNA, 19 nt, Homo sapiens
  misc_RNA (1)...(19): siRNA sense strand
acgcagauggucagacaga

SEQ ID NO: 2459383 - RNA, 19 nt, Homo sapiens
  misc_RNA (1)...(19): siRNA sense strand
aagaaaacgcagaugguca

SEQ ID NO: 2459384 - RNA, 19 nt, Homo sapiens
  misc_RNA (1)...(19): siRNA sense strand
ccaucgaaguguaaugacu

SEQ ID NO: 2459385 - RNA, 19 nt, Homo sapiens
  misc_RNA (1)...(19): siRNA sense strand
gccuauuagcagaugccaa

SEQ ID NO: 2459386 - RNA, 19 nt, Homo sapiens
  misc_RNA (1)...(19): siRNA sense strand
gcgaaugaucuuugagguc

SEQ ID NO: 2459387 - RNA, 19 nt, Homo sapiens
  misc_RNA (1)...(19): siRNA sense strand
uugaggucaugcagaacaa

SEQ ID NO: 2459388 - RNA, 19 nt, Homo sapiens
  misc_RNA (1)...(19): siRNA sense strand
gccuaugcuucgagagcuu

SEQ ID NO: 2459389 - RNA, 19 nt, Homo sapiens
  misc_RNA (1)...(19): siRNA sense strand
ucaucaacguggaccgcua

SEQ ID NO: 2459390 - RNA, 19 nt, Homo sapiens
  misc_RNA (1)...(19): siRNA sense strand
acuuuagcgccgagggcuu

SEQ ID NO: 2459391 - RNA, 19 nt, Homo sapiens
  misc_RNA (1)...(19): siRNA sense strand
agagaagacaaguuggaua

SEQ ID NO: 2459392 - RNA, 19 nt, Homo sapiens
  misc_RNA (1)...(19): siRNA sense strand
agagaaaaguagauagaga

SEQ ID NO: 2459393 - RNA, 19 nt, Homo sapiens
  misc_RNA (1)...(19): siRNA sense strand
aaguaacaguggagauaga

SEQ ID NO: 2459394 - RNA, 19 nt, Homo sapiens
  misc_RNA (1)...(19): siRNA sense strand
cugcaaaugguguguguau

SEQ ID NO: 2459395 - RNA, 19 nt, Homo sapiens
  misc_RNA (1)...(19): siRNA sense strand
gagaaaaguagauagagaa

SEQ ID NO: 2459396 - RNA, 19 nt, Homo sapiens
  misc_RNA (1)...(19): siRNA sense strand
acugaaaacuguggggaaa

SEQ ID NO: 2459397 - RNA, 19 nt, Homo sapiens
  misc_RNA (1)...(19): siRNA sense strand
gcgaacagugugagagucu

SEQ ID NO: 2459398 - RNA, 19 nt, Homo sapiens
  misc_RNA (1)...(19): siRNA sense strand
caguaauaucauggagauu

SEQ ID NO: 2459399 - RNA, 19 nt, Homo sapiens
  misc_RNA (1)...(19): siRNA sense strand
aaguagauagagaagacaa

SEQ ID NO: 2459400 - RNA, 19 nt, Homo sapiens
  misc_RNA (1)...(19): siRNA sense strand
gcugcuugcacaacagaua

SEQ ID NO: 2459401 - RNA, 19 nt, Homo sapiens
  misc_RNA (1)...(19): siRNA sense strand
auacuggauuugaggacuu

SEQ ID NO: 2459402 - RNA, 19 nt, Homo sapiens
  misc_RNA (1)...(19): siRNA sense strand
ugaaagaacaagaauccau

SEQ ID NO: 2459403 - RNA, 19 nt, Homo sapiens
  misc_RNA (1)...(19): siRNA sense strand
gaggcguuguacugguaaa

SEQ ID NO: 2459404 - RNA, 19 nt, Homo sapiens
  misc_RNA (1)...(19): siRNA sense strand
caacucaaguagcgaaaau

SEQ ID NO: 2459405 - RNA, 19 nt, Homo sapiens
  misc_RNA (1)...(19): siRNA sense strand
aagcaaaguugucucgcau

SEQ ID NO: 2459406 - RNA, 19 nt, Homo sapiens
  misc_RNA (1)...(19): siRNA sense strand
cagcgaacagugugagagu

SEQ ID NO: 2459407 - RNA, 19 nt, Homo sapiens
  misc_RNA (1)...(19): siRNA sense strand
caugaucuuccaagugaaa

SEQ ID NO: 2459408 - RNA, 19 nt, Homo sapiens
  misc_RNA (1)...(19): siRNA sense strand
gagcacaaacauugauacu

SEQ ID NO: 2459409 - RNA, 19 nt, Homo sapiens
  misc_RNA (1)...(19): siRNA sense strand
caucgaauucagagaguuc

SEQ ID NO: 2459410 - RNA, 19 nt, Homo sapiens
  misc_RNA (1)...(19): siRNA sense strand
guaacaguggagauagauu

SEQ ID NO: 2459411 - RNA, 19 nt, Homo sapiens
  misc_RNA (1)...(19): siRNA sense strand
ccaugaucuuccaagugaa

SEQ ID NO: 2459412 - RNA, 19 nt, Homo sapiens
  misc_RNA (1)...(19): siRNA sense strand
auuaauggccuuauuggaa

SEQ ID NO: 2459413 - RNA, 19 nt, Homo sapiens
  misc_RNA (1)...(19): siRNA sense strand
acaagaggacuucgcggaa

SEQ ID NO: 2459414 - RNA, 19 nt, Homo sapiens
  misc_RNA (1)...(19): siRNA sense strand
acuucgaguuucccaauaa

SEQ ID NO: 2459415 - RNA, 19 nt, Homo sapiens
  misc_RNA (1)...(19): siRNA sense strand
ucugcuuguugaugugaua

SEQ ID NO: 2459416 - RNA, 19 nt, Homo sapiens
  misc_RNA (1)...(19): siRNA sense strand
cauggagauucgacagcuu

SEQ ID NO: 2459417 - RNA, 19 nt, Homo sapiens
  misc_RNA (1)...(19): siRNA sense strand
ggaagagacucaaggccua

SEQ ID NO: 2459418 - RNA, 19 nt, Homo sapiens
  misc_RNA (1)...(19): siRNA sense strand
guguaaaguguaugugcaa

SEQ ID NO: 2459419 - RNA, 19 nt, Homo sapiens
  misc_RNA (1)...(19): siRNA sense strand
agcugaagccacugagaaa

SEQ ID NO: 2459420 - RNA, 19 nt, Homo sapiens
  misc_RNA (1)...(19): siRNA sense strand
ccaaagaaaaggagaggga

SEQ ID NO: 2459421 - RNA, 19 nt, Homo sapiens
  misc_RNA (1)...(19): siRNA sense strand
augagaagacuuugggaca

SEQ ID NO: 2459422 - RNA, 19 nt, Homo sapiens
  misc_RNA (1)...(19): siRNA sense strand
gcacagagccugaagacac

SEQ ID NO: 2459423 - RNA, 19 nt, Homo sapiens
  misc_RNA (1)...(19): siRNA sense strand
aguucaucauggagaccaa

SEQ ID NO: 2459424 - RNA, 19 nt, Homo sapiens
  misc_RNA (1)...(19): siRNA sense strand
agaccaagcugaagccacu

SEQ ID NO: 2459425 - RNA, 19 nt, Homo sapiens
  misc_RNA (1)...(19): siRNA sense strand
aggagagggaagaacagaa

SEQ ID NO: 2459426 - RNA, 19 nt, Homo sapiens
  misc_RNA (1)...(19): siRNA sense strand
cggcuucaccggaggacuu

SEQ ID NO: 2459427 - RNA, 19 nt, Homo sapiens
  misc_RNA (1)...(19): siRNA sense strand
caauuguggaagagacuca

SEQ ID NO: 2459428 - RNA, 19 nt, Homo sapiens
  misc_RNA (1)...(19): siRNA sense strand
agggaagaacagaaugaga

SEQ ID NO: 2459429 - RNA, 19 nt, Homo sapiens
  misc_RNA (1)...(19): siRNA sense strand
ccacugagaaaaugggaga

SEQ ID NO: 2459430 - RNA, 19 nt, Homo sapiens
  misc_RNA (1)...(19): siRNA sense strand
ccacugugaaggagaugau

SEQ ID NO: 2459431 - RNA, 19 nt, Homo sapiens
  misc_RNA (1)...(19): siRNA sense strand
ugagaaaaugggagaaguu

SEQ ID NO: 2459432 - RNA, 19 nt, Homo sapiens
  misc_RNA (1)...(19): siRNA sense strand
acccagaggaagagaguaa

SEQ ID NO: 2459433 - RNA, 19 nt, Homo sapiens
  misc_RNA (1)...(19): siRNA sense strand
agagauaacaaaugagauc

SEQ ID NO: 2459434 - RNA, 19 nt, Homo sapiens
  misc_RNA (1)...(19): siRNA sense strand
aagaagucaucaagcguga

SEQ ID NO: 2459435 - RNA, 19 nt, Homo sapiens
  misc_RNA (1)...(19): siRNA sense strand
gcuacaagccagucaucau

SEQ ID NO: 2459436 - RNA, 19 nt, Homo sapiens
  misc_RNA (1)...(19): siRNA sense strand
aagauuugaaggagugcua

SEQ ID NO: 2459437 - RNA, 19 nt, Homo sapiens
  misc_RNA (1)...(19): siRNA sense strand
caguauuagaggaaacuca

SEQ ID NO: 2459438 - RNA, 19 nt, Homo sapiens
  misc_RNA (1)...(19): siRNA sense strand
ccuaaugagaagcauguau

SEQ ID NO: 2459439 - RNA, 19 nt, Homo sapiens
  misc_RNA (1)...(19): siRNA sense strand
cuaccaaugcccaagaaaa

SEQ ID NO: 2459440 - RNA, 19 nt, Homo sapiens
  misc_RNA (1)...(19): siRNA sense strand
acugggaccuucugggaga

SEQ ID NO: 2459441 - RNA, 19 nt, Homo sapiens
  misc_RNA (1)...(19): siRNA sense strand
cguagaagcuauugcaacc

SEQ ID NO: 2459442 - RNA, 19 nt, Homo sapiens
  misc_RNA (1)...(19): siRNA sense strand
uugcaguaauugcuggaau

SEQ ID NO: 2459443 - RNA, 19 nt, Homo sapiens
  misc_RNA (1)...(19): siRNA sense strand
ugucucacccagaggaaga

SEQ ID NO: 2459444 - RNA, 19 nt, Homo sapiens
  misc_RNA (1)...(19): siRNA sense strand
ggaggaagacugcgcggaa

SEQ ID NO: 2459445 - RNA, 19 nt, Homo sapiens
  misc_RNA (1)...(19): siRNA sense strand
ggaacagaggagagcccaa

SEQ ID NO: 2459446 - RNA, 19 nt, Homo sapiens
  misc_RNA (1)...(19): siRNA sense strand
aggaagacugcgcggaauu

SEQ ID NO: 2459447 - RNA, 19 nt, Homo sapiens
  misc_RNA (1)...(19): siRNA sense strand
gcuccagggaugaagaaca

SEQ ID NO: 2459448 - RNA, 19 nt, Homo sapiens
  misc_RNA (1)...(19): siRNA sense strand
ugucuaacucccagcggaa

SEQ ID NO: 2459449 - RNA, 19 nt, Homo sapiens
  misc_RNA (1)...(19): siRNA sense strand
cagagaaaucuaagcagca

SEQ ID NO: 2459450 - RNA, 19 nt, Homo sapiens
  misc_RNA (1)...(19): siRNA sense strand
cagagaaaucuaagcagca

SEQ ID NO: 2459451 - RNA, 19 nt, Homo sapiens
  misc_RNA (1)...(19): siRNA sense strand
cagagaaaucuaagcagca

SEQ ID NO: 2459452 - RNA, 19 nt, Homo sapiens
  misc_RNA (1)...(19): siRNA sense strand
gcuccauaagucaggaaca

SEQ ID NO: 2459453 - RNA, 19 nt, Homo sapiens
  misc_RNA (1)...(19): siRNA sense strand
aaaucuaagcugcaggaga

SEQ ID NO: 2459454 - RNA, 19 nt, Homo sapiens
  misc_RNA (1)...(19): siRNA sense strand
cuaagcugcaggagaucua

SEQ ID NO: 2459455 - RNA, 19 nt, Homo sapiens
  misc_RNA (1)...(19): siRNA sense strand
aaaucuaagcugcaggaga

SEQ ID NO: 2459456 - RNA, 19 nt, Homo sapiens
  misc_RNA (1)...(19): siRNA sense strand
cuaagcugcaggagaucua

SEQ ID NO: 2459457 - RNA, 19 nt, Homo sapiens
  misc_RNA (1)...(19): siRNA sense strand
cgcggaauuuaguggcaau

SEQ ID NO: 2459458 - RNA, 19 nt, Homo sapiens
  misc_RNA (1)...(19): siRNA sense strand
aaaucuaagcagcaggaga

SEQ ID NO: 2459459 - RNA, 19 nt, Homo sapiens
  misc_RNA (1)...(19): siRNA sense strand
aaaucuaagcagcaggaga

SEQ ID NO: 2459460 - RNA, 19 nt, Homo sapiens
  misc_RNA (1)...(19): siRNA sense strand
gcugaaggcugcagugggu

SEQ ID NO: 2459461 - RNA, 19 nt, Homo sapiens
  misc_RNA (1)...(19): siRNA sense strand
gcugaaggcugcagugggu

SEQ ID NO: 2459462 - RNA, 19 nt, Homo sapiens
  misc_RNA (1)...(19): siRNA sense strand
gcugaaggcugcagugggu

SEQ ID NO: 2459463 - RNA, 19 nt, Homo sapiens
  misc_RNA (1)...(19): siRNA sense strand
gcugaaggcugcagugggu

SEQ ID NO: 2459464 - RNA, 19 nt, Homo sapiens
  misc_RNA (1)...(19): siRNA sense strand
uguuaaagauggagauaca

SEQ ID NO: 2459465 - RNA, 19 nt, Homo sapiens
  misc_RNA (1)...(19): siRNA sense strand
uggauauauuugagagaga

SEQ ID NO: 2459466 - RNA, 19 nt, Homo sapiens
  misc_RNA (1)...(19): siRNA sense strand
uguccaugcuaaagauaaa

SEQ ID NO: 2459467 - RNA, 19 nt, Homo sapiens
  misc_RNA (1)...(19): siRNA sense strand
agguauggucgauggauaa

SEQ ID NO: 2459468 - RNA, 19 nt, Homo sapiens
  misc_RNA (1)...(19): siRNA sense strand
cguaaggaaucuuggacuu

SEQ ID NO: 2459469 - RNA, 19 nt, Homo sapiens
  misc_RNA (1)...(19): siRNA sense strand
aacaagaaacuaugggaaa

SEQ ID NO: 2459470 - RNA, 19 nt, Homo sapiens
  misc_RNA (1)...(19): siRNA sense strand
gcaggauauaacagaguaa

SEQ ID NO: 2459471 - RNA, 19 nt, Homo sapiens
  misc_RNA (1)...(19): siRNA sense strand
ugugaaugcccaagacaaa

SEQ ID NO: 2459472 - RNA, 19 nt, Homo sapiens
  misc_RNA (1)...(19): siRNA sense strand
agguuaaugcucuggauaa

SEQ ID NO: 2459473 - RNA, 19 nt, Homo sapiens
  misc_RNA (1)...(19): siRNA sense strand
uuuagaaguugcagaguau

SEQ ID NO: 2459474 - RNA, 19 nt, Homo sapiens
  misc_RNA (1)...(19): siRNA sense strand
uugaaguaguggugaaaca

SEQ ID NO: 2459475 - RNA, 19 nt, Homo sapiens
  misc_RNA (1)...(19): siRNA sense strand
aauuaaaggagucgagaga

SEQ ID NO: 2459476 - RNA, 19 nt, Homo sapiens
  misc_RNA (1)...(19): siRNA sense strand
uggugaaacaugaagcaaa

SEQ ID NO: 2459477 - RNA, 19 nt, Homo sapiens
  misc_RNA (1)...(19): siRNA sense strand
agauggagauacagauauu

SEQ ID NO: 2459478 - RNA, 19 nt, Homo sapiens
  misc_RNA (1)...(19): siRNA sense strand
aaucaaugcuuauggacau

SEQ ID NO: 2459479 - RNA, 19 nt, Homo sapiens
  misc_RNA (1)...(19): siRNA sense strand
gguuaaugcucuggauaau

SEQ ID NO: 2459480 - RNA, 19 nt, Homo sapiens
  misc_RNA (1)...(19): siRNA sense strand
aagguauggucgauggaua

SEQ ID NO: 2459481 - RNA, 19 nt, Homo sapiens
  misc_RNA (1)...(19): siRNA sense strand
gugaacuguugcuaagaaa

SEQ ID NO: 2459482 - RNA, 19 nt, Homo sapiens
  misc_RNA (1)...(19): siRNA sense strand
gcuucagaauggugcaaau

SEQ ID NO: 2459483 - RNA, 19 nt, Homo sapiens
  misc_RNA (1)...(19): siRNA sense strand
cugcuuuacagaugggaaa

SEQ ID NO: 2459484 - RNA, 19 nt, Homo sapiens
  misc_RNA (1)...(19): siRNA sense strand
aaauacagauggaaggaca

SEQ ID NO: 2459485 - RNA, 19 nt, Homo sapiens
  misc_RNA (1)...(19): siRNA sense strand
guauaaugcaugugucaau

SEQ ID NO: 2459486 - RNA, 19 nt, Homo sapiens
  misc_RNA (1)...(19): siRNA sense strand
ggaguagauuuuagcauaa

SEQ ID NO: 2459487 - RNA, 19 nt, Homo sapiens
  misc_RNA (1)...(19): siRNA sense strand
guguaaaugcaauggacuu

SEQ ID NO: 2459488 - RNA, 19 nt, Homo sapiens
  misc_RNA (1)...(19): siRNA sense strand
ugugcaugcuaaagauaaa

SEQ ID NO: 2459489 - RNA, 19 nt, Homo sapiens
  misc_RNA (1)...(19): siRNA sense strand
agaaacuaugggaaagaua

SEQ ID NO: 2459490 - RNA, 19 nt, Homo sapiens
  misc_RNA (1)...(19): siRNA sense strand
ggauaaucuuggucagacu

SEQ ID NO: 2459491 - RNA, 19 nt, Homo sapiens
  misc_RNA (1)...(19): siRNA sense strand
auucagaggcagacagaca

SEQ ID NO: 2459492 - RNA, 19 nt, Homo sapiens
  misc_RNA (1)...(19): siRNA sense strand
caggaguggcaaugaagaa

SEQ ID NO: 2459493 - RNA, 19 nt, Homo sapiens
  misc_RNA (1)...(19): siRNA sense strand
gcauggugccuguguaaau

SEQ ID NO: 2459494 - RNA, 19 nt, Homo sapiens
  misc_RNA (1)...(19): siRNA sense strand
auuuagaaguugcagagua

SEQ ID NO: 2459495 - RNA, 19 nt, Homo sapiens
  misc_RNA (1)...(19): siRNA sense strand
uaacaagaaacuaugggaa

SEQ ID NO: 2459496 - RNA, 19 nt, Homo sapiens
  misc_RNA (1)...(19): siRNA sense strand
ccccaaugcucgagauaau

SEQ ID NO: 2459497 - RNA, 19 nt, Homo sapiens
  misc_RNA (1)...(19): siRNA sense strand
uguuauuuacagaggagaa

SEQ ID NO: 2459498 - RNA, 19 nt, Homo sapiens
  misc_RNA (1)...(19): siRNA sense strand
uuguugaaguaguggugaa

SEQ ID NO: 2459499 - RNA, 19 nt, Homo sapiens
  misc_RNA (1)...(19): siRNA sense strand
acaugaagcagcagcaaaa

SEQ ID NO: 2459500 - RNA, 19 nt, Homo sapiens
  misc_RNA (1)...(19): siRNA sense strand
aauguaaauugccgcgaua

SEQ ID NO: 2459501 - RNA, 19 nt, Homo sapiens
  misc_RNA (1)...(19): siRNA sense strand
acagaggagaacaggcuua

SEQ ID NO: 2459502 - RNA, 19 nt, Homo sapiens
  misc_RNA (1)...(19): siRNA sense strand
aaagauggagauacagaua

SEQ ID NO: 2459503 - RNA, 19 nt, Homo sapiens
  misc_RNA (1)...(19): siRNA sense strand
agauuuaguuucagcagau

SEQ ID NO: 2459504 - RNA, 19 nt, Homo sapiens
  misc_RNA (1)...(19): siRNA sense strand
aggaagagaugcaaaguac

SEQ ID NO: 2459505 - RNA, 19 nt, Homo sapiens
  misc_RNA (1)...(19): siRNA sense strand
gggugugauccuaacauua

SEQ ID NO: 2459506 - RNA, 19 nt, Homo sapiens
  misc_RNA (1)...(19): siRNA sense strand
gaaucaaugcuuauggaca

SEQ ID NO: 2459507 - RNA, 19 nt, Homo sapiens
  misc_RNA (1)...(19): siRNA sense strand
agugcuuacuggugaauau

SEQ ID NO: 2459508 - RNA, 19 nt, Homo sapiens
  misc_RNA (1)...(19): siRNA sense strand
ggaaauacuccuuuggauc

SEQ ID NO: 2459509 - RNA, 19 nt, Homo sapiens
  misc_RNA (1)...(19): siRNA sense strand
ccacgcaagugauggcaga

SEQ ID NO: 2459510 - RNA, 19 nt, Homo sapiens
  misc_RNA (1)...(19): siRNA sense strand
aagcauggugccuguguaa

SEQ ID NO: 2459511 - RNA, 19 nt, Homo sapiens
  misc_RNA (1)...(19): siRNA sense strand
aacaugaagcaaagguuaa

SEQ ID NO: 2459512 - RNA, 19 nt, Homo sapiens
  misc_RNA (1)...(19): siRNA sense strand
acauuuagcagcugguuau

SEQ ID NO: 2459513 - RNA, 19 nt, Homo sapiens
  misc_RNA (1)...(19): siRNA sense strand
gaguaaagauuguacagcu

SEQ ID NO: 2459514 - RNA, 19 nt, Homo sapiens
  misc_RNA (1)...(19): siRNA sense strand
ugcuaaagauaaaggugau

SEQ ID NO: 2459515 - RNA, 19 nt, Homo sapiens
  misc_RNA (1)...(19): siRNA sense strand
ccgcgauacccaaggcaga

SEQ ID NO: 2459516 - RNA, 19 nt, Homo sapiens
  misc_RNA (1)...(19): siRNA sense strand
aggaguagauuuuagcaua

SEQ ID NO: 2459517 - RNA, 19 nt, Homo sapiens
  misc_RNA (1)...(19): siRNA sense strand
ccaaugaacgaaugcuauu

SEQ ID NO: 2459518 - RNA, 19 nt, Homo sapiens
  misc_RNA (1)...(19): siRNA sense strand
agaugaacucuuagaaagu

SEQ ID NO: 2459519 - RNA, 19 nt, Homo sapiens
  misc_RNA (1)...(19): siRNA sense strand
acauuuggcagcaggauau

SEQ ID NO: 2459520 - RNA, 19 nt, Homo sapiens
  misc_RNA (1)...(19): siRNA sense strand
cauaugaauuuaaaggcca

SEQ ID NO: 2459521 - RNA, 19 nt, Homo sapiens
  misc_RNA (1)...(19): siRNA sense strand
uuacagaugggaaaugaaa

SEQ ID NO: 2459522 - RNA, 19 nt, Homo sapiens
  misc_RNA (1)...(19): siRNA sense strand
cacaaggagcugaaggaga

SEQ ID NO: 2459523 - RNA, 19 nt, Homo sapiens
  misc_RNA (1)...(19): siRNA sense strand
caagaaacuaugggaaaga

SEQ ID NO: 2459524 - RNA, 19 nt, Homo sapiens
  misc_RNA (1)...(19): siRNA sense strand
uggaggagguacugggugu

SEQ ID NO: 2459525 - RNA, 19 nt, Homo sapiens
  misc_RNA (1)...(19): siRNA sense strand
gcuaauaguguuugccaca

SEQ ID NO: 2459526 - RNA, 19 nt, Homo sapiens
  misc_RNA (1)...(19): siRNA sense strand
cauauaugugugugcguau

SEQ ID NO: 2459527 - RNA, 19 nt, Homo sapiens
  misc_RNA (1)...(19): siRNA sense strand
cagcugaagcagauggagu

SEQ ID NO: 2459528 - RNA, 19 nt, Homo sapiens
  misc_RNA (1)...(19): siRNA sense strand
cacaaguauuagugagucu

SEQ ID NO: 2459529 - RNA, 19 nt, Homo sapiens
  misc_RNA (1)...(19): siRNA sense strand
gcauauaugugugugcgua

SEQ ID NO: 2459530 - RNA, 19 nt, Homo sapiens
  misc_RNA (1)...(19): siRNA sense strand
agacugaagcaaagcugau

SEQ ID NO: 2459531 - RNA, 19 nt, Homo sapiens
  misc_RNA (1)...(19): siRNA sense strand
agauaggaugagagagaaa

SEQ ID NO: 2459532 - RNA, 19 nt, Homo sapiens
  misc_RNA (1)...(19): siRNA sense strand
cuaaagaaacagaaggcaa

SEQ ID NO: 2459533 - RNA, 19 nt, Homo sapiens
  misc_RNA (1)...(19): siRNA sense strand
acagaauauuagaggaaga

SEQ ID NO: 2459534 - RNA, 19 nt, Homo sapiens
  misc_RNA (1)...(19): siRNA sense strand
cagaaagagcugauggaga

SEQ ID NO: 2459535 - RNA, 19 nt, Homo sapiens
  misc_RNA (1)...(19): siRNA sense strand
aggcaaagaaguuggcuga

SEQ ID NO: 2459536 - RNA, 19 nt, Homo sapiens
  misc_RNA (1)...(19): siRNA sense strand
uagaggaagacaaggcaaa

SEQ ID NO: 2459537 - RNA, 19 nt, Homo sapiens
  misc_RNA (1)...(19): siRNA sense strand
aagcuaaagaacaggaaga

SEQ ID NO: 2459538 - RNA, 19 nt, Homo sapiens
  misc_RNA (1)...(19): siRNA sense strand
cccaagaagcagagaagga

SEQ ID NO: 2459539 - RNA, 19 nt, Homo sapiens
  misc_RNA (1)...(19): siRNA sense strand
ugauaagagaacagaagau

SEQ ID NO: 2459540 - RNA, 19 nt, Homo sapiens
  misc_RNA (1)...(19): siRNA sense strand
ccuucaagacuuacaggaa

SEQ ID NO: 2459541 - RNA, 19 nt, Homo sapiens
  misc_RNA (1)...(19): siRNA sense strand
ggcacagagacgugaggaa

SEQ ID NO: 2459542 - RNA, 19 nt, Homo sapiens
  misc_RNA (1)...(19): siRNA sense strand
cagaaggcaaagcaggaaa

SEQ ID NO: 2459543 - RNA, 19 nt, Homo sapiens
  misc_RNA (1)...(19): siRNA sense strand
aagacaaggcaaagaaguu

SEQ ID NO: 2459544 - RNA, 19 nt, Homo sapiens
  misc_RNA (1)...(19): siRNA sense strand
gugcuauggaacagaaaca

SEQ ID NO: 2459545 - RNA, 19 nt, Homo sapiens
  misc_RNA (1)...(19): siRNA sense strand
acgaacaggacuugaacau

SEQ ID NO: 2459546 - RNA, 19 nt, Homo sapiens
  misc_RNA (1)...(19): siRNA sense strand
acaagauguguuuggacaa

SEQ ID NO: 2459547 - RNA, 19 nt, Homo sapiens
  misc_RNA (1)...(19): siRNA sense strand
augaacaggauaugcuaaa

SEQ ID NO: 2459548 - RNA, 19 nt, Homo sapiens
  misc_RNA (1)...(19): siRNA sense strand
aggaauacagagacgaaca

SEQ ID NO: 2459549 - RNA, 19 nt, Homo sapiens
  misc_RNA (1)...(19): siRNA sense strand
agaaguuggcugagaagga

SEQ ID NO: 2459550 - RNA, 19 nt, Homo sapiens
  misc_RNA (1)...(19): siRNA sense strand
uggaacagaaacacauaaa

SEQ ID NO: 2459551 - RNA, 19 nt, Homo sapiens
  misc_RNA (1)...(19): siRNA sense strand
gaaagaaaccauugaggag

SEQ ID NO: 2459552 - RNA, 19 nt, Homo sapiens
  misc_RNA (1)...(19): siRNA sense strand
aagaaaaguugcaacgaga

SEQ ID NO: 2459553 - RNA, 19 nt, Homo sapiens
  misc_RNA (1)...(19): siRNA sense strand
augagaaugaacaggauau

SEQ ID NO: 2459554 - RNA, 19 nt, Homo sapiens
  misc_RNA (1)...(19): siRNA sense strand
acuuacaggaagaggcaga

SEQ ID NO: 2459555 - RNA, 19 nt, Homo sapiens
  misc_RNA (1)...(19): siRNA sense strand
aggaagacaaggcaaagaa

SEQ ID NO: 2459556 - RNA, 19 nt, Homo sapiens
  misc_RNA (1)...(19): siRNA sense strand
agcagagaaggaagagaaa

SEQ ID NO: 2459557 - RNA, 19 nt, Homo sapiens
  misc_RNA (1)...(19): siRNA sense strand
caugagaaugaacaggaua

SEQ ID NO: 2459558 - RNA, 19 nt, Homo sapiens
  misc_RNA (1)...(19): siRNA sense strand
acaagagaggauagaacau

SEQ ID NO: 2459559 - RNA, 19 nt, Homo sapiens
  misc_RNA (1)...(19): siRNA sense strand
ggaaaagcgagaagcccaa

SEQ ID NO: 2459560 - RNA, 19 nt, Homo sapiens
  misc_RNA (1)...(19): siRNA sense strand
gcaucaaggcacaaaggca

SEQ ID NO: 2459561 - RNA, 19 nt, Homo sapiens
  misc_RNA (1)...(19): siRNA sense strand
acaggauaugcuaaagaaa

SEQ ID NO: 2459562 - RNA, 19 nt, Homo sapiens
  misc_RNA (1)...(19): siRNA sense strand
cuacaagagaggauagaac

SEQ ID NO: 2459563 - RNA, 19 nt, Homo sapiens
  misc_RNA (1)...(19): siRNA sense strand
guugcaacgagaagcuaaa

SEQ ID NO: 2459564 - RNA, 19 nt, Homo sapiens
  misc_RNA (1)...(19): siRNA sense strand
acugugaagagaaggagaa

SEQ ID NO: 2459565 - RNA, 19 nt, Homo sapiens
  misc_RNA (1)...(19): siRNA sense strand
aagaagcagagaaggaaga

SEQ ID NO: 2459566 - RNA, 19 nt, Homo sapiens
  misc_RNA (1)...(19): siRNA sense strand
ccaaacucugggaggaaga

SEQ ID NO: 2459567 - RNA, 19 nt, Homo sapiens
  misc_RNA (1)...(19): siRNA sense strand
aggacaaggagcugagacu

SEQ ID NO: 2459568 - RNA, 19 nt, Homo sapiens
  misc_RNA (1)...(19): siRNA sense strand
acagagacgaacaggacuu

SEQ ID NO: 2459569 - RNA, 19 nt, Homo sapiens
  misc_RNA (1)...(19): siRNA sense strand
agaaagaaaccauugagga

SEQ ID NO: 2459570 - RNA, 19 nt, Homo sapiens
  misc_RNA (1)...(19): siRNA sense strand
aggaagaccgauuagccaa

SEQ ID NO: 2459571 - RNA, 19 nt, Homo sapiens
  misc_RNA (1)...(19): siRNA sense strand
cggaaagcacagauugcau

SEQ ID NO: 2459572 - RNA, 19 nt, Homo sapiens
  misc_RNA (1)...(19): siRNA sense strand
ggagacagaaagagcugau

SEQ ID NO: 2459573 - RNA, 19 nt, Homo sapiens
  misc_RNA (1)...(19): siRNA sense strand
ggauagaacauauucagca

SEQ ID NO: 2459574 - RNA, 19 nt, Homo sapiens
  misc_RNA (1)...(19): siRNA sense strand
uucaagacuuacaggaaga

SEQ ID NO: 2459575 - RNA, 19 nt, Homo sapiens
  misc_RNA (1)...(19): siRNA sense strand
cacagagacgugaggaaga

SEQ ID NO: 2459576 - RNA, 19 nt, Homo sapiens
  misc_RNA (1)...(19): siRNA sense strand
ggaugagagagaaaacuaa

SEQ ID NO: 2459577 - RNA, 19 nt, Homo sapiens
  misc_RNA (1)...(19): siRNA sense strand
cugaaaagcuagaccagca

SEQ ID NO: 2459578 - RNA, 19 nt, Homo sapiens
  misc_RNA (1)...(19): siRNA sense strand
aggcgaggagacagaaaga

SEQ ID NO: 2459579 - RNA, 19 nt, Homo sapiens
  misc_RNA (1)...(19): siRNA sense strand
aagcaggaaacuaggacca

SEQ ID NO: 2459580 - RNA, 19 nt, Homo sapiens
  misc_RNA (1)...(19): siRNA sense strand
gggaagaagcccaaggaga

SEQ ID NO: 2459581 - RNA, 19 nt, Homo sapiens
  misc_RNA (1)...(19): siRNA sense strand
ggaagaagcccaaggagac

SEQ ID NO: 2459582 - RNA, 19 nt, Homo sapiens
  misc_RNA (1)...(19): siRNA sense strand
uggucagguuccagaaaga

SEQ ID NO: 2459583 - RNA, 19 nt, Homo sapiens
  misc_RNA (1)...(19): siRNA sense strand
cuccuaagccaguguacaa

SEQ ID NO: 2459584 - RNA, 19 nt, Homo sapiens
  misc_RNA (1)...(19): siRNA sense strand
augcagucagaguggacaa

SEQ ID NO: 2459585 - RNA, 19 nt, Homo sapiens
  misc_RNA (1)...(19): siRNA sense strand
ucuaugaguacgugggcaa

SEQ ID NO: 2459586 - RNA, 19 nt, Homo sapiens
  misc_RNA (1)...(19): siRNA sense strand
cagaaguacgucaaggaga

SEQ ID NO: 2459587 - RNA, 19 nt, Homo sapiens
  misc_RNA (1)...(19): siRNA sense strand
aggaggaccugaaggccca

SEQ ID NO: 2459588 - RNA, 19 nt, Homo sapiens
  misc_RNA (1)...(19): siRNA sense strand
cugcagaaccaaaaggaaa

SEQ ID NO: 2459589 - RNA, 19 nt, Homo sapiens
  misc_RNA (1)...(19): siRNA sense strand
gaaauaaacccaaggcagu

SEQ ID NO: 2459590 - RNA, 19 nt, Homo sapiens
  misc_RNA (1)...(19): siRNA sense strand
ugguuaaagaagauagaga

SEQ ID NO: 2459591 - RNA, 19 nt, Homo sapiens
  misc_RNA (1)...(19): siRNA sense strand
ccacaaagaagccagcgaa

SEQ ID NO: 2459592 - RNA, 19 nt, Homo sapiens
  misc_RNA (1)...(19): siRNA sense strand
ggaaauaaacccaaggcag

SEQ ID NO: 2459593 - RNA, 19 nt, Homo sapiens
  misc_RNA (1)...(19): siRNA sense strand
agagagaaguuucagcaga

SEQ ID NO: 2459594 - RNA, 19 nt, Homo sapiens
  misc_RNA (1)...(19): siRNA sense strand
guuaaagaagauagagaag

SEQ ID NO: 2459595 - RNA, 19 nt, Homo sapiens
  misc_RNA (1)...(19): siRNA sense strand
cacugauggaugaggaaau

SEQ ID NO: 2459596 - RNA, 19 nt, Homo sapiens
  misc_RNA (1)...(19): siRNA sense strand
cuccauuagaacaggaaau

SEQ ID NO: 2459597 - RNA, 19 nt, Homo sapiens
  misc_RNA (1)...(19): siRNA sense strand
aagcaaacuaagcagaaga

SEQ ID NO: 2459598 - RNA, 19 nt, Homo sapiens
  misc_RNA (1)...(19): siRNA sense strand
acuauagagagcaaagauu

SEQ ID NO: 2459599 - RNA, 19 nt, Homo sapiens
  misc_RNA (1)...(19): siRNA sense strand
uacagaaggcacuggaaau

SEQ ID NO: 2459600 - RNA, 19 nt, Homo sapiens
  misc_RNA (1)...(19): siRNA sense strand
uccaauaagagucacgaaa

SEQ ID NO: 2459601 - RNA, 19 nt, Homo sapiens
  misc_RNA (1)...(19): siRNA sense strand
aggaaaugaauacggcaga

SEQ ID NO: 2459602 - RNA, 19 nt, Homo sapiens
  misc_RNA (1)...(19): siRNA sense strand
agaagauagagaagcuaca

SEQ ID NO: 2459603 - RNA, 19 nt, Homo sapiens
  misc_RNA (1)...(19): siRNA sense strand
uggaggaugagaugaguca

SEQ ID NO: 2459604 - RNA, 19 nt, Homo sapiens
  misc_RNA (1)...(19): siRNA sense strand
aagaggagaucuacgguaa

SEQ ID NO: 2459605 - RNA, 19 nt, Homo sapiens
  misc_RNA (1)...(19): siRNA sense strand
uguacaagaucgaggacgu

SEQ ID NO: 2459606 - RNA, 19 nt, Homo sapiens
  misc_RNA (1)...(19): siRNA sense strand
gguuccagccaaagccaua

SEQ ID NO: 2459607 - RNA, 19 nt, Homo sapiens
  misc_RNA (1)...(19): siRNA sense strand
acauuggcguccugggaau

SEQ ID NO: 2459608 - RNA, 19 nt, Homo sapiens
  misc_RNA (1)...(19): siRNA sense strand
ggccagugccuuugcauuu

SEQ ID NO: 2459609 - RNA, 19 nt, Homo sapiens
  misc_RNA (1)...(19): siRNA sense strand
ugggaugggcauaguaaaa

SEQ ID NO: 2459610 - RNA, 19 nt, Homo sapiens
  misc_RNA (1)...(19): siRNA sense strand
aggcauucuugaaguggau

SEQ ID NO: 2459611 - RNA, 19 nt, Homo sapiens
  misc_RNA (1)...(19): siRNA sense strand
gcacaugguuagucagcuc

SEQ ID NO: 2459612 - RNA, 19 nt, Homo sapiens
  misc_RNA (1)...(19): siRNA sense strand
cggcugcuguccugggaau

SEQ ID NO: 2459613 - RNA, 19 nt, Homo sapiens
  misc_RNA (1)...(19): siRNA sense strand
ggcuauugggcacgggcaa

SEQ ID NO: 2459614 - RNA, 19 nt, Homo sapiens
  misc_RNA (1)...(19): siRNA sense strand
gaagaggagaucuacggua

SEQ ID NO: 2459615 - RNA, 19 nt, Homo sapiens
  misc_RNA (1)...(19): siRNA sense strand
gcuccauucuccugaucau

SEQ ID NO: 2459616 - RNA, 19 nt, Homo sapiens
  misc_RNA (1)...(19): siRNA sense strand
ccacagacccaaaagccua

SEQ ID NO: 2459617 - RNA, 19 nt, Homo sapiens
  misc_RNA (1)...(19): siRNA sense strand
guggugacaucauggcuau

SEQ ID NO: 2459618 - RNA, 19 nt, Homo sapiens
  misc_RNA (1)...(19): siRNA sense strand
aagaggagaucuacgguaa

SEQ ID NO: 2459619 - RNA, 19 nt, Homo sapiens
  misc_RNA (1)...(19): siRNA sense strand
uguacaagaucgaggacgu

SEQ ID NO: 2459620 - RNA, 19 nt, Homo sapiens
  misc_RNA (1)...(19): siRNA sense strand
gguuccagccaaagccaua

SEQ ID NO: 2459621 - RNA, 19 nt, Homo sapiens
  misc_RNA (1)...(19): siRNA sense strand
acauuggcguccugggaau

SEQ ID NO: 2459622 - RNA, 19 nt, Homo sapiens
  misc_RNA (1)...(19): siRNA sense strand
ggccagugccuuugcauuu

SEQ ID NO: 2459623 - RNA, 19 nt, Homo sapiens
  misc_RNA (1)...(19): siRNA sense strand
ugggaugggcauaguaaaa

SEQ ID NO: 2459624 - RNA, 19 nt, Homo sapiens
  misc_RNA (1)...(19): siRNA sense strand
aggcauucuugaaguggau

SEQ ID NO: 2459625 - RNA, 19 nt, Homo sapiens
  misc_RNA (1)...(19): siRNA sense strand
gcacaugguuagucagcuc

SEQ ID NO: 2459626 - RNA, 19 nt, Homo sapiens
  misc_RNA (1)...(19): siRNA sense strand
cggcugcuguccugggaau

SEQ ID NO: 2459627 - RNA, 19 nt, Homo sapiens
  misc_RNA (1)...(19): siRNA sense strand
ggcuauugggcacgggcaa

SEQ ID NO: 2459628 - RNA, 19 nt, Homo sapiens
  misc_RNA (1)...(19): siRNA sense strand
gaagaggagaucuacggua

SEQ ID NO: 2459629 - RNA, 19 nt, Homo sapiens
  misc_RNA (1)...(19): siRNA sense strand
gcuccauucuccugaucau

SEQ ID NO: 2459630 - RNA, 19 nt, Homo sapiens
  misc_RNA (1)...(19): siRNA sense strand
ccacagacccaaaagccua

SEQ ID NO: 2459631 - RNA, 19 nt, Homo sapiens
  misc_RNA (1)...(19): siRNA sense strand
guggugacaucauggcuau

SEQ ID NO: 2459632 - RNA, 19 nt, Homo sapiens
  misc_RNA (1)...(19): siRNA sense strand
cuuccaagaaugaggcaaa

SEQ ID NO: 2459633 - RNA, 19 nt, Homo sapiens
  misc_RNA (1)...(19): siRNA sense strand
ucgccaaacugcaggcaca

SEQ ID NO: 2459634 - RNA, 19 nt, Homo sapiens
  misc_RNA (1)...(19): siRNA sense strand
caaucaugaaccaggaaaa

SEQ ID NO: 2459635 - RNA, 19 nt, Homo sapiens
  misc_RNA (1)...(19): siRNA sense strand
agugcgcauuggugggaaa

SEQ ID NO: 2459636 - RNA, 19 nt, Homo sapiens
  misc_RNA (1)...(19): siRNA sense strand
cuuaaagaaguuaggggua

SEQ ID NO: 2459637 - RNA, 19 nt, Homo sapiens
  misc_RNA (1)...(19): siRNA sense strand
gcagaaagaagaagguggu

SEQ ID NO: 2459638 - RNA, 19 nt, Homo sapiens
  misc_RNA (1)...(19): siRNA sense strand
cagccacagcagaugacaa

SEQ ID NO: 2459639 - RNA, 19 nt, Homo sapiens
  misc_RNA (1)...(19): siRNA sense strand
ggucauagcacgugccuca

SEQ ID NO: 2459640 - RNA, 19 nt, Homo sapiens
  misc_RNA (1)...(19): siRNA sense strand
gcauacgggaugagaucaa

SEQ ID NO: 2459641 - RNA, 19 nt, Homo sapiens
  misc_RNA (1)...(19): siRNA sense strand
gagaagagcugccaggcca

SEQ ID NO: 2459642 - RNA, 19 nt, Homo sapiens
  misc_RNA (1)...(19): siRNA sense strand
acacaacucacuuggcaaa

SEQ ID NO: 2459643 - RNA, 19 nt, Homo sapiens
  misc_RNA (1)...(19): siRNA sense strand
uggaagaggccgugaugca

SEQ ID NO: 2459644 - RNA, 19 nt, Homo sapiens
  misc_RNA (1)...(19): siRNA sense strand
caggaauggccuucaggaa

SEQ ID NO: 2459645 - RNA, 19 nt, Homo sapiens
  misc_RNA (1)...(19): siRNA sense strand
aggccauguuccagcaaau

SEQ ID NO: 2459646 - RNA, 19 nt, Homo sapiens
  misc_RNA (1)...(19): siRNA sense strand
uggccaaggagguggagau

SEQ ID NO: 2459647 - RNA, 19 nt, Homo sapiens
  misc_RNA (1)...(19): siRNA sense strand
gugcuguaugugugugaaa

SEQ ID NO: 2459648 - RNA, 19 nt, Homo sapiens
  misc_RNA (1)...(19): siRNA sense strand
gcagcaugaaagagaacau

SEQ ID NO: 2459649 - RNA, 19 nt, Homo sapiens
  misc_RNA (1)...(19): siRNA sense strand
auacuaaggcacugcaaga

SEQ ID NO: 2459650 - RNA, 19 nt, Homo sapiens
  misc_RNA (1)...(19): siRNA sense strand
agggcuucauugugguaaa

SEQ ID NO: 2459651 - RNA, 19 nt, Homo sapiens
  misc_RNA (1)...(19): siRNA sense strand
gcagugagaccaagcccaa

SEQ ID NO: 2459652 - RNA, 19 nt, Homo sapiens
  misc_RNA (1)...(19): siRNA sense strand
cgggaugagaucaagaaga

SEQ ID NO: 2459653 - RNA, 19 nt, Homo sapiens
  misc_RNA (1)...(19): siRNA sense strand
ggcucugguuaauggcaaa

SEQ ID NO: 2459654 - RNA, 19 nt, Homo sapiens
  misc_RNA (1)...(19): siRNA sense strand
uagcacagguacagcgcau

SEQ ID NO: 2459655 - RNA, 19 nt, Homo sapiens
  misc_RNA (1)...(19): siRNA sense strand
gccaaggacuggaagacca

SEQ ID NO: 2459656 - RNA, 19 nt, Homo sapiens
  misc_RNA (1)...(19): siRNA sense strand
ccaaggacuggaagaccaa

SEQ ID NO: 2459657 - RNA, 19 nt, Homo sapiens
  misc_RNA (1)...(19): siRNA sense strand
ugacauuacucgugagacc

SEQ ID NO: 2459658 - RNA, 19 nt, Homo sapiens
  misc_RNA (1)...(19): siRNA sense strand
cuucacauuuggagagucu

SEQ ID NO: 2459659 - RNA, 19 nt, Homo sapiens
  misc_RNA (1)...(19): siRNA sense strand
gccuugagccagacaguau

SEQ ID NO: 2459660 - RNA, 19 nt, Homo sapiens
  misc_RNA (1)...(19): siRNA sense strand
cagagggccuugagccaga

SEQ ID NO: 2459661 - RNA, 19 nt, Homo sapiens
  misc_RNA (1)...(19): siRNA sense strand
caagaaggaugauggggau

SEQ ID NO: 2459662 - RNA, 19 nt, Homo sapiens
  misc_RNA (1)...(19): siRNA sense strand
gggaagcaacaaggugaaa

SEQ ID NO: 2459663 - RNA, 19 nt, Homo sapiens
  misc_RNA (1)...(19): siRNA sense strand
gaagcaacaaggugaaaau

SEQ ID NO: 2459664 - RNA, 19 nt, Homo sapiens
  misc_RNA (1)...(19): siRNA sense strand
gcaagaaggaugaugggga

SEQ ID NO: 2459665 - RNA, 19 nt, Homo sapiens
  misc_RNA (1)...(19): siRNA sense strand
gcaaaauucaagaagagau

SEQ ID NO: 2459666 - RNA, 19 nt, Homo sapiens
  misc_RNA (1)...(19): siRNA sense strand
accagaaccgagaguuaaa

SEQ ID NO: 2459667 - RNA, 19 nt, Homo sapiens
  misc_RNA (1)...(19): siRNA sense strand
aggaaaagcacaagagccu

SEQ ID NO: 2459668 - RNA, 19 nt, Homo sapiens
  misc_RNA (1)...(19): siRNA sense strand
aggaaaagcaagaaggaug

SEQ ID NO: 2459669 - RNA, 19 nt, Homo sapiens
  misc_RNA (1)...(19): siRNA sense strand
augacugggaacagaagua

SEQ ID NO: 2459670 - RNA, 19 nt, Homo sapiens
  misc_RNA (1)...(19): siRNA sense strand
cugugacaaccauaagaaa

SEQ ID NO: 2459671 - RNA, 19 nt, Homo sapiens
  misc_RNA (1)...(19): siRNA sense strand
caccaaaguuccugcucca

SEQ ID NO: 2459672 - RNA, 19 nt, Homo sapiens
  misc_RNA (1)...(19): siRNA sense strand
agguacagcgcaucguuaa

SEQ ID NO: 2459673 - RNA, 19 nt, Homo sapiens
  misc_RNA (1)...(19): siRNA sense strand
ucguauggcaagagaaaga

SEQ ID NO: 2459674 - RNA, 19 nt, Homo sapiens
  misc_RNA (1)...(19): siRNA sense strand
aauugaagccagagcaguu

SEQ ID NO: 2459675 - RNA, 19 nt, Homo sapiens
  misc_RNA (1)...(19): siRNA sense strand
gcuaugagcuuguggccac

SEQ ID NO: 2459676 - RNA, 19 nt, Homo sapiens
  misc_RNA (1)...(19): siRNA sense strand
acaagaacuacuaccgaau

SEQ ID NO: 2459677 - RNA, 19 nt, Homo sapiens
  misc_RNA (1)...(19): siRNA sense strand
gaauccaauugaagccaga

SEQ ID NO: 2459678 - RNA, 19 nt, Homo sapiens
  misc_RNA (1)...(19): siRNA sense strand
gcugaggacuugaggacca

SEQ ID NO: 2459679 - RNA, 19 nt, Homo sapiens
  misc_RNA (1)...(19): siRNA sense strand
cgcaaaagcuggaggcaca

SEQ ID NO: 2459680 - RNA, 19 nt, Homo sapiens
  misc_RNA (1)...(19): siRNA sense strand
ggaugaaggcugugcagga

SEQ ID NO: 2459681 - RNA, 19 nt, Homo sapiens
  misc_RNA (1)...(19): siRNA sense strand
aggacgagcugguggcaca

SEQ ID NO: 2459682 - RNA, 19 nt, Homo sapiens
  misc_RNA (1)...(19): siRNA sense strand
agaagagaaugaaggcuga

SEQ ID NO: 2459683 - RNA, 19 nt, Homo sapiens
  misc_RNA (1)...(19): siRNA sense strand
cgcaaaucuucuacaggaa

SEQ ID NO: 2459684 - RNA, 19 nt, Homo sapiens
  misc_RNA (1)...(19): siRNA sense strand
cagagaagaucaccggaga

SEQ ID NO: 2459685 - RNA, 19 nt, Homo sapiens
  misc_RNA (1)...(19): siRNA sense strand
gcgcaaaucuucuacagga

SEQ ID NO: 2459686 - RNA, 19 nt, Homo sapiens
  misc_RNA (1)...(19): siRNA sense strand
gcagguuccaugagggaca

SEQ ID NO: 2459687 - RNA, 19 nt, Homo sapiens
  misc_RNA (1)...(19): siRNA sense strand
cagcugggccugaaggaga

SEQ ID NO: 2459688 - RNA, 19 nt, Homo sapiens
  misc_RNA (1)...(19): siRNA sense strand
agagaagaucaccggagaa

SEQ ID NO: 2459689 - RNA, 19 nt, Homo sapiens
  misc_RNA (1)...(19): siRNA sense strand
uugagaggcugguggcaga

SEQ ID NO: 2459690 - RNA, 19 nt, Homo sapiens
  misc_RNA (1)...(19): siRNA sense strand
uguacaaguccaagcugaa

SEQ ID NO: 2459691 - RNA, 19 nt, Homo sapiens
  misc_RNA (1)...(19): siRNA sense strand
aggcauggaugaaggcugu

SEQ ID NO: 2459692 - RNA, 19 nt, Homo sapiens
  misc_RNA (1)...(19): siRNA sense strand
cggugguggagaaggugaa

SEQ ID NO: 2459693 - RNA, 19 nt, Homo sapiens
  misc_RNA (1)...(19): siRNA sense strand
cuggaagagaugaggaaag

SEQ ID NO: 2459694 - RNA, 19 nt, Homo sapiens
  misc_RNA (1)...(19): siRNA sense strand
ccucggaugagcuggaaga

SEQ ID NO: 2459695 - RNA, 19 nt, Homo sapiens
  misc_RNA (1)...(19): siRNA sense strand
aggaagaagaagggagcca

SEQ ID NO: 2459696 - RNA, 19 nt, Homo sapiens
  misc_RNA (1)...(19): siRNA sense strand
uggagacgcuggaggagca

SEQ ID NO: 2459697 - RNA, 19 nt, Homo sapiens
  misc_RNA (1)...(19): siRNA sense strand
aggccgaguuugagaggcu

SEQ ID NO: 2459698 - RNA, 19 nt, Homo sapiens
  misc_RNA (1)...(19): siRNA sense strand
acgaugcagugaaggccaa

SEQ ID NO: 2459699 - RNA, 19 nt, Homo sapiens
  misc_RNA (1)...(19): siRNA sense strand
agaagggagccaugaagau

SEQ ID NO: 2459700 - RNA, 19 nt, Homo sapiens
  misc_RNA (1)...(19): siRNA sense strand
cuguacaaguccaagcuga

SEQ ID NO: 2459701 - RNA, 19 nt, Homo sapiens
  misc_RNA (1)...(19): siRNA sense strand
cugcaaggccucuggucca

SEQ ID NO: 2459702 - RNA, 19 nt, Homo sapiens
  misc_RNA (1)...(19): siRNA sense strand
gagaagcaguggcagcuga

SEQ ID NO: 2459703 - RNA, 19 nt, Homo sapiens
  misc_RNA (1)...(19): siRNA sense strand
cagaagagaaugaaggcug

SEQ ID NO: 2459704 - RNA, 19 nt, Homo sapiens
  misc_RNA (1)...(19): siRNA sense strand
aaagcaaacugcagagccu

SEQ ID NO: 2459705 - RNA, 19 nt, Homo sapiens
  misc_RNA (1)...(19): siRNA sense strand
ugucagacucagagggaga

SEQ ID NO: 2459706 - RNA, 19 nt, Homo sapiens
  misc_RNA (1)...(19): siRNA sense strand
gaagaaaaugucaggggaa

SEQ ID NO: 2459707 - RNA, 19 nt, Homo sapiens
  misc_RNA (1)...(19): siRNA sense strand
caaggaauguggaagccua

SEQ ID NO: 2459708 - RNA, 19 nt, Homo sapiens
  misc_RNA (1)...(19): siRNA sense strand
aagaaaaugucaggggaaa

SEQ ID NO: 2459709 - RNA, 19 nt, Homo sapiens
  misc_RNA (1)...(19): siRNA sense strand
gaagaaaagaggaugguga

SEQ ID NO: 2459710 - RNA, 19 nt, Homo sapiens
  misc_RNA (1)...(19): siRNA sense strand
uggaauacguacagcggca

SEQ ID NO: 2459711 - RNA, 19 nt, Homo sapiens
  misc_RNA (1)...(19): siRNA sense strand
gcuuucaagaugaggauga

SEQ ID NO: 2459712 - RNA, 19 nt, Homo sapiens
  misc_RNA (1)...(19): siRNA sense strand
aagcaaaugaagaggauuc

SEQ ID NO: 2459713 - RNA, 19 nt, Homo sapiens
  misc_RNA (1)...(19): siRNA sense strand
agaaaaugucaggggaaaa

SEQ ID NO: 2459714 - RNA, 19 nt, Homo sapiens
  misc_RNA (1)...(19): siRNA sense strand
ugguugcuguggugggaaa

SEQ ID NO: 2459715 - RNA, 19 nt, Homo sapiens
  misc_RNA (1)...(19): siRNA sense strand
acuuggagggaguggacua

SEQ ID NO: 2459716 - RNA, 19 nt, Homo sapiens
  misc_RNA (1)...(19): siRNA sense strand
ggagagcgacucagggaca

SEQ ID NO: 2459717 - RNA, 19 nt, Homo sapiens
  misc_RNA (1)...(19): siRNA sense strand
gcuacgucccuuugagaau

SEQ ID NO: 2459718 - RNA, 19 nt, Homo sapiens
  misc_RNA (1)...(19): siRNA sense strand
cauccugacauguggaaaa

SEQ ID NO: 2459719 - RNA, 19 nt, Homo sapiens
  misc_RNA (1)...(19): siRNA sense strand
agguauccgaagagcuaua

SEQ ID NO: 2459720 - RNA, 19 nt, Homo sapiens
  misc_RNA (1)...(19): siRNA sense strand
agagcagaaguauggaaua

SEQ ID NO: 2459721 - RNA, 19 nt, Homo sapiens
  misc_RNA (1)...(19): siRNA sense strand
uggaaagagaugaugcuga

SEQ ID NO: 2459722 - RNA, 19 nt, Homo sapiens
  misc_RNA (1)...(19): siRNA sense strand
ggggaugagacuaaguuaa

SEQ ID NO: 2459723 - RNA, 19 nt, Homo sapiens
  misc_RNA (1)...(19): siRNA sense strand
caugcaaagccaagccaau

SEQ ID NO: 2459724 - RNA, 19 nt, Homo sapiens
  misc_RNA (1)...(19): siRNA sense strand
aagaaaagaggauggugaa

SEQ ID NO: 2459725 - RNA, 19 nt, Homo sapiens
  misc_RNA (1)...(19): siRNA sense strand
gauaacauuuggucagcca

SEQ ID NO: 2459726 - RNA, 19 nt, Homo sapiens
  misc_RNA (1)...(19): siRNA sense strand
aagaugaggaugagauugu

SEQ ID NO: 2459727 - RNA, 19 nt, Homo sapiens
  misc_RNA (1)...(19): siRNA sense strand
gcguauacugccaggaaag

SEQ ID NO: 2459728 - RNA, 19 nt, Homo sapiens
  misc_RNA (1)...(19): siRNA sense strand
guuucaaaguccugcugau

SEQ ID NO: 2459729 - RNA, 19 nt, Homo sapiens
  misc_RNA (1)...(19): siRNA sense strand
ggauauuucucaaggaugc

SEQ ID NO: 2459730 - RNA, 19 nt, Homo sapiens
  misc_RNA (1)...(19): siRNA sense strand
aaaugaagcugaaggggca

SEQ ID NO: 2459731 - RNA, 19 nt, Homo sapiens
  misc_RNA (1)...(19): siRNA sense strand
ggcaaauauccaaggaaug

SEQ ID NO: 2459732 - RNA, 19 nt, Homo sapiens
  misc_RNA (1)...(19): siRNA sense strand
aaggaauguggaagccuaa

SEQ ID NO: 2459733 - RNA, 19 nt, Homo sapiens
  misc_RNA (1)...(19): siRNA sense strand
cagagcagaaguauggaau

SEQ ID NO: 2459734 - RNA, 19 nt, Homo sapiens
  misc_RNA (1)...(19): siRNA sense strand
guucucuagugaaggauca

SEQ ID NO: 2459735 - RNA, 19 nt, Homo sapiens
  misc_RNA (1)...(19): siRNA sense strand
cugaaugccagaagagucu

SEQ ID NO: 2459736 - RNA, 19 nt, Homo sapiens
  misc_RNA (1)...(19): siRNA sense strand
gaagucaaaacgaagaaaa

SEQ ID NO: 2459737 - RNA, 19 nt, Homo sapiens
  misc_RNA (1)...(19): siRNA sense strand
gcaagagaauauaggguga

SEQ ID NO: 2459738 - RNA, 19 nt, Homo sapiens
  misc_RNA (1)...(19): siRNA sense strand
gaaagaaccuggauggaga

SEQ ID NO: 2459739 - RNA, 19 nt, Homo sapiens
  misc_RNA (1)...(19): siRNA sense strand
gggaaagaggagaaaguca

SEQ ID NO: 2459740 - RNA, 19 nt, Homo sapiens
  misc_RNA (1)...(19): siRNA sense strand
aguuauugaugguggaaaa

SEQ ID NO: 2459741 - RNA, 19 nt, Homo sapiens
  misc_RNA (1)...(19): siRNA sense strand
cagcagggaaagaggagaa

SEQ ID NO: 2459742 - RNA, 19 nt, Homo sapiens
  misc_RNA (1)...(19): siRNA sense strand
agaugauacuagaagacaa

SEQ ID NO: 2459743 - RNA, 19 nt, Homo sapiens
  misc_RNA (1)...(19): siRNA sense strand
gagaaagcugcaagagaau

SEQ ID NO: 2459744 - RNA, 19 nt, Homo sapiens
  misc_RNA (1)...(19): siRNA sense strand
ccagagaauaacucagaaa

SEQ ID NO: 2459745 - RNA, 19 nt, Homo sapiens
  misc_RNA (1)...(19): siRNA sense strand
gacagagacagcagggaaa

SEQ ID NO: 2459746 - RNA, 19 nt, Homo sapiens
  misc_RNA (1)...(19): siRNA sense strand
aggagaaagucaaaggcuu

SEQ ID NO: 2459747 - RNA, 19 nt, Homo sapiens
  misc_RNA (1)...(19): siRNA sense strand
agagaauaacucagaaaga

SEQ ID NO: 2459748 - RNA, 19 nt, Homo sapiens
  misc_RNA (1)...(19): siRNA sense strand
ccugauaaggacagugcua

SEQ ID NO: 2459749 - RNA, 19 nt, Homo sapiens
  misc_RNA (1)...(19): siRNA sense strand
ugacagagacagcagggaa

SEQ ID NO: 2459750 - RNA, 19 nt, Homo sapiens
  misc_RNA (1)...(19): siRNA sense strand
cagaagcagcgcagggaga

SEQ ID NO: 2459751 - RNA, 19 nt, Homo sapiens
  misc_RNA (1)...(19): siRNA sense strand
cagggaaagaggagaaagu

SEQ ID NO: 2459752 - RNA, 19 nt, Homo sapiens
  misc_RNA (1)...(19): siRNA sense strand
caucagaggaagaggaggu

SEQ ID NO: 2459753 - RNA, 19 nt, Homo sapiens
  misc_RNA (1)...(19): siRNA sense strand
uacuagaagacaagagaau

SEQ ID NO: 2459754 - RNA, 19 nt, Homo sapiens
  misc_RNA (1)...(19): siRNA sense strand
ggagaaagucaaaggcuuc

SEQ ID NO: 2459755 - RNA, 19 nt, Homo sapiens
  misc_RNA (1)...(19): siRNA sense strand
gccaaagaaauuagugaca

SEQ ID NO: 2459756 - RNA, 19 nt, Homo sapiens
  misc_RNA (1)...(19): siRNA sense strand
gggugaaugcacagggacu

SEQ ID NO: 2459757 - RNA, 19 nt, Homo sapiens
  misc_RNA (1)...(19): siRNA sense strand
ugauaaggacagugcuaca

SEQ ID NO: 2459758 - RNA, 19 nt, Homo sapiens
  misc_RNA (1)...(19): siRNA sense strand
ugaaaguugaagaccuaaa

SEQ ID NO: 2459759 - RNA, 19 nt, Homo sapiens
  misc_RNA (1)...(19): siRNA sense strand
cagcagaaggagcgaaugu

SEQ ID NO: 2459760 - RNA, 19 nt, Homo sapiens
  misc_RNA (1)...(19): siRNA sense strand
aagaucgauuccuggauaa

SEQ ID NO: 2459761 - RNA, 19 nt, Homo sapiens
  misc_RNA (1)...(19): siRNA sense strand
uagucuacaugcagaaaga

SEQ ID NO: 2459762 - RNA, 19 nt, Homo sapiens
  misc_RNA (1)...(19): siRNA sense strand
aguugaagaccuaaaugua

SEQ ID NO: 2459763 - RNA, 19 nt, Homo sapiens
  misc_RNA (1)...(19): siRNA sense strand
ccuaaauguaugugagccu

SEQ ID NO: 2459764 - RNA, 19 nt, Homo sapiens
  misc_RNA (1)...(19): siRNA sense strand
cauggaaacggguggcuau

SEQ ID NO: 2459765 - RNA, 19 nt, Homo sapiens
  misc_RNA (1)...(19): siRNA sense strand
ggagaaaaugaaaguugaa

SEQ ID NO: 2459766 - RNA, 19 nt, Homo sapiens
  misc_RNA (1)...(19): siRNA sense strand
gaagcagcgcagggagaaa

SEQ ID NO: 2459767 - RNA, 19 nt, Homo sapiens
  misc_RNA (1)...(19): siRNA sense strand
cagccaaagaaauuaguga

SEQ ID NO: 2459768 - RNA, 19 nt, Homo sapiens
  misc_RNA (1)...(19): siRNA sense strand
uggaaaacaaggaagauuu

SEQ ID NO: 2459769 - RNA, 19 nt, Homo sapiens
  misc_RNA (1)...(19): siRNA sense strand
aaaugaaaguugaagaccu

SEQ ID NO: 2459770 - RNA, 19 nt, Homo sapiens
  misc_RNA (1)...(19): siRNA sense strand
cugaaugaccucaaguaca

SEQ ID NO: 2459771 - RNA, 19 nt, Homo sapiens
  misc_RNA (1)...(19): siRNA sense strand
aggggaaacuagugaggau

SEQ ID NO: 2459772 - RNA, 19 nt, Homo sapiens
  misc_RNA (1)...(19): siRNA sense strand
agugaggauuccaguaaca

SEQ ID NO: 2459773 - RNA, 19 nt, Homo sapiens
  misc_RNA (1)...(19): siRNA sense strand
cagugaauuccuagcuuau

SEQ ID NO: 2459774 - RNA, 19 nt, Homo sapiens
  misc_RNA (1)...(19): siRNA sense strand
agaauaacucagaaagaac

SEQ ID NO: 2459775 - RNA, 19 nt, Homo sapiens
  misc_RNA (1)...(19): siRNA sense strand
ccucaggaaaccagagugu

SEQ ID NO: 2459776 - RNA, 19 nt, Homo sapiens
  misc_RNA (1)...(19): siRNA sense strand
caugauugucguuggcuuu

SEQ ID NO: 2459777 - RNA, 19 nt, Homo sapiens
  misc_RNA (1)...(19): siRNA sense strand
ccacaauggacuucagaug

SEQ ID NO: 2459778 - RNA, 19 nt, Homo sapiens
  misc_RNA (1)...(19): siRNA sense strand
ugcuacagccaaagaaauu

SEQ ID NO: 2459779 - RNA, 19 nt, Homo sapiens
  misc_RNA (1)...(19): siRNA sense strand
aagaaauuagugacagaga

SEQ ID NO: 2459780 - RNA, 19 nt, Homo sapiens
  misc_RNA (1)...(19): siRNA sense strand
ggcagcagaaggagcgaau

SEQ ID NO: 2459781 - RNA, 19 nt, Homo sapiens
  misc_RNA (1)...(19): siRNA sense strand
ccaugauugucguuggcuu

SEQ ID NO: 2459782 - RNA, 19 nt, Homo sapiens
  misc_RNA (1)...(19): siRNA sense strand
ggauaaguccuuuucuaaa

SEQ ID NO: 2459783 - RNA, 19 nt, Homo sapiens
  misc_RNA (1)...(19): siRNA sense strand
uguaugucgccauggcaaa

SEQ ID NO: 2459784 - RNA, 19 nt, Homo sapiens
  misc_RNA (1)...(19): siRNA sense strand
gcacaaagucaaagggguc

SEQ ID NO: 2459785 - RNA, 19 nt, Homo sapiens
  misc_RNA (1)...(19): siRNA sense strand
gugcuacagccaaagaaau

SEQ ID NO: 2459786 - RNA, 19 nt, Homo sapiens
  misc_RNA (1)...(19): siRNA sense strand
aagagaauauagggugaau

SEQ ID NO: 2459787 - RNA, 19 nt, Homo sapiens
  misc_RNA (1)...(19): siRNA sense strand
gaauauagggugaaugcac

SEQ ID NO: 2459788 - RNA, 19 nt, Homo sapiens
  misc_RNA (1)...(19): siRNA sense strand
gcucagacucagagggaaa

SEQ ID NO: 2459789 - RNA, 19 nt, Homo sapiens
  misc_RNA (1)...(19): siRNA sense strand
uguaaggaaagcagagaaa

SEQ ID NO: 2459790 - RNA, 19 nt, Homo sapiens
  misc_RNA (1)...(19): siRNA sense strand
uugaacagcagaagagaaa

SEQ ID NO: 2459791 - RNA, 19 nt, Homo sapiens
  misc_RNA (1)...(19): siRNA sense strand
ccaaaucaagagagaagaa

SEQ ID NO: 2459792 - RNA, 19 nt, Homo sapiens
  misc_RNA (1)...(19): siRNA sense strand
ccaguaagauaaaggcaga

SEQ ID NO: 2459793 - RNA, 19 nt, Homo sapiens
  misc_RNA (1)...(19): siRNA sense strand
cggaguugggagauggaaa

SEQ ID NO: 2459794 - RNA, 19 nt, Homo sapiens
  misc_RNA (1)...(19): siRNA sense strand
aggcagacccugagaaacu

SEQ ID NO: 2459795 - RNA, 19 nt, Homo sapiens
  misc_RNA (1)...(19): siRNA sense strand
cagucaagcagaaacauaa

SEQ ID NO: 2459796 - RNA, 19 nt, Homo sapiens
  misc_RNA (1)...(19): siRNA sense strand
cgaauuugcugucagggaa

SEQ ID NO: 2459797 - RNA, 19 nt, Homo sapiens
  misc_RNA (1)...(19): siRNA sense strand
aagccaaaccugaggagau

SEQ ID NO: 2459798 - RNA, 19 nt, Homo sapiens
  misc_RNA (1)...(19): siRNA sense strand
ggaauauagaagagaccca

SEQ ID NO: 2459799 - RNA, 19 nt, Homo sapiens
  misc_RNA (1)...(19): siRNA sense strand
ucgcacagcccgagagcau

SEQ ID NO: 2459800 - RNA, 19 nt, Homo sapiens
  misc_RNA (1)...(19): siRNA sense strand
ggaguugggagauggaaau

SEQ ID NO: 2459801 - RNA, 19 nt, Homo sapiens
  misc_RNA (1)...(19): siRNA sense strand
agauaaaggcagacccuga

SEQ ID NO: 2459802 - RNA, 19 nt, Homo sapiens
  misc_RNA (1)...(19): siRNA sense strand
gaaaauaacaucaggagca

SEQ ID NO: 2459803 - RNA, 19 nt, Homo sapiens
  misc_RNA (1)...(19): siRNA sense strand
cuccaaacuuccagcaauu

SEQ ID NO: 2459804 - RNA, 19 nt, Homo sapiens
  misc_RNA (1)...(19): siRNA sense strand
gggcaaagguugucccaag

SEQ ID NO: 2459805 - RNA, 19 nt, Homo sapiens
  misc_RNA (1)...(19): siRNA sense strand
ggccaaaucaagagagaag

SEQ ID NO: 2459806 - RNA, 19 nt, Homo sapiens
  misc_RNA (1)...(19): siRNA sense strand
aggaaaccaguaagauaaa

SEQ ID NO: 2459807 - RNA, 19 nt, Homo sapiens
  misc_RNA (1)...(19): siRNA sense strand
guaccaugacuguaaggaa

SEQ ID NO: 2459808 - RNA, 19 nt, Homo sapiens
  misc_RNA (1)...(19): siRNA sense strand
uuaagaaagaggaagccaa

SEQ ID NO: 2459809 - RNA, 19 nt, Homo sapiens
  misc_RNA (1)...(19): siRNA sense strand
agaaauugcaagaaagucu

SEQ ID NO: 2459810 - RNA, 19 nt, Homo sapiens
  misc_RNA (1)...(19): siRNA sense strand
guucaguaucugcgggaca

SEQ ID NO: 2459811 - RNA, 19 nt, Homo sapiens
  misc_RNA (1)...(19): siRNA sense strand
uaaggaaagcagagaaagu

SEQ ID NO: 2459812 - RNA, 19 nt, Homo sapiens
  misc_RNA (1)...(19): siRNA sense strand
agaucaaguaguucaacaa

SEQ ID NO: 2459813 - RNA, 19 nt, Homo sapiens
  misc_RNA (1)...(19): siRNA sense strand
uacuaaauccacagggcaa

SEQ ID NO: 2459814 - RNA, 19 nt, Homo sapiens
  misc_RNA (1)...(19): siRNA sense strand
caucaagagugccugaaaa

SEQ ID NO: 2459815 - RNA, 19 nt, Homo sapiens
  misc_RNA (1)...(19): siRNA sense strand
cgugaagaccugugagaug

SEQ ID NO: 2459816 - RNA, 19 nt, Homo sapiens
  misc_RNA (1)...(19): siRNA sense strand
agagacaaguuuugagaga

SEQ ID NO: 2459817 - RNA, 19 nt, Homo sapiens
  misc_RNA (1)...(19): siRNA sense strand
cccaugauucugaaggaua

SEQ ID NO: 2459818 - RNA, 19 nt, Homo sapiens
  misc_RNA (1)...(19): siRNA sense strand
aaucaagagagaagaaacu

SEQ ID NO: 2459819 - RNA, 19 nt, Homo sapiens
  misc_RNA (1)...(19): siRNA sense strand
gaagaaugucuguggguug

SEQ ID NO: 2459820 - RNA, 19 nt, Homo sapiens
  misc_RNA (1)...(19): siRNA sense strand
aaaggcagacccugagaaa

SEQ ID NO: 2459821 - RNA, 19 nt, Homo sapiens
  misc_RNA (1)...(19): siRNA sense strand
guggaaagagagagguugu

SEQ ID NO: 2459822 - RNA, 19 nt, Homo sapiens
  misc_RNA (1)...(19): siRNA sense strand
caucagucaagcagaaaca

SEQ ID NO: 2459823 - RNA, 19 nt, Homo sapiens
  misc_RNA (1)...(19): siRNA sense strand
gcugaagaggccaaaucaa

SEQ ID NO: 2459824 - RNA, 19 nt, Homo sapiens
  misc_RNA (1)...(19): siRNA sense strand
gaaugaacucagaaggcca

SEQ ID NO: 2459825 - RNA, 19 nt, Homo sapiens
  misc_RNA (1)...(19): siRNA sense strand
agccaaaccugaggagauu

SEQ ID NO: 2459826 - RNA, 19 nt, Homo sapiens
  misc_RNA (1)...(19): siRNA sense strand
agucaagcagaaacauaaa

SEQ ID NO: 2459827 - RNA, 19 nt, Homo sapiens
  misc_RNA (1)...(19): siRNA sense strand
cagcagaagagaaagcgau

SEQ ID NO: 2459828 - RNA, 19 nt, Homo sapiens
  misc_RNA (1)...(19): siRNA sense strand
cuguaaggaaagcagagaa

SEQ ID NO: 2459829 - RNA, 19 nt, Homo sapiens
  misc_RNA (1)...(19): siRNA sense strand
gacagagguggcagugaaa

SEQ ID NO: 2459830 - RNA, 19 nt, Homo sapiens
  misc_RNA (1)...(19): siRNA sense strand
augaaaaggaaaccaguaa

SEQ ID NO: 2459831 - RNA, 19 nt, Homo sapiens
  misc_RNA (1)...(19): siRNA sense strand
agaagagacccaaaugaga

SEQ ID NO: 2459832 - RNA, 19 nt, Homo sapiens
  misc_RNA (1)...(19): siRNA sense strand
agacaaguuuugagagauc

SEQ ID NO: 2459833 - RNA, 19 nt, Homo sapiens
  misc_RNA (1)...(19): siRNA sense strand
agguggaaagagagagguu

SEQ ID NO: 2459834 - RNA, 19 nt, Homo sapiens
  misc_RNA (1)...(19): siRNA sense strand
cuguaggagggccaagaaa

SEQ ID NO: 2459835 - RNA, 19 nt, Homo sapiens
  misc_RNA (1)...(19): siRNA sense strand
cagagguggcagugaaaau

SEQ ID NO: 2459836 - RNA, 19 nt, Homo sapiens
  misc_RNA (1)...(19): siRNA sense strand
ugauuguauuucuguggaa

SEQ ID NO: 2459837 - RNA, 19 nt, Homo sapiens
  misc_RNA (1)...(19): siRNA sense strand
agaccugugagauguguaa

SEQ ID NO: 2459838 - RNA, 19 nt, Homo sapiens
  misc_RNA (1)...(19): siRNA sense strand
cagaucaaguaguucaaca

SEQ ID NO: 2459839 - RNA, 19 nt, Homo sapiens
  misc_RNA (1)...(19): siRNA sense strand
ccugauagggaaucugcua

SEQ ID NO: 2459840 - RNA, 19 nt, Homo sapiens
  misc_RNA (1)...(19): siRNA sense strand
ugucaaugcugaaaaugua

SEQ ID NO: 2459841 - RNA, 19 nt, Homo sapiens
  misc_RNA (1)...(19): siRNA sense strand
cugucucccauuagaaaua

SEQ ID NO: 2459842 - RNA, 19 nt, Homo sapiens
  misc_RNA (1)...(19): siRNA sense strand
uggccuuacuggugagcau

SEQ ID NO: 2459843 - RNA, 19 nt, Homo sapiens
  misc_RNA (1)...(19): siRNA sense strand
uuuaugaguuccuggauuu

SEQ ID NO: 2459844 - RNA, 19 nt, Homo sapiens
  misc_RNA (1)...(19): siRNA sense strand
auucagaucuugagugcca

SEQ ID NO: 2459845 - RNA, 19 nt, Homo sapiens
  misc_RNA (1)...(19): siRNA sense strand
ggccaaaagcuaccggaaa

SEQ ID NO: 2459846 - RNA, 19 nt, Homo sapiens
  misc_RNA (1)...(19): siRNA sense strand
uguccauggaggugaguga

SEQ ID NO: 2459847 - RNA, 19 nt, Homo sapiens
  misc_RNA (1)...(19): siRNA sense strand
aggccaugagggaggaaca

SEQ ID NO: 2459848 - RNA, 19 nt, Homo sapiens
  misc_RNA (1)...(19): siRNA sense strand
ggacagaacaggacuggcu

SEQ ID NO: 2459849 - RNA, 19 nt, Homo sapiens
  misc_RNA (1)...(19): siRNA sense strand
ccggaaaaggagagcgcuu

SEQ ID NO: 2459850 - RNA, 19 nt, Homo sapiens
  misc_RNA (1)...(19): siRNA sense strand
gggucaaagcacuguccau

SEQ ID NO: 2459851 - RNA, 19 nt, Homo sapiens
  misc_RNA (1)...(19): siRNA sense strand
guugaaggagcuaggacca

SEQ ID NO: 2459852 - RNA, 19 nt, Homo sapiens
  misc_RNA (1)...(19): siRNA sense strand
ugucagggaccaaggggaa

SEQ ID NO: 2459853 - RNA, 19 nt, Homo sapiens
  misc_RNA (1)...(19): siRNA sense strand
ccaccaagggcgagcucaa

SEQ ID NO: 2459854 - RNA, 19 nt, Homo sapiens
  misc_RNA (1)...(19): siRNA sense strand
aggccgagcaggaggaaga

SEQ ID NO: 2459855 - RNA, 19 nt, Homo sapiens
  misc_RNA (1)...(19): siRNA sense strand
uggaggaggaagagguaga

SEQ ID NO: 2459856 - RNA, 19 nt, Homo sapiens
  misc_RNA (1)...(19): siRNA sense strand
ucgagauggaggaggaaga

SEQ ID NO: 2459857 - RNA, 19 nt, Homo sapiens
  misc_RNA (1)...(19): siRNA sense strand
ccuucgagauggaggagga

SEQ ID NO: 2459858 - RNA, 19 nt, Homo sapiens
  misc_RNA (1)...(19): siRNA sense strand
cgggcaagaaggacgacaa

SEQ ID NO: 2459859 - RNA, 19 nt, Homo sapiens
  misc_RNA (1)...(19): siRNA sense strand
ccaucgagaggguggccaa

SEQ ID NO: 2459860 - RNA, 19 nt, Homo sapiens
  misc_RNA (1)...(19): siRNA sense strand
gggcgaacaggaaggggaa

SEQ ID NO: 2459861 - RNA, 19 nt, Homo sapiens
  misc_RNA (1)...(19): siRNA sense strand
aguucauaguggagaguaa

SEQ ID NO: 2459862 - RNA, 19 nt, Homo sapiens
  misc_RNA (1)...(19): siRNA sense strand
auguaaagaaugcgggaaa

SEQ ID NO: 2459863 - RNA, 19 nt, Homo sapiens
  misc_RNA (1)...(19): siRNA sense strand
augcaaggaaugugggaaa

SEQ ID NO: 2459864 - RNA, 19 nt, Homo sapiens
  misc_RNA (1)...(19): siRNA sense strand
auguaaggaaugugggaaa

SEQ ID NO: 2459865 - RNA, 19 nt, Homo sapiens
  misc_RNA (1)...(19): siRNA sense strand
uuguaaggaaugugggaaa

SEQ ID NO: 2459866 - RNA, 19 nt, Homo sapiens
  misc_RNA (1)...(19): siRNA sense strand
guguaagcaaugugguaaa

SEQ ID NO: 2459867 - RNA, 19 nt, Homo sapiens
  misc_RNA (1)...(19): siRNA sense strand
aauucauacaggagagaaa

SEQ ID NO: 2459868 - RNA, 19 nt, Homo sapiens
  misc_RNA (1)...(19): siRNA sense strand
gggaaaacugggaggagaa

SEQ ID NO: 2459869 - RNA, 19 nt, Homo sapiens
  misc_RNA (1)...(19): siRNA sense strand
aacucauacuggagagaaa

SEQ ID NO: 2459870 - RNA, 19 nt, Homo sapiens
  misc_RNA (1)...(19): siRNA sense strand
auguaaacagugugguaaa

SEQ ID NO: 2459871 - RNA, 19 nt, Homo sapiens
  misc_RNA (1)...(19): siRNA sense strand
auguaaacagugugguaaa

SEQ ID NO: 2459872 - RNA, 19 nt, Homo sapiens
  misc_RNA (1)...(19): siRNA sense strand
auguaaacagugugguaaa

SEQ ID NO: 2459873 - RNA, 19 nt, Homo sapiens
  misc_RNA (1)...(19): siRNA sense strand
ccuuaugaguguaaacaau

SEQ ID NO: 2459874 - RNA, 19 nt, Homo sapiens
  misc_RNA (1)...(19): siRNA sense strand
ggagaagaacauugaagau

SEQ ID NO: 2459875 - RNA, 19 nt, Homo sapiens
  misc_RNA (1)...(19): siRNA sense strand
gauaaugcacacuggaaau

SEQ ID NO: 2459876 - RNA, 19 nt, Homo sapiens
  misc_RNA (1)...(19): siRNA sense strand
gaauguaguguguguggaa

SEQ ID NO: 2459877 - RNA, 19 nt, Homo sapiens
  misc_RNA (1)...(19): siRNA sense strand
uggaaauggaccuuauaaa

SEQ ID NO: 2459878 - RNA, 19 nt, Homo sapiens
  misc_RNA (1)...(19): siRNA sense strand
ugauaaugcacacuggaaa

SEQ ID NO: 2459879 - RNA, 19 nt, Homo sapiens
  misc_RNA (1)...(19): siRNA sense strand
acaaauauggagagaaauc

SEQ ID NO: 2459880 - RNA, 19 nt, Homo sapiens
  misc_RNA (1)...(19): siRNA sense strand
gaauguaaacaaugugaca

SEQ ID NO: 2459881 - RNA, 19 nt, Homo sapiens
  misc_RNA (1)...(19): siRNA sense strand
aaauguaaacaguguggua

SEQ ID NO: 2459882 - RNA, 19 nt, Homo sapiens
  misc_RNA (1)...(19): siRNA sense strand
cccuaugauuguaaggaau

SEQ ID NO: 2459883 - RNA, 19 nt, Homo sapiens
  misc_RNA (1)...(19): siRNA sense strand
gaguguaaacaauguggua

SEQ ID NO: 2459884 - RNA, 19 nt, Homo sapiens
  misc_RNA (1)...(19): siRNA sense strand
aacucacacuggagagaaa

SEQ ID NO: 2459885 - RNA, 19 nt, Homo sapiens
  misc_RNA (1)...(19): siRNA sense strand
ucaaauacaugaaaggacu

SEQ ID NO: 2459886 - RNA, 19 nt, Homo sapiens
  misc_RNA (1)...(19): siRNA sense strand
caguguaagcaauguggua

SEQ ID NO: 2459887 - RNA, 19 nt, Homo sapiens
  misc_RNA (1)...(19): siRNA sense strand
aacucacacuggagagaaa

SEQ ID NO: 2459888 - RNA, 19 nt, Homo sapiens
  misc_RNA (1)...(19): siRNA sense strand
aacucacacuggagagaaa

SEQ ID NO: 2459889 - RNA, 19 nt, Homo sapiens
  misc_RNA (1)...(19): siRNA sense strand
aacucacacuggagagaaa

SEQ ID NO: 2459890 - RNA, 19 nt, Homo sapiens
  misc_RNA (1)...(19): siRNA sense strand
ugguaaagcucuuaguugu

SEQ ID NO: 2459891 - RNA, 19 nt, Homo sapiens
  misc_RNA (1)...(19): siRNA sense strand
cuuaauaggcacaugagau

SEQ ID NO: 2459892 - RNA, 19 nt, Homo sapiens
  misc_RNA (1)...(19): siRNA sense strand
agagaugugaugcaagaaa

SEQ ID NO: 2459893 - RNA, 19 nt, Homo sapiens
  misc_RNA (1)...(19): siRNA sense strand
augucaacaaugugguaaa

SEQ ID NO: 2459894 - RNA, 19 nt, Homo sapiens
  misc_RNA (1)...(19): siRNA sense strand
gggagaaagcuaagaaguc

SEQ ID NO: 2459895 - RNA, 19 nt, Homo sapiens
  misc_RNA (1)...(19): siRNA sense strand
gcaaugugguaaagcucuu

SEQ ID NO: 2459896 - RNA, 19 nt, Homo sapiens
  misc_RNA (1)...(19): siRNA sense strand
ucgaagucaugaaaggauu

SEQ ID NO: 2459897 - RNA, 19 nt, Homo sapiens
  misc_RNA (1)...(19): siRNA sense strand
ccaagcuaucgaagacaua

SEQ ID NO: 2459898 - RNA, 19 nt, Homo sapiens
  misc_RNA (1)...(19): siRNA sense strand
ucgaauacaugaaaggacu

SEQ ID NO: 2459899 - RNA, 19 nt, Homo sapiens
  misc_RNA (1)...(19): siRNA sense strand
ucgaauacaugaaaggacu

SEQ ID NO: 2459900 - RNA, 19 nt, Homo sapiens
  misc_RNA (1)...(19): siRNA sense strand
gugggaaagccuucaguuu

SEQ ID NO: 2459901 - RNA, 19 nt, Homo sapiens
  misc_RNA (1)...(19): siRNA sense strand
gagaaagcuaagaagucau

SEQ ID NO: 2459902 - RNA, 19 nt, Homo sapiens
  misc_RNA (1)...(19): siRNA sense strand
ggggaaaacugggaggaga

SEQ ID NO: 2459903 - RNA, 19 nt, Homo sapiens
  misc_RNA (1)...(19): siRNA sense strand
aggagaagaacauugaaga

SEQ ID NO: 2459904 - RNA, 19 nt, Homo sapiens
  misc_RNA (1)...(19): siRNA sense strand
cauugguuauugagggcaa

SEQ ID NO: 2459905 - RNA, 19 nt, Homo sapiens
  misc_RNA (1)...(19): siRNA sense strand
agaugaaaucccagagacu

SEQ ID NO: 2459906 - RNA, 19 nt, Homo sapiens
  misc_RNA (1)...(19): siRNA sense strand
ggaaagucccggagcucca

SEQ ID NO: 2459907 - RNA, 19 nt, Homo sapiens
  misc_RNA (1)...(19): siRNA sense strand
acaagaugcgagugaagau

SEQ ID NO: 2459908 - RNA, 19 nt, Homo sapiens
  misc_RNA (1)...(19): siRNA sense strand
caaagaacaagaugcgagu

SEQ ID NO: 2459909 - RNA, 19 nt, Homo sapiens
  misc_RNA (1)...(19): siRNA sense strand
gggauauguuuaugggcua

SEQ ID NO: 2459910 - RNA, 19 nt, Homo sapiens
  misc_RNA (1)...(19): siRNA sense strand
ggauguaaagauagggcaa

SEQ ID NO: 2459911 - RNA, 19 nt, Homo sapiens
  misc_RNA (1)...(19): siRNA sense strand
cugaaguagaagugcgaau

SEQ ID NO: 2459912 - RNA, 19 nt, Homo sapiens
  misc_RNA (1)...(19): siRNA sense strand
ugguguucuucuagagcua

SEQ ID NO: 2459913 - RNA, 19 nt, Homo sapiens
  misc_RNA (1)...(19): siRNA sense strand
acauguacgggaaggacaa

SEQ ID NO: 2459914 - RNA, 19 nt, Homo sapiens
  misc_RNA (1)...(19): siRNA sense strand
caagacaauggguggaaaa

SEQ ID NO: 2459915 - RNA, 19 nt, Homo sapiens
  misc_RNA (1)...(19): siRNA sense strand
auguaaagauagggcaaaa

SEQ ID NO: 2459916 - RNA, 19 nt, Homo sapiens
  misc_RNA (1)...(19): siRNA sense strand
ccgauagcuaugagacaga

SEQ ID NO: 2459917 - RNA, 19 nt, Homo sapiens
  misc_RNA (1)...(19): siRNA sense strand
caacacaauagaugaggga

SEQ ID NO: 2459918 - RNA, 19 nt, Homo sapiens
  misc_RNA (1)...(19): siRNA sense strand
acggaagaagcuuaacaaa

SEQ ID NO: 2459919 - RNA, 19 nt, Homo sapiens
  misc_RNA (1)...(19): siRNA sense strand
guuaaguuccacagcuaau

SEQ ID NO: 2459920 - RNA, 19 nt, Homo sapiens
  misc_RNA (1)...(19): siRNA sense strand
gauagcuaugagacagaaa

SEQ ID NO: 2459921 - RNA, 19 nt, Homo sapiens
  misc_RNA (1)...(19): siRNA sense strand
cgucacaggaaaauauaua

SEQ ID NO: 2459922 - RNA, 19 nt, Homo sapiens
  misc_RNA (1)...(19): siRNA sense strand
ccaagauguaugcgcguca

SEQ ID NO: 2459923 - RNA, 19 nt, Homo sapiens
  misc_RNA (1)...(19): siRNA sense strand
agucugugcuagagggcau

SEQ ID NO: 2459924 - RNA, 19 nt, Homo sapiens
  misc_RNA (1)...(19): siRNA sense strand
caaaggauccucaagguca

SEQ ID NO: 2459925 - RNA, 19 nt, Homo sapiens
  misc_RNA (1)...(19): siRNA sense strand
ccagaaagcccugagccua

SEQ ID NO: 2459926 - RNA, 19 nt, Homo sapiens
  misc_RNA (1)...(19): siRNA sense strand
ccaagaagaacaagggcaa

SEQ ID NO: 2459927 - RNA, 19 nt, Homo sapiens
  misc_RNA (1)...(19): siRNA sense strand
gaucaaggguggagaccga

SEQ ID NO: 2459928 - RNA, 19 nt, Homo sapiens
  misc_RNA (1)...(19): siRNA sense strand
gggacaagaaagaugacaa

SEQ ID NO: 2459929 - RNA, 19 nt, Homo sapiens
  misc_RNA (1)...(19): siRNA sense strand
ccgugaagcugaugcguga

SEQ ID NO: 2459930 - RNA, 19 nt, Homo sapiens
  misc_RNA (1)...(19): siRNA sense strand
gcaucaucucugagggcaa

SEQ ID NO: 2459931 - RNA, 19 nt, Homo sapiens
  misc_RNA (1)...(19): siRNA sense strand
cggaagaacugccugguga

SEQ ID NO: 2459932 - RNA, 19 nt, Homo sapiens
  misc_RNA (1)...(19): siRNA sense strand
gcgacaucaugaagagaca

SEQ ID NO: 2459933 - RNA, 19 nt, Homo sapiens
  misc_RNA (1)...(19): siRNA sense strand
gggaccugguggagaucaa

SEQ ID NO: 2459934 - RNA, 19 nt, Homo sapiens
  misc_RNA (1)...(19): siRNA sense strand
ccuacuaccaggaggccaa

SEQ ID NO: 2459935 - RNA, 19 nt, Homo sapiens
  misc_RNA (1)...(19): siRNA sense strand
acaagaugucaguggaaga

SEQ ID NO: 2459936 - RNA, 19 nt, Homo sapiens
  misc_RNA (1)...(19): siRNA sense strand
gcaacgagacuguggagga

SEQ ID NO: 2459937 - RNA, 19 nt, Homo sapiens
  misc_RNA (1)...(19): siRNA sense strand
ugaagaaccuggaggcugu

SEQ ID NO: 2459938 - RNA, 19 nt, Homo sapiens
  misc_RNA (1)...(19): siRNA sense strand
ggugagaagaugcagguga

SEQ ID NO: 2459939 - RNA, 19 nt, Homo sapiens
  misc_RNA (1)...(19): siRNA sense strand
uggcuaugacagagcacaa

SEQ ID NO: 2459940 - RNA, 19 nt, Homo sapiens
  misc_RNA (1)...(19): siRNA sense strand
gguuggguggagaaggaaa

SEQ ID NO: 2459941 - RNA, 19 nt, Homo sapiens
  misc_RNA (1)...(19): siRNA sense strand
cggccuucuuugugagcau

SEQ ID NO: 2459942 - RNA, 19 nt, Homo sapiens
  misc_RNA (1)...(19): siRNA sense strand
cggaaauacaacacagacu

SEQ ID NO: 2459943 - RNA, 19 nt, Homo sapiens
  misc_RNA (1)...(19): siRNA sense strand
acagcaaagcccaggagau

SEQ ID NO: 2459944 - RNA, 19 nt, Homo sapiens
  misc_RNA (1)...(19): siRNA sense strand
cugcagaaucacaccgaga

SEQ ID NO: 2459945 - RNA, 19 nt, Homo sapiens
  misc_RNA (1)...(19): siRNA sense strand
ccgaaagcgacaucaugaa

SEQ ID NO: 2459946 - RNA, 19 nt, Homo sapiens
  misc_RNA (1)...(19): siRNA sense strand
uggaagaggucugccggaa

SEQ ID NO: 2459947 - RNA, 19 nt, Homo sapiens
  misc_RNA (1)...(19): siRNA sense strand
aggacucacccaagaagaa

SEQ ID NO: 2459948 - RNA, 19 nt, Homo sapiens
  misc_RNA (1)...(19): siRNA sense strand
acgagacuguggaggacau

SEQ ID NO: 2459949 - RNA, 19 nt, Homo sapiens
  misc_RNA (1)...(19): siRNA sense strand
ccgagcaaaucgacgagau

SEQ ID NO: 2459950 - RNA, 19 nt, Homo sapiens
  misc_RNA (1)...(19): siRNA sense strand
gggaaggugagaagaugca

SEQ ID NO: 2459951 - RNA, 19 nt, Homo sapiens
  misc_RNA (1)...(19): siRNA sense strand
ccaaugucccagagggucu

SEQ ID NO: 2459952 - RNA, 19 nt, Homo sapiens
  misc_RNA (1)...(19): siRNA sense strand
agaaagaugacaaggacuc

SEQ ID NO: 2459953 - RNA, 19 nt, Homo sapiens
  misc_RNA (1)...(19): siRNA sense strand
ccaagagcuccaagaucau

SEQ ID NO: 2459954 - RNA, 19 nt, Homo sapiens
  misc_RNA (1)...(19): siRNA sense strand
acaccuggcuugaggcugu

SEQ ID NO: 2459955 - RNA, 19 nt, Homo sapiens
  misc_RNA (1)...(19): siRNA sense strand
acaacaucccugugcucaa

SEQ ID NO: 2459956 - RNA, 19 nt, Homo sapiens
  misc_RNA (1)...(19): siRNA sense strand
ugcaagacccggaggaacu

SEQ ID NO: 2459957 - RNA, 19 nt, Homo sapiens
  misc_RNA (1)...(19): siRNA sense strand
cuaaagaaguccauugccu

SEQ ID NO: 2459958 - RNA, 19 nt, Homo sapiens
  misc_RNA (1)...(19): siRNA sense strand
uaaagaaguccauugccua

SEQ ID NO: 2459959 - RNA, 19 nt, Homo sapiens
  misc_RNA (1)...(19): siRNA sense strand
gcaugaagaacaagauccu

SEQ ID NO: 2459960 - RNA, 19 nt, Homo sapiens
  misc_RNA (1)...(19): siRNA sense strand
ucucagaagcucaggacau

SEQ ID NO: 2459961 - RNA, 19 nt, Homo sapiens
  misc_RNA (1)...(19): siRNA sense strand
ugauuaagacaguggagau

SEQ ID NO: 2459962 - RNA, 19 nt, Homo sapiens
  misc_RNA (1)...(19): siRNA sense strand
caguggagauuaaugguga

SEQ ID NO: 2459963 - RNA, 19 nt, Homo sapiens
  misc_RNA (1)...(19): siRNA sense strand
ggcugaaaggagagagguu

SEQ ID NO: 2459964 - RNA, 19 nt, Homo sapiens
  misc_RNA (1)...(19): siRNA sense strand
ugaccuggcugaaaggaga

SEQ ID NO: 2459965 - RNA, 19 nt, Homo sapiens
  misc_RNA (1)...(19): siRNA sense strand
caagagagauuucggucca

SEQ ID NO: 2459966 - RNA, 19 nt, Homo sapiens
  misc_RNA (1)...(19): siRNA sense strand
cuuaccuggagaagggaaa

SEQ ID NO: 2459967 - RNA, 19 nt, Homo sapiens
  misc_RNA (1)...(19): siRNA sense strand
cagugaagccagacagaac

SEQ ID NO: 2459968 - RNA, 19 nt, Homo sapiens
  misc_RNA (1)...(19): siRNA sense strand
ggagaagggaaaagcauca

SEQ ID NO: 2459969 - RNA, 19 nt, Homo sapiens
  misc_RNA (1)...(19): siRNA sense strand
ggagagagguuucccagca

SEQ ID NO: 2459970 - RNA, 19 nt, Homo sapiens
  misc_RNA (1)...(19): siRNA sense strand
acucaucagugaagccaga

SEQ ID NO: 2459971 - RNA, 19 nt, Homo sapiens
  misc_RNA (1)...(19): siRNA sense strand
aguggagauuaauggugaa

SEQ ID NO: 2459972 - RNA, 19 nt, Homo sapiens
  misc_RNA (1)...(19): siRNA sense strand
gcugcgggagauagaacaa

SEQ ID NO: 2459973 - RNA, 19 nt, Homo sapiens
  misc_RNA (1)...(19): siRNA sense strand
agccaaggaaucugauaau

SEQ ID NO: 2459974 - RNA, 19 nt, Homo sapiens
  misc_RNA (1)...(19): siRNA sense strand
caacaaacuuaaagggaca

SEQ ID NO: 2459975 - RNA, 19 nt, Homo sapiens
  misc_RNA (1)...(19): siRNA sense strand
cugaaaugcugucggacca

SEQ ID NO: 2459976 - RNA, 19 nt, Homo sapiens
  misc_RNA (1)...(19): siRNA sense strand
cagccaugugggagcauua

SEQ ID NO: 2459977 - RNA, 19 nt, Homo sapiens
  misc_RNA (1)...(19): siRNA sense strand
gcaacaaacuuaaagggac

SEQ ID NO: 2459978 - RNA, 19 nt, Homo sapiens
  misc_RNA (1)...(19): siRNA sense strand
agaaaauggucucgagaaa

SEQ ID NO: 2459979 - RNA, 19 nt, Homo sapiens
  misc_RNA (1)...(19): siRNA sense strand
agaagaugacucagagaaa

SEQ ID NO: 2459980 - RNA, 19 nt, Homo sapiens
  misc_RNA (1)...(19): siRNA sense strand
augaagaugcagauggaaa

SEQ ID NO: 2459981 - RNA, 19 nt, Homo sapiens
  misc_RNA (1)...(19): siRNA sense strand
agaagaagaagaagugcaa

SEQ ID NO: 2459982 - RNA, 19 nt, Homo sapiens
  misc_RNA (1)...(19): siRNA sense strand
guugaagaagacagaaaua

SEQ ID NO: 2459983 - RNA, 19 nt, Homo sapiens
  misc_RNA (1)...(19): siRNA sense strand
gcaucuaguucuaccgcaa

SEQ ID NO: 2459984 - RNA, 19 nt, Homo sapiens
  misc_RNA (1)...(19): siRNA sense strand
aggaagaagaggaggauac

SEQ ID NO: 2459985 - RNA, 19 nt, Homo sapiens
  misc_RNA (1)...(19): siRNA sense strand
aaggaaaucuuaaaggaga

SEQ ID NO: 2459986 - RNA, 19 nt, Homo sapiens
  misc_RNA (1)...(19): siRNA sense strand
cggaagaaggugaugcaga

SEQ ID NO: 2459987 - RNA, 19 nt, Homo sapiens
  misc_RNA (1)...(19): siRNA sense strand
gccagaaagaagggagaaa

SEQ ID NO: 2459988 - RNA, 19 nt, Homo sapiens
  misc_RNA (1)...(19): siRNA sense strand
caaaagaguccgaagaaga

SEQ ID NO: 2459989 - RNA, 19 nt, Homo sapiens
  misc_RNA (1)...(19): siRNA sense strand
cugaugagaaagaggauga

SEQ ID NO: 2459990 - RNA, 19 nt, Homo sapiens
  misc_RNA (1)...(19): siRNA sense strand
auguugaagaagacagaaa

SEQ ID NO: 2459991 - RNA, 19 nt, Homo sapiens
  misc_RNA (1)...(19): siRNA sense strand
aagaagaagugcaaagacu

SEQ ID NO: 2459992 - RNA, 19 nt, Homo sapiens
  misc_RNA (1)...(19): siRNA sense strand
ccgaaagagaauuugaaga

SEQ ID NO: 2459993 - RNA, 19 nt, Homo sapiens
  misc_RNA (1)...(19): siRNA sense strand
gaaaacaaugcuaaggaaa

SEQ ID NO: 2459994 - RNA, 19 nt, Homo sapiens
  misc_RNA (1)...(19): siRNA sense strand
agagaaagagucugaugaa

SEQ ID NO: 2459995 - RNA, 19 nt, Homo sapiens
  misc_RNA (1)...(19): siRNA sense strand
aguugaagaugcugacgaa

SEQ ID NO: 2459996 - RNA, 19 nt, Homo sapiens
  misc_RNA (1)...(19): siRNA sense strand
acagaagaauuuaagguca

SEQ ID NO: 2459997 - RNA, 19 nt, Homo sapiens
  misc_RNA (1)...(19): siRNA sense strand
ucaaagaagaagaagaagu

SEQ ID NO: 2459998 - RNA, 19 nt, Homo sapiens
  misc_RNA (1)...(19): siRNA sense strand
agaagaagugcaaagacua

SEQ ID NO: 2459999 - RNA, 19 nt, Homo sapiens
  misc_RNA (1)...(19): siRNA sense strand
ugaagaagacagaaauaca

SEQ ID NO: 2460000 - RNA, 19 nt, Homo sapiens
  misc_RNA (1)...(19): siRNA sense strand
agaaggugaugcagaugaa

SEQ ID NO: 2460001 - RNA, 19 nt, Homo sapiens
  misc_RNA (1)...(19): siRNA sense strand
agaugcagauggaaaggaa

SEQ ID NO: 2460002 - RNA, 19 nt, Homo sapiens
  misc_RNA (1)...(19): siRNA sense strand
ugaaauuagaggcuacaaa

SEQ ID NO: 2460003 - RNA, 19 nt, Homo sapiens
  misc_RNA (1)...(19): siRNA sense strand
ugcaaagacuauaagaaga

SEQ ID NO: 2460004 - RNA, 19 nt, Homo sapiens
  misc_RNA (1)...(19): siRNA sense strand
aagaugacucagagaaaga

SEQ ID NO: 2460005 - RNA, 19 nt, Homo sapiens
  misc_RNA (1)...(19): siRNA sense strand
ggaugaagaauaugcagau

SEQ ID NO: 2460006 - RNA, 19 nt, Homo sapiens
  misc_RNA (1)...(19): siRNA sense strand
uggaaaggaaguugaagau

SEQ ID NO: 2460007 - RNA, 19 nt, Homo sapiens
  misc_RNA (1)...(19): siRNA sense strand
cuauagaugagaagaaguu

SEQ ID NO: 2460008 - RNA, 19 nt, Homo sapiens
  misc_RNA (1)...(19): siRNA sense strand
ccgaagaagaugacucaga

SEQ ID NO: 2460009 - RNA, 19 nt, Homo sapiens
  misc_RNA (1)...(19): siRNA sense strand
agaugaagaugcagaugga

SEQ ID NO: 2460010 - RNA, 19 nt, Homo sapiens
  misc_RNA (1)...(19): siRNA sense strand
ugcuaggacugcagaggaa

SEQ ID NO: 2460011 - RNA, 19 nt, Homo sapiens
  misc_RNA (1)...(19): siRNA sense strand
aaugaaugcucaagaaacu

SEQ ID NO: 2460012 - RNA, 19 nt, Homo sapiens
  misc_RNA (1)...(19): siRNA sense strand
ugcaagaauuguacggaga

SEQ ID NO: 2460013 - RNA, 19 nt, Homo sapiens
  misc_RNA (1)...(19): siRNA sense strand
ugacaaggaagaugaagau

SEQ ID NO: 2460014 - RNA, 19 nt, Homo sapiens
  misc_RNA (1)...(19): siRNA sense strand
agaugaaauuagaggcuac

SEQ ID NO: 2460015 - RNA, 19 nt, Homo sapiens
  misc_RNA (1)...(19): siRNA sense strand
augaaaagcuguuugaaga

SEQ ID NO: 2460016 - RNA, 19 nt, Homo sapiens
  misc_RNA (1)...(19): siRNA sense strand
gggagaauaugaugccuca

SEQ ID NO: 2460017 - RNA, 19 nt, Homo sapiens
  misc_RNA (1)...(19): siRNA sense strand
acuccgaauuugaagauga

SEQ ID NO: 2460018 - RNA, 19 nt, Homo sapiens
  misc_RNA (1)...(19): siRNA sense strand
augagaaagaggaugaaga

SEQ ID NO: 2460019 - RNA, 19 nt, Homo sapiens
  misc_RNA (1)...(19): siRNA sense strand
aaagagaaucuguggaacu

SEQ ID NO: 2460020 - RNA, 19 nt, Homo sapiens
  misc_RNA (1)...(19): siRNA sense strand
cugaagaugaccucaacaa

SEQ ID NO: 2460021 - RNA, 19 nt, Homo sapiens
  misc_RNA (1)...(19): siRNA sense strand
gugagaaguuguuugacga

SEQ ID NO: 2460022 - RNA, 19 nt, Homo sapiens
  misc_RNA (1)...(19): siRNA sense strand
caagagaaagggaggaaag

SEQ ID NO: 2460023 - RNA, 19 nt, Homo sapiens
  misc_RNA (1)...(19): siRNA sense strand
auggaaaggaaguugaaga

SEQ ID NO: 2460024 - RNA, 19 nt, Homo sapiens
  misc_RNA (1)...(19): siRNA sense strand
gaggaggauacauaugaaa

SEQ ID NO: 2460025 - RNA, 19 nt, Homo sapiens
  misc_RNA (1)...(19): siRNA sense strand
cuguggaacuugcauuaaa

SEQ ID NO: 2460026 - RNA, 19 nt, Homo sapiens
  misc_RNA (1)...(19): siRNA sense strand
cuuucgggauccagaggaa

SEQ ID NO: 2460027 - RNA, 19 nt, Homo sapiens
  misc_RNA (1)...(19): siRNA sense strand
uguuugaugaggaggaaga

SEQ ID NO: 2460028 - RNA, 19 nt, Homo sapiens
  misc_RNA (1)...(19): siRNA sense strand
acgagugggaccuggacaa

SEQ ID NO: 2460029 - RNA, 19 nt, Homo sapiens
  misc_RNA (1)...(19): siRNA sense strand
cagauauuacaguggauga

SEQ ID NO: 2460030 - RNA, 19 nt, Homo sapiens
  misc_RNA (1)...(19): siRNA sense strand
gaguagaguguucgaaguu

SEQ ID NO: 2460031 - RNA, 19 nt, Homo sapiens
  misc_RNA (1)...(19): siRNA sense strand
gcagggccuucuagagcaa

SEQ ID NO: 2460032 - RNA, 19 nt, Homo sapiens
  misc_RNA (1)...(19): siRNA sense strand
augacaaggaagaugaaga

SEQ ID NO: 2460033 - RNA, 19 nt, Homo sapiens
  misc_RNA (1)...(19): siRNA sense strand
aggaagaugaagaugcaga

SEQ ID NO: 2460034 - RNA, 19 nt, Homo sapiens
  misc_RNA (1)...(19): siRNA sense strand
augagaaguuguuugauga

SEQ ID NO: 2460035 - RNA, 19 nt, Homo sapiens
  misc_RNA (1)...(19): siRNA sense strand
ucaacugaagggagaauau

SEQ ID NO: 2460036 - RNA, 19 nt, Homo sapiens
  misc_RNA (1)...(19): siRNA sense strand
gagaagaagcugauggcau

SEQ ID NO: 2460037 - RNA, 19 nt, Homo sapiens
  misc_RNA (1)...(19): siRNA sense strand
gcacugagguggaagagga

SEQ ID NO: 2460038 - RNA, 19 nt, Homo sapiens
  misc_RNA (1)...(19): siRNA sense strand
ccaucagcucuguggagaa

SEQ ID NO: 2460039 - RNA, 19 nt, Homo sapiens
  misc_RNA (1)...(19): siRNA sense strand
ggaagaugggugugaaccu

SEQ ID NO: 2460040 - RNA, 19 nt, Homo sapiens
  misc_RNA (1)...(19): siRNA sense strand
gcucacaagauaauagcca

SEQ ID NO: 2460041 - RNA, 19 nt, Homo sapiens
  misc_RNA (1)...(19): siRNA sense strand
ccaagaugcugcuggacuc

SEQ ID NO: 2460042 - RNA, 19 nt, Homo sapiens
  misc_RNA (1)...(19): siRNA sense strand
gggacaaggaccuggaaau

SEQ ID NO: 2460043 - RNA, 19 nt, Homo sapiens
  misc_RNA (1)...(19): siRNA sense strand
cggaaugacaugaacacua

SEQ ID NO: 2460044 - RNA, 19 nt, Homo sapiens
  misc_RNA (1)...(19): siRNA sense strand
gcucgaaagggcaggaaga

SEQ ID NO: 2460045 - RNA, 19 nt, Homo sapiens
  misc_RNA (1)...(19): siRNA sense strand
uggaaauggaggagcuaau

SEQ ID NO: 2460046 - RNA, 19 nt, Homo sapiens
  misc_RNA (1)...(19): siRNA sense strand
cauugaacucagaggagaa

SEQ ID NO: 2460047 - RNA, 19 nt, Homo sapiens
  misc_RNA (1)...(19): siRNA sense strand
gaccauuaccaaaggcaaa

SEQ ID NO: 2460048 - RNA, 19 nt, Homo sapiens
  misc_RNA (1)...(19): siRNA sense strand
gagaagaagaggaggaggu

SEQ ID NO: 2460049 - RNA, 19 nt, Homo sapiens
  misc_RNA (1)...(19): siRNA sense strand
ccaaaggcaaagagugcua

SEQ ID NO: 2460050 - RNA, 19 nt, Homo sapiens
  misc_RNA (1)...(19): siRNA sense strand
aggcaaagagugcuacaaa

SEQ ID NO: 2460051 - RNA, 19 nt, Homo sapiens
  misc_RNA (1)...(19): siRNA sense strand
agauaaagcaacagcagca

SEQ ID NO: 2460052 - RNA, 19 nt, Homo sapiens
  misc_RNA (1)...(19): siRNA sense strand
acaaaaggagcgugcaaua

SEQ ID NO: 2460053 - RNA, 19 nt, Homo sapiens
  misc_RNA (1)...(19): siRNA sense strand
aggaugagcuucaggagca

SEQ ID NO: 2460054 - RNA, 19 nt, Homo sapiens
  misc_RNA (1)...(19): siRNA sense strand
ggagcgugcaauagaagaa

SEQ ID NO: 2460055 - RNA, 19 nt, Homo sapiens
  misc_RNA (1)...(19): siRNA sense strand
agcuaaugcugcaggauga

SEQ ID NO: 2460056 - RNA, 19 nt, Homo sapiens
  misc_RNA (1)...(19): siRNA sense strand
aggcagcaguagagggagu

SEQ ID NO: 2460057 - RNA, 19 nt, Homo sapiens
  misc_RNA (1)...(19): siRNA sense strand
uagacaacuugcagaaaca

SEQ ID NO: 2460058 - RNA, 19 nt, Homo sapiens
  misc_RNA (1)...(19): siRNA sense strand
caucagugagauuggaauu

SEQ ID NO: 2460059 - RNA, 19 nt, Homo sapiens
  misc_RNA (1)...(19): siRNA sense strand
gguuaucucuggaggacca

SEQ ID NO: 2460060 - RNA, 19 nt, Homo sapiens
  misc_RNA (1)...(19): siRNA sense strand
ccaacugggaaguggccua

SEQ ID NO: 2460061 - RNA, 19 nt, Homo sapiens
  misc_RNA (1)...(19): siRNA sense strand
agcagaaacagaagagaga

SEQ ID NO: 2460062 - RNA, 19 nt, Homo sapiens
  misc_RNA (1)...(19): siRNA sense strand
guucugaagaugugguaca

SEQ ID NO: 2460063 - RNA, 19 nt, Homo sapiens
  misc_RNA (1)...(19): siRNA sense strand
ccgcuugaucacaggacua

SEQ ID NO: 2460064 - RNA, 19 nt, Homo sapiens
  misc_RNA (1)...(19): siRNA sense strand
ggguggucuucauuggaaa

SEQ ID NO: 2460065 - RNA, 19 nt, Homo sapiens
  misc_RNA (1)...(19): siRNA sense strand
agguagacaacuugcagaa

SEQ ID NO: 2460066 - RNA, 19 nt, Homo sapiens
  misc_RNA (1)...(19): siRNA sense strand
gagagaagugcuggacaaa

SEQ ID NO: 2460067 - RNA, 19 nt, Homo sapiens
  misc_RNA (1)...(19): siRNA sense strand
cagaaacagaagagagaag

SEQ ID NO: 2460068 - RNA, 19 nt, Homo sapiens
  misc_RNA (1)...(19): siRNA sense strand
gcuggagcaguuugagaaa

SEQ ID NO: 2460069 - RNA, 19 nt, Homo sapiens
  misc_RNA (1)...(19): siRNA sense strand
ggcaaagagugcuacaaaa

SEQ ID NO: 2460070 - RNA, 19 nt, Homo sapiens
  misc_RNA (1)...(19): siRNA sense strand
agucaaagagguuguggau

SEQ ID NO: 2460071 - RNA, 19 nt, Homo sapiens
  misc_RNA (1)...(19): siRNA sense strand
ccgaaaagccugcagguca

SEQ ID NO: 2460072 - RNA, 19 nt, Homo sapiens
  misc_RNA (1)...(19): siRNA sense strand
cuacaaaaggagcgugcaa

SEQ ID NO: 2460073 - RNA, 19 nt, Homo sapiens
  misc_RNA (1)...(19): siRNA sense strand
gaggaggaagauaaagcaa

SEQ ID NO: 2460074 - RNA, 19 nt, Homo sapiens
  misc_RNA (1)...(19): siRNA sense strand
uuggagaauucuagcccua

SEQ ID NO: 2460075 - RNA, 19 nt, Homo sapiens
  misc_RNA (1)...(19): siRNA sense strand
gugcaauagaagaaagaag

SEQ ID NO: 2460076 - RNA, 19 nt, Homo sapiens
  misc_RNA (1)...(19): siRNA sense strand
cagcaccuguaaagagcaa

SEQ ID NO: 2460077 - RNA, 19 nt, Homo sapiens
  misc_RNA (1)...(19): siRNA sense strand
gcaccuguaaagagcaaau

SEQ ID NO: 2460078 - RNA, 19 nt, Homo sapiens
  misc_RNA (1)...(19): siRNA sense strand
agaagaagagcaaggagca

SEQ ID NO: 2460079 - RNA, 19 nt, Homo sapiens
  misc_RNA (1)...(19): siRNA sense strand
gcgugcaauagaagaaaga

SEQ ID NO: 2460080 - RNA, 19 nt, Homo sapiens
  misc_RNA (1)...(19): siRNA sense strand
auggagaagaagaggagga

SEQ ID NO: 2460081 - RNA, 19 nt, Homo sapiens
  misc_RNA (1)...(19): siRNA sense strand
gccaggaggcugaggucau

SEQ ID NO: 2460082 - RNA, 19 nt, Homo sapiens
  misc_RNA (1)...(19): siRNA sense strand
cugcagagaagcccugaaa

SEQ ID NO: 2460083 - RNA, 19 nt, Homo sapiens
  misc_RNA (1)...(19): siRNA sense strand
aagaugugguacaggcuuu

SEQ ID NO: 2460084 - RNA, 19 nt, Homo sapiens
  misc_RNA (1)...(19): siRNA sense strand
gagcugaaacagagguucu

SEQ ID NO: 2460085 - RNA, 19 nt, Homo sapiens
  misc_RNA (1)...(19): siRNA sense strand
cuggaugacucgcuagaga

SEQ ID NO: 2460086 - RNA, 19 nt, Homo sapiens
  misc_RNA (1)...(19): siRNA sense strand
cagacguggugcaguguca

SEQ ID NO: 2460087 - RNA, 19 nt, Homo sapiens
  misc_RNA (1)...(19): siRNA sense strand
ccuuggagagagcagguua

SEQ ID NO: 2460088 - RNA, 19 nt, Homo sapiens
  misc_RNA (1)...(19): siRNA sense strand
ccucucagguagacaacuu

SEQ ID NO: 2460089 - RNA, 19 nt, Homo sapiens
  misc_RNA (1)...(19): siRNA sense strand
uugagaaaucagaagccaa

SEQ ID NO: 2460090 - RNA, 19 nt, Homo sapiens
  misc_RNA (1)...(19): siRNA sense strand
gauggaaugucaagcgcca

SEQ ID NO: 2460091 - RNA, 19 nt, Homo sapiens
  misc_RNA (1)...(19): siRNA sense strand
aggaggagguggccagcuu

SEQ ID NO: 2460092 - RNA, 19 nt, Homo sapiens
  misc_RNA (1)...(19): siRNA sense strand
aaguaguccugcuaaagaa

SEQ ID NO: 2460093 - RNA, 19 nt, Homo sapiens
  misc_RNA (1)...(19): siRNA sense strand
ugaaacaccccuugagauu

SEQ ID NO: 2460094 - RNA, 19 nt, Homo sapiens
  misc_RNA (1)...(19): siRNA sense strand
ccaucaucccugaagucaa

SEQ ID NO: 2460095 - RNA, 19 nt, Homo sapiens
  misc_RNA (1)...(19): siRNA sense strand
gcagugauggagaagaaga

SEQ ID NO: 2460096 - RNA, 19 nt, Homo sapiens
  misc_RNA (1)...(19): siRNA sense strand
acgccaagcagaaacagaa

SEQ ID NO: 2460097 - RNA, 19 nt, Homo sapiens
  misc_RNA (1)...(19): siRNA sense strand
caguagagggagugggguu

SEQ ID NO: 2460098 - RNA, 19 nt, Homo sapiens
  misc_RNA (1)...(19): siRNA sense strand
cagcuggugaugagagcau

SEQ ID NO: 2460099 - RNA, 19 nt, Homo sapiens
  misc_RNA (1)...(19): siRNA sense strand
uggagcaguuugagaaauc

SEQ ID NO: 2460100 - RNA, 19 nt, Homo sapiens
  misc_RNA (1)...(19): siRNA sense strand
ggccaaacauccagcugca

SEQ ID NO: 2460101 - RNA, 19 nt, Homo sapiens
  misc_RNA (1)...(19): siRNA sense strand
aggagcagccagaugauuu

SEQ ID NO: 2460102 - RNA, 19 nt, Homo sapiens
  misc_RNA (1)...(19): siRNA sense strand
ggcuaugccaggaggcuga

SEQ ID NO: 2460103 - RNA, 19 nt, Homo sapiens
  misc_RNA (1)...(19): siRNA sense strand
ugagauuggaauugaggca

SEQ ID NO: 2460104 - RNA, 19 nt, Homo sapiens
  misc_RNA (1)...(19): siRNA sense strand
cagaagaccuugcccggaa

SEQ ID NO: 2460105 - RNA, 19 nt, Homo sapiens
  misc_RNA (1)...(19): siRNA sense strand
ggcucaaaguccagcugaa

SEQ ID NO: 2460106 - RNA, 19 nt, Homo sapiens
  misc_RNA (1)...(19): siRNA sense strand
ccaauggccuugugcccua

SEQ ID NO: 2460107 - RNA, 19 nt, Homo sapiens
  misc_RNA (1)...(19): siRNA sense strand
uggaaaccgucuaugccaa

SEQ ID NO: 2460108 - RNA, 19 nt, Homo sapiens
  misc_RNA (1)...(19): siRNA sense strand
cgacuguggccgagacacu

SEQ ID NO: 2460109 - RNA, 19 nt, Homo sapiens
  misc_RNA (1)...(19): siRNA sense strand
guguuuauggaucgagcua

SEQ ID NO: 2460110 - RNA, 19 nt, Homo sapiens
  misc_RNA (1)...(19): siRNA sense strand
ugaaggaccuggacgccau

SEQ ID NO: 2460111 - RNA, 19 nt, Homo sapiens
  misc_RNA (1)...(19): siRNA sense strand
acgcaaagacaagggagaa

SEQ ID NO: 2460112 - RNA, 19 nt, Homo sapiens
  misc_RNA (1)...(19): siRNA sense strand
gacgcaaagacaagggaga

SEQ ID NO: 2460113 - RNA, 19 nt, Homo sapiens
  misc_RNA (1)...(19): siRNA sense strand
cugaaggaguuccgggacu

SEQ ID NO: 2460114 - RNA, 19 nt, Homo sapiens
  misc_RNA (1)...(19): siRNA sense strand
ggguccaagacgcggaaga

SEQ ID NO: 2460115 - RNA, 19 nt, Homo sapiens
  misc_RNA (1)...(19): siRNA sense strand
auuacgagguggagauucu

SEQ ID NO: 2460116 - RNA, 19 nt, Homo sapiens
  misc_RNA (1)...(19): siRNA sense strand
ccaucugggccaagggcaa

SEQ ID NO: 2460117 - RNA, 19 nt, Homo sapiens
  misc_RNA (1)...(19): siRNA sense strand
acgcaaagacaagggagaa

SEQ ID NO: 2460118 - RNA, 19 nt, Homo sapiens
  misc_RNA (1)...(19): siRNA sense strand
gacgcaaagacaagggaga

SEQ ID NO: 2460119 - RNA, 19 nt, Homo sapiens
  misc_RNA (1)...(19): siRNA sense strand
cugaaggaguuccgggacu

SEQ ID NO: 2460120 - RNA, 19 nt, Homo sapiens
  misc_RNA (1)...(19): siRNA sense strand
ggguccaagacgcggaaga

SEQ ID NO: 2460121 - RNA, 19 nt, Homo sapiens
  misc_RNA (1)...(19): siRNA sense strand
auuacgagguggagauucu

SEQ ID NO: 2460122 - RNA, 19 nt, Homo sapiens
  misc_RNA (1)...(19): siRNA sense strand
gagcaguggucauggguca

SEQ ID NO: 2460123 - RNA, 19 nt, Homo sapiens
  misc_RNA (1)...(19): siRNA sense strand
cagcaaaggacaaaggcuu

SEQ ID NO: 2460124 - RNA, 19 nt, Homo sapiens
  misc_RNA (1)...(19): siRNA sense strand
ucgaaaugccacuggagaa

SEQ ID NO: 2460125 - RNA, 19 nt, Homo sapiens
  misc_RNA (1)...(19): siRNA sense strand
cugcaaugaauuucgauua

SEQ ID NO: 2460126 - RNA, 19 nt, Homo sapiens
  misc_RNA (1)...(19): siRNA sense strand
ccaacauggauuugaucaa

SEQ ID NO: 2460127 - RNA, 19 nt, Homo sapiens
  misc_RNA (1)...(19): siRNA sense strand
acaaagcagcaaaggacaa

SEQ ID NO: 2460128 - RNA, 19 nt, Homo sapiens
  misc_RNA (1)...(19): siRNA sense strand
cagacuggacagaggagaa

SEQ ID NO: 2460129 - RNA, 19 nt, Homo sapiens
  misc_RNA (1)...(19): siRNA sense strand
cagacaggauggugaggau

SEQ ID NO: 2460130 - RNA, 19 nt, Homo sapiens
  misc_RNA (1)...(19): siRNA sense strand
acaauggagagcuggauaa

SEQ ID NO: 2460131 - RNA, 19 nt, Homo sapiens
  misc_RNA (1)...(19): siRNA sense strand
gugcuggagccuagaaauu

SEQ ID NO: 2460132 - RNA, 19 nt, Homo sapiens
  misc_RNA (1)...(19): siRNA sense strand
gcuuacuuccugagagcua

SEQ ID NO: 2460133 - RNA, 19 nt, Homo sapiens
  misc_RNA (1)...(19): siRNA sense strand
aauccaaguuccaugacaa

SEQ ID NO: 2460134 - RNA, 19 nt, Homo sapiens
  misc_RNA (1)...(19): siRNA sense strand
auggcugccuggagaauaa

SEQ ID NO: 2460135 - RNA, 19 nt, Homo sapiens
  misc_RNA (1)...(19): siRNA sense strand
aaguauccaagaagggaaa

SEQ ID NO: 2460136 - RNA, 19 nt, Homo sapiens
  misc_RNA (1)...(19): siRNA sense strand
aggagaacaaagugaacau

SEQ ID NO: 2460137 - RNA, 19 nt, Homo sapiens
  misc_RNA (1)...(19): siRNA sense strand
ccugagagcuaaaucccaa

SEQ ID NO: 2460138 - RNA, 19 nt, Homo sapiens
  misc_RNA (1)...(19): siRNA sense strand
aaucaagcaaggauacaaa

SEQ ID NO: 2460139 - RNA, 19 nt, Homo sapiens
  misc_RNA (1)...(19): siRNA sense strand
gcgaacacugugcgggauu

SEQ ID NO: 2460140 - RNA, 19 nt, Homo sapiens
  misc_RNA (1)...(19): siRNA sense strand
cauuaggggugaugccaaa

SEQ ID NO: 2460141 - RNA, 19 nt, Homo sapiens
  misc_RNA (1)...(19): siRNA sense strand
uugagauguuugaugacaa

SEQ ID NO: 2460142 - RNA, 19 nt, Homo sapiens
  misc_RNA (1)...(19): siRNA sense strand
aguugaugguucuuagcaa

SEQ ID NO: 2460143 - RNA, 19 nt, Homo sapiens
  misc_RNA (1)...(19): siRNA sense strand
ccuucuguguucuggacaa

SEQ ID NO: 2460144 - RNA, 19 nt, Homo sapiens
  misc_RNA (1)...(19): siRNA sense strand
ggugcaugcugguguggau

SEQ ID NO: 2460145 - RNA, 19 nt, Homo sapiens
  misc_RNA (1)...(19): siRNA sense strand
gcaauuaccgcaaggccuu

SEQ ID NO: 2460146 - RNA, 19 nt, Homo sapiens
  misc_RNA (1)...(19): siRNA sense strand
agaagagaccagacaggau

SEQ ID NO: 2460147 - RNA, 19 nt, Homo sapiens
  misc_RNA (1)...(19): siRNA sense strand
uggagaaagcugcaaugaa

SEQ ID NO: 2460148 - RNA, 19 nt, Homo sapiens
  misc_RNA (1)...(19): siRNA sense strand
cagaggagaacaaagugaa

SEQ ID NO: 2460149 - RNA, 19 nt, Homo sapiens
  misc_RNA (1)...(19): siRNA sense strand
gggugaugccaaagccaga

SEQ ID NO: 2460150 - RNA, 19 nt, Homo sapiens
  misc_RNA (1)...(19): siRNA sense strand
uggccuaauuaguaaagau

SEQ ID NO: 2460151 - RNA, 19 nt, Homo sapiens
  misc_RNA (1)...(19): siRNA sense strand
ccaaaugggaaaaugagaa

SEQ ID NO: 2460152 - RNA, 19 nt, Homo sapiens
  misc_RNA (1)...(19): siRNA sense strand
uccuaugacuggaugagaa

SEQ ID NO: 2460153 - RNA, 19 nt, Homo sapiens
  misc_RNA (1)...(19): siRNA sense strand
cagcaacauuagaugaacu

SEQ ID NO: 2460154 - RNA, 19 nt, Homo sapiens
  misc_RNA (1)...(19): siRNA sense strand
ggaugaaggagaagagacc

SEQ ID NO: 2460155 - RNA, 19 nt, Homo sapiens
  misc_RNA (1)...(19): siRNA sense strand
gauuuagacagcagagcca

SEQ ID NO: 2460156 - RNA, 19 nt, Homo sapiens
  misc_RNA (1)...(19): siRNA sense strand
auacaaaugcaaagacugu

SEQ ID NO: 2460157 - RNA, 19 nt, Homo sapiens
  misc_RNA (1)...(19): siRNA sense strand
uggagucuguauuuagaaa

SEQ ID NO: 2460158 - RNA, 19 nt, Homo sapiens
  misc_RNA (1)...(19): siRNA sense strand
gagcuaaaucccaacuaca

SEQ ID NO: 2460159 - RNA, 19 nt, Homo sapiens
  misc_RNA (1)...(19): siRNA sense strand
uggaaugaaaugacagagu

SEQ ID NO: 2460160 - RNA, 19 nt, Homo sapiens
  misc_RNA (1)...(19): siRNA sense strand
ucugcuacuucaugaggua

SEQ ID NO: 2460161 - RNA, 19 nt, Homo sapiens
  misc_RNA (1)...(19): siRNA sense strand
ugaaaguauagcugccaau

SEQ ID NO: 2460162 - RNA, 19 nt, Homo sapiens
  misc_RNA (1)...(19): siRNA sense strand
cgauuaaagaucugcuacu

SEQ ID NO: 2460163 - RNA, 19 nt, Homo sapiens
  misc_RNA (1)...(19): siRNA sense strand
acuggacagaggagaacaa

SEQ ID NO: 2460164 - RNA, 19 nt, Homo sapiens
  misc_RNA (1)...(19): siRNA sense strand
cgucagccucaucgacaua

SEQ ID NO: 2460165 - RNA, 19 nt, Homo sapiens
  misc_RNA (1)...(19): siRNA sense strand
ugacaaagcagcaaaggac

SEQ ID NO: 2460166 - RNA, 19 nt, Homo sapiens
  misc_RNA (1)...(19): siRNA sense strand
ggcaggagauggaggccaa

SEQ ID NO: 2460167 - RNA, 19 nt, Homo sapiens
  misc_RNA (1)...(19): siRNA sense strand
cagaaguauaggcaggaga

SEQ ID NO: 2460168 - RNA, 19 nt, Homo sapiens
  misc_RNA (1)...(19): siRNA sense strand
uggucuaccuggacggcau

SEQ ID NO: 2460169 - RNA, 19 nt, Homo sapiens
  misc_RNA (1)...(19): siRNA sense strand
aguauaggcaggagaugga

SEQ ID NO: 2460170 - RNA, 19 nt, Homo sapiens
  misc_RNA (1)...(19): siRNA sense strand
gcaucggaggcaugaccaa

SEQ ID NO: 2460171 - RNA, 19 nt, Homo sapiens
  misc_RNA (1)...(19): siRNA sense strand
ggcaggagauggaggccaa

SEQ ID NO: 2460172 - RNA, 19 nt, Homo sapiens
  misc_RNA (1)...(19): siRNA sense strand
cagaaguauaggcaggaga

SEQ ID NO: 2460173 - RNA, 19 nt, Homo sapiens
  misc_RNA (1)...(19): siRNA sense strand
uggucuaccuggacggcau

SEQ ID NO: 2460174 - RNA, 19 nt, Homo sapiens
  misc_RNA (1)...(19): siRNA sense strand
aguauaggcaggagaugga

SEQ ID NO: 2460175 - RNA, 19 nt, Homo sapiens
  misc_RNA (1)...(19): siRNA sense strand
gcaucggaggcaugaccaa

SEQ ID NO: 2460176 - RNA, 19 nt, Homo sapiens
  misc_RNA (1)...(19): siRNA sense strand
accaagacuucgaggcaga

SEQ ID NO: 2460177 - RNA, 19 nt, Homo sapiens
  misc_RNA (1)...(19): siRNA sense strand
gcucaggaggaguggacca

SEQ ID NO: 2460178 - RNA, 19 nt, Homo sapiens
  misc_RNA (1)...(19): siRNA sense strand
cggcgguggugaugcuaau

SEQ ID NO: 2460179 - RNA, 19 nt, Homo sapiens
  misc_RNA (1)...(19): siRNA sense strand
ucucaaguuccuagagcaa

SEQ ID NO: 2460180 - RNA, 19 nt, Homo sapiens
  misc_RNA (1)...(19): siRNA sense strand
agggauaucaggagguuau

SEQ ID NO: 2460181 - RNA, 19 nt, Homo sapiens
  misc_RNA (1)...(19): siRNA sense strand
ccaccaaucgggagaacau

SEQ ID NO: 2460182 - RNA, 19 nt, Homo sapiens
  misc_RNA (1)...(19): siRNA sense strand
ccuagauggcagagacuca

SEQ ID NO: 2460183 - RNA, 19 nt, Homo sapiens
  misc_RNA (1)...(19): siRNA sense strand
ggcucgaacccgugccaaa

SEQ ID NO: 2460184 - RNA, 19 nt, Homo sapiens
  misc_RNA (1)...(19): siRNA sense strand
acaucaagcagguggcuga

SEQ ID NO: 2460185 - RNA, 19 nt, Homo sapiens
  misc_RNA (1)...(19): siRNA sense strand
aaagcaugcgugagaacaa

SEQ ID NO: 2460186 - RNA, 19 nt, Homo sapiens
  misc_RNA (1)...(19): siRNA sense strand
gugagaacaaggagaagca

SEQ ID NO: 2460187 - RNA, 19 nt, Homo sapiens
  misc_RNA (1)...(19): siRNA sense strand
ggguuaaaucuaagcagca

SEQ ID NO: 2460188 - RNA, 19 nt, Homo sapiens
  misc_RNA (1)...(19): siRNA sense strand
uugagaagauccagcgcau

SEQ ID NO: 2460189 - RNA, 19 nt, Homo sapiens
  misc_RNA (1)...(19): siRNA sense strand
gugucgacccugaggccua

SEQ ID NO: 2460190 - RNA, 19 nt, Homo sapiens
  misc_RNA (1)...(19): siRNA sense strand
ccaaagggaagcaggccau

SEQ ID NO: 2460191 - RNA, 19 nt, Homo sapiens
  misc_RNA (1)...(19): siRNA sense strand
gguucuggugggagcgaau

SEQ ID NO: 2460192 - RNA, 19 nt, Homo sapiens
  misc_RNA (1)...(19): siRNA sense strand
ucauugaagugaaggcgau

SEQ ID NO: 2460193 - RNA, 19 nt, Homo sapiens
  misc_RNA (1)...(19): siRNA sense strand
cggcagcagcagugagacu

SEQ ID NO: 2460194 - RNA, 19 nt, Homo sapiens
  misc_RNA (1)...(19): siRNA sense strand
ggauggaggauuugagccu

SEQ ID NO: 2460195 - RNA, 19 nt, Homo sapiens
  misc_RNA (1)...(19): siRNA sense strand
aggcucacaucgagggcau

SEQ ID NO: 2460196 - RNA, 19 nt, Homo sapiens
  misc_RNA (1)...(19): siRNA sense strand
gggcagagccagaagaacc

SEQ ID NO: 2460197 - RNA, 19 nt, Homo sapiens
  misc_RNA (1)...(19): siRNA sense strand
gagaacauccagaaggcca

SEQ ID NO: 2460198 - RNA, 19 nt, Homo sapiens
  misc_RNA (1)...(19): siRNA sense strand
uggaagacgcagacaucau

SEQ ID NO: 2460199 - RNA, 19 nt, Homo sapiens
  misc_RNA (1)...(19): siRNA sense strand
ccaacaagaugauggaagc

SEQ ID NO: 2460200 - RNA, 19 nt, Homo sapiens
  misc_RNA (1)...(19): siRNA sense strand
gugggagcgaauugagcaa

SEQ ID NO: 2460201 - RNA, 19 nt, Homo sapiens
  misc_RNA (1)...(19): siRNA sense strand
cguuauuccagcacggaga

SEQ ID NO: 2460202 - RNA, 19 nt, Homo sapiens
  misc_RNA (1)...(19): siRNA sense strand
cggagacccucaaggacga

SEQ ID NO: 2460203 - RNA, 19 nt, Homo sapiens
  misc_RNA (1)...(19): siRNA sense strand
gcaaagcaugcgugagaac

SEQ ID NO: 2460204 - RNA, 19 nt, Homo sapiens
  misc_RNA (1)...(19): siRNA sense strand
ccuuugagcagcuggcaga

SEQ ID NO: 2460205 - RNA, 19 nt, Homo sapiens
  misc_RNA (1)...(19): siRNA sense strand
agauagaggcucacaucga

SEQ ID NO: 2460206 - RNA, 19 nt, Homo sapiens
  misc_RNA (1)...(19): siRNA sense strand
gagcuuuccguguggccaa

SEQ ID NO: 2460207 - RNA, 19 nt, Homo sapiens
  misc_RNA (1)...(19): siRNA sense strand
ccgaaaaccuggugggagc

SEQ ID NO: 2460208 - RNA, 19 nt, Homo sapiens
  misc_RNA (1)...(19): siRNA sense strand
acaagaugauggaagcgau

SEQ ID NO: 2460209 - RNA, 19 nt, Homo sapiens
  misc_RNA (1)...(19): siRNA sense strand
ugggcagugaagagagcaa

SEQ ID NO: 2460210 - RNA, 19 nt, Homo sapiens
  misc_RNA (1)...(19): siRNA sense strand
caaaggaugcugugcgugu

SEQ ID NO: 2460211 - RNA, 19 nt, Homo sapiens
  misc_RNA (1)...(19): siRNA sense strand
ugcaggagauagaggcuca

SEQ ID NO: 2460212 - RNA, 19 nt, Homo sapiens
  misc_RNA (1)...(19): siRNA sense strand
gcagugacgacgaccgaga

SEQ ID NO: 2460213 - RNA, 19 nt, Homo sapiens
  misc_RNA (1)...(19): siRNA sense strand
aggagguuauucagagcau

SEQ ID NO: 2460214 - RNA, 19 nt, Homo sapiens
  misc_RNA (1)...(19): siRNA sense strand
ccguaagagcaaucagaua

SEQ ID NO: 2460215 - RNA, 19 nt, Homo sapiens
  misc_RNA (1)...(19): siRNA sense strand
gaagaaagccaaagagcag

SEQ ID NO: 2460216 - RNA, 19 nt, Homo sapiens
  misc_RNA (1)...(19): siRNA sense strand
ugaagauccguaagagcaa

SEQ ID NO: 2460217 - RNA, 19 nt, Homo sapiens
  misc_RNA (1)...(19): siRNA sense strand
ggagcaaagcugaggaggu

SEQ ID NO: 2460218 - RNA, 19 nt, Homo sapiens
  misc_RNA (1)...(19): siRNA sense strand
caaggaaacuuugagggaa

SEQ ID NO: 2460219 - RNA, 19 nt, Homo sapiens
  misc_RNA (1)...(19): siRNA sense strand
uggugucauuugugaagaa

SEQ ID NO: 2460220 - RNA, 19 nt, Homo sapiens
  misc_RNA (1)...(19): siRNA sense strand
ugaagaaagccaaagagca

SEQ ID NO: 2460221 - RNA, 19 nt, Homo sapiens
  misc_RNA (1)...(19): siRNA sense strand
aagccaaagagcagcugaa

SEQ ID NO: 2460222 - RNA, 19 nt, Homo sapiens
  misc_RNA (1)...(19): siRNA sense strand
guggagaaggacaugaaga

SEQ ID NO: 2460223 - RNA, 19 nt, Homo sapiens
  misc_RNA (1)...(19): siRNA sense strand
cugaagauccguaagagca

SEQ ID NO: 2460224 - RNA, 19 nt, Homo sapiens
  misc_RNA (1)...(19): siRNA sense strand
caacgaguggagaaggaca

SEQ ID NO: 2460225 - RNA, 19 nt, Homo sapiens
  misc_RNA (1)...(19): siRNA sense strand
gagcaaagcugaggaggug

SEQ ID NO: 2460226 - RNA, 19 nt, Homo sapiens
  misc_RNA (1)...(19): siRNA sense strand
acaugaagaaagccaaaga

SEQ ID NO: 2460227 - RNA, 19 nt, Homo sapiens
  misc_RNA (1)...(19): siRNA sense strand
uggaaaaggaaacagaaua

SEQ ID NO: 2460228 - RNA, 19 nt, Homo sapiens
  misc_RNA (1)...(19): siRNA sense strand
caagaaagugucagagccu

SEQ ID NO: 2460229 - RNA, 19 nt, Homo sapiens
  misc_RNA (1)...(19): siRNA sense strand
aggcagcugucaagggcga

SEQ ID NO: 2460230 - RNA, 19 nt, Homo sapiens
  misc_RNA (1)...(19): siRNA sense strand
ggauccucccagaagauaa

SEQ ID NO: 2460231 - RNA, 19 nt, Homo sapiens
  misc_RNA (1)...(19): siRNA sense strand
aagauaagauggagcaggu

SEQ ID NO: 2460232 - RNA, 19 nt, Homo sapiens
  misc_RNA (1)...(19): siRNA sense strand
cagaagauaagauggagca

SEQ ID NO: 2460233 - RNA, 19 nt, Homo sapiens
  misc_RNA (1)...(19): siRNA sense strand
gauaagauggagcagguca

SEQ ID NO: 2460234 - RNA, 19 nt, Homo sapiens
  misc_RNA (1)...(19): siRNA sense strand
ggaacaaaucacagcccau

SEQ ID NO: 2460235 - RNA, 19 nt, Homo sapiens
  misc_RNA (1)...(19): siRNA sense strand
ccaacuggcucauggccuu

SEQ ID NO: 2460236 - RNA, 19 nt, Homo sapiens
  misc_RNA (1)...(19): siRNA sense strand
ccgaggacccagaggaaac

SEQ ID NO: 2460237 - RNA, 19 nt, Homo sapiens
  misc_RNA (1)...(19): siRNA sense strand
uggccuuucucgugaccaa

SEQ ID NO: 2460238 - RNA, 19 nt, Homo sapiens
  misc_RNA (1)...(19): siRNA sense strand
cggucuacaucuccgaaau

SEQ ID NO: 2460239 - RNA, 19 nt, Homo sapiens
  misc_RNA (1)...(19): siRNA sense strand
cccugaaacuaaaggaaag

SEQ ID NO: 2460240 - RNA, 19 nt, Homo sapiens
  misc_RNA (1)...(19): siRNA sense strand
ucccugaaacuaaaggaaa

SEQ ID NO: 2460241 - RNA, 19 nt, Homo sapiens
  misc_RNA (1)...(19): siRNA sense strand
gaguauaaucccuggagaa

SEQ ID NO: 2460242 - RNA, 19 nt, Homo sapiens
  misc_RNA (1)...(19): siRNA sense strand
cagauuuacccuugggaua

SEQ ID NO: 2460243 - RNA, 19 nt, Homo sapiens
  misc_RNA (1)...(19): siRNA sense strand
ggacaaagaagaaaggcga

SEQ ID NO: 2460244 - RNA, 19 nt, Homo sapiens
  misc_RNA (1)...(19): siRNA sense strand
ggaucuuaggcgaggcaaa

SEQ ID NO: 2460245 - RNA, 19 nt, Homo sapiens
  misc_RNA (1)...(19): siRNA sense strand
aguuaaaugcagcgaagaa

SEQ ID NO: 2460246 - RNA, 19 nt, Homo sapiens
  misc_RNA (1)...(19): siRNA sense strand
ucauaaaggaaguggagga

SEQ ID NO: 2460247 - RNA, 19 nt, Homo sapiens
  misc_RNA (1)...(19): siRNA sense strand
aggaaugugcaaugguuaa

SEQ ID NO: 2460248 - RNA, 19 nt, Homo sapiens
  misc_RNA (1)...(19): siRNA sense strand
agaagaaaacauuggacaa

SEQ ID NO: 2460249 - RNA, 19 nt, Homo sapiens
  misc_RNA (1)...(19): siRNA sense strand
aguauaaucccuggagaaa

SEQ ID NO: 2460250 - RNA, 19 nt, Homo sapiens
  misc_RNA (1)...(19): siRNA sense strand
ggaugcucauggagaggaa

SEQ ID NO: 2460251 - RNA, 19 nt, Homo sapiens
  misc_RNA (1)...(19): siRNA sense strand
agagagaggcagcagaaau

SEQ ID NO: 2460252 - RNA, 19 nt, Homo sapiens
  misc_RNA (1)...(19): siRNA sense strand
ugaagaaggaacucaggaa

SEQ ID NO: 2460253 - RNA, 19 nt, Homo sapiens
  misc_RNA (1)...(19): siRNA sense strand
aaacauuggacaaagaaga

SEQ ID NO: 2460254 - RNA, 19 nt, Homo sapiens
  misc_RNA (1)...(19): siRNA sense strand
ggaaaauaacccuuggcaa

SEQ ID NO: 2460255 - RNA, 19 nt, Homo sapiens
  misc_RNA (1)...(19): siRNA sense strand
guucaugaugugaggcuuu

SEQ ID NO: 2460256 - RNA, 19 nt, Homo sapiens
  misc_RNA (1)...(19): siRNA sense strand
caggaaugugcaaugguua

SEQ ID NO: 2460257 - RNA, 19 nt, Homo sapiens
  misc_RNA (1)...(19): siRNA sense strand
caacaaaagcauacaagau

SEQ ID NO: 2460258 - RNA, 19 nt, Homo sapiens
  misc_RNA (1)...(19): siRNA sense strand
cagcguuauuuuaaggaua

SEQ ID NO: 2460259 - RNA, 19 nt, Homo sapiens
  misc_RNA (1)...(19): siRNA sense strand
gccaggaagaagaagaauu

SEQ ID NO: 2460260 - RNA, 19 nt, Homo sapiens
  misc_RNA (1)...(19): siRNA sense strand
cuagagagaggcagcagaa

SEQ ID NO: 2460261 - RNA, 19 nt, Homo sapiens
  misc_RNA (1)...(19): siRNA sense strand
ucuccugaauccauggaaa

SEQ ID NO: 2460262 - RNA, 19 nt, Homo sapiens
  misc_RNA (1)...(19): siRNA sense strand
cugaaagacaugcagaaca

SEQ ID NO: 2460263 - RNA, 19 nt, Homo sapiens
  misc_RNA (1)...(19): siRNA sense strand
gaaaggcgacagaaggcua

SEQ ID NO: 2460264 - RNA, 19 nt, Homo sapiens
  misc_RNA (1)...(19): siRNA sense strand
aggagguguuuauguacaa

SEQ ID NO: 2460265 - RNA, 19 nt, Homo sapiens
  misc_RNA (1)...(19): siRNA sense strand
gaaaauaacccuuggcaac

SEQ ID NO: 2460266 - RNA, 19 nt, Homo sapiens
  misc_RNA (1)...(19): siRNA sense strand
uaaaggaaguggaggagcu

SEQ ID NO: 2460267 - RNA, 19 nt, Homo sapiens
  misc_RNA (1)...(19): siRNA sense strand
cugccaggaagaagaagaa

SEQ ID NO: 2460268 - RNA, 19 nt, Homo sapiens
  misc_RNA (1)...(19): siRNA sense strand
auuacugagcuuugugaua

SEQ ID NO: 2460269 - RNA, 19 nt, Homo sapiens
  misc_RNA (1)...(19): siRNA sense strand
gauacaaaguucuugagca

SEQ ID NO: 2460270 - RNA, 19 nt, Homo sapiens
  misc_RNA (1)...(19): siRNA sense strand
cuggaagcaauguggaaaa

SEQ ID NO: 2460271 - RNA, 19 nt, Homo sapiens
  misc_RNA (1)...(19): siRNA sense strand
agaaaacauuggacaaaga

SEQ ID NO: 2460272 - RNA, 19 nt, Homo sapiens
  misc_RNA (1)...(19): siRNA sense strand
gauucaucgaggaggcaau

SEQ ID NO: 2460273 - RNA, 19 nt, Homo sapiens
  misc_RNA (1)...(19): siRNA sense strand
gccacaacccuuacgcaaa

SEQ ID NO: 2460274 - RNA, 19 nt, Homo sapiens
  misc_RNA (1)...(19): siRNA sense strand
cagcgaagaagauagguca

SEQ ID NO: 2460275 - RNA, 19 nt, Homo sapiens
  misc_RNA (1)...(19): siRNA sense strand
acagaaggcuagagagagg

SEQ ID NO: 2460276 - RNA, 19 nt, Homo sapiens
  misc_RNA (1)...(19): siRNA sense strand
uggcaacguccuagcaaca

SEQ ID NO: 2460277 - RNA, 19 nt, Homo sapiens
  misc_RNA (1)...(19): siRNA sense strand
ccugagaauuauaacacca

SEQ ID NO: 2460278 - RNA, 19 nt, Homo sapiens
  misc_RNA (1)...(19): siRNA sense strand
guucaugucucuuggcagu

SEQ ID NO: 2460279 - RNA, 19 nt, Homo sapiens
  misc_RNA (1)...(19): siRNA sense strand
cauggaaucauuacggaau

SEQ ID NO: 2460280 - RNA, 19 nt, Homo sapiens
  misc_RNA (1)...(19): siRNA sense strand
acaagaucucauaaaggaa

SEQ ID NO: 2460281 - RNA, 19 nt, Homo sapiens
  misc_RNA (1)...(19): siRNA sense strand
augaagaacaacagccuga

SEQ ID NO: 2460282 - RNA, 19 nt, Homo sapiens
  misc_RNA (1)...(19): siRNA sense strand
gaaaguuauaccaugaaga

SEQ ID NO: 2460283 - RNA, 19 nt, Homo sapiens
  misc_RNA (1)...(19): siRNA sense strand
agaagaaaggcgacagaag

SEQ ID NO: 2460284 - RNA, 19 nt, Homo sapiens
  misc_RNA (1)...(19): siRNA sense strand
uagaagagaugaauccaca

SEQ ID NO: 2460285 - RNA, 19 nt, Homo sapiens
  misc_RNA (1)...(19): siRNA sense strand
guacaugugaugcagaaaa

SEQ ID NO: 2460286 - RNA, 19 nt, Homo sapiens
  misc_RNA (1)...(19): siRNA sense strand
cagaaaagucuuacgaagu

SEQ ID NO: 2460287 - RNA, 19 nt, Homo sapiens
  misc_RNA (1)...(19): siRNA sense strand
gagaagaaaacauuggaca

SEQ ID NO: 2460288 - RNA, 19 nt, Homo sapiens
  misc_RNA (1)...(19): siRNA sense strand
cugggaaggagguguuuau

SEQ ID NO: 2460289 - RNA, 19 nt, Homo sapiens
  misc_RNA (1)...(19): siRNA sense strand
guuuaaaucagcuguuuca

SEQ ID NO: 2460290 - RNA, 19 nt, Homo sapiens
  misc_RNA (1)...(19): siRNA sense strand
cccaguuagaagagaugaa

SEQ ID NO: 2460291 - RNA, 19 nt, Homo sapiens
  misc_RNA (1)...(19): siRNA sense strand
acaaagaagaaaggcgaca

SEQ ID NO: 2460292 - RNA, 19 nt, Homo sapiens
  misc_RNA (1)...(19): siRNA sense strand
auaccacucagaagaaaua

SEQ ID NO: 2460293 - RNA, 19 nt, Homo sapiens
  misc_RNA (1)...(19): siRNA sense strand
acaaaguuacugugaaugu

SEQ ID NO: 2460294 - RNA, 19 nt, Homo sapiens
  misc_RNA (1)...(19): siRNA sense strand
uguuauuuguggacagagu

SEQ ID NO: 2460295 - RNA, 19 nt, Homo sapiens
  misc_RNA (1)...(19): siRNA sense strand
agauaggucagccuggaaa

SEQ ID NO: 2460296 - RNA, 19 nt, Homo sapiens
  misc_RNA (1)...(19): siRNA sense strand
gcagaaaagucuuacgaag

SEQ ID NO: 2460297 - RNA, 19 nt, Homo sapiens
  misc_RNA (1)...(19): siRNA sense strand
ggaacucaggaaugugcaa

SEQ ID NO: 2460298 - RNA, 19 nt, Homo sapiens
  misc_RNA (1)...(19): siRNA sense strand
ggaaugaccuaaaggcauc

SEQ ID NO: 2460299 - RNA, 19 nt, Homo sapiens
  misc_RNA (1)...(19): siRNA sense strand
aggaaugaccuaaaggcau

SEQ ID NO: 2460300 - RNA, 19 nt, Homo sapiens
  misc_RNA (1)...(19): siRNA sense strand
ucacggaccugcugggcuu

SEQ ID NO: 2460301 - RNA, 19 nt, Homo sapiens
  misc_RNA (1)...(19): siRNA sense strand
aagaguuggagaaggcauu

SEQ ID NO: 2460302 - RNA, 19 nt, Homo sapiens
  misc_RNA (1)...(19): siRNA sense strand
uggagaaggcauucagcga

SEQ ID NO: 2460303 - RNA, 19 nt, Homo sapiens
  misc_RNA (1)...(19): siRNA sense strand
aagacaggaaugaccuaaa

SEQ ID NO: 2460304 - RNA, 19 nt, Homo sapiens
  misc_RNA (1)...(19): siRNA sense strand
ggaaugaccuaaaggcauc

SEQ ID NO: 2460305 - RNA, 19 nt, Homo sapiens
  misc_RNA (1)...(19): siRNA sense strand
aggaaugaccuaaaggcau

SEQ ID NO: 2460306 - RNA, 19 nt, Homo sapiens
  misc_RNA (1)...(19): siRNA sense strand
ucacggaccugcugggcuu

SEQ ID NO: 2460307 - RNA, 19 nt, Homo sapiens
  misc_RNA (1)...(19): siRNA sense strand
aagaguuggagaaggcauu

SEQ ID NO: 2460308 - RNA, 19 nt, Homo sapiens
  misc_RNA (1)...(19): siRNA sense strand
uggagaaggcauucagcga

SEQ ID NO: 2460309 - RNA, 19 nt, Homo sapiens
  misc_RNA (1)...(19): siRNA sense strand
aagacaggaaugaccuaaa

SEQ ID NO: 2460310 - RNA, 19 nt, Homo sapiens
  misc_RNA (1)...(19): siRNA sense strand
cgcagcaccacgagaacua

SEQ ID NO: 2460311 - RNA, 19 nt, Homo sapiens
  misc_RNA (1)...(19): siRNA sense strand
cugucaggagugaggguaa

SEQ ID NO: 2460312 - RNA, 19 nt, Homo sapiens
  misc_RNA (1)...(19): siRNA sense strand
caggaagaggagaacucaa

SEQ ID NO: 2460313 - RNA, 19 nt, Homo sapiens
  misc_RNA (1)...(19): siRNA sense strand
cggaguggcuagaaggcua

SEQ ID NO: 2460314 - RNA, 19 nt, Homo sapiens
  misc_RNA (1)...(19): siRNA sense strand
uggaggaggaagaggaaga

SEQ ID NO: 2460315 - RNA, 19 nt, Homo sapiens
  misc_RNA (1)...(19): siRNA sense strand
gggccuuccuacugggcua

SEQ ID NO: 2460316 - RNA, 19 nt, Homo sapiens
  misc_RNA (1)...(19): siRNA sense strand
ggaaagggcaccuggagga

SEQ ID NO: 2460317 - RNA, 19 nt, Homo sapiens
  misc_RNA (1)...(19): siRNA sense strand
ccgaagaccugcaggaccu

SEQ ID NO: 2460318 - RNA, 19 nt, Homo sapiens
  misc_RNA (1)...(19): siRNA sense strand
gggcccaggagcagcuaaa

SEQ ID NO: 2460319 - RNA, 19 nt, Homo sapiens
  misc_RNA (1)...(19): siRNA sense strand
gcauguacaacgugcgcau

SEQ ID NO: 2460320 - RNA, 19 nt, Homo sapiens
  misc_RNA (1)...(19): siRNA sense strand
ggacaugugcaccugggaa

SEQ ID NO: 2460321 - RNA, 19 nt, Homo sapiens
  misc_RNA (1)...(19): siRNA sense strand
cuguguugguggucaguga

SEQ ID NO: 2460322 - RNA, 19 nt, Homo sapiens
  misc_RNA (1)...(19): siRNA sense strand
ccuggaggaggaagaggaa

SEQ ID NO: 2460323 - RNA, 19 nt, Homo sapiens
  misc_RNA (1)...(19): siRNA sense strand
gcaaaccagccuucgggaa

SEQ ID NO: 2460324 - RNA, 19 nt, Homo sapiens
  misc_RNA (1)...(19): siRNA sense strand
uggaggacgaccaggccua

SEQ ID NO: 2460325 - RNA, 19 nt, Homo sapiens
  misc_RNA (1)...(19): siRNA sense strand
auguacaacgugcgcauaa

SEQ ID NO: 2460326 - RNA, 19 nt, Homo sapiens
  misc_RNA (1)...(19): siRNA sense strand
aggagagagacgagcgacu

SEQ ID NO: 2460327 - RNA, 19 nt, Homo sapiens
  misc_RNA (1)...(19): siRNA sense strand
agcagacgccggagagaaa

SEQ ID NO: 2460328 - RNA, 19 nt, Homo sapiens
  misc_RNA (1)...(19): siRNA sense strand
gggcccagcuguauggcau

SEQ ID NO: 2460329 - RNA, 19 nt, Homo sapiens
  misc_RNA (1)...(19): siRNA sense strand
ggugagacgggcaaggaca

SEQ ID NO: 2460330 - RNA, 19 nt, Homo sapiens
  misc_RNA (1)...(19): siRNA sense strand
ggagcaucacugacggcua

SEQ ID NO: 2460331 - RNA, 19 nt, Homo sapiens
  misc_RNA (1)...(19): siRNA sense strand
acucagcugaugugggcaa

SEQ ID NO: 2460332 - RNA, 19 nt, Homo sapiens
  misc_RNA (1)...(19): siRNA sense strand
ccgcuucaucaccgagaaa

SEQ ID NO: 2460333 - RNA, 19 nt, Homo sapiens
  misc_RNA (1)...(19): siRNA sense strand
cagcaguguucgugauccu

SEQ ID NO: 2460334 - RNA, 19 nt, Homo sapiens
  misc_RNA (1)...(19): siRNA sense strand
cggagagaaaugaguagca

SEQ ID NO: 2460335 - RNA, 19 nt, Homo sapiens
  misc_RNA (1)...(19): siRNA sense strand
gggcaaggacagggagaag

SEQ ID NO: 2460336 - RNA, 19 nt, Homo sapiens
  misc_RNA (1)...(19): siRNA sense strand
augcaaggaaugugggaaa

SEQ ID NO: 2460337 - RNA, 19 nt, Homo sapiens
  misc_RNA (1)...(19): siRNA sense strand
aauucauacaggagagaaa

SEQ ID NO: 2460338 - RNA, 19 nt, Homo sapiens
  misc_RNA (1)...(19): siRNA sense strand
ccagggaagcaucgggaaa

SEQ ID NO: 2460339 - RNA, 19 nt, Homo sapiens
  misc_RNA (1)...(19): siRNA sense strand
auguaacagaugugggaaa

SEQ ID NO: 2460340 - RNA, 19 nt, Homo sapiens
  misc_RNA (1)...(19): siRNA sense strand
augugauguuggagaacua

SEQ ID NO: 2460341 - RNA, 19 nt, Homo sapiens
  misc_RNA (1)...(19): siRNA sense strand
aauucauaauggagagaga

SEQ ID NO: 2460342 - RNA, 19 nt, Homo sapiens
  misc_RNA (1)...(19): siRNA sense strand
augcagugaaugcgggaaa

SEQ ID NO: 2460343 - RNA, 19 nt, Homo sapiens
  misc_RNA (1)...(19): siRNA sense strand
augcaaugacuguggaaaa

SEQ ID NO: 2460344 - RNA, 19 nt, Homo sapiens
  misc_RNA (1)...(19): siRNA sense strand
guguaucauauguggcaaa

SEQ ID NO: 2460345 - RNA, 19 nt, Homo sapiens
  misc_RNA (1)...(19): siRNA sense strand
gucuuaauccaaugagaaa

SEQ ID NO: 2460346 - RNA, 19 nt, Homo sapiens
  misc_RNA (1)...(19): siRNA sense strand
gcuugauugugcugagaga

SEQ ID NO: 2460347 - RNA, 19 nt, Homo sapiens
  misc_RNA (1)...(19): siRNA sense strand
uguuggagaacuauagaaa

SEQ ID NO: 2460348 - RNA, 19 nt, Homo sapiens
  misc_RNA (1)...(19): siRNA sense strand
uuguauugaauguggcaaa

SEQ ID NO: 2460349 - RNA, 19 nt, Homo sapiens
  misc_RNA (1)...(19): siRNA sense strand
ccaaagaauucauacagga

SEQ ID NO: 2460350 - RNA, 19 nt, Homo sapiens
  misc_RNA (1)...(19): siRNA sense strand
aggauguggcuguggauuu

SEQ ID NO: 2460351 - RNA, 19 nt, Homo sapiens
  misc_RNA (1)...(19): siRNA sense strand
ggaaaagccuauagcagga

SEQ ID NO: 2460352 - RNA, 19 nt, Homo sapiens
  misc_RNA (1)...(19): siRNA sense strand
ucgggaaagcaaagacaau

SEQ ID NO: 2460353 - RNA, 19 nt, Homo sapiens
  misc_RNA (1)...(19): siRNA sense strand
agucuuaauccaaugagaa

SEQ ID NO: 2460354 - RNA, 19 nt, Homo sapiens
  misc_RNA (1)...(19): siRNA sense strand
agagcaaggacaagagcca

SEQ ID NO: 2460355 - RNA, 19 nt, Homo sapiens
  misc_RNA (1)...(19): siRNA sense strand
gaauguaacagauguggga

SEQ ID NO: 2460356 - RNA, 19 nt, Homo sapiens
  misc_RNA (1)...(19): siRNA sense strand
aagugauccucaagguaga

SEQ ID NO: 2460357 - RNA, 19 nt, Homo sapiens
  misc_RNA (1)...(19): siRNA sense strand
gauccucaagguagagcaa

SEQ ID NO: 2460358 - RNA, 19 nt, Homo sapiens
  misc_RNA (1)...(19): siRNA sense strand
auacaggagagaagcccua

SEQ ID NO: 2460359 - RNA, 19 nt, Homo sapiens
  misc_RNA (1)...(19): siRNA sense strand
gaugguggagggagcgaau

SEQ ID NO: 2460360 - RNA, 19 nt, Homo sapiens
  misc_RNA (1)...(19): siRNA sense strand
guggcaaagccuucaucaa

SEQ ID NO: 2460361 - RNA, 19 nt, Homo sapiens
  misc_RNA (1)...(19): siRNA sense strand
ucagauaacucauacagga

SEQ ID NO: 2460362 - RNA, 19 nt, Homo sapiens
  misc_RNA (1)...(19): siRNA sense strand
acaccaaagaauucauaca

SEQ ID NO: 2460363 - RNA, 19 nt, Homo sapiens
  misc_RNA (1)...(19): siRNA sense strand
ucacaguggaagaggcaaa

SEQ ID NO: 2460364 - RNA, 19 nt, Homo sapiens
  misc_RNA (1)...(19): siRNA sense strand
gcagauugauuuagggacu

SEQ ID NO: 2460365 - RNA, 19 nt, Homo sapiens
  misc_RNA (1)...(19): siRNA sense strand
gugaucacaaacagggaaa

SEQ ID NO: 2460366 - RNA, 19 nt, Homo sapiens
  misc_RNA (1)...(19): siRNA sense strand
ggacaaagggaauuccaca

SEQ ID NO: 2460367 - RNA, 19 nt, Homo sapiens
  misc_RNA (1)...(19): siRNA sense strand
ugagaaaacaggugagcau

SEQ ID NO: 2460368 - RNA, 19 nt, Homo sapiens
  misc_RNA (1)...(19): siRNA sense strand
ccgacuuacuauugcugaa

SEQ ID NO: 2460369 - RNA, 19 nt, Homo sapiens
  misc_RNA (1)...(19): siRNA sense strand
gugcaaagugaggaagauu

SEQ ID NO: 2460370 - RNA, 19 nt, Homo sapiens
  misc_RNA (1)...(19): siRNA sense strand
cuggagaugagguaaagaa

SEQ ID NO: 2460371 - RNA, 19 nt, Homo sapiens
  misc_RNA (1)...(19): siRNA sense strand
ggcaauguauguaugguga

SEQ ID NO: 2460372 - RNA, 19 nt, Homo sapiens
  misc_RNA (1)...(19): siRNA sense strand
caggaauagacucaaguau

SEQ ID NO: 2460373 - RNA, 19 nt, Homo sapiens
  misc_RNA (1)...(19): siRNA sense strand
ugguaauaaaccuuggauu

SEQ ID NO: 2460374 - RNA, 19 nt, Homo sapiens
  misc_RNA (1)...(19): siRNA sense strand
gcaagguucgaguggacau

SEQ ID NO: 2460375 - RNA, 19 nt, Homo sapiens
  misc_RNA (1)...(19): siRNA sense strand
uggcaagguucgaguggac

SEQ ID NO: 2460376 - RNA, 19 nt, Homo sapiens
  misc_RNA (1)...(19): siRNA sense strand
agaaaacaggugagcauuu

SEQ ID NO: 2460377 - RNA, 19 nt, Homo sapiens
  misc_RNA (1)...(19): siRNA sense strand
aguugugcaaagugaggaa

SEQ ID NO: 2460378 - RNA, 19 nt, Homo sapiens
  misc_RNA (1)...(19): siRNA sense strand
gcuacaagaaacugcgcaa

SEQ ID NO: 2460379 - RNA, 19 nt, Homo sapiens
  misc_RNA (1)...(19): siRNA sense strand
agacagagcagauccgcaa

SEQ ID NO: 2460380 - RNA, 19 nt, Homo sapiens
  misc_RNA (1)...(19): siRNA sense strand
ccucuuuaucuuuggcaua

SEQ ID NO: 2460381 - RNA, 19 nt, Homo sapiens
  misc_RNA (1)...(19): siRNA sense strand
ccguguuugugaaggagaa

SEQ ID NO: 2460382 - RNA, 19 nt, Homo sapiens
  misc_RNA (1)...(19): siRNA sense strand
uggaugaagaugaggaugu

SEQ ID NO: 2460383 - RNA, 19 nt, Homo sapiens
  misc_RNA (1)...(19): siRNA sense strand
ccucaagacaauugggaug

SEQ ID NO: 2460384 - RNA, 19 nt, Homo sapiens
  misc_RNA (1)...(19): siRNA sense strand
ccaccguguuugugaagga

SEQ ID NO: 2460385 - RNA, 19 nt, Homo sapiens
  misc_RNA (1)...(19): siRNA sense strand
gcauagaauucgugggccc

SEQ ID NO: 2460386 - RNA, 19 nt, Homo sapiens
  misc_RNA (1)...(19): siRNA sense strand
uugugaaggagaagcacua

SEQ ID NO: 2460387 - RNA, 19 nt, Homo sapiens
  misc_RNA (1)...(19): siRNA sense strand
ccauucaacuucagcuaca

SEQ ID NO: 2460388 - RNA, 19 nt, Homo sapiens
  misc_RNA (1)...(19): siRNA sense strand
augauaugccuuuggauga

SEQ ID NO: 2460389 - RNA, 19 nt, Homo sapiens
  misc_RNA (1)...(19): siRNA sense strand
gcuacagcgacuaugauau

SEQ ID NO: 2460390 - RNA, 19 nt, Homo sapiens
  misc_RNA (1)...(19): siRNA sense strand
acuacuauguggugcgcca

SEQ ID NO: 2460391 - RNA, 19 nt, Homo sapiens
  misc_RNA (1)...(19): siRNA sense strand
ucuacaucgucgagugcau

SEQ ID NO: 2460392 - RNA, 19 nt, Homo sapiens
  misc_RNA (1)...(19): siRNA sense strand
cugcaucagacuaaaauaa

SEQ ID NO: 2460393 - RNA, 19 nt, Homo sapiens
  misc_RNA (1)...(19): siRNA sense strand
acgcagacuucgacggcaa

SEQ ID NO: 2460394 - RNA, 19 nt, Homo sapiens
  misc_RNA (1)...(19): siRNA sense strand
aggaggagcuggagagcac

SEQ ID NO: 2460395 - RNA, 19 nt, Homo sapiens
  misc_RNA (1)...(19): siRNA sense strand
ccgacaugguggagacgca

SEQ ID NO: 2460396 - RNA, 19 nt, Homo sapiens
  misc_RNA (1)...(19): siRNA sense strand
ggugccaagcagagaguga

SEQ ID NO: 2460397 - RNA, 19 nt, Homo sapiens
  misc_RNA (1)...(19): siRNA sense strand
cgaagauucagcuggaaca

SEQ ID NO: 2460398 - RNA, 19 nt, Homo sapiens
  misc_RNA (1)...(19): siRNA sense strand
ucaugugggcgcugggcaa

SEQ ID NO: 2460399 - RNA, 19 nt, Homo sapiens
  misc_RNA (1)...(19): siRNA sense strand
ucuucgagcuggaggagca

SEQ ID NO: 2460400 - RNA, 19 nt, Homo sapiens
  misc_RNA (1)...(19): siRNA sense strand
cggcaugcuggaugaugaa

SEQ ID NO: 2460401 - RNA, 19 nt, Homo sapiens
  misc_RNA (1)...(19): siRNA sense strand
aggagaacaagaagaagca

SEQ ID NO: 2460402 - RNA, 19 nt, Homo sapiens
  misc_RNA (1)...(19): siRNA sense strand
cgaagcugcuggaggcacu

SEQ ID NO: 2460403 - RNA, 19 nt, Homo sapiens
  misc_RNA (1)...(19): siRNA sense strand
cuacaaggccagaaccaga

SEQ ID NO: 2460404 - RNA, 19 nt, Homo sapiens
  misc_RNA (1)...(19): siRNA sense strand
gcaccaagcucuuuacgga

SEQ ID NO: 2460405 - RNA, 19 nt, Homo sapiens
  misc_RNA (1)...(19): siRNA sense strand
acggagaaacagcggauga

SEQ ID NO: 2460406 - RNA, 19 nt, Homo sapiens
  misc_RNA (1)...(19): siRNA sense strand
ugacugagauggagcugga

SEQ ID NO: 2460407 - RNA, 19 nt, Homo sapiens
  misc_RNA (1)...(19): siRNA sense strand
cggagaaacagcggaugaa

SEQ ID NO: 2460408 - RNA, 19 nt, Homo sapiens
  misc_RNA (1)...(19): siRNA sense strand
uagaagaauuuaaggaagc

SEQ ID NO: 2460409 - RNA, 19 nt, Homo sapiens
  misc_RNA (1)...(19): siRNA sense strand
agauggagcuggaccgugu

SEQ ID NO: 2460410 - RNA, 19 nt, Homo sapiens
  misc_RNA (1)...(19): siRNA sense strand
cgucaacccugcaguggga

SEQ ID NO: 2460411 - RNA, 19 nt, Homo sapiens
  misc_RNA (1)...(19): siRNA sense strand
ggggaaagaacuagagaga

SEQ ID NO: 2460412 - RNA, 19 nt, Homo sapiens
  misc_RNA (1)...(19): siRNA sense strand
agacaaggggaaagaacua

SEQ ID NO: 2460413 - RNA, 19 nt, Homo sapiens
  misc_RNA (1)...(19): siRNA sense strand
ggacagaggaaguucagga

SEQ ID NO: 2460414 - RNA, 19 nt, Homo sapiens
  misc_RNA (1)...(19): siRNA sense strand
gcauaucccaagaggacau

SEQ ID NO: 2460415 - RNA, 19 nt, Homo sapiens
  misc_RNA (1)...(19): siRNA sense strand
agaacuagagagagacaca

SEQ ID NO: 2460416 - RNA, 19 nt, Homo sapiens
  misc_RNA (1)...(19): siRNA sense strand
aggaaguucaggaugacaa

SEQ ID NO: 2460417 - RNA, 19 nt, Homo sapiens
  misc_RNA (1)...(19): siRNA sense strand
gggaugagcuggagccuug

SEQ ID NO: 2460418 - RNA, 19 nt, Homo sapiens
  misc_RNA (1)...(19): siRNA sense strand
gcaaggacauggaggacag

SEQ ID NO: 2460419 - RNA, 19 nt, Homo sapiens
  misc_RNA (1)...(19): siRNA sense strand
uaaagacggcagaggguca

SEQ ID NO: 2460420 - RNA, 19 nt, Homo sapiens
  misc_RNA (1)...(19): siRNA sense strand
ggaaaugauucuacucgga

SEQ ID NO: 2460421 - RNA, 19 nt, Homo sapiens
  misc_RNA (1)...(19): siRNA sense strand
ucguagucaaugugaagaa

SEQ ID NO: 2460422 - RNA, 19 nt, Homo sapiens
  misc_RNA (1)...(19): siRNA sense strand
cagcauaucccaagaggac

SEQ ID NO: 2460423 - RNA, 19 nt, Homo sapiens
  misc_RNA (1)...(19): siRNA sense strand
cgaguaaagaagcggaaag

SEQ ID NO: 2460424 - RNA, 19 nt, Homo sapiens
  misc_RNA (1)...(19): siRNA sense strand
gcgaguaaagaagcggaaa

SEQ ID NO: 2460425 - RNA, 19 nt, Homo sapiens
  misc_RNA (1)...(19): siRNA sense strand
uuaccagggcauugugcaa

SEQ ID NO: 2460426 - RNA, 19 nt, Homo sapiens
  misc_RNA (1)...(19): siRNA sense strand
cgugaaugugcaagacaaa

SEQ ID NO: 2460427 - RNA, 19 nt, Homo sapiens
  misc_RNA (1)...(19): siRNA sense strand
agaaagaaaaggaggauca

SEQ ID NO: 2460428 - RNA, 19 nt, Homo sapiens
  misc_RNA (1)...(19): siRNA sense strand
ccaaugauaucaaggagga

SEQ ID NO: 2460429 - RNA, 19 nt, Homo sapiens
  misc_RNA (1)...(19): siRNA sense strand
gcccaagagcucagacaca

SEQ ID NO: 2460430 - RNA, 19 nt, Homo sapiens
  misc_RNA (1)...(19): siRNA sense strand
cuggaguauccuuggucua

SEQ ID NO: 2460431 - RNA, 19 nt, Homo sapiens
  misc_RNA (1)...(19): siRNA sense strand
ggaagugagcacagggccu

SEQ ID NO: 2460432 - RNA, 19 nt, Homo sapiens
  misc_RNA (1)...(19): siRNA sense strand
ccaagagcucagacacaau

SEQ ID NO: 2460433 - RNA, 19 nt, Homo sapiens
  misc_RNA (1)...(19): siRNA sense strand
caucaaaaccuuagaacuc

SEQ ID NO: 2460434 - RNA, 19 nt, Homo sapiens
  misc_RNA (1)...(19): siRNA sense strand
gcuccgugaaugugcaaga

SEQ ID NO: 2460435 - RNA, 19 nt, Homo sapiens
  misc_RNA (1)...(19): siRNA sense strand
guccaauaccagugggauc

SEQ ID NO: 2460436 - RNA, 19 nt, Homo sapiens
  misc_RNA (1)...(19): siRNA sense strand
gcaccaugcuugagcgcuu

SEQ ID NO: 2460437 - RNA, 19 nt, Homo sapiens
  misc_RNA (1)...(19): siRNA sense strand
gcagacaaccugaggcuga

SEQ ID NO: 2460438 - RNA, 19 nt, Homo sapiens
  misc_RNA (1)...(19): siRNA sense strand
ggaagacccuguuugggaa

SEQ ID NO: 2460439 - RNA, 19 nt, Homo sapiens
  misc_RNA (1)...(19): siRNA sense strand
gcucaaugcugcagagacc

SEQ ID NO: 2460440 - RNA, 19 nt, Homo sapiens
  misc_RNA (1)...(19): siRNA sense strand
uggaaguggaucagggcuu

SEQ ID NO: 2460441 - RNA, 19 nt, Homo sapiens
  misc_RNA (1)...(19): siRNA sense strand
gcgacaagccagaggagac

SEQ ID NO: 2460442 - RNA, 19 nt, Homo sapiens
  misc_RNA (1)...(19): siRNA sense strand
gcacaaugauauaauccga

SEQ ID NO: 2460443 - RNA, 19 nt, Homo sapiens
  misc_RNA (1)...(19): siRNA sense strand
augagggccuggugggcua

SEQ ID NO: 2460444 - RNA, 19 nt, Homo sapiens
  misc_RNA (1)...(19): siRNA sense strand
gcacaugcccacuuggaca

SEQ ID NO: 2460445 - RNA, 19 nt, Homo sapiens
  misc_RNA (1)...(19): siRNA sense strand
gaggaaacacccagggaug

SEQ ID NO: 2460446 - RNA, 19 nt, Homo sapiens
  misc_RNA (1)...(19): siRNA sense strand
aggggaaggcagagaaaga

SEQ ID NO: 2460447 - RNA, 19 nt, Homo sapiens
  misc_RNA (1)...(19): siRNA sense strand
cagaggagacucaggggaa

SEQ ID NO: 2460448 - RNA, 19 nt, Homo sapiens
  misc_RNA (1)...(19): siRNA sense strand
gggaagacccuguuuggga

SEQ ID NO: 2460449 - RNA, 19 nt, Homo sapiens
  misc_RNA (1)...(19): siRNA sense strand
agguguugcuggugcuaga

SEQ ID NO: 2460450 - RNA, 19 nt, Homo sapiens
  misc_RNA (1)...(19): siRNA sense strand
cggcaauaugcuagucuca

SEQ ID NO: 2460451 - RNA, 19 nt, Homo sapiens
  misc_RNA (1)...(19): siRNA sense strand
guucaaugguccugagguc

SEQ ID NO: 2460452 - RNA, 19 nt, Homo sapiens
  misc_RNA (1)...(19): siRNA sense strand
acagagaagcauacggcca

SEQ ID NO: 2460453 - RNA, 19 nt, Homo sapiens
  misc_RNA (1)...(19): siRNA sense strand
ugucaaugcccgaggacuc

SEQ ID NO: 2460454 - RNA, 19 nt, Homo sapiens
  misc_RNA (1)...(19): siRNA sense strand
aggcugaugugcuggaagu

SEQ ID NO: 2460455 - RNA, 19 nt, Homo sapiens
  misc_RNA (1)...(19): siRNA sense strand
uugaacaugcugauggcaa

SEQ ID NO: 2460456 - RNA, 19 nt, Homo sapiens
  misc_RNA (1)...(19): siRNA sense strand
gcaccaugcuugagcgcuu

SEQ ID NO: 2460457 - RNA, 19 nt, Homo sapiens
  misc_RNA (1)...(19): siRNA sense strand
cagcagacccugaaggaca

SEQ ID NO: 2460458 - RNA, 19 nt, Homo sapiens
  misc_RNA (1)...(19): siRNA sense strand
cugugguacuccagacaaa

SEQ ID NO: 2460459 - RNA, 19 nt, Homo sapiens
  misc_RNA (1)...(19): siRNA sense strand
gcagacaaccugaggcuga

SEQ ID NO: 2460460 - RNA, 19 nt, Homo sapiens
  misc_RNA (1)...(19): siRNA sense strand
ggaagacccuguuugggaa

SEQ ID NO: 2460461 - RNA, 19 nt, Homo sapiens
  misc_RNA (1)...(19): siRNA sense strand
gcucaaugcugcagagacc

SEQ ID NO: 2460462 - RNA, 19 nt, Homo sapiens
  misc_RNA (1)...(19): siRNA sense strand
uggaaguggaucagggcuu

SEQ ID NO: 2460463 - RNA, 19 nt, Homo sapiens
  misc_RNA (1)...(19): siRNA sense strand
gcgacaagccagaggagac

SEQ ID NO: 2460464 - RNA, 19 nt, Homo sapiens
  misc_RNA (1)...(19): siRNA sense strand
gcacaaugauauaauccga

SEQ ID NO: 2460465 - RNA, 19 nt, Homo sapiens
  misc_RNA (1)...(19): siRNA sense strand
augagggccuggugggcua

SEQ ID NO: 2460466 - RNA, 19 nt, Homo sapiens
  misc_RNA (1)...(19): siRNA sense strand
cuguguugguccugcgcaa

SEQ ID NO: 2460467 - RNA, 19 nt, Homo sapiens
  misc_RNA (1)...(19): siRNA sense strand
gcacaugcccacuuggaca

SEQ ID NO: 2460468 - RNA, 19 nt, Homo sapiens
  misc_RNA (1)...(19): siRNA sense strand
ccuucaauauagaugauca

SEQ ID NO: 2460469 - RNA, 19 nt, Homo sapiens
  misc_RNA (1)...(19): siRNA sense strand
gaggaaacacccagggaug

SEQ ID NO: 2460470 - RNA, 19 nt, Homo sapiens
  misc_RNA (1)...(19): siRNA sense strand
aggggaaggcagagaaaga

SEQ ID NO: 2460471 - RNA, 19 nt, Homo sapiens
  misc_RNA (1)...(19): siRNA sense strand
cagaggagacucaggggaa

SEQ ID NO: 2460472 - RNA, 19 nt, Homo sapiens
  misc_RNA (1)...(19): siRNA sense strand
ggguacagcucaaggagag

SEQ ID NO: 2460473 - RNA, 19 nt, Homo sapiens
  misc_RNA (1)...(19): siRNA sense strand
gggaagacccuguuuggga

SEQ ID NO: 2460474 - RNA, 19 nt, Homo sapiens
  misc_RNA (1)...(19): siRNA sense strand
agguguugcuggugcuaga

SEQ ID NO: 2460475 - RNA, 19 nt, Homo sapiens
  misc_RNA (1)...(19): siRNA sense strand
cggcaauaugcuagucuca

SEQ ID NO: 2460476 - RNA, 19 nt, Homo sapiens
  misc_RNA (1)...(19): siRNA sense strand
ccuguaacucuaagcagua

SEQ ID NO: 2460477 - RNA, 19 nt, Homo sapiens
  misc_RNA (1)...(19): siRNA sense strand
acagagaagcauacggcca

SEQ ID NO: 2460478 - RNA, 19 nt, Homo sapiens
  misc_RNA (1)...(19): siRNA sense strand
ugucaaugcccgaggacuc

SEQ ID NO: 2460479 - RNA, 19 nt, Homo sapiens
  misc_RNA (1)...(19): siRNA sense strand
aggcugaugugcuggaagu

SEQ ID NO: 2460480 - RNA, 19 nt, Homo sapiens
  misc_RNA (1)...(19): siRNA sense strand
uugaacaugcugauggcaa

SEQ ID NO: 2460481 - RNA, 19 nt, Homo sapiens
  misc_RNA (1)...(19): siRNA sense strand
ugauaauaggggcuggaaa

SEQ ID NO: 2460482 - RNA, 19 nt, Homo sapiens
  misc_RNA (1)...(19): siRNA sense strand
gcaccaugcuugagcgcuu

SEQ ID NO: 2460483 - RNA, 19 nt, Homo sapiens
  misc_RNA (1)...(19): siRNA sense strand
cagcagacccugaaggaca

SEQ ID NO: 2460484 - RNA, 19 nt, Homo sapiens
  misc_RNA (1)...(19): siRNA sense strand
cugugguacuccagacaaa

SEQ ID NO: 2460485 - RNA, 19 nt, Homo sapiens
  misc_RNA (1)...(19): siRNA sense strand
gcagacaaccugaggcuga

SEQ ID NO: 2460486 - RNA, 19 nt, Homo sapiens
  misc_RNA (1)...(19): siRNA sense strand
ggaagacccuguuugggaa

SEQ ID NO: 2460487 - RNA, 19 nt, Homo sapiens
  misc_RNA (1)...(19): siRNA sense strand
gcucaaugcugcagagacc

SEQ ID NO: 2460488 - RNA, 19 nt, Homo sapiens
  misc_RNA (1)...(19): siRNA sense strand
uggaaguggaucagggcuu

SEQ ID NO: 2460489 - RNA, 19 nt, Homo sapiens
  misc_RNA (1)...(19): siRNA sense strand
gcgacaagccagaggagac

SEQ ID NO: 2460490 - RNA, 19 nt, Homo sapiens
  misc_RNA (1)...(19): siRNA sense strand
gcacaaugauauaauccga

SEQ ID NO: 2460491 - RNA, 19 nt, Homo sapiens
  misc_RNA (1)...(19): siRNA sense strand
augagggccuggugggcua

SEQ ID NO: 2460492 - RNA, 19 nt, Homo sapiens
  misc_RNA (1)...(19): siRNA sense strand
cuguguugguccugcgcaa

SEQ ID NO: 2460493 - RNA, 19 nt, Homo sapiens
  misc_RNA (1)...(19): siRNA sense strand
gcacaugcccacuuggaca

SEQ ID NO: 2460494 - RNA, 19 nt, Homo sapiens
  misc_RNA (1)...(19): siRNA sense strand
ccuucaauauagaugauca

SEQ ID NO: 2460495 - RNA, 19 nt, Homo sapiens
  misc_RNA (1)...(19): siRNA sense strand
gaggaaacacccagggaug

SEQ ID NO: 2460496 - RNA, 19 nt, Homo sapiens
  misc_RNA (1)...(19): siRNA sense strand
aggggaaggcagagaaaga

SEQ ID NO: 2460497 - RNA, 19 nt, Homo sapiens
  misc_RNA (1)...(19): siRNA sense strand
cagaggagacucaggggaa

SEQ ID NO: 2460498 - RNA, 19 nt, Homo sapiens
  misc_RNA (1)...(19): siRNA sense strand
ggguacagcucaaggagag

SEQ ID NO: 2460499 - RNA, 19 nt, Homo sapiens
  misc_RNA (1)...(19): siRNA sense strand
gggaagacccuguuuggga

SEQ ID NO: 2460500 - RNA, 19 nt, Homo sapiens
  misc_RNA (1)...(19): siRNA sense strand
agguguugcuggugcuaga

SEQ ID NO: 2460501 - RNA, 19 nt, Homo sapiens
  misc_RNA (1)...(19): siRNA sense strand
cggcaauaugcuagucuca

SEQ ID NO: 2460502 - RNA, 19 nt, Homo sapiens
  misc_RNA (1)...(19): siRNA sense strand
ccuguaacucuaagcagua

SEQ ID NO: 2460503 - RNA, 19 nt, Homo sapiens
  misc_RNA (1)...(19): siRNA sense strand
acagagaagcauacggcca

SEQ ID NO: 2460504 - RNA, 19 nt, Homo sapiens
  misc_RNA (1)...(19): siRNA sense strand
ugucaaugcccgaggacuc

SEQ ID NO: 2460505 - RNA, 19 nt, Homo sapiens
  misc_RNA (1)...(19): siRNA sense strand
aggcugaugugcuggaagu

SEQ ID NO: 2460506 - RNA, 19 nt, Homo sapiens
  misc_RNA (1)...(19): siRNA sense strand
uugaacaugcugauggcaa

SEQ ID NO: 2460507 - RNA, 19 nt, Homo sapiens
  misc_RNA (1)...(19): siRNA sense strand
ugauaauaggggcuggaaa

SEQ ID NO: 2460508 - RNA, 19 nt, Homo sapiens
  misc_RNA (1)...(19): siRNA sense strand
agacaaaggucaucgcaga

SEQ ID NO: 2460509 - RNA, 19 nt, Homo sapiens
  misc_RNA (1)...(19): siRNA sense strand
gaagcuagaugaaagggaa

SEQ ID NO: 2460510 - RNA, 19 nt, Homo sapiens
  misc_RNA (1)...(19): siRNA sense strand
gcagauaacgugaaggacu

SEQ ID NO: 2460511 - RNA, 19 nt, Homo sapiens
  misc_RNA (1)...(19): siRNA sense strand
ggcagaagcuagaucccaa

SEQ ID NO: 2460512 - RNA, 19 nt, Homo sapiens
  misc_RNA (1)...(19): siRNA sense strand
gcaaggucguccuggccua

SEQ ID NO: 2460513 - RNA, 19 nt, Homo sapiens
  misc_RNA (1)...(19): siRNA sense strand
ccgaauucguggacaucau

SEQ ID NO: 2460514 - RNA, 19 nt, Homo sapiens
  misc_RNA (1)...(19): siRNA sense strand
gguacuggcaagacugcaa

SEQ ID NO: 2460515 - RNA, 19 nt, Homo sapiens
  misc_RNA (1)...(19): siRNA sense strand
acgugaaggacuggagcaa

SEQ ID NO: 2460516 - RNA, 19 nt, Homo sapiens
  misc_RNA (1)...(19): siRNA sense strand
cagauaacgugaaggacug

SEQ ID NO: 2460517 - RNA, 19 nt, Homo sapiens
  misc_RNA (1)...(19): siRNA sense strand
cagaugagcugauugggca

SEQ ID NO: 2460518 - RNA, 19 nt, Homo sapiens
  misc_RNA (1)...(19): siRNA sense strand
ggggaaacuggaagaugaa

SEQ ID NO: 2460519 - RNA, 19 nt, Homo sapiens
  misc_RNA (1)...(19): siRNA sense strand
aggaaguacacgagaagcu

SEQ ID NO: 2460520 - RNA, 19 nt, Homo sapiens
  misc_RNA (1)...(19): siRNA sense strand
acugcuacaaagugacuaa

SEQ ID NO: 2460521 - RNA, 19 nt, Homo sapiens
  misc_RNA (1)...(19): siRNA sense strand
agcccgaauucguggacau

SEQ ID NO: 2460522 - RNA, 19 nt, Homo sapiens
  misc_RNA (1)...(19): siRNA sense strand
gcgagaaggaauauggaaa

SEQ ID NO: 2460523 - RNA, 19 nt, Homo sapiens
  misc_RNA (1)...(19): siRNA sense strand
gcuuaaaaucacagaguaa

SEQ ID NO: 2460524 - RNA, 19 nt, Homo sapiens
  misc_RNA (1)...(19): siRNA sense strand
aagaagaggaugaugaaau

SEQ ID NO: 2460525 - RNA, 19 nt, Homo sapiens
  misc_RNA (1)...(19): siRNA sense strand
gaucauggcugcaggcaca

SEQ ID NO: 2460526 - RNA, 19 nt, Homo sapiens
  misc_RNA (1)...(19): siRNA sense strand
ucgaaugcgagaaggaaua

SEQ ID NO: 2460527 - RNA, 19 nt, Homo sapiens
  misc_RNA (1)...(19): siRNA sense strand
aaguaaagcuacaggaaag

SEQ ID NO: 2460528 - RNA, 19 nt, Homo sapiens
  misc_RNA (1)...(19): siRNA sense strand
gcuacagaaauuagaagaa

SEQ ID NO: 2460529 - RNA, 19 nt, Homo sapiens
  misc_RNA (1)...(19): siRNA sense strand
gauuaugucaccacggaaa

SEQ ID NO: 2460530 - RNA, 19 nt, Homo sapiens
  misc_RNA (1)...(19): siRNA sense strand
aucaauugguuaaggacaa

SEQ ID NO: 2460531 - RNA, 19 nt, Homo sapiens
  misc_RNA (1)...(19): siRNA sense strand
ggucugauuaguuggagaa

SEQ ID NO: 2460532 - RNA, 19 nt, Homo sapiens
  misc_RNA (1)...(19): siRNA sense strand
agaacgaacagcauguaaa

SEQ ID NO: 2460533 - RNA, 19 nt, Homo sapiens
  misc_RNA (1)...(19): siRNA sense strand
caauaaagaacgaucacga

SEQ ID NO: 2460534 - RNA, 19 nt, Homo sapiens
  misc_RNA (1)...(19): siRNA sense strand
ugacaauagagaagaucuu

SEQ ID NO: 2460535 - RNA, 19 nt, Homo sapiens
  misc_RNA (1)...(19): siRNA sense strand
cagaaauccaucaaagaca

SEQ ID NO: 2460536 - RNA, 19 nt, Homo sapiens
  misc_RNA (1)...(19): siRNA sense strand
ugauaugagcauugauuca

SEQ ID NO: 2460537 - RNA, 19 nt, Homo sapiens
  misc_RNA (1)...(19): siRNA sense strand
cuuggaaagugcugaggau

SEQ ID NO: 2460538 - RNA, 19 nt, Homo sapiens
  misc_RNA (1)...(19): siRNA sense strand
cugauuaguuggagaaggu

SEQ ID NO: 2460539 - RNA, 19 nt, Homo sapiens
  misc_RNA (1)...(19): siRNA sense strand
agaagaacagauugcaaau

SEQ ID NO: 2460540 - RNA, 19 nt, Homo sapiens
  misc_RNA (1)...(19): siRNA sense strand
gaucaauugguuaaggaca

SEQ ID NO: 2460541 - RNA, 19 nt, Homo sapiens
  misc_RNA (1)...(19): siRNA sense strand
gcuacaggaaagaaaauaa

SEQ ID NO: 2460542 - RNA, 19 nt, Homo sapiens
  misc_RNA (1)...(19): siRNA sense strand
uggauaaggaugccaagaa

SEQ ID NO: 2460543 - RNA, 19 nt, Homo sapiens
  misc_RNA (1)...(19): siRNA sense strand
cuuagaaauucgaaugcga

SEQ ID NO: 2460544 - RNA, 19 nt, Homo sapiens
  misc_RNA (1)...(19): siRNA sense strand
aguaaagaacgaacagcau

SEQ ID NO: 2460545 - RNA, 19 nt, Homo sapiens
  misc_RNA (1)...(19): siRNA sense strand
cagcaauaaagaacgauca

SEQ ID NO: 2460546 - RNA, 19 nt, Homo sapiens
  misc_RNA (1)...(19): siRNA sense strand
uaaagcuacaggaaagaaa

SEQ ID NO: 2460547 - RNA, 19 nt, Homo sapiens
  misc_RNA (1)...(19): siRNA sense strand
acagaguaacacagaucaa

SEQ ID NO: 2460548 - RNA, 19 nt, Homo sapiens
  misc_RNA (1)...(19): siRNA sense strand
auguggugaauguggauaa

SEQ ID NO: 2460549 - RNA, 19 nt, Homo sapiens
  misc_RNA (1)...(19): siRNA sense strand
gauaaggaugccaagaaaa

SEQ ID NO: 2460550 - RNA, 19 nt, Homo sapiens
  misc_RNA (1)...(19): siRNA sense strand
gcuccaaggcagaaaucca

SEQ ID NO: 2460551 - RNA, 19 nt, Homo sapiens
  misc_RNA (1)...(19): siRNA sense strand
cgagaaggaauauggaaac

SEQ ID NO: 2460552 - RNA, 19 nt, Homo sapiens
  misc_RNA (1)...(19): siRNA sense strand
auaaguaaagcuacaggaa

SEQ ID NO: 2460553 - RNA, 19 nt, Homo sapiens
  misc_RNA (1)...(19): siRNA sense strand
agcaaaugguagaaggucu

SEQ ID NO: 2460554 - RNA, 19 nt, Homo sapiens
  misc_RNA (1)...(19): siRNA sense strand
ugaaaguaaagaacgaaca

SEQ ID NO: 2460555 - RNA, 19 nt, Homo sapiens
  misc_RNA (1)...(19): siRNA sense strand
uggaaagugcugaggauag

SEQ ID NO: 2460556 - RNA, 19 nt, Homo sapiens
  misc_RNA (1)...(19): siRNA sense strand
gaaaccagaauccgggcaa

SEQ ID NO: 2460557 - RNA, 19 nt, Homo sapiens
  misc_RNA (1)...(19): siRNA sense strand
guauaguugcuguacagaa

SEQ ID NO: 2460558 - RNA, 19 nt, Homo sapiens
  misc_RNA (1)...(19): siRNA sense strand
guuaagaaucucauggugu

SEQ ID NO: 2460559 - RNA, 19 nt, Homo sapiens
  misc_RNA (1)...(19): siRNA sense strand
aguugacaauagagaagau

SEQ ID NO: 2460560 - RNA, 19 nt, Homo sapiens
  misc_RNA (1)...(19): siRNA sense strand
guuaaggacaacuggggaa

SEQ ID NO: 2460561 - RNA, 19 nt, Homo sapiens
  misc_RNA (1)...(19): siRNA sense strand
ggcagaaauccaucaaaga

SEQ ID NO: 2460562 - RNA, 19 nt, Homo sapiens
  misc_RNA (1)...(19): siRNA sense strand
aaguaaagaacgaacagca

SEQ ID NO: 2460563 - RNA, 19 nt, Homo sapiens
  misc_RNA (1)...(19): siRNA sense strand
cuucagcaauaaagaacga

SEQ ID NO: 2460564 - RNA, 19 nt, Homo sapiens
  misc_RNA (1)...(19): siRNA sense strand
uuuacaguccagaggaaau

SEQ ID NO: 2460565 - RNA, 19 nt, Homo sapiens
  misc_RNA (1)...(19): siRNA sense strand
gagaaggaauauggaaacu

SEQ ID NO: 2460566 - RNA, 19 nt, Homo sapiens
  misc_RNA (1)...(19): siRNA sense strand
gggcaauggauaaggaugc

SEQ ID NO: 2460567 - RNA, 19 nt, Homo sapiens
  misc_RNA (1)...(19): siRNA sense strand
caauccuguuccuggacaa

SEQ ID NO: 2460568 - RNA, 19 nt, Homo sapiens
  misc_RNA (1)...(19): siRNA sense strand
agaaguggauggaagccuu

SEQ ID NO: 2460569 - RNA, 19 nt, Homo sapiens
  misc_RNA (1)...(19): siRNA sense strand
aaaucagacuggaagaugu

SEQ ID NO: 2460570 - RNA, 19 nt, Homo sapiens
  misc_RNA (1)...(19): siRNA sense strand
acucagaaagaucaaguuu

SEQ ID NO: 2460571 - RNA, 19 nt, Homo sapiens
  misc_RNA (1)...(19): siRNA sense strand
guacccauuaacaaggaaa

SEQ ID NO: 2460572 - RNA, 19 nt, Homo sapiens
  misc_RNA (1)...(19): siRNA sense strand
agaaucucauggugugcaa

SEQ ID NO: 2460573 - RNA, 19 nt, Homo sapiens
  misc_RNA (1)...(19): siRNA sense strand
agaccuagguuauggcaca

SEQ ID NO: 2460574 - RNA, 19 nt, Homo sapiens
  misc_RNA (1)...(19): siRNA sense strand
agaaauuaaagguggaguu

SEQ ID NO: 2460575 - RNA, 19 nt, Homo sapiens
  misc_RNA (1)...(19): siRNA sense strand
gguuauggguguaggagac

SEQ ID NO: 2460576 - RNA, 19 nt, Homo sapiens
  misc_RNA (1)...(19): siRNA sense strand
agaagaacaaagaguccaa

SEQ ID NO: 2460577 - RNA, 19 nt, Homo sapiens
  misc_RNA (1)...(19): siRNA sense strand
ggguauauaaagacagacu

SEQ ID NO: 2460578 - RNA, 19 nt, Homo sapiens
  misc_RNA (1)...(19): siRNA sense strand
ugauauugauaguggguug

SEQ ID NO: 2460579 - RNA, 19 nt, Homo sapiens
  misc_RNA (1)...(19): siRNA sense strand
cuaucauguuagaaaguca

SEQ ID NO: 2460580 - RNA, 19 nt, Homo sapiens
  misc_RNA (1)...(19): siRNA sense strand
caccuauagcugaugauaa

SEQ ID NO: 2460581 - RNA, 19 nt, Homo sapiens
  misc_RNA (1)...(19): siRNA sense strand
agcuaaucaccgagaagaa

SEQ ID NO: 2460582 - RNA, 19 nt, Homo sapiens
  misc_RNA (1)...(19): siRNA sense strand
ggauaugaugacaaaggau

SEQ ID NO: 2460583 - RNA, 19 nt, Homo sapiens
  misc_RNA (1)...(19): siRNA sense strand
uuuacgaacaagagaugaa

SEQ ID NO: 2460584 - RNA, 19 nt, Homo sapiens
  misc_RNA (1)...(19): siRNA sense strand
augacaaaggauacagcaa

SEQ ID NO: 2460585 - RNA, 19 nt, Homo sapiens
  misc_RNA (1)...(19): siRNA sense strand
gaaaccuacauuugggaga

SEQ ID NO: 2460586 - RNA, 19 nt, Homo sapiens
  misc_RNA (1)...(19): siRNA sense strand
aaaacaagaccuagguuau

SEQ ID NO: 2460587 - RNA, 19 nt, Homo sapiens
  misc_RNA (1)...(19): siRNA sense strand
accuacaccacgugauaaa

SEQ ID NO: 2460588 - RNA, 19 nt, Homo sapiens
  misc_RNA (1)...(19): siRNA sense strand
gguauauaaagacagacua

SEQ ID NO: 2460589 - RNA, 19 nt, Homo sapiens
  misc_RNA (1)...(19): siRNA sense strand
cggucauggcauacuuuaa

SEQ ID NO: 2460590 - RNA, 19 nt, Homo sapiens
  misc_RNA (1)...(19): siRNA sense strand
ccuugacugcauugguaaa

SEQ ID NO: 2460591 - RNA, 19 nt, Homo sapiens
  misc_RNA (1)...(19): siRNA sense strand
cuugggaagagcagauauu

SEQ ID NO: 2460592 - RNA, 19 nt, Homo sapiens
  misc_RNA (1)...(19): siRNA sense strand
aggucacuguaaugauuua

SEQ ID NO: 2460593 - RNA, 19 nt, Homo sapiens
  misc_RNA (1)...(19): siRNA sense strand
gcaccucauggaaggagaa

SEQ ID NO: 2460594 - RNA, 19 nt, Homo sapiens
  misc_RNA (1)...(19): siRNA sense strand
ccucauggaaggagaacuc

SEQ ID NO: 2460595 - RNA, 19 nt, Homo sapiens
  misc_RNA (1)...(19): siRNA sense strand
cuggguauauaaagacaga

SEQ ID NO: 2460596 - RNA, 19 nt, Homo sapiens
  misc_RNA (1)...(19): siRNA sense strand
ccacaagagugcacgccua

SEQ ID NO: 2460597 - RNA, 19 nt, Homo sapiens
  misc_RNA (1)...(19): siRNA sense strand
ggaagaacguugcugguga

SEQ ID NO: 2460598 - RNA, 19 nt, Homo sapiens
  misc_RNA (1)...(19): siRNA sense strand
cggaaucguaacaggcaaa

SEQ ID NO: 2460599 - RNA, 19 nt, Homo sapiens
  misc_RNA (1)...(19): siRNA sense strand
gaguaaaugggcuggcaga

SEQ ID NO: 2460600 - RNA, 19 nt, Homo sapiens
  misc_RNA (1)...(19): siRNA sense strand
ucgggaagcuggagccaca

SEQ ID NO: 2460601 - RNA, 19 nt, Homo sapiens
  misc_RNA (1)...(19): siRNA sense strand
ccggaaucguaacaggcaa

SEQ ID NO: 2460602 - RNA, 19 nt, Homo sapiens
  misc_RNA (1)...(19): siRNA sense strand
ccucaagacaggacugcuu

SEQ ID NO: 2460603 - RNA, 19 nt, Homo sapiens
  misc_RNA (1)...(19): siRNA sense strand
ugccaauucuggaaccaaa

SEQ ID NO: 2460604 - RNA, 19 nt, Homo sapiens
  misc_RNA (1)...(19): siRNA sense strand
ggauggcuuuguugaccaa

SEQ ID NO: 2460605 - RNA, 19 nt, Homo sapiens
  misc_RNA (1)...(19): siRNA sense strand
ggguaaagucagugauaaa

SEQ ID NO: 2460606 - RNA, 19 nt, Homo sapiens
  misc_RNA (1)...(19): siRNA sense strand
cccaaggacagguggaaua

SEQ ID NO: 2460607 - RNA, 19 nt, Homo sapiens
  misc_RNA (1)...(19): siRNA sense strand
ugaaagagaaaguggagau

SEQ ID NO: 2460608 - RNA, 19 nt, Homo sapiens
  misc_RNA (1)...(19): siRNA sense strand
aagagaaaguggagaucga

SEQ ID NO: 2460609 - RNA, 19 nt, Homo sapiens
  misc_RNA (1)...(19): siRNA sense strand
gcaaagagcugguggccuc

SEQ ID NO: 2460610 - RNA, 19 nt, Homo sapiens
  misc_RNA (1)...(19): siRNA sense strand
ugcugaaggacaagagaaa

SEQ ID NO: 2460611 - RNA, 19 nt, Homo sapiens
  misc_RNA (1)...(19): siRNA sense strand
gguggugaucaaaggguaa

SEQ ID NO: 2460612 - RNA, 19 nt, Homo sapiens
  misc_RNA (1)...(19): siRNA sense strand
gaauaagauggcugguaau

SEQ ID NO: 2460613 - RNA, 19 nt, Homo sapiens
  misc_RNA (1)...(19): siRNA sense strand
aggaguaaauaaugcugaa

SEQ ID NO: 2460614 - RNA, 19 nt, Homo sapiens
  misc_RNA (1)...(19): siRNA sense strand
cugaaggacaagagaaaau

SEQ ID NO: 2460615 - RNA, 19 nt, Homo sapiens
  misc_RNA (1)...(19): siRNA sense strand
uguuaaugaucuuggaacu

SEQ ID NO: 2460616 - RNA, 19 nt, Homo sapiens
  misc_RNA (1)...(19): siRNA sense strand
agaaaguggagaucgaaau

SEQ ID NO: 2460617 - RNA, 19 nt, Homo sapiens
  misc_RNA (1)...(19): siRNA sense strand
ucugacaacgggaaggaaa

SEQ ID NO: 2460618 - RNA, 19 nt, Homo sapiens
  misc_RNA (1)...(19): siRNA sense strand
auacaauugcugaaggaca

SEQ ID NO: 2460619 - RNA, 19 nt, Homo sapiens
  misc_RNA (1)...(19): siRNA sense strand
gcccugaagcaguucgaaa

SEQ ID NO: 2460620 - RNA, 19 nt, Homo sapiens
  misc_RNA (1)...(19): siRNA sense strand
cugacaacgggaaggaaaa

SEQ ID NO: 2460621 - RNA, 19 nt, Homo sapiens
  misc_RNA (1)...(19): siRNA sense strand
cuauacaauugcugaagga

SEQ ID NO: 2460622 - RNA, 19 nt, Homo sapiens
  misc_RNA (1)...(19): siRNA sense strand
gaguguauggauauguuaa

SEQ ID NO: 2460623 - RNA, 19 nt, Homo sapiens
  misc_RNA (1)...(19): siRNA sense strand
aggcauucuacuggagaua

SEQ ID NO: 2460624 - RNA, 19 nt, Homo sapiens
  misc_RNA (1)...(19): siRNA sense strand
agacggacgcguuuggcaa

SEQ ID NO: 2460625 - RNA, 19 nt, Homo sapiens
  misc_RNA (1)...(19): siRNA sense strand
aaggguaaagucagugaua

SEQ ID NO: 2460626 - RNA, 19 nt, Homo sapiens
  misc_RNA (1)...(19): siRNA sense strand
agauuugcuuugucagcua

SEQ ID NO: 2460627 - RNA, 19 nt, Homo sapiens
  misc_RNA (1)...(19): siRNA sense strand
gaguuauaugaaagugcua

SEQ ID NO: 2460628 - RNA, 19 nt, Homo sapiens
  misc_RNA (1)...(19): siRNA sense strand
uggacuaagauucaacaaa

SEQ ID NO: 2460629 - RNA, 19 nt, Homo sapiens
  misc_RNA (1)...(19): siRNA sense strand
ugaucaaaggguaaaguca

SEQ ID NO: 2460630 - RNA, 19 nt, Homo sapiens
  misc_RNA (1)...(19): siRNA sense strand
ccagguugaaagaguguau

SEQ ID NO: 2460631 - RNA, 19 nt, Homo sapiens
  misc_RNA (1)...(19): siRNA sense strand
ccgaguggacuaagauuca

SEQ ID NO: 2460632 - RNA, 19 nt, Homo sapiens
  misc_RNA (1)...(19): siRNA sense strand
agguggugaucaaagggua

SEQ ID NO: 2460633 - RNA, 19 nt, Homo sapiens
  misc_RNA (1)...(19): siRNA sense strand
aggguaaagucagugauaa

SEQ ID NO: 2460634 - RNA, 19 nt, Homo sapiens
  misc_RNA (1)...(19): siRNA sense strand
caguagauggacagaggca

SEQ ID NO: 2460635 - RNA, 19 nt, Homo sapiens
  misc_RNA (1)...(19): siRNA sense strand
gcugguggccucaggugaa

SEQ ID NO: 2460636 - RNA, 19 nt, Homo sapiens
  misc_RNA (1)...(19): siRNA sense strand
guucuauacaauugcugaa

SEQ ID NO: 2460637 - RNA, 19 nt, Homo sapiens
  misc_RNA (1)...(19): siRNA sense strand
ugaucuuggaacugaauau

SEQ ID NO: 2460638 - RNA, 19 nt, Homo sapiens
  misc_RNA (1)...(19): siRNA sense strand
ggaguaaauaaugcugaaa

SEQ ID NO: 2460639 - RNA, 19 nt, Homo sapiens
  misc_RNA (1)...(19): siRNA sense strand
aggaggaaguggaggagga

SEQ ID NO: 2460640 - RNA, 19 nt, Homo sapiens
  misc_RNA (1)...(19): siRNA sense strand
cggaggaggaaguggagga

SEQ ID NO: 2460641 - RNA, 19 nt, Homo sapiens
  misc_RNA (1)...(19): siRNA sense strand
aggaaguggaggaggagga

SEQ ID NO: 2460642 - RNA, 19 nt, Homo sapiens
  misc_RNA (1)...(19): siRNA sense strand
ucagcaaccugguggccaa

SEQ ID NO: 2460643 - RNA, 19 nt, Homo sapiens
  misc_RNA (1)...(19): siRNA sense strand
gcuuggagucggaggagga

SEQ ID NO: 2460644 - RNA, 19 nt, Homo sapiens
  misc_RNA (1)...(19): siRNA sense strand
uggaugacacagaggcuga

SEQ ID NO: 2460645 - RNA, 19 nt, Homo sapiens
  misc_RNA (1)...(19): siRNA sense strand
agucagugcuguacgggaa

SEQ ID NO: 2460646 - RNA, 19 nt, Homo sapiens
  misc_RNA (1)...(19): siRNA sense strand
agacgauucuggagagcca

SEQ ID NO: 2460647 - RNA, 19 nt, Homo sapiens
  misc_RNA (1)...(19): siRNA sense strand
gugaagacgauucuggaga

SEQ ID NO: 2460648 - RNA, 19 nt, Homo sapiens
  misc_RNA (1)...(19): siRNA sense strand
gccaagauccccugggcaa

SEQ ID NO: 2460649 - RNA, 19 nt, Homo sapiens
  misc_RNA (1)...(19): siRNA sense strand
ccgucgggguccagaacua

SEQ ID NO: 2460650 - RNA, 19 nt, Homo sapiens
  misc_RNA (1)...(19): siRNA sense strand
caacggaaaaggagugaaa

SEQ ID NO: 2460651 - RNA, 19 nt, Homo sapiens
  misc_RNA (1)...(19): siRNA sense strand
gguuagaaguucaagccga

SEQ ID NO: 2460652 - RNA, 19 nt, Homo sapiens
  misc_RNA (1)...(19): siRNA sense strand
ccgcagugaccuagagagu

SEQ ID NO: 2460653 - RNA, 19 nt, Homo sapiens
  misc_RNA (1)...(19): siRNA sense strand
agguaugagggaaggaaaa

SEQ ID NO: 2460654 - RNA, 19 nt, Homo sapiens
  misc_RNA (1)...(19): siRNA sense strand
gcaauuagugacaacgcaa

SEQ ID NO: 2460655 - RNA, 19 nt, Homo sapiens
  misc_RNA (1)...(19): siRNA sense strand
cagguaugagggaaggaaa

SEQ ID NO: 2460656 - RNA, 19 nt, Homo sapiens
  misc_RNA (1)...(19): siRNA sense strand
acggaaaaggagugaaaau

SEQ ID NO: 2460657 - RNA, 19 nt, Homo sapiens
  misc_RNA (1)...(19): siRNA sense strand
cacaagaggaauuuggcua

SEQ ID NO: 2460658 - RNA, 19 nt, Homo sapiens
  misc_RNA (1)...(19): siRNA sense strand
guuagaaguucaagccgau

SEQ ID NO: 2460659 - RNA, 19 nt, Homo sapiens
  misc_RNA (1)...(19): siRNA sense strand
cggaggcagugaagaggau

SEQ ID NO: 2460660 - RNA, 19 nt, Homo sapiens
  misc_RNA (1)...(19): siRNA sense strand
agucagacgaugugccaga

SEQ ID NO: 2460661 - RNA, 19 nt, Homo sapiens
  misc_RNA (1)...(19): siRNA sense strand
ugaugaagaugauggucca

SEQ ID NO: 2460662 - RNA, 19 nt, Homo sapiens
  misc_RNA (1)...(19): siRNA sense strand
gguggagaagccagaguau

SEQ ID NO: 2460663 - RNA, 19 nt, Homo sapiens
  misc_RNA (1)...(19): siRNA sense strand
aggucucaguuaugggcaa

SEQ ID NO: 2460664 - RNA, 19 nt, Homo sapiens
  misc_RNA (1)...(19): siRNA sense strand
aggaaaaccuccaaacaca

SEQ ID NO: 2460665 - RNA, 19 nt, Homo sapiens
  misc_RNA (1)...(19): siRNA sense strand
uccaaacacaagaggaauu

SEQ ID NO: 2460666 - RNA, 19 nt, Homo sapiens
  misc_RNA (1)...(19): siRNA sense strand
ucuccaguggcaagggaaa

SEQ ID NO: 2460667 - RNA, 19 nt, Homo sapiens
  misc_RNA (1)...(19): siRNA sense strand
gaugaaugauggaagcugu

SEQ ID NO: 2460668 - RNA, 19 nt, Homo sapiens
  misc_RNA (1)...(19): siRNA sense strand
aaguggacauugaagccaa

SEQ ID NO: 2460669 - RNA, 19 nt, Homo sapiens
  misc_RNA (1)...(19): siRNA sense strand
cucagauggcagagaauga

SEQ ID NO: 2460670 - RNA, 19 nt, Homo sapiens
  misc_RNA (1)...(19): siRNA sense strand
cagaaagacugccuggcca

SEQ ID NO: 2460671 - RNA, 19 nt, Homo sapiens
  misc_RNA (1)...(19): siRNA sense strand
cuguuggcuuuguaugaaa

SEQ ID NO: 2460672 - RNA, 19 nt, Homo sapiens
  misc_RNA (1)...(19): siRNA sense strand
guuuauguuggaaggaaga

SEQ ID NO: 2460673 - RNA, 19 nt, Homo sapiens
  misc_RNA (1)...(19): siRNA sense strand
cggaaaaggagugaaaauu

SEQ ID NO: 2460674 - RNA, 19 nt, Homo sapiens
  misc_RNA (1)...(19): siRNA sense strand
uggacuuaguguuaugcaa

SEQ ID NO: 2460675 - RNA, 19 nt, Homo sapiens
  misc_RNA (1)...(19): siRNA sense strand
aguucaagccgauguccaa

SEQ ID NO: 2460676 - RNA, 19 nt, Homo sapiens
  misc_RNA (1)...(19): siRNA sense strand
agaagguagugguggcgga

SEQ ID NO: 2460677 - RNA, 19 nt, Homo sapiens
  misc_RNA (1)...(19): siRNA sense strand
ccuagagaguucugaugca

SEQ ID NO: 2460678 - RNA, 19 nt, Homo sapiens
  misc_RNA (1)...(19): siRNA sense strand
gaagcuaacuugugagagg

SEQ ID NO: 2460679 - RNA, 19 nt, Homo sapiens
  misc_RNA (1)...(19): siRNA sense strand
agaucucagacuugcauua

SEQ ID NO: 2460680 - RNA, 19 nt, Homo sapiens
  misc_RNA (1)...(19): siRNA sense strand
aguuauugcugcaguuagu

SEQ ID NO: 2460681 - RNA, 19 nt, Homo sapiens
  misc_RNA (1)...(19): siRNA sense strand
agaaugaagaagaagguag

SEQ ID NO: 2460682 - RNA, 19 nt, Homo sapiens
  misc_RNA (1)...(19): siRNA sense strand
agccagucuuggugcaauu

SEQ ID NO: 2460683 - RNA, 19 nt, Homo sapiens
  misc_RNA (1)...(19): siRNA sense strand
ggcaggagguguuggcuca

SEQ ID NO: 2460684 - RNA, 19 nt, Homo sapiens
  misc_RNA (1)...(19): siRNA sense strand
ccaagcacacgcagggcua

SEQ ID NO: 2460685 - RNA, 19 nt, Homo sapiens
  misc_RNA (1)...(19): siRNA sense strand
ggaugaagcccgacuggca

SEQ ID NO: 2460686 - RNA, 19 nt, Homo sapiens
  misc_RNA (1)...(19): siRNA sense strand
gcaacagggaggaagcuga

SEQ ID NO: 2460687 - RNA, 19 nt, Homo sapiens
  misc_RNA (1)...(19): siRNA sense strand
ugaaugugguggaggcacu

SEQ ID NO: 2460688 - RNA, 19 nt, Homo sapiens
  misc_RNA (1)...(19): siRNA sense strand
ggccaugagggaacgacaa

SEQ ID NO: 2460689 - RNA, 19 nt, Homo sapiens
  misc_RNA (1)...(19): siRNA sense strand
uccacaaggagaagaaaga

SEQ ID NO: 2460690 - RNA, 19 nt, Homo sapiens
  misc_RNA (1)...(19): siRNA sense strand
cuuaaggccaugagggaac

SEQ ID NO: 2460691 - RNA, 19 nt, Homo sapiens
  misc_RNA (1)...(19): siRNA sense strand
gccucuuggugguuggcaa

SEQ ID NO: 2460692 - RNA, 19 nt, Homo sapiens
  misc_RNA (1)...(19): siRNA sense strand
ugaucugccuccugcgcua

SEQ ID NO: 2460693 - RNA, 19 nt, Homo sapiens
  misc_RNA (1)...(19): siRNA sense strand
ccauauaccaugagcgcau

SEQ ID NO: 2460694 - RNA, 19 nt, Homo sapiens
  misc_RNA (1)...(19): siRNA sense strand
ucaaagagauugugagcag

SEQ ID NO: 2460695 - RNA, 19 nt, Homo sapiens
  misc_RNA (1)...(19): siRNA sense strand
ggggaguaaaaguggauua

SEQ ID NO: 2460696 - RNA, 19 nt, Homo sapiens
  misc_RNA (1)...(19): siRNA sense strand
gcauugacguggaaggcca

SEQ ID NO: 2460697 - RNA, 19 nt, Homo sapiens
  misc_RNA (1)...(19): siRNA sense strand
ggacaaagugauugagcug

SEQ ID NO: 2460698 - RNA, 19 nt, Homo sapiens
  misc_RNA (1)...(19): siRNA sense strand
ugugcaauguggugggcau

SEQ ID NO: 2460699 - RNA, 19 nt, Homo sapiens
  misc_RNA (1)...(19): siRNA sense strand
cuggauggacaaagugauu

SEQ ID NO: 2460700 - RNA, 19 nt, Homo sapiens
  misc_RNA (1)...(19): siRNA sense strand
aagugauugagcugaauaa

SEQ ID NO: 2460701 - RNA, 19 nt, Homo sapiens
  misc_RNA (1)...(19): siRNA sense strand
agguugagauucugggugu

SEQ ID NO: 2460702 - RNA, 19 nt, Homo sapiens
  misc_RNA (1)...(19): siRNA sense strand
caugacugucuacgagaaa

SEQ ID NO: 2460703 - RNA, 19 nt, Homo sapiens
  misc_RNA (1)...(19): siRNA sense strand
ugacugucuacgagaaaga

SEQ ID NO: 2460704 - RNA, 19 nt, Homo sapiens
  misc_RNA (1)...(19): siRNA sense strand
ugaccaaggccaaaaggaa

SEQ ID NO: 2460705 - RNA, 19 nt, Homo sapiens
  misc_RNA (1)...(19): siRNA sense strand
aggcugugagguugagauu

SEQ ID NO: 2460706 - RNA, 19 nt, Homo sapiens
  misc_RNA (1)...(19): siRNA sense strand
gagaaagaagccaucccaa

SEQ ID NO: 2460707 - RNA, 19 nt, Homo sapiens
  misc_RNA (1)...(19): siRNA sense strand
cugcauuguuccagagcua

SEQ ID NO: 2460708 - RNA, 19 nt, Homo sapiens
  misc_RNA (1)...(19): siRNA sense strand
cauuaugggcagugggauu

SEQ ID NO: 2460709 - RNA, 19 nt, Homo sapiens
  misc_RNA (1)...(19): siRNA sense strand
ugggaaaggaagagacauu

SEQ ID NO: 2460710 - RNA, 19 nt, Homo sapiens
  misc_RNA (1)...(19): siRNA sense strand
cuacagaacacuggagcaa

SEQ ID NO: 2460711 - RNA, 19 nt, Homo sapiens
  misc_RNA (1)...(19): siRNA sense strand
cuugaagaacuuaggguau

SEQ ID NO: 2460712 - RNA, 19 nt, Homo sapiens
  misc_RNA (1)...(19): siRNA sense strand
gcauuguuccagagcuaaa

SEQ ID NO: 2460713 - RNA, 19 nt, Homo sapiens
  misc_RNA (1)...(19): siRNA sense strand
ucgugaaaguagaagaagu

SEQ ID NO: 2460714 - RNA, 19 nt, Homo sapiens
  misc_RNA (1)...(19): siRNA sense strand
gggccugcucaucgaguaa

SEQ ID NO: 2460715 - RNA, 19 nt, Homo sapiens
  misc_RNA (1)...(19): siRNA sense strand
ggaugauaacauuagcaau

SEQ ID NO: 2460716 - RNA, 19 nt, Homo sapiens
  misc_RNA (1)...(19): siRNA sense strand
gcugcaugguguaugaaaa

SEQ ID NO: 2460717 - RNA, 19 nt, Homo sapiens
  misc_RNA (1)...(19): siRNA sense strand
cuuuauuugaacuggcuaa

SEQ ID NO: 2460718 - RNA, 19 nt, Homo sapiens
  misc_RNA (1)...(19): siRNA sense strand
gaaacaggcugcauggugu

SEQ ID NO: 2460719 - RNA, 19 nt, Homo sapiens
  misc_RNA (1)...(19): siRNA sense strand
caggauggagauaaaggaa

SEQ ID NO: 2460720 - RNA, 19 nt, Homo sapiens
  misc_RNA (1)...(19): siRNA sense strand
gaguaauggugaaggccac

SEQ ID NO: 2460721 - RNA, 19 nt, Homo sapiens
  misc_RNA (1)...(19): siRNA sense strand
gguacaaccuccuuaggca

SEQ ID NO: 2460722 - RNA, 19 nt, Homo sapiens
  misc_RNA (1)...(19): siRNA sense strand
gcugacacguguacgccaa

SEQ ID NO: 2460723 - RNA, 19 nt, Homo sapiens
  misc_RNA (1)...(19): siRNA sense strand
ugaguauauuccagguaca

SEQ ID NO: 2460724 - RNA, 19 nt, Homo sapiens
  misc_RNA (1)...(19): siRNA sense strand
guagaaaauggucagauaa

SEQ ID NO: 2460725 - RNA, 19 nt, Homo sapiens
  misc_RNA (1)...(19): siRNA sense strand
gggaacaagucuuuggcac

SEQ ID NO: 2460726 - RNA, 19 nt, Homo sapiens
  misc_RNA (1)...(19): siRNA sense strand
gccaauuuacagugagcuu

SEQ ID NO: 2460727 - RNA, 19 nt, Homo sapiens
  misc_RNA (1)...(19): siRNA sense strand
cgugaaaguagaagaaguc

SEQ ID NO: 2460728 - RNA, 19 nt, Homo sapiens
  misc_RNA (1)...(19): siRNA sense strand
cauaaaguuucuaauggga

SEQ ID NO: 2460729 - RNA, 19 nt, Homo sapiens
  misc_RNA (1)...(19): siRNA sense strand
aguacaaggaagggaaaua

SEQ ID NO: 2460730 - RNA, 19 nt, Homo sapiens
  misc_RNA (1)...(19): siRNA sense strand
gggcuggaaauaugagcaa

SEQ ID NO: 2460731 - RNA, 19 nt, Homo sapiens
  misc_RNA (1)...(19): siRNA sense strand
agaaguacaaggaagggaa

SEQ ID NO: 2460732 - RNA, 19 nt, Homo sapiens
  misc_RNA (1)...(19): siRNA sense strand
cacacauggugaaggacaa

SEQ ID NO: 2460733 - RNA, 19 nt, Homo sapiens
  misc_RNA (1)...(19): siRNA sense strand
uguuuaacuccguggucaa

SEQ ID NO: 2460734 - RNA, 19 nt, Homo sapiens
  misc_RNA (1)...(19): siRNA sense strand
ccaucagagaggaggagua

SEQ ID NO: 2460735 - RNA, 19 nt, Homo sapiens
  misc_RNA (1)...(19): siRNA sense strand
ggaacagaauccauggaga

SEQ ID NO: 2460736 - RNA, 19 nt, Homo sapiens
  misc_RNA (1)...(19): siRNA sense strand
uggagaaccugguggagga

SEQ ID NO: 2460737 - RNA, 19 nt, Homo sapiens
  misc_RNA (1)...(19): siRNA sense strand
ccauggaugaccaggguau

SEQ ID NO: 2460738 - RNA, 19 nt, Homo sapiens
  misc_RNA (1)...(19): siRNA sense strand
acgaggagcuggugaccga

SEQ ID NO: 2460739 - RNA, 19 nt, Homo sapiens
  misc_RNA (1)...(19): siRNA sense strand
gcagcaaagugcagggccu

SEQ ID NO: 2460740 - RNA, 19 nt, Homo sapiens
  misc_RNA (1)...(19): siRNA sense strand
ccaauaaaucagaacagga

SEQ ID NO: 2460741 - RNA, 19 nt, Homo sapiens
  misc_RNA (1)...(19): siRNA sense strand
gcaagaacgccaauggugu

SEQ ID NO: 2460742 - RNA, 19 nt, Homo sapiens
  misc_RNA (1)...(19): siRNA sense strand
agaaccugguggaggagau

SEQ ID NO: 2460743 - RNA, 19 nt, Homo sapiens
  misc_RNA (1)...(19): siRNA sense strand
cugcugaggcccuggagau

SEQ ID NO: 2460744 - RNA, 19 nt, Homo sapiens
  misc_RNA (1)...(19): siRNA sense strand
agaucagcgacaugaagua

SEQ ID NO: 2460745 - RNA, 19 nt, Homo sapiens
  misc_RNA (1)...(19): siRNA sense strand
cauaaaguccugcugguga

SEQ ID NO: 2460746 - RNA, 19 nt, Homo sapiens
  misc_RNA (1)...(19): siRNA sense strand
ccgaggguguggaggaaag

SEQ ID NO: 2460747 - RNA, 19 nt, Homo sapiens
  misc_RNA (1)...(19): siRNA sense strand
cggccaggcuagauccaca

SEQ ID NO: 2460748 - RNA, 19 nt, Homo sapiens
  misc_RNA (1)...(19): siRNA sense strand
ccgagaaugaccuugaaca

SEQ ID NO: 2460749 - RNA, 19 nt, Homo sapiens
  misc_RNA (1)...(19): siRNA sense strand
cuaacagguucaagacacu

SEQ ID NO: 2460750 - RNA, 19 nt, Homo sapiens
  misc_RNA (1)...(19): siRNA sense strand
gcuggaugcuggugcccau

SEQ ID NO: 2460751 - RNA, 19 nt, Homo sapiens
  misc_RNA (1)...(19): siRNA sense strand
aggaaaggcauccgagaaa

SEQ ID NO: 2460752 - RNA, 19 nt, Homo sapiens
  misc_RNA (1)...(19): siRNA sense strand
gcaucuaaguuuaugggaa

SEQ ID NO: 2460753 - RNA, 19 nt, Homo sapiens
  misc_RNA (1)...(19): siRNA sense strand
ccaaagcagcugagagaga

SEQ ID NO: 2460754 - RNA, 19 nt, Homo sapiens
  misc_RNA (1)...(19): siRNA sense strand
gugaagaggaagagaacca

SEQ ID NO: 2460755 - RNA, 19 nt, Homo sapiens
  misc_RNA (1)...(19): siRNA sense strand
aggaacaagcugagaaaca

SEQ ID NO: 2460756 - RNA, 19 nt, Homo sapiens
  misc_RNA (1)...(19): siRNA sense strand
ugucaagaaaguagagaau

SEQ ID NO: 2460757 - RNA, 19 nt, Homo sapiens
  misc_RNA (1)...(19): siRNA sense strand
gcuuugaggaucagaggaa

SEQ ID NO: 2460758 - RNA, 19 nt, Homo sapiens
  misc_RNA (1)...(19): siRNA sense strand
cuggaaggauggugggaca

SEQ ID NO: 2460759 - RNA, 19 nt, Homo sapiens
  misc_RNA (1)...(19): siRNA sense strand
ggagaggagacaagaaaca

SEQ ID NO: 2460760 - RNA, 19 nt, Homo sapiens
  misc_RNA (1)...(19): siRNA sense strand
gaggaaagagaaaggguca

SEQ ID NO: 2460761 - RNA, 19 nt, Homo sapiens
  misc_RNA (1)...(19): siRNA sense strand
ccgagaaagcuuugaggau

SEQ ID NO: 2460762 - RNA, 19 nt, Homo sapiens
  misc_RNA (1)...(19): siRNA sense strand
aggaagagaaccaaaggaa

SEQ ID NO: 2460763 - RNA, 19 nt, Homo sapiens
  misc_RNA (1)...(19): siRNA sense strand
acucaaagcugaaaaggaa

SEQ ID NO: 2460764 - RNA, 19 nt, Homo sapiens
  misc_RNA (1)...(19): siRNA sense strand
gcugagaaacaaaguagaa

SEQ ID NO: 2460765 - RNA, 19 nt, Homo sapiens
  misc_RNA (1)...(19): siRNA sense strand
acauuguagccgaaagaua

SEQ ID NO: 2460766 - RNA, 19 nt, Homo sapiens
  misc_RNA (1)...(19): siRNA sense strand
gguaaagauguuugaagau

SEQ ID NO: 2460767 - RNA, 19 nt, Homo sapiens
  misc_RNA (1)...(19): siRNA sense strand
aaggaaacuaugaggaaaa

SEQ ID NO: 2460768 - RNA, 19 nt, Homo sapiens
  misc_RNA (1)...(19): siRNA sense strand
ggacauuguagccgaaaga

SEQ ID NO: 2460769 - RNA, 19 nt, Homo sapiens
  misc_RNA (1)...(19): siRNA sense strand
gaaacguguagaagagaau

SEQ ID NO: 2460770 - RNA, 19 nt, Homo sapiens
  misc_RNA (1)...(19): siRNA sense strand
ggguagagaaugaagacca

SEQ ID NO: 2460771 - RNA, 19 nt, Homo sapiens
  misc_RNA (1)...(19): siRNA sense strand
aaucaaaagccaucggaaa

SEQ ID NO: 2460772 - RNA, 19 nt, Homo sapiens
  misc_RNA (1)...(19): siRNA sense strand
ggaaaauagagcaagagaa

SEQ ID NO: 2460773 - RNA, 19 nt, Homo sapiens
  misc_RNA (1)...(19): siRNA sense strand
caccaagaacagugaagaa

SEQ ID NO: 2460774 - RNA, 19 nt, Homo sapiens
  misc_RNA (1)...(19): siRNA sense strand
aagcagagaugauggggaa

SEQ ID NO: 2460775 - RNA, 19 nt, Homo sapiens
  misc_RNA (1)...(19): siRNA sense strand
ggaaucacaaggaggaaga

SEQ ID NO: 2460776 - RNA, 19 nt, Homo sapiens
  misc_RNA (1)...(19): siRNA sense strand
aggaggaagaagaaagaga

SEQ ID NO: 2460777 - RNA, 19 nt, Homo sapiens
  misc_RNA (1)...(19): siRNA sense strand
agauaugcuacaacagaua

SEQ ID NO: 2460778 - RNA, 19 nt, Homo sapiens
  misc_RNA (1)...(19): siRNA sense strand
gaggaagaagaaagagaca

SEQ ID NO: 2460779 - RNA, 19 nt, Homo sapiens
  misc_RNA (1)...(19): siRNA sense strand
acccaugaggaaagagaaa

SEQ ID NO: 2460780 - RNA, 19 nt, Homo sapiens
  misc_RNA (1)...(19): siRNA sense strand
cuccaaagcagcugagaga

SEQ ID NO: 2460781 - RNA, 19 nt, Homo sapiens
  misc_RNA (1)...(19): siRNA sense strand
ccauaugacuucaccaaaa

SEQ ID NO: 2460782 - RNA, 19 nt, Homo sapiens
  misc_RNA (1)...(19): siRNA sense strand
agaaugaagaccagcaaga

SEQ ID NO: 2460783 - RNA, 19 nt, Homo sapiens
  misc_RNA (1)...(19): siRNA sense strand
gcaugaagaaacaguauca

SEQ ID NO: 2460784 - RNA, 19 nt, Homo sapiens
  misc_RNA (1)...(19): siRNA sense strand
cauaauggaaucugaugaa

SEQ ID NO: 2460785 - RNA, 19 nt, Homo sapiens
  misc_RNA (1)...(19): siRNA sense strand
cgggaacgguggaggaaac

SEQ ID NO: 2460786 - RNA, 19 nt, Homo sapiens
  misc_RNA (1)...(19): siRNA sense strand
agauccagauguucagaaa

SEQ ID NO: 2460787 - RNA, 19 nt, Homo sapiens
  misc_RNA (1)...(19): siRNA sense strand
ugaacaagaaguugauaga

SEQ ID NO: 2460788 - RNA, 19 nt, Homo sapiens
  misc_RNA (1)...(19): siRNA sense strand
agaagauuauagacgggaa

SEQ ID NO: 2460789 - RNA, 19 nt, Homo sapiens
  misc_RNA (1)...(19): siRNA sense strand
agaaacguguagaagagaa

SEQ ID NO: 2460790 - RNA, 19 nt, Homo sapiens
  misc_RNA (1)...(19): siRNA sense strand
ugggagaggagacaagaaa

SEQ ID NO: 2460791 - RNA, 19 nt, Homo sapiens
  misc_RNA (1)...(19): siRNA sense strand
uggcaauuugagagcuaaa

SEQ ID NO: 2460792 - RNA, 19 nt, Homo sapiens
  misc_RNA (1)...(19): siRNA sense strand
gauaugggucaauggaaau

SEQ ID NO: 2460793 - RNA, 19 nt, Homo sapiens
  misc_RNA (1)...(19): siRNA sense strand
ccugaagacuguagugugu

SEQ ID NO: 2460794 - RNA, 19 nt, Homo sapiens
  misc_RNA (1)...(19): siRNA sense strand
gagaaacaaaguagaaacu

SEQ ID NO: 2460795 - RNA, 19 nt, Homo sapiens
  misc_RNA (1)...(19): siRNA sense strand
gcuaaauucuugagacccu

SEQ ID NO: 2460796 - RNA, 19 nt, Homo sapiens
  misc_RNA (1)...(19): siRNA sense strand
cagcaagggcagaaaauuu

SEQ ID NO: 2460797 - RNA, 19 nt, Homo sapiens
  misc_RNA (1)...(19): siRNA sense strand
gaucagucuggaagaguau

SEQ ID NO: 2460798 - RNA, 19 nt, Homo sapiens
  misc_RNA (1)...(19): siRNA sense strand
cuacuuuguuggaugaaga

SEQ ID NO: 2460799 - RNA, 19 nt, Homo sapiens
  misc_RNA (1)...(19): siRNA sense strand
aaacugauggaaagagaau

SEQ ID NO: 2460800 - RNA, 19 nt, Homo sapiens
  misc_RNA (1)...(19): siRNA sense strand
agaucagucuggaagagua

SEQ ID NO: 2460801 - RNA, 19 nt, Homo sapiens
  misc_RNA (1)...(19): siRNA sense strand
ugaccaacccggaggugau

SEQ ID NO: 2460802 - RNA, 19 nt, Homo sapiens
  misc_RNA (1)...(19): siRNA sense strand
ccaaauugcagaaggcaug

SEQ ID NO: 2460803 - RNA, 19 nt, Homo sapiens
  misc_RNA (1)...(19): siRNA sense strand
uugcagaaggcauggcauu

SEQ ID NO: 2460804 - RNA, 19 nt, Homo sapiens
  misc_RNA (1)...(19): siRNA sense strand
ggacagcgccagaagccau

SEQ ID NO: 2460805 - RNA, 19 nt, Homo sapiens
  misc_RNA (1)...(19): siRNA sense strand
ccuucaauuuuguggccaa

SEQ ID NO: 2460806 - RNA, 19 nt, Homo sapiens
  misc_RNA (1)...(19): siRNA sense strand
aaacauuacaagauccgua

SEQ ID NO: 2460807 - RNA, 19 nt, Homo sapiens
  misc_RNA (1)...(19): siRNA sense strand
uggugaaacauuacaagau

SEQ ID NO: 2460808 - RNA, 19 nt, Homo sapiens
  misc_RNA (1)...(19): siRNA sense strand
cggugaagagccugaagca

SEQ ID NO: 2460809 - RNA, 19 nt, Homo sapiens
  misc_RNA (1)...(19): siRNA sense strand
gauugcagacuuuggccua

SEQ ID NO: 2460810 - RNA, 19 nt, Homo sapiens
  misc_RNA (1)...(19): siRNA sense strand
cuguuaacacccagagaaa

SEQ ID NO: 2460811 - RNA, 19 nt, Homo sapiens
  misc_RNA (1)...(19): siRNA sense strand
cugauaaacagucgagcaa

SEQ ID NO: 2460812 - RNA, 19 nt, Homo sapiens
  misc_RNA (1)...(19): siRNA sense strand
guugagaagaauaagcaaa

SEQ ID NO: 2460813 - RNA, 19 nt, Homo sapiens
  misc_RNA (1)...(19): siRNA sense strand
ggaugaaaccuauguugaa

SEQ ID NO: 2460814 - RNA, 19 nt, Homo sapiens
  misc_RNA (1)...(19): siRNA sense strand
auacaagaacaguggaaaa

SEQ ID NO: 2460815 - RNA, 19 nt, Homo sapiens
  misc_RNA (1)...(19): siRNA sense strand
cagaauaaaggauggacau

SEQ ID NO: 2460816 - RNA, 19 nt, Homo sapiens
  misc_RNA (1)...(19): siRNA sense strand
gauuauugagagaaggaau

SEQ ID NO: 2460817 - RNA, 19 nt, Homo sapiens
  misc_RNA (1)...(19): siRNA sense strand
cuauuaaagaccaagagaa

SEQ ID NO: 2460818 - RNA, 19 nt, Homo sapiens
  misc_RNA (1)...(19): siRNA sense strand
caacaugaaaguuuggcua

SEQ ID NO: 2460819 - RNA, 19 nt, Homo sapiens
  misc_RNA (1)...(19): siRNA sense strand
caagagaaccagaagcuga

SEQ ID NO: 2460820 - RNA, 19 nt, Homo sapiens
  misc_RNA (1)...(19): siRNA sense strand
uauuaaagaccaagagaac

SEQ ID NO: 2460821 - RNA, 19 nt, Homo sapiens
  misc_RNA (1)...(19): siRNA sense strand
uuaaagaccaagagaacca

SEQ ID NO: 2460822 - RNA, 19 nt, Homo sapiens
  misc_RNA (1)...(19): siRNA sense strand
agagaguuaucuagaugua

SEQ ID NO: 2460823 - RNA, 19 nt, Homo sapiens
  misc_RNA (1)...(19): siRNA sense strand
uguugaagaaauugcgaau

SEQ ID NO: 2460824 - RNA, 19 nt, Homo sapiens
  misc_RNA (1)...(19): siRNA sense strand
ugcaaggauuauugagaga

SEQ ID NO: 2460825 - RNA, 19 nt, Homo sapiens
  misc_RNA (1)...(19): siRNA sense strand
cagauaagagagacgccaa

SEQ ID NO: 2460826 - RNA, 19 nt, Homo sapiens
  misc_RNA (1)...(19): siRNA sense strand
aaauacaagaacaguggaa

SEQ ID NO: 2460827 - RNA, 19 nt, Homo sapiens
  misc_RNA (1)...(19): siRNA sense strand
uccucaggcuacagaauaa

SEQ ID NO: 2460828 - RNA, 19 nt, Homo sapiens
  misc_RNA (1)...(19): siRNA sense strand
acagaauaaaggauggaca

SEQ ID NO: 2460829 - RNA, 19 nt, Homo sapiens
  misc_RNA (1)...(19): siRNA sense strand
caggauaaggaaacugaau

SEQ ID NO: 2460830 - RNA, 19 nt, Homo sapiens
  misc_RNA (1)...(19): siRNA sense strand
caguuuuagaagagagaau

SEQ ID NO: 2460831 - RNA, 19 nt, Homo sapiens
  misc_RNA (1)...(19): siRNA sense strand
caccuauacaacugauaaa

SEQ ID NO: 2460832 - RNA, 19 nt, Homo sapiens
  misc_RNA (1)...(19): siRNA sense strand
aggauaaggaaacugaauu

SEQ ID NO: 2460833 - RNA, 19 nt, Homo sapiens
  misc_RNA (1)...(19): siRNA sense strand
uagcaaaucuaaauggauc

SEQ ID NO: 2460834 - RNA, 19 nt, Homo sapiens
  misc_RNA (1)...(19): siRNA sense strand
aagagaaccagaagcugaa

SEQ ID NO: 2460835 - RNA, 19 nt, Homo sapiens
  misc_RNA (1)...(19): siRNA sense strand
caguacaggauaaggaaac

SEQ ID NO: 2460836 - RNA, 19 nt, Homo sapiens
  misc_RNA (1)...(19): siRNA sense strand
gaacaguggaaaagcucua

SEQ ID NO: 2460837 - RNA, 19 nt, Homo sapiens
  misc_RNA (1)...(19): siRNA sense strand
agaauaagcaaaugguaag

SEQ ID NO: 2460838 - RNA, 19 nt, Homo sapiens
  misc_RNA (1)...(19): siRNA sense strand
agauaagagagacgccaau

SEQ ID NO: 2460839 - RNA, 19 nt, Homo sapiens
  misc_RNA (1)...(19): siRNA sense strand
ugguaagaauucuccaaga

SEQ ID NO: 2460840 - RNA, 19 nt, Homo sapiens
  misc_RNA (1)...(19): siRNA sense strand
ucaguugacauuaggaaaa

SEQ ID NO: 2460841 - RNA, 19 nt, Homo sapiens
  misc_RNA (1)...(19): siRNA sense strand
cuauaaaggaaacacuaga

SEQ ID NO: 2460842 - RNA, 19 nt, Homo sapiens
  misc_RNA (1)...(19): siRNA sense strand
acaguacaggauaaggaaa

SEQ ID NO: 2460843 - RNA, 19 nt, Homo sapiens
  misc_RNA (1)...(19): siRNA sense strand
cgucaagaggauagggaga

SEQ ID NO: 2460844 - RNA, 19 nt, Homo sapiens
  misc_RNA (1)...(19): siRNA sense strand
ggacagugcugccuggcua

SEQ ID NO: 2460845 - RNA, 19 nt, Homo sapiens
  misc_RNA (1)...(19): siRNA sense strand
agaagauggccaagugcaa

SEQ ID NO: 2460846 - RNA, 19 nt, Homo sapiens
  misc_RNA (1)...(19): siRNA sense strand
gcaguucaguuguggguga

SEQ ID NO: 2460847 - RNA, 19 nt, Homo sapiens
  misc_RNA (1)...(19): siRNA sense strand
agacaagagacugcagaaa

SEQ ID NO: 2460848 - RNA, 19 nt, Homo sapiens
  misc_RNA (1)...(19): siRNA sense strand
aauccaacucucagacaaa

SEQ ID NO: 2460849 - RNA, 19 nt, Homo sapiens
  misc_RNA (1)...(19): siRNA sense strand
cagcagaagaacaguuuua

SEQ ID NO: 2460850 - RNA, 19 nt, Homo sapiens
  misc_RNA (1)...(19): siRNA sense strand
ugccacagucgcagggaua

SEQ ID NO: 2460851 - RNA, 19 nt, Homo sapiens
  misc_RNA (1)...(19): siRNA sense strand
augagaaggcgcugcauau

SEQ ID NO: 2460852 - RNA, 19 nt, Homo sapiens
  misc_RNA (1)...(19): siRNA sense strand
acaccuacgauaagaugaa

SEQ ID NO: 2460853 - RNA, 19 nt, Homo sapiens
  misc_RNA (1)...(19): siRNA sense strand
gcagaaaagugaagagguc

SEQ ID NO: 2460854 - RNA, 19 nt, Homo sapiens
  misc_RNA (1)...(19): siRNA sense strand
cugccuggcuagagaagca

SEQ ID NO: 2460855 - RNA, 19 nt, Homo sapiens
  misc_RNA (1)...(19): siRNA sense strand
uggaagaggugcugcugca

SEQ ID NO: 2460856 - RNA, 19 nt, Homo sapiens
  misc_RNA (1)...(19): siRNA sense strand
gcuacaaggaggacaucga

SEQ ID NO: 2460857 - RNA, 19 nt, Homo sapiens
  misc_RNA (1)...(19): siRNA sense strand
agaugaaguugaaaggaag

SEQ ID NO: 2460858 - RNA, 19 nt, Homo sapiens
  misc_RNA (1)...(19): siRNA sense strand
ccgcagaguagaagaggcu

SEQ ID NO: 2460859 - RNA, 19 nt, Homo sapiens
  misc_RNA (1)...(19): siRNA sense strand
gguccgcagcacagaggua

SEQ ID NO: 2460860 - RNA, 19 nt, Homo sapiens
  misc_RNA (1)...(19): siRNA sense strand
gcaaauggcuacaaggagg

SEQ ID NO: 2460861 - RNA, 19 nt, Homo sapiens
  misc_RNA (1)...(19): siRNA sense strand
aaaggagcccggaggaaca

SEQ ID NO: 2460862 - RNA, 19 nt, Homo sapiens
  misc_RNA (1)...(19): siRNA sense strand
gcgucaacauagagugcgu

SEQ ID NO: 2460863 - RNA, 19 nt, Homo sapiens
  misc_RNA (1)...(19): siRNA sense strand
ccaucagccuggucaacau

SEQ ID NO: 2460864 - RNA, 19 nt, Homo sapiens
  misc_RNA (1)...(19): siRNA sense strand
gcagcacagagguagcaaa

SEQ ID NO: 2460865 - RNA, 19 nt, Homo sapiens
  misc_RNA (1)...(19): siRNA sense strand
ugcagaaagaagaguauca

SEQ ID NO: 2460866 - RNA, 19 nt, Homo sapiens
  misc_RNA (1)...(19): siRNA sense strand
ggaccaugcagguggcucu

SEQ ID NO: 2460867 - RNA, 19 nt, Homo sapiens
  misc_RNA (1)...(19): siRNA sense strand
cuuugaaggaagagugauc

SEQ ID NO: 2460868 - RNA, 19 nt, Homo sapiens
  misc_RNA (1)...(19): siRNA sense strand
ugccacaaguaaaggaguu

SEQ ID NO: 2460869 - RNA, 19 nt, Homo sapiens
  misc_RNA (1)...(19): siRNA sense strand
caacaaaggaauugggaac

SEQ ID NO: 2460870 - RNA, 19 nt, Homo sapiens
  misc_RNA (1)...(19): siRNA sense strand
aguuacaggacaugauuaa

SEQ ID NO: 2460871 - RNA, 19 nt, Homo sapiens
  misc_RNA (1)...(19): siRNA sense strand
agaugaagaaguugaugaa

SEQ ID NO: 2460872 - RNA, 19 nt, Homo sapiens
  misc_RNA (1)...(19): siRNA sense strand
aagcagauauugaugguga

SEQ ID NO: 2460873 - RNA, 19 nt, Homo sapiens
  misc_RNA (1)...(19): siRNA sense strand
gaugaaaugaucagggaag

SEQ ID NO: 2460874 - RNA, 19 nt, Homo sapiens
  misc_RNA (1)...(19): siRNA sense strand
acaacaaaggaauugggaa

SEQ ID NO: 2460875 - RNA, 19 nt, Homo sapiens
  misc_RNA (1)...(19): siRNA sense strand
cagacagugaagaagaaau

SEQ ID NO: 2460876 - RNA, 19 nt, Homo sapiens
  misc_RNA (1)...(19): siRNA sense strand
agaaguuaacagaugaaga

SEQ ID NO: 2460877 - RNA, 19 nt, Homo sapiens
  misc_RNA (1)...(19): siRNA sense strand
uuaaugaaguagaugcuga

SEQ ID NO: 2460878 - RNA, 19 nt, Homo sapiens
  misc_RNA (1)...(19): siRNA sense strand
cugaagagcagauugcaga

SEQ ID NO: 2460879 - RNA, 19 nt, Homo sapiens
  misc_RNA (1)...(19): siRNA sense strand
agagaaguuaacagaugaa

SEQ ID NO: 2460880 - RNA, 19 nt, Homo sapiens
  misc_RNA (1)...(19): siRNA sense strand
agauauugauggugauggu

SEQ ID NO: 2460881 - RNA, 19 nt, Homo sapiens
  misc_RNA (1)...(19): siRNA sense strand
agaaauuagagaagcauuc

SEQ ID NO: 2460882 - RNA, 19 nt, Homo sapiens
  misc_RNA (1)...(19): siRNA sense strand
aaugaaagacacagacagu

SEQ ID NO: 2460883 - RNA, 19 nt, Homo sapiens
  misc_RNA (1)...(19): siRNA sense strand
gaagcagaguuacaggaca

SEQ ID NO: 2460884 - RNA, 19 nt, Homo sapiens
  misc_RNA (1)...(19): siRNA sense strand
ccugaauuucugacaauga

SEQ ID NO: 2460885 - RNA, 19 nt, Homo sapiens
  misc_RNA (1)...(19): siRNA sense strand
ccaacugacugaagagcag

SEQ ID NO: 2460886 - RNA, 19 nt, Homo sapiens
  misc_RNA (1)...(19): siRNA sense strand
uggaaagauaugaagacaa

SEQ ID NO: 2460887 - RNA, 19 nt, Homo sapiens
  misc_RNA (1)...(19): siRNA sense strand
ggauuaaaguucaggaggu

SEQ ID NO: 2460888 - RNA, 19 nt, Homo sapiens
  misc_RNA (1)...(19): siRNA sense strand
gaggaaaagaagaguguau

SEQ ID NO: 2460889 - RNA, 19 nt, Homo sapiens
  misc_RNA (1)...(19): siRNA sense strand
cguuaaugucucuaaggaa

SEQ ID NO: 2460890 - RNA, 19 nt, Homo sapiens
  misc_RNA (1)...(19): siRNA sense strand
aacagagagcuuugagaaa

SEQ ID NO: 2460891 - RNA, 19 nt, Homo sapiens
  misc_RNA (1)...(19): siRNA sense strand
ggugcaaagaaacagguua

SEQ ID NO: 2460892 - RNA, 19 nt, Homo sapiens
  misc_RNA (1)...(19): siRNA sense strand
gggaaagguuauuuuggaa

SEQ ID NO: 2460893 - RNA, 19 nt, Homo sapiens
  misc_RNA (1)...(19): siRNA sense strand
acugguugcuaaauggaaa

SEQ ID NO: 2460894 - RNA, 19 nt, Homo sapiens
  misc_RNA (1)...(19): siRNA sense strand
ggaaagguuauuuuggaaa

SEQ ID NO: 2460895 - RNA, 19 nt, Homo sapiens
  misc_RNA (1)...(19): siRNA sense strand
gcucuaugggaaagguuau

SEQ ID NO: 2460896 - RNA, 19 nt, Homo sapiens
  misc_RNA (1)...(19): siRNA sense strand
ugaggaaugcggaggacau

SEQ ID NO: 2460897 - RNA, 19 nt, Homo sapiens
  misc_RNA (1)...(19): siRNA sense strand
gguuaauaugcagaagaaa

SEQ ID NO: 2460898 - RNA, 19 nt, Homo sapiens
  misc_RNA (1)...(19): siRNA sense strand
cgagcuaguugaugaccau

SEQ ID NO: 2460899 - RNA, 19 nt, Homo sapiens
  misc_RNA (1)...(19): siRNA sense strand
guauuuacuaugagaagga

SEQ ID NO: 2460900 - RNA, 19 nt, Homo sapiens
  misc_RNA (1)...(19): siRNA sense strand
guuaaugucucuaaggaac

SEQ ID NO: 2460901 - RNA, 19 nt, Homo sapiens
  misc_RNA (1)...(19): siRNA sense strand
aggcucaagugcaugacaa

SEQ ID NO: 2460902 - RNA, 19 nt, Homo sapiens
  misc_RNA (1)...(19): siRNA sense strand
aagaagaguguaugagacu

SEQ ID NO: 2460903 - RNA, 19 nt, Homo sapiens
  misc_RNA (1)...(19): siRNA sense strand
acgagagaggagugaccaa

SEQ ID NO: 2460904 - RNA, 19 nt, Homo sapiens
  misc_RNA (1)...(19): siRNA sense strand
gagugugccaugagcgaga

SEQ ID NO: 2460905 - RNA, 19 nt, Homo sapiens
  misc_RNA (1)...(19): siRNA sense strand
caaaugaggaauuggugca

SEQ ID NO: 2460906 - RNA, 19 nt, Homo sapiens
  misc_RNA (1)...(19): siRNA sense strand
acuaugacugacaaggaaa

SEQ ID NO: 2460907 - RNA, 19 nt, Homo sapiens
  misc_RNA (1)...(19): siRNA sense strand
agucaggugguguggguga

SEQ ID NO: 2460908 - RNA, 19 nt, Homo sapiens
  misc_RNA (1)...(19): siRNA sense strand
ucaccagaauguaugaaaa

SEQ ID NO: 2460909 - RNA, 19 nt, Homo sapiens
  misc_RNA (1)...(19): siRNA sense strand
gauucugagucgauggguu

SEQ ID NO: 2460910 - RNA, 19 nt, Homo sapiens
  misc_RNA (1)...(19): siRNA sense strand
ucacaauuucagauccuaa

SEQ ID NO: 2460911 - RNA, 19 nt, Homo sapiens
  misc_RNA (1)...(19): siRNA sense strand
auucugagucgauggguuu

SEQ ID NO: 2460912 - RNA, 19 nt, Homo sapiens
  misc_RNA (1)...(19): siRNA sense strand
cgauagugaagcucuggaa

SEQ ID NO: 2460913 - RNA, 19 nt, Homo sapiens
  misc_RNA (1)...(19): siRNA sense strand
aggcagaccaacagggaaa

SEQ ID NO: 2460914 - RNA, 19 nt, Homo sapiens
  misc_RNA (1)...(19): siRNA sense strand
cagaaauggaagaggaaaa

SEQ ID NO: 2460915 - RNA, 19 nt, Homo sapiens
  misc_RNA (1)...(19): siRNA sense strand
gagaagaggaagaagaaaa

SEQ ID NO: 2460916 - RNA, 19 nt, Homo sapiens
  misc_RNA (1)...(19): siRNA sense strand
ucacaaagagagaggaaaa

SEQ ID NO: 2460917 - RNA, 19 nt, Homo sapiens
  misc_RNA (1)...(19): siRNA sense strand
gaauuaaagaagaggacau

SEQ ID NO: 2460918 - RNA, 19 nt, Homo sapiens
  misc_RNA (1)...(19): siRNA sense strand
acaaagagacagaagaaaa

SEQ ID NO: 2460919 - RNA, 19 nt, Homo sapiens
  misc_RNA (1)...(19): siRNA sense strand
gggcugaagcugaagaaaa

SEQ ID NO: 2460920 - RNA, 19 nt, Homo sapiens
  misc_RNA (1)...(19): siRNA sense strand
accaagaacaagaagauaa

SEQ ID NO: 2460921 - RNA, 19 nt, Homo sapiens
  misc_RNA (1)...(19): siRNA sense strand
ccaauggagaagaggaaga

SEQ ID NO: 2460922 - RNA, 19 nt, Homo sapiens
  misc_RNA (1)...(19): siRNA sense strand
gccuaagggaucaaggaaa

SEQ ID NO: 2460923 - RNA, 19 nt, Homo sapiens
  misc_RNA (1)...(19): siRNA sense strand
ggcagagucaagaggguaa

SEQ ID NO: 2460924 - RNA, 19 nt, Homo sapiens
  misc_RNA (1)...(19): siRNA sense strand
augaauuugaucaggguaa

SEQ ID NO: 2460925 - RNA, 19 nt, Homo sapiens
  misc_RNA (1)...(19): siRNA sense strand
auugaggagcaaagagaaa

SEQ ID NO: 2460926 - RNA, 19 nt, Homo sapiens
  misc_RNA (1)...(19): siRNA sense strand
acagcaagcaggaggaaga

SEQ ID NO: 2460927 - RNA, 19 nt, Homo sapiens
  misc_RNA (1)...(19): siRNA sense strand
caguugaacaggagcagua

SEQ ID NO: 2460928 - RNA, 19 nt, Homo sapiens
  misc_RNA (1)...(19): siRNA sense strand
uggagaagaggaagaagaa

SEQ ID NO: 2460929 - RNA, 19 nt, Homo sapiens
  misc_RNA (1)...(19): siRNA sense strand
ccaacaaggauaagcacau

SEQ ID NO: 2460930 - RNA, 19 nt, Homo sapiens
  misc_RNA (1)...(19): siRNA sense strand
caaugauaaccaagaaaga

SEQ ID NO: 2460931 - RNA, 19 nt, Homo sapiens
  misc_RNA (1)...(19): siRNA sense strand
agaagaggacauagaugaa

SEQ ID NO: 2460932 - RNA, 19 nt, Homo sapiens
  misc_RNA (1)...(19): siRNA sense strand
ccuaagggaucaaggaaac

SEQ ID NO: 2460933 - RNA, 19 nt, Homo sapiens
  misc_RNA (1)...(19): siRNA sense strand
ggcugaagcugaagaaaau

SEQ ID NO: 2460934 - RNA, 19 nt, Homo sapiens
  misc_RNA (1)...(19): siRNA sense strand
ccaagaaagcagagaacuc

SEQ ID NO: 2460935 - RNA, 19 nt, Homo sapiens
  misc_RNA (1)...(19): siRNA sense strand
ccgacaaaugcaagauuau

SEQ ID NO: 2460936 - RNA, 19 nt, Homo sapiens
  misc_RNA (1)...(19): siRNA sense strand
agaaaguaucacaaagaga

SEQ ID NO: 2460937 - RNA, 19 nt, Homo sapiens
  misc_RNA (1)...(19): siRNA sense strand
aagcagagaaauaaaguca

SEQ ID NO: 2460938 - RNA, 19 nt, Homo sapiens
  misc_RNA (1)...(19): siRNA sense strand
uggauagagucuugacaca

SEQ ID NO: 2460939 - RNA, 19 nt, Homo sapiens
  misc_RNA (1)...(19): siRNA sense strand
uaucacaaagagagaggaa

SEQ ID NO: 2460940 - RNA, 19 nt, Homo sapiens
  misc_RNA (1)...(19): siRNA sense strand
cuaaaugagaagcagagaa

SEQ ID NO: 2460941 - RNA, 19 nt, Homo sapiens
  misc_RNA (1)...(19): siRNA sense strand
uuaaagaagaggacauaga

SEQ ID NO: 2460942 - RNA, 19 nt, Homo sapiens
  misc_RNA (1)...(19): siRNA sense strand
uaaccaagaaagaaagaca

SEQ ID NO: 2460943 - RNA, 19 nt, Homo sapiens
  misc_RNA (1)...(19): siRNA sense strand
augcagaaauggaagagga

SEQ ID NO: 2460944 - RNA, 19 nt, Homo sapiens
  misc_RNA (1)...(19): siRNA sense strand
gccuagaagcuaucagcaa

SEQ ID NO: 2460945 - RNA, 19 nt, Homo sapiens
  misc_RNA (1)...(19): siRNA sense strand
agucagcagaacagggcaa

SEQ ID NO: 2460946 - RNA, 19 nt, Homo sapiens
  misc_RNA (1)...(19): siRNA sense strand
ggagaagaggaagaagaaa

SEQ ID NO: 2460947 - RNA, 19 nt, Homo sapiens
  misc_RNA (1)...(19): siRNA sense strand
guuuagugaacuugaccaa

SEQ ID NO: 2460948 - RNA, 19 nt, Homo sapiens
  misc_RNA (1)...(19): siRNA sense strand
gcagaaauggaagaggaaa

SEQ ID NO: 2460949 - RNA, 19 nt, Homo sapiens
  misc_RNA (1)...(19): siRNA sense strand
auggagaagaggaagaaga

SEQ ID NO: 2460950 - RNA, 19 nt, Homo sapiens
  misc_RNA (1)...(19): siRNA sense strand
cagcaaccacaaagagaca

SEQ ID NO: 2460951 - RNA, 19 nt, Homo sapiens
  misc_RNA (1)...(19): siRNA sense strand
ugagaagcagagaaauaaa

SEQ ID NO: 2460952 - RNA, 19 nt, Homo sapiens
  misc_RNA (1)...(19): siRNA sense strand
gagagcaccaagaggccaa

SEQ ID NO: 2460953 - RNA, 19 nt, Homo sapiens
  misc_RNA (1)...(19): siRNA sense strand
ccaugaacagucagcagaa

SEQ ID NO: 2460954 - RNA, 19 nt, Homo sapiens
  misc_RNA (1)...(19): siRNA sense strand
agaggaaaaccaagaacaa

SEQ ID NO: 2460955 - RNA, 19 nt, Homo sapiens
  misc_RNA (1)...(19): siRNA sense strand
ugaucaaguuuguggcacu

SEQ ID NO: 2460956 - RNA, 19 nt, Homo sapiens
  misc_RNA (1)...(19): siRNA sense strand
agagacuggcucaagaaua

SEQ ID NO: 2460957 - RNA, 19 nt, Homo sapiens
  misc_RNA (1)...(19): siRNA sense strand
aagaggacauagaugaaaa

SEQ ID NO: 2460958 - RNA, 19 nt, Homo sapiens
  misc_RNA (1)...(19): siRNA sense strand
uaaacauagccaaggccua

SEQ ID NO: 2460959 - RNA, 19 nt, Homo sapiens
  misc_RNA (1)...(19): siRNA sense strand
accaagagcaggauccaaa

SEQ ID NO: 2460960 - RNA, 19 nt, Homo sapiens
  misc_RNA (1)...(19): siRNA sense strand
caagaaacugaauggcaga

SEQ ID NO: 2460961 - RNA, 19 nt, Homo sapiens
  misc_RNA (1)...(19): siRNA sense strand
cgaugaugauggcgaugau

SEQ ID NO: 2460962 - RNA, 19 nt, Homo sapiens
  misc_RNA (1)...(19): siRNA sense strand
guuuaugggcugaagcuga

SEQ ID NO: 2460963 - RNA, 19 nt, Homo sapiens
  misc_RNA (1)...(19): siRNA sense strand
cuaaccaacaagaaaguau

SEQ ID NO: 2460964 - RNA, 19 nt, Homo sapiens
  misc_RNA (1)...(19): siRNA sense strand
aaauugaggagcaaagaga

SEQ ID NO: 2460965 - RNA, 19 nt, Homo sapiens
  misc_RNA (1)...(19): siRNA sense strand
gaaaaugcaucgaacguca

SEQ ID NO: 2460966 - RNA, 19 nt, Homo sapiens
  misc_RNA (1)...(19): siRNA sense strand
aaacugaauggcagaguca

SEQ ID NO: 2460967 - RNA, 19 nt, Homo sapiens
  misc_RNA (1)...(19): siRNA sense strand
agucaaaagaggaaagcca

SEQ ID NO: 2460968 - RNA, 19 nt, Homo sapiens
  misc_RNA (1)...(19): siRNA sense strand
accaagaacaaccuagaaa

SEQ ID NO: 2460969 - RNA, 19 nt, Homo sapiens
  misc_RNA (1)...(19): siRNA sense strand
gagcaguaaacauagccaa

SEQ ID NO: 2460970 - RNA, 19 nt, Homo sapiens
  misc_RNA (1)...(19): siRNA sense strand
gggccacugcuuuggaauu

SEQ ID NO: 2460971 - RNA, 19 nt, Homo sapiens
  misc_RNA (1)...(19): siRNA sense strand
acuaaagucaaaagaggaa

SEQ ID NO: 2460972 - RNA, 19 nt, Homo sapiens
  misc_RNA (1)...(19): siRNA sense strand
ugcagaaauggaagaggaa

SEQ ID NO: 2460973 - RNA, 19 nt, Homo sapiens
  misc_RNA (1)...(19): siRNA sense strand
aaggaaaccaagagcagga

SEQ ID NO: 2460974 - RNA, 19 nt, Homo sapiens
  misc_RNA (1)...(19): siRNA sense strand
ugugagaagaugagcaaua

SEQ ID NO: 2460975 - RNA, 19 nt, Homo sapiens
  misc_RNA (1)...(19): siRNA sense strand
ccgauaacuaugagaaauu

SEQ ID NO: 2460976 - RNA, 19 nt, Homo sapiens
  misc_RNA (1)...(19): siRNA sense strand
acucggaagaagaaggaua

SEQ ID NO: 2460977 - RNA, 19 nt, Homo sapiens
  misc_RNA (1)...(19): siRNA sense strand
cagcaugugacgagauaau

SEQ ID NO: 2460978 - RNA, 19 nt, Homo sapiens
  misc_RNA (1)...(19): siRNA sense strand
caguuuggucagaggacaa

SEQ ID NO: 2460979 - RNA, 19 nt, Homo sapiens
  misc_RNA (1)...(19): siRNA sense strand
agaccgaguuaaagcaaaa

SEQ ID NO: 2460980 - RNA, 19 nt, Homo sapiens
  misc_RNA (1)...(19): siRNA sense strand
cagaagauugugagaagau

SEQ ID NO: 2460981 - RNA, 19 nt, Homo sapiens
  misc_RNA (1)...(19): siRNA sense strand
agaaagaagcacugggaag

SEQ ID NO: 2460982 - RNA, 19 nt, Homo sapiens
  misc_RNA (1)...(19): siRNA sense strand
ggucagaggacaacaaaau

SEQ ID NO: 2460983 - RNA, 19 nt, Homo sapiens
  misc_RNA (1)...(19): siRNA sense strand
guaaugagcugcuggucga

SEQ ID NO: 2460984 - RNA, 19 nt, Homo sapiens
  misc_RNA (1)...(19): siRNA sense strand
cugggaggacagagguaua

SEQ ID NO: 2460985 - RNA, 19 nt, Homo sapiens
  misc_RNA (1)...(19): siRNA sense strand
gggcuucgguggauggaga

SEQ ID NO: 2460986 - RNA, 19 nt, Homo sapiens
  misc_RNA (1)...(19): siRNA sense strand
gcacagaagcugagggucg

SEQ ID NO: 2460987 - RNA, 19 nt, Homo sapiens
  misc_RNA (1)...(19): siRNA sense strand
agaccugaaaccagagcaa

SEQ ID NO: 2460988 - RNA, 19 nt, Homo sapiens
  misc_RNA (1)...(19): siRNA sense strand
cugugaaaccuguggggaa

SEQ ID NO: 2460989 - RNA, 19 nt, Homo sapiens
  misc_RNA (1)...(19): siRNA sense strand
guucgggauucgauggauu

SEQ ID NO: 2460990 - RNA, 19 nt, Homo sapiens
  misc_RNA (1)...(19): siRNA sense strand
aagaugagcaauaugggaa

SEQ ID NO: 2460991 - RNA, 19 nt, Homo sapiens
  misc_RNA (1)...(19): siRNA sense strand
ugauaaugagguacgguau

SEQ ID NO: 2460992 - RNA, 19 nt, Homo sapiens
  misc_RNA (1)...(19): siRNA sense strand
cagugaagaauuuuggaaa

SEQ ID NO: 2460993 - RNA, 19 nt, Homo sapiens
  misc_RNA (1)...(19): siRNA sense strand
cgauggauucuuuggcauu

SEQ ID NO: 2460994 - RNA, 19 nt, Homo sapiens
  misc_RNA (1)...(19): siRNA sense strand
cuuugagugaagaggagaa

SEQ ID NO: 2460995 - RNA, 19 nt, Homo sapiens
  misc_RNA (1)...(19): siRNA sense strand
ccauggggcuucaggguau

SEQ ID NO: 2460996 - RNA, 19 nt, Homo sapiens
  misc_RNA (1)...(19): siRNA sense strand
aggaauuggaacuggacca

SEQ ID NO: 2460997 - RNA, 19 nt, Homo sapiens
  misc_RNA (1)...(19): siRNA sense strand
agagcaaaguguucgggau

SEQ ID NO: 2460998 - RNA, 19 nt, Homo sapiens
  misc_RNA (1)...(19): siRNA sense strand
cagccuccgaugagugaaa

SEQ ID NO: 2460999 - RNA, 19 nt, Homo sapiens
  misc_RNA (1)...(19): siRNA sense strand
agugugguuugaagauaaa

SEQ ID NO: 2461000 - RNA, 19 nt, Homo sapiens
  misc_RNA (1)...(19): siRNA sense strand
gcagaguagagcaggaaac

SEQ ID NO: 2461001 - RNA, 19 nt, Homo sapiens
  misc_RNA (1)...(19): siRNA sense strand
acacagugguaugaagauu

SEQ ID NO: 2461002 - RNA, 19 nt, Homo sapiens
  misc_RNA (1)...(19): siRNA sense strand
acaacaaaauccaagaaga

SEQ ID NO: 2461003 - RNA, 19 nt, Homo sapiens
  misc_RNA (1)...(19): siRNA sense strand
cagcccaaugagauggaua

SEQ ID NO: 2461004 - RNA, 19 nt, Homo sapiens
  misc_RNA (1)...(19): siRNA sense strand
gggaacuaugacauugaaa

SEQ ID NO: 2461005 - RNA, 19 nt, Homo sapiens
  misc_RNA (1)...(19): siRNA sense strand
cugcagaacccaggaauga

SEQ ID NO: 2461006 - RNA, 19 nt, Homo sapiens
  misc_RNA (1)...(19): siRNA sense strand
ccugaaucuuguuacagaa

SEQ ID NO: 2461007 - RNA, 19 nt, Homo sapiens
  misc_RNA (1)...(19): siRNA sense strand
ccgauuauggccugcagaa

SEQ ID NO: 2461008 - RNA, 19 nt, Homo sapiens
  misc_RNA (1)...(19): siRNA sense strand
cggaagaagaaggauauuu

SEQ ID NO: 2461009 - RNA, 19 nt, Homo sapiens
  misc_RNA (1)...(19): siRNA sense strand
ccagaagacccugaagaau

SEQ ID NO: 2461010 - RNA, 19 nt, Homo sapiens
  misc_RNA (1)...(19): siRNA sense strand
augaugaaacacaguggua

SEQ ID NO: 2461011 - RNA, 19 nt, Homo sapiens
  misc_RNA (1)...(19): siRNA sense strand
cugaaucuuguuacagaaa

SEQ ID NO: 2461012 - RNA, 19 nt, Homo sapiens
  misc_RNA (1)...(19): siRNA sense strand
gagcagugugguuugaaga

SEQ ID NO: 2461013 - RNA, 19 nt, Homo sapiens
  misc_RNA (1)...(19): siRNA sense strand
uccagaagacccugaagaa

SEQ ID NO: 2461014 - RNA, 19 nt, Homo sapiens
  misc_RNA (1)...(19): siRNA sense strand
gaaaacaagccaaggccau

SEQ ID NO: 2461015 - RNA, 19 nt, Homo sapiens
  misc_RNA (1)...(19): siRNA sense strand
gaagaaagaagcacuggga

SEQ ID NO: 2461016 - RNA, 19 nt, Homo sapiens
  misc_RNA (1)...(19): siRNA sense strand
aggauauuuucuuggacaa

SEQ ID NO: 2461017 - RNA, 19 nt, Homo sapiens
  misc_RNA (1)...(19): siRNA sense strand
cuugcuuaccagaggaaaa

SEQ ID NO: 2461018 - RNA, 19 nt, Homo sapiens
  misc_RNA (1)...(19): siRNA sense strand
accacaugauaaugaggua

SEQ ID NO: 2461019 - RNA, 19 nt, Homo sapiens
  misc_RNA (1)...(19): siRNA sense strand
cggagagaagcaucggauu

SEQ ID NO: 2461020 - RNA, 19 nt, Homo sapiens
  misc_RNA (1)...(19): siRNA sense strand
uaugcggaguacugugaaa

SEQ ID NO: 2461021 - RNA, 19 nt, Homo sapiens
  misc_RNA (1)...(19): siRNA sense strand
ggcugaucaugaagauuau

SEQ ID NO: 2461022 - RNA, 19 nt, Homo sapiens
  misc_RNA (1)...(19): siRNA sense strand
augcugaucucuacggaca

SEQ ID NO: 2461023 - RNA, 19 nt, Homo sapiens
  misc_RNA (1)...(19): siRNA sense strand
guuugauacacuugugaaa

SEQ ID NO: 2461024 - RNA, 19 nt, Homo sapiens
  misc_RNA (1)...(19): siRNA sense strand
guggauuauauaagggauu

SEQ ID NO: 2461025 - RNA, 19 nt, Homo sapiens
  misc_RNA (1)...(19): siRNA sense strand
uggcauaugaauugcugaa

SEQ ID NO: 2461026 - RNA, 19 nt, Homo sapiens
  misc_RNA (1)...(19): siRNA sense strand
gaaagaaggcgucggugga

SEQ ID NO: 2461027 - RNA, 19 nt, Homo sapiens
  misc_RNA (1)...(19): siRNA sense strand
agauguaaucacaaagaca

SEQ ID NO: 2461028 - RNA, 19 nt, Homo sapiens
  misc_RNA (1)...(19): siRNA sense strand
ugcugaaguugaaguacaa

SEQ ID NO: 2461029 - RNA, 19 nt, Homo sapiens
  misc_RNA (1)...(19): siRNA sense strand
aguugagcacaguagaaua

SEQ ID NO: 2461030 - RNA, 19 nt, Homo sapiens
  misc_RNA (1)...(19): siRNA sense strand
auauauaucuguugcagca

SEQ ID NO: 2461031 - RNA, 19 nt, Homo sapiens
  misc_RNA (1)...(19): siRNA sense strand
ccuuugugguauaugaaaa

SEQ ID NO: 2461032 - RNA, 19 nt, Homo sapiens
  misc_RNA (1)...(19): siRNA sense strand
aggaguaaccccaaauaua

SEQ ID NO: 2461033 - RNA, 19 nt, Homo sapiens
  misc_RNA (1)...(19): siRNA sense strand
cacaaagacauggaggaaa

SEQ ID NO: 2461034 - RNA, 19 nt, Homo sapiens
  misc_RNA (1)...(19): siRNA sense strand
cguuuagaggcaacagaau

SEQ ID NO: 2461035 - RNA, 19 nt, Homo sapiens
  misc_RNA (1)...(19): siRNA sense strand
ggauuggaacugagaccga

SEQ ID NO: 2461036 - RNA, 19 nt, Homo sapiens
  misc_RNA (1)...(19): siRNA sense strand
aacagaaggaagagcugaa

SEQ ID NO: 2461037 - RNA, 19 nt, Homo sapiens
  misc_RNA (1)...(19): siRNA sense strand
cgcucgaccucgugaagau

SEQ ID NO: 2461038 - RNA, 19 nt, Homo sapiens
  misc_RNA (1)...(19): siRNA sense strand
cagugguguaauagaugua

SEQ ID NO: 2461039 - RNA, 19 nt, Homo sapiens
  misc_RNA (1)...(19): siRNA sense strand
uagcagauucaaagagaaa

SEQ ID NO: 2461040 - RNA, 19 nt, Homo sapiens
  misc_RNA (1)...(19): siRNA sense strand
guuccagaaucgagaagaa

SEQ ID NO: 2461041 - RNA, 19 nt, Homo sapiens
  misc_RNA (1)...(19): siRNA sense strand
agaaaaggccacuggaaaa

SEQ ID NO: 2461042 - RNA, 19 nt, Homo sapiens
  misc_RNA (1)...(19): siRNA sense strand
ccggaaaacacuaaagaaa

SEQ ID NO: 2461043 - RNA, 19 nt, Homo sapiens
  misc_RNA (1)...(19): siRNA sense strand
cggaaaacacuaaagaaaa

SEQ ID NO: 2461044 - RNA, 19 nt, Homo sapiens
  misc_RNA (1)...(19): siRNA sense strand
agagaaagaaucagcauau

SEQ ID NO: 2461045 - RNA, 19 nt, Homo sapiens
  misc_RNA (1)...(19): siRNA sense strand
ccagaaucgagaagaaauu

SEQ ID NO: 2461046 - RNA, 19 nt, Homo sapiens
  misc_RNA (1)...(19): siRNA sense strand
gcgaacaaccaaagcaaaa

SEQ ID NO: 2461047 - RNA, 19 nt, Homo sapiens
  misc_RNA (1)...(19): siRNA sense strand
gcagauucaaagagaaaga

SEQ ID NO: 2461048 - RNA, 19 nt, Homo sapiens
  misc_RNA (1)...(19): siRNA sense strand
acuaaaagccuaugaagaa

SEQ ID NO: 2461049 - RNA, 19 nt, Homo sapiens
  misc_RNA (1)...(19): siRNA sense strand
gguuaagauuccuacagaa

SEQ ID NO: 2461050 - RNA, 19 nt, Homo sapiens
  misc_RNA (1)...(19): siRNA sense strand
cagugauaauugucugaaa

SEQ ID NO: 2461051 - RNA, 19 nt, Homo sapiens
  misc_RNA (1)...(19): siRNA sense strand
ugguucauguuguggauaa

SEQ ID NO: 2461052 - RNA, 19 nt, Homo sapiens
  misc_RNA (1)...(19): siRNA sense strand
guaaugagcagaaggcaga

SEQ ID NO: 2461053 - RNA, 19 nt, Homo sapiens
  misc_RNA (1)...(19): siRNA sense strand
gaauaucugaaguuggaaa

SEQ ID NO: 2461054 - RNA, 19 nt, Homo sapiens
  misc_RNA (1)...(19): siRNA sense strand
ccaaaugauaacaaagaca

SEQ ID NO: 2461055 - RNA, 19 nt, Homo sapiens
  misc_RNA (1)...(19): siRNA sense strand
caucaaugccuuagcagau

SEQ ID NO: 2461056 - RNA, 19 nt, Homo sapiens
  misc_RNA (1)...(19): siRNA sense strand
gguuagaaaauuuggaaga

SEQ ID NO: 2461057 - RNA, 19 nt, Homo sapiens
  misc_RNA (1)...(19): siRNA sense strand
aacauuugguagagaggaa

SEQ ID NO: 2461058 - RNA, 19 nt, Homo sapiens
  misc_RNA (1)...(19): siRNA sense strand
cuuaguaaauucagggcca

SEQ ID NO: 2461059 - RNA, 19 nt, Homo sapiens
  misc_RNA (1)...(19): siRNA sense strand
gggaggaggaauugaagca

SEQ ID NO: 2461060 - RNA, 19 nt, Homo sapiens
  misc_RNA (1)...(19): siRNA sense strand
acuuuuagcucuugggaau

SEQ ID NO: 2461061 - RNA, 19 nt, Homo sapiens
  misc_RNA (1)...(19): siRNA sense strand
aaaggagggaggaggaauu

SEQ ID NO: 2461062 - RNA, 19 nt, Homo sapiens
  misc_RNA (1)...(19): siRNA sense strand
cguuaacugcagacguaaa

SEQ ID NO: 2461063 - RNA, 19 nt, Homo sapiens
  misc_RNA (1)...(19): siRNA sense strand
ccaaauccucagaagaaau

SEQ ID NO: 2461064 - RNA, 19 nt, Homo sapiens
  misc_RNA (1)...(19): siRNA sense strand
ugccaaacguguucgacaa

SEQ ID NO: 2461065 - RNA, 19 nt, Homo sapiens
  misc_RNA (1)...(19): siRNA sense strand
gguucauguuguggauaaa

SEQ ID NO: 2461066 - RNA, 19 nt, Homo sapiens
  misc_RNA (1)...(19): siRNA sense strand
cggaaauuaacaaguucua

SEQ ID NO: 2461067 - RNA, 19 nt, Homo sapiens
  misc_RNA (1)...(19): siRNA sense strand
acaucaaacaguucguuaa

SEQ ID NO: 2461068 - RNA, 19 nt, Homo sapiens
  misc_RNA (1)...(19): siRNA sense strand
cugaagacaaaguagaaaa

SEQ ID NO: 2461069 - RNA, 19 nt, Homo sapiens
  misc_RNA (1)...(19): siRNA sense strand
ucgagaagaaauuagacaa

SEQ ID NO: 2461070 - RNA, 19 nt, Homo sapiens
  misc_RNA (1)...(19): siRNA sense strand
aaugcauggaugagauuaa

SEQ ID NO: 2461071 - RNA, 19 nt, Homo sapiens
  misc_RNA (1)...(19): siRNA sense strand
caacaagacaaaacagcaa

SEQ ID NO: 2461072 - RNA, 19 nt, Homo sapiens
  misc_RNA (1)...(19): siRNA sense strand
uagaaaaggccacuggaaa

SEQ ID NO: 2461073 - RNA, 19 nt, Homo sapiens
  misc_RNA (1)...(19): siRNA sense strand
cuucaaagagaucgaacau

SEQ ID NO: 2461074 - RNA, 19 nt, Homo sapiens
  misc_RNA (1)...(19): siRNA sense strand
acaaaugcauggaugagau

SEQ ID NO: 2461075 - RNA, 19 nt, Homo sapiens
  misc_RNA (1)...(19): siRNA sense strand
uguagaaggcacaaauauu

SEQ ID NO: 2461076 - RNA, 19 nt, Homo sapiens
  misc_RNA (1)...(19): siRNA sense strand
gugaagacaucaagagcuc

SEQ ID NO: 2461077 - RNA, 19 nt, Homo sapiens
  misc_RNA (1)...(19): siRNA sense strand
ucaagagcucgaaguguaa

SEQ ID NO: 2461078 - RNA, 19 nt, Homo sapiens
  misc_RNA (1)...(19): siRNA sense strand
aagagaaagaaucagcaua

SEQ ID NO: 2461079 - RNA, 19 nt, Homo sapiens
  misc_RNA (1)...(19): siRNA sense strand
ccauaugaaaguaguaguu

SEQ ID NO: 2461080 - RNA, 19 nt, Homo sapiens
  misc_RNA (1)...(19): siRNA sense strand
auccaagcaugguuagaaa

SEQ ID NO: 2461081 - RNA, 19 nt, Homo sapiens
  misc_RNA (1)...(19): siRNA sense strand
agaucgaacauuugguaga

SEQ ID NO: 2461082 - RNA, 19 nt, Homo sapiens
  misc_RNA (1)...(19): siRNA sense strand
acacaacaucccacugaua

SEQ ID NO: 2461083 - RNA, 19 nt, Homo sapiens
  misc_RNA (1)...(19): siRNA sense strand
gaacacacuacuaagccaa

SEQ ID NO: 2461084 - RNA, 19 nt, Homo sapiens
  misc_RNA (1)...(19): siRNA sense strand
cagcaaguaucaaucaaaa

SEQ ID NO: 2461085 - RNA, 19 nt, Homo sapiens
  misc_RNA (1)...(19): siRNA sense strand
gaacagcaacacaggcaga

SEQ ID NO: 2461086 - RNA, 19 nt, Homo sapiens
  misc_RNA (1)...(19): siRNA sense strand
gccaaaaggaaacggaaau

SEQ ID NO: 2461087 - RNA, 19 nt, Homo sapiens
  misc_RNA (1)...(19): siRNA sense strand
ccaacaacagugccauaaa

SEQ ID NO: 2461088 - RNA, 19 nt, Homo sapiens
  misc_RNA (1)...(19): siRNA sense strand
aggaaacggaaauuaacaa

SEQ ID NO: 2461089 - RNA, 19 nt, Homo sapiens
  misc_RNA (1)...(19): siRNA sense strand
ccagaagacuguagaaaag

SEQ ID NO: 2461090 - RNA, 19 nt, Homo sapiens
  misc_RNA (1)...(19): siRNA sense strand
cuacaguaaccuuaaugaa

SEQ ID NO: 2461091 - RNA, 19 nt, Homo sapiens
  misc_RNA (1)...(19): siRNA sense strand
acaagaaucacuaccaaau

SEQ ID NO: 2461092 - RNA, 19 nt, Homo sapiens
  misc_RNA (1)...(19): siRNA sense strand
aacaagaagaagucaguuu

SEQ ID NO: 2461093 - RNA, 19 nt, Homo sapiens
  misc_RNA (1)...(19): siRNA sense strand
uggcgaacaaccaaagcaa

SEQ ID NO: 2461094 - RNA, 19 nt, Homo sapiens
  misc_RNA (1)...(19): siRNA sense strand
ccuaaagauaauuggaaga

SEQ ID NO: 2461095 - RNA, 19 nt, Homo sapiens
  misc_RNA (1)...(19): siRNA sense strand
caugaauagagaagagauu

SEQ ID NO: 2461096 - RNA, 19 nt, Homo sapiens
  misc_RNA (1)...(19): siRNA sense strand
cguaaauaaaguuguggaa

SEQ ID NO: 2461097 - RNA, 19 nt, Homo sapiens
  misc_RNA (1)...(19): siRNA sense strand
ugucugaguauuugagaau

SEQ ID NO: 2461098 - RNA, 19 nt, Homo sapiens
  misc_RNA (1)...(19): siRNA sense strand
uggaauauguuaaaggucu

SEQ ID NO: 2461099 - RNA, 19 nt, Homo sapiens
  misc_RNA (1)...(19): siRNA sense strand
uaauggaucucaugggaca

SEQ ID NO: 2461100 - RNA, 19 nt, Homo sapiens
  misc_RNA (1)...(19): siRNA sense strand
uggaaaaggcaaucgaauu

SEQ ID NO: 2461101 - RNA, 19 nt, Homo sapiens
  misc_RNA (1)...(19): siRNA sense strand
auggaaggccggagaaguu

SEQ ID NO: 2461102 - RNA, 19 nt, Homo sapiens
  misc_RNA (1)...(19): siRNA sense strand
agucaguugcaucaaguaa

SEQ ID NO: 2461103 - RNA, 19 nt, Homo sapiens
  misc_RNA (1)...(19): siRNA sense strand
gcaugaauagagaagagau

SEQ ID NO: 2461104 - RNA, 19 nt, Homo sapiens
  misc_RNA (1)...(19): siRNA sense strand
caugaaugugguggaauaa

SEQ ID NO: 2461105 - RNA, 19 nt, Homo sapiens
  misc_RNA (1)...(19): siRNA sense strand
ccuauggcucaaagaaaga

SEQ ID NO: 2461106 - RNA, 19 nt, Homo sapiens
  misc_RNA (1)...(19): siRNA sense strand
cagcaguaucuguuggaaa

SEQ ID NO: 2461107 - RNA, 19 nt, Homo sapiens
  misc_RNA (1)...(19): siRNA sense strand
caagaaagcugguggcucu

SEQ ID NO: 2461108 - RNA, 19 nt, Homo sapiens
  misc_RNA (1)...(19): siRNA sense strand
aggaaauucaacagaacuu

SEQ ID NO: 2461109 - RNA, 19 nt, Homo sapiens
  misc_RNA (1)...(19): siRNA sense strand
uugcaauggaucugauuau

SEQ ID NO: 2461110 - RNA, 19 nt, Homo sapiens
  misc_RNA (1)...(19): siRNA sense strand
cgggaggagguaucacaaa

SEQ ID NO: 2461111 - RNA, 19 nt, Homo sapiens
  misc_RNA (1)...(19): siRNA sense strand
ggugaaaagcaguggcugu

SEQ ID NO: 2461112 - RNA, 19 nt, Homo sapiens
  misc_RNA (1)...(19): siRNA sense strand
ggaaacaauccauaugcga

SEQ ID NO: 2461113 - RNA, 19 nt, Homo sapiens
  misc_RNA (1)...(19): siRNA sense strand
cugaauaucuccuggaaaa

SEQ ID NO: 2461114 - RNA, 19 nt, Homo sapiens
  misc_RNA (1)...(19): siRNA sense strand
augaagaaauugaggcaga

SEQ ID NO: 2461115 - RNA, 19 nt, Homo sapiens
  misc_RNA (1)...(19): siRNA sense strand
gggaaauuauagagaccau

SEQ ID NO: 2461116 - RNA, 19 nt, Homo sapiens
  misc_RNA (1)...(19): siRNA sense strand
cggaggaaauuuaagaaaa

SEQ ID NO: 2461117 - RNA, 19 nt, Homo sapiens
  misc_RNA (1)...(19): siRNA sense strand
ccguggaauaugaggacaa

SEQ ID NO: 2461118 - RNA, 19 nt, Homo sapiens
  misc_RNA (1)...(19): siRNA sense strand
agucauaggcagagugguu

SEQ ID NO: 2461119 - RNA, 19 nt, Homo sapiens
  misc_RNA (1)...(19): siRNA sense strand
gugauauggaugaagaaau

SEQ ID NO: 2461120 - RNA, 19 nt, Homo sapiens
  misc_RNA (1)...(19): siRNA sense strand
ggaugaagaaauugaggca

SEQ ID NO: 2461121 - RNA, 19 nt, Homo sapiens
  misc_RNA (1)...(19): siRNA sense strand
aaacauauguagugcagga

SEQ ID NO: 2461122 - RNA, 19 nt, Homo sapiens
  misc_RNA (1)...(19): siRNA sense strand
ccagacaagagcuaggaua

SEQ ID NO: 2461123 - RNA, 19 nt, Homo sapiens
  misc_RNA (1)...(19): siRNA sense strand
acaggcagcgagagagaaa

SEQ ID NO: 2461124 - RNA, 19 nt, Homo sapiens
  misc_RNA (1)...(19): siRNA sense strand
gaugaaacuggaaggguga

SEQ ID NO: 2461125 - RNA, 19 nt, Homo sapiens
  misc_RNA (1)...(19): siRNA sense strand
ccaccaacaugaagaggca

SEQ ID NO: 2461126 - RNA, 19 nt, Homo sapiens
  misc_RNA (1)...(19): siRNA sense strand
ugguugugcugcaggcaua

SEQ ID NO: 2461127 - RNA, 19 nt, Homo sapiens
  misc_RNA (1)...(19): siRNA sense strand
guaacuaacaagagagaug

SEQ ID NO: 2461128 - RNA, 19 nt, Homo sapiens
  misc_RNA (1)...(19): siRNA sense strand
ucaaaauccuguugcuaaa

SEQ ID NO: 2461129 - RNA, 19 nt, Homo sapiens
  misc_RNA (1)...(19): siRNA sense strand
caacagaaggaaugagucu

SEQ ID NO: 2461130 - RNA, 19 nt, Homo sapiens
  misc_RNA (1)...(19): siRNA sense strand
guaaaggcaccuauggcaa

SEQ ID NO: 2461131 - RNA, 19 nt, Homo sapiens
  misc_RNA (1)...(19): siRNA sense strand
aagaaauugaggcagaaua

SEQ ID NO: 2461132 - RNA, 19 nt, Homo sapiens
  misc_RNA (1)...(19): siRNA sense strand
gguauuauuacuuggcauu

SEQ ID NO: 2461133 - RNA, 19 nt, Homo sapiens
  misc_RNA (1)...(19): siRNA sense strand
aaaccaaagcagugggcca

SEQ ID NO: 2461134 - RNA, 19 nt, Homo sapiens
  misc_RNA (1)...(19): siRNA sense strand
cuuccagaaucuaagcaua

SEQ ID NO: 2461135 - RNA, 19 nt, Homo sapiens
  misc_RNA (1)...(19): siRNA sense strand
cagucagccuggagaggau

SEQ ID NO: 2461136 - RNA, 19 nt, Homo sapiens
  misc_RNA (1)...(19): siRNA sense strand
ccacagacaccugggaaau

SEQ ID NO: 2461137 - RNA, 19 nt, Homo sapiens
  misc_RNA (1)...(19): siRNA sense strand
aaacaggcagcgagagaga

SEQ ID NO: 2461138 - RNA, 19 nt, Homo sapiens
  misc_RNA (1)...(19): siRNA sense strand
ucgagaagucauaggcaga

SEQ ID NO: 2461139 - RNA, 19 nt, Homo sapiens
  misc_RNA (1)...(19): siRNA sense strand
ugggaaaggccaauaauca

SEQ ID NO: 2461140 - RNA, 19 nt, Homo sapiens
  misc_RNA (1)...(19): siRNA sense strand
agauggaauaucagaauga

SEQ ID NO: 2461141 - RNA, 19 nt, Homo sapiens
  misc_RNA (1)...(19): siRNA sense strand
caacagaaggaggaguuaa

SEQ ID NO: 2461142 - RNA, 19 nt, Homo sapiens
  misc_RNA (1)...(19): siRNA sense strand
gguggaagccuuugggaac

SEQ ID NO: 2461143 - RNA, 19 nt, Homo sapiens
  misc_RNA (1)...(19): siRNA sense strand
acacagacuucaagcaacu

SEQ ID NO: 2461144 - RNA, 19 nt, Homo sapiens
  misc_RNA (1)...(19): siRNA sense strand
aaauugaggcagaauacaa

SEQ ID NO: 2461145 - RNA, 19 nt, Homo sapiens
  misc_RNA (1)...(19): siRNA sense strand
aaaccaggcaugagaggau

SEQ ID NO: 2461146 - RNA, 19 nt, Homo sapiens
  misc_RNA (1)...(19): siRNA sense strand
uaaaggaguacauggaaaa

SEQ ID NO: 2461147 - RNA, 19 nt, Homo sapiens
  misc_RNA (1)...(19): siRNA sense strand
cuggaugaggauacaauua

SEQ ID NO: 2461148 - RNA, 19 nt, Homo sapiens
  misc_RNA (1)...(19): siRNA sense strand
uuauaggguucacggacaa

SEQ ID NO: 2461149 - RNA, 19 nt, Homo sapiens
  misc_RNA (1)...(19): siRNA sense strand
ggaacugugcuuuggcauu

SEQ ID NO: 2461150 - RNA, 19 nt, Homo sapiens
  misc_RNA (1)...(19): siRNA sense strand
gucagagagaagagagaga

SEQ ID NO: 2461151 - RNA, 19 nt, Homo sapiens
  misc_RNA (1)...(19): siRNA sense strand
ggucauugccugugagcag

SEQ ID NO: 2461152 - RNA, 19 nt, Homo sapiens
  misc_RNA (1)...(19): siRNA sense strand
cucuugagcagauggaaua

SEQ ID NO: 2461153 - RNA, 19 nt, Homo sapiens
  misc_RNA (1)...(19): siRNA sense strand
ucggaggaaauuuaagaaa

SEQ ID NO: 2461154 - RNA, 19 nt, Homo sapiens
  misc_RNA (1)...(19): siRNA sense strand
cugcauaaacaucgccaau

SEQ ID NO: 2461155 - RNA, 19 nt, Homo sapiens
  misc_RNA (1)...(19): siRNA sense strand
gcacagaagcaucgaacac

SEQ ID NO: 2461156 - RNA, 19 nt, Homo sapiens
  misc_RNA (1)...(19): siRNA sense strand
ucuacaagguaacuaacaa

SEQ ID NO: 2461157 - RNA, 19 nt, Homo sapiens
  misc_RNA (1)...(19): siRNA sense strand
ucccaauguuguaaaguuu

SEQ ID NO: 2461158 - RNA, 19 nt, Homo sapiens
  misc_RNA (1)...(19): siRNA sense strand
cuucaggauuauaggguuc

SEQ ID NO: 2461159 - RNA, 19 nt, Homo sapiens
  misc_RNA (1)...(19): siRNA sense strand
guacaucguaggagccauu

SEQ ID NO: 2461160 - RNA, 19 nt, Homo sapiens
  misc_RNA (1)...(19): siRNA sense strand
cggaagaaaccaccaacau

SEQ ID NO: 2461161 - RNA, 19 nt, Homo sapiens
  misc_RNA (1)...(19): siRNA sense strand
accaacaugaagaggcaaa

SEQ ID NO: 2461162 - RNA, 19 nt, Homo sapiens
  misc_RNA (1)...(19): siRNA sense strand
gagagagaagggagccauu

SEQ ID NO: 2461163 - RNA, 19 nt, Homo sapiens
  misc_RNA (1)...(19): siRNA sense strand
uaugaugcucggaggaaau

SEQ ID NO: 2461164 - RNA, 19 nt, Homo sapiens
  misc_RNA (1)...(19): siRNA sense strand
auaugaugcucggaggaaa

SEQ ID NO: 2461165 - RNA, 19 nt, Homo sapiens
  misc_RNA (1)...(19): siRNA sense strand
aauaagcaacagaaggaau

SEQ ID NO: 2461166 - RNA, 19 nt, Homo sapiens
  misc_RNA (1)...(19): siRNA sense strand
ccaagaaauccuccaccua

SEQ ID NO: 2461167 - RNA, 19 nt, Homo sapiens
  misc_RNA (1)...(19): siRNA sense strand
ugucaucagcggagagagu

SEQ ID NO: 2461168 - RNA, 19 nt, Homo sapiens
  misc_RNA (1)...(19): siRNA sense strand
gacaacagaaggaggaguu

SEQ ID NO: 2461169 - RNA, 19 nt, Homo sapiens
  misc_RNA (1)...(19): siRNA sense strand
gcagaaacguuaugcagac

SEQ ID NO: 2461170 - RNA, 19 nt, Homo sapiens
  misc_RNA (1)...(19): siRNA sense strand
ugcaggagguggaaugaau

SEQ ID NO: 2461171 - RNA, 19 nt, Homo sapiens
  misc_RNA (1)...(19): siRNA sense strand
ucucaaucccucugaccaa

SEQ ID NO: 2461172 - RNA, 19 nt, Homo sapiens
  misc_RNA (1)...(19): siRNA sense strand
cuggaagggugaugcacga

SEQ ID NO: 2461173 - RNA, 19 nt, Homo sapiens
  misc_RNA (1)...(19): siRNA sense strand
cagugauauggaugaagaa

SEQ ID NO: 2461174 - RNA, 19 nt, Homo sapiens
  misc_RNA (1)...(19): siRNA sense strand
aguuaagcucguugacuuu

SEQ ID NO: 2461175 - RNA, 19 nt, Homo sapiens
  misc_RNA (1)...(19): siRNA sense strand
auaaucagaccuugagaga

SEQ ID NO: 2461176 - RNA, 19 nt, Homo sapiens
  misc_RNA (1)...(19): siRNA sense strand
aaagagagcuguguggcua

SEQ ID NO: 2461177 - RNA, 19 nt, Homo sapiens
  misc_RNA (1)...(19): siRNA sense strand
agguaacuaacaagagaga

SEQ ID NO: 2461178 - RNA, 19 nt, Homo sapiens
  misc_RNA (1)...(19): siRNA sense strand
cauuccaaacugagagaaa

SEQ ID NO: 2461179 - RNA, 19 nt, Homo sapiens
  misc_RNA (1)...(19): siRNA sense strand
agacauaaaccuugggacu

SEQ ID NO: 2461180 - RNA, 19 nt, Homo sapiens
  misc_RNA (1)...(19): siRNA sense strand
cuggaauggaagacauaaa

SEQ ID NO: 2461181 - RNA, 19 nt, Homo sapiens
  misc_RNA (1)...(19): siRNA sense strand
uuccaaacugagagaaaua

SEQ ID NO: 2461182 - RNA, 19 nt, Homo sapiens
  misc_RNA (1)...(19): siRNA sense strand
uaaacagacucgugggacu

SEQ ID NO: 2461183 - RNA, 19 nt, Homo sapiens
  misc_RNA (1)...(19): siRNA sense strand
cgaugguccucaaagggaa

SEQ ID NO: 2461184 - RNA, 19 nt, Homo sapiens
  misc_RNA (1)...(19): siRNA sense strand
ccaacaugacagaauggaa

SEQ ID NO: 2461185 - RNA, 19 nt, Homo sapiens
  misc_RNA (1)...(19): siRNA sense strand
ucacaacgacuuaugggaa

SEQ ID NO: 2461186 - RNA, 19 nt, Homo sapiens
  misc_RNA (1)...(19): siRNA sense strand
caaaagaauguggaggaaa

SEQ ID NO: 2461187 - RNA, 19 nt, Homo sapiens
  misc_RNA (1)...(19): siRNA sense strand
agaacacauauaugggcua

SEQ ID NO: 2461188 - RNA, 19 nt, Homo sapiens
  misc_RNA (1)...(19): siRNA sense strand
uguucuauguagugggacu

SEQ ID NO: 2461189 - RNA, 19 nt, Homo sapiens
  misc_RNA (1)...(19): siRNA sense strand
ugacagaauggaagcacca

SEQ ID NO: 2461190 - RNA, 19 nt, Homo sapiens
  misc_RNA (1)...(19): siRNA sense strand
uggagaaauggaugcaaaa

SEQ ID NO: 2461191 - RNA, 19 nt, Homo sapiens
  misc_RNA (1)...(19): siRNA sense strand
ugauuguguuucaugggaa

SEQ ID NO: 2461192 - RNA, 19 nt, Homo sapiens
  misc_RNA (1)...(19): siRNA sense strand
cugaauugcuccagccucu

SEQ ID NO: 2461193 - RNA, 19 nt, Homo sapiens
  misc_RNA (1)...(19): siRNA sense strand
ccccaaaagcccagagaaa

SEQ ID NO: 2461194 - RNA, 19 nt, Homo sapiens
  misc_RNA (1)...(19): siRNA sense strand
cccaaagcucacuguguaa

SEQ ID NO: 2461195 - RNA, 19 nt, Homo sapiens
  misc_RNA (1)...(19): siRNA sense strand
aucauuaagcucauggaaa

SEQ ID NO: 2461196 - RNA, 19 nt, Homo sapiens
  misc_RNA (1)...(19): siRNA sense strand
ugguagagaaaguaacaaa

SEQ ID NO: 2461197 - RNA, 19 nt, Homo sapiens
  misc_RNA (1)...(19): siRNA sense strand
ggguaaacacugauccaga

SEQ ID NO: 2461198 - RNA, 19 nt, Homo sapiens
  misc_RNA (1)...(19): siRNA sense strand
ucgagaaccaauagcaaau

SEQ ID NO: 2461199 - RNA, 19 nt, Homo sapiens
  misc_RNA (1)...(19): siRNA sense strand
gguuguggaggcagagaau

SEQ ID NO: 2461200 - RNA, 19 nt, Homo sapiens
  misc_RNA (1)...(19): siRNA sense strand
ggaucaaaggccuggucau

SEQ ID NO: 2461201 - RNA, 19 nt, Homo sapiens
  misc_RNA (1)...(19): siRNA sense strand
uugcaaaacgacaaggaaa

SEQ ID NO: 2461202 - RNA, 19 nt, Homo sapiens
  misc_RNA (1)...(19): siRNA sense strand
cgaguaaagucuuggacag

SEQ ID NO: 2461203 - RNA, 19 nt, Homo sapiens
  misc_RNA (1)...(19): siRNA sense strand
gaugaaaggucugaggcuu

SEQ ID NO: 2461204 - RNA, 19 nt, Homo sapiens
  misc_RNA (1)...(19): siRNA sense strand
uuucaguauucgagaacca

SEQ ID NO: 2461205 - RNA, 19 nt, Homo sapiens
  misc_RNA (1)...(19): siRNA sense strand
uuguggaggcagagaauca

SEQ ID NO: 2461206 - RNA, 19 nt, Homo sapiens
  misc_RNA (1)...(19): siRNA sense strand
cagaagaguucagggcuca

SEQ ID NO: 2461207 - RNA, 19 nt, Homo sapiens
  misc_RNA (1)...(19): siRNA sense strand
ugaacagagaauugguaga

SEQ ID NO: 2461208 - RNA, 19 nt, Homo sapiens
  misc_RNA (1)...(19): siRNA sense strand
gcauaaacccuguaccugu

SEQ ID NO: 2461209 - RNA, 19 nt, Homo sapiens
  misc_RNA (1)...(19): siRNA sense strand
gcgaguaaagucuuggaca

SEQ ID NO: 2461210 - RNA, 19 nt, Homo sapiens
  misc_RNA (1)...(19): siRNA sense strand
uaacauugaaagagcucau

SEQ ID NO: 2461211 - RNA, 19 nt, Homo sapiens
  misc_RNA (1)...(19): siRNA sense strand
acagaagaguucagggcuc

SEQ ID NO: 2461212 - RNA, 19 nt, Homo sapiens
  misc_RNA (1)...(19): siRNA sense strand
ugcaaaacgacaaggaaau

SEQ ID NO: 2461213 - RNA, 19 nt, Homo sapiens
  misc_RNA (1)...(19): siRNA sense strand
cuuccauugaacagagaau

SEQ ID NO: 2461214 - RNA, 19 nt, Homo sapiens
  misc_RNA (1)...(19): siRNA sense strand
aggugguuguggaggcaga

SEQ ID NO: 2461215 - RNA, 19 nt, Homo sapiens
  misc_RNA (1)...(19): siRNA sense strand
ggaacaggaucaaaggccu

SEQ ID NO: 2461216 - RNA, 19 nt, Homo sapiens
  misc_RNA (1)...(19): siRNA sense strand
agccaaacaacgagggaaa

SEQ ID NO: 2461217 - RNA, 19 nt, Homo sapiens
  misc_RNA (1)...(19): siRNA sense strand
cgggaguggcucagaguaa

SEQ ID NO: 2461218 - RNA, 19 nt, Homo sapiens
  misc_RNA (1)...(19): siRNA sense strand
agucauaagcgcacagcaa

SEQ ID NO: 2461219 - RNA, 19 nt, Homo sapiens
  misc_RNA (1)...(19): siRNA sense strand
gauuaagagaucagugcaa

SEQ ID NO: 2461220 - RNA, 19 nt, Homo sapiens
  misc_RNA (1)...(19): siRNA sense strand
auguaaugccuguggacaa

SEQ ID NO: 2461221 - RNA, 19 nt, Homo sapiens
  misc_RNA (1)...(19): siRNA sense strand
caaaugaaauagaacgaca

SEQ ID NO: 2461222 - RNA, 19 nt, Homo sapiens
  misc_RNA (1)...(19): siRNA sense strand
gaaaguugcuugugggaac

SEQ ID NO: 2461223 - RNA, 19 nt, Homo sapiens
  misc_RNA (1)...(19): siRNA sense strand
ucaucaaguccaauagaaa

SEQ ID NO: 2461224 - RNA, 19 nt, Homo sapiens
  misc_RNA (1)...(19): siRNA sense strand
gugaaacaacuguggaaca

SEQ ID NO: 2461225 - RNA, 19 nt, Homo sapiens
  misc_RNA (1)...(19): siRNA sense strand
ccacuuuauuggagaaacu

SEQ ID NO: 2461226 - RNA, 19 nt, Homo sapiens
  misc_RNA (1)...(19): siRNA sense strand
cugucuaccuggugugcaa

SEQ ID NO: 2461227 - RNA, 19 nt, Homo sapiens
  misc_RNA (1)...(19): siRNA sense strand
ggugagugguggauagcca

SEQ ID NO: 2461228 - RNA, 19 nt, Homo sapiens
  misc_RNA (1)...(19): siRNA sense strand
agaugauaguagcagaaau

SEQ ID NO: 2461229 - RNA, 19 nt, Homo sapiens
  misc_RNA (1)...(19): siRNA sense strand
ugauaguagcagaaaugaa

SEQ ID NO: 2461230 - RNA, 19 nt, Homo sapiens
  misc_RNA (1)...(19): siRNA sense strand
auguagagcuggaaagauc

SEQ ID NO: 2461231 - RNA, 19 nt, Homo sapiens
  misc_RNA (1)...(19): siRNA sense strand
gcuggaaagaucugcagaa

SEQ ID NO: 2461232 - RNA, 19 nt, Homo sapiens
  misc_RNA (1)...(19): siRNA sense strand
aagaagggucagacaggua

SEQ ID NO: 2461233 - RNA, 19 nt, Homo sapiens
  misc_RNA (1)...(19): siRNA sense strand
ucauaagcgcacagcaaau

SEQ ID NO: 2461234 - RNA, 19 nt, Homo sapiens
  misc_RNA (1)...(19): siRNA sense strand
caaugaugguggcugggua

SEQ ID NO: 2461235 - RNA, 19 nt, Homo sapiens
  misc_RNA (1)...(19): siRNA sense strand
gguagauaucacuagacaa

SEQ ID NO: 2461236 - RNA, 19 nt, Homo sapiens
  misc_RNA (1)...(19): siRNA sense strand
aguacaugcuggagugguu

SEQ ID NO: 2461237 - RNA, 19 nt, Homo sapiens
  misc_RNA (1)...(19): siRNA sense strand
ggacagaauuugggagcac

SEQ ID NO: 2461238 - RNA, 19 nt, Homo sapiens
  misc_RNA (1)...(19): siRNA sense strand
cucgagaagaggaaacaaa

SEQ ID NO: 2461239 - RNA, 19 nt, Homo sapiens
  misc_RNA (1)...(19): siRNA sense strand
uagacaaggaagaaagcau

SEQ ID NO: 2461240 - RNA, 19 nt, Homo sapiens
  misc_RNA (1)...(19): siRNA sense strand
gaguauaugacaugggaug

SEQ ID NO: 2461241 - RNA, 19 nt, Homo sapiens
  misc_RNA (1)...(19): siRNA sense strand
cugcaauucauuaugguau

SEQ ID NO: 2461242 - RNA, 19 nt, Homo sapiens
  misc_RNA (1)...(19): siRNA sense strand
cuggaaagaucugcagaau

SEQ ID NO: 2461243 - RNA, 19 nt, Homo sapiens
  misc_RNA (1)...(19): siRNA sense strand
aguuauuggcaguguacau

SEQ ID NO: 2461244 - RNA, 19 nt, Homo sapiens
  misc_RNA (1)...(19): siRNA sense strand
augcuggagugguucgaaa

SEQ ID NO: 2461245 - RNA, 19 nt, Homo sapiens
  misc_RNA (1)...(19): siRNA sense strand
gaacaugaaugcaacccau

SEQ ID NO: 2461246 - RNA, 19 nt, Homo sapiens
  misc_RNA (1)...(19): siRNA sense strand
ucagaugauaguagcagaa

SEQ ID NO: 2461247 - RNA, 19 nt, Homo sapiens
  misc_RNA (1)...(19): siRNA sense strand
ggcaaauaucagucugcua

SEQ ID NO: 2461248 - RNA, 19 nt, Homo sapiens
  misc_RNA (1)...(19): siRNA sense strand
gcacacuggggaagauaua

SEQ ID NO: 2461249 - RNA, 19 nt, Homo sapiens
  misc_RNA (1)...(19): siRNA sense strand
gcacagcaaaugucccaaa

SEQ ID NO: 2461250 - RNA, 19 nt, Homo sapiens
  misc_RNA (1)...(19): siRNA sense strand
gugaaguaagauuaagaga

SEQ ID NO: 2461251 - RNA, 19 nt, Homo sapiens
  misc_RNA (1)...(19): siRNA sense strand
gaucagugcaaaggaacaa

SEQ ID NO: 2461252 - RNA, 19 nt, Homo sapiens
  misc_RNA (1)...(19): siRNA sense strand
agcuaaaguuauuggcagu

SEQ ID NO: 2461253 - RNA, 19 nt, Homo sapiens
  misc_RNA (1)...(19): siRNA sense strand
cggugguuauguugaugua

SEQ ID NO: 2461254 - RNA, 19 nt, Homo sapiens
  misc_RNA (1)...(19): siRNA sense strand
agaucagugcaaaggaaca

SEQ ID NO: 2461255 - RNA, 19 nt, Homo sapiens
  misc_RNA (1)...(19): siRNA sense strand
agagaaaaucugugcuaca

SEQ ID NO: 2461256 - RNA, 19 nt, Homo sapiens
  misc_RNA (1)...(19): siRNA sense strand
cuggcuguuuggauaguaa

SEQ ID NO: 2461257 - RNA, 19 nt, Homo sapiens
  misc_RNA (1)...(19): siRNA sense strand
ucacuagacaaggaagaaa

SEQ ID NO: 2461258 - RNA, 19 nt, Homo sapiens
  misc_RNA (1)...(19): siRNA sense strand
cguaacuguaugcaagcaa

SEQ ID NO: 2461259 - RNA, 19 nt, Homo sapiens
  misc_RNA (1)...(19): siRNA sense strand
gggccaucacagacaauga

SEQ ID NO: 2461260 - RNA, 19 nt, Homo sapiens
  misc_RNA (1)...(19): siRNA sense strand
agaagaggaaacaaaugaa

SEQ ID NO: 2461261 - RNA, 19 nt, Homo sapiens
  misc_RNA (1)...(19): siRNA sense strand
ugaaauagaacgacagcag

SEQ ID NO: 2461262 - RNA, 19 nt, Homo sapiens
  misc_RNA (1)...(19): siRNA sense strand
cagccauggugguucccaa

SEQ ID NO: 2461263 - RNA, 19 nt, Homo sapiens
  misc_RNA (1)...(19): siRNA sense strand
cgugguaugaugaagugaa

SEQ ID NO: 2461264 - RNA, 19 nt, Homo sapiens
  misc_RNA (1)...(19): siRNA sense strand
acaaugagguagacgaaga

SEQ ID NO: 2461265 - RNA, 19 nt, Homo sapiens
  misc_RNA (1)...(19): siRNA sense strand
gggaggaagaggaggagga

SEQ ID NO: 2461266 - RNA, 19 nt, Homo sapiens
  misc_RNA (1)...(19): siRNA sense strand
acuuaaaggagaagaagga

SEQ ID NO: 2461267 - RNA, 19 nt, Homo sapiens
  misc_RNA (1)...(19): siRNA sense strand
ugacaaugagguagacgaa

SEQ ID NO: 2461268 - RNA, 19 nt, Homo sapiens
  misc_RNA (1)...(19): siRNA sense strand
uagacgaagaagaggaaga

SEQ ID NO: 2461269 - RNA, 19 nt, Homo sapiens
  misc_RNA (1)...(19): siRNA sense strand
aagaagaaggugaugguga

SEQ ID NO: 2461270 - RNA, 19 nt, Homo sapiens
  misc_RNA (1)...(19): siRNA sense strand
ccaagaagcagaagaccga

SEQ ID NO: 2461271 - RNA, 19 nt, Homo sapiens
  misc_RNA (1)...(19): siRNA sense strand
gguagacgaagaagaggaa

SEQ ID NO: 2461272 - RNA, 19 nt, Homo sapiens
  misc_RNA (1)...(19): siRNA sense strand
aggacuuaaaggagaagaa

SEQ ID NO: 2461273 - RNA, 19 nt, Homo sapiens
  misc_RNA (1)...(19): siRNA sense strand
aggaggaagaagaagguga

SEQ ID NO: 2461274 - RNA, 19 nt, Homo sapiens
  misc_RNA (1)...(19): siRNA sense strand
gcagaagaccgacgaggau

SEQ ID NO: 2461275 - RNA, 19 nt, Homo sapiens
  misc_RNA (1)...(19): siRNA sense strand
uggagaugaagaugaggaa

SEQ ID NO: 2461276 - RNA, 19 nt, Homo sapiens
  misc_RNA (1)...(19): siRNA sense strand
gggaaugcuaaugaggaaa

SEQ ID NO: 2461277 - RNA, 19 nt, Homo sapiens
  misc_RNA (1)...(19): siRNA sense strand
agaccgacgaggaugacua

SEQ ID NO: 2461278 - RNA, 19 nt, Homo sapiens
  misc_RNA (1)...(19): siRNA sense strand
aggcugacaaugagguaga

SEQ ID NO: 2461279 - RNA, 19 nt, Homo sapiens
  misc_RNA (1)...(19): siRNA sense strand
accaaggacuuaaaggaga

SEQ ID NO: 2461280 - RNA, 19 nt, Homo sapiens
  misc_RNA (1)...(19): siRNA sense strand
cgaagaagaggaagaaggu

SEQ ID NO: 2461281 - RNA, 19 nt, Homo sapiens
  misc_RNA (1)...(19): siRNA sense strand
caaugagguagacgaagaa

SEQ ID NO: 2461282 - RNA, 19 nt, Homo sapiens
  misc_RNA (1)...(19): siRNA sense strand
agaagaccgacgaggauga

SEQ ID NO: 2461283 - RNA, 19 nt, Homo sapiens
  misc_RNA (1)...(19): siRNA sense strand
ggaaguuguggaagaggca

SEQ ID NO: 2461284 - RNA, 19 nt, Homo sapiens
  misc_RNA (1)...(19): siRNA sense strand
agacgaagaagaggaagaa

SEQ ID NO: 2461285 - RNA, 19 nt, Homo sapiens
  misc_RNA (1)...(19): siRNA sense strand
agguagacgaagaagagga

SEQ ID NO: 2461286 - RNA, 19 nt, Homo sapiens
  misc_RNA (1)...(19): siRNA sense strand
agaugaggaagcugaguca

SEQ ID NO: 2461287 - RNA, 19 nt, Homo sapiens
  misc_RNA (1)...(19): siRNA sense strand
agcugaagaugaugaggau

SEQ ID NO: 2461288 - RNA, 19 nt, Homo sapiens
  misc_RNA (1)...(19): siRNA sense strand
gggagcaggaggcugacaa

SEQ ID NO: 2461289 - RNA, 19 nt, Homo sapiens
  misc_RNA (1)...(19): siRNA sense strand
gagaugaagaugaggaagc

SEQ ID NO: 2461290 - RNA, 19 nt, Homo sapiens
  misc_RNA (1)...(19): siRNA sense strand
cugcuaacgggaaugcuaa

SEQ ID NO: 2461291 - RNA, 19 nt, Homo sapiens
  misc_RNA (1)...(19): siRNA sense strand
cagcugaagaugaugagga

SEQ ID NO: 2461292 - RNA, 19 nt, Homo sapiens
  misc_RNA (1)...(19): siRNA sense strand
augacgaugucgauaccaa

SEQ ID NO: 2461293 - RNA, 19 nt, Homo sapiens
  misc_RNA (1)...(19): siRNA sense strand
augugaagacugugggaaa

SEQ ID NO: 2461294 - RNA, 19 nt, Homo sapiens
  misc_RNA (1)...(19): siRNA sense strand
gugucaggaaugugggaaa

SEQ ID NO: 2461295 - RNA, 19 nt, Homo sapiens
  misc_RNA (1)...(19): siRNA sense strand
gggaaagccuucagccaga

SEQ ID NO: 2461296 - RNA, 19 nt, Homo sapiens
  misc_RNA (1)...(19): siRNA sense strand
cagacaucuuauuggauau

SEQ ID NO: 2461297 - RNA, 19 nt, Homo sapiens
  misc_RNA (1)...(19): siRNA sense strand
aacucacacuggagagaaa

SEQ ID NO: 2461298 - RNA, 19 nt, Homo sapiens
  misc_RNA (1)...(19): siRNA sense strand
gaauguaagcaguguggga

SEQ ID NO: 2461299 - RNA, 19 nt, Homo sapiens
  misc_RNA (1)...(19): siRNA sense strand
cagggaagcucuaaaggga

SEQ ID NO: 2461300 - RNA, 19 nt, Homo sapiens
  misc_RNA (1)...(19): siRNA sense strand
cuuacaagaagguggcuuu

SEQ ID NO: 2461301 - RNA, 19 nt, Homo sapiens
  misc_RNA (1)...(19): siRNA sense strand
gggagagccuucagccaga

SEQ ID NO: 2461302 - RNA, 19 nt, Homo sapiens
  misc_RNA (1)...(19): siRNA sense strand
gggaaagcguucuaccaga

SEQ ID NO: 2461303 - RNA, 19 nt, Homo sapiens
  misc_RNA (1)...(19): siRNA sense strand
gggaaagccuucaacagga

SEQ ID NO: 2461304 - RNA, 19 nt, Homo sapiens
  misc_RNA (1)...(19): siRNA sense strand
gggauaugcagaucggaga

SEQ ID NO: 2461305 - RNA, 19 nt, Homo sapiens
  misc_RNA (1)...(19): siRNA sense strand
gugcggugagugcgggaaa

SEQ ID NO: 2461306 - RNA, 19 nt, Homo sapiens
  misc_RNA (1)...(19): siRNA sense strand
gggaagcucuaaagggaac

SEQ ID NO: 2461307 - RNA, 19 nt, Homo sapiens
  misc_RNA (1)...(19): siRNA sense strand
cccuggaagccuugaagaa

SEQ ID NO: 2461308 - RNA, 19 nt, Homo sapiens
  misc_RNA (1)...(19): siRNA sense strand
cccuguggauagaggaaaa

SEQ ID NO: 2461309 - RNA, 19 nt, Homo sapiens
  misc_RNA (1)...(19): siRNA sense strand
guguucaaccggaggcauu

SEQ ID NO: 2461310 - RNA, 19 nt, Homo sapiens
  misc_RNA (1)...(19): siRNA sense strand
ggaagcaguuagaggacag

SEQ ID NO: 2461311 - RNA, 19 nt, Homo sapiens
  misc_RNA (1)...(19): siRNA sense strand
uggcauggauuuggggaaa

SEQ ID NO: 2461312 - RNA, 19 nt, Homo sapiens
  misc_RNA (1)...(19): siRNA sense strand
aggcauucuuugagcgaac

SEQ ID NO: 2461313 - RNA, 19 nt, Homo sapiens
  misc_RNA (1)...(19): siRNA sense strand
agucauugaaccacgguau

SEQ ID NO: 2461314 - RNA, 19 nt, Homo sapiens
  misc_RNA (1)...(19): siRNA sense strand
ggggaaaagcccuauaaau

SEQ ID NO: 2461315 - RNA, 19 nt, Homo sapiens
  misc_RNA (1)...(19): siRNA sense strand
gggcgagccuuuacgcaca

SEQ ID NO: 2461316 - RNA, 19 nt, Homo sapiens
  misc_RNA (1)...(19): siRNA sense strand
cuuguguggcagcgaguua

SEQ ID NO: 2461317 - RNA, 19 nt, Homo sapiens
  misc_RNA (1)...(19): siRNA sense strand
acagagaggugaugcugga

SEQ ID NO: 2461318 - RNA, 19 nt, Homo sapiens
  misc_RNA (1)...(19): siRNA sense strand
auguaagcagugugggaga

SEQ ID NO: 2461319 - RNA, 19 nt, Homo sapiens
  misc_RNA (1)...(19): siRNA sense strand
ugagcgaacaucaaagaau

SEQ ID NO: 2461320 - RNA, 19 nt, Homo sapiens
  misc_RNA (1)...(19): siRNA sense strand
agggaagcucuaaagggaa

SEQ ID NO: 2461321 - RNA, 19 nt, Homo sapiens
  misc_RNA (1)...(19): siRNA sense strand
ggaaaugccauccgccaga

SEQ ID NO: 2461322 - RNA, 19 nt, Homo sapiens
  misc_RNA (1)...(19): siRNA sense strand
ggucuucccuugugaggca

SEQ ID NO: 2461323 - RNA, 19 nt, Homo sapiens
  misc_RNA (1)...(19): siRNA sense strand
gcucagaagaaccuguaca

SEQ ID NO: 2461324 - RNA, 19 nt, Homo sapiens
  misc_RNA (1)...(19): siRNA sense strand
cccuacaggugucaggaau

SEQ ID NO: 2461325 - RNA, 19 nt, Homo sapiens
  misc_RNA (1)...(19): siRNA sense strand
ccauaggaccagagggaga

SEQ ID NO: 2461326 - RNA, 19 nt, Homo sapiens
  misc_RNA (1)...(19): siRNA sense strand
gcuaauaagcaucuggcaa

SEQ ID NO: 2461327 - RNA, 19 nt, Homo sapiens
  misc_RNA (1)...(19): siRNA sense strand
agguaagacuggaccgcua

SEQ ID NO: 2461328 - RNA, 19 nt, Homo sapiens
  misc_RNA (1)...(19): siRNA sense strand
aggucuugccggugagaaa

SEQ ID NO: 2461329 - RNA, 19 nt, Homo sapiens
  misc_RNA (1)...(19): siRNA sense strand
ggaaaggagagaaagguga

SEQ ID NO: 2461330 - RNA, 19 nt, Homo sapiens
  misc_RNA (1)...(19): siRNA sense strand
ugguagagacggcaggaaa

SEQ ID NO: 2461331 - RNA, 19 nt, Homo sapiens
  misc_RNA (1)...(19): siRNA sense strand
aggaccagagggagagaaa

SEQ ID NO: 2461332 - RNA, 19 nt, Homo sapiens
  misc_RNA (1)...(19): siRNA sense strand
acugcagguuugagaggua

SEQ ID NO: 2461333 - RNA, 19 nt, Homo sapiens
  misc_RNA (1)...(19): siRNA sense strand
gaaaggacccauaggacca

SEQ ID NO: 2461334 - RNA, 19 nt, Homo sapiens
  misc_RNA (1)...(19): siRNA sense strand
guaaucaguugaaaggaga

SEQ ID NO: 2461335 - RNA, 19 nt, Homo sapiens
  misc_RNA (1)...(19): siRNA sense strand
gaaaggagaaguaggucca

SEQ ID NO: 2461336 - RNA, 19 nt, Homo sapiens
  misc_RNA (1)...(19): siRNA sense strand
aggagaaguagguccaauu

SEQ ID NO: 2461337 - RNA, 19 nt, Homo sapiens
  misc_RNA (1)...(19): siRNA sense strand
agagaaaggugaaaaggga

SEQ ID NO: 2461338 - RNA, 19 nt, Homo sapiens
  misc_RNA (1)...(19): siRNA sense strand
agagggagagaaaggagaa

SEQ ID NO: 2461339 - RNA, 19 nt, Homo sapiens
  misc_RNA (1)...(19): siRNA sense strand
gaugaagucuggcuggaga

SEQ ID NO: 2461340 - RNA, 19 nt, Homo sapiens
  misc_RNA (1)...(19): siRNA sense strand
aggaagagaugguagagac

SEQ ID NO: 2461341 - RNA, 19 nt, Homo sapiens
  misc_RNA (1)...(19): siRNA sense strand
gagaaaggugaaaagggaa

SEQ ID NO: 2461342 - RNA, 19 nt, Homo sapiens
  misc_RNA (1)...(19): siRNA sense strand
acccauaggaccagaggga

SEQ ID NO: 2461343 - RNA, 19 nt, Homo sapiens
  misc_RNA (1)...(19): siRNA sense strand
gguaaucaguugaaaggag

SEQ ID NO: 2461344 - RNA, 19 nt, Homo sapiens
  misc_RNA (1)...(19): siRNA sense strand
cagagggagagaaaggaga

SEQ ID NO: 2461345 - RNA, 19 nt, Homo sapiens
  misc_RNA (1)...(19): siRNA sense strand
augauaucacauuggcuaa

SEQ ID NO: 2461346 - RNA, 19 nt, Homo sapiens
  misc_RNA (1)...(19): siRNA sense strand
ccuaucaauuuaugggcaa

SEQ ID NO: 2461347 - RNA, 19 nt, Homo sapiens
  misc_RNA (1)...(19): siRNA sense strand
acucauaacaagaucacaa

SEQ ID NO: 2461348 - RNA, 19 nt, Homo sapiens
  misc_RNA (1)...(19): siRNA sense strand
aguuugacauaaagagcuu

SEQ ID NO: 2461349 - RNA, 19 nt, Homo sapiens
  misc_RNA (1)...(19): siRNA sense strand
aagauaaaagggagaguuu

SEQ ID NO: 2461350 - RNA, 19 nt, Homo sapiens
  misc_RNA (1)...(19): siRNA sense strand
aacaauaagaucagcaaca

SEQ ID NO: 2461351 - RNA, 19 nt, Homo sapiens
  misc_RNA (1)...(19): siRNA sense strand
acuggcugauaguggaaua

SEQ ID NO: 2461352 - RNA, 19 nt, Homo sapiens
  misc_RNA (1)...(19): siRNA sense strand
ggaauaaccagauugacca

SEQ ID NO: 2461353 - RNA, 19 nt, Homo sapiens
  misc_RNA (1)...(19): siRNA sense strand
uaguggaauaccuggaaau

SEQ ID NO: 2461354 - RNA, 19 nt, Homo sapiens
  misc_RNA (1)...(19): siRNA sense strand
gucuuaaaucacucgaaua

SEQ ID NO: 2461355 - RNA, 19 nt, Homo sapiens
  misc_RNA (1)...(19): siRNA sense strand
acaacaauaagaucagcaa

SEQ ID NO: 2461356 - RNA, 19 nt, Homo sapiens
  misc_RNA (1)...(19): siRNA sense strand
uguccuauaacaagcuuaa

SEQ ID NO: 2461357 - RNA, 19 nt, Homo sapiens
  misc_RNA (1)...(19): siRNA sense strand
ccaccaagcuggagccuga

SEQ ID NO: 2461358 - RNA, 19 nt, Homo sapiens
  misc_RNA (1)...(19): siRNA sense strand
cagaggugcugcagggcau

SEQ ID NO: 2461359 - RNA, 19 nt, Homo sapiens
  misc_RNA (1)...(19): siRNA sense strand
aguucaauguggcgaucaa

SEQ ID NO: 2461360 - RNA, 19 nt, Homo sapiens
  misc_RNA (1)...(19): siRNA sense strand
cuacgagaucuuugagaca

SEQ ID NO: 2461361 - RNA, 19 nt, Homo sapiens
  misc_RNA (1)...(19): siRNA sense strand
augcaaauguccaggcagu

SEQ ID NO: 2461362 - RNA, 19 nt, Homo sapiens
  misc_RNA (1)...(19): siRNA sense strand
agcuggagccugagggaga

SEQ ID NO: 2461363 - RNA, 19 nt, Homo sapiens
  misc_RNA (1)...(19): siRNA sense strand
gacuauggagacagaggaa

SEQ ID NO: 2461364 - RNA, 19 nt, Homo sapiens
  misc_RNA (1)...(19): siRNA sense strand
ucaagaucaucgaccgcaa

SEQ ID NO: 2461365 - RNA, 19 nt, Homo sapiens
  misc_RNA (1)...(19): siRNA sense strand
agacaaaacccgaggggac

SEQ ID NO: 2461366 - RNA, 19 nt, Homo sapiens
  misc_RNA (1)...(19): siRNA sense strand
aaauugagauucuggccau

SEQ ID NO: 2461367 - RNA, 19 nt, Homo sapiens
  misc_RNA (1)...(19): siRNA sense strand
cagaaggagcaccgcguca

SEQ ID NO: 2461368 - RNA, 19 nt, Homo sapiens
  misc_RNA (1)...(19): siRNA sense strand
gagcaguggagcugggaau

SEQ ID NO: 2461369 - RNA, 19 nt, Homo sapiens
  misc_RNA (1)...(19): siRNA sense strand
cuauguaauuaacggcaaa

SEQ ID NO: 2461370 - RNA, 19 nt, Homo sapiens
  misc_RNA (1)...(19): siRNA sense strand
gcuaagaaagagauugcaa

SEQ ID NO: 2461371 - RNA, 19 nt, Homo sapiens
  misc_RNA (1)...(19): siRNA sense strand
cuugauugcugaagaaaca

SEQ ID NO: 2461372 - RNA, 19 nt, Homo sapiens
  misc_RNA (1)...(19): siRNA sense strand
uggccaaagucgagggucu

SEQ ID NO: 2461373 - RNA, 19 nt, Homo sapiens
  misc_RNA (1)...(19): siRNA sense strand
gugaggaacagaagaaaca

SEQ ID NO: 2461374 - RNA, 19 nt, Homo sapiens
  misc_RNA (1)...(19): siRNA sense strand
cgguagaaacauuggcuca

SEQ ID NO: 2461375 - RNA, 19 nt, Homo sapiens
  misc_RNA (1)...(19): siRNA sense strand
caagguucuuauagugaaa

SEQ ID NO: 2461376 - RNA, 19 nt, Homo sapiens
  misc_RNA (1)...(19): siRNA sense strand
ugucauuggaacagaauuu

SEQ ID NO: 2461377 - RNA, 19 nt, Homo sapiens
  misc_RNA (1)...(19): siRNA sense strand
gcaagucccuggaggccua

SEQ ID NO: 2461378 - RNA, 19 nt, Homo sapiens
  misc_RNA (1)...(19): siRNA sense strand
ugguauaggugcuggguac

SEQ ID NO: 2461379 - RNA, 19 nt, Homo sapiens
  misc_RNA (1)...(19): siRNA sense strand
agaagaaguuguaugcaca

SEQ ID NO: 2461380 - RNA, 19 nt, Homo sapiens
  misc_RNA (1)...(19): siRNA sense strand
aggauuacccucuggcuaa

SEQ ID NO: 2461381 - RNA, 19 nt, Homo sapiens
  misc_RNA (1)...(19): siRNA sense strand
gcuauguaauuaacggcaa

SEQ ID NO: 2461382 - RNA, 19 nt, Homo sapiens
  misc_RNA (1)...(19): siRNA sense strand
agcacaaguucgacagcaa

SEQ ID NO: 2461383 - RNA, 19 nt, Homo sapiens
  misc_RNA (1)...(19): siRNA sense strand
ccuguauggaagugaggaa

SEQ ID NO: 2461384 - RNA, 19 nt, Homo sapiens
  misc_RNA (1)...(19): siRNA sense strand
acauaugugcucaggaaaa

SEQ ID NO: 2461385 - RNA, 19 nt, Homo sapiens
  misc_RNA (1)...(19): siRNA sense strand
agcagaacguucagccaua

SEQ ID NO: 2461386 - RNA, 19 nt, Homo sapiens
  misc_RNA (1)...(19): siRNA sense strand
uagugaaaacucagggaua

SEQ ID NO: 2461387 - RNA, 19 nt, Homo sapiens
  misc_RNA (1)...(19): siRNA sense strand
uggaauagcacagggagua

SEQ ID NO: 2461388 - RNA, 19 nt, Homo sapiens
  misc_RNA (1)...(19): siRNA sense strand
acacauucuuccagcugaa

SEQ ID NO: 2461389 - RNA, 19 nt, Homo sapiens
  misc_RNA (1)...(19): siRNA sense strand
ccgcauugccauugagaag

SEQ ID NO: 2461390 - RNA, 19 nt, Homo sapiens
  misc_RNA (1)...(19): siRNA sense strand
cagcuaucggaguggcuaa

SEQ ID NO: 2461391 - RNA, 19 nt, Homo sapiens
  misc_RNA (1)...(19): siRNA sense strand
gcgggcaacacaaaggaua

SEQ ID NO: 2461392 - RNA, 19 nt, Homo sapiens
  misc_RNA (1)...(19): siRNA sense strand
ccgauaaugacaaugaaga

SEQ ID NO: 2461393 - RNA, 19 nt, Homo sapiens
  misc_RNA (1)...(19): siRNA sense strand
gggaagaacucaaaauacu

SEQ ID NO: 2461394 - RNA, 19 nt, Homo sapiens
  misc_RNA (1)...(19): siRNA sense strand
cugccaagcaccagacaca

SEQ ID NO: 2461395 - RNA, 19 nt, Homo sapiens
  misc_RNA (1)...(19): siRNA sense strand
guaugagaacaguagguuu

SEQ ID NO: 2461396 - RNA, 19 nt, Homo sapiens
  misc_RNA (1)...(19): siRNA sense strand
caacaauggagcugcggga

SEQ ID NO: 2461397 - RNA, 19 nt, Homo sapiens
  misc_RNA (1)...(19): siRNA sense strand
cuaagaaagagauugcaau

SEQ ID NO: 2461398 - RNA, 19 nt, Homo sapiens
  misc_RNA (1)...(19): siRNA sense strand
aaacauuggcucaguuaca

SEQ ID NO: 2461399 - RNA, 19 nt, Homo sapiens
  misc_RNA (1)...(19): siRNA sense strand
ggaauagcacagggaguau

SEQ ID NO: 2461400 - RNA, 19 nt, Homo sapiens
  misc_RNA (1)...(19): siRNA sense strand
cagaagaaacaguggcuug

SEQ ID NO: 2461401 - RNA, 19 nt, Homo sapiens
  misc_RNA (1)...(19): siRNA sense strand
agaacuugcccgauaauga

SEQ ID NO: 2461402 - RNA, 19 nt, Homo sapiens
  misc_RNA (1)...(19): siRNA sense strand
caugaacacaccuggagua

SEQ ID NO: 2461403 - RNA, 19 nt, Homo sapiens
  misc_RNA (1)...(19): siRNA sense strand
cagugauacuucugucauu

SEQ ID NO: 2461404 - RNA, 19 nt, Homo sapiens
  misc_RNA (1)...(19): siRNA sense strand
cuggaauagcacagggagu

SEQ ID NO: 2461405 - RNA, 19 nt, Homo sapiens
  misc_RNA (1)...(19): siRNA sense strand
ccaaaagacugacagccaa

SEQ ID NO: 2461406 - RNA, 19 nt, Homo sapiens
  misc_RNA (1)...(19): siRNA sense strand
gagaauuuaaaguccagaa

SEQ ID NO: 2461407 - RNA, 19 nt, Homo sapiens
  misc_RNA (1)...(19): siRNA sense strand
ggugcuggguacugcaaaa

SEQ ID NO: 2461408 - RNA, 19 nt, Homo sapiens
  misc_RNA (1)...(19): siRNA sense strand
aggauagcuuucaagaaga

SEQ ID NO: 2461409 - RNA, 19 nt, Homo sapiens
  misc_RNA (1)...(19): siRNA sense strand
cugaaaaggagguaacuga

SEQ ID NO: 2461410 - RNA, 19 nt, Homo sapiens
  misc_RNA (1)...(19): siRNA sense strand
gugcuggcgcuaagaaaga

SEQ ID NO: 2461411 - RNA, 19 nt, Homo sapiens
  misc_RNA (1)...(19): siRNA sense strand
uccuaaagcacaucagauu

SEQ ID NO: 2461412 - RNA, 19 nt, Homo sapiens
  misc_RNA (1)...(19): siRNA sense strand
uuuaacaauuccuggacuu

SEQ ID NO: 2461413 - RNA, 19 nt, Homo sapiens
  misc_RNA (1)...(19): siRNA sense strand
ggacaaagcaauaucaagc

SEQ ID NO: 2461414 - RNA, 19 nt, Homo sapiens
  misc_RNA (1)...(19): siRNA sense strand
aggaaauggccaaagucga

SEQ ID NO: 2461415 - RNA, 19 nt, Homo sapiens
  misc_RNA (1)...(19): siRNA sense strand
gaacaguagguuuggcgga

SEQ ID NO: 2461416 - RNA, 19 nt, Homo sapiens
  misc_RNA (1)...(19): siRNA sense strand
gcugaaagccgcauugcca

SEQ ID NO: 2461417 - RNA, 19 nt, Homo sapiens
  misc_RNA (1)...(19): siRNA sense strand
gacugacagccaagauaua

SEQ ID NO: 2461418 - RNA, 19 nt, Homo sapiens
  misc_RNA (1)...(19): siRNA sense strand
uggacuuagcccagcagaa

SEQ ID NO: 2461419 - RNA, 19 nt, Homo sapiens
  misc_RNA (1)...(19): siRNA sense strand
gauaaugacaaugaagaga

SEQ ID NO: 2461420 - RNA, 19 nt, Homo sapiens
  misc_RNA (1)...(19): siRNA sense strand
aggacaguuccaaugauaa

SEQ ID NO: 2461421 - RNA, 19 nt, Homo sapiens
  misc_RNA (1)...(19): siRNA sense strand
uguauggaagugaggaaca

SEQ ID NO: 2461422 - RNA, 19 nt, Homo sapiens
  misc_RNA (1)...(19): siRNA sense strand
ucaagugaugccacgaaua

SEQ ID NO: 2461423 - RNA, 19 nt, Homo sapiens
  misc_RNA (1)...(19): siRNA sense strand
gagauuucagacuagauaa

SEQ ID NO: 2461424 - RNA, 19 nt, Homo sapiens
  misc_RNA (1)...(19): siRNA sense strand
agauaucuucugggaaaua

SEQ ID NO: 2461425 - RNA, 19 nt, Homo sapiens
  misc_RNA (1)...(19): siRNA sense strand
ggaaauaauucaucugagg

SEQ ID NO: 2461426 - RNA, 19 nt, Homo sapiens
  misc_RNA (1)...(19): siRNA sense strand
caugauuagcgcugauuca

SEQ ID NO: 2461427 - RNA, 19 nt, Homo sapiens
  misc_RNA (1)...(19): siRNA sense strand
ccauaauaacggaaaguuu

SEQ ID NO: 2461428 - RNA, 19 nt, Homo sapiens
  misc_RNA (1)...(19): siRNA sense strand
caacagaaaaugugaacaa

SEQ ID NO: 2461429 - RNA, 19 nt, Homo sapiens
  misc_RNA (1)...(19): siRNA sense strand
aggagaaggcucugaaaga

SEQ ID NO: 2461430 - RNA, 19 nt, Homo sapiens
  misc_RNA (1)...(19): siRNA sense strand
caguaaaugggaagauauu

SEQ ID NO: 2461431 - RNA, 19 nt, Homo sapiens
  misc_RNA (1)...(19): siRNA sense strand
gagaaggcucugaaagaau

SEQ ID NO: 2461432 - RNA, 19 nt, Homo sapiens
  misc_RNA (1)...(19): siRNA sense strand
gauuaauggagaaugggaa

SEQ ID NO: 2461433 - RNA, 19 nt, Homo sapiens
  misc_RNA (1)...(19): siRNA sense strand
auuaauggagaaugggaaa

SEQ ID NO: 2461434 - RNA, 19 nt, Homo sapiens
  misc_RNA (1)...(19): siRNA sense strand
ccagcagcaaagagaaaua

SEQ ID NO: 2461435 - RNA, 19 nt, Homo sapiens
  misc_RNA (1)...(19): siRNA sense strand
acucaaggaaguagcacaa

SEQ ID NO: 2461436 - RNA, 19 nt, Homo sapiens
  misc_RNA (1)...(19): siRNA sense strand
ugaaggaggucacgcgcaa

SEQ ID NO: 2461437 - RNA, 19 nt, Homo sapiens
  misc_RNA (1)...(19): siRNA sense strand
ccauuguauuggacacuaa

SEQ ID NO: 2461438 - RNA, 19 nt, Homo sapiens
  misc_RNA (1)...(19): siRNA sense strand
gcgcaaagcucucaugcca

SEQ ID NO: 2461439 - RNA, 19 nt, Homo sapiens
  misc_RNA (1)...(19): siRNA sense strand
ucuuacagccagucagaua

SEQ ID NO: 2461440 - RNA, 19 nt, Homo sapiens
  misc_RNA (1)...(19): siRNA sense strand
guccaaaggaucaagagaa

SEQ ID NO: 2461441 - RNA, 19 nt, Homo sapiens
  misc_RNA (1)...(19): siRNA sense strand
agaauguauuugagcugaa

SEQ ID NO: 2461442 - RNA, 19 nt, Homo sapiens
  misc_RNA (1)...(19): siRNA sense strand
acaggaaagaacuuggaaa

SEQ ID NO: 2461443 - RNA, 19 nt, Homo sapiens
  misc_RNA (1)...(19): siRNA sense strand
gcaagaaccaagacagcga

SEQ ID NO: 2461444 - RNA, 19 nt, Homo sapiens
  misc_RNA (1)...(19): siRNA sense strand
ucaccaaagcaccaagaua

SEQ ID NO: 2461445 - RNA, 19 nt, Homo sapiens
  misc_RNA (1)...(19): siRNA sense strand
aggaauugaagaggagaua

SEQ ID NO: 2461446 - RNA, 19 nt, Homo sapiens
  misc_RNA (1)...(19): siRNA sense strand
cugcaagaaccaauaguau

SEQ ID NO: 2461447 - RNA, 19 nt, Homo sapiens
  misc_RNA (1)...(19): siRNA sense strand
caggaaagaacuuggaaac

SEQ ID NO: 2461448 - RNA, 19 nt, Homo sapiens
  misc_RNA (1)...(19): siRNA sense strand
gaauaugaagcaaaggaca

SEQ ID NO: 2461449 - RNA, 19 nt, Homo sapiens
  misc_RNA (1)...(19): siRNA sense strand
gaacaaaaggaucccaaaa

SEQ ID NO: 2461450 - RNA, 19 nt, Homo sapiens
  misc_RNA (1)...(19): siRNA sense strand
agcaaaggacagaaagauu

SEQ ID NO: 2461451 - RNA, 19 nt, Homo sapiens
  misc_RNA (1)...(19): siRNA sense strand
ccuaaaguuuccagccaga

SEQ ID NO: 2461452 - RNA, 19 nt, Homo sapiens
  misc_RNA (1)...(19): siRNA sense strand
cugaaagaauacaucaaga

SEQ ID NO: 2461453 - RNA, 19 nt, Homo sapiens
  misc_RNA (1)...(19): siRNA sense strand
gaaugacaguaaaugggaa

SEQ ID NO: 2461454 - RNA, 19 nt, Homo sapiens
  misc_RNA (1)...(19): siRNA sense strand
gcaaaggagauuuccaaaa

SEQ ID NO: 2461455 - RNA, 19 nt, Homo sapiens
  misc_RNA (1)...(19): siRNA sense strand
agagguacaucuuggugaa

SEQ ID NO: 2461456 - RNA, 19 nt, Homo sapiens
  misc_RNA (1)...(19): siRNA sense strand
cagcaaaggagauuuccaa

SEQ ID NO: 2461457 - RNA, 19 nt, Homo sapiens
  misc_RNA (1)...(19): siRNA sense strand
cuuauauaccagugacuau

SEQ ID NO: 2461458 - RNA, 19 nt, Homo sapiens
  misc_RNA (1)...(19): siRNA sense strand
uuuggauauugaugggaua

SEQ ID NO: 2461459 - RNA, 19 nt, Homo sapiens
  misc_RNA (1)...(19): siRNA sense strand
uggacuugaaugacaguaa

SEQ ID NO: 2461460 - RNA, 19 nt, Homo sapiens
  misc_RNA (1)...(19): siRNA sense strand
uuacuauaacagagggaca

SEQ ID NO: 2461461 - RNA, 19 nt, Homo sapiens
  misc_RNA (1)...(19): siRNA sense strand
augaagcaaaggacagaaa

SEQ ID NO: 2461462 - RNA, 19 nt, Homo sapiens
  misc_RNA (1)...(19): siRNA sense strand
acugaacagauaagggcaa

SEQ ID NO: 2461463 - RNA, 19 nt, Homo sapiens
  misc_RNA (1)...(19): siRNA sense strand
ugggaaacucauaaagaca

SEQ ID NO: 2461464 - RNA, 19 nt, Homo sapiens
  misc_RNA (1)...(19): siRNA sense strand
aagucaagccagaugaaaa

SEQ ID NO: 2461465 - RNA, 19 nt, Homo sapiens
  misc_RNA (1)...(19): siRNA sense strand
ggucagacugucaaccuaa

SEQ ID NO: 2461466 - RNA, 19 nt, Homo sapiens
  misc_RNA (1)...(19): siRNA sense strand
cucagaagaguuauagaaa

SEQ ID NO: 2461467 - RNA, 19 nt, Homo sapiens
  misc_RNA (1)...(19): siRNA sense strand
ugacaaugacacuguuauu

SEQ ID NO: 2461468 - RNA, 19 nt, Homo sapiens
  misc_RNA (1)...(19): siRNA sense strand
ccuuuaaaguaucuagcau

SEQ ID NO: 2461469 - RNA, 19 nt, Homo sapiens
  misc_RNA (1)...(19): siRNA sense strand
caauaaucaggcaguagaa

SEQ ID NO: 2461470 - RNA, 19 nt, Homo sapiens
  misc_RNA (1)...(19): siRNA sense strand
uaaaacaaggggagaggua

SEQ ID NO: 2461471 - RNA, 19 nt, Homo sapiens
  misc_RNA (1)...(19): siRNA sense strand
ucgcagugauccagaaacu

SEQ ID NO: 2461472 - RNA, 19 nt, Homo sapiens
  misc_RNA (1)...(19): siRNA sense strand
gaacaggucuuauucguga

SEQ ID NO: 2461473 - RNA, 19 nt, Homo sapiens
  misc_RNA (1)...(19): siRNA sense strand
ucacauucuccuaaaguuu

SEQ ID NO: 2461474 - RNA, 19 nt, Homo sapiens
  misc_RNA (1)...(19): siRNA sense strand
cagaauaggacacgcucau

SEQ ID NO: 2461475 - RNA, 19 nt, Homo sapiens
  misc_RNA (1)...(19): siRNA sense strand
caauucagauuaauggaga

SEQ ID NO: 2461476 - RNA, 19 nt, Homo sapiens
  misc_RNA (1)...(19): siRNA sense strand
ucagauagucagugugguu

SEQ ID NO: 2461477 - RNA, 19 nt, Homo sapiens
  misc_RNA (1)...(19): siRNA sense strand
ucccagcagcaaagagaaa

SEQ ID NO: 2461478 - RNA, 19 nt, Homo sapiens
  misc_RNA (1)...(19): siRNA sense strand
acaguaaaugggaagauau

SEQ ID NO: 2461479 - RNA, 19 nt, Homo sapiens
  misc_RNA (1)...(19): siRNA sense strand
ucucagaagaguuauagaa

SEQ ID NO: 2461480 - RNA, 19 nt, Homo sapiens
  misc_RNA (1)...(19): siRNA sense strand
aggaaaagaaacagcagaa

SEQ ID NO: 2461481 - RNA, 19 nt, Homo sapiens
  misc_RNA (1)...(19): siRNA sense strand
aagaaacagcagaagaaga

SEQ ID NO: 2461482 - RNA, 19 nt, Homo sapiens
  misc_RNA (1)...(19): siRNA sense strand
ggagaaaguuccagcuggu

SEQ ID NO: 2461483 - RNA, 19 nt, Homo sapiens
  misc_RNA (1)...(19): siRNA sense strand
ccucaggagugaagcgucu

SEQ ID NO: 2461484 - RNA, 19 nt, Homo sapiens
  misc_RNA (1)...(19): siRNA sense strand
cagcagaagaagaaacgga

SEQ ID NO: 2461485 - RNA, 19 nt, Homo sapiens
  misc_RNA (1)...(19): siRNA sense strand
aagaagaaacggaaggaag

SEQ ID NO: 2461486 - RNA, 19 nt, Homo sapiens
  misc_RNA (1)...(19): siRNA sense strand
ggccauggcuggaaggaag

SEQ ID NO: 2461487 - RNA, 19 nt, Homo sapiens
  misc_RNA (1)...(19): siRNA sense strand
agaaacggaaggaagaaaa

SEQ ID NO: 2461488 - RNA, 19 nt, Homo sapiens
  misc_RNA (1)...(19): siRNA sense strand
aagaaacggaaggaagaaa

SEQ ID NO: 2461489 - RNA, 19 nt, Homo sapiens
  misc_RNA (1)...(19): siRNA sense strand
gaagaacucuccagggauc

SEQ ID NO: 2461490 - RNA, 19 nt, Homo sapiens
  misc_RNA (1)...(19): siRNA sense strand
gagcagccauugaucggua

SEQ ID NO: 2461491 - RNA, 19 nt, Homo sapiens
  misc_RNA (1)...(19): siRNA sense strand
augaagaacucuccaggga

SEQ ID NO: 2461492 - RNA, 19 nt, Homo sapiens
  misc_RNA (1)...(19): siRNA sense strand
gaacauguugcgcuggcua

SEQ ID NO: 2461493 - RNA, 19 nt, Homo sapiens
  misc_RNA (1)...(19): siRNA sense strand
aggaaaagaaacagcagaa

SEQ ID NO: 2461494 - RNA, 19 nt, Homo sapiens
  misc_RNA (1)...(19): siRNA sense strand
aagaaacagcagaagaaga

SEQ ID NO: 2461495 - RNA, 19 nt, Homo sapiens
  misc_RNA (1)...(19): siRNA sense strand
ggagaaaguuccagcuggu

SEQ ID NO: 2461496 - RNA, 19 nt, Homo sapiens
  misc_RNA (1)...(19): siRNA sense strand
ccucaggagugaagcgucu

SEQ ID NO: 2461497 - RNA, 19 nt, Homo sapiens
  misc_RNA (1)...(19): siRNA sense strand
cagcagaagaagaaacgga

SEQ ID NO: 2461498 - RNA, 19 nt, Homo sapiens
  misc_RNA (1)...(19): siRNA sense strand
aagaagaaacggaaggaag

SEQ ID NO: 2461499 - RNA, 19 nt, Homo sapiens
  misc_RNA (1)...(19): siRNA sense strand
ggccauggcuggaaggaag

SEQ ID NO: 2461500 - RNA, 19 nt, Homo sapiens
  misc_RNA (1)...(19): siRNA sense strand
agaaacggaaggaagaaaa

SEQ ID NO: 2461501 - RNA, 19 nt, Homo sapiens
  misc_RNA (1)...(19): siRNA sense strand
aagaaacggaaggaagaaa

SEQ ID NO: 2461502 - RNA, 19 nt, Homo sapiens
  misc_RNA (1)...(19): siRNA sense strand
gaagaacucuccagggauc

SEQ ID NO: 2461503 - RNA, 19 nt, Homo sapiens
  misc_RNA (1)...(19): siRNA sense strand
gagcagccauugaucggua

SEQ ID NO: 2461504 - RNA, 19 nt, Homo sapiens
  misc_RNA (1)...(19): siRNA sense strand
augaagaacucuccaggga

SEQ ID NO: 2461505 - RNA, 19 nt, Homo sapiens
  misc_RNA (1)...(19): siRNA sense strand
gaacauguugcgcuggcua

SEQ ID NO: 2461506 - RNA, 19 nt, Homo sapiens
  misc_RNA (1)...(19): siRNA sense strand
aagaaauacaagagacuca

SEQ ID NO: 2461507 - RNA, 19 nt, Homo sapiens
  misc_RNA (1)...(19): siRNA sense strand
aguaaaaggacuggaaaua

SEQ ID NO: 2461508 - RNA, 19 nt, Homo sapiens
  misc_RNA (1)...(19): siRNA sense strand
agaagaaauacaagagacu

SEQ ID NO: 2461509 - RNA, 19 nt, Homo sapiens
  misc_RNA (1)...(19): siRNA sense strand
aaguaaaaggacuggaaau

SEQ ID NO: 2461510 - RNA, 19 nt, Homo sapiens
  misc_RNA (1)...(19): siRNA sense strand
acaacuaccuguuugguga

SEQ ID NO: 2461511 - RNA, 19 nt, Homo sapiens
  misc_RNA (1)...(19): siRNA sense strand
uugcugaaacaaugaacaa

SEQ ID NO: 2461512 - RNA, 19 nt, Homo sapiens
  misc_RNA (1)...(19): siRNA sense strand
ccugagaagacuguggaua

SEQ ID NO: 2461513 - RNA, 19 nt, Homo sapiens
  misc_RNA (1)...(19): siRNA sense strand
aguuugagucugaggaugu

SEQ ID NO: 2461514 - RNA, 19 nt, Homo sapiens
  misc_RNA (1)...(19): siRNA sense strand
agucugaggauguugccaa

SEQ ID NO: 2461515 - RNA, 19 nt, Homo sapiens
  misc_RNA (1)...(19): siRNA sense strand
caaucagugaaacgguaua

SEQ ID NO: 2461516 - RNA, 19 nt, Homo sapiens
  misc_RNA (1)...(19): siRNA sense strand
cgguauaaucggaaucgga

SEQ ID NO: 2461517 - RNA, 19 nt, Homo sapiens
  misc_RNA (1)...(19): siRNA sense strand
gcaaagauaguaaaggcuu

SEQ ID NO: 2461518 - RNA, 19 nt, Homo sapiens
  misc_RNA (1)...(19): siRNA sense strand
guguuguucuccugggaca

SEQ ID NO: 2461519 - RNA, 19 nt, Homo sapiens
  misc_RNA (1)...(19): siRNA sense strand
acauagugauugaggccau

SEQ ID NO: 2461520 - RNA, 19 nt, Homo sapiens
  misc_RNA (1)...(19): siRNA sense strand
gcgacuggaugguggcaca

SEQ ID NO: 2461521 - RNA, 19 nt, Homo sapiens
  misc_RNA (1)...(19): siRNA sense strand
cuuugagcccuuugguaaa

SEQ ID NO: 2461522 - RNA, 19 nt, Homo sapiens
  misc_RNA (1)...(19): siRNA sense strand
uggcagaaggcgcuggaau

SEQ ID NO: 2461523 - RNA, 19 nt, Homo sapiens
  misc_RNA (1)...(19): siRNA sense strand
ggaucgguauagacggaga

SEQ ID NO: 2461524 - RNA, 19 nt, Homo sapiens
  misc_RNA (1)...(19): siRNA sense strand
guugaauggguuugagcuu

SEQ ID NO: 2461525 - RNA, 19 nt, Homo sapiens
  misc_RNA (1)...(19): siRNA sense strand
aaaagaagaggaugagcaa

SEQ ID NO: 2461526 - RNA, 19 nt, Homo sapiens
  misc_RNA (1)...(19): siRNA sense strand
aagcaaucguagucgagau

SEQ ID NO: 2461527 - RNA, 19 nt, Homo sapiens
  misc_RNA (1)...(19): siRNA sense strand
uggaacaguugaauggguu

SEQ ID NO: 2461528 - RNA, 19 nt, Homo sapiens
  misc_RNA (1)...(19): siRNA sense strand
cgggaucgguauagacgga

SEQ ID NO: 2461529 - RNA, 19 nt, Homo sapiens
  misc_RNA (1)...(19): siRNA sense strand
guuuucagcucauggcaaa

SEQ ID NO: 2461530 - RNA, 19 nt, Homo sapiens
  misc_RNA (1)...(19): siRNA sense strand
aguccucauuucagagaga

SEQ ID NO: 2461531 - RNA, 19 nt, Homo sapiens
  misc_RNA (1)...(19): siRNA sense strand
gcaaaagggcaauggugga

SEQ ID NO: 2461532 - RNA, 19 nt, Homo sapiens
  misc_RNA (1)...(19): siRNA sense strand
guauagacggagaaauagu

SEQ ID NO: 2461533 - RNA, 19 nt, Homo sapiens
  misc_RNA (1)...(19): siRNA sense strand
ucgugaggaucgugugcau

SEQ ID NO: 2461534 - RNA, 19 nt, Homo sapiens
  misc_RNA (1)...(19): siRNA sense strand
gggaagacuugacugcaca

SEQ ID NO: 2461535 - RNA, 19 nt, Homo sapiens
  misc_RNA (1)...(19): siRNA sense strand
ucaucauggugguggcaau

SEQ ID NO: 2461536 - RNA, 19 nt, Homo sapiens
  misc_RNA (1)...(19): siRNA sense strand
agacguagacacugggcuu

SEQ ID NO: 2461537 - RNA, 19 nt, Homo sapiens
  misc_RNA (1)...(19): siRNA sense strand
aagccagucugaugggcaa

SEQ ID NO: 2461538 - RNA, 19 nt, Homo sapiens
  misc_RNA (1)...(19): siRNA sense strand
ucaauuuggccguggcuga

SEQ ID NO: 2461539 - RNA, 19 nt, Homo sapiens
  misc_RNA (1)...(19): siRNA sense strand
augaagaccuggaagccca

SEQ ID NO: 2461540 - RNA, 19 nt, Homo sapiens
  misc_RNA (1)...(19): siRNA sense strand
ggaaauaccaagauggaac

SEQ ID NO: 2461541 - RNA, 19 nt, Homo sapiens
  misc_RNA (1)...(19): siRNA sense strand
aaauaggagcacauggaaa

SEQ ID NO: 2461542 - RNA, 19 nt, Homo sapiens
  misc_RNA (1)...(19): siRNA sense strand
ggucaaaauaggagcacau

SEQ ID NO: 2461543 - RNA, 19 nt, Homo sapiens
  misc_RNA (1)...(19): siRNA sense strand
aauaggagcacauggaaaa

SEQ ID NO: 2461544 - RNA, 19 nt, Homo sapiens
  misc_RNA (1)...(19): siRNA sense strand
ggauaauauuaaugcagcu

SEQ ID NO: 2461545 - RNA, 19 nt, Homo sapiens
  misc_RNA (1)...(19): siRNA sense strand
cgcgaaugccguagggcuu

SEQ ID NO: 2461546 - RNA, 19 nt, Homo sapiens
  misc_RNA (1)...(19): siRNA sense strand
gucuaagugaagaggucaa

SEQ ID NO: 2461547 - RNA, 19 nt, Homo sapiens
  misc_RNA (1)...(19): siRNA sense strand
guggaguccuuguggaacu

SEQ ID NO: 2461548 - RNA, 19 nt, Homo sapiens
  misc_RNA (1)...(19): siRNA sense strand
ugguggaguccuuguggaa

SEQ ID NO: 2461549 - RNA, 19 nt, Homo sapiens
  misc_RNA (1)...(19): siRNA sense strand
ucugcaucgagguggauaa

SEQ ID NO: 2461550 - RNA, 19 nt, Homo sapiens
  misc_RNA (1)...(19): siRNA sense strand
cagucuaagugaagagguc

SEQ ID NO: 2461551 - RNA, 19 nt, Homo sapiens
  misc_RNA (1)...(19): siRNA sense strand
uggaaaaggcugcagcauu

SEQ ID NO: 2461552 - RNA, 19 nt, Homo sapiens
  misc_RNA (1)...(19): siRNA sense strand
agacaaaccaggucggaga

SEQ ID NO: 2461553 - RNA, 19 nt, Homo sapiens
  misc_RNA (1)...(19): siRNA sense strand
cagcaguuagugagaggaa

SEQ ID NO: 2461554 - RNA, 19 nt, Homo sapiens
  misc_RNA (1)...(19): siRNA sense strand
gcugaagacauuauggaga

SEQ ID NO: 2461555 - RNA, 19 nt, Homo sapiens
  misc_RNA (1)...(19): siRNA sense strand
auggagaaagacuggaaua

SEQ ID NO: 2461556 - RNA, 19 nt, Homo sapiens
  misc_RNA (1)...(19): siRNA sense strand
agacaagaagugcuggaau

SEQ ID NO: 2461557 - RNA, 19 nt, Homo sapiens
  misc_RNA (1)...(19): siRNA sense strand
guuagugagaggaagaaaa

SEQ ID NO: 2461558 - RNA, 19 nt, Homo sapiens
  misc_RNA (1)...(19): siRNA sense strand
aucccaagcugaaaggcaa

SEQ ID NO: 2461559 - RNA, 19 nt, Homo sapiens
  misc_RNA (1)...(19): siRNA sense strand
caaccgagcacauugguga

SEQ ID NO: 2461560 - RNA, 19 nt, Homo sapiens
  misc_RNA (1)...(19): siRNA sense strand
ugccaaugugcuagccaaa

SEQ ID NO: 2461561 - RNA, 19 nt, Homo sapiens
  misc_RNA (1)...(19): siRNA sense strand
agaaagucacagagguaau

SEQ ID NO: 2461562 - RNA, 19 nt, Homo sapiens
  misc_RNA (1)...(19): siRNA sense strand
ccgaggacuagcagacaaa

SEQ ID NO: 2461563 - RNA, 19 nt, Homo sapiens
  misc_RNA (1)...(19): siRNA sense strand
gaguacaagaacuggguga

SEQ ID NO: 2461564 - RNA, 19 nt, Homo sapiens
  misc_RNA (1)...(19): siRNA sense strand
ccgaggaagaucagcgaga

SEQ ID NO: 2461565 - RNA, 19 nt, Homo sapiens
  misc_RNA (1)...(19): siRNA sense strand
gcugaauggaaaagggaga

SEQ ID NO: 2461566 - RNA, 19 nt, Homo sapiens
  misc_RNA (1)...(19): siRNA sense strand
cuucaugccccgaggacua

SEQ ID NO: 2461567 - RNA, 19 nt, Homo sapiens
  misc_RNA (1)...(19): siRNA sense strand
ugcaguuacuaaaggagaa

SEQ ID NO: 2461568 - RNA, 19 nt, Homo sapiens
  misc_RNA (1)...(19): siRNA sense strand
cagcgagaugggugugaau

SEQ ID NO: 2461569 - RNA, 19 nt, Homo sapiens
  misc_RNA (1)...(19): siRNA sense strand
ucaacugcgccgaguacaa

SEQ ID NO: 2461570 - RNA, 19 nt, Homo sapiens
  misc_RNA (1)...(19): siRNA sense strand
cuggaaguggugaaggaau

SEQ ID NO: 2461571 - RNA, 19 nt, Homo sapiens
  misc_RNA (1)...(19): siRNA sense strand
ggagaugugcacuggggaa

SEQ ID NO: 2461572 - RNA, 19 nt, Homo sapiens
  misc_RNA (1)...(19): siRNA sense strand
aggacuagcagacaaacaa

SEQ ID NO: 2461573 - RNA, 19 nt, Homo sapiens
  misc_RNA (1)...(19): siRNA sense strand
ucugagaaacaaugaggau

SEQ ID NO: 2461574 - RNA, 19 nt, Homo sapiens
  misc_RNA (1)...(19): siRNA sense strand
gaaagaaagucacagaggu

SEQ ID NO: 2461575 - RNA, 19 nt, Homo sapiens
  misc_RNA (1)...(19): siRNA sense strand
uguuaaaaccaguggguca

SEQ ID NO: 2461576 - RNA, 19 nt, Homo sapiens
  misc_RNA (1)...(19): siRNA sense strand
caacaacagugaauggcuu

SEQ ID NO: 2461577 - RNA, 19 nt, Homo sapiens
  misc_RNA (1)...(19): siRNA sense strand
ugaugaaguaccagcagaa

SEQ ID NO: 2461578 - RNA, 19 nt, Homo sapiens
  misc_RNA (1)...(19): siRNA sense strand
cugguguggaauugagaaa

SEQ ID NO: 2461579 - RNA, 19 nt, Homo sapiens
  misc_RNA (1)...(19): siRNA sense strand
gcagaaagcagccgggaug

SEQ ID NO: 2461580 - RNA, 19 nt, Homo sapiens
  misc_RNA (1)...(19): siRNA sense strand
accagguggaaguggaaua

SEQ ID NO: 2461581 - RNA, 19 nt, Homo sapiens
  misc_RNA (1)...(19): siRNA sense strand
ccugaggagcccacggaau

SEQ ID NO: 2461582 - RNA, 19 nt, Homo sapiens
  misc_RNA (1)...(19): siRNA sense strand
agcaggaggugaagaggga

SEQ ID NO: 2461583 - RNA, 19 nt, Homo sapiens
  misc_RNA (1)...(19): siRNA sense strand
gugaagagggaccgggugu

SEQ ID NO: 2461584 - RNA, 19 nt, Homo sapiens
  misc_RNA (1)...(19): siRNA sense strand
gcuuggaggaugaugaagu

SEQ ID NO: 2461585 - RNA, 19 nt, Homo sapiens
  misc_RNA (1)...(19): siRNA sense strand
cgguccaacaacagugaau

SEQ ID NO: 2461586 - RNA, 19 nt, Homo sapiens
  misc_RNA (1)...(19): siRNA sense strand
gaauaugucaccauggcuu

SEQ ID NO: 2461587 - RNA, 19 nt, Homo sapiens
  misc_RNA (1)...(19): siRNA sense strand
cuuucaaacuggagaguau

SEQ ID NO: 2461588 - RNA, 19 nt, Homo sapiens
  misc_RNA (1)...(19): siRNA sense strand
cugaugaagaagugauuaa

SEQ ID NO: 2461589 - RNA, 19 nt, Homo sapiens
  misc_RNA (1)...(19): siRNA sense strand
uguuuaugcuacauggaaa

SEQ ID NO: 2461590 - RNA, 19 nt, Homo sapiens
  misc_RNA (1)...(19): siRNA sense strand
ggacacaguaacaggacuu

SEQ ID NO: 2461591 - RNA, 19 nt, Homo sapiens
  misc_RNA (1)...(19): siRNA sense strand
cugaagaagauaaaugcaa

SEQ ID NO: 2461592 - RNA, 19 nt, Homo sapiens
  misc_RNA (1)...(19): siRNA sense strand
augcaauaacugugaucaa

SEQ ID NO: 2461593 - RNA, 19 nt, Homo sapiens
  misc_RNA (1)...(19): siRNA sense strand
aaguagaaguacggaaauu

SEQ ID NO: 2461594 - RNA, 19 nt, Homo sapiens
  misc_RNA (1)...(19): siRNA sense strand
cagauuauggauuggauau

SEQ ID NO: 2461595 - RNA, 19 nt, Homo sapiens
  misc_RNA (1)...(19): siRNA sense strand
ggacagaacccuuggugcu

SEQ ID NO: 2461596 - RNA, 19 nt, Homo sapiens
  misc_RNA (1)...(19): siRNA sense strand
uaaugaugccagaagcaaa

SEQ ID NO: 2461597 - RNA, 19 nt, Homo sapiens
  misc_RNA (1)...(19): siRNA sense strand
auguaaaccuggauaaagu

SEQ ID NO: 2461598 - RNA, 19 nt, Homo sapiens
  misc_RNA (1)...(19): siRNA sense strand
guguaaagcagaaccauca

SEQ ID NO: 2461599 - RNA, 19 nt, Homo sapiens
  misc_RNA (1)...(19): siRNA sense strand
ugagaaaauggaagagcaa

SEQ ID NO: 2461600 - RNA, 19 nt, Homo sapiens
  misc_RNA (1)...(19): siRNA sense strand
ccagauuauggauuggaua

SEQ ID NO: 2461601 - RNA, 19 nt, Homo sapiens
  misc_RNA (1)...(19): siRNA sense strand
ggagcuggucagugaaaca

SEQ ID NO: 2461602 - RNA, 19 nt, Homo sapiens
  misc_RNA (1)...(19): siRNA sense strand
agugaaacaaggucaaauu

SEQ ID NO: 2461603 - RNA, 19 nt, Homo sapiens
  misc_RNA (1)...(19): siRNA sense strand
aagauguaaaccuggauaa

SEQ ID NO: 2461604 - RNA, 19 nt, Homo sapiens
  misc_RNA (1)...(19): siRNA sense strand
ggucagugaaacaagguca

SEQ ID NO: 2461605 - RNA, 19 nt, Homo sapiens
  misc_RNA (1)...(19): siRNA sense strand
agauguaaaccuggauaaa

SEQ ID NO: 2461606 - RNA, 19 nt, Homo sapiens
  misc_RNA (1)...(19): siRNA sense strand
agcagaaguauauaggaua

SEQ ID NO: 2461607 - RNA, 19 nt, Homo sapiens
  misc_RNA (1)...(19): siRNA sense strand
gaagugauuaaauggacaa

SEQ ID NO: 2461608 - RNA, 19 nt, Homo sapiens
  misc_RNA (1)...(19): siRNA sense strand
ccaccuaccuugaaccaga

SEQ ID NO: 2461609 - RNA, 19 nt, Homo sapiens
  misc_RNA (1)...(19): siRNA sense strand
agaagugauuaaauggaca

SEQ ID NO: 2461610 - RNA, 19 nt, Homo sapiens
  misc_RNA (1)...(19): siRNA sense strand
cuuaauggagauugccuua

SEQ ID NO: 2461611 - RNA, 19 nt, Homo sapiens
  misc_RNA (1)...(19): siRNA sense strand
uggaagagcaaacugaaau

SEQ ID NO: 2461612 - RNA, 19 nt, Homo sapiens
  misc_RNA (1)...(19): siRNA sense strand
cuucaugcccugugguaca

SEQ ID NO: 2461613 - RNA, 19 nt, Homo sapiens
  misc_RNA (1)...(19): siRNA sense strand
agaccaguuucuagugaca

SEQ ID NO: 2461614 - RNA, 19 nt, Homo sapiens
  misc_RNA (1)...(19): siRNA sense strand
auggaagagcaaacugaaa

SEQ ID NO: 2461615 - RNA, 19 nt, Homo sapiens
  misc_RNA (1)...(19): siRNA sense strand
aggugcuguucgugguuua

SEQ ID NO: 2461616 - RNA, 19 nt, Homo sapiens
  misc_RNA (1)...(19): siRNA sense strand
uagucaagauccaggaacu

SEQ ID NO: 2461617 - RNA, 19 nt, Homo sapiens
  misc_RNA (1)...(19): siRNA sense strand
cauucagcauauagcgaga

SEQ ID NO: 2461618 - RNA, 19 nt, Homo sapiens
  misc_RNA (1)...(19): siRNA sense strand
agcaaagaggcuacugaua

SEQ ID NO: 2461619 - RNA, 19 nt, Homo sapiens
  misc_RNA (1)...(19): siRNA sense strand
uugaagugcuggagcucuu

SEQ ID NO: 2461620 - RNA, 19 nt, Homo sapiens
  misc_RNA (1)...(19): siRNA sense strand
guuuaugcuacauggaaaa

SEQ ID NO: 2461621 - RNA, 19 nt, Homo sapiens
  misc_RNA (1)...(19): siRNA sense strand
agacgaaaacucuguuaua

SEQ ID NO: 2461622 - RNA, 19 nt, Homo sapiens
  misc_RNA (1)...(19): siRNA sense strand
cuggaaagguguaaagcag

SEQ ID NO: 2461623 - RNA, 19 nt, Homo sapiens
  misc_RNA (1)...(19): siRNA sense strand
ccugaaguguagcgaaaau

SEQ ID NO: 2461624 - RNA, 19 nt, Homo sapiens
  misc_RNA (1)...(19): siRNA sense strand
guacacgauaauaagguuu

SEQ ID NO: 2461625 - RNA, 19 nt, Homo sapiens
  misc_RNA (1)...(19): siRNA sense strand
cauugucagcagaaguaua

SEQ ID NO: 2461626 - RNA, 19 nt, Homo sapiens
  misc_RNA (1)...(19): siRNA sense strand
acugugaucaagaguuaaa

SEQ ID NO: 2461627 - RNA, 19 nt, Homo sapiens
  misc_RNA (1)...(19): siRNA sense strand
cuguuuauucugagcucaa

SEQ ID NO: 2461628 - RNA, 19 nt, Homo sapiens
  misc_RNA (1)...(19): siRNA sense strand
acucaagcauagucaagau

SEQ ID NO: 2461629 - RNA, 19 nt, Homo sapiens
  misc_RNA (1)...(19): siRNA sense strand
ugaagugaguuuacagcca

SEQ ID NO: 2461630 - RNA, 19 nt, Homo sapiens
  misc_RNA (1)...(19): siRNA sense strand
agacauuucuucugccuca

SEQ ID NO: 2461631 - RNA, 19 nt, Homo sapiens
  misc_RNA (1)...(19): siRNA sense strand
cugguauuauggagaacau

SEQ ID NO: 2461632 - RNA, 19 nt, Homo sapiens
  misc_RNA (1)...(19): siRNA sense strand
caauccugaagaagauaaa

SEQ ID NO: 2461633 - RNA, 19 nt, Homo sapiens
  misc_RNA (1)...(19): siRNA sense strand
cuagcagcuucuaaggaau

SEQ ID NO: 2461634 - RNA, 19 nt, Homo sapiens
  misc_RNA (1)...(19): siRNA sense strand
caagcauagucaagaucca

SEQ ID NO: 2461635 - RNA, 19 nt, Homo sapiens
  misc_RNA (1)...(19): siRNA sense strand
caauugaagugcuggagcu

SEQ ID NO: 2461636 - RNA, 19 nt, Homo sapiens
  misc_RNA (1)...(19): siRNA sense strand
aguccuaggaaguccacua

SEQ ID NO: 2461637 - RNA, 19 nt, Homo sapiens
  misc_RNA (1)...(19): siRNA sense strand
aguaacaggacuucuggaa

SEQ ID NO: 2461638 - RNA, 19 nt, Homo sapiens
  misc_RNA (1)...(19): siRNA sense strand
gaguuuacagccagagguu

SEQ ID NO: 2461639 - RNA, 19 nt, Homo sapiens
  misc_RNA (1)...(19): siRNA sense strand
cuguacaugaugagaaaau

SEQ ID NO: 2461640 - RNA, 19 nt, Homo sapiens
  misc_RNA (1)...(19): siRNA sense strand
gcagagaacgacagggaca

SEQ ID NO: 2461641 - RNA, 19 nt, Homo sapiens
  misc_RNA (1)...(19): siRNA sense strand
gggcagagaacgacaggga

SEQ ID NO: 2461642 - RNA, 19 nt, Homo sapiens
  misc_RNA (1)...(19): siRNA sense strand
acagaugcccagagaacau

SEQ ID NO: 2461643 - RNA, 19 nt, Homo sapiens
  misc_RNA (1)...(19): siRNA sense strand
gggauaagacagaugccca

SEQ ID NO: 2461644 - RNA, 19 nt, Homo sapiens
  misc_RNA (1)...(19): siRNA sense strand
cuggugaggucguggccau

SEQ ID NO: 2461645 - RNA, 19 nt, Homo sapiens
  misc_RNA (1)...(19): siRNA sense strand
uuugaugcuuuuagggaua

SEQ ID NO: 2461646 - RNA, 19 nt, Homo sapiens
  misc_RNA (1)...(19): siRNA sense strand
guguuugaguuuauggguu

SEQ ID NO: 2461647 - RNA, 19 nt, Homo sapiens
  misc_RNA (1)...(19): siRNA sense strand
cugcagacacugaccugaa

SEQ ID NO: 2461648 - RNA, 19 nt, Homo sapiens
  misc_RNA (1)...(19): siRNA sense strand
aggaccaggccgugacaga

SEQ ID NO: 2461649 - RNA, 19 nt, Homo sapiens
  misc_RNA (1)...(19): siRNA sense strand
augcaguagcagagggaau

SEQ ID NO: 2461650 - RNA, 19 nt, Homo sapiens
  misc_RNA (1)...(19): siRNA sense strand
aggcauaaugaaugaugaa

SEQ ID NO: 2461651 - RNA, 19 nt, Homo sapiens
  misc_RNA (1)...(19): siRNA sense strand
auacagaauuuaagccuca

SEQ ID NO: 2461652 - RNA, 19 nt, Homo sapiens
  misc_RNA (1)...(19): siRNA sense strand
ugaugaaagggaugugaau

SEQ ID NO: 2461653 - RNA, 19 nt, Homo sapiens
  misc_RNA (1)...(19): siRNA sense strand
ggaugugaauuauuggaca

SEQ ID NO: 2461654 - RNA, 19 nt, Homo sapiens
  misc_RNA (1)...(19): siRNA sense strand
uggcaaaugcaguagcaga

SEQ ID NO: 2461655 - RNA, 19 nt, Homo sapiens
  misc_RNA (1)...(19): siRNA sense strand
acguauaugaaguggagga

SEQ ID NO: 2461656 - RNA, 19 nt, Homo sapiens
  misc_RNA (1)...(19): siRNA sense strand
augaaguggaggagcccaa

SEQ ID NO: 2461657 - RNA, 19 nt, Homo sapiens
  misc_RNA (1)...(19): siRNA sense strand
gcucagaagaaaacaucua

SEQ ID NO: 2461658 - RNA, 19 nt, Homo sapiens
  misc_RNA (1)...(19): siRNA sense strand
gccaaugaguuacgggacu

SEQ ID NO: 2461659 - RNA, 19 nt, Homo sapiens
  misc_RNA (1)...(19): siRNA sense strand
gccaaugacuuacgggacu

SEQ ID NO: 2461660 - RNA, 19 nt, Homo sapiens
  misc_RNA (1)...(19): siRNA sense strand
gucccugaccauagagaau

SEQ ID NO: 2461661 - RNA, 19 nt, Homo sapiens
  misc_RNA (1)...(19): siRNA sense strand
gggauuuccgcaaaggaga

SEQ ID NO: 2461662 - RNA, 19 nt, Homo sapiens
  misc_RNA (1)...(19): siRNA sense strand
auagcaaagagaagauaca

SEQ ID NO: 2461663 - RNA, 19 nt, Homo sapiens
  misc_RNA (1)...(19): siRNA sense strand
gcauggacuucguggccua

SEQ ID NO: 2461664 - RNA, 19 nt, Homo sapiens
  misc_RNA (1)...(19): siRNA sense strand
cugaaagcaauuagagaaa

SEQ ID NO: 2461665 - RNA, 19 nt, Homo sapiens
  misc_RNA (1)...(19): siRNA sense strand
cagagaaggaaaugagcaa

SEQ ID NO: 2461666 - RNA, 19 nt, Homo sapiens
  misc_RNA (1)...(19): siRNA sense strand
gcagcaacaagaagggaaa

SEQ ID NO: 2461667 - RNA, 19 nt, Homo sapiens
  misc_RNA (1)...(19): siRNA sense strand
gcauaggagcaaagugcaa

SEQ ID NO: 2461668 - RNA, 19 nt, Homo sapiens
  misc_RNA (1)...(19): siRNA sense strand
acggaaagcaagaggugua

SEQ ID NO: 2461669 - RNA, 19 nt, Homo sapiens
  misc_RNA (1)...(19): siRNA sense strand
gugacaaagauauggaaau

SEQ ID NO: 2461670 - RNA, 19 nt, Homo sapiens
  misc_RNA (1)...(19): siRNA sense strand
uagaaaagguagaugacaa

SEQ ID NO: 2461671 - RNA, 19 nt, Homo sapiens
  misc_RNA (1)...(19): siRNA sense strand
ccgaaagagcaguuagaga

SEQ ID NO: 2461672 - RNA, 19 nt, Homo sapiens
  misc_RNA (1)...(19): siRNA sense strand
ugagaaaacuagauggcaa

SEQ ID NO: 2461673 - RNA, 19 nt, Homo sapiens
  misc_RNA (1)...(19): siRNA sense strand
agauauaggaggacuggaa

SEQ ID NO: 2461674 - RNA, 19 nt, Homo sapiens
  misc_RNA (1)...(19): siRNA sense strand
cuggaagaauugauagaau

SEQ ID NO: 2461675 - RNA, 19 nt, Homo sapiens
  misc_RNA (1)...(19): siRNA sense strand
gagugaaauggcacagaaa

SEQ ID NO: 2461676 - RNA, 19 nt, Homo sapiens
  misc_RNA (1)...(19): siRNA sense strand
uaacagaaauggaugggau

SEQ ID NO: 2461677 - RNA, 19 nt, Homo sapiens
  misc_RNA (1)...(19): siRNA sense strand
gaaacugcuucgaagggua

SEQ ID NO: 2461678 - RNA, 19 nt, Homo sapiens
  misc_RNA (1)...(19): siRNA sense strand
caaugagaguggacugaau

SEQ ID NO: 2461679 - RNA, 19 nt, Homo sapiens
  misc_RNA (1)...(19): siRNA sense strand
aagaagagagacugcuaaa

SEQ ID NO: 2461680 - RNA, 19 nt, Homo sapiens
  misc_RNA (1)...(19): siRNA sense strand
gggaaauauuuaagcugca

SEQ ID NO: 2461681 - RNA, 19 nt, Homo sapiens
  misc_RNA (1)...(19): siRNA sense strand
cuuacuaguuugaacggaa

SEQ ID NO: 2461682 - RNA, 19 nt, Homo sapiens
  misc_RNA (1)...(19): siRNA sense strand
agaaaagguagaugacaaa

SEQ ID NO: 2461683 - RNA, 19 nt, Homo sapiens
  misc_RNA (1)...(19): siRNA sense strand
aguuagaucuggaggauac

SEQ ID NO: 2461684 - RNA, 19 nt, Homo sapiens
  misc_RNA (1)...(19): siRNA sense strand
ggaugcacuuuguccgaaa

SEQ ID NO: 2461685 - RNA, 19 nt, Homo sapiens
  misc_RNA (1)...(19): siRNA sense strand
gagcagagauuguagcugu

SEQ ID NO: 2461686 - RNA, 19 nt, Homo sapiens
  misc_RNA (1)...(19): siRNA sense strand
aagaauagaaagcgguuga

SEQ ID NO: 2461687 - RNA, 19 nt, Homo sapiens
  misc_RNA (1)...(19): siRNA sense strand
cagaaguaagugaaggaca

SEQ ID NO: 2461688 - RNA, 19 nt, Homo sapiens
  misc_RNA (1)...(19): siRNA sense strand
ugagcaacuuacugaagaa

SEQ ID NO: 2461689 - RNA, 19 nt, Homo sapiens
  misc_RNA (1)...(19): siRNA sense strand
acuccaugccugucaguaa

SEQ ID NO: 2461690 - RNA, 19 nt, Homo sapiens
  misc_RNA (1)...(19): siRNA sense strand
cugguuguauccugagaaa

SEQ ID NO: 2461691 - RNA, 19 nt, Homo sapiens
  misc_RNA (1)...(19): siRNA sense strand
gagaaggaaaugagcaacu

SEQ ID NO: 2461692 - RNA, 19 nt, Homo sapiens
  misc_RNA (1)...(19): siRNA sense strand
aagauuacucugaaggauu

SEQ ID NO: 2461693 - RNA, 19 nt, Homo sapiens
  misc_RNA (1)...(19): siRNA sense strand
ugcuacaggcugaggaaau

SEQ ID NO: 2461694 - RNA, 19 nt, Homo sapiens
  misc_RNA (1)...(19): siRNA sense strand
cgccagggcuguugcuaau

SEQ ID NO: 2461695 - RNA, 19 nt, Homo sapiens
  misc_RNA (1)...(19): siRNA sense strand
uuagagagaccuuccgaaa

SEQ ID NO: 2461696 - RNA, 19 nt, Homo sapiens
  misc_RNA (1)...(19): siRNA sense strand
accuagaauuccugaguca

SEQ ID NO: 2461697 - RNA, 19 nt, Homo sapiens
  misc_RNA (1)...(19): siRNA sense strand
aggaaauggauguggcacu

SEQ ID NO: 2461698 - RNA, 19 nt, Homo sapiens
  misc_RNA (1)...(19): siRNA sense strand
ccguacaagcugcaaguau

SEQ ID NO: 2461699 - RNA, 19 nt, Homo sapiens
  misc_RNA (1)...(19): siRNA sense strand
ugaagaagagagacugcua

SEQ ID NO: 2461700 - RNA, 19 nt, Homo sapiens
  misc_RNA (1)...(19): siRNA sense strand
gggaaauagcaauugaugu

SEQ ID NO: 2461701 - RNA, 19 nt, Homo sapiens
  misc_RNA (1)...(19): siRNA sense strand
cuaugaagucugcaaauau

SEQ ID NO: 2461702 - RNA, 19 nt, Homo sapiens
  misc_RNA (1)...(19): siRNA sense strand
uuacuaguuugaacggaaa

SEQ ID NO: 2461703 - RNA, 19 nt, Homo sapiens
  misc_RNA (1)...(19): siRNA sense strand
uggcuggacuggugaagau

SEQ ID NO: 2461704 - RNA, 19 nt, Homo sapiens
  misc_RNA (1)...(19): siRNA sense strand
uggagauggcaguggacuu

SEQ ID NO: 2461705 - RNA, 19 nt, Homo sapiens
  misc_RNA (1)...(19): siRNA sense strand
caugagggaaauagcaauu

SEQ ID NO: 2461706 - RNA, 19 nt, Homo sapiens
  misc_RNA (1)...(19): siRNA sense strand
uauaaaggggccugaauua

SEQ ID NO: 2461707 - RNA, 19 nt, Homo sapiens
  misc_RNA (1)...(19): siRNA sense strand
agcuaaaggaugugaccau

SEQ ID NO: 2461708 - RNA, 19 nt, Homo sapiens
  misc_RNA (1)...(19): siRNA sense strand
guguauacagccuggccua

SEQ ID NO: 2461709 - RNA, 19 nt, Homo sapiens
  misc_RNA (1)...(19): siRNA sense strand
acacugaugcccaaagaau

SEQ ID NO: 2461710 - RNA, 19 nt, Homo sapiens
  misc_RNA (1)...(19): siRNA sense strand
ggcccagaaugaaguggaa

SEQ ID NO: 2461711 - RNA, 19 nt, Homo sapiens
  misc_RNA (1)...(19): siRNA sense strand
cccagaaugaaguggaaaa

SEQ ID NO: 2461712 - RNA, 19 nt, Homo sapiens
  misc_RNA (1)...(19): siRNA sense strand
agugacaaagauauggaaa

SEQ ID NO: 2461713 - RNA, 19 nt, Homo sapiens
  misc_RNA (1)...(19): siRNA sense strand
agcaaaguuacgucagaua

SEQ ID NO: 2461714 - RNA, 19 nt, Homo sapiens
  misc_RNA (1)...(19): siRNA sense strand
aaauagugcucauggauac

SEQ ID NO: 2461715 - RNA, 19 nt, Homo sapiens
  misc_RNA (1)...(19): siRNA sense strand
uggaagaauugauagaauc

SEQ ID NO: 2461716 - RNA, 19 nt, Homo sapiens
  misc_RNA (1)...(19): siRNA sense strand
ggacucugacggugaccaa

SEQ ID NO: 2461717 - RNA, 19 nt, Homo sapiens
  misc_RNA (1)...(19): siRNA sense strand
uguaauuaaugguccugaa

SEQ ID NO: 2461718 - RNA, 19 nt, Homo sapiens
  misc_RNA (1)...(19): siRNA sense strand
uaagcaaauucuaugguga

SEQ ID NO: 2461719 - RNA, 19 nt, Homo sapiens
  misc_RNA (1)...(19): siRNA sense strand
uugaacagcuaaaggaugu

SEQ ID NO: 2461720 - RNA, 19 nt, Homo sapiens
  misc_RNA (1)...(19): siRNA sense strand
uuacugaagaagagagacu

SEQ ID NO: 2461721 - RNA, 19 nt, Homo sapiens
  misc_RNA (1)...(19): siRNA sense strand
guccugaaauuauaagcaa

SEQ ID NO: 2461722 - RNA, 19 nt, Homo sapiens
  misc_RNA (1)...(19): siRNA sense strand
aggauuucuuucaggcaau

SEQ ID NO: 2461723 - RNA, 19 nt, Homo sapiens
  misc_RNA (1)...(19): siRNA sense strand
cuuaaaacauccagagucu

SEQ ID NO: 2461724 - RNA, 19 nt, Homo sapiens
  misc_RNA (1)...(19): siRNA sense strand
cagaaauggaugggauuga

SEQ ID NO: 2461725 - RNA, 19 nt, Homo sapiens
  misc_RNA (1)...(19): siRNA sense strand
cuagaauuccugagucauu

SEQ ID NO: 2461726 - RNA, 19 nt, Homo sapiens
  misc_RNA (1)...(19): siRNA sense strand
gaucagacuucgcggcaac

SEQ ID NO: 2461727 - RNA, 19 nt, Homo sapiens
  misc_RNA (1)...(19): siRNA sense strand
cuacaguggugccgggaga

SEQ ID NO: 2461728 - RNA, 19 nt, Homo sapiens
  misc_RNA (1)...(19): siRNA sense strand
acguauuuccagacagcua

SEQ ID NO: 2461729 - RNA, 19 nt, Homo sapiens
  misc_RNA (1)...(19): siRNA sense strand
aggaugacgaggaaaguga

SEQ ID NO: 2461730 - RNA, 19 nt, Homo sapiens
  misc_RNA (1)...(19): siRNA sense strand
acgaaugcacgcagauuau

SEQ ID NO: 2461731 - RNA, 19 nt, Homo sapiens
  misc_RNA (1)...(19): siRNA sense strand
gauagagaaaugaggaaaa

SEQ ID NO: 2461732 - RNA, 19 nt, Homo sapiens
  misc_RNA (1)...(19): siRNA sense strand
acaacugaagauagagaaa

SEQ ID NO: 2461733 - RNA, 19 nt, Homo sapiens
  misc_RNA (1)...(19): siRNA sense strand
acagaaaggaggugcugaa

SEQ ID NO: 2461734 - RNA, 19 nt, Homo sapiens
  misc_RNA (1)...(19): siRNA sense strand
aagcaauguuaguugucaa

SEQ ID NO: 2461735 - RNA, 19 nt, Homo sapiens
  misc_RNA (1)...(19): siRNA sense strand
cauaaagagcaaagcaguu

SEQ ID NO: 2461736 - RNA, 19 nt, Homo sapiens
  misc_RNA (1)...(19): siRNA sense strand
agauagagaaaugaggaaa

SEQ ID NO: 2461737 - RNA, 19 nt, Homo sapiens
  misc_RNA (1)...(19): siRNA sense strand
gccuggagacguaaggaaa

SEQ ID NO: 2461738 - RNA, 19 nt, Homo sapiens
  misc_RNA (1)...(19): siRNA sense strand
aagauagagaaaugaggaa

SEQ ID NO: 2461739 - RNA, 19 nt, Homo sapiens
  misc_RNA (1)...(19): siRNA sense strand
ucuacaaaugguugguuua

SEQ ID NO: 2461740 - RNA, 19 nt, Homo sapiens
  misc_RNA (1)...(19): siRNA sense strand
cagcaaugagucuguacaa

SEQ ID NO: 2461741 - RNA, 19 nt, Homo sapiens
  misc_RNA (1)...(19): siRNA sense strand
cuguagaagauuugauguu

SEQ ID NO: 2461742 - RNA, 19 nt, Homo sapiens
  misc_RNA (1)...(19): siRNA sense strand
gugcaacaaaugaagaaaa

SEQ ID NO: 2461743 - RNA, 19 nt, Homo sapiens
  misc_RNA (1)...(19): siRNA sense strand
agguaacagaucugaauuu

SEQ ID NO: 2461744 - RNA, 19 nt, Homo sapiens
  misc_RNA (1)...(19): siRNA sense strand
cuguuggcauaaagagcaa

SEQ ID NO: 2461745 - RNA, 19 nt, Homo sapiens
  misc_RNA (1)...(19): siRNA sense strand
gcauaaagagcaaagcagu

SEQ ID NO: 2461746 - RNA, 19 nt, Homo sapiens
  misc_RNA (1)...(19): siRNA sense strand
ugucaauaacaguguccua

SEQ ID NO: 2461747 - RNA, 19 nt, Homo sapiens
  misc_RNA (1)...(19): siRNA sense strand
aaugaagacaggugggcuu

SEQ ID NO: 2461748 - RNA, 19 nt, Homo sapiens
  misc_RNA (1)...(19): siRNA sense strand
ugugauacuucuaggccuu

SEQ ID NO: 2461749 - RNA, 19 nt, Homo sapiens
  misc_RNA (1)...(19): siRNA sense strand
ccuggagacguaaggaaau

SEQ ID NO: 2461750 - RNA, 19 nt, Homo sapiens
  misc_RNA (1)...(19): siRNA sense strand
aagaauggugagaguauca

SEQ ID NO: 2461751 - RNA, 19 nt, Homo sapiens
  misc_RNA (1)...(19): siRNA sense strand
cuuccaaguacccuagaaa

SEQ ID NO: 2461752 - RNA, 19 nt, Homo sapiens
  misc_RNA (1)...(19): siRNA sense strand
cugaauuuccugaugugaa

SEQ ID NO: 2461753 - RNA, 19 nt, Homo sapiens
  misc_RNA (1)...(19): siRNA sense strand
agacguaaggaaaugaaaa

SEQ ID NO: 2461754 - RNA, 19 nt, Homo sapiens
  misc_RNA (1)...(19): siRNA sense strand
caaccaaggacuacugcau

SEQ ID NO: 2461755 - RNA, 19 nt, Homo sapiens
  misc_RNA (1)...(19): siRNA sense strand
ugaacagauuguccagcaa

SEQ ID NO: 2461756 - RNA, 19 nt, Homo sapiens
  misc_RNA (1)...(19): siRNA sense strand
ccauauggacaaugcacga

SEQ ID NO: 2461757 - RNA, 19 nt, Homo sapiens
  misc_RNA (1)...(19): siRNA sense strand
ugacaacugaagauagaga

SEQ ID NO: 2461758 - RNA, 19 nt, Homo sapiens
  misc_RNA (1)...(19): siRNA sense strand
cuguuucaauauuggguuu

SEQ ID NO: 2461759 - RNA, 19 nt, Homo sapiens
  misc_RNA (1)...(19): siRNA sense strand
gagacguaaggaaaugaaa

SEQ ID NO: 2461760 - RNA, 19 nt, Homo sapiens
  misc_RNA (1)...(19): siRNA sense strand
gaagauagagaaaugagga

SEQ ID NO: 2461761 - RNA, 19 nt, Homo sapiens
  misc_RNA (1)...(19): siRNA sense strand
auaagauaccauauggaca

SEQ ID NO: 2461762 - RNA, 19 nt, Homo sapiens
  misc_RNA (1)...(19): siRNA sense strand
ccugggaaguauuuggcua

SEQ ID NO: 2461763 - RNA, 19 nt, Homo sapiens
  misc_RNA (1)...(19): siRNA sense strand
ccaaagaacgugaggugcu

SEQ ID NO: 2461764 - RNA, 19 nt, Homo sapiens
  misc_RNA (1)...(19): siRNA sense strand
acuacuaacgagugguaca

SEQ ID NO: 2461765 - RNA, 19 nt, Homo sapiens
  misc_RNA (1)...(19): siRNA sense strand
ggggaggagcacagauauu

SEQ ID NO: 2461766 - RNA, 19 nt, Homo sapiens
  misc_RNA (1)...(19): siRNA sense strand
ccgugagcguggugaacaa

SEQ ID NO: 2461767 - RNA, 19 nt, Homo sapiens
  misc_RNA (1)...(19): siRNA sense strand
ccucagaaggacagcaaga

SEQ ID NO: 2461768 - RNA, 19 nt, Homo sapiens
  misc_RNA (1)...(19): siRNA sense strand
ccaauaagguacuaugcca

SEQ ID NO: 2461769 - RNA, 19 nt, Homo sapiens
  misc_RNA (1)...(19): siRNA sense strand
caauaagguacuaugccau

SEQ ID NO: 2461770 - RNA, 19 nt, Homo sapiens
  misc_RNA (1)...(19): siRNA sense strand
ccucaaaagaagaaagaaa

SEQ ID NO: 2461771 - RNA, 19 nt, Homo sapiens
  misc_RNA (1)...(19): siRNA sense strand
aggaaguagaagaaaguga

SEQ ID NO: 2461772 - RNA, 19 nt, Homo sapiens
  misc_RNA (1)...(19): siRNA sense strand
aguagaagaaagugaagau

SEQ ID NO: 2461773 - RNA, 19 nt, Homo sapiens
  misc_RNA (1)...(19): siRNA sense strand
agccaaaauugaagaagaa

SEQ ID NO: 2461774 - RNA, 19 nt, Homo sapiens
  misc_RNA (1)...(19): siRNA sense strand
aaguaagagcacaguguau

SEQ ID NO: 2461775 - RNA, 19 nt, Homo sapiens
  misc_RNA (1)...(19): siRNA sense strand
aaguuaugccuguccgaaa

SEQ ID NO: 2461776 - RNA, 19 nt, Homo sapiens
  misc_RNA (1)...(19): siRNA sense strand
aauugaggaaguagaagaa

SEQ ID NO: 2461777 - RNA, 19 nt, Homo sapiens
  misc_RNA (1)...(19): siRNA sense strand
agauaaagauaccaggaag

SEQ ID NO: 2461778 - RNA, 19 nt, Homo sapiens
  misc_RNA (1)...(19): siRNA sense strand
caggaagaguaaagggguu

SEQ ID NO: 2461779 - RNA, 19 nt, Homo sapiens
  misc_RNA (1)...(19): siRNA sense strand
ccaucaugaaagauaaaga

SEQ ID NO: 2461780 - RNA, 19 nt, Homo sapiens
  misc_RNA (1)...(19): siRNA sense strand
cagaagaagaaauugagga

SEQ ID NO: 2461781 - RNA, 19 nt, Homo sapiens
  misc_RNA (1)...(19): siRNA sense strand
aagaaauugaggaaguaga

SEQ ID NO: 2461782 - RNA, 19 nt, Homo sapiens
  misc_RNA (1)...(19): siRNA sense strand
ccaaaauugaagaagaaca

SEQ ID NO: 2461783 - RNA, 19 nt, Homo sapiens
  misc_RNA (1)...(19): siRNA sense strand
aagccaaaauugaagaaga

SEQ ID NO: 2461784 - RNA, 19 nt, Homo sapiens
  misc_RNA (1)...(19): siRNA sense strand
acgcccaaggauaaagaaa

SEQ ID NO: 2461785 - RNA, 19 nt, Homo sapiens
  misc_RNA (1)...(19): siRNA sense strand
uguuaugaauguggggaaa

SEQ ID NO: 2461786 - RNA, 19 nt, Homo sapiens
  misc_RNA (1)...(19): siRNA sense strand
cgcccaaggauaaagaaaa

SEQ ID NO: 2461787 - RNA, 19 nt, Homo sapiens
  misc_RNA (1)...(19): siRNA sense strand
caaaacuguaccagggcaa

SEQ ID NO: 2461788 - RNA, 19 nt, Homo sapiens
  misc_RNA (1)...(19): siRNA sense strand
ggaaauagagaccagggaa

SEQ ID NO: 2461789 - RNA, 19 nt, Homo sapiens
  misc_RNA (1)...(19): siRNA sense strand
cggagguggacgagugcaa

SEQ ID NO: 2461790 - RNA, 19 nt, Homo sapiens
  misc_RNA (1)...(19): siRNA sense strand
ccaacaggcugguggccau

SEQ ID NO: 2461791 - RNA, 19 nt, Homo sapiens
  misc_RNA (1)...(19): siRNA sense strand
ucucauaagccauggcaca

SEQ ID NO: 2461792 - RNA, 19 nt, Homo sapiens
  misc_RNA (1)...(19): siRNA sense strand
acauucaaacggaggaaau

SEQ ID NO: 2461793 - RNA, 19 nt, Homo sapiens
  misc_RNA (1)...(19): siRNA sense strand
ccuucaaaaucgaaaagua

SEQ ID NO: 2461794 - RNA, 19 nt, Homo sapiens
  misc_RNA (1)...(19): siRNA sense strand
gguaaugaauuuuggggca

SEQ ID NO: 2461795 - RNA, 19 nt, Homo sapiens
  misc_RNA (1)...(19): siRNA sense strand
gaaauagagaccagggaag

SEQ ID NO: 2461796 - RNA, 19 nt, Homo sapiens
  misc_RNA (1)...(19): siRNA sense strand
agacaagauuugagagugg

SEQ ID NO: 2461797 - RNA, 19 nt, Homo sapiens
  misc_RNA (1)...(19): siRNA sense strand
uugaauuaccaaaggcaga

SEQ ID NO: 2461798 - RNA, 19 nt, Homo sapiens
  misc_RNA (1)...(19): siRNA sense strand
augcuguaguuaugccaaa

SEQ ID NO: 2461799 - RNA, 19 nt, Homo sapiens
  misc_RNA (1)...(19): siRNA sense strand
ucacuuuauuauuggcaca

SEQ ID NO: 2461800 - RNA, 19 nt, Homo sapiens
  misc_RNA (1)...(19): siRNA sense strand
cggaggaaauagagaccag

SEQ ID NO: 2461801 - RNA, 19 nt, Homo sapiens
  misc_RNA (1)...(19): siRNA sense strand
uauucaaaccucagcaaca

SEQ ID NO: 2461802 - RNA, 19 nt, Homo sapiens
  misc_RNA (1)...(19): siRNA sense strand
auguaugggugguuguuga

SEQ ID NO: 2461803 - RNA, 19 nt, Homo sapiens
  misc_RNA (1)...(19): siRNA sense strand
uguuguaucuggaggcagu

SEQ ID NO: 2461804 - RNA, 19 nt, Homo sapiens
  misc_RNA (1)...(19): siRNA sense strand
auugauacuccaagguuau

SEQ ID NO: 2461805 - RNA, 19 nt, Homo sapiens
  misc_RNA (1)...(19): siRNA sense strand
aagccauggcacaagacaa

SEQ ID NO: 2461806 - RNA, 19 nt, Homo sapiens
  misc_RNA (1)...(19): siRNA sense strand
caucaaaaugggugggaaa

SEQ ID NO: 2461807 - RNA, 19 nt, Homo sapiens
  misc_RNA (1)...(19): siRNA sense strand
cguaauagacaaugacaau

SEQ ID NO: 2461808 - RNA, 19 nt, Homo sapiens
  misc_RNA (1)...(19): siRNA sense strand
gaaacuagccagaggcaga

SEQ ID NO: 2461809 - RNA, 19 nt, Homo sapiens
  misc_RNA (1)...(19): siRNA sense strand
uagaagaaauggagagacu

SEQ ID NO: 2461810 - RNA, 19 nt, Homo sapiens
  misc_RNA (1)...(19): siRNA sense strand
caagaaacucucugggcaa

SEQ ID NO: 2461811 - RNA, 19 nt, Homo sapiens
  misc_RNA (1)...(19): siRNA sense strand
ggguauaagugaagaacag

SEQ ID NO: 2461812 - RNA, 19 nt, Homo sapiens
  misc_RNA (1)...(19): siRNA sense strand
gcguaauagacaaugacaa

SEQ ID NO: 2461813 - RNA, 19 nt, Homo sapiens
  misc_RNA (1)...(19): siRNA sense strand
ugaacaaccucgaggaacu

SEQ ID NO: 2461814 - RNA, 19 nt, Homo sapiens
  misc_RNA (1)...(19): siRNA sense strand
aaaauaagggagagacaaa

SEQ ID NO: 2461815 - RNA, 19 nt, Homo sapiens
  misc_RNA (1)...(19): siRNA sense strand
uggaagaugugcagaaaau

SEQ ID NO: 2461816 - RNA, 19 nt, Homo sapiens
  misc_RNA (1)...(19): siRNA sense strand
gaacagagaucucaggagu

SEQ ID NO: 2461817 - RNA, 19 nt, Homo sapiens
  misc_RNA (1)...(19): siRNA sense strand
gggcuauaucaguguaaau

SEQ ID NO: 2461818 - RNA, 19 nt, Homo sapiens
  misc_RNA (1)...(19): siRNA sense strand
cgagccagccacagaguaa

SEQ ID NO: 2461819 - RNA, 19 nt, Homo sapiens
  misc_RNA (1)...(19): siRNA sense strand
ccucauagcguaauagaca

SEQ ID NO: 2461820 - RNA, 19 nt, Homo sapiens
  misc_RNA (1)...(19): siRNA sense strand
cuuuagaagucuggaagaa

SEQ ID NO: 2461821 - RNA, 19 nt, Homo sapiens
  misc_RNA (1)...(19): siRNA sense strand
agccagaggcagaaguuaa

SEQ ID NO: 2461822 - RNA, 19 nt, Homo sapiens
  misc_RNA (1)...(19): siRNA sense strand
gauuuaaagccaauggaga

SEQ ID NO: 2461823 - RNA, 19 nt, Homo sapiens
  misc_RNA (1)...(19): siRNA sense strand
cgugaugaccugauggauu

SEQ ID NO: 2461824 - RNA, 19 nt, Homo sapiens
  misc_RNA (1)...(19): siRNA sense strand
gcaagaucauuuugugaaa

SEQ ID NO: 2461825 - RNA, 19 nt, Homo sapiens
  misc_RNA (1)...(19): siRNA sense strand
ucgaggaacuuaagcaaaa

SEQ ID NO: 2461826 - RNA, 19 nt, Homo sapiens
  misc_RNA (1)...(19): siRNA sense strand
aggcauaaaucgcaugaca

SEQ ID NO: 2461827 - RNA, 19 nt, Homo sapiens
  misc_RNA (1)...(19): siRNA sense strand
ccguggaagaugugcagaa

SEQ ID NO: 2461828 - RNA, 19 nt, Homo sapiens
  misc_RNA (1)...(19): siRNA sense strand
uguuggauguugaaagcaa

SEQ ID NO: 2461829 - RNA, 19 nt, Homo sapiens
  misc_RNA (1)...(19): siRNA sense strand
cagaguaacagcuguggaa

SEQ ID NO: 2461830 - RNA, 19 nt, Homo sapiens
  misc_RNA (1)...(19): siRNA sense strand
acaaaaggagcuagauuua

SEQ ID NO: 2461831 - RNA, 19 nt, Homo sapiens
  misc_RNA (1)...(19): siRNA sense strand
gcccaaagcaagccaggaa

SEQ ID NO: 2461832 - RNA, 19 nt, Homo sapiens
  misc_RNA (1)...(19): siRNA sense strand
agcaggaaauggagcgauu

SEQ ID NO: 2461833 - RNA, 19 nt, Homo sapiens
  misc_RNA (1)...(19): siRNA sense strand
gggcaauuccaaacgaaca

SEQ ID NO: 2461834 - RNA, 19 nt, Homo sapiens
  misc_RNA (1)...(19): siRNA sense strand
acuucuugcuggagaguca

SEQ ID NO: 2461835 - RNA, 19 nt, Homo sapiens
  misc_RNA (1)...(19): siRNA sense strand
ggcagaaguuaauagaaaa

SEQ ID NO: 2461836 - RNA, 19 nt, Homo sapiens
  misc_RNA (1)...(19): siRNA sense strand
aaaugguagcuuagaggaa

SEQ ID NO: 2461837 - RNA, 19 nt, Homo sapiens
  misc_RNA (1)...(19): siRNA sense strand
ccgcacagcaucugaauca

SEQ ID NO: 2461838 - RNA, 19 nt, Homo sapiens
  misc_RNA (1)...(19): siRNA sense strand
gggcagaagguuacacuca

SEQ ID NO: 2461839 - RNA, 19 nt, Homo sapiens
  misc_RNA (1)...(19): siRNA sense strand
ccgaaagcuuccagcgagu

SEQ ID NO: 2461840 - RNA, 19 nt, Homo sapiens
  misc_RNA (1)...(19): siRNA sense strand
gaguaacagcuguggaagu

SEQ ID NO: 2461841 - RNA, 19 nt, Homo sapiens
  misc_RNA (1)...(19): siRNA sense strand
cgaacaaaacuuggggaaa

SEQ ID NO: 2461842 - RNA, 19 nt, Homo sapiens
  misc_RNA (1)...(19): siRNA sense strand
ggaucuaccucauagcgua

SEQ ID NO: 2461843 - RNA, 19 nt, Homo sapiens
  misc_RNA (1)...(19): siRNA sense strand
ggauauggaaugugcucuu

SEQ ID NO: 2461844 - RNA, 19 nt, Homo sapiens
  misc_RNA (1)...(19): siRNA sense strand
cguggaagaugugcagaaa

SEQ ID NO: 2461845 - RNA, 19 nt, Homo sapiens
  misc_RNA (1)...(19): siRNA sense strand
ccucaugagcccugacaca

SEQ ID NO: 2461846 - RNA, 19 nt, Homo sapiens
  misc_RNA (1)...(19): siRNA sense strand
gaggaugcucagagguuau

SEQ ID NO: 2461847 - RNA, 19 nt, Homo sapiens
  misc_RNA (1)...(19): siRNA sense strand
augauguugcaaagagaaa

SEQ ID NO: 2461848 - RNA, 19 nt, Homo sapiens
  misc_RNA (1)...(19): siRNA sense strand
gagccucagcccaaagaaa

SEQ ID NO: 2461849 - RNA, 19 nt, Homo sapiens
  misc_RNA (1)...(19): siRNA sense strand
uggaauuugaugaggcaga

SEQ ID NO: 2461850 - RNA, 19 nt, Homo sapiens
  misc_RNA (1)...(19): siRNA sense strand
ggcauaaaucgcaugacaa

SEQ ID NO: 2461851 - RNA, 19 nt, Homo sapiens
  misc_RNA (1)...(19): siRNA sense strand
ggagagucagacagaguuu

SEQ ID NO: 2461852 - RNA, 19 nt, Homo sapiens
  misc_RNA (1)...(19): siRNA sense strand
gaauccagggaacgggaaa

SEQ ID NO: 2461853 - RNA, 19 nt, Homo sapiens
  misc_RNA (1)...(19): siRNA sense strand
gaucggaacaagcgaacau

SEQ ID NO: 2461854 - RNA, 19 nt, Homo sapiens
  misc_RNA (1)...(19): siRNA sense strand
cuuaugaaggagaaggaga

SEQ ID NO: 2461855 - RNA, 19 nt, Homo sapiens
  misc_RNA (1)...(19): siRNA sense strand
agaaggagauuuuggauca

SEQ ID NO: 2461856 - RNA, 19 nt, Homo sapiens
  misc_RNA (1)...(19): siRNA sense strand
cggaggaugcucagagguu

SEQ ID NO: 2461857 - RNA, 19 nt, Homo sapiens
  misc_RNA (1)...(19): siRNA sense strand
ccaaagcaagccaggaaaa

SEQ ID NO: 2461858 - RNA, 19 nt, Homo sapiens
  misc_RNA (1)...(19): siRNA sense strand
aggaaguacuccagcagca

SEQ ID NO: 2461859 - RNA, 19 nt, Homo sapiens
  misc_RNA (1)...(19): siRNA sense strand
ccaagaaacucucugggca

SEQ ID NO: 2461860 - RNA, 19 nt, Homo sapiens
  misc_RNA (1)...(19): siRNA sense strand
cugaacuuaugaaggagaa

SEQ ID NO: 2461861 - RNA, 19 nt, Homo sapiens
  misc_RNA (1)...(19): siRNA sense strand
guuggauguugaaagcaaa

SEQ ID NO: 2461862 - RNA, 19 nt, Homo sapiens
  misc_RNA (1)...(19): siRNA sense strand
gccucagcccaaagaaaua

SEQ ID NO: 2461863 - RNA, 19 nt, Homo sapiens
  misc_RNA (1)...(19): siRNA sense strand
caaauauagcucaaggcau

SEQ ID NO: 2461864 - RNA, 19 nt, Homo sapiens
  misc_RNA (1)...(19): siRNA sense strand
gaucuaccucauagcguaa

SEQ ID NO: 2461865 - RNA, 19 nt, Homo sapiens
  misc_RNA (1)...(19): siRNA sense strand
ccucgaggaacuuaagcaa

SEQ ID NO: 2461866 - RNA, 19 nt, Homo sapiens
  misc_RNA (1)...(19): siRNA sense strand
acauaaaugaucagaugga

SEQ ID NO: 2461867 - RNA, 19 nt, Homo sapiens
  misc_RNA (1)...(19): siRNA sense strand
gcugaauaucaacggaaca

SEQ ID NO: 2461868 - RNA, 19 nt, Homo sapiens
  misc_RNA (1)...(19): siRNA sense strand
gcaaagagaaaaggagaau

SEQ ID NO: 2461869 - RNA, 19 nt, Homo sapiens
  misc_RNA (1)...(19): siRNA sense strand
agucugagauuuaaagcca

SEQ ID NO: 2461870 - RNA, 19 nt, Homo sapiens
  misc_RNA (1)...(19): siRNA sense strand
gaaacuaaauugaaaggag

SEQ ID NO: 2461871 - RNA, 19 nt, Homo sapiens
  misc_RNA (1)...(19): siRNA sense strand
cuucauauguggggacaaa

SEQ ID NO: 2461872 - RNA, 19 nt, Homo sapiens
  misc_RNA (1)...(19): siRNA sense strand
agacaacaaaugaggacau

SEQ ID NO: 2461873 - RNA, 19 nt, Homo sapiens
  misc_RNA (1)...(19): siRNA sense strand
ggcaaauagauaucgcaaa

SEQ ID NO: 2461874 - RNA, 19 nt, Homo sapiens
  misc_RNA (1)...(19): siRNA sense strand
cuaaaugcccuuaaggaca

SEQ ID NO: 2461875 - RNA, 19 nt, Homo sapiens
  misc_RNA (1)...(19): siRNA sense strand
aggcaaauagauaucgcaa

SEQ ID NO: 2461876 - RNA, 19 nt, Homo sapiens
  misc_RNA (1)...(19): siRNA sense strand
cauuaaaggauccugguca

SEQ ID NO: 2461877 - RNA, 19 nt, Homo sapiens
  misc_RNA (1)...(19): siRNA sense strand
ucaccaagccugaucgaca

SEQ ID NO: 2461878 - RNA, 19 nt, Homo sapiens
  misc_RNA (1)...(19): siRNA sense strand
ccgccgaucuggaaaggca

SEQ ID NO: 2461879 - RNA, 19 nt, Homo sapiens
  misc_RNA (1)...(19): siRNA sense strand
auuacaaucccuacagcua

SEQ ID NO: 2461880 - RNA, 19 nt, Homo sapiens
  misc_RNA (1)...(19): siRNA sense strand
ccccacaagaagaagaaaa

SEQ ID NO: 2461881 - RNA, 19 nt, Homo sapiens
  misc_RNA (1)...(19): siRNA sense strand
aagaugagcacaugggcca

SEQ ID NO: 2461882 - RNA, 19 nt, Homo sapiens
  misc_RNA (1)...(19): siRNA sense strand
cauucuucguucacagcaa

SEQ ID NO: 2461883 - RNA, 19 nt, Homo sapiens
  misc_RNA (1)...(19): siRNA sense strand
agacaacaaaugaggacau

SEQ ID NO: 2461884 - RNA, 19 nt, Homo sapiens
  misc_RNA (1)...(19): siRNA sense strand
ggcaaauagauaucgcaaa

SEQ ID NO: 2461885 - RNA, 19 nt, Homo sapiens
  misc_RNA (1)...(19): siRNA sense strand
cuaaaugcccuuaaggaca

SEQ ID NO: 2461886 - RNA, 19 nt, Homo sapiens
  misc_RNA (1)...(19): siRNA sense strand
aggcaaauagauaucgcaa

SEQ ID NO: 2461887 - RNA, 19 nt, Homo sapiens
  misc_RNA (1)...(19): siRNA sense strand
cauuaaaggauccugguca

SEQ ID NO: 2461888 - RNA, 19 nt, Homo sapiens
  misc_RNA (1)...(19): siRNA sense strand
ucaccaagccugaucgaca

SEQ ID NO: 2461889 - RNA, 19 nt, Homo sapiens
  misc_RNA (1)...(19): siRNA sense strand
ccgccgaucuggaaaggca

SEQ ID NO: 2461890 - RNA, 19 nt, Homo sapiens
  misc_RNA (1)...(19): siRNA sense strand
auuacaaucccuacagcua

SEQ ID NO: 2461891 - RNA, 19 nt, Homo sapiens
  misc_RNA (1)...(19): siRNA sense strand
ccccacaagaagaagaaaa

SEQ ID NO: 2461892 - RNA, 19 nt, Homo sapiens
  misc_RNA (1)...(19): siRNA sense strand
aagaugagcacaugggcca

SEQ ID NO: 2461893 - RNA, 19 nt, Homo sapiens
  misc_RNA (1)...(19): siRNA sense strand
cauucuucguucacagcaa

SEQ ID NO: 2461894 - RNA, 19 nt, Homo sapiens
  misc_RNA (1)...(19): siRNA sense strand
cugcucuacuugaggaaca

SEQ ID NO: 2461895 - RNA, 19 nt, Homo sapiens
  misc_RNA (1)...(19): siRNA sense strand
ggagagugaugcagggaga

SEQ ID NO: 2461896 - RNA, 19 nt, Homo sapiens
  misc_RNA (1)...(19): siRNA sense strand
ccuaaauauccaaguucaa

SEQ ID NO: 2461897 - RNA, 19 nt, Homo sapiens
  misc_RNA (1)...(19): siRNA sense strand
augaagaagaugaugaaga

SEQ ID NO: 2461898 - RNA, 19 nt, Homo sapiens
  misc_RNA (1)...(19): siRNA sense strand
aaggaaaccaggaggacuu

SEQ ID NO: 2461899 - RNA, 19 nt, Homo sapiens
  misc_RNA (1)...(19): siRNA sense strand
acucaauguuacaggaacu

SEQ ID NO: 2461900 - RNA, 19 nt, Homo sapiens
  misc_RNA (1)...(19): siRNA sense strand
gcugauugaaggagaaaau

SEQ ID NO: 2461901 - RNA, 19 nt, Homo sapiens
  misc_RNA (1)...(19): siRNA sense strand
gauccaaauuacagagccu

SEQ ID NO: 2461902 - RNA, 19 nt, Homo sapiens
  misc_RNA (1)...(19): siRNA sense strand
cuucaaaaccccuaaauau

SEQ ID NO: 2461903 - RNA, 19 nt, Homo sapiens
  misc_RNA (1)...(19): siRNA sense strand
gcucaguagcccaggguuc

SEQ ID NO: 2461904 - RNA, 19 nt, Homo sapiens
  misc_RNA (1)...(19): siRNA sense strand
guagaaagacccagcguuc

SEQ ID NO: 2461905 - RNA, 19 nt, Homo sapiens
  misc_RNA (1)...(19): siRNA sense strand
ccgaaggaaaccaggagga

SEQ ID NO: 2461906 - RNA, 19 nt, Homo sapiens
  misc_RNA (1)...(19): siRNA sense strand
uuuacuacaaggauggaaa

SEQ ID NO: 2461907 - RNA, 19 nt, Homo sapiens
  misc_RNA (1)...(19): siRNA sense strand
gguuuuaucacgaggauga

SEQ ID NO: 2461908 - RNA, 19 nt, Homo sapiens
  misc_RNA (1)...(19): siRNA sense strand
aguaagaagccuggguaga

SEQ ID NO: 2461909 - RNA, 19 nt, Homo sapiens
  misc_RNA (1)...(19): siRNA sense strand
aauguaaauccuggagaua

SEQ ID NO: 2461910 - RNA, 19 nt, Homo sapiens
  misc_RNA (1)...(19): siRNA sense strand
agagugaugcagggagaua

SEQ ID NO: 2461911 - RNA, 19 nt, Homo sapiens
  misc_RNA (1)...(19): siRNA sense strand
caauguaagacccgaggau

SEQ ID NO: 2461912 - RNA, 19 nt, Homo sapiens
  misc_RNA (1)...(19): siRNA sense strand
ggauugggcuggagcaggu

SEQ ID NO: 2461913 - RNA, 19 nt, Homo sapiens
  misc_RNA (1)...(19): siRNA sense strand
ccugacuccuggaagagaa

SEQ ID NO: 2461914 - RNA, 19 nt, Homo sapiens
  misc_RNA (1)...(19): siRNA sense strand
aauuacagagccuggaaau

SEQ ID NO: 2461915 - RNA, 19 nt, Homo sapiens
  misc_RNA (1)...(19): siRNA sense strand
agguggagacagugacuca

SEQ ID NO: 2461916 - RNA, 19 nt, Homo sapiens
  misc_RNA (1)...(19): siRNA sense strand
aucaagagcaugaggaacu

SEQ ID NO: 2461917 - RNA, 19 nt, Homo sapiens
  misc_RNA (1)...(19): siRNA sense strand
gaggcuagcagcagaggca

SEQ ID NO: 2461918 - RNA, 19 nt, Homo sapiens
  misc_RNA (1)...(19): siRNA sense strand
acgaugagaaguuguugaa

SEQ ID NO: 2461919 - RNA, 19 nt, Homo sapiens
  misc_RNA (1)...(19): siRNA sense strand
guguaauggaagaacugaa

SEQ ID NO: 2461920 - RNA, 19 nt, Homo sapiens
  misc_RNA (1)...(19): siRNA sense strand
auggaagaacugaagagaa

SEQ ID NO: 2461921 - RNA, 19 nt, Homo sapiens
  misc_RNA (1)...(19): siRNA sense strand
guaaaucagucaaaggauc

SEQ ID NO: 2461922 - RNA, 19 nt, Homo sapiens
  misc_RNA (1)...(19): siRNA sense strand
cggacggaaagcuuagaua

SEQ ID NO: 2461923 - RNA, 19 nt, Homo sapiens
  misc_RNA (1)...(19): siRNA sense strand
gcacauaucuuuuaccaca

SEQ ID NO: 2461924 - RNA, 19 nt, Homo sapiens
  misc_RNA (1)...(19): siRNA sense strand
gcgauuucuaccugcgcua

SEQ ID NO: 2461925 - RNA, 19 nt, Homo sapiens
  misc_RNA (1)...(19): siRNA sense strand
aggugcugguggugaaaua

SEQ ID NO: 2461926 - RNA, 19 nt, Homo sapiens
  misc_RNA (1)...(19): siRNA sense strand
agacagaauuuguguggcu

SEQ ID NO: 2461927 - RNA, 19 nt, Homo sapiens
  misc_RNA (1)...(19): siRNA sense strand
acuucaggcucgaugagaa

SEQ ID NO: 2461928 - RNA, 19 nt, Homo sapiens
  misc_RNA (1)...(19): siRNA sense strand
acacaaggcaagaagggca

SEQ ID NO: 2461929 - RNA, 19 nt, Homo sapiens
  misc_RNA (1)...(19): siRNA sense strand
ggcaagaagggcaggcuca

SEQ ID NO: 2461930 - RNA, 19 nt, Homo sapiens
  misc_RNA (1)...(19): siRNA sense strand
uggagacgcuggaggcuca

SEQ ID NO: 2461931 - RNA, 19 nt, Homo sapiens
  misc_RNA (1)...(19): siRNA sense strand
ggagagagaacgaugccca

SEQ ID NO: 2461932 - RNA, 19 nt, Homo sapiens
  misc_RNA (1)...(19): siRNA sense strand
aggcuugggcagcgcacaa

SEQ ID NO: 2461933 - RNA, 19 nt, Homo sapiens
  misc_RNA (1)...(19): siRNA sense strand
gugaagagcugguuccgaa

SEQ ID NO: 2461934 - RNA, 19 nt, Homo sapiens
  misc_RNA (1)...(19): siRNA sense strand
aggaagugcuggaggacgu

SEQ ID NO: 2461935 - RNA, 19 nt, Homo sapiens
  misc_RNA (1)...(19): siRNA sense strand
agaaauuauccuugaacca

SEQ ID NO: 2461936 - RNA, 19 nt, Homo sapiens
  misc_RNA (1)...(19): siRNA sense strand
ucgcaguguugcugggcca

SEQ ID NO: 2461937 - RNA, 19 nt, Homo sapiens
  misc_RNA (1)...(19): siRNA sense strand
gcauggagacgacugggaa

SEQ ID NO: 2461938 - RNA, 19 nt, Homo sapiens
  misc_RNA (1)...(19): siRNA sense strand
gcauggagguggagucccu

SEQ ID NO: 2461939 - RNA, 19 nt, Homo sapiens
  misc_RNA (1)...(19): siRNA sense strand
guguaaugaaugugggaaa

SEQ ID NO: 2461940 - RNA, 19 nt, Homo sapiens
  misc_RNA (1)...(19): siRNA sense strand
aguucauacuggagagaaa

SEQ ID NO: 2461941 - RNA, 19 nt, Homo sapiens
  misc_RNA (1)...(19): siRNA sense strand
aggacauacaggugagaaa

SEQ ID NO: 2461942 - RNA, 19 nt, Homo sapiens
  misc_RNA (1)...(19): siRNA sense strand
ggaagaaguauuaaggaga

SEQ ID NO: 2461943 - RNA, 19 nt, Homo sapiens
  misc_RNA (1)...(19): siRNA sense strand
auguaaggaaugugggaaa

SEQ ID NO: 2461944 - RNA, 19 nt, Homo sapiens
  misc_RNA (1)...(19): siRNA sense strand
auguaaugaaugugggaaa

SEQ ID NO: 2461945 - RNA, 19 nt, Homo sapiens
  misc_RNA (1)...(19): siRNA sense strand
guguaaucauuguggaaaa

SEQ ID NO: 2461946 - RNA, 19 nt, Homo sapiens
  misc_RNA (1)...(19): siRNA sense strand
ccucauugcacaucagaaa

SEQ ID NO: 2461947 - RNA, 19 nt, Homo sapiens
  misc_RNA (1)...(19): siRNA sense strand
augcaaugaaugugguaaa

SEQ ID NO: 2461948 - RNA, 19 nt, Homo sapiens
  misc_RNA (1)...(19): siRNA sense strand
agaaaggagcauugugaau

SEQ ID NO: 2461949 - RNA, 19 nt, Homo sapiens
  misc_RNA (1)...(19): siRNA sense strand
gaagaagaaccauggguga

SEQ ID NO: 2461950 - RNA, 19 nt, Homo sapiens
  misc_RNA (1)...(19): siRNA sense strand
cggaaugugaugcuagaaa

SEQ ID NO: 2461951 - RNA, 19 nt, Homo sapiens
  misc_RNA (1)...(19): siRNA sense strand
cugugaaaucauaugguaa

SEQ ID NO: 2461952 - RNA, 19 nt, Homo sapiens
  misc_RNA (1)...(19): siRNA sense strand
gcauucagccagaagcaaa

SEQ ID NO: 2461953 - RNA, 19 nt, Homo sapiens
  misc_RNA (1)...(19): siRNA sense strand
acacuggcaaggagaaaua

SEQ ID NO: 2461954 - RNA, 19 nt, Homo sapiens
  misc_RNA (1)...(19): siRNA sense strand
acacaaucucuaugaguau

SEQ ID NO: 2461955 - RNA, 19 nt, Homo sapiens
  misc_RNA (1)...(19): siRNA sense strand
gaauguaaugaguguggaa

SEQ ID NO: 2461956 - RNA, 19 nt, Homo sapiens
  misc_RNA (1)...(19): siRNA sense strand
gaauguaaugaguguggaa

SEQ ID NO: 2461957 - RNA, 19 nt, Homo sapiens
  misc_RNA (1)...(19): siRNA sense strand
cccuauauauguaaggaau

SEQ ID NO: 2461958 - RNA, 19 nt, Homo sapiens
  misc_RNA (1)...(19): siRNA sense strand
cauucaaagauguggcuau

SEQ ID NO: 2461959 - RNA, 19 nt, Homo sapiens
  misc_RNA (1)...(19): siRNA sense strand
aggaggaguggaagagauu

SEQ ID NO: 2461960 - RNA, 19 nt, Homo sapiens
  misc_RNA (1)...(19): siRNA sense strand
gaauguaaggaaugcagaa

SEQ ID NO: 2461961 - RNA, 19 nt, Homo sapiens
  misc_RNA (1)...(19): siRNA sense strand
agagaaaacuguaccggaa

SEQ ID NO: 2461962 - RNA, 19 nt, Homo sapiens
  misc_RNA (1)...(19): siRNA sense strand
cccuaugaauguaaggaau

SEQ ID NO: 2461963 - RNA, 19 nt, Homo sapiens
  misc_RNA (1)...(19): siRNA sense strand
gagaagucauacaggggaa

SEQ ID NO: 2461964 - RNA, 19 nt, Homo sapiens
  misc_RNA (1)...(19): siRNA sense strand
gcauguaaggaaugugaga

SEQ ID NO: 2461965 - RNA, 19 nt, Homo sapiens
  misc_RNA (1)...(19): siRNA sense strand
gagaauucauacuggggaa

SEQ ID NO: 2461966 - RNA, 19 nt, Homo sapiens
  misc_RNA (1)...(19): siRNA sense strand
cuguaguaaauguggaaaa

SEQ ID NO: 2461967 - RNA, 19 nt, Homo sapiens
  misc_RNA (1)...(19): siRNA sense strand
ggagcaagaagaagaacca

SEQ ID NO: 2461968 - RNA, 19 nt, Homo sapiens
  misc_RNA (1)...(19): siRNA sense strand
caugggugauggaggaaga

SEQ ID NO: 2461969 - RNA, 19 nt, Homo sapiens
  misc_RNA (1)...(19): siRNA sense strand
ccuuaugcauguaaugaau

SEQ ID NO: 2461970 - RNA, 19 nt, Homo sapiens
  misc_RNA (1)...(19): siRNA sense strand
ucaaauuggagcaagaaga

SEQ ID NO: 2461971 - RNA, 19 nt, Homo sapiens
  misc_RNA (1)...(19): siRNA sense strand
caggaggaguggaagagau

SEQ ID NO: 2461972 - RNA, 19 nt, Homo sapiens
  misc_RNA (1)...(19): siRNA sense strand
cuucauuacacaccagaaa

SEQ ID NO: 2461973 - RNA, 19 nt, Homo sapiens
  misc_RNA (1)...(19): siRNA sense strand
gggaacaguaacauucaaa

SEQ ID NO: 2461974 - RNA, 19 nt, Homo sapiens
  misc_RNA (1)...(19): siRNA sense strand
gcauguaaugaauguggua

SEQ ID NO: 2461975 - RNA, 19 nt, Homo sapiens
  misc_RNA (1)...(19): siRNA sense strand
ggggaaaagccuuaugaau

SEQ ID NO: 2461976 - RNA, 19 nt, Homo sapiens
  misc_RNA (1)...(19): siRNA sense strand
ugguaaagccuucagccaa

SEQ ID NO: 2461977 - RNA, 19 nt, Homo sapiens
  misc_RNA (1)...(19): siRNA sense strand
acauauacgaggacauaca

SEQ ID NO: 2461978 - RNA, 19 nt, Homo sapiens
  misc_RNA (1)...(19): siRNA sense strand
ggaaaagcauucagccaga

SEQ ID NO: 2461979 - RNA, 19 nt, Homo sapiens
  misc_RNA (1)...(19): siRNA sense strand
auguaaugaguguggaaaa

SEQ ID NO: 2461980 - RNA, 19 nt, Homo sapiens
  misc_RNA (1)...(19): siRNA sense strand
auguaaugaguguggaaaa

SEQ ID NO: 2461981 - RNA, 19 nt, Homo sapiens
  misc_RNA (1)...(19): siRNA sense strand
ugauggaggaagaaguauu

SEQ ID NO: 2461982 - RNA, 19 nt, Homo sapiens
  misc_RNA (1)...(19): siRNA sense strand
gccuuuagccagaaaucaa

SEQ ID NO: 2461983 - RNA, 19 nt, Homo sapiens
  misc_RNA (1)...(19): siRNA sense strand
acuuaaucacaguaggcua

SEQ ID NO: 2461984 - RNA, 19 nt, Homo sapiens
  misc_RNA (1)...(19): siRNA sense strand
cuuaaucacaguaggcuau

SEQ ID NO: 2461985 - RNA, 19 nt, Homo sapiens
  misc_RNA (1)...(19): siRNA sense strand
gcacaugagaggccauaca

SEQ ID NO: 2461986 - RNA, 19 nt, Homo sapiens
  misc_RNA (1)...(19): siRNA sense strand
agacacuggcaaggagaaa

SEQ ID NO: 2461987 - RNA, 19 nt, Homo sapiens
  misc_RNA (1)...(19): siRNA sense strand
aggacagacuuuugagaca

SEQ ID NO: 2461988 - RNA, 19 nt, Homo sapiens
  misc_RNA (1)...(19): siRNA sense strand
aaguguaaucauuguggaa

SEQ ID NO: 2461989 - RNA, 19 nt, Homo sapiens
  misc_RNA (1)...(19): siRNA sense strand
cccuaugcauguaaggaau

SEQ ID NO: 2461990 - RNA, 19 nt, Homo sapiens
  misc_RNA (1)...(19): siRNA sense strand
ccaaagacucggacggaga

SEQ ID NO: 2461991 - RNA, 19 nt, Homo sapiens
  misc_RNA (1)...(19): siRNA sense strand
cggcagaaggagcuggaga

SEQ ID NO: 2461992 - RNA, 19 nt, Homo sapiens
  misc_RNA (1)...(19): siRNA sense strand
gcacaggagagcagcccuu

SEQ ID NO: 2461993 - RNA, 19 nt, Homo sapiens
  misc_RNA (1)...(19): siRNA sense strand
ccagcgaguccaaggagau

SEQ ID NO: 2461994 - RNA, 19 nt, Homo sapiens
  misc_RNA (1)...(19): siRNA sense strand
ggcacaagauggcucggaa

SEQ ID NO: 2461995 - RNA, 19 nt, Homo sapiens
  misc_RNA (1)...(19): siRNA sense strand
gaauggaacucaaggguag

SEQ ID NO: 2461996 - RNA, 19 nt, Homo sapiens
  misc_RNA (1)...(19): siRNA sense strand
auucuuuggugguugguau

SEQ ID NO: 2461997 - RNA, 19 nt, Homo sapiens
  misc_RNA (1)...(19): siRNA sense strand
ccgagaccucaaagagaaa

SEQ ID NO: 2461998 - RNA, 19 nt, Homo sapiens
  misc_RNA (1)...(19): siRNA sense strand
uggccaaccagcugaagaa

SEQ ID NO: 2461999 - RNA, 19 nt, Homo sapiens
  misc_RNA (1)...(19): siRNA sense strand
ugugaagaguacaggaauc

SEQ ID NO: 2462000 - RNA, 19 nt, Homo sapiens
  misc_RNA (1)...(19): siRNA sense strand
ccuagaaaucaaccaggaa

SEQ ID NO: 2462001 - RNA, 19 nt, Homo sapiens
  misc_RNA (1)...(19): siRNA sense strand
aagaaauacaagugugaag

SEQ ID NO: 2462002 - RNA, 19 nt, Homo sapiens
  misc_RNA (1)...(19): siRNA sense strand
agugugaagaguacaggaa

SEQ ID NO: 2462003 - RNA, 19 nt, Homo sapiens
  misc_RNA (1)...(19): siRNA sense strand
ugcagaagacugaagaaaa

SEQ ID NO: 2462004 - RNA, 19 nt, Homo sapiens
  misc_RNA (1)...(19): siRNA sense strand
cgcagcuggcagagagcaa

SEQ ID NO: 2462005 - RNA, 19 nt, Homo sapiens
  misc_RNA (1)...(19): siRNA sense strand
cuggagaaacagaaagaaa

SEQ ID NO: 2462006 - RNA, 19 nt, Homo sapiens
  misc_RNA (1)...(19): siRNA sense strand
ccacagugcugcaggcuga

SEQ ID NO: 2462007 - RNA, 19 nt, Homo sapiens
  misc_RNA (1)...(19): siRNA sense strand
uguaaagaugggagagaga

SEQ ID NO: 2462008 - RNA, 19 nt, Homo sapiens
  misc_RNA (1)...(19): siRNA sense strand
augcaggaguagugucaaa

SEQ ID NO: 2462009 - RNA, 19 nt, Homo sapiens
  misc_RNA (1)...(19): siRNA sense strand
cagaacugaaauaggcaaa

SEQ ID NO: 2462010 - RNA, 19 nt, Homo sapiens
  misc_RNA (1)...(19): siRNA sense strand
aggaggaauuguugguaca

SEQ ID NO: 2462011 - RNA, 19 nt, Homo sapiens
  misc_RNA (1)...(19): siRNA sense strand
cggccaaaucaguguugua

SEQ ID NO: 2462012 - RNA, 19 nt, Homo sapiens
  misc_RNA (1)...(19): siRNA sense strand
uggagaaacagaaagaaaa

SEQ ID NO: 2462013 - RNA, 19 nt, Homo sapiens
  misc_RNA (1)...(19): siRNA sense strand
ucgcaguagcaaugaauuu

SEQ ID NO: 2462014 - RNA, 19 nt, Homo sapiens
  misc_RNA (1)...(19): siRNA sense strand
cuuuaaaccagaagaagga

SEQ ID NO: 2462015 - RNA, 19 nt, Homo sapiens
  misc_RNA (1)...(19): siRNA sense strand
aggaaaagaagcaggcuau

SEQ ID NO: 2462016 - RNA, 19 nt, Homo sapiens
  misc_RNA (1)...(19): siRNA sense strand
cuaauuacuuguuuggaca

SEQ ID NO: 2462017 - RNA, 19 nt, Homo sapiens
  misc_RNA (1)...(19): siRNA sense strand
gagaacaguuggaaaccca

SEQ ID NO: 2462018 - RNA, 19 nt, Homo sapiens
  misc_RNA (1)...(19): siRNA sense strand
cagaaaauugccaugaaaa

SEQ ID NO: 2462019 - RNA, 19 nt, Homo sapiens
  misc_RNA (1)...(19): siRNA sense strand
ccucauacucuguuauaga

SEQ ID NO: 2462020 - RNA, 19 nt, Homo sapiens
  misc_RNA (1)...(19): siRNA sense strand
aggaauuguugguacacuu

SEQ ID NO: 2462021 - RNA, 19 nt, Homo sapiens
  misc_RNA (1)...(19): siRNA sense strand
ccacacagggcaagagaac

SEQ ID NO: 2462022 - RNA, 19 nt, Homo sapiens
  misc_RNA (1)...(19): siRNA sense strand
acaagaaguaucaggagca

SEQ ID NO: 2462023 - RNA, 19 nt, Homo sapiens
  misc_RNA (1)...(19): siRNA sense strand
cagugaugaugggcagaaa

SEQ ID NO: 2462024 - RNA, 19 nt, Homo sapiens
  misc_RNA (1)...(19): siRNA sense strand
cguguaaagaugggagaga

SEQ ID NO: 2462025 - RNA, 19 nt, Homo sapiens
  misc_RNA (1)...(19): siRNA sense strand
gggcaagagaacaguugga

SEQ ID NO: 2462026 - RNA, 19 nt, Homo sapiens
  misc_RNA (1)...(19): siRNA sense strand
gccacugguaggaggaauu

SEQ ID NO: 2462027 - RNA, 19 nt, Homo sapiens
  misc_RNA (1)...(19): siRNA sense strand
gcaugcaggaguaguguca

SEQ ID NO: 2462028 - RNA, 19 nt, Homo sapiens
  misc_RNA (1)...(19): siRNA sense strand
gaaacaaagauuaucacca

SEQ ID NO: 2462029 - RNA, 19 nt, Homo sapiens
  misc_RNA (1)...(19): siRNA sense strand
uuaaaccagaagaaggaaa

SEQ ID NO: 2462030 - RNA, 19 nt, Homo sapiens
  misc_RNA (1)...(19): siRNA sense strand
uaaagaugggagagagagu

SEQ ID NO: 2462031 - RNA, 19 nt, Homo sapiens
  misc_RNA (1)...(19): siRNA sense strand
acauuuaagacaaguggau

SEQ ID NO: 2462032 - RNA, 19 nt, Homo sapiens
  misc_RNA (1)...(19): siRNA sense strand
agaaguaucaggagcagga

SEQ ID NO: 2462033 - RNA, 19 nt, Homo sapiens
  misc_RNA (1)...(19): siRNA sense strand
uguacuaggcccugagagu

SEQ ID NO: 2462034 - RNA, 19 nt, Homo sapiens
  misc_RNA (1)...(19): siRNA sense strand
uggugugcaugcaggagua

SEQ ID NO: 2462035 - RNA, 19 nt, Homo sapiens
  misc_RNA (1)...(19): siRNA sense strand
gcagaacugaaauaggcaa

SEQ ID NO: 2462036 - RNA, 19 nt, Homo sapiens
  misc_RNA (1)...(19): siRNA sense strand
gaaucaaaaggcaaugaaa

SEQ ID NO: 2462037 - RNA, 19 nt, Homo sapiens
  misc_RNA (1)...(19): siRNA sense strand
uggagcaagauaagauauu

SEQ ID NO: 2462038 - RNA, 19 nt, Homo sapiens
  misc_RNA (1)...(19): siRNA sense strand
auuuaagacaaguggaugu

SEQ ID NO: 2462039 - RNA, 19 nt, Homo sapiens
  misc_RNA (1)...(19): siRNA sense strand
gcaaugaauuuccugcaca

SEQ ID NO: 2462040 - RNA, 19 nt, Homo sapiens
  misc_RNA (1)...(19): siRNA sense strand
gguggaaaggaaugaagca

SEQ ID NO: 2462041 - RNA, 19 nt, Homo sapiens
  misc_RNA (1)...(19): siRNA sense strand
guacagugaugaugggcag

SEQ ID NO: 2462042 - RNA, 19 nt, Homo sapiens
  misc_RNA (1)...(19): siRNA sense strand
guguggagcaagauaagau

SEQ ID NO: 2462043 - RNA, 19 nt, Homo sapiens
  misc_RNA (1)...(19): siRNA sense strand
uaucagaaauacuaccgua

SEQ ID NO: 2462044 - RNA, 19 nt, Homo sapiens
  misc_RNA (1)...(19): siRNA sense strand
caguggaccaugaggaaac

SEQ ID NO: 2462045 - RNA, 19 nt, Homo sapiens
  misc_RNA (1)...(19): siRNA sense strand
ucgcauucuggguggacaa

SEQ ID NO: 2462046 - RNA, 19 nt, Homo sapiens
  misc_RNA (1)...(19): siRNA sense strand
ccaucaagggcaucaucaa

SEQ ID NO: 2462047 - RNA, 19 nt, Homo sapiens
  misc_RNA (1)...(19): siRNA sense strand
ugguggaccgcaaggaauu

SEQ ID NO: 2462048 - RNA, 19 nt, Homo sapiens
  misc_RNA (1)...(19): siRNA sense strand
gcuaugaacacgcggugga

SEQ ID NO: 2462049 - RNA, 19 nt, Homo sapiens
  misc_RNA (1)...(19): siRNA sense strand
aaguagaagaucaaggaaa

SEQ ID NO: 2462050 - RNA, 19 nt, Homo sapiens
  misc_RNA (1)...(19): siRNA sense strand
ggaaauagcaguagggcac

SEQ ID NO: 2462051 - RNA, 19 nt, Homo sapiens
  misc_RNA (1)...(19): siRNA sense strand
guuaagacauggagagggu

SEQ ID NO: 2462052 - RNA, 19 nt, Homo sapiens
  misc_RNA (1)...(19): siRNA sense strand
agaucaaggaaaagugaaa

SEQ ID NO: 2462053 - RNA, 19 nt, Homo sapiens
  misc_RNA (1)...(19): siRNA sense strand
gugaagaacaagugaggcu

SEQ ID NO: 2462054 - RNA, 19 nt, Homo sapiens
  misc_RNA (1)...(19): siRNA sense strand
gcgaaggaauggaggaagc

SEQ ID NO: 2462055 - RNA, 19 nt, Homo sapiens
  misc_RNA (1)...(19): siRNA sense strand
cagcgaaggaauggaggaa

SEQ ID NO: 2462056 - RNA, 19 nt, Homo sapiens
  misc_RNA (1)...(19): siRNA sense strand
ucggaaagcuuaaaggaug

SEQ ID NO: 2462057 - RNA, 19 nt, Homo sapiens
  misc_RNA (1)...(19): siRNA sense strand
aggauguucuggagagacu

SEQ ID NO: 2462058 - RNA, 19 nt, Homo sapiens
  misc_RNA (1)...(19): siRNA sense strand
uggaaauagcaguagggca

SEQ ID NO: 2462059 - RNA, 19 nt, Homo sapiens
  misc_RNA (1)...(19): siRNA sense strand
ggaagcaacucaaagcguu

SEQ ID NO: 2462060 - RNA, 19 nt, Homo sapiens
  misc_RNA (1)...(19): siRNA sense strand
gcuuaaaggauguucugga

SEQ ID NO: 2462061 - RNA, 19 nt, Homo sapiens
  misc_RNA (1)...(19): siRNA sense strand
cuuacuaccaagaaaucua

SEQ ID NO: 2462062 - RNA, 19 nt, Homo sapiens
  misc_RNA (1)...(19): siRNA sense strand
gaauggaggaagcucggaa

SEQ ID NO: 2462063 - RNA, 19 nt, Homo sapiens
  misc_RNA (1)...(19): siRNA sense strand
ccuauuggaaugaaaggau

SEQ ID NO: 2462064 - RNA, 19 nt, Homo sapiens
  misc_RNA (1)...(19): siRNA sense strand
aaguagaagaucaaggaaa

SEQ ID NO: 2462065 - RNA, 19 nt, Homo sapiens
  misc_RNA (1)...(19): siRNA sense strand
ggaaauagcaguagggcac

SEQ ID NO: 2462066 - RNA, 19 nt, Homo sapiens
  misc_RNA (1)...(19): siRNA sense strand
guuaagacauggagagggu

SEQ ID NO: 2462067 - RNA, 19 nt, Homo sapiens
  misc_RNA (1)...(19): siRNA sense strand
agaucaaggaaaagugaaa

SEQ ID NO: 2462068 - RNA, 19 nt, Homo sapiens
  misc_RNA (1)...(19): siRNA sense strand
gugaagaacaagugaggcu

SEQ ID NO: 2462069 - RNA, 19 nt, Homo sapiens
  misc_RNA (1)...(19): siRNA sense strand
gcgaaggaauggaggaagc

SEQ ID NO: 2462070 - RNA, 19 nt, Homo sapiens
  misc_RNA (1)...(19): siRNA sense strand
cagcgaaggaauggaggaa

SEQ ID NO: 2462071 - RNA, 19 nt, Homo sapiens
  misc_RNA (1)...(19): siRNA sense strand
ucggaaagcuuaaaggaug

SEQ ID NO: 2462072 - RNA, 19 nt, Homo sapiens
  misc_RNA (1)...(19): siRNA sense strand
aggauguucuggagagacu

SEQ ID NO: 2462073 - RNA, 19 nt, Homo sapiens
  misc_RNA (1)...(19): siRNA sense strand
uggaaauagcaguagggca

SEQ ID NO: 2462074 - RNA, 19 nt, Homo sapiens
  misc_RNA (1)...(19): siRNA sense strand
ggaagcaacucaaagcguu

SEQ ID NO: 2462075 - RNA, 19 nt, Homo sapiens
  misc_RNA (1)...(19): siRNA sense strand
gcuuaaaggauguucugga

SEQ ID NO: 2462076 - RNA, 19 nt, Homo sapiens
  misc_RNA (1)...(19): siRNA sense strand
cuuacuaccaagaaaucua

SEQ ID NO: 2462077 - RNA, 19 nt, Homo sapiens
  misc_RNA (1)...(19): siRNA sense strand
gaauggaggaagcucggaa

SEQ ID NO: 2462078 - RNA, 19 nt, Homo sapiens
  misc_RNA (1)...(19): siRNA sense strand
ccuauuggaaugaaaggau

SEQ ID NO: 2462079 - RNA, 19 nt, Homo sapiens
  misc_RNA (1)...(19): siRNA sense strand
uugauuuaguccagcgaaa

SEQ ID NO: 2462080 - RNA, 19 nt, Homo sapiens
  misc_RNA (1)...(19): siRNA sense strand
uauuaagaauuucgcggaa

SEQ ID NO: 2462081 - RNA, 19 nt, Homo sapiens
  misc_RNA (1)...(19): siRNA sense strand
agguuugagugaugaacuu

SEQ ID NO: 2462082 - RNA, 19 nt, Homo sapiens
  misc_RNA (1)...(19): siRNA sense strand
agauauaggaacugauaag

SEQ ID NO: 2462083 - RNA, 19 nt, Homo sapiens
  misc_RNA (1)...(19): siRNA sense strand
uguaggaacuggaucgguu

SEQ ID NO: 2462084 - RNA, 19 nt, Homo sapiens
  misc_RNA (1)...(19): siRNA sense strand
agacaauggaucuucaaca

SEQ ID NO: 2462085 - RNA, 19 nt, Homo sapiens
  misc_RNA (1)...(19): siRNA sense strand
ucgcggaagaggaggccau

SEQ ID NO: 2462086 - RNA, 19 nt, Homo sapiens
  misc_RNA (1)...(19): siRNA sense strand
ugauaaggauccugagcag

SEQ ID NO: 2462087 - RNA, 19 nt, Homo sapiens
  misc_RNA (1)...(19): siRNA sense strand
cuggaaguugaguggauuu

SEQ ID NO: 2462088 - RNA, 19 nt, Homo sapiens
  misc_RNA (1)...(19): siRNA sense strand
caguggaaaccgagcaaau

SEQ ID NO: 2462089 - RNA, 19 nt, Homo sapiens
  misc_RNA (1)...(19): siRNA sense strand
acgugaaagacuucgggaa

SEQ ID NO: 2462090 - RNA, 19 nt, Homo sapiens
  misc_RNA (1)...(19): siRNA sense strand
gagcaaauuggucaggaga

SEQ ID NO: 2462091 - RNA, 19 nt, Homo sapiens
  misc_RNA (1)...(19): siRNA sense strand
auaccaaauagcaguggaa

SEQ ID NO: 2462092 - RNA, 19 nt, Homo sapiens
  misc_RNA (1)...(19): siRNA sense strand
caaacaagaaaugggaaaa

SEQ ID NO: 2462093 - RNA, 19 nt, Homo sapiens
  misc_RNA (1)...(19): siRNA sense strand
cuuagucaugacagagaaa

SEQ ID NO: 2462094 - RNA, 19 nt, Homo sapiens
  misc_RNA (1)...(19): siRNA sense strand
auguacagcaacagaauga

SEQ ID NO: 2462095 - RNA, 19 nt, Homo sapiens
  misc_RNA (1)...(19): siRNA sense strand
cugcuugaacagauggauu

SEQ ID NO: 2462096 - RNA, 19 nt, Homo sapiens
  misc_RNA (1)...(19): siRNA sense strand
ucagagaaccagagggcac

SEQ ID NO: 2462097 - RNA, 19 nt, Homo sapiens
  misc_RNA (1)...(19): siRNA sense strand
ugacagggauguugcgaag

SEQ ID NO: 2462098 - RNA, 19 nt, Homo sapiens
  misc_RNA (1)...(19): siRNA sense strand
ggaauuccucagagaacca

SEQ ID NO: 2462099 - RNA, 19 nt, Homo sapiens
  misc_RNA (1)...(19): siRNA sense strand
ggggaaaagcccaaggaaa

SEQ ID NO: 2462100 - RNA, 19 nt, Homo sapiens
  misc_RNA (1)...(19): siRNA sense strand
gcaaugaagccguggacca

SEQ ID NO: 2462101 - RNA, 19 nt, Homo sapiens
  misc_RNA (1)...(19): siRNA sense strand
ggacaagaugcgugaucau

SEQ ID NO: 2462102 - RNA, 19 nt, Homo sapiens
  misc_RNA (1)...(19): siRNA sense strand
gcacagagauccaacagca

SEQ ID NO: 2462103 - RNA, 19 nt, Homo sapiens
  misc_RNA (1)...(19): siRNA sense strand
caaccugauucgagggacu

SEQ ID NO: 2462104 - RNA, 19 nt, Homo sapiens
  misc_RNA (1)...(19): siRNA sense strand
ucaaguauaaacuggacaa

SEQ ID NO: 2462105 - RNA, 19 nt, Homo sapiens
  misc_RNA (1)...(19): siRNA sense strand
cguuaauggaguggggaaa

SEQ ID NO: 2462106 - RNA, 19 nt, Homo sapiens
  misc_RNA (1)...(19): siRNA sense strand
gggccaagaaggaagguuc

SEQ ID NO: 2462107 - RNA, 19 nt, Homo sapiens
  misc_RNA (1)...(19): siRNA sense strand
gcguuaauggaguggggaa

SEQ ID NO: 2462108 - RNA, 19 nt, Homo sapiens
  misc_RNA (1)...(19): siRNA sense strand
gcucagacaccucggcuca

SEQ ID NO: 2462109 - RNA, 19 nt, Homo sapiens
  misc_RNA (1)...(19): siRNA sense strand
acaaauugauagaugacgu

SEQ ID NO: 2462110 - RNA, 19 nt, Homo sapiens
  misc_RNA (1)...(19): siRNA sense strand
ccaaaggagaagggcaaaa

SEQ ID NO: 2462111 - RNA, 19 nt, Homo sapiens
  misc_RNA (1)...(19): siRNA sense strand
cuaagaacguggcugcaga

SEQ ID NO: 2462112 - RNA, 19 nt, Homo sapiens
  misc_RNA (1)...(19): siRNA sense strand
uugaaaagggcuauggcaa

SEQ ID NO: 2462113 - RNA, 19 nt, Homo sapiens
  misc_RNA (1)...(19): siRNA sense strand
caguaaagcaagcccuaca

SEQ ID NO: 2462114 - RNA, 19 nt, Homo sapiens
  misc_RNA (1)...(19): siRNA sense strand
cccacuaccaugaagaaau

SEQ ID NO: 2462115 - RNA, 19 nt, Homo sapiens
  misc_RNA (1)...(19): siRNA sense strand
aaguaaugcaacagaguaa

SEQ ID NO: 2462116 - RNA, 19 nt, Homo sapiens
  misc_RNA (1)...(19): siRNA sense strand
ggcaagaagcuuugggaca

SEQ ID NO: 2462117 - RNA, 19 nt, Homo sapiens
  misc_RNA (1)...(19): siRNA sense strand
ccaaggaguccaagggcau

SEQ ID NO: 2462118 - RNA, 19 nt, Homo sapiens
  misc_RNA (1)...(19): siRNA sense strand
aauuuaagguguauggaga

SEQ ID NO: 2462119 - RNA, 19 nt, Homo sapiens
  misc_RNA (1)...(19): siRNA sense strand
agaauaaagugacuggaga

SEQ ID NO: 2462120 - RNA, 19 nt, Homo sapiens
  misc_RNA (1)...(19): siRNA sense strand
aaaguaaagguuugggcua

SEQ ID NO: 2462121 - RNA, 19 nt, Homo sapiens
  misc_RNA (1)...(19): siRNA sense strand
aauaaagugacuggagaaa

SEQ ID NO: 2462122 - RNA, 19 nt, Homo sapiens
  misc_RNA (1)...(19): siRNA sense strand
agaagaagaucugcgggaa

SEQ ID NO: 2462123 - RNA, 19 nt, Homo sapiens
  misc_RNA (1)...(19): siRNA sense strand
agauguugaagaugaagaa

SEQ ID NO: 2462124 - RNA, 19 nt, Homo sapiens
  misc_RNA (1)...(19): siRNA sense strand
gggccauggaggagaugca

SEQ ID NO: 2462125 - RNA, 19 nt, Homo sapiens
  misc_RNA (1)...(19): siRNA sense strand
aguccuacacagaagaaga

SEQ ID NO: 2462126 - RNA, 19 nt, Homo sapiens
  misc_RNA (1)...(19): siRNA sense strand
ugacaagaaugauagccga

SEQ ID NO: 2462127 - RNA, 19 nt, Homo sapiens
  misc_RNA (1)...(19): siRNA sense strand
ccgaauagguguuuccuuc

SEQ ID NO: 2462128 - RNA, 19 nt, Homo sapiens
  misc_RNA (1)...(19): siRNA sense strand
acacaaaagcugaaggauu

SEQ ID NO: 2462129 - RNA, 19 nt, Homo sapiens
  misc_RNA (1)...(19): siRNA sense strand
acaugagagcaaagacuaa

SEQ ID NO: 2462130 - RNA, 19 nt, Homo sapiens
  misc_RNA (1)...(19): siRNA sense strand
agacugauguucaugggua

SEQ ID NO: 2462131 - RNA, 19 nt, Homo sapiens
  misc_RNA (1)...(19): siRNA sense strand
augucaaaauuguggagaa

SEQ ID NO: 2462132 - RNA, 19 nt, Homo sapiens
  misc_RNA (1)...(19): siRNA sense strand
uguucagaauucacacaaa

SEQ ID NO: 2462133 - RNA, 19 nt, Homo sapiens
  misc_RNA (1)...(19): siRNA sense strand
gcugaaggauuuauggaug

SEQ ID NO: 2462134 - RNA, 19 nt, Homo sapiens
  misc_RNA (1)...(19): siRNA sense strand
ugauuuuacuacagggaga

SEQ ID NO: 2462135 - RNA, 19 nt, Homo sapiens
  misc_RNA (1)...(19): siRNA sense strand
aggacgagcaagaggaguu

SEQ ID NO: 2462136 - RNA, 19 nt, Homo sapiens
  misc_RNA (1)...(19): siRNA sense strand
uguucgaggacgagcaaga

SEQ ID NO: 2462137 - RNA, 19 nt, Homo sapiens
  misc_RNA (1)...(19): siRNA sense strand
acgaagaggcgcagaagcu

SEQ ID NO: 2462138 - RNA, 19 nt, Homo sapiens
  misc_RNA (1)...(19): siRNA sense strand
agaucaagcucgacggcua

SEQ ID NO: 2462139 - RNA, 19 nt, Homo sapiens
  misc_RNA (1)...(19): siRNA sense strand
ccaacagcguccugggcaa

SEQ ID NO: 2462140 - RNA, 19 nt, Homo sapiens
  misc_RNA (1)...(19): siRNA sense strand
acgccgacuucgagaacaa

SEQ ID NO: 2462141 - RNA, 19 nt, Homo sapiens
  misc_RNA (1)...(19): siRNA sense strand
ugaucgaggcaguggacaa

SEQ ID NO: 2462142 - RNA, 19 nt, Homo sapiens
  misc_RNA (1)...(19): siRNA sense strand
aggagugggucguggccaa

SEQ ID NO: 2462143 - RNA, 19 nt, Homo sapiens
  misc_RNA (1)...(19): siRNA sense strand
cugaagaaggagaugccaa

SEQ ID NO: 2462144 - RNA, 19 nt, Homo sapiens
  misc_RNA (1)...(19): siRNA sense strand
aggaaaacaagaagagaga

SEQ ID NO: 2462145 - RNA, 19 nt, Homo sapiens
  misc_RNA (1)...(19): siRNA sense strand
cgugauguauggagagacu

SEQ ID NO: 2462146 - RNA, 19 nt, Homo sapiens
  misc_RNA (1)...(19): siRNA sense strand
gccaagaaggagaugguga

SEQ ID NO: 2462147 - RNA, 19 nt, Homo sapiens
  misc_RNA (1)...(19): siRNA sense strand
uggccaaggugcaugccua

SEQ ID NO: 2462148 - RNA, 19 nt, Homo sapiens
  misc_RNA (1)...(19): siRNA sense strand
acauucagcuacagcgaga

SEQ ID NO: 2462149 - RNA, 19 nt, Homo sapiens
  misc_RNA (1)...(19): siRNA sense strand
guguauuuggaaaggaaaa

SEQ ID NO: 2462150 - RNA, 19 nt, Homo sapiens
  misc_RNA (1)...(19): siRNA sense strand
gggucguggccaaagacaa

SEQ ID NO: 2462151 - RNA, 19 nt, Homo sapiens
  misc_RNA (1)...(19): siRNA sense strand
ucagauaccuacuggagca

SEQ ID NO: 2462152 - RNA, 19 nt, Homo sapiens
  misc_RNA (1)...(19): siRNA sense strand
ggaaaggaaaacaagaaga

SEQ ID NO: 2462153 - RNA, 19 nt, Homo sapiens
  misc_RNA (1)...(19): siRNA sense strand
agaaggcagcggugcgcaa

SEQ ID NO: 2462154 - RNA, 19 nt, Homo sapiens
  misc_RNA (1)...(19): siRNA sense strand
gcucagucgcuuuggaaac

SEQ ID NO: 2462155 - RNA, 19 nt, Homo sapiens
  misc_RNA (1)...(19): siRNA sense strand
gugucaacgccaagaagga

SEQ ID NO: 2462156 - RNA, 19 nt, Homo sapiens
  misc_RNA (1)...(19): siRNA sense strand
ugauguauggagagacuga

SEQ ID NO: 2462157 - RNA, 19 nt, Homo sapiens
  misc_RNA (1)...(19): siRNA sense strand
ucaucaagaucaagcucga

SEQ ID NO: 2462158 - RNA, 19 nt, Homo sapiens
  misc_RNA (1)...(19): siRNA sense strand
cauaguagauauagccaca

SEQ ID NO: 2462159 - RNA, 19 nt, Homo sapiens
  misc_RNA (1)...(19): siRNA sense strand
gcacagagagccaggccuu

SEQ ID NO: 2462160 - RNA, 19 nt, Homo sapiens
  misc_RNA (1)...(19): siRNA sense strand
uugaacaaggagagggauu

SEQ ID NO: 2462161 - RNA, 19 nt, Homo sapiens
  misc_RNA (1)...(19): siRNA sense strand
cgagaugcgcaguggacuu

SEQ ID NO: 2462162 - RNA, 19 nt, Homo sapiens
  misc_RNA (1)...(19): siRNA sense strand
aagcaguaucccagaaaga

SEQ ID NO: 2462163 - RNA, 19 nt, Homo sapiens
  misc_RNA (1)...(19): siRNA sense strand
aaacaguagcaaaggagau

SEQ ID NO: 2462164 - RNA, 19 nt, Homo sapiens
  misc_RNA (1)...(19): siRNA sense strand
ccauaaaagcaaaacaaga

SEQ ID NO: 2462165 - RNA, 19 nt, Homo sapiens
  misc_RNA (1)...(19): siRNA sense strand
uaucagcauuaaugggcaa

SEQ ID NO: 2462166 - RNA, 19 nt, Homo sapiens
  misc_RNA (1)...(19): siRNA sense strand
cugaaaagaaagcaaacua

SEQ ID NO: 2462167 - RNA, 19 nt, Homo sapiens
  misc_RNA (1)...(19): siRNA sense strand
cauuaauugaacaaggaga

SEQ ID NO: 2462168 - RNA, 19 nt, Homo sapiens
  misc_RNA (1)...(19): siRNA sense strand
caucaaaaccauaaaagca

SEQ ID NO: 2462169 - RNA, 19 nt, Homo sapiens
  misc_RNA (1)...(19): siRNA sense strand
gggcaagcauggcaggaag

SEQ ID NO: 2462170 - RNA, 19 nt, Homo sapiens
  misc_RNA (1)...(19): siRNA sense strand
uuugaaaugcagaggggaa

SEQ ID NO: 2462171 - RNA, 19 nt, Homo sapiens
  misc_RNA (1)...(19): siRNA sense strand
acgugguacugaaaagaaa

SEQ ID NO: 2462172 - RNA, 19 nt, Homo sapiens
  misc_RNA (1)...(19): siRNA sense strand
aauugaacaaggagaggga

SEQ ID NO: 2462173 - RNA, 19 nt, Homo sapiens
  misc_RNA (1)...(19): siRNA sense strand
gguacugaaaagaaagcaa

SEQ ID NO: 2462174 - RNA, 19 nt, Homo sapiens
  misc_RNA (1)...(19): siRNA sense strand
gcaaggaacuucuggagca

SEQ ID NO: 2462175 - RNA, 19 nt, Homo sapiens
  misc_RNA (1)...(19): siRNA sense strand
caggaaaguuugaggagcu

SEQ ID NO: 2462176 - RNA, 19 nt, Homo sapiens
  misc_RNA (1)...(19): siRNA sense strand
caggagaaggagcgagaga

SEQ ID NO: 2462177 - RNA, 19 nt, Homo sapiens
  misc_RNA (1)...(19): siRNA sense strand
caggagaaggagcgggaga

SEQ ID NO: 2462178 - RNA, 19 nt, Homo sapiens
  misc_RNA (1)...(19): siRNA sense strand
caggagaaagagcgagaga

SEQ ID NO: 2462179 - RNA, 19 nt, Homo sapiens
  misc_RNA (1)...(19): siRNA sense strand
cggcagaagcaggagaaga

SEQ ID NO: 2462180 - RNA, 19 nt, Homo sapiens
  misc_RNA (1)...(19): siRNA sense strand
cggagugguucaugugcau

SEQ ID NO: 2462181 - RNA, 19 nt, Homo sapiens
  misc_RNA (1)...(19): siRNA sense strand
gcacugauugagcgggaga

SEQ ID NO: 2462182 - RNA, 19 nt, Homo sapiens
  misc_RNA (1)...(19): siRNA sense strand
cggcgauuccagaagguga

SEQ ID NO: 2462183 - RNA, 19 nt, Homo sapiens
  misc_RNA (1)...(19): siRNA sense strand
caggagaaggagcggcaga

SEQ ID NO: 2462184 - RNA, 19 nt, Homo sapiens
  misc_RNA (1)...(19): siRNA sense strand
caggagaaggagcggcaga

SEQ ID NO: 2462185 - RNA, 19 nt, Homo sapiens
  misc_RNA (1)...(19): siRNA sense strand
caggagaaggagcggcaga

SEQ ID NO: 2462186 - RNA, 19 nt, Homo sapiens
  misc_RNA (1)...(19): siRNA sense strand
agcgagagaagcaggagaa

SEQ ID NO: 2462187 - RNA, 19 nt, Homo sapiens
  misc_RNA (1)...(19): siRNA sense strand
agcgagagaagcaggagaa

SEQ ID NO: 2462188 - RNA, 19 nt, Homo sapiens
  misc_RNA (1)...(19): siRNA sense strand
gagcgagagaagcaggaga

SEQ ID NO: 2462189 - RNA, 19 nt, Homo sapiens
  misc_RNA (1)...(19): siRNA sense strand
gagcgagagaagcaggaga

SEQ ID NO: 2462190 - RNA, 19 nt, Homo sapiens
  misc_RNA (1)...(19): siRNA sense strand
aggagaaggagcgggagaa

SEQ ID NO: 2462191 - RNA, 19 nt, Homo sapiens
  misc_RNA (1)...(19): siRNA sense strand
uguuuaagagcaaaggcaa

SEQ ID NO: 2462192 - RNA, 19 nt, Homo sapiens
  misc_RNA (1)...(19): siRNA sense strand
gcaacuacgacgagggguu

SEQ ID NO: 2462193 - RNA, 19 nt, Homo sapiens
  misc_RNA (1)...(19): siRNA sense strand
guuuaagagcaaaggcaac

SEQ ID NO: 2462194 - RNA, 19 nt, Homo sapiens
  misc_RNA (1)...(19): siRNA sense strand
gcaaaggcaacuacgacga

SEQ ID NO: 2462195 - RNA, 19 nt, Homo sapiens
  misc_RNA (1)...(19): siRNA sense strand
agguuauucuggauggaaa

SEQ ID NO: 2462196 - RNA, 19 nt, Homo sapiens
  misc_RNA (1)...(19): siRNA sense strand
aagauuaaagagacgguaa

SEQ ID NO: 2462197 - RNA, 19 nt, Homo sapiens
  misc_RNA (1)...(19): siRNA sense strand
caauccagaaagaaagaaa

SEQ ID NO: 2462198 - RNA, 19 nt, Homo sapiens
  misc_RNA (1)...(19): siRNA sense strand
ugacaauguuggugguaac

SEQ ID NO: 2462199 - RNA, 19 nt, Homo sapiens
  misc_RNA (1)...(19): siRNA sense strand
gguuauucuggauggaaau

SEQ ID NO: 2462200 - RNA, 19 nt, Homo sapiens
  misc_RNA (1)...(19): siRNA sense strand
ugauugggauacaggaaaa

SEQ ID NO: 2462201 - RNA, 19 nt, Homo sapiens
  misc_RNA (1)...(19): siRNA sense strand
cuauagaggcaauccagaa

SEQ ID NO: 2462202 - RNA, 19 nt, Homo sapiens
  misc_RNA (1)...(19): siRNA sense strand
ccgaauggaagaagucuau

SEQ ID NO: 2462203 - RNA, 19 nt, Homo sapiens
  misc_RNA (1)...(19): siRNA sense strand
agaagaaagcaaacacaca

SEQ ID NO: 2462204 - RNA, 19 nt, Homo sapiens
  misc_RNA (1)...(19): siRNA sense strand
gcuaaagauuaaagagacg

SEQ ID NO: 2462205 - RNA, 19 nt, Homo sapiens
  misc_RNA (1)...(19): siRNA sense strand
uggcagagaauuuccgaau

SEQ ID NO: 2462206 - RNA, 19 nt, Homo sapiens
  misc_RNA (1)...(19): siRNA sense strand
aagaaagcaaacacacaaa

SEQ ID NO: 2462207 - RNA, 19 nt, Homo sapiens
  misc_RNA (1)...(19): siRNA sense strand
agucagugguuuaaagaag

SEQ ID NO: 2462208 - RNA, 19 nt, Homo sapiens
  misc_RNA (1)...(19): siRNA sense strand
agaacagcuccgugaauca

SEQ ID NO: 2462209 - RNA, 19 nt, Homo sapiens
  misc_RNA (1)...(19): siRNA sense strand
aggacaaguacaaguuaga

SEQ ID NO: 2462210 - RNA, 19 nt, Homo sapiens
  misc_RNA (1)...(19): siRNA sense strand
aagaaacaucacaagggaa

SEQ ID NO: 2462211 - RNA, 19 nt, Homo sapiens
  misc_RNA (1)...(19): siRNA sense strand
auccaguggcagagaauuu

SEQ ID NO: 2462212 - RNA, 19 nt, Homo sapiens
  misc_RNA (1)...(19): siRNA sense strand
aagacaauguggcagaaca

SEQ ID NO: 2462213 - RNA, 19 nt, Homo sapiens
  misc_RNA (1)...(19): siRNA sense strand
gaaugaagacacuggcacu

SEQ ID NO: 2462214 - RNA, 19 nt, Homo sapiens
  misc_RNA (1)...(19): siRNA sense strand
agacacuggcacugauuau

SEQ ID NO: 2462215 - RNA, 19 nt, Homo sapiens
  misc_RNA (1)...(19): siRNA sense strand
auuggaaagcagauaguuu

SEQ ID NO: 2462216 - RNA, 19 nt, Homo sapiens
  misc_RNA (1)...(19): siRNA sense strand
ccaugaugacaggagguaa

SEQ ID NO: 2462217 - RNA, 19 nt, Homo sapiens
  misc_RNA (1)...(19): siRNA sense strand
caggagguaacauuggaaa

SEQ ID NO: 2462218 - RNA, 19 nt, Homo sapiens
  misc_RNA (1)...(19): siRNA sense strand
aguuugcauuucagaagaa

SEQ ID NO: 2462219 - RNA, 19 nt, Homo sapiens
  misc_RNA (1)...(19): siRNA sense strand
aaauuugacuaaaggcgau

SEQ ID NO: 2462220 - RNA, 19 nt, Homo sapiens
  misc_RNA (1)...(19): siRNA sense strand
gugauaagucagaugaaug

SEQ ID NO: 2462221 - RNA, 19 nt, Homo sapiens
  misc_RNA (1)...(19): siRNA sense strand
gauuguucaaagaguggua

SEQ ID NO: 2462222 - RNA, 19 nt, Homo sapiens
  misc_RNA (1)...(19): siRNA sense strand
cagugauaagucagaugaa

SEQ ID NO: 2462223 - RNA, 19 nt, Homo sapiens
  misc_RNA (1)...(19): siRNA sense strand
gcagcuugacuuugggcua

SEQ ID NO: 2462224 - RNA, 19 nt, Homo sapiens
  misc_RNA (1)...(19): siRNA sense strand
agucguuggcagagauaga

SEQ ID NO: 2462225 - RNA, 19 nt, Homo sapiens
  misc_RNA (1)...(19): siRNA sense strand
ccaaugaggaccaaaggga

SEQ ID NO: 2462226 - RNA, 19 nt, Homo sapiens
  misc_RNA (1)...(19): siRNA sense strand
uggcagagauagaccagca

SEQ ID NO: 2462227 - RNA, 19 nt, Homo sapiens
  misc_RNA (1)...(19): siRNA sense strand
aggcagaacuccacuggca

SEQ ID NO: 2462228 - RNA, 19 nt, Homo sapiens
  misc_RNA (1)...(19): siRNA sense strand
gguacagaugagacugcaa

SEQ ID NO: 2462229 - RNA, 19 nt, Homo sapiens
  misc_RNA (1)...(19): siRNA sense strand
uguggagauacgaggaaga

SEQ ID NO: 2462230 - RNA, 19 nt, Homo sapiens
  misc_RNA (1)...(19): siRNA sense strand
aguauaaagagaagagaga

SEQ ID NO: 2462231 - RNA, 19 nt, Homo sapiens
  misc_RNA (1)...(19): siRNA sense strand
ucgaaugggaagagggaga

SEQ ID NO: 2462232 - RNA, 19 nt, Homo sapiens
  misc_RNA (1)...(19): siRNA sense strand
gggaagaagaauuugugaa

SEQ ID NO: 2462233 - RNA, 19 nt, Homo sapiens
  misc_RNA (1)...(19): siRNA sense strand
caaaagaagaacuggcuaa

SEQ ID NO: 2462234 - RNA, 19 nt, Homo sapiens
  misc_RNA (1)...(19): siRNA sense strand
uuaaaggaaggcagagaaa

SEQ ID NO: 2462235 - RNA, 19 nt, Homo sapiens
  misc_RNA (1)...(19): siRNA sense strand
aaauaaaccagaugaccaa

SEQ ID NO: 2462236 - RNA, 19 nt, Homo sapiens
  misc_RNA (1)...(19): siRNA sense strand
agagagagcaucuggaaaa

SEQ ID NO: 2462237 - RNA, 19 nt, Homo sapiens
  misc_RNA (1)...(19): siRNA sense strand
gaaauaaaccagaugacca

SEQ ID NO: 2462238 - RNA, 19 nt, Homo sapiens
  misc_RNA (1)...(19): siRNA sense strand
augaaauacucgugggucu

SEQ ID NO: 2462239 - RNA, 19 nt, Homo sapiens
  misc_RNA (1)...(19): siRNA sense strand
aagagaagagagaacaaua

SEQ ID NO: 2462240 - RNA, 19 nt, Homo sapiens
  misc_RNA (1)...(19): siRNA sense strand
agugguacucggugggaua

SEQ ID NO: 2462241 - RNA, 19 nt, Homo sapiens
  misc_RNA (1)...(19): siRNA sense strand
ccuuaaugguauuucagaa

SEQ ID NO: 2462242 - RNA, 19 nt, Homo sapiens
  misc_RNA (1)...(19): siRNA sense strand
aaauagaagaugcaggaau

SEQ ID NO: 2462243 - RNA, 19 nt, Homo sapiens
  misc_RNA (1)...(19): siRNA sense strand
ugacuguaaaggaaagaaa

SEQ ID NO: 2462244 - RNA, 19 nt, Homo sapiens
  misc_RNA (1)...(19): siRNA sense strand
gagagagagcaucuggaaa

SEQ ID NO: 2462245 - RNA, 19 nt, Homo sapiens
  misc_RNA (1)...(19): siRNA sense strand
cuaaaugcaaacaggagaa

SEQ ID NO: 2462246 - RNA, 19 nt, Homo sapiens
  misc_RNA (1)...(19): siRNA sense strand
uaaagagaagagagaacaa

SEQ ID NO: 2462247 - RNA, 19 nt, Homo sapiens
  misc_RNA (1)...(19): siRNA sense strand
gggacaguauauauggaau

SEQ ID NO: 2462248 - RNA, 19 nt, Homo sapiens
  misc_RNA (1)...(19): siRNA sense strand
aaugcaaacaggagaaaga

SEQ ID NO: 2462249 - RNA, 19 nt, Homo sapiens
  misc_RNA (1)...(19): siRNA sense strand
ggagauugggagcaacaaa

SEQ ID NO: 2462250 - RNA, 19 nt, Homo sapiens
  misc_RNA (1)...(19): siRNA sense strand
acacuuaaguugagcguuc

SEQ ID NO: 2462251 - RNA, 19 nt, Homo sapiens
  misc_RNA (1)...(19): siRNA sense strand
augggaagagggagauaua

SEQ ID NO: 2462252 - RNA, 19 nt, Homo sapiens
  misc_RNA (1)...(19): siRNA sense strand
uauaaagagaagagagaac

SEQ ID NO: 2462253 - RNA, 19 nt, Homo sapiens
  misc_RNA (1)...(19): siRNA sense strand
cagcccaacucuaagacaa

SEQ ID NO: 2462254 - RNA, 19 nt, Homo sapiens
  misc_RNA (1)...(19): siRNA sense strand
ccacugauacagaugacaa

SEQ ID NO: 2462255 - RNA, 19 nt, Homo sapiens
  misc_RNA (1)...(19): siRNA sense strand
caaugaugcguaaggaaga

SEQ ID NO: 2462256 - RNA, 19 nt, Homo sapiens
  misc_RNA (1)...(19): siRNA sense strand
guuggugaauauugggcua

SEQ ID NO: 2462257 - RNA, 19 nt, Homo sapiens
  misc_RNA (1)...(19): siRNA sense strand
uguacaugaggaugaaaua

SEQ ID NO: 2462258 - RNA, 19 nt, Homo sapiens
  misc_RNA (1)...(19): siRNA sense strand
aagaagaauuugugaagac

SEQ ID NO: 2462259 - RNA, 19 nt, Homo sapiens
  misc_RNA (1)...(19): siRNA sense strand
cuucaaucagacaaggaua

SEQ ID NO: 2462260 - RNA, 19 nt, Homo sapiens
  misc_RNA (1)...(19): siRNA sense strand
agaaguaucuggcacgcaa

SEQ ID NO: 2462261 - RNA, 19 nt, Homo sapiens
  misc_RNA (1)...(19): siRNA sense strand
ugagaaucgggaagaagaa

SEQ ID NO: 2462262 - RNA, 19 nt, Homo sapiens
  misc_RNA (1)...(19): siRNA sense strand
cuuauaaggccaacugcua

SEQ ID NO: 2462263 - RNA, 19 nt, Homo sapiens
  misc_RNA (1)...(19): siRNA sense strand
gauucgaguuaaaugucaa

SEQ ID NO: 2462264 - RNA, 19 nt, Homo sapiens
  misc_RNA (1)...(19): siRNA sense strand
acuugaacguccaggaguu

SEQ ID NO: 2462265 - RNA, 19 nt, Homo sapiens
  misc_RNA (1)...(19): siRNA sense strand
cugaugacuguaaaggaaa

SEQ ID NO: 2462266 - RNA, 19 nt, Homo sapiens
  misc_RNA (1)...(19): siRNA sense strand
acugcauguuggugaauau

SEQ ID NO: 2462267 - RNA, 19 nt, Homo sapiens
  misc_RNA (1)...(19): siRNA sense strand
gcuauuauucagcaaacaa

SEQ ID NO: 2462268 - RNA, 19 nt, Homo sapiens
  misc_RNA (1)...(19): siRNA sense strand
acacgugggaauaauguaa

SEQ ID NO: 2462269 - RNA, 19 nt, Homo sapiens
  misc_RNA (1)...(19): siRNA sense strand
caaugauggaguugcaaaa

SEQ ID NO: 2462270 - RNA, 19 nt, Homo sapiens
  misc_RNA (1)...(19): siRNA sense strand
ugagguggaucaaggguga

SEQ ID NO: 2462271 - RNA, 19 nt, Homo sapiens
  misc_RNA (1)...(19): siRNA sense strand
aagacuuacucaaggcuuu

SEQ ID NO: 2462272 - RNA, 19 nt, Homo sapiens
  misc_RNA (1)...(19): siRNA sense strand
ccucaucaguggcgggagu

SEQ ID NO: 2462273 - RNA, 19 nt, Homo sapiens
  misc_RNA (1)...(19): siRNA sense strand
acuuaagguaguugggcuu

SEQ ID NO: 2462274 - RNA, 19 nt, Homo sapiens
  misc_RNA (1)...(19): siRNA sense strand
aaauacagcaucuaggcaa

SEQ ID NO: 2462275 - RNA, 19 nt, Homo sapiens
  misc_RNA (1)...(19): siRNA sense strand
cugcagcgcccuuggaaga

SEQ ID NO: 2462276 - RNA, 19 nt, Homo sapiens
  misc_RNA (1)...(19): siRNA sense strand
gaucauuggcagacgaaac

SEQ ID NO: 2462277 - RNA, 19 nt, Homo sapiens
  misc_RNA (1)...(19): siRNA sense strand
aagaauuugugaagacgau

SEQ ID NO: 2462278 - RNA, 19 nt, Homo sapiens
  misc_RNA (1)...(19): siRNA sense strand
cuaugagaaucgggaagaa

SEQ ID NO: 2462279 - RNA, 19 nt, Homo sapiens
  misc_RNA (1)...(19): siRNA sense strand
aggccaacugcuagucaaa

SEQ ID NO: 2462280 - RNA, 19 nt, Homo sapiens
  misc_RNA (1)...(19): siRNA sense strand
ccacaugccaaauaaguca

SEQ ID NO: 2462281 - RNA, 19 nt, Homo sapiens
  misc_RNA (1)...(19): siRNA sense strand
guuccugaugggagagaga

SEQ ID NO: 2462282 - RNA, 19 nt, Homo sapiens
  misc_RNA (1)...(19): siRNA sense strand
ccagcgaaugcgaagaaau

SEQ ID NO: 2462283 - RNA, 19 nt, Homo sapiens
  misc_RNA (1)...(19): siRNA sense strand
guuuccaaccugucaguua

SEQ ID NO: 2462284 - RNA, 19 nt, Homo sapiens
  misc_RNA (1)...(19): siRNA sense strand
ggaagaucuuuguaggaag

SEQ ID NO: 2462285 - RNA, 19 nt, Homo sapiens
  misc_RNA (1)...(19): siRNA sense strand
agcagagaguauaaagaga

SEQ ID NO: 2462286 - RNA, 19 nt, Homo sapiens
  misc_RNA (1)...(19): siRNA sense strand
aaauaagucaucugagcuu

SEQ ID NO: 2462287 - RNA, 19 nt, Homo sapiens
  misc_RNA (1)...(19): siRNA sense strand
gaaugggaagagggagaua

SEQ ID NO: 2462288 - RNA, 19 nt, Homo sapiens
  misc_RNA (1)...(19): siRNA sense strand
ugaaacauuuggaccguga

SEQ ID NO: 2462289 - RNA, 19 nt, Homo sapiens
  misc_RNA (1)...(19): siRNA sense strand
cggaaaaguugacgcacca

SEQ ID NO: 2462290 - RNA, 19 nt, Homo sapiens
  misc_RNA (1)...(19): siRNA sense strand
cuuaugagggacaguauau

SEQ ID NO: 2462291 - RNA, 19 nt, Homo sapiens
  misc_RNA (1)...(19): siRNA sense strand
cagcgaaugcgaagaaauc

SEQ ID NO: 2462292 - RNA, 19 nt, Homo sapiens
  misc_RNA (1)...(19): siRNA sense strand
caacaaaauagaagaugca

SEQ ID NO: 2462293 - RNA, 19 nt, Homo sapiens
  misc_RNA (1)...(19): siRNA sense strand
gcagcagagaguauaaaga

SEQ ID NO: 2462294 - RNA, 19 nt, Homo sapiens
  misc_RNA (1)...(19): siRNA sense strand
gugcacaagcagacggaga

SEQ ID NO: 2462295 - RNA, 19 nt, Homo sapiens
  misc_RNA (1)...(19): siRNA sense strand
ccaagugccaggugggcuu

SEQ ID NO: 2462296 - RNA, 19 nt, Homo sapiens
  misc_RNA (1)...(19): siRNA sense strand
cugcaaggacaagaagaaa

SEQ ID NO: 2462297 - RNA, 19 nt, Homo sapiens
  misc_RNA (1)...(19): siRNA sense strand
agacgagccuucagggacu

SEQ ID NO: 2462298 - RNA, 19 nt, Homo sapiens
  misc_RNA (1)...(19): siRNA sense strand
ugcaaggacaagaagaaau

SEQ ID NO: 2462299 - RNA, 19 nt, Homo sapiens
  misc_RNA (1)...(19): siRNA sense strand
cagcagcagcacagcgaca

SEQ ID NO: 2462300 - RNA, 19 nt, Homo sapiens
  misc_RNA (1)...(19): siRNA sense strand
gggaagaccuacugcaagc

SEQ ID NO: 2462301 - RNA, 19 nt, Homo sapiens
  misc_RNA (1)...(19): siRNA sense strand
acgugaagcccgagaacuu

SEQ ID NO: 2462302 - RNA, 19 nt, Homo sapiens
  misc_RNA (1)...(19): siRNA sense strand
cuucaagaggagaaagaga

SEQ ID NO: 2462303 - RNA, 19 nt, Homo sapiens
  misc_RNA (1)...(19): siRNA sense strand
cuaucaaauuggagccgau

SEQ ID NO: 2462304 - RNA, 19 nt, Homo sapiens
  misc_RNA (1)...(19): siRNA sense strand
aagaggagaaagagaaaau

SEQ ID NO: 2462305 - RNA, 19 nt, Homo sapiens
  misc_RNA (1)...(19): siRNA sense strand
ccaagaagcacaucccgua

SEQ ID NO: 2462306 - RNA, 19 nt, Homo sapiens
  misc_RNA (1)...(19): siRNA sense strand
agaacuucccagaggagau

SEQ ID NO: 2462307 - RNA, 19 nt, Homo sapiens
  misc_RNA (1)...(19): siRNA sense strand
cacaagagccugacgggca

SEQ ID NO: 2462308 - RNA, 19 nt, Homo sapiens
  misc_RNA (1)...(19): siRNA sense strand
ucaacacgcaccugggcaa

SEQ ID NO: 2462309 - RNA, 19 nt, Homo sapiens
  misc_RNA (1)...(19): siRNA sense strand
aaguaaaucucgaggagca

SEQ ID NO: 2462310 - RNA, 19 nt, Homo sapiens
  misc_RNA (1)...(19): siRNA sense strand
caucugaagaagaggaaaa

SEQ ID NO: 2462311 - RNA, 19 nt, Homo sapiens
  misc_RNA (1)...(19): siRNA sense strand
agucagugguugaaagcau

SEQ ID NO: 2462312 - RNA, 19 nt, Homo sapiens
  misc_RNA (1)...(19): siRNA sense strand
gggaaauggaaucugggaa

SEQ ID NO: 2462313 - RNA, 19 nt, Homo sapiens
  misc_RNA (1)...(19): siRNA sense strand
cagucaaugaagagaaaca

SEQ ID NO: 2462314 - RNA, 19 nt, Homo sapiens
  misc_RNA (1)...(19): siRNA sense strand
ggaaauggaaucugggaac

SEQ ID NO: 2462315 - RNA, 19 nt, Homo sapiens
  misc_RNA (1)...(19): siRNA sense strand
gaguguguucaaaggaaua

SEQ ID NO: 2462316 - RNA, 19 nt, Homo sapiens
  misc_RNA (1)...(19): siRNA sense strand
ucaaaagaucacagcaaaa

SEQ ID NO: 2462317 - RNA, 19 nt, Homo sapiens
  misc_RNA (1)...(19): siRNA sense strand
acugaaaagagaagagauu

SEQ ID NO: 2462318 - RNA, 19 nt, Homo sapiens
  misc_RNA (1)...(19): siRNA sense strand
gguugaaagcauuacaaaa

SEQ ID NO: 2462319 - RNA, 19 nt, Homo sapiens
  misc_RNA (1)...(19): siRNA sense strand
gcaaguaagaaaacugaaa

SEQ ID NO: 2462320 - RNA, 19 nt, Homo sapiens
  misc_RNA (1)...(19): siRNA sense strand
cagacagagugcugaagau

SEQ ID NO: 2462321 - RNA, 19 nt, Homo sapiens
  misc_RNA (1)...(19): siRNA sense strand
aauuauaccuggcagaaaa

SEQ ID NO: 2462322 - RNA, 19 nt, Homo sapiens
  misc_RNA (1)...(19): siRNA sense strand
gguucuucguggacgggaa

SEQ ID NO: 2462323 - RNA, 19 nt, Homo sapiens
  misc_RNA (1)...(19): siRNA sense strand
gaucacagcaaaagaagaa

SEQ ID NO: 2462324 - RNA, 19 nt, Homo sapiens
  misc_RNA (1)...(19): siRNA sense strand
ccugaggagucacggaaaa

SEQ ID NO: 2462325 - RNA, 19 nt, Homo sapiens
  misc_RNA (1)...(19): siRNA sense strand
acaaauuauaccuggcaga

SEQ ID NO: 2462326 - RNA, 19 nt, Homo sapiens
  misc_RNA (1)...(19): siRNA sense strand
ccuacuaugaauaugacaa

SEQ ID NO: 2462327 - RNA, 19 nt, Homo sapiens
  misc_RNA (1)...(19): siRNA sense strand
agauguguggagaaaguaa

SEQ ID NO: 2462328 - RNA, 19 nt, Homo sapiens
  misc_RNA (1)...(19): siRNA sense strand
ucaaaugaagagagccgaa

SEQ ID NO: 2462329 - RNA, 19 nt, Homo sapiens
  misc_RNA (1)...(19): siRNA sense strand
ugcagucaaugaagagaaa

SEQ ID NO: 2462330 - RNA, 19 nt, Homo sapiens
  misc_RNA (1)...(19): siRNA sense strand
ccucaaagauuucauggga

SEQ ID NO: 2462331 - RNA, 19 nt, Homo sapiens
  misc_RNA (1)...(19): siRNA sense strand
cucaaagauuucaugggaa

SEQ ID NO: 2462332 - RNA, 19 nt, Homo sapiens
  misc_RNA (1)...(19): siRNA sense strand
aguaaggcugugaaugaua

SEQ ID NO: 2462333 - RNA, 19 nt, Homo sapiens
  misc_RNA (1)...(19): siRNA sense strand
gggacuuggcugcucguaa

SEQ ID NO: 2462334 - RNA, 19 nt, Homo sapiens
  misc_RNA (1)...(19): siRNA sense strand
guuagaaauucgagccaag

SEQ ID NO: 2462335 - RNA, 19 nt, Homo sapiens
  misc_RNA (1)...(19): siRNA sense strand
cagcaaaagaagaaaaugu

SEQ ID NO: 2462336 - RNA, 19 nt, Homo sapiens
  misc_RNA (1)...(19): siRNA sense strand
caauaugacagcaacucaa

SEQ ID NO: 2462337 - RNA, 19 nt, Homo sapiens
  misc_RNA (1)...(19): siRNA sense strand
ucucaaaagaucacagcaa

SEQ ID NO: 2462338 - RNA, 19 nt, Homo sapiens
  misc_RNA (1)...(19): siRNA sense strand
gcuccaugucagaagauga

SEQ ID NO: 2462339 - RNA, 19 nt, Homo sapiens
  misc_RNA (1)...(19): siRNA sense strand
ccaauaugacaacgaauca

SEQ ID NO: 2462340 - RNA, 19 nt, Homo sapiens
  misc_RNA (1)...(19): siRNA sense strand
acuucaacaugcaguauau

SEQ ID NO: 2462341 - RNA, 19 nt, Homo sapiens
  misc_RNA (1)...(19): siRNA sense strand
acugguggcaaguaagaaa

SEQ ID NO: 2462342 - RNA, 19 nt, Homo sapiens
  misc_RNA (1)...(19): siRNA sense strand
guugcaagcaguaaccaaa

SEQ ID NO: 2462343 - RNA, 19 nt, Homo sapiens
  misc_RNA (1)...(19): siRNA sense strand
ugguuaaauucuauggagu

SEQ ID NO: 2462344 - RNA, 19 nt, Homo sapiens
  misc_RNA (1)...(19): siRNA sense strand
cggaaaaggacuugaaccu

SEQ ID NO: 2462345 - RNA, 19 nt, Homo sapiens
  misc_RNA (1)...(19): siRNA sense strand
gguuagaaauucgagccaa

SEQ ID NO: 2462346 - RNA, 19 nt, Homo sapiens
  misc_RNA (1)...(19): siRNA sense strand
uggccuucuuggagaguca

SEQ ID NO: 2462347 - RNA, 19 nt, Homo sapiens
  misc_RNA (1)...(19): siRNA sense strand
cauugaaccacuucgggaa

SEQ ID NO: 2462348 - RNA, 19 nt, Homo sapiens
  misc_RNA (1)...(19): siRNA sense strand
cugcagucaaugaagagaa

SEQ ID NO: 2462349 - RNA, 19 nt, Homo sapiens
  misc_RNA (1)...(19): siRNA sense strand
agucagacguaugggcauu

SEQ ID NO: 2462350 - RNA, 19 nt, Homo sapiens
  misc_RNA (1)...(19): siRNA sense strand
aaaucagauguguggagaa

SEQ ID NO: 2462351 - RNA, 19 nt, Homo sapiens
  misc_RNA (1)...(19): siRNA sense strand
ggauguacccucugggaag

SEQ ID NO: 2462352 - RNA, 19 nt, Homo sapiens
  misc_RNA (1)...(19): siRNA sense strand
augaaaaggggcagcagaa

SEQ ID NO: 2462353 - RNA, 19 nt, Homo sapiens
  misc_RNA (1)...(19): siRNA sense strand
gaaaguaaaucucgaggag

SEQ ID NO: 2462354 - RNA, 19 nt, Homo sapiens
  misc_RNA (1)...(19): siRNA sense strand
aaguaccagucuagcgcaa

SEQ ID NO: 2462355 - RNA, 19 nt, Homo sapiens
  misc_RNA (1)...(19): siRNA sense strand
gauguguggagaaaguaaa

SEQ ID NO: 2462356 - RNA, 19 nt, Homo sapiens
  misc_RNA (1)...(19): siRNA sense strand
acaaaugcugagaacaaau

SEQ ID NO: 2462357 - RNA, 19 nt, Homo sapiens
  misc_RNA (1)...(19): siRNA sense strand
cccuaugacuuguaugaca

SEQ ID NO: 2462358 - RNA, 19 nt, Homo sapiens
  misc_RNA (1)...(19): siRNA sense strand
gggcaguuccuguucucaa

SEQ ID NO: 2462359 - RNA, 19 nt, Homo sapiens
  misc_RNA (1)...(19): siRNA sense strand
gcgcaauaugacagcaacu

SEQ ID NO: 2462360 - RNA, 19 nt, Homo sapiens
  misc_RNA (1)...(19): siRNA sense strand
gagugguccagcugggcaa

SEQ ID NO: 2462361 - RNA, 19 nt, Homo sapiens
  misc_RNA (1)...(19): siRNA sense strand
augacugguuugcugguaa

SEQ ID NO: 2462362 - RNA, 19 nt, Homo sapiens
  misc_RNA (1)...(19): siRNA sense strand
cagacaaaagggaaaagaa

SEQ ID NO: 2462363 - RNA, 19 nt, Homo sapiens
  misc_RNA (1)...(19): siRNA sense strand
agaagaaaaugucaccaaa

SEQ ID NO: 2462364 - RNA, 19 nt, Homo sapiens
  misc_RNA (1)...(19): siRNA sense strand
gaaaaggauccauugaaau

SEQ ID NO: 2462365 - RNA, 19 nt, Homo sapiens
  misc_RNA (1)...(19): siRNA sense strand
acaaaagggaaaagaagga

SEQ ID NO: 2462366 - RNA, 19 nt, Homo sapiens
  misc_RNA (1)...(19): siRNA sense strand
cugaauuaccugaggaguc

SEQ ID NO: 2462367 - RNA, 19 nt, Homo sapiens
  misc_RNA (1)...(19): siRNA sense strand
aaauuauaccuggcagaaa

SEQ ID NO: 2462368 - RNA, 19 nt, Homo sapiens
  misc_RNA (1)...(19): siRNA sense strand
gguauguucuugaugacca

SEQ ID NO: 2462369 - RNA, 19 nt, Homo sapiens
  misc_RNA (1)...(19): siRNA sense strand
aaguaaaucucgaggagca

SEQ ID NO: 2462370 - RNA, 19 nt, Homo sapiens
  misc_RNA (1)...(19): siRNA sense strand
caucugaagaagaggaaaa

SEQ ID NO: 2462371 - RNA, 19 nt, Homo sapiens
  misc_RNA (1)...(19): siRNA sense strand
agucagugguugaaagcau

SEQ ID NO: 2462372 - RNA, 19 nt, Homo sapiens
  misc_RNA (1)...(19): siRNA sense strand
gggaaauggaaucugggaa

SEQ ID NO: 2462373 - RNA, 19 nt, Homo sapiens
  misc_RNA (1)...(19): siRNA sense strand
cagucaaugaagagaaaca

SEQ ID NO: 2462374 - RNA, 19 nt, Homo sapiens
  misc_RNA (1)...(19): siRNA sense strand
ggaaauggaaucugggaac

SEQ ID NO: 2462375 - RNA, 19 nt, Homo sapiens
  misc_RNA (1)...(19): siRNA sense strand
gaguguguucaaaggaaua

SEQ ID NO: 2462376 - RNA, 19 nt, Homo sapiens
  misc_RNA (1)...(19): siRNA sense strand
ucaaaagaucacagcaaaa

SEQ ID NO: 2462377 - RNA, 19 nt, Homo sapiens
  misc_RNA (1)...(19): siRNA sense strand
acugaaaagagaagagauu

SEQ ID NO: 2462378 - RNA, 19 nt, Homo sapiens
  misc_RNA (1)...(19): siRNA sense strand
gguugaaagcauuacaaaa

SEQ ID NO: 2462379 - RNA, 19 nt, Homo sapiens
  misc_RNA (1)...(19): siRNA sense strand
gcaaguaagaaaacugaaa

SEQ ID NO: 2462380 - RNA, 19 nt, Homo sapiens
  misc_RNA (1)...(19): siRNA sense strand
cagacagagugcugaagau

SEQ ID NO: 2462381 - RNA, 19 nt, Homo sapiens
  misc_RNA (1)...(19): siRNA sense strand
aauuauaccuggcagaaaa

SEQ ID NO: 2462382 - RNA, 19 nt, Homo sapiens
  misc_RNA (1)...(19): siRNA sense strand
gguucuucguggacgggaa

SEQ ID NO: 2462383 - RNA, 19 nt, Homo sapiens
  misc_RNA (1)...(19): siRNA sense strand
gaucacagcaaaagaagaa

SEQ ID NO: 2462384 - RNA, 19 nt, Homo sapiens
  misc_RNA (1)...(19): siRNA sense strand
ccugaggagucacggaaaa

SEQ ID NO: 2462385 - RNA, 19 nt, Homo sapiens
  misc_RNA (1)...(19): siRNA sense strand
acaaauuauaccuggcaga

SEQ ID NO: 2462386 - RNA, 19 nt, Homo sapiens
  misc_RNA (1)...(19): siRNA sense strand
ccuacuaugaauaugacaa

SEQ ID NO: 2462387 - RNA, 19 nt, Homo sapiens
  misc_RNA (1)...(19): siRNA sense strand
agauguguggagaaaguaa

SEQ ID NO: 2462388 - RNA, 19 nt, Homo sapiens
  misc_RNA (1)...(19): siRNA sense strand
ucaaaugaagagagccgaa

SEQ ID NO: 2462389 - RNA, 19 nt, Homo sapiens
  misc_RNA (1)...(19): siRNA sense strand
ugcagucaaugaagagaaa

SEQ ID NO: 2462390 - RNA, 19 nt, Homo sapiens
  misc_RNA (1)...(19): siRNA sense strand
ccucaaagauuucauggga

SEQ ID NO: 2462391 - RNA, 19 nt, Homo sapiens
  misc_RNA (1)...(19): siRNA sense strand
cucaaagauuucaugggaa

SEQ ID NO: 2462392 - RNA, 19 nt, Homo sapiens
  misc_RNA (1)...(19): siRNA sense strand
aguaaggcugugaaugaua

SEQ ID NO: 2462393 - RNA, 19 nt, Homo sapiens
  misc_RNA (1)...(19): siRNA sense strand
gggacuuggcugcucguaa

SEQ ID NO: 2462394 - RNA, 19 nt, Homo sapiens
  misc_RNA (1)...(19): siRNA sense strand
guuagaaauucgagccaag

SEQ ID NO: 2462395 - RNA, 19 nt, Homo sapiens
  misc_RNA (1)...(19): siRNA sense strand
cagcaaaagaagaaaaugu

SEQ ID NO: 2462396 - RNA, 19 nt, Homo sapiens
  misc_RNA (1)...(19): siRNA sense strand
caauaugacagcaacucaa

SEQ ID NO: 2462397 - RNA, 19 nt, Homo sapiens
  misc_RNA (1)...(19): siRNA sense strand
ucucaaaagaucacagcaa

SEQ ID NO: 2462398 - RNA, 19 nt, Homo sapiens
  misc_RNA (1)...(19): siRNA sense strand
gcuccaugucagaagauga

SEQ ID NO: 2462399 - RNA, 19 nt, Homo sapiens
  misc_RNA (1)...(19): siRNA sense strand
ccaauaugacaacgaauca

SEQ ID NO: 2462400 - RNA, 19 nt, Homo sapiens
  misc_RNA (1)...(19): siRNA sense strand
acuucaacaugcaguauau

SEQ ID NO: 2462401 - RNA, 19 nt, Homo sapiens
  misc_RNA (1)...(19): siRNA sense strand
acugguggcaaguaagaaa

SEQ ID NO: 2462402 - RNA, 19 nt, Homo sapiens
  misc_RNA (1)...(19): siRNA sense strand
guugcaagcaguaaccaaa

SEQ ID NO: 2462403 - RNA, 19 nt, Homo sapiens
  misc_RNA (1)...(19): siRNA sense strand
ugguuaaauucuauggagu

SEQ ID NO: 2462404 - RNA, 19 nt, Homo sapiens
  misc_RNA (1)...(19): siRNA sense strand
cggaaaaggacuugaaccu

SEQ ID NO: 2462405 - RNA, 19 nt, Homo sapiens
  misc_RNA (1)...(19): siRNA sense strand
gguuagaaauucgagccaa

SEQ ID NO: 2462406 - RNA, 19 nt, Homo sapiens
  misc_RNA (1)...(19): siRNA sense strand
uggccuucuuggagaguca

SEQ ID NO: 2462407 - RNA, 19 nt, Homo sapiens
  misc_RNA (1)...(19): siRNA sense strand
cauugaaccacuucgggaa

SEQ ID NO: 2462408 - RNA, 19 nt, Homo sapiens
  misc_RNA (1)...(19): siRNA sense strand
cugcagucaaugaagagaa

SEQ ID NO: 2462409 - RNA, 19 nt, Homo sapiens
  misc_RNA (1)...(19): siRNA sense strand
agucagacguaugggcauu

SEQ ID NO: 2462410 - RNA, 19 nt, Homo sapiens
  misc_RNA (1)...(19): siRNA sense strand
aaaucagauguguggagaa

SEQ ID NO: 2462411 - RNA, 19 nt, Homo sapiens
  misc_RNA (1)...(19): siRNA sense strand
ggauguacccucugggaag

SEQ ID NO: 2462412 - RNA, 19 nt, Homo sapiens
  misc_RNA (1)...(19): siRNA sense strand
augaaaaggggcagcagaa

SEQ ID NO: 2462413 - RNA, 19 nt, Homo sapiens
  misc_RNA (1)...(19): siRNA sense strand
gaaaguaaaucucgaggag

SEQ ID NO: 2462414 - RNA, 19 nt, Homo sapiens
  misc_RNA (1)...(19): siRNA sense strand
aaguaccagucuagcgcaa

SEQ ID NO: 2462415 - RNA, 19 nt, Homo sapiens
  misc_RNA (1)...(19): siRNA sense strand
gauguguggagaaaguaaa

SEQ ID NO: 2462416 - RNA, 19 nt, Homo sapiens
  misc_RNA (1)...(19): siRNA sense strand
acaaaugcugagaacaaau

SEQ ID NO: 2462417 - RNA, 19 nt, Homo sapiens
  misc_RNA (1)...(19): siRNA sense strand
cccuaugacuuguaugaca

SEQ ID NO: 2462418 - RNA, 19 nt, Homo sapiens
  misc_RNA (1)...(19): siRNA sense strand
gggcaguuccuguucucaa

SEQ ID NO: 2462419 - RNA, 19 nt, Homo sapiens
  misc_RNA (1)...(19): siRNA sense strand
gcgcaauaugacagcaacu

SEQ ID NO: 2462420 - RNA, 19 nt, Homo sapiens
  misc_RNA (1)...(19): siRNA sense strand
gagugguccagcugggcaa

SEQ ID NO: 2462421 - RNA, 19 nt, Homo sapiens
  misc_RNA (1)...(19): siRNA sense strand
augacugguuugcugguaa

SEQ ID NO: 2462422 - RNA, 19 nt, Homo sapiens
  misc_RNA (1)...(19): siRNA sense strand
cagacaaaagggaaaagaa

SEQ ID NO: 2462423 - RNA, 19 nt, Homo sapiens
  misc_RNA (1)...(19): siRNA sense strand
agaagaaaaugucaccaaa

SEQ ID NO: 2462424 - RNA, 19 nt, Homo sapiens
  misc_RNA (1)...(19): siRNA sense strand
gaaaaggauccauugaaau

SEQ ID NO: 2462425 - RNA, 19 nt, Homo sapiens
  misc_RNA (1)...(19): siRNA sense strand
acaaaagggaaaagaagga

SEQ ID NO: 2462426 - RNA, 19 nt, Homo sapiens
  misc_RNA (1)...(19): siRNA sense strand
cugaauuaccugaggaguc

SEQ ID NO: 2462427 - RNA, 19 nt, Homo sapiens
  misc_RNA (1)...(19): siRNA sense strand
aaauuauaccuggcagaaa

SEQ ID NO: 2462428 - RNA, 19 nt, Homo sapiens
  misc_RNA (1)...(19): siRNA sense strand
gguauguucuugaugacca

SEQ ID NO: 2462429 - RNA, 19 nt, Homo sapiens
  misc_RNA (1)...(19): siRNA sense strand
cgggaagagcugugaggau

SEQ ID NO: 2462430 - RNA, 19 nt, Homo sapiens
  misc_RNA (1)...(19): siRNA sense strand
ugaacgagugugagcucua

SEQ ID NO: 2462431 - RNA, 19 nt, Homo sapiens
  misc_RNA (1)...(19): siRNA sense strand
gggaagagcugugaggaug

SEQ ID NO: 2462432 - RNA, 19 nt, Homo sapiens
  misc_RNA (1)...(19): siRNA sense strand
cggaauaccuggaccgcuc

SEQ ID NO: 2462433 - RNA, 19 nt, Homo sapiens
  misc_RNA (1)...(19): siRNA sense strand
gaacucuggcugacgggaa

SEQ ID NO: 2462434 - RNA, 19 nt, Homo sapiens
  misc_RNA (1)...(19): siRNA sense strand
aggccaaccacguguccaa

SEQ ID NO: 2462435 - RNA, 19 nt, Homo sapiens
  misc_RNA (1)...(19): siRNA sense strand
uguagagguaucagugaau

SEQ ID NO: 2462436 - RNA, 19 nt, Homo sapiens
  misc_RNA (1)...(19): siRNA sense strand
gcugaagggccaggagaca

SEQ ID NO: 2462437 - RNA, 19 nt, Homo sapiens
  misc_RNA (1)...(19): siRNA sense strand
guguagaaggagucaacca

SEQ ID NO: 2462438 - RNA, 19 nt, Homo sapiens
  misc_RNA (1)...(19): siRNA sense strand
agaagauggaggaggcaaa

SEQ ID NO: 2462439 - RNA, 19 nt, Homo sapiens
  misc_RNA (1)...(19): siRNA sense strand
gcgagaagcugcuggagga

SEQ ID NO: 2462440 - RNA, 19 nt, Homo sapiens
  misc_RNA (1)...(19): siRNA sense strand
aggagaacaucgagggccu

SEQ ID NO: 2462441 - RNA, 19 nt, Homo sapiens
  misc_RNA (1)...(19): siRNA sense strand
gagaagauggaggaggcaa

SEQ ID NO: 2462442 - RNA, 19 nt, Homo sapiens
  misc_RNA (1)...(19): siRNA sense strand
agaagcugcuggaggagga

SEQ ID NO: 2462443 - RNA, 19 nt, Homo sapiens
  misc_RNA (1)...(19): siRNA sense strand
gcaugcuggaggagaacau

SEQ ID NO: 2462444 - RNA, 19 nt, Homo sapiens
  misc_RNA (1)...(19): siRNA sense strand
guacagacgaggaggguuc

SEQ ID NO: 2462445 - RNA, 19 nt, Homo sapiens
  misc_RNA (1)...(19): siRNA sense strand
cuaucuaacugaagaggca

SEQ ID NO: 2462446 - RNA, 19 nt, Homo sapiens
  misc_RNA (1)...(19): siRNA sense strand
cgaccuacauaguggagca

SEQ ID NO: 2462447 - RNA, 19 nt, Homo sapiens
  misc_RNA (1)...(19): siRNA sense strand
acauaguggagcaggcaca

SEQ ID NO: 2462448 - RNA, 19 nt, Homo sapiens
  misc_RNA (1)...(19): siRNA sense strand
ccaaugaugcccagccaga

SEQ ID NO: 2462449 - RNA, 19 nt, Homo sapiens
  misc_RNA (1)...(19): siRNA sense strand
ugggaaugacaaagggaua

SEQ ID NO: 2462450 - RNA, 19 nt, Homo sapiens
  misc_RNA (1)...(19): siRNA sense strand
ccuuuaaaccagaagaaau

SEQ ID NO: 2462451 - RNA, 19 nt, Homo sapiens
  misc_RNA (1)...(19): siRNA sense strand
gagugauaguacauggcua

SEQ ID NO: 2462452 - RNA, 19 nt, Homo sapiens
  misc_RNA (1)...(19): siRNA sense strand
ugaagauguccuaggaaca

SEQ ID NO: 2462453 - RNA, 19 nt, Homo sapiens
  misc_RNA (1)...(19): siRNA sense strand
gcacugaaccuaagccaca

SEQ ID NO: 2462454 - RNA, 19 nt, Homo sapiens
  misc_RNA (1)...(19): siRNA sense strand
ggguacucauugaugggaa

SEQ ID NO: 2462455 - RNA, 19 nt, Homo sapiens
  misc_RNA (1)...(19): siRNA sense strand
ggggugaaacugcgugaaa

SEQ ID NO: 2462456 - RNA, 19 nt, Homo sapiens
  misc_RNA (1)...(19): siRNA sense strand
gggugaaacugcgugaaaa

SEQ ID NO: 2462457 - RNA, 19 nt, Homo sapiens
  misc_RNA (1)...(19): siRNA sense strand
gcgugaaaacagacaucaa

SEQ ID NO: 2462458 - RNA, 19 nt, Homo sapiens
  misc_RNA (1)...(19): siRNA sense strand
gggacaucaaucaaggaga

SEQ ID NO: 2462459 - RNA, 19 nt, Homo sapiens
  misc_RNA (1)...(19): siRNA sense strand
gggaaguggagacgggcaa

SEQ ID NO: 2462460 - RNA, 19 nt, Homo sapiens
  misc_RNA (1)...(19): siRNA sense strand
cggaaacagccuggagaaa

SEQ ID NO: 2462461 - RNA, 19 nt, Homo sapiens
  misc_RNA (1)...(19): siRNA sense strand
gccaaggaguugaggcaga

SEQ ID NO: 2462462 - RNA, 19 nt, Homo sapiens
  misc_RNA (1)...(19): siRNA sense strand
ugaaggaaguggaagcaga

SEQ ID NO: 2462463 - RNA, 19 nt, Homo sapiens
  misc_RNA (1)...(19): siRNA sense strand
cagaagagguugagccuag

SEQ ID NO: 2462464 - RNA, 19 nt, Homo sapiens
  misc_RNA (1)...(19): siRNA sense strand
gggaaggugcuuagccaga

SEQ ID NO: 2462465 - RNA, 19 nt, Homo sapiens
  misc_RNA (1)...(19): siRNA sense strand
ucuuggagcuagugaggca

SEQ ID NO: 2462466 - RNA, 19 nt, Homo sapiens
  misc_RNA (1)...(19): siRNA sense strand
cagaggacaucucgggcau

SEQ ID NO: 2462467 - RNA, 19 nt, Homo sapiens
  misc_RNA (1)...(19): siRNA sense strand
aggaaguggaagcagagaa

SEQ ID NO: 2462468 - RNA, 19 nt, Homo sapiens
  misc_RNA (1)...(19): siRNA sense strand
ucggaaacagccuggagaa

SEQ ID NO: 2462469 - RNA, 19 nt, Homo sapiens
  misc_RNA (1)...(19): siRNA sense strand
gugcuuagccagacgacca

SEQ ID NO: 2462470 - RNA, 19 nt, Homo sapiens
  misc_RNA (1)...(19): siRNA sense strand
ccuucugggcuuaugcaaa

SEQ ID NO: 2462471 - RNA, 19 nt, Homo sapiens
  misc_RNA (1)...(19): siRNA sense strand
uggccaaggaguugaggca

SEQ ID NO: 2462472 - RNA, 19 nt, Homo sapiens
  misc_RNA (1)...(19): siRNA sense strand
agcaauuggccaaggaguu

SEQ ID NO: 2462473 - RNA, 19 nt, Homo sapiens
  misc_RNA (1)...(19): siRNA sense strand
aguugaggcagaagagguu

SEQ ID NO: 2462474 - RNA, 19 nt, Homo sapiens
  misc_RNA (1)...(19): siRNA sense strand
agacacagcuggaagagga

SEQ ID NO: 2462475 - RNA, 19 nt, Homo sapiens
  misc_RNA (1)...(19): siRNA sense strand
ggaacagacaccaggagga

SEQ ID NO: 2462476 - RNA, 19 nt, Homo sapiens
  misc_RNA (1)...(19): siRNA sense strand
ggaucaaauaccaaggugu

SEQ ID NO: 2462477 - RNA, 19 nt, Homo sapiens
  misc_RNA (1)...(19): siRNA sense strand
ucgaaauuauagugacaca

SEQ ID NO: 2462478 - RNA, 19 nt, Homo sapiens
  misc_RNA (1)...(19): siRNA sense strand
gcuagugaugugagcaaau

SEQ ID NO: 2462479 - RNA, 19 nt, Homo sapiens
  misc_RNA (1)...(19): siRNA sense strand
gcgccuuauuccagugaca

SEQ ID NO: 2462480 - RNA, 19 nt, Homo sapiens
  misc_RNA (1)...(19): siRNA sense strand
gcacaguggaggagcugca

SEQ ID NO: 2462481 - RNA, 19 nt, Homo sapiens
  misc_RNA (1)...(19): siRNA sense strand
cauaaugccugcugcgagu

SEQ ID NO: 2462482 - RNA, 19 nt, Homo sapiens
  misc_RNA (1)...(19): siRNA sense strand
gccuuauuccagugacaaa

SEQ ID NO: 2462483 - RNA, 19 nt, Homo sapiens
  misc_RNA (1)...(19): siRNA sense strand
gggcacucacagaaggaga

SEQ ID NO: 2462484 - RNA, 19 nt, Homo sapiens
  misc_RNA (1)...(19): siRNA sense strand
acucaguugaauuggaaca

SEQ ID NO: 2462485 - RNA, 19 nt, Homo sapiens
  misc_RNA (1)...(19): siRNA sense strand
acuuucacaucaugagaau

SEQ ID NO: 2462486 - RNA, 19 nt, Homo sapiens
  misc_RNA (1)...(19): siRNA sense strand
auguguaauccucgaaauu

SEQ ID NO: 2462487 - RNA, 19 nt, Homo sapiens
  misc_RNA (1)...(19): siRNA sense strand
caaagagcacaguggagga

SEQ ID NO: 2462488 - RNA, 19 nt, Homo sapiens
  misc_RNA (1)...(19): siRNA sense strand
ccuucagacuauagacaau

SEQ ID NO: 2462489 - RNA, 19 nt, Homo sapiens
  misc_RNA (1)...(19): siRNA sense strand
gcuacauaacaguggaaca

SEQ ID NO: 2462490 - RNA, 19 nt, Homo sapiens
  misc_RNA (1)...(19): siRNA sense strand
ugggcgaacuacugguaaa

SEQ ID NO: 2462491 - RNA, 19 nt, Homo sapiens
  misc_RNA (1)...(19): siRNA sense strand
uaacaguggaacagaccaa

SEQ ID NO: 2462492 - RNA, 19 nt, Homo sapiens
  misc_RNA (1)...(19): siRNA sense strand
cuggaaaagagguggucaa

SEQ ID NO: 2462493 - RNA, 19 nt, Homo sapiens
  misc_RNA (1)...(19): siRNA sense strand
uggaggaaggguugaaaga

SEQ ID NO: 2462494 - RNA, 19 nt, Homo sapiens
  misc_RNA (1)...(19): siRNA sense strand
ugaugauagccuuaagaau

SEQ ID NO: 2462495 - RNA, 19 nt, Homo sapiens
  misc_RNA (1)...(19): siRNA sense strand
agauacagaccuagccaga

SEQ ID NO: 2462496 - RNA, 19 nt, Homo sapiens
  misc_RNA (1)...(19): siRNA sense strand
auuuccagacccagagaua

SEQ ID NO: 2462497 - RNA, 19 nt, Homo sapiens
  misc_RNA (1)...(19): siRNA sense strand
guggagagcaugcuggaca

SEQ ID NO: 2462498 - RNA, 19 nt, Homo sapiens
  misc_RNA (1)...(19): siRNA sense strand
ccagcaaccuccacggcuu

SEQ ID NO: 2462499 - RNA, 19 nt, Homo sapiens
  misc_RNA (1)...(19): siRNA sense strand
uggaugacccuaaaggaga

SEQ ID NO: 2462500 - RNA, 19 nt, Homo sapiens
  misc_RNA (1)...(19): siRNA sense strand
uuccagacccagagauaau

SEQ ID NO: 2462501 - RNA, 19 nt, Homo sapiens
  misc_RNA (1)...(19): siRNA sense strand
caggacacagccagagaau

SEQ ID NO: 2462502 - RNA, 19 nt, Homo sapiens
  misc_RNA (1)...(19): siRNA sense strand
ugguacaagaucagcauga

SEQ ID NO: 2462503 - RNA, 19 nt, Homo sapiens
  misc_RNA (1)...(19): siRNA sense strand
uggucaaacaguuggagga

SEQ ID NO: 2462504 - RNA, 19 nt, Homo sapiens
  misc_RNA (1)...(19): siRNA sense strand
ccagcaaugaugagaguuc

SEQ ID NO: 2462505 - RNA, 19 nt, Homo sapiens
  misc_RNA (1)...(19): siRNA sense strand
gggaacugacauugaccuu

SEQ ID NO: 2462506 - RNA, 19 nt, Homo sapiens
  misc_RNA (1)...(19): siRNA sense strand
ccucagaccuacaagcugu

SEQ ID NO: 2462507 - RNA, 19 nt, Homo sapiens
  misc_RNA (1)...(19): siRNA sense strand
gcggcuggcaguagaggau

SEQ ID NO: 2462508 - RNA, 19 nt, Homo sapiens
  misc_RNA (1)...(19): siRNA sense strand
ugguaaaggcgguggccac

SEQ ID NO: 2462509 - RNA, 19 nt, Homo sapiens
  misc_RNA (1)...(19): siRNA sense strand
agaaagcaucccugcaaga

SEQ ID NO: 2462510 - RNA, 19 nt, Homo sapiens
  misc_RNA (1)...(19): siRNA sense strand
gcaaagaucuucaggcaca

SEQ ID NO: 2462511 - RNA, 19 nt, Homo sapiens
  misc_RNA (1)...(19): siRNA sense strand
uugaaaaggaaguggaaua

SEQ ID NO: 2462512 - RNA, 19 nt, Homo sapiens
  misc_RNA (1)...(19): siRNA sense strand
ggaaggagaucaauggaca

SEQ ID NO: 2462513 - RNA, 19 nt, Homo sapiens
  misc_RNA (1)...(19): siRNA sense strand
guggauugcuagugauaau

SEQ ID NO: 2462514 - RNA, 19 nt, Homo sapiens
  misc_RNA (1)...(19): siRNA sense strand
ucuaaaugcuccaaggaau

SEQ ID NO: 2462515 - RNA, 19 nt, Homo sapiens
  misc_RNA (1)...(19): siRNA sense strand
guguguuggcuuugaaaua

SEQ ID NO: 2462516 - RNA, 19 nt, Homo sapiens
  misc_RNA (1)...(19): siRNA sense strand
ggaaugcaguccugggcaa

SEQ ID NO: 2462517 - RNA, 19 nt, Homo sapiens
  misc_RNA (1)...(19): siRNA sense strand
gggcaaaugaagaaaacua

SEQ ID NO: 2462518 - RNA, 19 nt, Homo sapiens
  misc_RNA (1)...(19): siRNA sense strand
ugucauagguucuggguac

SEQ ID NO: 2462519 - RNA, 19 nt, Homo sapiens
  misc_RNA (1)...(19): siRNA sense strand
agaauaugaccuacagaau

SEQ ID NO: 2462520 - RNA, 19 nt, Homo sapiens
  misc_RNA (1)...(19): siRNA sense strand
aagcaaagaucuucaggca

SEQ ID NO: 2462521 - RNA, 19 nt, Homo sapiens
  misc_RNA (1)...(19): siRNA sense strand
aagcaagagauuaacacaa

SEQ ID NO: 2462522 - RNA, 19 nt, Homo sapiens
  misc_RNA (1)...(19): siRNA sense strand
cagaagucacaguggcaau

SEQ ID NO: 2462523 - RNA, 19 nt, Homo sapiens
  misc_RNA (1)...(19): siRNA sense strand
gcagaaaagcaaagaucuu

SEQ ID NO: 2462524 - RNA, 19 nt, Homo sapiens
  misc_RNA (1)...(19): siRNA sense strand
agaaauccugagugacaaa

SEQ ID NO: 2462525 - RNA, 19 nt, Homo sapiens
  misc_RNA (1)...(19): siRNA sense strand
ggaaaaugccacaagugua

SEQ ID NO: 2462526 - RNA, 19 nt, Homo sapiens
  misc_RNA (1)...(19): siRNA sense strand
cagaauaugaccuacagaa

SEQ ID NO: 2462527 - RNA, 19 nt, Homo sapiens
  misc_RNA (1)...(19): siRNA sense strand
uguucugguuguuggcaua

SEQ ID NO: 2462528 - RNA, 19 nt, Homo sapiens
  misc_RNA (1)...(19): siRNA sense strand
uucaacugcuccagagaaa

SEQ ID NO: 2462529 - RNA, 19 nt, Homo sapiens
  misc_RNA (1)...(19): siRNA sense strand
aagcaaauaacgugugcau

SEQ ID NO: 2462530 - RNA, 19 nt, Homo sapiens
  misc_RNA (1)...(19): siRNA sense strand
gcuagugauaauuggucaa

SEQ ID NO: 2462531 - RNA, 19 nt, Homo sapiens
  misc_RNA (1)...(19): siRNA sense strand
cuguggaguuuaaguguga

SEQ ID NO: 2462532 - RNA, 19 nt, Homo sapiens
  misc_RNA (1)...(19): siRNA sense strand
gggauuuaaauacuggaua

SEQ ID NO: 2462533 - RNA, 19 nt, Homo sapiens
  misc_RNA (1)...(19): siRNA sense strand
agaauuacaaugaagccaa

SEQ ID NO: 2462534 - RNA, 19 nt, Homo sapiens
  misc_RNA (1)...(19): siRNA sense strand
agucagaaucaaucggaca

SEQ ID NO: 2462535 - RNA, 19 nt, Homo sapiens
  misc_RNA (1)...(19): siRNA sense strand
gauaauuggucaacugcca

SEQ ID NO: 2462536 - RNA, 19 nt, Homo sapiens
  misc_RNA (1)...(19): siRNA sense strand
ggaaugacuccuuggccau

SEQ ID NO: 2462537 - RNA, 19 nt, Homo sapiens
  misc_RNA (1)...(19): siRNA sense strand
agcuacaugccaagaguua

SEQ ID NO: 2462538 - RNA, 19 nt, Homo sapiens
  misc_RNA (1)...(19): siRNA sense strand
ccaucaaauuaaagcaaug

SEQ ID NO: 2462539 - RNA, 19 nt, Homo sapiens
  misc_RNA (1)...(19): siRNA sense strand
aaauuaaagcaauggcuca

SEQ ID NO: 2462540 - RNA, 19 nt, Homo sapiens
  misc_RNA (1)...(19): siRNA sense strand
cagacaauguuuggaguga

SEQ ID NO: 2462541 - RNA, 19 nt, Homo sapiens
  misc_RNA (1)...(19): siRNA sense strand
ugacgaagucucugaaaau

SEQ ID NO: 2462542 - RNA, 19 nt, Homo sapiens
  misc_RNA (1)...(19): siRNA sense strand
uuuuagaagcccagguuaa

SEQ ID NO: 2462543 - RNA, 19 nt, Homo sapiens
  misc_RNA (1)...(19): siRNA sense strand
cuuuagaagagggaauaua

SEQ ID NO: 2462544 - RNA, 19 nt, Homo sapiens
  misc_RNA (1)...(19): siRNA sense strand
uacacuaaucagacagaua

SEQ ID NO: 2462545 - RNA, 19 nt, Homo sapiens
  misc_RNA (1)...(19): siRNA sense strand
gguuggaacuggauuggca

SEQ ID NO: 2462546 - RNA, 19 nt, Homo sapiens
  misc_RNA (1)...(19): siRNA sense strand
ucaucauccuggaguguga

SEQ ID NO: 2462547 - RNA, 19 nt, Homo sapiens
  misc_RNA (1)...(19): siRNA sense strand
cuuucaaccaugggaguua

SEQ ID NO: 2462548 - RNA, 19 nt, Homo sapiens
  misc_RNA (1)...(19): siRNA sense strand
ucccagaucaggaaacaaa

SEQ ID NO: 2462549 - RNA, 19 nt, Homo sapiens
  misc_RNA (1)...(19): siRNA sense strand
caaaggcaaauaugagaau

SEQ ID NO: 2462550 - RNA, 19 nt, Homo sapiens
  misc_RNA (1)...(19): siRNA sense strand
ggaguuuaagugugacuau

SEQ ID NO: 2462551 - RNA, 19 nt, Homo sapiens
  misc_RNA (1)...(19): siRNA sense strand
cuaagauggcagaauauga

SEQ ID NO: 2462552 - RNA, 19 nt, Homo sapiens
  misc_RNA (1)...(19): siRNA sense strand
cagaaauaacuauggcugu

SEQ ID NO: 2462553 - RNA, 19 nt, Homo sapiens
  misc_RNA (1)...(19): siRNA sense strand
cacuaagauggcagaauau

SEQ ID NO: 2462554 - RNA, 19 nt, Homo sapiens
  misc_RNA (1)...(19): siRNA sense strand
gggauuaagagucugcuau

SEQ ID NO: 2462555 - RNA, 19 nt, Homo sapiens
  misc_RNA (1)...(19): siRNA sense strand
uguggagauuauugucaua

SEQ ID NO: 2462556 - RNA, 19 nt, Homo sapiens
  misc_RNA (1)...(19): siRNA sense strand
ggguaugaaaucuaugaca

SEQ ID NO: 2462557 - RNA, 19 nt, Homo sapiens
  misc_RNA (1)...(19): siRNA sense strand
aaagauuggcaaaguugua

SEQ ID NO: 2462558 - RNA, 19 nt, Homo sapiens
  misc_RNA (1)...(19): siRNA sense strand
uggaaugacuccuuggcca

SEQ ID NO: 2462559 - RNA, 19 nt, Homo sapiens
  misc_RNA (1)...(19): siRNA sense strand
gcaaauauguaccagcugu

SEQ ID NO: 2462560 - RNA, 19 nt, Homo sapiens
  misc_RNA (1)...(19): siRNA sense strand
cagaaauccugagugacaa

SEQ ID NO: 2462561 - RNA, 19 nt, Homo sapiens
  misc_RNA (1)...(19): siRNA sense strand
ugccuuuagaagagggaau

SEQ ID NO: 2462562 - RNA, 19 nt, Homo sapiens
  misc_RNA (1)...(19): siRNA sense strand
ugccacaaguguaucuaaa

SEQ ID NO: 2462563 - RNA, 19 nt, Homo sapiens
  misc_RNA (1)...(19): siRNA sense strand
aggaaguggaauaucucaa

SEQ ID NO: 2462564 - RNA, 19 nt, Homo sapiens
  misc_RNA (1)...(19): siRNA sense strand
gguuguuggcauaauauuu

SEQ ID NO: 2462565 - RNA, 19 nt, Homo sapiens
  misc_RNA (1)...(19): siRNA sense strand
cucuauagaccgauccuua

SEQ ID NO: 2462566 - RNA, 19 nt, Homo sapiens
  misc_RNA (1)...(19): siRNA sense strand
guaugaaaucuaugacacu

SEQ ID NO: 2462567 - RNA, 19 nt, Homo sapiens
  misc_RNA (1)...(19): siRNA sense strand
uggcagaauaugaccuaca

SEQ ID NO: 2462568 - RNA, 19 nt, Homo sapiens
  misc_RNA (1)...(19): siRNA sense strand
ucaaaggcaaauaugagaa

SEQ ID NO: 2462569 - RNA, 19 nt, Homo sapiens
  misc_RNA (1)...(19): siRNA sense strand
gguaugaaaucuaugacac

SEQ ID NO: 2462570 - RNA, 19 nt, Homo sapiens
  misc_RNA (1)...(19): siRNA sense strand
gguacuauccagaaagcaa

SEQ ID NO: 2462571 - RNA, 19 nt, Homo sapiens
  misc_RNA (1)...(19): siRNA sense strand
ugggaaugacugaggaaga

SEQ ID NO: 2462572 - RNA, 19 nt, Homo sapiens
  misc_RNA (1)...(19): siRNA sense strand
ccauugagguggaagcuga

SEQ ID NO: 2462573 - RNA, 19 nt, Homo sapiens
  misc_RNA (1)...(19): siRNA sense strand
ugaaaguaguauagccaca

SEQ ID NO: 2462574 - RNA, 19 nt, Homo sapiens
  misc_RNA (1)...(19): siRNA sense strand
uugacaaguugguggugaa

SEQ ID NO: 2462575 - RNA, 19 nt, Homo sapiens
  misc_RNA (1)...(19): siRNA sense strand
gaagaaggccagugcgguu

SEQ ID NO: 2462576 - RNA, 19 nt, Homo sapiens
  misc_RNA (1)...(19): siRNA sense strand
auuagagaacauagcgaaa

SEQ ID NO: 2462577 - RNA, 19 nt, Homo sapiens
  misc_RNA (1)...(19): siRNA sense strand
ggucacgaucacauggaaa

SEQ ID NO: 2462578 - RNA, 19 nt, Homo sapiens
  misc_RNA (1)...(19): siRNA sense strand
gguggugaacuuugggaau

SEQ ID NO: 2462579 - RNA, 19 nt, Homo sapiens
  misc_RNA (1)...(19): siRNA sense strand
auucagugucuuugagauu

SEQ ID NO: 2462580 - RNA, 19 nt, Homo sapiens
  misc_RNA (1)...(19): siRNA sense strand
gauuagagaacauagcgaa

SEQ ID NO: 2462581 - RNA, 19 nt, Homo sapiens
  misc_RNA (1)...(19): siRNA sense strand
uucccaagagugagagaaa

SEQ ID NO: 2462582 - RNA, 19 nt, Homo sapiens
  misc_RNA (1)...(19): siRNA sense strand
gcugaaaguaguauagcca

SEQ ID NO: 2462583 - RNA, 19 nt, Homo sapiens
  misc_RNA (1)...(19): siRNA sense strand
acaccaagggagaagucua

SEQ ID NO: 2462584 - RNA, 19 nt, Homo sapiens
  misc_RNA (1)...(19): siRNA sense strand
aagcuaaaccugaaggagu

SEQ ID NO: 2462585 - RNA, 19 nt, Homo sapiens
  misc_RNA (1)...(19): siRNA sense strand
ccugaggauuccagcuauu

SEQ ID NO: 2462586 - RNA, 19 nt, Homo sapiens
  misc_RNA (1)...(19): siRNA sense strand
ccagaacgggucaggaaaa

SEQ ID NO: 2462587 - RNA, 19 nt, Homo sapiens
  misc_RNA (1)...(19): siRNA sense strand
acuggagauuagagaacau

SEQ ID NO: 2462588 - RNA, 19 nt, Homo sapiens
  misc_RNA (1)...(19): siRNA sense strand
ccagcuggauggaagucaa

SEQ ID NO: 2462589 - RNA, 19 nt, Homo sapiens
  misc_RNA (1)...(19): siRNA sense strand
cgauccagcaagauaaauu

SEQ ID NO: 2462590 - RNA, 19 nt, Homo sapiens
  misc_RNA (1)...(19): siRNA sense strand
ucugauugguggaggccuu

SEQ ID NO: 2462591 - RNA, 19 nt, Homo sapiens
  misc_RNA (1)...(19): siRNA sense strand
aaacaauuuaggaggggaa

SEQ ID NO: 2462592 - RNA, 19 nt, Homo sapiens
  misc_RNA (1)...(19): siRNA sense strand
aacacuaaccucacagaaa

SEQ ID NO: 2462593 - RNA, 19 nt, Homo sapiens
  misc_RNA (1)...(19): siRNA sense strand
gugcgguuguuauggaaga

SEQ ID NO: 2462594 - RNA, 19 nt, Homo sapiens
  misc_RNA (1)...(19): siRNA sense strand
uuaccaagcugaaggugga

SEQ ID NO: 2462595 - RNA, 19 nt, Homo sapiens
  misc_RNA (1)...(19): siRNA sense strand
ugaaaauggagauggugua

SEQ ID NO: 2462596 - RNA, 19 nt, Homo sapiens
  misc_RNA (1)...(19): siRNA sense strand
auaugguacuauccagaaa

SEQ ID NO: 2462597 - RNA, 19 nt, Homo sapiens
  misc_RNA (1)...(19): siRNA sense strand
gucuacuacuauaggaaaa

SEQ ID NO: 2462598 - RNA, 19 nt, Homo sapiens
  misc_RNA (1)...(19): siRNA sense strand
aagagauucccaagaguga

SEQ ID NO: 2462599 - RNA, 19 nt, Homo sapiens
  misc_RNA (1)...(19): siRNA sense strand
uguacaaccaauaguucua

SEQ ID NO: 2462600 - RNA, 19 nt, Homo sapiens
  misc_RNA (1)...(19): siRNA sense strand
acgaucacauggaaagaga

SEQ ID NO: 2462601 - RNA, 19 nt, Homo sapiens
  misc_RNA (1)...(19): siRNA sense strand
agccagaacgggucaggaa

SEQ ID NO: 2462602 - RNA, 19 nt, Homo sapiens
  misc_RNA (1)...(19): siRNA sense strand
cuauaacaucucuguguau

SEQ ID NO: 2462603 - RNA, 19 nt, Homo sapiens
  misc_RNA (1)...(19): siRNA sense strand
gccagaacgggucaggaaa

SEQ ID NO: 2462604 - RNA, 19 nt, Homo sapiens
  misc_RNA (1)...(19): siRNA sense strand
uugaauggauaaagccuga

SEQ ID NO: 2462605 - RNA, 19 nt, Homo sapiens
  misc_RNA (1)...(19): siRNA sense strand
cagagcacaccaagggaga

SEQ ID NO: 2462606 - RNA, 19 nt, Homo sapiens
  misc_RNA (1)...(19): siRNA sense strand
uuguuauggaagaaggcaa

SEQ ID NO: 2462607 - RNA, 19 nt, Homo sapiens
  misc_RNA (1)...(19): siRNA sense strand
uuauaauucucuugggaag

SEQ ID NO: 2462608 - RNA, 19 nt, Homo sapiens
  misc_RNA (1)...(19): siRNA sense strand
ccaagcugaagguggaaaa

SEQ ID NO: 2462609 - RNA, 19 nt, Homo sapiens
  misc_RNA (1)...(19): siRNA sense strand
guggcaaagcucugcucua

SEQ ID NO: 2462610 - RNA, 19 nt, Homo sapiens
  misc_RNA (1)...(19): siRNA sense strand
gauuucaaggauaagcuaa

SEQ ID NO: 2462611 - RNA, 19 nt, Homo sapiens
  misc_RNA (1)...(19): siRNA sense strand
gugcggucaaggagucaaa

SEQ ID NO: 2462612 - RNA, 19 nt, Homo sapiens
  misc_RNA (1)...(19): siRNA sense strand
cuaguggugaaguggcaaa

SEQ ID NO: 2462613 - RNA, 19 nt, Homo sapiens
  misc_RNA (1)...(19): siRNA sense strand
agggagaaggugagcagua

SEQ ID NO: 2462614 - RNA, 19 nt, Homo sapiens
  misc_RNA (1)...(19): siRNA sense strand
ugaaggagguggaggagcu

SEQ ID NO: 2462615 - RNA, 19 nt, Homo sapiens
  misc_RNA (1)...(19): siRNA sense strand
gagaugagacugugcgagu

SEQ ID NO: 2462616 - RNA, 19 nt, Homo sapiens
  misc_RNA (1)...(19): siRNA sense strand
cccaaagcccaaagugaau

SEQ ID NO: 2462617 - RNA, 19 nt, Homo sapiens
  misc_RNA (1)...(19): siRNA sense strand
gaguggucgcccuggacaa

SEQ ID NO: 2462618 - RNA, 19 nt, Homo sapiens
  misc_RNA (1)...(19): siRNA sense strand
augacaugaccaagaauga

SEQ ID NO: 2462619 - RNA, 19 nt, Homo sapiens
  misc_RNA (1)...(19): siRNA sense strand
gagaacaauuauaagggua

SEQ ID NO: 2462620 - RNA, 19 nt, Homo sapiens
  misc_RNA (1)...(19): siRNA sense strand
cguaaauguaucagaccaa

SEQ ID NO: 2462621 - RNA, 19 nt, Homo sapiens
  misc_RNA (1)...(19): siRNA sense strand
aguugaaauugaaggucua

SEQ ID NO: 2462622 - RNA, 19 nt, Homo sapiens
  misc_RNA (1)...(19): siRNA sense strand
caguauuacaaauggaaga

SEQ ID NO: 2462623 - RNA, 19 nt, Homo sapiens
  misc_RNA (1)...(19): siRNA sense strand
uggaaugggaaguugaaau

SEQ ID NO: 2462624 - RNA, 19 nt, Homo sapiens
  misc_RNA (1)...(19): siRNA sense strand
agugaagauaugauggaau

SEQ ID NO: 2462625 - RNA, 19 nt, Homo sapiens
  misc_RNA (1)...(19): siRNA sense strand
cuacagcaucagaaagaau

SEQ ID NO: 2462626 - RNA, 19 nt, Homo sapiens
  misc_RNA (1)...(19): siRNA sense strand
ggaguuaccuaaagaccca

SEQ ID NO: 2462627 - RNA, 19 nt, Homo sapiens
  misc_RNA (1)...(19): siRNA sense strand
accuaaagacccacguaaa

SEQ ID NO: 2462628 - RNA, 19 nt, Homo sapiens
  misc_RNA (1)...(19): siRNA sense strand
gcaucagaaagaauggaau

SEQ ID NO: 2462629 - RNA, 19 nt, Homo sapiens
  misc_RNA (1)...(19): siRNA sense strand
agauaugauggaaugggaa

SEQ ID NO: 2462630 - RNA, 19 nt, Homo sapiens
  misc_RNA (1)...(19): siRNA sense strand
aaaugaaagaugacagcca

SEQ ID NO: 2462631 - RNA, 19 nt, Homo sapiens
  misc_RNA (1)...(19): siRNA sense strand
aacccugagaaguggaaua

SEQ ID NO: 2462632 - RNA, 19 nt, Homo sapiens
  misc_RNA (1)...(19): siRNA sense strand
gagcuuaccucuugcugca

SEQ ID NO: 2462633 - RNA, 19 nt, Homo sapiens
  misc_RNA (1)...(19): siRNA sense strand
acguaaauguaucagacca

SEQ ID NO: 2462634 - RNA, 19 nt, Homo sapiens
  misc_RNA (1)...(19): siRNA sense strand
aaguugaaauugaaggucu

SEQ ID NO: 2462635 - RNA, 19 nt, Homo sapiens
  misc_RNA (1)...(19): siRNA sense strand
ccagaagggugcuuggcaa

SEQ ID NO: 2462636 - RNA, 19 nt, Homo sapiens
  misc_RNA (1)...(19): siRNA sense strand
ggaugaaguguuaaagcca

SEQ ID NO: 2462637 - RNA, 19 nt, Homo sapiens
  misc_RNA (1)...(19): siRNA sense strand
augaaguguuaaagccaca

SEQ ID NO: 2462638 - RNA, 19 nt, Homo sapiens
  misc_RNA (1)...(19): siRNA sense strand
gguacaaucgugugggaga

SEQ ID NO: 2462639 - RNA, 19 nt, Homo sapiens
  misc_RNA (1)...(19): siRNA sense strand
gugaacaagcugugguaca

SEQ ID NO: 2462640 - RNA, 19 nt, Homo sapiens
  misc_RNA (1)...(19): siRNA sense strand
uggaagguguggagggagu

SEQ ID NO: 2462641 - RNA, 19 nt, Homo sapiens
  misc_RNA (1)...(19): siRNA sense strand
guucauaauaggugcucau

SEQ ID NO: 2462642 - RNA, 19 nt, Homo sapiens
  misc_RNA (1)...(19): siRNA sense strand
ucguaauguuccugcaaaa

SEQ ID NO: 2462643 - RNA, 19 nt, Homo sapiens
  misc_RNA (1)...(19): siRNA sense strand
ccggaaaguggcaggaguu

SEQ ID NO: 2462644 - RNA, 19 nt, Homo sapiens
  misc_RNA (1)...(19): siRNA sense strand
ccuaaaagauaccaggaca

SEQ ID NO: 2462645 - RNA, 19 nt, Homo sapiens
  misc_RNA (1)...(19): siRNA sense strand
ucgcaauaaccaugaacuu

SEQ ID NO: 2462646 - RNA, 19 nt, Homo sapiens
  misc_RNA (1)...(19): siRNA sense strand
ggaugagacauuugcuaca

SEQ ID NO: 2462647 - RNA, 19 nt, Homo sapiens
  misc_RNA (1)...(19): siRNA sense strand
guggaaacaacgagcuuca

SEQ ID NO: 2462648 - RNA, 19 nt, Homo sapiens
  misc_RNA (1)...(19): siRNA sense strand
augccaaugauguggguuu

SEQ ID NO: 2462649 - RNA, 19 nt, Homo sapiens
  misc_RNA (1)...(19): siRNA sense strand
guggugugcaggugaacaa

SEQ ID NO: 2462650 - RNA, 19 nt, Homo sapiens
  misc_RNA (1)...(19): siRNA sense strand
cuauagauggacuguggaa

SEQ ID NO: 2462651 - RNA, 19 nt, Homo sapiens
  misc_RNA (1)...(19): siRNA sense strand
acauagaccucgaagcugu

SEQ ID NO: 2462652 - RNA, 19 nt, Homo sapiens
  misc_RNA (1)...(19): siRNA sense strand
aaggaaucuccaugaggaa

SEQ ID NO: 2462653 - RNA, 19 nt, Homo sapiens
  misc_RNA (1)...(19): siRNA sense strand
ugugagaagaccugugaga

SEQ ID NO: 2462654 - RNA, 19 nt, Homo sapiens
  misc_RNA (1)...(19): siRNA sense strand
gggugaagauguaagcaug

SEQ ID NO: 2462655 - RNA, 19 nt, Homo sapiens
  misc_RNA (1)...(19): siRNA sense strand
ucaucuuaccagagagcuu

SEQ ID NO: 2462656 - RNA, 19 nt, Homo sapiens
  misc_RNA (1)...(19): siRNA sense strand
aggaagaugccuuacugaa

SEQ ID NO: 2462657 - RNA, 19 nt, Homo sapiens
  misc_RNA (1)...(19): siRNA sense strand
ugucaaacuuuaucaggca

SEQ ID NO: 2462658 - RNA, 19 nt, Homo sapiens
  misc_RNA (1)...(19): siRNA sense strand
gggaguucucagagucauu

SEQ ID NO: 2462659 - RNA, 19 nt, Homo sapiens
  misc_RNA (1)...(19): siRNA sense strand
cugcagaucaguuggccuu

SEQ ID NO: 2462660 - RNA, 19 nt, Homo sapiens
  misc_RNA (1)...(19): siRNA sense strand
agucuguggcugugugaga

SEQ ID NO: 2462661 - RNA, 19 nt, Homo sapiens
  misc_RNA (1)...(19): siRNA sense strand
cugugaagugccuguggaa

SEQ ID NO: 2462662 - RNA, 19 nt, Homo sapiens
  misc_RNA (1)...(19): siRNA sense strand
caguauucuccgugggaac

SEQ ID NO: 2462663 - RNA, 19 nt, Homo sapiens
  misc_RNA (1)...(19): siRNA sense strand
gggaguugcaggugguuuu

SEQ ID NO: 2462664 - RNA, 19 nt, Homo sapiens
  misc_RNA (1)...(19): siRNA sense strand
gcagguuuauggagagaaa

SEQ ID NO: 2462665 - RNA, 19 nt, Homo sapiens
  misc_RNA (1)...(19): siRNA sense strand
cgaagaacauuguggcuga

SEQ ID NO: 2462666 - RNA, 19 nt, Homo sapiens
  misc_RNA (1)...(19): siRNA sense strand
ccauggagucaacgagaaa

SEQ ID NO: 2462667 - RNA, 19 nt, Homo sapiens
  misc_RNA (1)...(19): siRNA sense strand
ucaauauaauccugagcaa

SEQ ID NO: 2462668 - RNA, 19 nt, Homo sapiens
  misc_RNA (1)...(19): siRNA sense strand
cuaugagacccaagugaaa

SEQ ID NO: 2462669 - RNA, 19 nt, Homo sapiens
  misc_RNA (1)...(19): siRNA sense strand
ccacuuauaagcagguuua

SEQ ID NO: 2462670 - RNA, 19 nt, Homo sapiens
  misc_RNA (1)...(19): siRNA sense strand
caucaaagggcgucgcgaa

SEQ ID NO: 2462671 - RNA, 19 nt, Homo sapiens
  misc_RNA (1)...(19): siRNA sense strand
cgaugaaagaggcgcugaa

SEQ ID NO: 2462672 - RNA, 19 nt, Homo sapiens
  misc_RNA (1)...(19): siRNA sense strand
uggcauuacugcaggccuu

SEQ ID NO: 2462673 - RNA, 19 nt, Homo sapiens
  misc_RNA (1)...(19): siRNA sense strand
agaacauuguggcugauaa

SEQ ID NO: 2462674 - RNA, 19 nt, Homo sapiens
  misc_RNA (1)...(19): siRNA sense strand
gagcagacaccaaugccua

SEQ ID NO: 2462675 - RNA, 19 nt, Homo sapiens
  misc_RNA (1)...(19): siRNA sense strand
gggucaaguucaaugucau

SEQ ID NO: 2462676 - RNA, 19 nt, Homo sapiens
  misc_RNA (1)...(19): siRNA sense strand
acauacagccugaagacuu

SEQ ID NO: 2462677 - RNA, 19 nt, Homo sapiens
  misc_RNA (1)...(19): siRNA sense strand
cauauuuggaagcgggaca

SEQ ID NO: 2462678 - RNA, 19 nt, Homo sapiens
  misc_RNA (1)...(19): siRNA sense strand
ccuaugagacccaagugaa

SEQ ID NO: 2462679 - RNA, 19 nt, Homo sapiens
  misc_RNA (1)...(19): siRNA sense strand
ucucuggguuggagcguga

SEQ ID NO: 2462680 - RNA, 19 nt, Homo sapiens
  misc_RNA (1)...(19): siRNA sense strand
gcaauaaucaggaccacca

SEQ ID NO: 2462681 - RNA, 19 nt, Homo sapiens
  misc_RNA (1)...(19): siRNA sense strand
ccaucuacauacagccuga

SEQ ID NO: 2462682 - RNA, 19 nt, Homo sapiens
  misc_RNA (1)...(19): siRNA sense strand
acacagaccaggagccagu

SEQ ID NO: 2462683 - RNA, 19 nt, Homo sapiens
  misc_RNA (1)...(19): siRNA sense strand
gggccaugaugaggaguca

SEQ ID NO: 2462684 - RNA, 19 nt, Homo sapiens
  misc_RNA (1)...(19): siRNA sense strand
gcuauuugaaccacuuaua

SEQ ID NO: 2462685 - RNA, 19 nt, Homo sapiens
  misc_RNA (1)...(19): siRNA sense strand
gaagagagauccacgggaa

SEQ ID NO: 2462686 - RNA, 19 nt, Homo sapiens
  misc_RNA (1)...(19): siRNA sense strand
agaagaaagacgaggagau

SEQ ID NO: 2462687 - RNA, 19 nt, Homo sapiens
  misc_RNA (1)...(19): siRNA sense strand
ucugaaaggcaaaggccaa

SEQ ID NO: 2462688 - RNA, 19 nt, Homo sapiens
  misc_RNA (1)...(19): siRNA sense strand
ggaagcagcugcaggagga

SEQ ID NO: 2462689 - RNA, 19 nt, Homo sapiens
  misc_RNA (1)...(19): siRNA sense strand
gguuaaggaauaagaucau

SEQ ID NO: 2462690 - RNA, 19 nt, Homo sapiens
  misc_RNA (1)...(19): siRNA sense strand
gcgaaagaucaauacggaa

SEQ ID NO: 2462691 - RNA, 19 nt, Homo sapiens
  misc_RNA (1)...(19): siRNA sense strand
aagagagauccacgggaaa

SEQ ID NO: 2462692 - RNA, 19 nt, Homo sapiens
  misc_RNA (1)...(19): siRNA sense strand
ucggagaccuggagaggca

SEQ ID NO: 2462693 - RNA, 19 nt, Homo sapiens
  misc_RNA (1)...(19): siRNA sense strand
gggacaaggaugaggacuc

SEQ ID NO: 2462694 - RNA, 19 nt, Homo sapiens
  misc_RNA (1)...(19): siRNA sense strand
gcucgagagguuaaggaau

SEQ ID NO: 2462695 - RNA, 19 nt, Homo sapiens
  misc_RNA (1)...(19): siRNA sense strand
aggaggaggaagaggagga

SEQ ID NO: 2462696 - RNA, 19 nt, Homo sapiens
  misc_RNA (1)...(19): siRNA sense strand
agguuaaggaauaagauca

SEQ ID NO: 2462697 - RNA, 19 nt, Homo sapiens
  misc_RNA (1)...(19): siRNA sense strand
cugaagacgcagcugaaau

SEQ ID NO: 2462698 - RNA, 19 nt, Homo sapiens
  misc_RNA (1)...(19): siRNA sense strand
gcgaggaggaggaagagga

SEQ ID NO: 2462699 - RNA, 19 nt, Homo sapiens
  misc_RNA (1)...(19): siRNA sense strand
aguaagagcaucugcgagu

SEQ ID NO: 2462700 - RNA, 19 nt, Homo sapiens
  misc_RNA (1)...(19): siRNA sense strand
agaaacaccaagagaugau

SEQ ID NO: 2462701 - RNA, 19 nt, Homo sapiens
  misc_RNA (1)...(19): siRNA sense strand
ccuugcaacaggagugauu

SEQ ID NO: 2462702 - RNA, 19 nt, Homo sapiens
  misc_RNA (1)...(19): siRNA sense strand
cuacaagccaugaccgaca

SEQ ID NO: 2462703 - RNA, 19 nt, Homo sapiens
  misc_RNA (1)...(19): siRNA sense strand
ggugugagccagaugggau

SEQ ID NO: 2462704 - RNA, 19 nt, Homo sapiens
  misc_RNA (1)...(19): siRNA sense strand
agagcaagaaggagaugau

SEQ ID NO: 2462705 - RNA, 19 nt, Homo sapiens
  misc_RNA (1)...(19): siRNA sense strand
ccgagucguuugaggagga

SEQ ID NO: 2462706 - RNA, 19 nt, Homo sapiens
  misc_RNA (1)...(19): siRNA sense strand
caagaaacccagcugcgaa

SEQ ID NO: 2462707 - RNA, 19 nt, Homo sapiens
  misc_RNA (1)...(19): siRNA sense strand
agggaagcgaggaggagga

SEQ ID NO: 2462708 - RNA, 19 nt, Homo sapiens
  misc_RNA (1)...(19): siRNA sense strand
aggaaggggacaaggauga

SEQ ID NO: 2462709 - RNA, 19 nt, Homo sapiens
  misc_RNA (1)...(19): siRNA sense strand
uccgagaagauaagaaaca

SEQ ID NO: 2462710 - RNA, 19 nt, Homo sapiens
  misc_RNA (1)...(19): siRNA sense strand
acaacaaggacaagcccua

SEQ ID NO: 2462711 - RNA, 19 nt, Homo sapiens
  misc_RNA (1)...(19): siRNA sense strand
aaguucaccaagugggaaa

SEQ ID NO: 2462712 - RNA, 19 nt, Homo sapiens
  misc_RNA (1)...(19): siRNA sense strand
uuaacaagaucaaggagca

SEQ ID NO: 2462713 - RNA, 19 nt, Homo sapiens
  misc_RNA (1)...(19): siRNA sense strand
gcuccaaguccuuugccaa

SEQ ID NO: 2462714 - RNA, 19 nt, Homo sapiens
  misc_RNA (1)...(19): siRNA sense strand
ucaccaagucagagaugca

SEQ ID NO: 2462715 - RNA, 19 nt, Homo sapiens
  misc_RNA (1)...(19): siRNA sense strand
ccaaacacacgguggugga

SEQ ID NO: 2462716 - RNA, 19 nt, Homo sapiens
  misc_RNA (1)...(19): siRNA sense strand
gcaggaagaagcugggcaa

SEQ ID NO: 2462717 - RNA, 19 nt, Homo sapiens
  misc_RNA (1)...(19): siRNA sense strand
gaauggcacaagagggcaa

SEQ ID NO: 2462718 - RNA, 19 nt, Homo sapiens
  misc_RNA (1)...(19): siRNA sense strand
ggcucuuuguccugggaua

SEQ ID NO: 2462719 - RNA, 19 nt, Homo sapiens
  misc_RNA (1)...(19): siRNA sense strand
agaagauguaugagcugaa

SEQ ID NO: 2462720 - RNA, 19 nt, Homo sapiens
  misc_RNA (1)...(19): siRNA sense strand
ugagcaauguggugaggga

SEQ ID NO: 2462721 - RNA, 19 nt, Homo sapiens
  misc_RNA (1)...(19): siRNA sense strand
gggacuacguguaccgcca

SEQ ID NO: 2462722 - RNA, 19 nt, Homo sapiens
  misc_RNA (1)...(19): siRNA sense strand
gagaagaagcggauccugu

SEQ ID NO: 2462723 - RNA, 19 nt, Homo sapiens
  misc_RNA (1)...(19): siRNA sense strand
uguacagcuuggugggcuu

SEQ ID NO: 2462724 - RNA, 19 nt, Homo sapiens
  misc_RNA (1)...(19): siRNA sense strand
gggccauguucaaggaccu

SEQ ID NO: 2462725 - RNA, 19 nt, Homo sapiens
  misc_RNA (1)...(19): siRNA sense strand
gcaucccaguggaaggcaa

SEQ ID NO: 2462726 - RNA, 19 nt, Homo sapiens
  misc_RNA (1)...(19): siRNA sense strand
uccgcaaagcugaggagaa

SEQ ID NO: 2462727 - RNA, 19 nt, Homo sapiens
  misc_RNA (1)...(19): siRNA sense strand
agucauaaacuggagguga

SEQ ID NO: 2462728 - RNA, 19 nt, Homo sapiens
  misc_RNA (1)...(19): siRNA sense strand
ugaauagugagacgggcua

SEQ ID NO: 2462729 - RNA, 19 nt, Homo sapiens
  misc_RNA (1)...(19): siRNA sense strand
agguggaggcccagguuua

SEQ ID NO: 2462730 - RNA, 19 nt, Homo sapiens
  misc_RNA (1)...(19): siRNA sense strand
acugaggaggagaagaaua

SEQ ID NO: 2462731 - RNA, 19 nt, Homo sapiens
  misc_RNA (1)...(19): siRNA sense strand
ugguggaacugguggaacu

SEQ ID NO: 2462732 - RNA, 19 nt, Homo sapiens
  misc_RNA (1)...(19): siRNA sense strand
acuuauuacuggccagaca

SEQ ID NO: 2462733 - RNA, 19 nt, Homo sapiens
  misc_RNA (1)...(19): siRNA sense strand
agguuuacauccucagcaa

SEQ ID NO: 2462734 - RNA, 19 nt, Homo sapiens
  misc_RNA (1)...(19): siRNA sense strand
ccaugacugaggaggagaa

SEQ ID NO: 2462735 - RNA, 19 nt, Homo sapiens
  misc_RNA (1)...(19): siRNA sense strand
gaauaugaucacaggcacu

SEQ ID NO: 2462736 - RNA, 19 nt, Homo sapiens
  misc_RNA (1)...(19): siRNA sense strand
uggugguguaugugaacaa

SEQ ID NO: 2462737 - RNA, 19 nt, Homo sapiens
  misc_RNA (1)...(19): siRNA sense strand
ucacgaagauucuagcuga

SEQ ID NO: 2462738 - RNA, 19 nt, Homo sapiens
  misc_RNA (1)...(19): siRNA sense strand
agugugagcuccuaggaca

SEQ ID NO: 2462739 - RNA, 19 nt, Homo sapiens
  misc_RNA (1)...(19): siRNA sense strand
accagaagguggaggccca

SEQ ID NO: 2462740 - RNA, 19 nt, Homo sapiens
  misc_RNA (1)...(19): siRNA sense strand
aguacgaggagauugacaa

SEQ ID NO: 2462741 - RNA, 19 nt, Homo sapiens
  misc_RNA (1)...(19): siRNA sense strand
aggaggagaagaauaucaa

SEQ ID NO: 2462742 - RNA, 19 nt, Homo sapiens
  misc_RNA (1)...(19): siRNA sense strand
ggacauagcaagaacaucc

SEQ ID NO: 2462743 - RNA, 19 nt, Homo sapiens
  misc_RNA (1)...(19): siRNA sense strand
gaaaagaaauagagggucu

SEQ ID NO: 2462744 - RNA, 19 nt, Homo sapiens
  misc_RNA (1)...(19): siRNA sense strand
aaggaagagucaaggauuu

SEQ ID NO: 2462745 - RNA, 19 nt, Homo sapiens
  misc_RNA (1)...(19): siRNA sense strand
agcugaugcuguagagaaa

SEQ ID NO: 2462746 - RNA, 19 nt, Homo sapiens
  misc_RNA (1)...(19): siRNA sense strand
acaaagaaaggaagaguca

SEQ ID NO: 2462747 - RNA, 19 nt, Homo sapiens
  misc_RNA (1)...(19): siRNA sense strand
cuguagagaaaguugcaaa

SEQ ID NO: 2462748 - RNA, 19 nt, Homo sapiens
  misc_RNA (1)...(19): siRNA sense strand
ugacauagaaacagcccaa

SEQ ID NO: 2462749 - RNA, 19 nt, Homo sapiens
  misc_RNA (1)...(19): siRNA sense strand
cagacaacaaagaaaggaa

SEQ ID NO: 2462750 - RNA, 19 nt, Homo sapiens
  misc_RNA (1)...(19): siRNA sense strand
aagaagauuuugaggaaca

SEQ ID NO: 2462751 - RNA, 19 nt, Homo sapiens
  misc_RNA (1)...(19): siRNA sense strand
cuaaagaagauaaccaaga

SEQ ID NO: 2462752 - RNA, 19 nt, Homo sapiens
  misc_RNA (1)...(19): siRNA sense strand
aucacaagcaucagagaua

SEQ ID NO: 2462753 - RNA, 19 nt, Homo sapiens
  misc_RNA (1)...(19): siRNA sense strand
agacaaugaaagaagaacu

SEQ ID NO: 2462754 - RNA, 19 nt, Homo sapiens
  misc_RNA (1)...(19): siRNA sense strand
agaagauaaccaagacaca

SEQ ID NO: 2462755 - RNA, 19 nt, Homo sapiens
  misc_RNA (1)...(19): siRNA sense strand
ccaagacacaaguucauua

SEQ ID NO: 2462756 - RNA, 19 nt, Homo sapiens
  misc_RNA (1)...(19): siRNA sense strand
acaacaaucacaagcauca

SEQ ID NO: 2462757 - RNA, 19 nt, Homo sapiens
  misc_RNA (1)...(19): siRNA sense strand
caacaacaaucacaagcau

SEQ ID NO: 2462758 - RNA, 19 nt, Homo sapiens
  misc_RNA (1)...(19): siRNA sense strand
gacaacaaagaaaggaaga

SEQ ID NO: 2462759 - RNA, 19 nt, Homo sapiens
  misc_RNA (1)...(19): siRNA sense strand
caacaaagaaaggaagagu

SEQ ID NO: 2462760 - RNA, 19 nt, Homo sapiens
  misc_RNA (1)...(19): siRNA sense strand
gaaaggaagagucaaggau

SEQ ID NO: 2462761 - RNA, 19 nt, Homo sapiens
  misc_RNA (1)...(19): siRNA sense strand
caagcaucagagauagaaa

SEQ ID NO: 2462762 - RNA, 19 nt, Homo sapiens
  misc_RNA (1)...(19): siRNA sense strand
ucugcagaaacuaaagaaa

SEQ ID NO: 2462763 - RNA, 19 nt, Homo sapiens
  misc_RNA (1)...(19): siRNA sense strand
cugcagaaacuaaagaaac

SEQ ID NO: 2462764 - RNA, 19 nt, Homo sapiens
  misc_RNA (1)...(19): siRNA sense strand
gaagauaaccaagacacaa

SEQ ID NO: 2462765 - RNA, 19 nt, Homo sapiens
  misc_RNA (1)...(19): siRNA sense strand
uagagaaaguugcaaagca

SEQ ID NO: 2462766 - RNA, 19 nt, Homo sapiens
  misc_RNA (1)...(19): siRNA sense strand
aaaggaagagucaaggauu

SEQ ID NO: 2462767 - RNA, 19 nt, Homo sapiens
  misc_RNA (1)...(19): siRNA sense strand
cuggaaacucaaaucaaau

SEQ ID NO: 2462768 - RNA, 19 nt, Homo sapiens
  misc_RNA (1)...(19): siRNA sense strand
aaagaaaggaagagucaag

SEQ ID NO: 2462769 - RNA, 19 nt, Homo sapiens
  misc_RNA (1)...(19): siRNA sense strand
acauagaaacagcccaaga

SEQ ID NO: 2462770 - RNA, 19 nt, Homo sapiens
  misc_RNA (1)...(19): siRNA sense strand
gaaacaaauucaaggagca

SEQ ID NO: 2462771 - RNA, 19 nt, Homo sapiens
  misc_RNA (1)...(19): siRNA sense strand
aaaccggugcagagggaaa

SEQ ID NO: 2462772 - RNA, 19 nt, Homo sapiens
  misc_RNA (1)...(19): siRNA sense strand
gggaaaagagucaggcaga

SEQ ID NO: 2462773 - RNA, 19 nt, Homo sapiens
  misc_RNA (1)...(19): siRNA sense strand
gggaaaagaaauccagcua

SEQ ID NO: 2462774 - RNA, 19 nt, Homo sapiens
  misc_RNA (1)...(19): siRNA sense strand
cuagaaaguguucggaaaa

SEQ ID NO: 2462775 - RNA, 19 nt, Homo sapiens
  misc_RNA (1)...(19): siRNA sense strand
gcucagcugaagagggaga

SEQ ID NO: 2462776 - RNA, 19 nt, Homo sapiens
  misc_RNA (1)...(19): siRNA sense strand
uugcugaauuacagaaaca

SEQ ID NO: 2462777 - RNA, 19 nt, Homo sapiens
  misc_RNA (1)...(19): siRNA sense strand
acagggaagauguggucaa

SEQ ID NO: 2462778 - RNA, 19 nt, Homo sapiens
  misc_RNA (1)...(19): siRNA sense strand
aauaugaagcccuggccaa

SEQ ID NO: 2462779 - RNA, 19 nt, Homo sapiens
  misc_RNA (1)...(19): siRNA sense strand
agaggaagaaacggagaaa

SEQ ID NO: 2462780 - RNA, 19 nt, Homo sapiens
  misc_RNA (1)...(19): siRNA sense strand
cgacaaagcccgauaccag

SEQ ID NO: 2462781 - RNA, 19 nt, Homo sapiens
  misc_RNA (1)...(19): siRNA sense strand
aggaagaaacggagaaagc

SEQ ID NO: 2462782 - RNA, 19 nt, Homo sapiens
  misc_RNA (1)...(19): siRNA sense strand
cccgauaccaggaagaaau

SEQ ID NO: 2462783 - RNA, 19 nt, Homo sapiens
  misc_RNA (1)...(19): siRNA sense strand
ugaugaauuauguuggcaa

SEQ ID NO: 2462784 - RNA, 19 nt, Homo sapiens
  misc_RNA (1)...(19): siRNA sense strand
aagaggaagaaacggagaa

SEQ ID NO: 2462785 - RNA, 19 nt, Homo sapiens
  misc_RNA (1)...(19): siRNA sense strand
cguaaacaauguaaugcca

SEQ ID NO: 2462786 - RNA, 19 nt, Homo sapiens
  misc_RNA (1)...(19): siRNA sense strand
ggcaagaggaagaaacgga

SEQ ID NO: 2462787 - RNA, 19 nt, Homo sapiens
  misc_RNA (1)...(19): siRNA sense strand
cagcgacagaccuggagaa

SEQ ID NO: 2462788 - RNA, 19 nt, Homo sapiens
  misc_RNA (1)...(19): siRNA sense strand
agaaaccggugcagaggga

SEQ ID NO: 2462789 - RNA, 19 nt, Homo sapiens
  misc_RNA (1)...(19): siRNA sense strand
gagcuaaguacuucgagga

SEQ ID NO: 2462790 - RNA, 19 nt, Homo sapiens
  misc_RNA (1)...(19): siRNA sense strand
gaaacaagauaguggugaa

SEQ ID NO: 2462791 - RNA, 19 nt, Homo sapiens
  misc_RNA (1)...(19): siRNA sense strand
agaaagggaaagaggauua

SEQ ID NO: 2462792 - RNA, 19 nt, Homo sapiens
  misc_RNA (1)...(19): siRNA sense strand
acucaaaguuguauggauu

SEQ ID NO: 2462793 - RNA, 19 nt, Homo sapiens
  misc_RNA (1)...(19): siRNA sense strand
ggaaaggacaagaggacuu

SEQ ID NO: 2462794 - RNA, 19 nt, Homo sapiens
  misc_RNA (1)...(19): siRNA sense strand
agaaagaaacuguagacaa

SEQ ID NO: 2462795 - RNA, 19 nt, Homo sapiens
  misc_RNA (1)...(19): siRNA sense strand
gugaagaugugaaggccaa

SEQ ID NO: 2462796 - RNA, 19 nt, Homo sapiens
  misc_RNA (1)...(19): siRNA sense strand
ggugcaaguuccugugaaa

SEQ ID NO: 2462797 - RNA, 19 nt, Homo sapiens
  misc_RNA (1)...(19): siRNA sense strand
uuaaagaaguggagcccaa

SEQ ID NO: 2462798 - RNA, 19 nt, Homo sapiens
  misc_RNA (1)...(19): siRNA sense strand
aaugaagagcagaaagaaa

SEQ ID NO: 2462799 - RNA, 19 nt, Homo sapiens
  misc_RNA (1)...(19): siRNA sense strand
agauaaaacuuaagggcuu

SEQ ID NO: 2462800 - RNA, 19 nt, Homo sapiens
  misc_RNA (1)...(19): siRNA sense strand
ggaauuaucugaagccgaa

SEQ ID NO: 2462801 - RNA, 19 nt, Homo sapiens
  misc_RNA (1)...(19): siRNA sense strand
cugaagaacacuuggccaa

SEQ ID NO: 2462802 - RNA, 19 nt, Homo sapiens
  misc_RNA (1)...(19): siRNA sense strand
cagcagauuugaagaacau

SEQ ID NO: 2462803 - RNA, 19 nt, Homo sapiens
  misc_RNA (1)...(19): siRNA sense strand
cagcagugguggugaaguu

SEQ ID NO: 2462804 - RNA, 19 nt, Homo sapiens
  misc_RNA (1)...(19): siRNA sense strand
uaaaugaagcaguggacua

SEQ ID NO: 2462805 - RNA, 19 nt, Homo sapiens
  misc_RNA (1)...(19): siRNA sense strand
aauaagaagcuaugggaca

SEQ ID NO: 2462806 - RNA, 19 nt, Homo sapiens
  misc_RNA (1)...(19): siRNA sense strand
aagaaagaauggaggagga

SEQ ID NO: 2462807 - RNA, 19 nt, Homo sapiens
  misc_RNA (1)...(19): siRNA sense strand
caagauuuggaaagagaaa

SEQ ID NO: 2462808 - RNA, 19 nt, Homo sapiens
  misc_RNA (1)...(19): siRNA sense strand
ugauauacguucaugggaa

SEQ ID NO: 2462809 - RNA, 19 nt, Homo sapiens
  misc_RNA (1)...(19): siRNA sense strand
guggagaaggaaagagauu

SEQ ID NO: 2462810 - RNA, 19 nt, Homo sapiens
  misc_RNA (1)...(19): siRNA sense strand
cgaaacaaugaaucagaaa

SEQ ID NO: 2462811 - RNA, 19 nt, Homo sapiens
  misc_RNA (1)...(19): siRNA sense strand
acuuaauagcuuuggcuua

SEQ ID NO: 2462812 - RNA, 19 nt, Homo sapiens
  misc_RNA (1)...(19): siRNA sense strand
acgaauauguuguccgcaa

SEQ ID NO: 2462813 - RNA, 19 nt, Homo sapiens
  misc_RNA (1)...(19): siRNA sense strand
agagaaacuaagacugaaa

SEQ ID NO: 2462814 - RNA, 19 nt, Homo sapiens
  misc_RNA (1)...(19): siRNA sense strand
ggaguauguacgaguuaaa

SEQ ID NO: 2462815 - RNA, 19 nt, Homo sapiens
  misc_RNA (1)...(19): siRNA sense strand
gauuauauccaaagugaga

SEQ ID NO: 2462816 - RNA, 19 nt, Homo sapiens
  misc_RNA (1)...(19): siRNA sense strand
caguauaugguguaguaaa

SEQ ID NO: 2462817 - RNA, 19 nt, Homo sapiens
  misc_RNA (1)...(19): siRNA sense strand
ccaaaggauucaaagccua

SEQ ID NO: 2462818 - RNA, 19 nt, Homo sapiens
  misc_RNA (1)...(19): siRNA sense strand
agaacaucuuggagaaaca

SEQ ID NO: 2462819 - RNA, 19 nt, Homo sapiens
  misc_RNA (1)...(19): siRNA sense strand
cagaguaaagacaagaaua

SEQ ID NO: 2462820 - RNA, 19 nt, Homo sapiens
  misc_RNA (1)...(19): siRNA sense strand
cuacaaggucgaacagcaa

SEQ ID NO: 2462821 - RNA, 19 nt, Homo sapiens
  misc_RNA (1)...(19): siRNA sense strand
aaagaugcuguuagagaaa

SEQ ID NO: 2462822 - RNA, 19 nt, Homo sapiens
  misc_RNA (1)...(19): siRNA sense strand
gaccauagcaaucgaaauu

SEQ ID NO: 2462823 - RNA, 19 nt, Homo sapiens
  misc_RNA (1)...(19): siRNA sense strand
cuuaaagggcagagcgcuu

SEQ ID NO: 2462824 - RNA, 19 nt, Homo sapiens
  misc_RNA (1)...(19): siRNA sense strand
gcuuaauucaagauggcua

SEQ ID NO: 2462825 - RNA, 19 nt, Homo sapiens
  misc_RNA (1)...(19): siRNA sense strand
agaaaguaauccacccaaa

SEQ ID NO: 2462826 - RNA, 19 nt, Homo sapiens
  misc_RNA (1)...(19): siRNA sense strand
aggauugaguauugaugaa

SEQ ID NO: 2462827 - RNA, 19 nt, Homo sapiens
  misc_RNA (1)...(19): siRNA sense strand
ggaauuuaaaccagaugua

SEQ ID NO: 2462828 - RNA, 19 nt, Homo sapiens
  misc_RNA (1)...(19): siRNA sense strand
aaagaaagggaaagaggau

SEQ ID NO: 2462829 - RNA, 19 nt, Homo sapiens
  misc_RNA (1)...(19): siRNA sense strand
aggauuaugaagagaguca

SEQ ID NO: 2462830 - RNA, 19 nt, Homo sapiens
  misc_RNA (1)...(19): siRNA sense strand
cagugguggugaaguuaaa

SEQ ID NO: 2462831 - RNA, 19 nt, Homo sapiens
  misc_RNA (1)...(19): siRNA sense strand
ggaaugagaaauaugguca

SEQ ID NO: 2462832 - RNA, 19 nt, Homo sapiens
  misc_RNA (1)...(19): siRNA sense strand
cuugaaaacuggaaggaga

SEQ ID NO: 2462833 - RNA, 19 nt, Homo sapiens
  misc_RNA (1)...(19): siRNA sense strand
cuagaagaacacagagaca

SEQ ID NO: 2462834 - RNA, 19 nt, Homo sapiens
  misc_RNA (1)...(19): siRNA sense strand
aaagaauggaggaggacuu

SEQ ID NO: 2462835 - RNA, 19 nt, Homo sapiens
  misc_RNA (1)...(19): siRNA sense strand
gcaaauuacaagcgagucu

SEQ ID NO: 2462836 - RNA, 19 nt, Homo sapiens
  misc_RNA (1)...(19): siRNA sense strand
caucaaaacaguuccguaa

SEQ ID NO: 2462837 - RNA, 19 nt, Homo sapiens
  misc_RNA (1)...(19): siRNA sense strand
acaagauaguggugaagca

SEQ ID NO: 2462838 - RNA, 19 nt, Homo sapiens
  misc_RNA (1)...(19): siRNA sense strand
caaugacagagcagauaaa

SEQ ID NO: 2462839 - RNA, 19 nt, Homo sapiens
  misc_RNA (1)...(19): siRNA sense strand
ccaaguauuacaagaccaa

SEQ ID NO: 2462840 - RNA, 19 nt, Homo sapiens
  misc_RNA (1)...(19): siRNA sense strand
uauagaggaaggagaacua

SEQ ID NO: 2462841 - RNA, 19 nt, Homo sapiens
  misc_RNA (1)...(19): siRNA sense strand
ggugauggaaagagagcca

SEQ ID NO: 2462842 - RNA, 19 nt, Homo sapiens
  misc_RNA (1)...(19): siRNA sense strand
cacuuaacuuuguggagaa

SEQ ID NO: 2462843 - RNA, 19 nt, Homo sapiens
  misc_RNA (1)...(19): siRNA sense strand
uaggacagccugaggaauu

SEQ ID NO: 2462844 - RNA, 19 nt, Homo sapiens
  misc_RNA (1)...(19): siRNA sense strand
uuguauagaggaaggagaa

SEQ ID NO: 2462845 - RNA, 19 nt, Homo sapiens
  misc_RNA (1)...(19): siRNA sense strand
gaagaacaaauuaaggcaa

SEQ ID NO: 2462846 - RNA, 19 nt, Homo sapiens
  misc_RNA (1)...(19): siRNA sense strand
ugcaaguuccugugaaaua

SEQ ID NO: 2462847 - RNA, 19 nt, Homo sapiens
  misc_RNA (1)...(19): siRNA sense strand
auccaaagugagaggaauu

SEQ ID NO: 2462848 - RNA, 19 nt, Homo sapiens
  misc_RNA (1)...(19): siRNA sense strand
cucuauagaaggaaagcaa

SEQ ID NO: 2462849 - RNA, 19 nt, Homo sapiens
  misc_RNA (1)...(19): siRNA sense strand
ugagugagucuaacagaaa

SEQ ID NO: 2462850 - RNA, 19 nt, Homo sapiens
  misc_RNA (1)...(19): siRNA sense strand
gaaaaggcacuuagaagaa

SEQ ID NO: 2462851 - RNA, 19 nt, Homo sapiens
  misc_RNA (1)...(19): siRNA sense strand
gcugagaagcuuaauucaa

SEQ ID NO: 2462852 - RNA, 19 nt, Homo sapiens
  misc_RNA (1)...(19): siRNA sense strand
auaaagaugcuguuagaga

SEQ ID NO: 2462853 - RNA, 19 nt, Homo sapiens
  misc_RNA (1)...(19): siRNA sense strand
aauacaaacuggugcggaa

SEQ ID NO: 2462854 - RNA, 19 nt, Homo sapiens
  misc_RNA (1)...(19): siRNA sense strand
acucguugugggagggaaa

SEQ ID NO: 2462855 - RNA, 19 nt, Homo sapiens
  misc_RNA (1)...(19): siRNA sense strand
uggcaaggacuaaaggcua

SEQ ID NO: 2462856 - RNA, 19 nt, Homo sapiens
  misc_RNA (1)...(19): siRNA sense strand
ccaccaacggcgaggaagu

SEQ ID NO: 2462857 - RNA, 19 nt, Homo sapiens
  misc_RNA (1)...(19): siRNA sense strand
cguacagagaagauaaaca

SEQ ID NO: 2462858 - RNA, 19 nt, Homo sapiens
  misc_RNA (1)...(19): siRNA sense strand
acauggaauccuuaggcua

SEQ ID NO: 2462859 - RNA, 19 nt, Homo sapiens
  misc_RNA (1)...(19): siRNA sense strand
ugaaaagauuagugagaag

SEQ ID NO: 2462860 - RNA, 19 nt, Homo sapiens
  misc_RNA (1)...(19): siRNA sense strand
aagauuagugagaagaaga

SEQ ID NO: 2462861 - RNA, 19 nt, Homo sapiens
  misc_RNA (1)...(19): siRNA sense strand
gauaacuuccugaugggua

SEQ ID NO: 2462862 - RNA, 19 nt, Homo sapiens
  misc_RNA (1)...(19): siRNA sense strand
ucgccauguacuugaacua

SEQ ID NO: 2462863 - RNA, 19 nt, Homo sapiens
  misc_RNA (1)...(19): siRNA sense strand
gcccaaacccagacaggca

SEQ ID NO: 2462864 - RNA, 19 nt, Homo sapiens
  misc_RNA (1)...(19): siRNA sense strand
uuugauuggacgauguuaa

SEQ ID NO: 2462865 - RNA, 19 nt, Homo sapiens
  misc_RNA (1)...(19): siRNA sense strand
uggaaucucagaaggucaa

SEQ ID NO: 2462866 - RNA, 19 nt, Homo sapiens
  misc_RNA (1)...(19): siRNA sense strand
agacauuaaaccagauaac

SEQ ID NO: 2462867 - RNA, 19 nt, Homo sapiens
  misc_RNA (1)...(19): siRNA sense strand
gcaacaacauagagggaga

SEQ ID NO: 2462868 - RNA, 19 nt, Homo sapiens
  misc_RNA (1)...(19): siRNA sense strand
agaaauuagaucuggguga

SEQ ID NO: 2462869 - RNA, 19 nt, Homo sapiens
  misc_RNA (1)...(19): siRNA sense strand
aagaaguggaugaagaaau

SEQ ID NO: 2462870 - RNA, 19 nt, Homo sapiens
  misc_RNA (1)...(19): siRNA sense strand
ggacaucaacuuauggaga

SEQ ID NO: 2462871 - RNA, 19 nt, Homo sapiens
  misc_RNA (1)...(19): siRNA sense strand
auugauugcuaaagugcua

SEQ ID NO: 2462872 - RNA, 19 nt, Homo sapiens
  misc_RNA (1)...(19): siRNA sense strand
uagaaagaguuacagguga

SEQ ID NO: 2462873 - RNA, 19 nt, Homo sapiens
  misc_RNA (1)...(19): siRNA sense strand
cauagagggagaaggacuu

SEQ ID NO: 2462874 - RNA, 19 nt, Homo sapiens
  misc_RNA (1)...(19): siRNA sense strand
auucaaauggguugucuaa

SEQ ID NO: 2462875 - RNA, 19 nt, Homo sapiens
  misc_RNA (1)...(19): siRNA sense strand
gugccaguagaaagaguua

SEQ ID NO: 2462876 - RNA, 19 nt, Homo sapiens
  misc_RNA (1)...(19): siRNA sense strand
cagcaacaacauagaggga

SEQ ID NO: 2462877 - RNA, 19 nt, Homo sapiens
  misc_RNA (1)...(19): siRNA sense strand
acauagagggagaaggacu

SEQ ID NO: 2462878 - RNA, 19 nt, Homo sapiens
  misc_RNA (1)...(19): siRNA sense strand
aaacaaauuugaugaggcu

SEQ ID NO: 2462879 - RNA, 19 nt, Homo sapiens
  misc_RNA (1)...(19): siRNA sense strand
acguguauaucuugcagaa

SEQ ID NO: 2462880 - RNA, 19 nt, Homo sapiens
  misc_RNA (1)...(19): siRNA sense strand
cguugucaguagucagcaa

SEQ ID NO: 2462881 - RNA, 19 nt, Homo sapiens
  misc_RNA (1)...(19): siRNA sense strand
uggagaauugauugcuaaa

SEQ ID NO: 2462882 - RNA, 19 nt, Homo sapiens
  misc_RNA (1)...(19): siRNA sense strand
gagaaggacuuguugcacu

SEQ ID NO: 2462883 - RNA, 19 nt, Homo sapiens
  misc_RNA (1)...(19): siRNA sense strand
gggagaaggacuuguugca

SEQ ID NO: 2462884 - RNA, 19 nt, Homo sapiens
  misc_RNA (1)...(19): siRNA sense strand
ccuaagaaugacuggaaac

SEQ ID NO: 2462885 - RNA, 19 nt, Homo sapiens
  misc_RNA (1)...(19): siRNA sense strand
acaucaacuuauggagaau

SEQ ID NO: 2462886 - RNA, 19 nt, Homo sapiens
  misc_RNA (1)...(19): siRNA sense strand
cuuagugccaguagaaaga

SEQ ID NO: 2462887 - RNA, 19 nt, Homo sapiens
  misc_RNA (1)...(19): siRNA sense strand
aguuacaggugaagauuuu

SEQ ID NO: 2462888 - RNA, 19 nt, Homo sapiens
  misc_RNA (1)...(19): siRNA sense strand
accuaagaaugacuggaaa

SEQ ID NO: 2462889 - RNA, 19 nt, Homo sapiens
  misc_RNA (1)...(19): siRNA sense strand
cagugguauacaacaguua

SEQ ID NO: 2462890 - RNA, 19 nt, Homo sapiens
  misc_RNA (1)...(19): siRNA sense strand
ccuggaaguaauagaucuu

SEQ ID NO: 2462891 - RNA, 19 nt, Homo sapiens
  misc_RNA (1)...(19): siRNA sense strand
aagaguuacaggugaagau

SEQ ID NO: 2462892 - RNA, 19 nt, Homo sapiens
  misc_RNA (1)...(19): siRNA sense strand
acacaacaggagucuuaaa

SEQ ID NO: 2462893 - RNA, 19 nt, Homo sapiens
  misc_RNA (1)...(19): siRNA sense strand
uaacaaucgcuuagugcca

SEQ ID NO: 2462894 - RNA, 19 nt, Homo sapiens
  misc_RNA (1)...(19): siRNA sense strand
gccaguagaaagaguuaca

SEQ ID NO: 2462895 - RNA, 19 nt, Homo sapiens
  misc_RNA (1)...(19): siRNA sense strand
cuaccuuaccaguggauaa

SEQ ID NO: 2462896 - RNA, 19 nt, Homo sapiens
  misc_RNA (1)...(19): siRNA sense strand
cgguugagcuacagaaaau

SEQ ID NO: 2462897 - RNA, 19 nt, Homo sapiens
  misc_RNA (1)...(19): siRNA sense strand
cugaauuuggcaacagaaa

SEQ ID NO: 2462898 - RNA, 19 nt, Homo sapiens
  misc_RNA (1)...(19): siRNA sense strand
ggguauuuauccagaaucu

SEQ ID NO: 2462899 - RNA, 19 nt, Homo sapiens
  misc_RNA (1)...(19): siRNA sense strand
gguaaucauuccuggggua

SEQ ID NO: 2462900 - RNA, 19 nt, Homo sapiens
  misc_RNA (1)...(19): siRNA sense strand
ggguaaaaccaaucaccaa

SEQ ID NO: 2462901 - RNA, 19 nt, Homo sapiens
  misc_RNA (1)...(19): siRNA sense strand
ugaccuucaucuagaaaca

SEQ ID NO: 2462902 - RNA, 19 nt, Homo sapiens
  misc_RNA (1)...(19): siRNA sense strand
guguggaucagaugaagaa

SEQ ID NO: 2462903 - RNA, 19 nt, Homo sapiens
  misc_RNA (1)...(19): siRNA sense strand
uugcauuacuuuccagaau

SEQ ID NO: 2462904 - RNA, 19 nt, Homo sapiens
  misc_RNA (1)...(19): siRNA sense strand
ucaccaaagacuacauuau

SEQ ID NO: 2462905 - RNA, 19 nt, Homo sapiens
  misc_RNA (1)...(19): siRNA sense strand
gugucaugcagaagauuau

SEQ ID NO: 2462906 - RNA, 19 nt, Homo sapiens
  misc_RNA (1)...(19): siRNA sense strand
gguaaaaccaaucaccaaa

SEQ ID NO: 2462907 - RNA, 19 nt, Homo sapiens
  misc_RNA (1)...(19): siRNA sense strand
uccuacagaagaagaauua

SEQ ID NO: 2462908 - RNA, 19 nt, Homo sapiens
  misc_RNA (1)...(19): siRNA sense strand
aggaaaugaauaucagcuu

SEQ ID NO: 2462909 - RNA, 19 nt, Homo sapiens
  misc_RNA (1)...(19): siRNA sense strand
guagaagaugguggugaaa

SEQ ID NO: 2462910 - RNA, 19 nt, Homo sapiens
  misc_RNA (1)...(19): siRNA sense strand
aagcaauggcaguguugau

SEQ ID NO: 2462911 - RNA, 19 nt, Homo sapiens
  misc_RNA (1)...(19): siRNA sense strand
uaaccauuccaaaggauau

SEQ ID NO: 2462912 - RNA, 19 nt, Homo sapiens
  misc_RNA (1)...(19): siRNA sense strand
auggucacauugaaaguaa

SEQ ID NO: 2462913 - RNA, 19 nt, Homo sapiens
  misc_RNA (1)...(19): siRNA sense strand
ccuacacaggaaaugaaua

SEQ ID NO: 2462914 - RNA, 19 nt, Homo sapiens
  misc_RNA (1)...(19): siRNA sense strand
uggccagugucaugcagaa

SEQ ID NO: 2462915 - RNA, 19 nt, Homo sapiens
  misc_RNA (1)...(19): siRNA sense strand
ggaccaggauguacgguga

SEQ ID NO: 2462916 - RNA, 19 nt, Homo sapiens
  misc_RNA (1)...(19): siRNA sense strand
cgaucuugguggauggaga

SEQ ID NO: 2462917 - RNA, 19 nt, Homo sapiens
  misc_RNA (1)...(19): siRNA sense strand
cugaagaagaggacagcuu

SEQ ID NO: 2462918 - RNA, 19 nt, Homo sapiens
  misc_RNA (1)...(19): siRNA sense strand
aggauaugcugucuggcua

SEQ ID NO: 2462919 - RNA, 19 nt, Homo sapiens
  misc_RNA (1)...(19): siRNA sense strand
gcuuugacucuuauggcua

SEQ ID NO: 2462920 - RNA, 19 nt, Homo sapiens
  misc_RNA (1)...(19): siRNA sense strand
gcucauaguucccuccaga

SEQ ID NO: 2462921 - RNA, 19 nt, Homo sapiens
  misc_RNA (1)...(19): siRNA sense strand
ccacaaauaucuuaaccgu

SEQ ID NO: 2462922 - RNA, 19 nt, Homo sapiens
  misc_RNA (1)...(19): siRNA sense strand
auuuacaacuacagccuau

SEQ ID NO: 2462923 - RNA, 19 nt, Homo sapiens
  misc_RNA (1)...(19): siRNA sense strand
ccuuggaggaugugacuaa

SEQ ID NO: 2462924 - RNA, 19 nt, Homo sapiens
  misc_RNA (1)...(19): siRNA sense strand
aggaaaugucccuguggaa

SEQ ID NO: 2462925 - RNA, 19 nt, Homo sapiens
  misc_RNA (1)...(19): siRNA sense strand
cuaacuacaagaugagcua

SEQ ID NO: 2462926 - RNA, 19 nt, Homo sapiens
  misc_RNA (1)...(19): siRNA sense strand
cgucccgagugaagagaau

SEQ ID NO: 2462927 - RNA, 19 nt, Homo sapiens
  misc_RNA (1)...(19): siRNA sense strand
gcagagaaguucaggcccu

SEQ ID NO: 2462928 - RNA, 19 nt, Homo sapiens
  misc_RNA (1)...(19): siRNA sense strand
agugaagagaauauggauu

SEQ ID NO: 2462929 - RNA, 19 nt, Homo sapiens
  misc_RNA (1)...(19): siRNA sense strand
cuguaacaccacugaguuu

SEQ ID NO: 2462930 - RNA, 19 nt, Homo sapiens
  misc_RNA (1)...(19): siRNA sense strand
acuacaucaaggagagauu

SEQ ID NO: 2462931 - RNA, 19 nt, Homo sapiens
  misc_RNA (1)...(19): siRNA sense strand
accacugaguuucgagaua

SEQ ID NO: 2462932 - RNA, 19 nt, Homo sapiens
  misc_RNA (1)...(19): siRNA sense strand
gcuuugggucacaggauau

SEQ ID NO: 2462933 - RNA, 19 nt, Homo sapiens
  misc_RNA (1)...(19): siRNA sense strand
cagcaugcgcacagagcca

SEQ ID NO: 2462934 - RNA, 19 nt, Homo sapiens
  misc_RNA (1)...(19): siRNA sense strand
uggcuacaccuuugaggaa

SEQ ID NO: 2462935 - RNA, 19 nt, Homo sapiens
  misc_RNA (1)...(19): siRNA sense strand
aaauauccauguagcgaca

SEQ ID NO: 2462936 - RNA, 19 nt, Homo sapiens
  misc_RNA (1)...(19): siRNA sense strand
ugacaacagugcaggccca

SEQ ID NO: 2462937 - RNA, 19 nt, Homo sapiens
  misc_RNA (1)...(19): siRNA sense strand
gcuuuacucccaaggaaau

SEQ ID NO: 2462938 - RNA, 19 nt, Homo sapiens
  misc_RNA (1)...(19): siRNA sense strand
gcuguaaaccucuggccau

SEQ ID NO: 2462939 - RNA, 19 nt, Homo sapiens
  misc_RNA (1)...(19): siRNA sense strand
ccaaccaaggcgagagcca

SEQ ID NO: 2462940 - RNA, 19 nt, Homo sapiens
  misc_RNA (1)...(19): siRNA sense strand
agagaguccuucaagccaa

SEQ ID NO: 2462941 - RNA, 19 nt, Homo sapiens
  misc_RNA (1)...(19): siRNA sense strand
gcuacaccuuugaggaagu

SEQ ID NO: 2462942 - RNA, 19 nt, Homo sapiens
  misc_RNA (1)...(19): siRNA sense strand
gagaauauggauuugcuca

SEQ ID NO: 2462943 - RNA, 19 nt, Homo sapiens
  misc_RNA (1)...(19): siRNA sense strand
cauaaaaggccuugugaag

SEQ ID NO: 2462944 - RNA, 19 nt, Homo sapiens
  misc_RNA (1)...(19): siRNA sense strand
ugcaugaagcagagaaguu

SEQ ID NO: 2462945 - RNA, 19 nt, Homo sapiens
  misc_RNA (1)...(19): siRNA sense strand
ccgaagacaggauggaucu

SEQ ID NO: 2462946 - RNA, 19 nt, Homo sapiens
  misc_RNA (1)...(19): siRNA sense strand
gaugaaacagagaaaccau

SEQ ID NO: 2462947 - RNA, 19 nt, Homo sapiens
  misc_RNA (1)...(19): siRNA sense strand
cuacaaggccuuaugccaa

SEQ ID NO: 2462948 - RNA, 19 nt, Homo sapiens
  misc_RNA (1)...(19): siRNA sense strand
ucauccuggugaagagaaa

SEQ ID NO: 2462949 - RNA, 19 nt, Homo sapiens
  misc_RNA (1)...(19): siRNA sense strand
gccaaauguaugagaagau

SEQ ID NO: 2462950 - RNA, 19 nt, Homo sapiens
  misc_RNA (1)...(19): siRNA sense strand
ggaagaacuacaaggccuu

SEQ ID NO: 2462951 - RNA, 19 nt, Homo sapiens
  misc_RNA (1)...(19): siRNA sense strand
agacagaaugggacagcuu

SEQ ID NO: 2462952 - RNA, 19 nt, Homo sapiens
  misc_RNA (1)...(19): siRNA sense strand
acaaagauccccugggcaa

SEQ ID NO: 2462953 - RNA, 19 nt, Homo sapiens
  misc_RNA (1)...(19): siRNA sense strand
cagaguaccagcagggcuu

SEQ ID NO: 2462954 - RNA, 19 nt, Homo sapiens
  misc_RNA (1)...(19): siRNA sense strand
aggaagaacuacaaggccu

SEQ ID NO: 2462955 - RNA, 19 nt, Homo sapiens
  misc_RNA (1)...(19): siRNA sense strand
uggaaaaccugcaccggaa

SEQ ID NO: 2462956 - RNA, 19 nt, Homo sapiens
  misc_RNA (1)...(19): siRNA sense strand
guggacagcaugaggagga

SEQ ID NO: 2462957 - RNA, 19 nt, Homo sapiens
  misc_RNA (1)...(19): siRNA sense strand
gacaagacagaaugggaca

SEQ ID NO: 2462958 - RNA, 19 nt, Homo sapiens
  misc_RNA (1)...(19): siRNA sense strand
gaugaugucuggaggcucu

SEQ ID NO: 2462959 - RNA, 19 nt, Homo sapiens
  misc_RNA (1)...(19): siRNA sense strand
ccuucaaguccuucgauga

SEQ ID NO: 2462960 - RNA, 19 nt, Homo sapiens
  misc_RNA (1)...(19): siRNA sense strand
cauuagagaagcaggaaau

SEQ ID NO: 2462961 - RNA, 19 nt, Homo sapiens
  misc_RNA (1)...(19): siRNA sense strand
cagcacuggacaagagaaa

SEQ ID NO: 2462962 - RNA, 19 nt, Homo sapiens
  misc_RNA (1)...(19): siRNA sense strand
cagaauaaagagaggugau

SEQ ID NO: 2462963 - RNA, 19 nt, Homo sapiens
  misc_RNA (1)...(19): siRNA sense strand
gcuacaagugccucagaaa

SEQ ID NO: 2462964 - RNA, 19 nt, Homo sapiens
  misc_RNA (1)...(19): siRNA sense strand
uguugaaggagcagaggaa

SEQ ID NO: 2462965 - RNA, 19 nt, Homo sapiens
  misc_RNA (1)...(19): siRNA sense strand
gcauuaaauuggugcgaag

SEQ ID NO: 2462966 - RNA, 19 nt, Homo sapiens
  misc_RNA (1)...(19): siRNA sense strand
ccauuagagaagcaggaaa

SEQ ID NO: 2462967 - RNA, 19 nt, Homo sapiens
  misc_RNA (1)...(19): siRNA sense strand
uugaaggagcagaggaaca

SEQ ID NO: 2462968 - RNA, 19 nt, Homo sapiens
  misc_RNA (1)...(19): siRNA sense strand
ccguauuauagcagaccaa

SEQ ID NO: 2462969 - RNA, 19 nt, Homo sapiens
  misc_RNA (1)...(19): siRNA sense strand
gcgaaggacagaugagcca

SEQ ID NO: 2462970 - RNA, 19 nt, Homo sapiens
  misc_RNA (1)...(19): siRNA sense strand
gcuaaauaucaacggcauu

SEQ ID NO: 2462971 - RNA, 19 nt, Homo sapiens
  misc_RNA (1)...(19): siRNA sense strand
guggauaugaagagaacca

SEQ ID NO: 2462972 - RNA, 19 nt, Homo sapiens
  misc_RNA (1)...(19): siRNA sense strand
caguggagagagagugaau

SEQ ID NO: 2462973 - RNA, 19 nt, Homo sapiens
  misc_RNA (1)...(19): siRNA sense strand
ggccaacagcacuggacaa

SEQ ID NO: 2462974 - RNA, 19 nt, Homo sapiens
  misc_RNA (1)...(19): siRNA sense strand
cauuuuaaguugugcaaga

SEQ ID NO: 2462975 - RNA, 19 nt, Homo sapiens
  misc_RNA (1)...(19): siRNA sense strand
ggucauguggcuugggcuu

SEQ ID NO: 2462976 - RNA, 19 nt, Homo sapiens
  misc_RNA (1)...(19): siRNA sense strand
ccuuaaagcacuugagguc

SEQ ID NO: 2462977 - RNA, 19 nt, Homo sapiens
  misc_RNA (1)...(19): siRNA sense strand
gagagaggcgcuuuggcaa

SEQ ID NO: 2462978 - RNA, 19 nt, Homo sapiens
  misc_RNA (1)...(19): siRNA sense strand
cuguaaagaaggaaccaca

SEQ ID NO: 2462979 - RNA, 19 nt, Homo sapiens
  misc_RNA (1)...(19): siRNA sense strand
uaguuuaccagaaggagaa

SEQ ID NO: 2462980 - RNA, 19 nt, Homo sapiens
  misc_RNA (1)...(19): siRNA sense strand
agauuaaaguguggugaca

SEQ ID NO: 2462981 - RNA, 19 nt, Homo sapiens
  misc_RNA (1)...(19): siRNA sense strand
agauggugucuguggaaca

SEQ ID NO: 2462982 - RNA, 19 nt, Homo sapiens
  misc_RNA (1)...(19): siRNA sense strand
gcaggaaaucauagcagca

SEQ ID NO: 2462983 - RNA, 19 nt, Homo sapiens
  misc_RNA (1)...(19): siRNA sense strand
aaguaagaguggugagcug

SEQ ID NO: 2462984 - RNA, 19 nt, Homo sapiens
  misc_RNA (1)...(19): siRNA sense strand
gagagagugaauuuaacaa

SEQ ID NO: 2462985 - RNA, 19 nt, Homo sapiens
  misc_RNA (1)...(19): siRNA sense strand
ggauaugaagagaaccaca

SEQ ID NO: 2462986 - RNA, 19 nt, Homo sapiens
  misc_RNA (1)...(19): siRNA sense strand
ggacaagagaaaaccauuu

SEQ ID NO: 2462987 - RNA, 19 nt, Homo sapiens
  misc_RNA (1)...(19): siRNA sense strand
uguacaauuaccagaauga

SEQ ID NO: 2462988 - RNA, 19 nt, Homo sapiens
  misc_RNA (1)...(19): siRNA sense strand
uagagaagcaggaaaucau

SEQ ID NO: 2462989 - RNA, 19 nt, Homo sapiens
  misc_RNA (1)...(19): siRNA sense strand
augaagagaaccacaccaa

SEQ ID NO: 2462990 - RNA, 19 nt, Homo sapiens
  misc_RNA (1)...(19): siRNA sense strand
acaaccauucugauaguaa

SEQ ID NO: 2462991 - RNA, 19 nt, Homo sapiens
  misc_RNA (1)...(19): siRNA sense strand
acaugauuguggccguaaa

SEQ ID NO: 2462992 - RNA, 19 nt, Homo sapiens
  misc_RNA (1)...(19): siRNA sense strand
gaaaacuaguagaacucaa

SEQ ID NO: 2462993 - RNA, 19 nt, Homo sapiens
  misc_RNA (1)...(19): siRNA sense strand
uuaaagcacuugaggucca

SEQ ID NO: 2462994 - RNA, 19 nt, Homo sapiens
  misc_RNA (1)...(19): siRNA sense strand
uucauaaacuccuagacaa

SEQ ID NO: 2462995 - RNA, 19 nt, Homo sapiens
  misc_RNA (1)...(19): siRNA sense strand
aaacagauguccuggagcu

SEQ ID NO: 2462996 - RNA, 19 nt, Homo sapiens
  misc_RNA (1)...(19): siRNA sense strand
aauugcuagaccagggaaa

SEQ ID NO: 2462997 - RNA, 19 nt, Homo sapiens
  misc_RNA (1)...(19): siRNA sense strand
gugcaagaagucuaguauu

SEQ ID NO: 2462998 - RNA, 19 nt, Homo sapiens
  misc_RNA (1)...(19): siRNA sense strand
cuggagagaaggaaaacua

SEQ ID NO: 2462999 - RNA, 19 nt, Homo sapiens
  misc_RNA (1)...(19): siRNA sense strand
agaaggaaaacuaguagaa

SEQ ID NO: 2463000 - RNA, 19 nt, Homo sapiens
  misc_RNA (1)...(19): siRNA sense strand
ccuuacauucaguuaggaa

SEQ ID NO: 2463001 - RNA, 19 nt, Homo sapiens
  misc_RNA (1)...(19): siRNA sense strand
ggaaaucauagcagcagca

SEQ ID NO: 2463002 - RNA, 19 nt, Homo sapiens
  misc_RNA (1)...(19): siRNA sense strand
aaacuauugucuugggaac

SEQ ID NO: 2463003 - RNA, 19 nt, Homo sapiens
  misc_RNA (1)...(19): siRNA sense strand
gcaaagauguaaugcaacg

SEQ ID NO: 2463004 - RNA, 19 nt, Homo sapiens
  misc_RNA (1)...(19): siRNA sense strand
gagaguugcccuggagaga

SEQ ID NO: 2463005 - RNA, 19 nt, Homo sapiens
  misc_RNA (1)...(19): siRNA sense strand
cuccagaagcagacuguuu

SEQ ID NO: 2463006 - RNA, 19 nt, Homo sapiens
  misc_RNA (1)...(19): siRNA sense strand
acaacuacaauaucagcaa

SEQ ID NO: 2463007 - RNA, 19 nt, Homo sapiens
  misc_RNA (1)...(19): siRNA sense strand
caacaagugaugagauggu

SEQ ID NO: 2463008 - RNA, 19 nt, Homo sapiens
  misc_RNA (1)...(19): siRNA sense strand
aagaggagcuagagccuga

SEQ ID NO: 2463009 - RNA, 19 nt, Homo sapiens
  misc_RNA (1)...(19): siRNA sense strand
ggaaggaaguccaacgaag

SEQ ID NO: 2463010 - RNA, 19 nt, Homo sapiens
  misc_RNA (1)...(19): siRNA sense strand
agguggaacucuacgcaga

SEQ ID NO: 2463011 - RNA, 19 nt, Homo sapiens
  misc_RNA (1)...(19): siRNA sense strand
caagaggaaucaagagcca

SEQ ID NO: 2463012 - RNA, 19 nt, Homo sapiens
  misc_RNA (1)...(19): siRNA sense strand
gaaagaaguuaacaaggca

SEQ ID NO: 2463013 - RNA, 19 nt, Homo sapiens
  misc_RNA (1)...(19): siRNA sense strand
ucuuaugagggaugggaaa

SEQ ID NO: 2463014 - RNA, 19 nt, Homo sapiens
  misc_RNA (1)...(19): siRNA sense strand
cugcacaaugagagggcua

SEQ ID NO: 2463015 - RNA, 19 nt, Homo sapiens
  misc_RNA (1)...(19): siRNA sense strand
ccucaauguaaacgaacaa

SEQ ID NO: 2463016 - RNA, 19 nt, Homo sapiens
  misc_RNA (1)...(19): siRNA sense strand
cgaacaaacuuaguggcaa

SEQ ID NO: 2463017 - RNA, 19 nt, Homo sapiens
  misc_RNA (1)...(19): siRNA sense strand
acaaagaaaccgagcuacu

SEQ ID NO: 2463018 - RNA, 19 nt, Homo sapiens
  misc_RNA (1)...(19): siRNA sense strand
gagacugauuagaggccga

SEQ ID NO: 2463019 - RNA, 19 nt, Homo sapiens
  misc_RNA (1)...(19): siRNA sense strand
cugcaguuauugaaagcau

SEQ ID NO: 2463020 - RNA, 19 nt, Homo sapiens
  misc_RNA (1)...(19): siRNA sense strand
ugucaaaauugcagauguu

SEQ ID NO: 2463021 - RNA, 19 nt, Homo sapiens
  misc_RNA (1)...(19): siRNA sense strand
cuuaaagaugauucaggua

SEQ ID NO: 2463022 - RNA, 19 nt, Homo sapiens
  misc_RNA (1)...(19): siRNA sense strand
caaucaaauacuggaagaa

SEQ ID NO: 2463023 - RNA, 19 nt, Homo sapiens
  misc_RNA (1)...(19): siRNA sense strand
gcuugaaaacuuggaauaa

SEQ ID NO: 2463024 - RNA, 19 nt, Homo sapiens
  misc_RNA (1)...(19): siRNA sense strand
ggaugauauuccagaagac

SEQ ID NO: 2463025 - RNA, 19 nt, Homo sapiens
  misc_RNA (1)...(19): siRNA sense strand
cgagcuacucagacaaaca

SEQ ID NO: 2463026 - RNA, 19 nt, Homo sapiens
  misc_RNA (1)...(19): siRNA sense strand
caaugagagggcuagacaa

SEQ ID NO: 2463027 - RNA, 19 nt, Homo sapiens
  misc_RNA (1)...(19): siRNA sense strand
augauauuccagaagacaa

SEQ ID NO: 2463028 - RNA, 19 nt, Homo sapiens
  misc_RNA (1)...(19): siRNA sense strand
cagggugguuggagcuaca

SEQ ID NO: 2463029 - RNA, 19 nt, Homo sapiens
  misc_RNA (1)...(19): siRNA sense strand
aagaaauugccaaggacaa

SEQ ID NO: 2463030 - RNA, 19 nt, Homo sapiens
  misc_RNA (1)...(19): siRNA sense strand
agguauacucugaaacuaa

SEQ ID NO: 2463031 - RNA, 19 nt, Homo sapiens
  misc_RNA (1)...(19): siRNA sense strand
guucuaaggcaguuggaau

SEQ ID NO: 2463032 - RNA, 19 nt, Homo sapiens
  misc_RNA (1)...(19): siRNA sense strand
gggaauuuacacugggaga

SEQ ID NO: 2463033 - RNA, 19 nt, Homo sapiens
  misc_RNA (1)...(19): siRNA sense strand
ggaauuacuuuaugccaca

SEQ ID NO: 2463034 - RNA, 19 nt, Homo sapiens
  misc_RNA (1)...(19): siRNA sense strand
uauugauccaagugggaaa

SEQ ID NO: 2463035 - RNA, 19 nt, Homo sapiens
  misc_RNA (1)...(19): siRNA sense strand
gaagaaauugccaaggaca

SEQ ID NO: 2463036 - RNA, 19 nt, Homo sapiens
  misc_RNA (1)...(19): siRNA sense strand
acgaugaugaagaacguua

SEQ ID NO: 2463037 - RNA, 19 nt, Homo sapiens
  misc_RNA (1)...(19): siRNA sense strand
cccgcagaguggaggacua

SEQ ID NO: 2463038 - RNA, 19 nt, Homo sapiens
  misc_RNA (1)...(19): siRNA sense strand
ggccaaucuuucaugggaa

SEQ ID NO: 2463039 - RNA, 19 nt, Homo sapiens
  misc_RNA (1)...(19): siRNA sense strand
gaugaaaaguggaaggaag

SEQ ID NO: 2463040 - RNA, 19 nt, Homo sapiens
  misc_RNA (1)...(19): siRNA sense strand
gguacaagcagcagaaccu

SEQ ID NO: 2463041 - RNA, 19 nt, Homo sapiens
  misc_RNA (1)...(19): siRNA sense strand
uugaagaauaugaacguga

SEQ ID NO: 2463042 - RNA, 19 nt, Homo sapiens
  misc_RNA (1)...(19): siRNA sense strand
guuccaaaaugaaggagau

SEQ ID NO: 2463043 - RNA, 19 nt, Homo sapiens
  misc_RNA (1)...(19): siRNA sense strand
guuagaggucagugggcca

SEQ ID NO: 2463044 - RNA, 19 nt, Homo sapiens
  misc_RNA (1)...(19): siRNA sense strand
ugauuaaguaccuugaaga

SEQ ID NO: 2463045 - RNA, 19 nt, Homo sapiens
  misc_RNA (1)...(19): siRNA sense strand
ugggaaaguuaaauccuga

SEQ ID NO: 2463046 - RNA, 19 nt, Homo sapiens
  misc_RNA (1)...(19): siRNA sense strand
cuguaugcccaguuccaaa

SEQ ID NO: 2463047 - RNA, 19 nt, Homo sapiens
  misc_RNA (1)...(19): siRNA sense strand
cagaaaagccagaacuguu

SEQ ID NO: 2463048 - RNA, 19 nt, Homo sapiens
  misc_RNA (1)...(19): siRNA sense strand
gggaauuacuuuaugccac

SEQ ID NO: 2463049 - RNA, 19 nt, Homo sapiens
  misc_RNA (1)...(19): siRNA sense strand
acccagacacgcugagaau

SEQ ID NO: 2463050 - RNA, 19 nt, Homo sapiens
  misc_RNA (1)...(19): siRNA sense strand
caaaugaaauaaagacccu

SEQ ID NO: 2463051 - RNA, 19 nt, Homo sapiens
  misc_RNA (1)...(19): siRNA sense strand
uggcauaucauguucaaaa

SEQ ID NO: 2463052 - RNA, 19 nt, Homo sapiens
  misc_RNA (1)...(19): siRNA sense strand
agccaggaucugaggcaau

SEQ ID NO: 2463053 - RNA, 19 nt, Homo sapiens
  misc_RNA (1)...(19): siRNA sense strand
ugaugaaguaacaccaaau

SEQ ID NO: 2463054 - RNA, 19 nt, Homo sapiens
  misc_RNA (1)...(19): siRNA sense strand
agugauaacccaaaggcua

SEQ ID NO: 2463055 - RNA, 19 nt, Homo sapiens
  misc_RNA (1)...(19): siRNA sense strand
ccuaacaguauuuggugaa

SEQ ID NO: 2463056 - RNA, 19 nt, Homo sapiens
  misc_RNA (1)...(19): siRNA sense strand
gcgauaugguucauggcuu

SEQ ID NO: 2463057 - RNA, 19 nt, Homo sapiens
  misc_RNA (1)...(19): siRNA sense strand
agaaggaguaagcgaccaa

SEQ ID NO: 2463058 - RNA, 19 nt, Homo sapiens
  misc_RNA (1)...(19): siRNA sense strand
gcuucaaacagaacaggau

SEQ ID NO: 2463059 - RNA, 19 nt, Homo sapiens
  misc_RNA (1)...(19): siRNA sense strand
cgauaugguucauggcuug

SEQ ID NO: 2463060 - RNA, 19 nt, Homo sapiens
  misc_RNA (1)...(19): siRNA sense strand
caguauuuggugaagauga

SEQ ID NO: 2463061 - RNA, 19 nt, Homo sapiens
  misc_RNA (1)...(19): siRNA sense strand
cuggaugaugauucaguua

SEQ ID NO: 2463062 - RNA, 19 nt, Homo sapiens
  misc_RNA (1)...(19): siRNA sense strand
cggagaaugaagaggacaa

SEQ ID NO: 2463063 - RNA, 19 nt, Homo sapiens
  misc_RNA (1)...(19): siRNA sense strand
cgauuaugggauaggagaa

SEQ ID NO: 2463064 - RNA, 19 nt, Homo sapiens
  misc_RNA (1)...(19): siRNA sense strand
gggaauaagaagcagcuga

SEQ ID NO: 2463065 - RNA, 19 nt, Homo sapiens
  misc_RNA (1)...(19): siRNA sense strand
ucgcaaagcuggcccgaga

SEQ ID NO: 2463066 - RNA, 19 nt, Homo sapiens
  misc_RNA (1)...(19): siRNA sense strand
gcucaaagccggcugcaga

SEQ ID NO: 2463067 - RNA, 19 nt, Homo sapiens
  misc_RNA (1)...(19): siRNA sense strand
ccucagacauacggagaau

SEQ ID NO: 2463068 - RNA, 19 nt, Homo sapiens
  misc_RNA (1)...(19): siRNA sense strand
gcucaauagcucagcgacu

SEQ ID NO: 2463069 - RNA, 19 nt, Homo sapiens
  misc_RNA (1)...(19): siRNA sense strand
ggagaaugaagaggacaaa

SEQ ID NO: 2463070 - RNA, 19 nt, Homo sapiens
  misc_RNA (1)...(19): siRNA sense strand
guggaacaucugagugaau

SEQ ID NO: 2463071 - RNA, 19 nt, Homo sapiens
  misc_RNA (1)...(19): siRNA sense strand
aagaucuguugaagagcaa

SEQ ID NO: 2463072 - RNA, 19 nt, Homo sapiens
  misc_RNA (1)...(19): siRNA sense strand
cugaagauacucacggaca

SEQ ID NO: 2463073 - RNA, 19 nt, Homo sapiens
  misc_RNA (1)...(19): siRNA sense strand
aguacaacccggucaaaca

SEQ ID NO: 2463074 - RNA, 19 nt, Homo sapiens
  misc_RNA (1)...(19): siRNA sense strand
uuauacagaacguguggaa

SEQ ID NO: 2463075 - RNA, 19 nt, Homo sapiens
  misc_RNA (1)...(19): siRNA sense strand
ugggaguagcagacaaaga

SEQ ID NO: 2463076 - RNA, 19 nt, Homo sapiens
  misc_RNA (1)...(19): siRNA sense strand
ccgcuuccgccuugagaau

SEQ ID NO: 2463077 - RNA, 19 nt, Homo sapiens
  misc_RNA (1)...(19): siRNA sense strand
ucagacauacggagaauga

SEQ ID NO: 2463078 - RNA, 19 nt, Homo sapiens
  misc_RNA (1)...(19): siRNA sense strand
ugagaaugaccuggaggaa

SEQ ID NO: 2463079 - RNA, 19 nt, Homo sapiens
  misc_RNA (1)...(19): siRNA sense strand
cagccggguguuugggaau

SEQ ID NO: 2463080 - RNA, 19 nt, Homo sapiens
  misc_RNA (1)...(19): siRNA sense strand
ccgauuaugggauaggaga

SEQ ID NO: 2463081 - RNA, 19 nt, Homo sapiens
  misc_RNA (1)...(19): siRNA sense strand
cguuugaccgccugcacaa

SEQ ID NO: 2463082 - RNA, 19 nt, Homo sapiens
  misc_RNA (1)...(19): siRNA sense strand
caucaguggcucugggaag

SEQ ID NO: 2463083 - RNA, 19 nt, Homo sapiens
  misc_RNA (1)...(19): siRNA sense strand
gagcaaaagaugugauaau

SEQ ID NO: 2463084 - RNA, 19 nt, Homo sapiens
  misc_RNA (1)...(19): siRNA sense strand
gguuauaugcagagagacu

SEQ ID NO: 2463085 - RNA, 19 nt, Homo sapiens
  misc_RNA (1)...(19): siRNA sense strand
ccgaaguggccuuggagua

SEQ ID NO: 2463086 - RNA, 19 nt, Homo sapiens
  misc_RNA (1)...(19): siRNA sense strand
cugaaaggaauaaggagaa

SEQ ID NO: 2463087 - RNA, 19 nt, Homo sapiens
  misc_RNA (1)...(19): siRNA sense strand
gcaauuaacuguuggugga

SEQ ID NO: 2463088 - RNA, 19 nt, Homo sapiens
  misc_RNA (1)...(19): siRNA sense strand
cggcaauuguugacgugaa

SEQ ID NO: 2463089 - RNA, 19 nt, Homo sapiens
  misc_RNA (1)...(19): siRNA sense strand
ccagaaacugagagcagaa

SEQ ID NO: 2463090 - RNA, 19 nt, Homo sapiens
  misc_RNA (1)...(19): siRNA sense strand
agaagaaaugugagguuga

SEQ ID NO: 2463091 - RNA, 19 nt, Homo sapiens
  misc_RNA (1)...(19): siRNA sense strand
aaagaaagcucuggaauca

SEQ ID NO: 2463092 - RNA, 19 nt, Homo sapiens
  misc_RNA (1)...(19): siRNA sense strand
gggcagaaauugagcaagc

SEQ ID NO: 2463093 - RNA, 19 nt, Homo sapiens
  misc_RNA (1)...(19): siRNA sense strand
ucugaaaggaauaaggaga

SEQ ID NO: 2463094 - RNA, 19 nt, Homo sapiens
  misc_RNA (1)...(19): siRNA sense strand
ggugaaagaauuugcggca

SEQ ID NO: 2463095 - RNA, 19 nt, Homo sapiens
  misc_RNA (1)...(19): siRNA sense strand
gauaauaccagcaaagcca

SEQ ID NO: 2463096 - RNA, 19 nt, Homo sapiens
  misc_RNA (1)...(19): siRNA sense strand
agguguuguuuguggcaau

SEQ ID NO: 2463097 - RNA, 19 nt, Homo sapiens
  misc_RNA (1)...(19): siRNA sense strand
caaauaaacaucuugcgaa

SEQ ID NO: 2463098 - RNA, 19 nt, Homo sapiens
  misc_RNA (1)...(19): siRNA sense strand
gcaucagacagcauagaau

SEQ ID NO: 2463099 - RNA, 19 nt, Homo sapiens
  misc_RNA (1)...(19): siRNA sense strand
ugagaagaaaugugagguu

SEQ ID NO: 2463100 - RNA, 19 nt, Homo sapiens
  misc_RNA (1)...(19): siRNA sense strand
cugaauaacgagcugaaga

SEQ ID NO: 2463101 - RNA, 19 nt, Homo sapiens
  misc_RNA (1)...(19): siRNA sense strand
uggcgaccauggagaggaa

SEQ ID NO: 2463102 - RNA, 19 nt, Homo sapiens
  misc_RNA (1)...(19): siRNA sense strand
agaggaaacuggagggcag

SEQ ID NO: 2463103 - RNA, 19 nt, Homo sapiens
  misc_RNA (1)...(19): siRNA sense strand
gaaucaaccucuucuccaa

SEQ ID NO: 2463104 - RNA, 19 nt, Homo sapiens
  misc_RNA (1)...(19): siRNA sense strand
acauugaggagaacaggua

SEQ ID NO: 2463105 - RNA, 19 nt, Homo sapiens
  misc_RNA (1)...(19): siRNA sense strand
aggaauaaggagaacagga

SEQ ID NO: 2463106 - RNA, 19 nt, Homo sapiens
  misc_RNA (1)...(19): siRNA sense strand
caauuguugacgugaaaga

SEQ ID NO: 2463107 - RNA, 19 nt, Homo sapiens
  misc_RNA (1)...(19): siRNA sense strand
gggaaaugcagaaaacaga

SEQ ID NO: 2463108 - RNA, 19 nt, Homo sapiens
  misc_RNA (1)...(19): siRNA sense strand
uaaagaaagcucuggaauc

SEQ ID NO: 2463109 - RNA, 19 nt, Homo sapiens
  misc_RNA (1)...(19): siRNA sense strand
gcagaagacacgugagcug

SEQ ID NO: 2463110 - RNA, 19 nt, Homo sapiens
  misc_RNA (1)...(19): siRNA sense strand
guggacaugacuagcacaa

SEQ ID NO: 2463111 - RNA, 19 nt, Homo sapiens
  misc_RNA (1)...(19): siRNA sense strand
gaagaaaggaccagcgcug

SEQ ID NO: 2463112 - RNA, 19 nt, Homo sapiens
  misc_RNA (1)...(19): siRNA sense strand
gcacaaacuucacaggccu

SEQ ID NO: 2463113 - RNA, 19 nt, Homo sapiens
  misc_RNA (1)...(19): siRNA sense strand
gaauaaggagaacaggaca

SEQ ID NO: 2463114 - RNA, 19 nt, Homo sapiens
  misc_RNA (1)...(19): siRNA sense strand
aggaccuaagugugaaaua

SEQ ID NO: 2463115 - RNA, 19 nt, Homo sapiens
  misc_RNA (1)...(19): siRNA sense strand
aggagugucuucagagcga

SEQ ID NO: 2463116 - RNA, 19 nt, Homo sapiens
  misc_RNA (1)...(19): siRNA sense strand
ggaauaaggagaacaggac

SEQ ID NO: 2463117 - RNA, 19 nt, Homo sapiens
  misc_RNA (1)...(19): siRNA sense strand
cagggcagaaauugagcaa

SEQ ID NO: 2463118 - RNA, 19 nt, Homo sapiens
  misc_RNA (1)...(19): siRNA sense strand
uuaaagaaagcucuggaau

SEQ ID NO: 2463119 - RNA, 19 nt, Homo sapiens
  misc_RNA (1)...(19): siRNA sense strand
cuuucuaccucaaggagca

SEQ ID NO: 2463120 - RNA, 19 nt, Homo sapiens
  misc_RNA (1)...(19): siRNA sense strand
ccagaaguggacaugacua

SEQ ID NO: 2463121 - RNA, 19 nt, Homo sapiens
  misc_RNA (1)...(19): siRNA sense strand
uugguuauaugcagagaga

SEQ ID NO: 2463122 - RNA, 19 nt, Homo sapiens
  misc_RNA (1)...(19): siRNA sense strand
ccacuuggagagagagauc

SEQ ID NO: 2463123 - RNA, 19 nt, Homo sapiens
  misc_RNA (1)...(19): siRNA sense strand
uguacaagaaaucuggaaa

SEQ ID NO: 2463124 - RNA, 19 nt, Homo sapiens
  misc_RNA (1)...(19): siRNA sense strand
agaugcaaucagugaagaa

SEQ ID NO: 2463125 - RNA, 19 nt, Homo sapiens
  misc_RNA (1)...(19): siRNA sense strand
gcagugugcucaagaggca

SEQ ID NO: 2463126 - RNA, 19 nt, Homo sapiens
  misc_RNA (1)...(19): siRNA sense strand
aagguuacggcgaggguuu

SEQ ID NO: 2463127 - RNA, 19 nt, Homo sapiens
  misc_RNA (1)...(19): siRNA sense strand
gcucaagaggcaagguuac

SEQ ID NO: 2463128 - RNA, 19 nt, Homo sapiens
  misc_RNA (1)...(19): siRNA sense strand
aguugagcuuaaugcuuua

SEQ ID NO: 2463129 - RNA, 19 nt, Homo sapiens
  misc_RNA (1)...(19): siRNA sense strand
ccgugagauauuugggcuu

SEQ ID NO: 2463130 - RNA, 19 nt, Homo sapiens
  misc_RNA (1)...(19): siRNA sense strand
ggcagaaagaacagcacaa

SEQ ID NO: 2463131 - RNA, 19 nt, Homo sapiens
  misc_RNA (1)...(19): siRNA sense strand
ccucaaagcaggaagacag

SEQ ID NO: 2463132 - RNA, 19 nt, Homo sapiens
  misc_RNA (1)...(19): siRNA sense strand
gcaaagaucugguaacccu

SEQ ID NO: 2463133 - RNA, 19 nt, Homo sapiens
  misc_RNA (1)...(19): siRNA sense strand
cgagauuagccuggucaaa

SEQ ID NO: 2463134 - RNA, 19 nt, Homo sapiens
  misc_RNA (1)...(19): siRNA sense strand
ggacaggaaucaagagaaa

SEQ ID NO: 2463135 - RNA, 19 nt, Homo sapiens
  misc_RNA (1)...(19): siRNA sense strand
aggagaagauaaagagaaa

SEQ ID NO: 2463136 - RNA, 19 nt, Homo sapiens
  misc_RNA (1)...(19): siRNA sense strand
gaacaagaccugagacuaa

SEQ ID NO: 2463137 - RNA, 19 nt, Homo sapiens
  misc_RNA (1)...(19): siRNA sense strand
gacaauaaugagagagaaa

SEQ ID NO: 2463138 - RNA, 19 nt, Homo sapiens
  misc_RNA (1)...(19): siRNA sense strand
ggauauagccgaaguggaa

SEQ ID NO: 2463139 - RNA, 19 nt, Homo sapiens
  misc_RNA (1)...(19): siRNA sense strand
caacaagaauggaagagua

SEQ ID NO: 2463140 - RNA, 19 nt, Homo sapiens
  misc_RNA (1)...(19): siRNA sense strand
aggcagaccuccagaacua

SEQ ID NO: 2463141 - RNA, 19 nt, Homo sapiens
  misc_RNA (1)...(19): siRNA sense strand
ccuuaaaauuugugagaga

SEQ ID NO: 2463142 - RNA, 19 nt, Homo sapiens
  misc_RNA (1)...(19): siRNA sense strand
ggugaaauuuacugagaga

SEQ ID NO: 2463143 - RNA, 19 nt, Homo sapiens
  misc_RNA (1)...(19): siRNA sense strand
ggauaaaguuguugcuguu

SEQ ID NO: 2463144 - RNA, 19 nt, Homo sapiens
  misc_RNA (1)...(19): siRNA sense strand
gggaagagggagaggagga

SEQ ID NO: 2463145 - RNA, 19 nt, Homo sapiens
  misc_RNA (1)...(19): siRNA sense strand
gggacaauaaugagagaga

SEQ ID NO: 2463146 - RNA, 19 nt, Homo sapiens
  misc_RNA (1)...(19): siRNA sense strand
gggaaagagcaccgaagaa

SEQ ID NO: 2463147 - RNA, 19 nt, Homo sapiens
  misc_RNA (1)...(19): siRNA sense strand
guugaauggcaaagugaaa

SEQ ID NO: 2463148 - RNA, 19 nt, Homo sapiens
  misc_RNA (1)...(19): siRNA sense strand
cucagagaguggagaguua

SEQ ID NO: 2463149 - RNA, 19 nt, Homo sapiens
  misc_RNA (1)...(19): siRNA sense strand
cuccaaauguggugaauau

SEQ ID NO: 2463150 - RNA, 19 nt, Homo sapiens
  misc_RNA (1)...(19): siRNA sense strand
gccaaagacuguaagagua

SEQ ID NO: 2463151 - RNA, 19 nt, Homo sapiens
  misc_RNA (1)...(19): siRNA sense strand
cggaauuacuuuaacauga

SEQ ID NO: 2463152 - RNA, 19 nt, Homo sapiens
  misc_RNA (1)...(19): siRNA sense strand
agaugaaacuguuggcaca

SEQ ID NO: 2463153 - RNA, 19 nt, Homo sapiens
  misc_RNA (1)...(19): siRNA sense strand
aaaugaaguugcagccuaa

SEQ ID NO: 2463154 - RNA, 19 nt, Homo sapiens
  misc_RNA (1)...(19): siRNA sense strand
ugguggauguugauggaaa

SEQ ID NO: 2463155 - RNA, 19 nt, Homo sapiens
  misc_RNA (1)...(19): siRNA sense strand
gugauaagguaguaagagu

SEQ ID NO: 2463156 - RNA, 19 nt, Homo sapiens
  misc_RNA (1)...(19): siRNA sense strand
uaacaugauugaaggccaa

SEQ ID NO: 2463157 - RNA, 19 nt, Homo sapiens
  misc_RNA (1)...(19): siRNA sense strand
gaguuaggauccaguuuaa

SEQ ID NO: 2463158 - RNA, 19 nt, Homo sapiens
  misc_RNA (1)...(19): siRNA sense strand
gaggagaagauaaagagaa

SEQ ID NO: 2463159 - RNA, 19 nt, Homo sapiens
  misc_RNA (1)...(19): siRNA sense strand
cauacaaaccagaccuaaa

SEQ ID NO: 2463160 - RNA, 19 nt, Homo sapiens
  misc_RNA (1)...(19): siRNA sense strand
acgagggagucgaggaaga

SEQ ID NO: 2463161 - RNA, 19 nt, Homo sapiens
  misc_RNA (1)...(19): siRNA sense strand
acaaugaaguuuagagauc

SEQ ID NO: 2463162 - RNA, 19 nt, Homo sapiens
  misc_RNA (1)...(19): siRNA sense strand
ggagaagacaagaucacua

SEQ ID NO: 2463163 - RNA, 19 nt, Homo sapiens
  misc_RNA (1)...(19): siRNA sense strand
aauugaagguguuagacaa

SEQ ID NO: 2463164 - RNA, 19 nt, Homo sapiens
  misc_RNA (1)...(19): siRNA sense strand
ggacgagggagucgaggaa

SEQ ID NO: 2463165 - RNA, 19 nt, Homo sapiens
  misc_RNA (1)...(19): siRNA sense strand
aaacaugggaggagaagau

SEQ ID NO: 2463166 - RNA, 19 nt, Homo sapiens
  misc_RNA (1)...(19): siRNA sense strand
gcaacauggcaauggaaaa

SEQ ID NO: 2463167 - RNA, 19 nt, Homo sapiens
  misc_RNA (1)...(19): siRNA sense strand
gguggauguugauggaaau

SEQ ID NO: 2463168 - RNA, 19 nt, Homo sapiens
  misc_RNA (1)...(19): siRNA sense strand
aauuaaagcagaagaacga

SEQ ID NO: 2463169 - RNA, 19 nt, Homo sapiens
  misc_RNA (1)...(19): siRNA sense strand
caugggaggagaagauaaa

SEQ ID NO: 2463170 - RNA, 19 nt, Homo sapiens
  misc_RNA (1)...(19): siRNA sense strand
gaccaugauuauagcaaau

SEQ ID NO: 2463171 - RNA, 19 nt, Homo sapiens
  misc_RNA (1)...(19): siRNA sense strand
uagaggaggcagaggaaga

SEQ ID NO: 2463172 - RNA, 19 nt, Homo sapiens
  misc_RNA (1)...(19): siRNA sense strand
gagaauugguccuuuacua

SEQ ID NO: 2463173 - RNA, 19 nt, Homo sapiens
  misc_RNA (1)...(19): siRNA sense strand
cagaacuaccuguaaauua

SEQ ID NO: 2463174 - RNA, 19 nt, Homo sapiens
  misc_RNA (1)...(19): siRNA sense strand
gaccgaagcgggagaagaa

SEQ ID NO: 2463175 - RNA, 19 nt, Homo sapiens
  misc_RNA (1)...(19): siRNA sense strand
gagcauaauucacaggcau

SEQ ID NO: 2463176 - RNA, 19 nt, Homo sapiens
  misc_RNA (1)...(19): siRNA sense strand
auggaagaguauagugcua

SEQ ID NO: 2463177 - RNA, 19 nt, Homo sapiens
  misc_RNA (1)...(19): siRNA sense strand
gcagcaaaccaaugaccaa

SEQ ID NO: 2463178 - RNA, 19 nt, Homo sapiens
  misc_RNA (1)...(19): siRNA sense strand
cagaagaaaccuaagcaga

SEQ ID NO: 2463179 - RNA, 19 nt, Homo sapiens
  misc_RNA (1)...(19): siRNA sense strand
ccucaguggaucuuggaua

SEQ ID NO: 2463180 - RNA, 19 nt, Homo sapiens
  misc_RNA (1)...(19): siRNA sense strand
gcaaggaacuauugagccu

SEQ ID NO: 2463181 - RNA, 19 nt, Homo sapiens
  misc_RNA (1)...(19): siRNA sense strand
ucagaaagcaacauggcaa

SEQ ID NO: 2463182 - RNA, 19 nt, Homo sapiens
  misc_RNA (1)...(19): siRNA sense strand
cuaaaggcacaaacagaua

SEQ ID NO: 2463183 - RNA, 19 nt, Homo sapiens
  misc_RNA (1)...(19): siRNA sense strand
ucagggagcugcagagaga

SEQ ID NO: 2463184 - RNA, 19 nt, Homo sapiens
  misc_RNA (1)...(19): siRNA sense strand
gcaaaaggugacauagaaa

SEQ ID NO: 2463185 - RNA, 19 nt, Homo sapiens
  misc_RNA (1)...(19): siRNA sense strand
gugaagacucggagccauu

SEQ ID NO: 2463186 - RNA, 19 nt, Homo sapiens
  misc_RNA (1)...(19): siRNA sense strand
ugagagaauugguccuuua

SEQ ID NO: 2463187 - RNA, 19 nt, Homo sapiens
  misc_RNA (1)...(19): siRNA sense strand
gagacuaauuaaugaagga

SEQ ID NO: 2463188 - RNA, 19 nt, Homo sapiens
  misc_RNA (1)...(19): siRNA sense strand
ucgaagacauaguagucaa

SEQ ID NO: 2463189 - RNA, 19 nt, Homo sapiens
  misc_RNA (1)...(19): siRNA sense strand
ccuaagcagacuagaaaga

SEQ ID NO: 2463190 - RNA, 19 nt, Homo sapiens
  misc_RNA (1)...(19): siRNA sense strand
agucaaggaucuauagcau

SEQ ID NO: 2463191 - RNA, 19 nt, Homo sapiens
  misc_RNA (1)...(19): siRNA sense strand
caaaugaaguugcagccua

SEQ ID NO: 2463192 - RNA, 19 nt, Homo sapiens
  misc_RNA (1)...(19): siRNA sense strand
gaucaggcagagugcguaa

SEQ ID NO: 2463193 - RNA, 19 nt, Homo sapiens
  misc_RNA (1)...(19): siRNA sense strand
ugacauggcuguuaacuau

SEQ ID NO: 2463194 - RNA, 19 nt, Homo sapiens
  misc_RNA (1)...(19): siRNA sense strand
gagaagacaagaucacuaa

SEQ ID NO: 2463195 - RNA, 19 nt, Homo sapiens
  misc_RNA (1)...(19): siRNA sense strand
cgaagaaugugaacggguu

SEQ ID NO: 2463196 - RNA, 19 nt, Homo sapiens
  misc_RNA (1)...(19): siRNA sense strand
uagccaugacccagggaaa

SEQ ID NO: 2463197 - RNA, 19 nt, Homo sapiens
  misc_RNA (1)...(19): siRNA sense strand
caguuuaaguucugaaagu

SEQ ID NO: 2463198 - RNA, 19 nt, Homo sapiens
  misc_RNA (1)...(19): siRNA sense strand
aagauuacguagauggaga

SEQ ID NO: 2463199 - RNA, 19 nt, Homo sapiens
  misc_RNA (1)...(19): siRNA sense strand
ggaagaguauagugcuaga

SEQ ID NO: 2463200 - RNA, 19 nt, Homo sapiens
  misc_RNA (1)...(19): siRNA sense strand
guaaagaugaacagcuuau

SEQ ID NO: 2463201 - RNA, 19 nt, Homo sapiens
  misc_RNA (1)...(19): siRNA sense strand
acaaaugggagaugagcuu

SEQ ID NO: 2463202 - RNA, 19 nt, Homo sapiens
  misc_RNA (1)...(19): siRNA sense strand
uguucgggcuguaaggaaa

SEQ ID NO: 2463203 - RNA, 19 nt, Homo sapiens
  misc_RNA (1)...(19): siRNA sense strand
gcacagauucucauggaca

SEQ ID NO: 2463204 - RNA, 19 nt, Homo sapiens
  misc_RNA (1)...(19): siRNA sense strand
ccagaacagaucaagauua

SEQ ID NO: 2463205 - RNA, 19 nt, Homo sapiens
  misc_RNA (1)...(19): siRNA sense strand
ugauaagguaguaagagua

SEQ ID NO: 2463206 - RNA, 19 nt, Homo sapiens
  misc_RNA (1)...(19): siRNA sense strand
uggagaaggaagaggacau

SEQ ID NO: 2463207 - RNA, 19 nt, Homo sapiens
  misc_RNA (1)...(19): siRNA sense strand
ucagaggagcccagcauua

SEQ ID NO: 2463208 - RNA, 19 nt, Homo sapiens
  misc_RNA (1)...(19): siRNA sense strand
acgcaaccuucgaggacau

SEQ ID NO: 2463209 - RNA, 19 nt, Homo sapiens
  misc_RNA (1)...(19): siRNA sense strand
ggagagaagcuguuccaga

SEQ ID NO: 2463210 - RNA, 19 nt, Homo sapiens
  misc_RNA (1)...(19): siRNA sense strand
gggaagcagaugaucgaga

SEQ ID NO: 2463211 - RNA, 19 nt, Homo sapiens
  misc_RNA (1)...(19): siRNA sense strand
gagauagagaggaagcuga

SEQ ID NO: 2463212 - RNA, 19 nt, Homo sapiens
  misc_RNA (1)...(19): siRNA sense strand
ccaaggugcccaaggcuga

SEQ ID NO: 2463213 - RNA, 19 nt, Homo sapiens
  misc_RNA (1)...(19): siRNA sense strand
aagugaacccagagccgaa

SEQ ID NO: 2463214 - RNA, 19 nt, Homo sapiens
  misc_RNA (1)...(19): siRNA sense strand
gagaggaagcugaacgucu

SEQ ID NO: 2463215 - RNA, 19 nt, Homo sapiens
  misc_RNA (1)...(19): siRNA sense strand
ggagccaagaucuggaaaa

SEQ ID NO: 2463216 - RNA, 19 nt, Homo sapiens
  misc_RNA (1)...(19): siRNA sense strand
uuguaucgccuguggaaga

SEQ ID NO: 2463217 - RNA, 19 nt, Homo sapiens
  misc_RNA (1)...(19): siRNA sense strand
agaaggaagaggacaugau

SEQ ID NO: 2463218 - RNA, 19 nt, Homo sapiens
  misc_RNA (1)...(19): siRNA sense strand
uggagaaggaagaggacau

SEQ ID NO: 2463219 - RNA, 19 nt, Homo sapiens
  misc_RNA (1)...(19): siRNA sense strand
ucagaggagcccagcauua

SEQ ID NO: 2463220 - RNA, 19 nt, Homo sapiens
  misc_RNA (1)...(19): siRNA sense strand
acgcaaccuucgaggacau

SEQ ID NO: 2463221 - RNA, 19 nt, Homo sapiens
  misc_RNA (1)...(19): siRNA sense strand
ggagagaagcuguuccaga

SEQ ID NO: 2463222 - RNA, 19 nt, Homo sapiens
  misc_RNA (1)...(19): siRNA sense strand
gggaagcagaugaucgaga

SEQ ID NO: 2463223 - RNA, 19 nt, Homo sapiens
  misc_RNA (1)...(19): siRNA sense strand
gagauagagaggaagcuga

SEQ ID NO: 2463224 - RNA, 19 nt, Homo sapiens
  misc_RNA (1)...(19): siRNA sense strand
ccaaggugcccaaggcuga

SEQ ID NO: 2463225 - RNA, 19 nt, Homo sapiens
  misc_RNA (1)...(19): siRNA sense strand
aagugaacccagagccgaa

SEQ ID NO: 2463226 - RNA, 19 nt, Homo sapiens
  misc_RNA (1)...(19): siRNA sense strand
gagaggaagcugaacgucu

SEQ ID NO: 2463227 - RNA, 19 nt, Homo sapiens
  misc_RNA (1)...(19): siRNA sense strand
ggagccaagaucuggaaaa

SEQ ID NO: 2463228 - RNA, 19 nt, Homo sapiens
  misc_RNA (1)...(19): siRNA sense strand
uuguaucgccuguggaaga

SEQ ID NO: 2463229 - RNA, 19 nt, Homo sapiens
  misc_RNA (1)...(19): siRNA sense strand
agaaggaagaggacaugau

SEQ ID NO: 2463230 - RNA, 19 nt, Homo sapiens
  misc_RNA (1)...(19): siRNA sense strand
gcugaaaggacaaggaaca

SEQ ID NO: 2463231 - RNA, 19 nt, Homo sapiens
  misc_RNA (1)...(19): siRNA sense strand
gaagaaaguuacaacguca

SEQ ID NO: 2463232 - RNA, 19 nt, Homo sapiens
  misc_RNA (1)...(19): siRNA sense strand
ggauuaucucagacaguaa

SEQ ID NO: 2463233 - RNA, 19 nt, Homo sapiens
  misc_RNA (1)...(19): siRNA sense strand
caagaagaagagugaagaa

SEQ ID NO: 2463234 - RNA, 19 nt, Homo sapiens
  misc_RNA (1)...(19): siRNA sense strand
gugacaaugaagagcuuaa

SEQ ID NO: 2463235 - RNA, 19 nt, Homo sapiens
  misc_RNA (1)...(19): siRNA sense strand
cgaaugagaaaguggagau

SEQ ID NO: 2463236 - RNA, 19 nt, Homo sapiens
  misc_RNA (1)...(19): siRNA sense strand
agaagagugaagaaaguua

SEQ ID NO: 2463237 - RNA, 19 nt, Homo sapiens
  misc_RNA (1)...(19): siRNA sense strand
agucagagcccaaagaaca

SEQ ID NO: 2463238 - RNA, 19 nt, Homo sapiens
  misc_RNA (1)...(19): siRNA sense strand
ucgaagaagaagaacagaa

SEQ ID NO: 2463239 - RNA, 19 nt, Homo sapiens
  misc_RNA (1)...(19): siRNA sense strand
ugauggaagacaaggagaa

SEQ ID NO: 2463240 - RNA, 19 nt, Homo sapiens
  misc_RNA (1)...(19): siRNA sense strand
augaagagucagagcccaa

SEQ ID NO: 2463241 - RNA, 19 nt, Homo sapiens
  misc_RNA (1)...(19): siRNA sense strand
gcgagagcgagguggauuu

SEQ ID NO: 2463242 - RNA, 19 nt, Homo sapiens
  misc_RNA (1)...(19): siRNA sense strand
uggaagacaaggagaaguu

SEQ ID NO: 2463243 - RNA, 19 nt, Homo sapiens
  misc_RNA (1)...(19): siRNA sense strand
cauaagugacauuguggaa

SEQ ID NO: 2463244 - RNA, 19 nt, Homo sapiens
  misc_RNA (1)...(19): siRNA sense strand
uggaaaggacugagaugau

SEQ ID NO: 2463245 - RNA, 19 nt, Homo sapiens
  misc_RNA (1)...(19): siRNA sense strand
aagaagaagagugaagaaa

SEQ ID NO: 2463246 - RNA, 19 nt, Homo sapiens
  misc_RNA (1)...(19): siRNA sense strand
ggauaacugcccugggaca

SEQ ID NO: 2463247 - RNA, 19 nt, Homo sapiens
  misc_RNA (1)...(19): siRNA sense strand
aagaagaagaacagaaugu

SEQ ID NO: 2463248 - RNA, 19 nt, Homo sapiens
  misc_RNA (1)...(19): siRNA sense strand
agucauauccucugaacau

SEQ ID NO: 2463249 - RNA, 19 nt, Homo sapiens
  misc_RNA (1)...(19): siRNA sense strand
ccuuaagagaucagcuauu

SEQ ID NO: 2463250 - RNA, 19 nt, Homo sapiens
  misc_RNA (1)...(19): siRNA sense strand
gaggaaagaaagagacaag

SEQ ID NO: 2463251 - RNA, 19 nt, Homo sapiens
  misc_RNA (1)...(19): siRNA sense strand
ugauaagaauguggagaga

SEQ ID NO: 2463252 - RNA, 19 nt, Homo sapiens
  misc_RNA (1)...(19): siRNA sense strand
gagcugagacgcagagcga

SEQ ID NO: 2463253 - RNA, 19 nt, Homo sapiens
  misc_RNA (1)...(19): siRNA sense strand
ugcuaggacuggagaccaa

SEQ ID NO: 2463254 - RNA, 19 nt, Homo sapiens
  misc_RNA (1)...(19): siRNA sense strand
aggaggaaagaaagagaca

SEQ ID NO: 2463255 - RNA, 19 nt, Homo sapiens
  misc_RNA (1)...(19): siRNA sense strand
cgaaguaugaagucugcaa

SEQ ID NO: 2463256 - RNA, 19 nt, Homo sapiens
  misc_RNA (1)...(19): siRNA sense strand
gggaggagagugaggucga

SEQ ID NO: 2463257 - RNA, 19 nt, Homo sapiens
  misc_RNA (1)...(19): siRNA sense strand
ggugaaaagaaagggauua

SEQ ID NO: 2463258 - RNA, 19 nt, Homo sapiens
  misc_RNA (1)...(19): siRNA sense strand
acaguaagccaggaggaaa

SEQ ID NO: 2463259 - RNA, 19 nt, Homo sapiens
  misc_RNA (1)...(19): siRNA sense strand
gcacaaaugaagucuacca

SEQ ID NO: 2463260 - RNA, 19 nt, Homo sapiens
  misc_RNA (1)...(19): siRNA sense strand
cauccaaacagcaagucua

SEQ ID NO: 2463261 - RNA, 19 nt, Homo sapiens
  misc_RNA (1)...(19): siRNA sense strand
aggagagugaggucgauaa

SEQ ID NO: 2463262 - RNA, 19 nt, Homo sapiens
  misc_RNA (1)...(19): siRNA sense strand
aaguggugauggaagacaa

SEQ ID NO: 2463263 - RNA, 19 nt, Homo sapiens
  misc_RNA (1)...(19): siRNA sense strand
gguggaaaucguuagguca

SEQ ID NO: 2463264 - RNA, 19 nt, Homo sapiens
  misc_RNA (1)...(19): siRNA sense strand
acgacuacgagauggagaa

SEQ ID NO: 2463265 - RNA, 19 nt, Homo sapiens
  misc_RNA (1)...(19): siRNA sense strand
ggucaguggcuuugauuuu

SEQ ID NO: 2463266 - RNA, 19 nt, Homo sapiens
  misc_RNA (1)...(19): siRNA sense strand
ucugggaaggauaaagaaa

SEQ ID NO: 2463267 - RNA, 19 nt, Homo sapiens
  misc_RNA (1)...(19): siRNA sense strand
cggugaaaagaaagggauu

SEQ ID NO: 2463268 - RNA, 19 nt, Homo sapiens
  misc_RNA (1)...(19): siRNA sense strand
caguaagccaggaggaaag

SEQ ID NO: 2463269 - RNA, 19 nt, Homo sapiens
  misc_RNA (1)...(19): siRNA sense strand
guggaaaucguuaggucau

SEQ ID NO: 2463270 - RNA, 19 nt, Homo sapiens
  misc_RNA (1)...(19): siRNA sense strand
ggaacgacuacgagaugga

SEQ ID NO: 2463271 - RNA, 19 nt, Homo sapiens
  misc_RNA (1)...(19): siRNA sense strand
ccaggaggaaagaaagaga

SEQ ID NO: 2463272 - RNA, 19 nt, Homo sapiens
  misc_RNA (1)...(19): siRNA sense strand
cugagaugauguacacaau

SEQ ID NO: 2463273 - RNA, 19 nt, Homo sapiens
  misc_RNA (1)...(19): siRNA sense strand
agaaagagacaagaggcua

SEQ ID NO: 2463274 - RNA, 19 nt, Homo sapiens
  misc_RNA (1)...(19): siRNA sense strand
ccaugaagacuguaggaac

SEQ ID NO: 2463275 - RNA, 19 nt, Homo sapiens
  misc_RNA (1)...(19): siRNA sense strand
uaaccacgcgaaugagaaa

SEQ ID NO: 2463276 - RNA, 19 nt, Homo sapiens
  misc_RNA (1)...(19): siRNA sense strand
uggaaugugccaaggagau

SEQ ID NO: 2463277 - RNA, 19 nt, Homo sapiens
  misc_RNA (1)...(19): siRNA sense strand
cuaccagcucgaagaagaa

SEQ ID NO: 2463278 - RNA, 19 nt, Homo sapiens
  misc_RNA (1)...(19): siRNA sense strand
uaagccaggaggaaagaaa

SEQ ID NO: 2463279 - RNA, 19 nt, Homo sapiens
  misc_RNA (1)...(19): siRNA sense strand
cuaccaacaacgaacacua

SEQ ID NO: 2463280 - RNA, 19 nt, Homo sapiens
  misc_RNA (1)...(19): siRNA sense strand
ccaacaacgaacacuacaa

SEQ ID NO: 2463281 - RNA, 19 nt, Homo sapiens
  misc_RNA (1)...(19): siRNA sense strand
gagaucagcuauuggugga

SEQ ID NO: 2463282 - RNA, 19 nt, Homo sapiens
  misc_RNA (1)...(19): siRNA sense strand
uggagaaagaggcugguuu

SEQ ID NO: 2463283 - RNA, 19 nt, Homo sapiens
  misc_RNA (1)...(19): siRNA sense strand
gauaagaauguggagagaa

SEQ ID NO: 2463284 - RNA, 19 nt, Homo sapiens
  misc_RNA (1)...(19): siRNA sense strand
acgcaggggaggagaguga

SEQ ID NO: 2463285 - RNA, 19 nt, Homo sapiens
  misc_RNA (1)...(19): siRNA sense strand
ucauuaucaccaagaagaa

SEQ ID NO: 2463286 - RNA, 19 nt, Homo sapiens
  misc_RNA (1)...(19): siRNA sense strand
agaacagaagucagaugaa

SEQ ID NO: 2463287 - RNA, 19 nt, Homo sapiens
  misc_RNA (1)...(19): siRNA sense strand
cugggaaggauaaagaaaa

SEQ ID NO: 2463288 - RNA, 19 nt, Homo sapiens
  misc_RNA (1)...(19): siRNA sense strand
ccuuaguaaccacgcgaau

SEQ ID NO: 2463289 - RNA, 19 nt, Homo sapiens
  misc_RNA (1)...(19): siRNA sense strand
uaaagaacugagugauaca

SEQ ID NO: 2463290 - RNA, 19 nt, Homo sapiens
  misc_RNA (1)...(19): siRNA sense strand
augagaaaguggagaugcu

SEQ ID NO: 2463291 - RNA, 19 nt, Homo sapiens
  misc_RNA (1)...(19): siRNA sense strand
gggacacagcagagggaag

SEQ ID NO: 2463292 - RNA, 19 nt, Homo sapiens
  misc_RNA (1)...(19): siRNA sense strand
aggaacauuugauggggaa

SEQ ID NO: 2463293 - RNA, 19 nt, Homo sapiens
  misc_RNA (1)...(19): siRNA sense strand
uugaaguagcagagaguga

SEQ ID NO: 2463294 - RNA, 19 nt, Homo sapiens
  misc_RNA (1)...(19): siRNA sense strand
aaguggaggaggugcgaau

SEQ ID NO: 2463295 - RNA, 19 nt, Homo sapiens
  misc_RNA (1)...(19): siRNA sense strand
cgggagugcucgagaagcu

SEQ ID NO: 2463296 - RNA, 19 nt, Homo sapiens
  misc_RNA (1)...(19): siRNA sense strand
ugucauugagguagagcau

SEQ ID NO: 2463297 - RNA, 19 nt, Homo sapiens
  misc_RNA (1)...(19): siRNA sense strand
ggacauagaaucugggugc

SEQ ID NO: 2463298 - RNA, 19 nt, Homo sapiens
  misc_RNA (1)...(19): siRNA sense strand
acaggagguuugaacgcua

SEQ ID NO: 2463299 - RNA, 19 nt, Homo sapiens
  misc_RNA (1)...(19): siRNA sense strand
gaagagaacugccuggcca

SEQ ID NO: 2463300 - RNA, 19 nt, Homo sapiens
  misc_RNA (1)...(19): siRNA sense strand
caucagaucuguugcugca

SEQ ID NO: 2463301 - RNA, 19 nt, Homo sapiens
  misc_RNA (1)...(19): siRNA sense strand
ccaacuggcccuaugguca

SEQ ID NO: 2463302 - RNA, 19 nt, Homo sapiens
  misc_RNA (1)...(19): siRNA sense strand
cggaugugaagccaggaaa

SEQ ID NO: 2463303 - RNA, 19 nt, Homo sapiens
  misc_RNA (1)...(19): siRNA sense strand
gcaaugaaauguaacugca

SEQ ID NO: 2463304 - RNA, 19 nt, Homo sapiens
  misc_RNA (1)...(19): siRNA sense strand
ggaauauaacagagguggu

SEQ ID NO: 2463305 - RNA, 19 nt, Homo sapiens
  misc_RNA (1)...(19): siRNA sense strand
cuuugaaguagcagagagu

SEQ ID NO: 2463306 - RNA, 19 nt, Homo sapiens
  misc_RNA (1)...(19): siRNA sense strand
guagaaguccugaaggcca

SEQ ID NO: 2463307 - RNA, 19 nt, Homo sapiens
  misc_RNA (1)...(19): siRNA sense strand
gugcuauccaccugaguga

SEQ ID NO: 2463308 - RNA, 19 nt, Homo sapiens
  misc_RNA (1)...(19): siRNA sense strand
ccacauuggugaugccuuc

SEQ ID NO: 2463309 - RNA, 19 nt, Homo sapiens
  misc_RNA (1)...(19): siRNA sense strand
gggaccgagcagaguguga

SEQ ID NO: 2463310 - RNA, 19 nt, Homo sapiens
  misc_RNA (1)...(19): siRNA sense strand
ggguagaaguccugaaggc

SEQ ID NO: 2463311 - RNA, 19 nt, Homo sapiens
  misc_RNA (1)...(19): siRNA sense strand
gugcaaaacaugcgaggaa

SEQ ID NO: 2463312 - RNA, 19 nt, Homo sapiens
  misc_RNA (1)...(19): siRNA sense strand
acguaaaggagaagcccua

SEQ ID NO: 2463313 - RNA, 19 nt, Homo sapiens
  misc_RNA (1)...(19): siRNA sense strand
aauucauucaggagagaaa

SEQ ID NO: 2463314 - RNA, 19 nt, Homo sapiens
  misc_RNA (1)...(19): siRNA sense strand
aguagaacucucugaauau

SEQ ID NO: 2463315 - RNA, 19 nt, Homo sapiens
  misc_RNA (1)...(19): siRNA sense strand
cugaggauggaguuggaaa

SEQ ID NO: 2463316 - RNA, 19 nt, Homo sapiens
  misc_RNA (1)...(19): siRNA sense strand
cugaggacacacaggagaa

SEQ ID NO: 2463317 - RNA, 19 nt, Homo sapiens
  misc_RNA (1)...(19): siRNA sense strand
acuuacaagagaaggguca

SEQ ID NO: 2463318 - RNA, 19 nt, Homo sapiens
  misc_RNA (1)...(19): siRNA sense strand
ucucaagaggagugcguga

SEQ ID NO: 2463319 - RNA, 19 nt, Homo sapiens
  misc_RNA (1)...(19): siRNA sense strand
ugaugggagaggaaggcaa

SEQ ID NO: 2463320 - RNA, 19 nt, Homo sapiens
  misc_RNA (1)...(19): siRNA sense strand
cauaugugguagagguuuu

SEQ ID NO: 2463321 - RNA, 19 nt, Homo sapiens
  misc_RNA (1)...(19): siRNA sense strand
caggauuggcacagcauca

SEQ ID NO: 2463322 - RNA, 19 nt, Homo sapiens
  misc_RNA (1)...(19): siRNA sense strand
ggcuuugaugggagaggaa

SEQ ID NO: 2463323 - RNA, 19 nt, Homo sapiens
  misc_RNA (1)...(19): siRNA sense strand
ucucauuacucauaagcga

SEQ ID NO: 2463324 - RNA, 19 nt, Homo sapiens
  misc_RNA (1)...(19): siRNA sense strand
ucauaagcgaacucacaua

SEQ ID NO: 2463325 - RNA, 19 nt, Homo sapiens
  misc_RNA (1)...(19): siRNA sense strand
uuggaaacccugaagcgaa

SEQ ID NO: 2463326 - RNA, 19 nt, Homo sapiens
  misc_RNA (1)...(19): siRNA sense strand
gcugaaaacaccuacgaau

SEQ ID NO: 2463327 - RNA, 19 nt, Homo sapiens
  misc_RNA (1)...(19): siRNA sense strand
cugaauauuuaggaaccaa

SEQ ID NO: 2463328 - RNA, 19 nt, Homo sapiens
  misc_RNA (1)...(19): siRNA sense strand
acucagaacuugcaugcca

SEQ ID NO: 2463329 - RNA, 19 nt, Homo sapiens
  misc_RNA (1)...(19): siRNA sense strand
gaccaauacuguuugagga

SEQ ID NO: 2463330 - RNA, 19 nt, Homo sapiens
  misc_RNA (1)...(19): siRNA sense strand
acaugaauagccacguaaa

SEQ ID NO: 2463331 - RNA, 19 nt, Homo sapiens
  misc_RNA (1)...(19): siRNA sense strand
gggugaacgcccaggacaa

SEQ ID NO: 2463332 - RNA, 19 nt, Homo sapiens
  misc_RNA (1)...(19): siRNA sense strand
aggacaaugaguugaguaa

SEQ ID NO: 2463333 - RNA, 19 nt, Homo sapiens
  misc_RNA (1)...(19): siRNA sense strand
ggaagcagcuggagugcga

SEQ ID NO: 2463334 - RNA, 19 nt, Homo sapiens
  misc_RNA (1)...(19): siRNA sense strand
cugagcagcuugagcggaa

SEQ ID NO: 2463335 - RNA, 19 nt, Homo sapiens
  misc_RNA (1)...(19): siRNA sense strand
uggaggagggacagcgaaa

SEQ ID NO: 2463336 - RNA, 19 nt, Homo sapiens
  misc_RNA (1)...(19): siRNA sense strand
cggaagguaaagaggguca

SEQ ID NO: 2463337 - RNA, 19 nt, Homo sapiens
  misc_RNA (1)...(19): siRNA sense strand
gagcagaggcacaagcaca

SEQ ID NO: 2463338 - RNA, 19 nt, Homo sapiens
  misc_RNA (1)...(19): siRNA sense strand
ucguaauaagugugaguuu

SEQ ID NO: 2463339 - RNA, 19 nt, Homo sapiens
  misc_RNA (1)...(19): siRNA sense strand
ggacagugcccuaugcuga

SEQ ID NO: 2463340 - RNA, 19 nt, Homo sapiens
  misc_RNA (1)...(19): siRNA sense strand
ggguggauggggaggauaa

SEQ ID NO: 2463341 - RNA, 19 nt, Homo sapiens
  misc_RNA (1)...(19): siRNA sense strand
cccuggaggagguggagaa

SEQ ID NO: 2463342 - RNA, 19 nt, Homo sapiens
  misc_RNA (1)...(19): siRNA sense strand
ggucauuggggucgagcua

SEQ ID NO: 2463343 - RNA, 19 nt, Homo sapiens
  misc_RNA (1)...(19): siRNA sense strand
ucuuuaaacuggagcugca

SEQ ID NO: 2463344 - RNA, 19 nt, Homo sapiens
  misc_RNA (1)...(19): siRNA sense strand
gcgacaggagggugagagu

SEQ ID NO: 2463345 - RNA, 19 nt, Homo sapiens
  misc_RNA (1)...(19): siRNA sense strand
uggcagagcugaagaccuc

SEQ ID NO: 2463346 - RNA, 19 nt, Homo sapiens
  misc_RNA (1)...(19): siRNA sense strand
ccaaggugauccuggccau

SEQ ID NO: 2463347 - RNA, 19 nt, Homo sapiens
  misc_RNA (1)...(19): siRNA sense strand
acuucguggaggagggaca

SEQ ID NO: 2463348 - RNA, 19 nt, Homo sapiens
  misc_RNA (1)...(19): siRNA sense strand
gggugaacgcccaggacaa

SEQ ID NO: 2463349 - RNA, 19 nt, Homo sapiens
  misc_RNA (1)...(19): siRNA sense strand
aggacaaugaguugaguaa

SEQ ID NO: 2463350 - RNA, 19 nt, Homo sapiens
  misc_RNA (1)...(19): siRNA sense strand
ggaagcagcuggagugcga

SEQ ID NO: 2463351 - RNA, 19 nt, Homo sapiens
  misc_RNA (1)...(19): siRNA sense strand
cugagcagcuugagcggaa

SEQ ID NO: 2463352 - RNA, 19 nt, Homo sapiens
  misc_RNA (1)...(19): siRNA sense strand
uggaggagggacagcgaaa

SEQ ID NO: 2463353 - RNA, 19 nt, Homo sapiens
  misc_RNA (1)...(19): siRNA sense strand
cggaagguaaagaggguca

SEQ ID NO: 2463354 - RNA, 19 nt, Homo sapiens
  misc_RNA (1)...(19): siRNA sense strand
gagcagaggcacaagcaca

SEQ ID NO: 2463355 - RNA, 19 nt, Homo sapiens
  misc_RNA (1)...(19): siRNA sense strand
ucguaauaagugugaguuu

SEQ ID NO: 2463356 - RNA, 19 nt, Homo sapiens
  misc_RNA (1)...(19): siRNA sense strand
ggacagugcccuaugcuga

SEQ ID NO: 2463357 - RNA, 19 nt, Homo sapiens
  misc_RNA (1)...(19): siRNA sense strand
ggguggauggggaggauaa

SEQ ID NO: 2463358 - RNA, 19 nt, Homo sapiens
  misc_RNA (1)...(19): siRNA sense strand
cggucaaggcuguggcagu

SEQ ID NO: 2463359 - RNA, 19 nt, Homo sapiens
  misc_RNA (1)...(19): siRNA sense strand
cccuggaggagguggagaa

SEQ ID NO: 2463360 - RNA, 19 nt, Homo sapiens
  misc_RNA (1)...(19): siRNA sense strand
ggucauuggggucgagcua

SEQ ID NO: 2463361 - RNA, 19 nt, Homo sapiens
  misc_RNA (1)...(19): siRNA sense strand
ucuuuaaacuggagcugca

SEQ ID NO: 2463362 - RNA, 19 nt, Homo sapiens
  misc_RNA (1)...(19): siRNA sense strand
gcgacaggagggugagagu

SEQ ID NO: 2463363 - RNA, 19 nt, Homo sapiens
  misc_RNA (1)...(19): siRNA sense strand
uggcagagcugaagaccuc

SEQ ID NO: 2463364 - RNA, 19 nt, Homo sapiens
  misc_RNA (1)...(19): siRNA sense strand
ccaaggugauccuggccau

SEQ ID NO: 2463365 - RNA, 19 nt, Homo sapiens
  misc_RNA (1)...(19): siRNA sense strand
acuucguggaggagggaca

SEQ ID NO: 2463366 - RNA, 19 nt, Homo sapiens
  misc_RNA (1)...(19): siRNA sense strand
cuaaccgggugaagggcau

SEQ ID NO: 2463367 - RNA, 19 nt, Homo sapiens
  misc_RNA (1)...(19): siRNA sense strand
guuuaaggucaaagaaaga

SEQ ID NO: 2463368 - RNA, 19 nt, Homo sapiens
  misc_RNA (1)...(19): siRNA sense strand
cuguuuaaggucaaagaaa

SEQ ID NO: 2463369 - RNA, 19 nt, Homo sapiens
  misc_RNA (1)...(19): siRNA sense strand
agauguggguauagaggau

SEQ ID NO: 2463370 - RNA, 19 nt, Homo sapiens
  misc_RNA (1)...(19): siRNA sense strand
uuucagaggaagaggcuau

SEQ ID NO: 2463371 - RNA, 19 nt, Homo sapiens
  misc_RNA (1)...(19): siRNA sense strand
gauuuguccaagauagaaa

SEQ ID NO: 2463372 - RNA, 19 nt, Homo sapiens
  misc_RNA (1)...(19): siRNA sense strand
auguggguauagaggauaa

SEQ ID NO: 2463373 - RNA, 19 nt, Homo sapiens
  misc_RNA (1)...(19): siRNA sense strand
uggauaacagauugggauu

SEQ ID NO: 2463374 - RNA, 19 nt, Homo sapiens
  misc_RNA (1)...(19): siRNA sense strand
aagcaucaguacaggacuu

SEQ ID NO: 2463375 - RNA, 19 nt, Homo sapiens
  misc_RNA (1)...(19): siRNA sense strand
auucacacuucgagacuau

SEQ ID NO: 2463376 - RNA, 19 nt, Homo sapiens
  misc_RNA (1)...(19): siRNA sense strand
agagauugccaaagcauca

SEQ ID NO: 2463377 - RNA, 19 nt, Homo sapiens
  misc_RNA (1)...(19): siRNA sense strand
cuggaacccgugaaagaaa

SEQ ID NO: 2463378 - RNA, 19 nt, Homo sapiens
  misc_RNA (1)...(19): siRNA sense strand
gucuggaacccgugaaaga

SEQ ID NO: 2463379 - RNA, 19 nt, Homo sapiens
  misc_RNA (1)...(19): siRNA sense strand
gcacaguaugauccagcaa

SEQ ID NO: 2463380 - RNA, 19 nt, Homo sapiens
  misc_RNA (1)...(19): siRNA sense strand
agccaauuucagaggaaga

SEQ ID NO: 2463381 - RNA, 19 nt, Homo sapiens
  misc_RNA (1)...(19): siRNA sense strand
acaguaugauccagcaaaa

SEQ ID NO: 2463382 - RNA, 19 nt, Homo sapiens
  misc_RNA (1)...(19): siRNA sense strand
caguaaagcagauguugca

SEQ ID NO: 2463383 - RNA, 19 nt, Homo sapiens
  misc_RNA (1)...(19): siRNA sense strand
caguacaggacuuugaaaa

SEQ ID NO: 2463384 - RNA, 19 nt, Homo sapiens
  misc_RNA (1)...(19): siRNA sense strand
acuacaucucuuuggacaa

SEQ ID NO: 2463385 - RNA, 19 nt, Homo sapiens
  misc_RNA (1)...(19): siRNA sense strand
aggaagaggcuauucagau

SEQ ID NO: 2463386 - RNA, 19 nt, Homo sapiens
  misc_RNA (1)...(19): siRNA sense strand
cagucacagaagacacaaa

SEQ ID NO: 2463387 - RNA, 19 nt, Homo sapiens
  misc_RNA (1)...(19): siRNA sense strand
uugugaagagauugccaaa

SEQ ID NO: 2463388 - RNA, 19 nt, Homo sapiens
  misc_RNA (1)...(19): siRNA sense strand
gaggagaauaccaggaaaa

SEQ ID NO: 2463389 - RNA, 19 nt, Homo sapiens
  misc_RNA (1)...(19): siRNA sense strand
aaucaguggaagcaagaaa

SEQ ID NO: 2463390 - RNA, 19 nt, Homo sapiens
  misc_RNA (1)...(19): siRNA sense strand
gcaccaaauuucaaccuga

SEQ ID NO: 2463391 - RNA, 19 nt, Homo sapiens
  misc_RNA (1)...(19): siRNA sense strand
acauaacaguccaggaaac

SEQ ID NO: 2463392 - RNA, 19 nt, Homo sapiens
  misc_RNA (1)...(19): siRNA sense strand
gcguuauaauguugcagau

SEQ ID NO: 2463393 - RNA, 19 nt, Homo sapiens
  misc_RNA (1)...(19): siRNA sense strand
aagagaaagcuaugaaacu

SEQ ID NO: 2463394 - RNA, 19 nt, Homo sapiens
  misc_RNA (1)...(19): siRNA sense strand
aguggaagcaagaaaguca

SEQ ID NO: 2463395 - RNA, 19 nt, Homo sapiens
  misc_RNA (1)...(19): siRNA sense strand
gaagaaaagcaaugaccau

SEQ ID NO: 2463396 - RNA, 19 nt, Homo sapiens
  misc_RNA (1)...(19): siRNA sense strand
gcaagaaagucaaggacgc

SEQ ID NO: 2463397 - RNA, 19 nt, Homo sapiens
  misc_RNA (1)...(19): siRNA sense strand
agucaaggacgcuggcaca

SEQ ID NO: 2463398 - RNA, 19 nt, Homo sapiens
  misc_RNA (1)...(19): siRNA sense strand
auucaaggaaagcguuaua

SEQ ID NO: 2463399 - RNA, 19 nt, Homo sapiens
  misc_RNA (1)...(19): siRNA sense strand
acagcaagcaaaagacaua

SEQ ID NO: 2463400 - RNA, 19 nt, Homo sapiens
  misc_RNA (1)...(19): siRNA sense strand
gacaaaaggaggagaauac

SEQ ID NO: 2463401 - RNA, 19 nt, Homo sapiens
  misc_RNA (1)...(19): siRNA sense strand
agugacaacaggaagaaaa

SEQ ID NO: 2463402 - RNA, 19 nt, Homo sapiens
  misc_RNA (1)...(19): siRNA sense strand
auggguauuuacaggaauu

SEQ ID NO: 2463403 - RNA, 19 nt, Homo sapiens
  misc_RNA (1)...(19): siRNA sense strand
gcaaaauaacaauggaucu

SEQ ID NO: 2463404 - RNA, 19 nt, Homo sapiens
  misc_RNA (1)...(19): siRNA sense strand
caaacacuuccuugggcua

SEQ ID NO: 2463405 - RNA, 19 nt, Homo sapiens
  misc_RNA (1)...(19): siRNA sense strand
caggacaaaaggaggagaa

SEQ ID NO: 2463406 - RNA, 19 nt, Homo sapiens
  misc_RNA (1)...(19): siRNA sense strand
ccuugggcuaccugaauua

SEQ ID NO: 2463407 - RNA, 19 nt, Homo sapiens
  misc_RNA (1)...(19): siRNA sense strand
ggauaaaauaagacuacca

SEQ ID NO: 2463408 - RNA, 19 nt, Homo sapiens
  misc_RNA (1)...(19): siRNA sense strand
guggaaaugaagaggaaaa

SEQ ID NO: 2463409 - RNA, 19 nt, Homo sapiens
  misc_RNA (1)...(19): siRNA sense strand
gauacaauauagaggcaga

SEQ ID NO: 2463410 - RNA, 19 nt, Homo sapiens
  misc_RNA (1)...(19): siRNA sense strand
acaucaaagaagagucaua

SEQ ID NO: 2463411 - RNA, 19 nt, Homo sapiens
  misc_RNA (1)...(19): siRNA sense strand
agauguugguacaggaaaa

SEQ ID NO: 2463412 - RNA, 19 nt, Homo sapiens
  misc_RNA (1)...(19): siRNA sense strand
auguggaaaugaagaggaa

SEQ ID NO: 2463413 - RNA, 19 nt, Homo sapiens
  misc_RNA (1)...(19): siRNA sense strand
gggauagauuaccggaaaa

SEQ ID NO: 2463414 - RNA, 19 nt, Homo sapiens
  misc_RNA (1)...(19): siRNA sense strand
gaauaaagccuguggaacc

SEQ ID NO: 2463415 - RNA, 19 nt, Homo sapiens
  misc_RNA (1)...(19): siRNA sense strand
cugaauaaagccuguggaa

SEQ ID NO: 2463416 - RNA, 19 nt, Homo sapiens
  misc_RNA (1)...(19): siRNA sense strand
aaacaggacucaaggucga

SEQ ID NO: 2463417 - RNA, 19 nt, Homo sapiens
  misc_RNA (1)...(19): siRNA sense strand
agcuaaaggaugaugaaca

SEQ ID NO: 2463418 - RNA, 19 nt, Homo sapiens
  misc_RNA (1)...(19): siRNA sense strand
agaaauuacacgaggaccu

SEQ ID NO: 2463419 - RNA, 19 nt, Homo sapiens
  misc_RNA (1)...(19): siRNA sense strand
cuggaaugaaggagacaga

SEQ ID NO: 2463420 - RNA, 19 nt, Homo sapiens
  misc_RNA (1)...(19): siRNA sense strand
acucaaggucgaagauuca

SEQ ID NO: 2463421 - RNA, 19 nt, Homo sapiens
  misc_RNA (1)...(19): siRNA sense strand
ggaaugaaggagacagaac

SEQ ID NO: 2463422 - RNA, 19 nt, Homo sapiens
  misc_RNA (1)...(19): siRNA sense strand
aaaccaggauucauggcua

SEQ ID NO: 2463423 - RNA, 19 nt, Homo sapiens
  misc_RNA (1)...(19): siRNA sense strand
acuuggagccagugacuau

SEQ ID NO: 2463424 - RNA, 19 nt, Homo sapiens
  misc_RNA (1)...(19): siRNA sense strand
gaguuggagcaaagcagaa

SEQ ID NO: 2463425 - RNA, 19 nt, Homo sapiens
  misc_RNA (1)...(19): siRNA sense strand
ccaacaggccaccggaaga

SEQ ID NO: 2463426 - RNA, 19 nt, Homo sapiens
  misc_RNA (1)...(19): siRNA sense strand
cgcaauuuacucuggcaaa

SEQ ID NO: 2463427 - RNA, 19 nt, Homo sapiens
  misc_RNA (1)...(19): siRNA sense strand
cggaaaugcagacugaaca

SEQ ID NO: 2463428 - RNA, 19 nt, Homo sapiens
  misc_RNA (1)...(19): siRNA sense strand
uuauggagauguugguaca

SEQ ID NO: 2463429 - RNA, 19 nt, Homo sapiens
  misc_RNA (1)...(19): siRNA sense strand
uuaccggagaagaggaaau

SEQ ID NO: 2463430 - RNA, 19 nt, Homo sapiens
  misc_RNA (1)...(19): siRNA sense strand
aagaagagucauacagugu

SEQ ID NO: 2463431 - RNA, 19 nt, Homo sapiens
  misc_RNA (1)...(19): siRNA sense strand
gcucagaaacaaaaugauu

SEQ ID NO: 2463432 - RNA, 19 nt, Homo sapiens
  misc_RNA (1)...(19): siRNA sense strand
ugaagagcugugugagaga

SEQ ID NO: 2463433 - RNA, 19 nt, Homo sapiens
  misc_RNA (1)...(19): siRNA sense strand
aggauacaauauagaggca

SEQ ID NO: 2463434 - RNA, 19 nt, Homo sapiens
  misc_RNA (1)...(19): siRNA sense strand
gccuguauguuuauggaga

SEQ ID NO: 2463435 - RNA, 19 nt, Homo sapiens
  misc_RNA (1)...(19): siRNA sense strand
augccaugauucugaaaca

SEQ ID NO: 2463436 - RNA, 19 nt, Homo sapiens
  misc_RNA (1)...(19): siRNA sense strand
ccuguauguuuauggagau

SEQ ID NO: 2463437 - RNA, 19 nt, Homo sapiens
  misc_RNA (1)...(19): siRNA sense strand
uuugaagagcugugugaga

SEQ ID NO: 2463438 - RNA, 19 nt, Homo sapiens
  misc_RNA (1)...(19): siRNA sense strand
cauuugaagagcuguguga

SEQ ID NO: 2463439 - RNA, 19 nt, Homo sapiens
  misc_RNA (1)...(19): siRNA sense strand
auagcagucuugaaggaau

SEQ ID NO: 2463440 - RNA, 19 nt, Homo sapiens
  misc_RNA (1)...(19): siRNA sense strand
aguacuggaaugaaggaga

SEQ ID NO: 2463441 - RNA, 19 nt, Homo sapiens
  misc_RNA (1)...(19): siRNA sense strand
ucauacaguguuugcagaa

SEQ ID NO: 2463442 - RNA, 19 nt, Homo sapiens
  misc_RNA (1)...(19): siRNA sense strand
ggucaucaauguaggagaa

SEQ ID NO: 2463443 - RNA, 19 nt, Homo sapiens
  misc_RNA (1)...(19): siRNA sense strand
cauggauaguggaggacaa

SEQ ID NO: 2463444 - RNA, 19 nt, Homo sapiens
  misc_RNA (1)...(19): siRNA sense strand
ccaagaaaggccuggaaca

SEQ ID NO: 2463445 - RNA, 19 nt, Homo sapiens
  misc_RNA (1)...(19): siRNA sense strand
ggggagagcucuauggcua

SEQ ID NO: 2463446 - RNA, 19 nt, Homo sapiens
  misc_RNA (1)...(19): siRNA sense strand
augcagagggccaggacua

SEQ ID NO: 2463447 - RNA, 19 nt, Homo sapiens
  misc_RNA (1)...(19): siRNA sense strand
agcagaagcuagugaacau

SEQ ID NO: 2463448 - RNA, 19 nt, Homo sapiens
  misc_RNA (1)...(19): siRNA sense strand
gaugauaagaguagggaag

SEQ ID NO: 2463449 - RNA, 19 nt, Homo sapiens
  misc_RNA (1)...(19): siRNA sense strand
gagaaggaaaauagaacaa

SEQ ID NO: 2463450 - RNA, 19 nt, Homo sapiens
  misc_RNA (1)...(19): siRNA sense strand
ucuugaaagcaaugaggaa

SEQ ID NO: 2463451 - RNA, 19 nt, Homo sapiens
  misc_RNA (1)...(19): siRNA sense strand
gcacagaggacuagaggag

SEQ ID NO: 2463452 - RNA, 19 nt, Homo sapiens
  misc_RNA (1)...(19): siRNA sense strand
gagcauaguguuugggauc

SEQ ID NO: 2463453 - RNA, 19 nt, Homo sapiens
  misc_RNA (1)...(19): siRNA sense strand
ccgcaagaacagagaguug

SEQ ID NO: 2463454 - RNA, 19 nt, Homo sapiens
  misc_RNA (1)...(19): siRNA sense strand
uagaacagucuuugagaga

SEQ ID NO: 2463455 - RNA, 19 nt, Homo sapiens
  misc_RNA (1)...(19): siRNA sense strand
gcuugcaugaucagaguaa

SEQ ID NO: 2463456 - RNA, 19 nt, Homo sapiens
  misc_RNA (1)...(19): siRNA sense strand
gagaaaacuuugaacacau

SEQ ID NO: 2463457 - RNA, 19 nt, Homo sapiens
  misc_RNA (1)...(19): siRNA sense strand
uugaaagcaaugaggaaga

SEQ ID NO: 2463458 - RNA, 19 nt, Homo sapiens
  misc_RNA (1)...(19): siRNA sense strand
agagagaccaagagaagga

SEQ ID NO: 2463459 - RNA, 19 nt, Homo sapiens
  misc_RNA (1)...(19): siRNA sense strand
aggcuuucuuugagaccaa

SEQ ID NO: 2463460 - RNA, 19 nt, Homo sapiens
  misc_RNA (1)...(19): siRNA sense strand
ggaugauaagaguagggaa

SEQ ID NO: 2463461 - RNA, 19 nt, Homo sapiens
  misc_RNA (1)...(19): siRNA sense strand
cagccugacaaccgagaaa

SEQ ID NO: 2463462 - RNA, 19 nt, Homo sapiens
  misc_RNA (1)...(19): siRNA sense strand
ccgaauggucccagggugu

SEQ ID NO: 2463463 - RNA, 19 nt, Homo sapiens
  misc_RNA (1)...(19): siRNA sense strand
ccgcaaaagaaguggagca

SEQ ID NO: 2463464 - RNA, 19 nt, Homo sapiens
  misc_RNA (1)...(19): siRNA sense strand
gguauuuccugaagccgaa

SEQ ID NO: 2463465 - RNA, 19 nt, Homo sapiens
  misc_RNA (1)...(19): siRNA sense strand
uugcaugaucagaguaaau

SEQ ID NO: 2463466 - RNA, 19 nt, Homo sapiens
  misc_RNA (1)...(19): siRNA sense strand
caccaggauauuugcgaua

SEQ ID NO: 2463467 - RNA, 19 nt, Homo sapiens
  misc_RNA (1)...(19): siRNA sense strand
gagaagugacucuuggaga

SEQ ID NO: 2463468 - RNA, 19 nt, Homo sapiens
  misc_RNA (1)...(19): siRNA sense strand
ccaagaagguugagcaucc

SEQ ID NO: 2463469 - RNA, 19 nt, Homo sapiens
  misc_RNA (1)...(19): siRNA sense strand
cucaguuaguagaguuuaa

SEQ ID NO: 2463470 - RNA, 19 nt, Homo sapiens
  misc_RNA (1)...(19): siRNA sense strand
auucauggauaguggagga

SEQ ID NO: 2463471 - RNA, 19 nt, Homo sapiens
  misc_RNA (1)...(19): siRNA sense strand
accaagagaaggagagagu

SEQ ID NO: 2463472 - RNA, 19 nt, Homo sapiens
  misc_RNA (1)...(19): siRNA sense strand
gggaugugcaaaagaaaau

SEQ ID NO: 2463473 - RNA, 19 nt, Homo sapiens
  misc_RNA (1)...(19): siRNA sense strand
caaaauuguggauguguua

SEQ ID NO: 2463474 - RNA, 19 nt, Homo sapiens
  misc_RNA (1)...(19): siRNA sense strand
ccgagaaauggguaggcau

SEQ ID NO: 2463475 - RNA, 19 nt, Homo sapiens
  misc_RNA (1)...(19): siRNA sense strand
uugacgaagcucagaauuu

SEQ ID NO: 2463476 - RNA, 19 nt, Homo sapiens
  misc_RNA (1)...(19): siRNA sense strand
caugugauauguuggguga

SEQ ID NO: 2463477 - RNA, 19 nt, Homo sapiens
  misc_RNA (1)...(19): siRNA sense strand
ggccaagaagguugagcau

SEQ ID NO: 2463478 - RNA, 19 nt, Homo sapiens
  misc_RNA (1)...(19): siRNA sense strand
gaacagucuuugagagagc

SEQ ID NO: 2463479 - RNA, 19 nt, Homo sapiens
  misc_RNA (1)...(19): siRNA sense strand
gaaaauucagagagaccaa

SEQ ID NO: 2463480 - RNA, 19 nt, Homo sapiens
  misc_RNA (1)...(19): siRNA sense strand
aaacacuggaggaggcuau

SEQ ID NO: 2463481 - RNA, 19 nt, Homo sapiens
  misc_RNA (1)...(19): siRNA sense strand
gcaugaugacagacacaga

SEQ ID NO: 2463482 - RNA, 19 nt, Homo sapiens
  misc_RNA (1)...(19): siRNA sense strand
gggagagcucuauggcuau

SEQ ID NO: 2463483 - RNA, 19 nt, Homo sapiens
  misc_RNA (1)...(19): siRNA sense strand
gggcuguggaccugaacuu

SEQ ID NO: 2463484 - RNA, 19 nt, Homo sapiens
  misc_RNA (1)...(19): siRNA sense strand
caauguaggagaagugacu

SEQ ID NO: 2463485 - RNA, 19 nt, Homo sapiens
  misc_RNA (1)...(19): siRNA sense strand
agagaagagcucaccagaa

SEQ ID NO: 2463486 - RNA, 19 nt, Homo sapiens
  misc_RNA (1)...(19): siRNA sense strand
cugggugccucgagguauu

SEQ ID NO: 2463487 - RNA, 19 nt, Homo sapiens
  misc_RNA (1)...(19): siRNA sense strand
acuauaaguaugagcucuu

SEQ ID NO: 2463488 - RNA, 19 nt, Homo sapiens
  misc_RNA (1)...(19): siRNA sense strand
ggagcauaguguuugggau

SEQ ID NO: 2463489 - RNA, 19 nt, Homo sapiens
  misc_RNA (1)...(19): siRNA sense strand
cucaggaggaggagugauu

SEQ ID NO: 2463490 - RNA, 19 nt, Homo sapiens
  misc_RNA (1)...(19): siRNA sense strand
gggcaaaacaacaccugua

SEQ ID NO: 2463491 - RNA, 19 nt, Homo sapiens
  misc_RNA (1)...(19): siRNA sense strand
ucuggaucuuucuggauua

SEQ ID NO: 2463492 - RNA, 19 nt, Homo sapiens
  misc_RNA (1)...(19): siRNA sense strand
ucaccagaauaguucgcaa

SEQ ID NO: 2463493 - RNA, 19 nt, Homo sapiens
  misc_RNA (1)...(19): siRNA sense strand
gaguuuaaacaguucucua

SEQ ID NO: 2463494 - RNA, 19 nt, Homo sapiens
  misc_RNA (1)...(19): siRNA sense strand
guagggaaguccugggaug

SEQ ID NO: 2463495 - RNA, 19 nt, Homo sapiens
  misc_RNA (1)...(19): siRNA sense strand
gagucuaucuagugggccu

SEQ ID NO: 2463496 - RNA, 19 nt, Homo sapiens
  misc_RNA (1)...(19): siRNA sense strand
cuacaaaacacuuccaaga

SEQ ID NO: 2463497 - RNA, 19 nt, Homo sapiens
  misc_RNA (1)...(19): siRNA sense strand
aauaaugaccuguguggca

SEQ ID NO: 2463498 - RNA, 19 nt, Homo sapiens
  misc_RNA (1)...(19): siRNA sense strand
uggagaugggacuggauuu

SEQ ID NO: 2463499 - RNA, 19 nt, Homo sapiens
  misc_RNA (1)...(19): siRNA sense strand
gggacuggauuuagaacag

SEQ ID NO: 2463500 - RNA, 19 nt, Homo sapiens
  misc_RNA (1)...(19): siRNA sense strand
aggcaugaugacagacaca

SEQ ID NO: 2463501 - RNA, 19 nt, Homo sapiens
  misc_RNA (1)...(19): siRNA sense strand
auacuugacuguggagcaa

SEQ ID NO: 2463502 - RNA, 19 nt, Homo sapiens
  misc_RNA (1)...(19): siRNA sense strand
cgagaaauggguaggcaug

SEQ ID NO: 2463503 - RNA, 19 nt, Homo sapiens
  misc_RNA (1)...(19): siRNA sense strand
aaaggguggcccaggaauu

SEQ ID NO: 2463504 - RNA, 19 nt, Homo sapiens
  misc_RNA (1)...(19): siRNA sense strand
cagaggacuagaggaguua

SEQ ID NO: 2463505 - RNA, 19 nt, Homo sapiens
  misc_RNA (1)...(19): siRNA sense strand
gaggacuagaggaguuaau

SEQ ID NO: 2463506 - RNA, 19 nt, Homo sapiens
  misc_RNA (1)...(19): siRNA sense strand
caggagaagccaggaguca

SEQ ID NO: 2463507 - RNA, 19 nt, Homo sapiens
  misc_RNA (1)...(19): siRNA sense strand
gugacaaggucgaggagga

SEQ ID NO: 2463508 - RNA, 19 nt, Homo sapiens
  misc_RNA (1)...(19): siRNA sense strand
augaagaagaggaggagga

SEQ ID NO: 2463509 - RNA, 19 nt, Homo sapiens
  misc_RNA (1)...(19): siRNA sense strand
agcaaaucauucaggaaau

SEQ ID NO: 2463510 - RNA, 19 nt, Homo sapiens
  misc_RNA (1)...(19): siRNA sense strand
aggaugaagaagaggagga

SEQ ID NO: 2463511 - RNA, 19 nt, Homo sapiens
  misc_RNA (1)...(19): siRNA sense strand
cagaaaggauugagcgcag

SEQ ID NO: 2463512 - RNA, 19 nt, Homo sapiens
  misc_RNA (1)...(19): siRNA sense strand
gggaagcagagaugcaaaa

SEQ ID NO: 2463513 - RNA, 19 nt, Homo sapiens
  misc_RNA (1)...(19): siRNA sense strand
agauggugaauaugguaua

SEQ ID NO: 2463514 - RNA, 19 nt, Homo sapiens
  misc_RNA (1)...(19): siRNA sense strand
auggaauucuuguuagcaa

SEQ ID NO: 2463515 - RNA, 19 nt, Homo sapiens
  misc_RNA (1)...(19): siRNA sense strand
guaaauaccuccuggucuc

SEQ ID NO: 2463516 - RNA, 19 nt, Homo sapiens
  misc_RNA (1)...(19): siRNA sense strand
aggaggacagcgaggauga

SEQ ID NO: 2463517 - RNA, 19 nt, Homo sapiens
  misc_RNA (1)...(19): siRNA sense strand
cagcuuaaccuguguggca

SEQ ID NO: 2463518 - RNA, 19 nt, Homo sapiens
  misc_RNA (1)...(19): siRNA sense strand
acagcgaggaugaagaaga

SEQ ID NO: 2463519 - RNA, 19 nt, Homo sapiens
  misc_RNA (1)...(19): siRNA sense strand
cuuuaaaugccaaccuaau

SEQ ID NO: 2463520 - RNA, 19 nt, Homo sapiens
  misc_RNA (1)...(19): siRNA sense strand
ccuuuaaaugccaaccuaa

SEQ ID NO: 2463521 - RNA, 19 nt, Homo sapiens
  misc_RNA (1)...(19): siRNA sense strand
gguauaaacuucgacccaa

SEQ ID NO: 2463522 - RNA, 19 nt, Homo sapiens
  misc_RNA (1)...(19): siRNA sense strand
guauaaacuucgacccaag

SEQ ID NO: 2463523 - RNA, 19 nt, Homo sapiens
  misc_RNA (1)...(19): siRNA sense strand
gcgaggaugaagaagagga

SEQ ID NO: 2463524 - RNA, 19 nt, Homo sapiens
  misc_RNA (1)...(19): siRNA sense strand
aguucauacuggugagaaa

SEQ ID NO: 2463525 - RNA, 19 nt, Homo sapiens
  misc_RNA (1)...(19): siRNA sense strand
acuucauacuggugagaaa

SEQ ID NO: 2463526 - RNA, 19 nt, Homo sapiens
  misc_RNA (1)...(19): siRNA sense strand
aauucauacuggugagaaa

SEQ ID NO: 2463527 - RNA, 19 nt, Homo sapiens
  misc_RNA (1)...(19): siRNA sense strand
aauucauacuggugagaaa

SEQ ID NO: 2463528 - RNA, 19 nt, Homo sapiens
  misc_RNA (1)...(19): siRNA sense strand
auguaaggaaugugggaaa

SEQ ID NO: 2463529 - RNA, 19 nt, Homo sapiens
  misc_RNA (1)...(19): siRNA sense strand
auguaaggaaugugggaaa

SEQ ID NO: 2463530 - RNA, 19 nt, Homo sapiens
  misc_RNA (1)...(19): siRNA sense strand
auguaaggaaugugggaaa

SEQ ID NO: 2463531 - RNA, 19 nt, Homo sapiens
  misc_RNA (1)...(19): siRNA sense strand
augugaagaaugugggaaa

SEQ ID NO: 2463532 - RNA, 19 nt, Homo sapiens
  misc_RNA (1)...(19): siRNA sense strand
cccuauaaauguaaggaau

SEQ ID NO: 2463533 - RNA, 19 nt, Homo sapiens
  misc_RNA (1)...(19): siRNA sense strand
aauucauaccggugagaaa

SEQ ID NO: 2463534 - RNA, 19 nt, Homo sapiens
  misc_RNA (1)...(19): siRNA sense strand
ccauaucaauguaaggaau

SEQ ID NO: 2463535 - RNA, 19 nt, Homo sapiens
  misc_RNA (1)...(19): siRNA sense strand
ccauaucaauguaaggaau

SEQ ID NO: 2463536 - RNA, 19 nt, Homo sapiens
  misc_RNA (1)...(19): siRNA sense strand
auauaaggaaugugggauu

SEQ ID NO: 2463537 - RNA, 19 nt, Homo sapiens
  misc_RNA (1)...(19): siRNA sense strand
cccuaugaaugcagagaau

SEQ ID NO: 2463538 - RNA, 19 nt, Homo sapiens
  misc_RNA (1)...(19): siRNA sense strand
gcgaauucacacuggagaa

SEQ ID NO: 2463539 - RNA, 19 nt, Homo sapiens
  misc_RNA (1)...(19): siRNA sense strand
augugauguuggagaacua

SEQ ID NO: 2463540 - RNA, 19 nt, Homo sapiens
  misc_RNA (1)...(19): siRNA sense strand
gaaaauucauaauggggaa

SEQ ID NO: 2463541 - RNA, 19 nt, Homo sapiens
  misc_RNA (1)...(19): siRNA sense strand
gcaagauggagaagcaaca

SEQ ID NO: 2463542 - RNA, 19 nt, Homo sapiens
  misc_RNA (1)...(19): siRNA sense strand
ccaaaggcaagauggagaa

SEQ ID NO: 2463543 - RNA, 19 nt, Homo sapiens
  misc_RNA (1)...(19): siRNA sense strand
gaguccaauuccagggauu

SEQ ID NO: 2463544 - RNA, 19 nt, Homo sapiens
  misc_RNA (1)...(19): siRNA sense strand
cugcauaagagaauucaua

SEQ ID NO: 2463545 - RNA, 19 nt, Homo sapiens
  misc_RNA (1)...(19): siRNA sense strand
cccuaugaauguaaagaau

SEQ ID NO: 2463546 - RNA, 19 nt, Homo sapiens
  misc_RNA (1)...(19): siRNA sense strand
gccaaaggcaagauggaga

SEQ ID NO: 2463547 - RNA, 19 nt, Homo sapiens
  misc_RNA (1)...(19): siRNA sense strand
cccuaugaauguaaggaau

SEQ ID NO: 2463548 - RNA, 19 nt, Homo sapiens
  misc_RNA (1)...(19): siRNA sense strand
auguaaggaauguggaaaa

SEQ ID NO: 2463549 - RNA, 19 nt, Homo sapiens
  misc_RNA (1)...(19): siRNA sense strand
cccuaugaauguaaggaau

SEQ ID NO: 2463550 - RNA, 19 nt, Homo sapiens
  misc_RNA (1)...(19): siRNA sense strand
auguaaggaauguggaaaa

SEQ ID NO: 2463551 - RNA, 19 nt, Homo sapiens
  misc_RNA (1)...(19): siRNA sense strand
cccuaugaauguaaggaau

SEQ ID NO: 2463552 - RNA, 19 nt, Homo sapiens
  misc_RNA (1)...(19): siRNA sense strand
cuucaaggugugcaaguaa

SEQ ID NO: 2463553 - RNA, 19 nt, Homo sapiens
  misc_RNA (1)...(19): siRNA sense strand
aggcaagggaugaucauau

SEQ ID NO: 2463554 - RNA, 19 nt, Homo sapiens
  misc_RNA (1)...(19): siRNA sense strand
gaauauaaggaauguggga

SEQ ID NO: 2463555 - RNA, 19 nt, Homo sapiens
  misc_RNA (1)...(19): siRNA sense strand
gggaaaugagugacagacu

SEQ ID NO: 2463556 - RNA, 19 nt, Homo sapiens
  misc_RNA (1)...(19): siRNA sense strand
gcucuaugaauguaaagaa

SEQ ID NO: 2463557 - RNA, 19 nt, Homo sapiens
  misc_RNA (1)...(19): siRNA sense strand
caauguaaggaauguggaa

SEQ ID NO: 2463558 - RNA, 19 nt, Homo sapiens
  misc_RNA (1)...(19): siRNA sense strand
ucucaggaagagugggaau

SEQ ID NO: 2463559 - RNA, 19 nt, Homo sapiens
  misc_RNA (1)...(19): siRNA sense strand
uggagaagcaacaagaaaa

SEQ ID NO: 2463560 - RNA, 19 nt, Homo sapiens
  misc_RNA (1)...(19): siRNA sense strand
gcucacuacugaugcaaca

SEQ ID NO: 2463561 - RNA, 19 nt, Homo sapiens
  misc_RNA (1)...(19): siRNA sense strand
auggagaagcaacaagaaa

SEQ ID NO: 2463562 - RNA, 19 nt, Homo sapiens
  misc_RNA (1)...(19): siRNA sense strand
ggagaagcaacaagaaaau

SEQ ID NO: 2463563 - RNA, 19 nt, Homo sapiens
  misc_RNA (1)...(19): siRNA sense strand
ggaaugugggauugacuuu

SEQ ID NO: 2463564 - RNA, 19 nt, Homo sapiens
  misc_RNA (1)...(19): siRNA sense strand
auguaaagaaugugggaag

SEQ ID NO: 2463565 - RNA, 19 nt, Homo sapiens
  misc_RNA (1)...(19): siRNA sense strand
cgaauucacacuggagaaa

SEQ ID NO: 2463566 - RNA, 19 nt, Homo sapiens
  misc_RNA (1)...(19): siRNA sense strand
cuaugaaugcagagaaugu

SEQ ID NO: 2463567 - RNA, 19 nt, Homo sapiens
  misc_RNA (1)...(19): siRNA sense strand
aaggcaagauggagaagca

SEQ ID NO: 2463568 - RNA, 19 nt, Homo sapiens
  misc_RNA (1)...(19): siRNA sense strand
uaacucaacaucagagaau

SEQ ID NO: 2463569 - RNA, 19 nt, Homo sapiens
  misc_RNA (1)...(19): siRNA sense strand
ggccuuuagucgugauuca

SEQ ID NO: 2463570 - RNA, 19 nt, Homo sapiens
  misc_RNA (1)...(19): siRNA sense strand
gaauguaagcaaugcggga

SEQ ID NO: 2463571 - RNA, 19 nt, Homo sapiens
  misc_RNA (1)...(19): siRNA sense strand
guguaaugaauguggaaag

SEQ ID NO: 2463572 - RNA, 19 nt, Homo sapiens
  misc_RNA (1)...(19): siRNA sense strand
ggccuuuacucgugguuca

SEQ ID NO: 2463573 - RNA, 19 nt, Homo sapiens
  misc_RNA (1)...(19): siRNA sense strand
cccuaugcauguaaggaau

SEQ ID NO: 2463574 - RNA, 19 nt, Homo sapiens
  misc_RNA (1)...(19): siRNA sense strand
agagauuuguauagagaug

SEQ ID NO: 2463575 - RNA, 19 nt, Homo sapiens
  misc_RNA (1)...(19): siRNA sense strand
ggugaaaagcucuaugaau

SEQ ID NO: 2463576 - RNA, 19 nt, Homo sapiens
  misc_RNA (1)...(19): siRNA sense strand
acaccuaacacaacaucaa

SEQ ID NO: 2463577 - RNA, 19 nt, Homo sapiens
  misc_RNA (1)...(19): siRNA sense strand
ggccuuugcgcguggcuua

SEQ ID NO: 2463578 - RNA, 19 nt, Homo sapiens
  misc_RNA (1)...(19): siRNA sense strand
caaugggaaaugagugaca

SEQ ID NO: 2463579 - RNA, 19 nt, Homo sapiens
  misc_RNA (1)...(19): siRNA sense strand
ucaaagaacccaagagcca

SEQ ID NO: 2463580 - RNA, 19 nt, Homo sapiens
  misc_RNA (1)...(19): siRNA sense strand
gaacagaguuagggagcac

SEQ ID NO: 2463581 - RNA, 19 nt, Homo sapiens
  misc_RNA (1)...(19): siRNA sense strand
cugaaagggaucuggaaau

SEQ ID NO: 2463582 - RNA, 19 nt, Homo sapiens
  misc_RNA (1)...(19): siRNA sense strand
gugaguuggaagaggaaau

SEQ ID NO: 2463583 - RNA, 19 nt, Homo sapiens
  misc_RNA (1)...(19): siRNA sense strand
gaaauagucuugagaggca

SEQ ID NO: 2463584 - RNA, 19 nt, Homo sapiens
  misc_RNA (1)...(19): siRNA sense strand
ugaagagagcccaggacaa

SEQ ID NO: 2463585 - RNA, 19 nt, Homo sapiens
  misc_RNA (1)...(19): siRNA sense strand
uggaagaggaaauggauca

SEQ ID NO: 2463586 - RNA, 19 nt, Homo sapiens
  misc_RNA (1)...(19): siRNA sense strand
cugugaaacaagugccaaa

SEQ ID NO: 2463587 - RNA, 19 nt, Homo sapiens
  misc_RNA (1)...(19): siRNA sense strand
aagaaagcucgaagaacaa

SEQ ID NO: 2463588 - RNA, 19 nt, Homo sapiens
  misc_RNA (1)...(19): siRNA sense strand
aggaaauggaucagaggau

SEQ ID NO: 2463589 - RNA, 19 nt, Homo sapiens
  misc_RNA (1)...(19): siRNA sense strand
accagaaaguuaagaaaga

SEQ ID NO: 2463590 - RNA, 19 nt, Homo sapiens
  misc_RNA (1)...(19): siRNA sense strand
auggaaaaccagaaaguua

SEQ ID NO: 2463591 - RNA, 19 nt, Homo sapiens
  misc_RNA (1)...(19): siRNA sense strand
cuugagaggcaaauugaaa

SEQ ID NO: 2463592 - RNA, 19 nt, Homo sapiens
  misc_RNA (1)...(19): siRNA sense strand
gaucagacuucaaagcaca

SEQ ID NO: 2463593 - RNA, 19 nt, Homo sapiens
  misc_RNA (1)...(19): siRNA sense strand
gagagaucccaaugaguau

SEQ ID NO: 2463594 - RNA, 19 nt, Homo sapiens
  misc_RNA (1)...(19): siRNA sense strand
cagcuaugcaguugaguga

SEQ ID NO: 2463595 - RNA, 19 nt, Homo sapiens
  misc_RNA (1)...(19): siRNA sense strand
ccucauuguggauggagaa

SEQ ID NO: 2463596 - RNA, 19 nt, Homo sapiens
  misc_RNA (1)...(19): siRNA sense strand
acugaaagggaucuggaaa

SEQ ID NO: 2463597 - RNA, 19 nt, Homo sapiens
  misc_RNA (1)...(19): siRNA sense strand
uaacauacgagaaugggua

SEQ ID NO: 2463598 - RNA, 19 nt, Homo sapiens
  misc_RNA (1)...(19): siRNA sense strand
agggcacuuuggagagaaa

SEQ ID NO: 2463599 - RNA, 19 nt, Homo sapiens
  misc_RNA (1)...(19): siRNA sense strand
gguagaugacaacgcuaaa

SEQ ID NO: 2463600 - RNA, 19 nt, Homo sapiens
  misc_RNA (1)...(19): siRNA sense strand
cauuguggauggagaacga

SEQ ID NO: 2463601 - RNA, 19 nt, Homo sapiens
  misc_RNA (1)...(19): siRNA sense strand
cagcuggucaggagagauu

SEQ ID NO: 2463602 - RNA, 19 nt, Homo sapiens
  misc_RNA (1)...(19): siRNA sense strand
cagaaaggcagaugguguu

SEQ ID NO: 2463603 - RNA, 19 nt, Homo sapiens
  misc_RNA (1)...(19): siRNA sense strand
gcaaauugaaauacuccaa

SEQ ID NO: 2463604 - RNA, 19 nt, Homo sapiens
  misc_RNA (1)...(19): siRNA sense strand
agaacauaagacacggaaa

SEQ ID NO: 2463605 - RNA, 19 nt, Homo sapiens
  misc_RNA (1)...(19): siRNA sense strand
aguuauagcaaguucaaca

SEQ ID NO: 2463606 - RNA, 19 nt, Homo sapiens
  misc_RNA (1)...(19): siRNA sense strand
aggugaugcuucagacaca

SEQ ID NO: 2463607 - RNA, 19 nt, Homo sapiens
  misc_RNA (1)...(19): siRNA sense strand
augaagagacauuugguuu

SEQ ID NO: 2463608 - RNA, 19 nt, Homo sapiens
  misc_RNA (1)...(19): siRNA sense strand
uggaaaaccagaaaguuaa

SEQ ID NO: 2463609 - RNA, 19 nt, Homo sapiens
  misc_RNA (1)...(19): siRNA sense strand
cagcauuguuaguucauca

SEQ ID NO: 2463610 - RNA, 19 nt, Homo sapiens
  misc_RNA (1)...(19): siRNA sense strand
ggcauuauucugugaaaca

SEQ ID NO: 2463611 - RNA, 19 nt, Homo sapiens
  misc_RNA (1)...(19): siRNA sense strand
gcaagaaugaauuucgaga

SEQ ID NO: 2463612 - RNA, 19 nt, Homo sapiens
  misc_RNA (1)...(19): siRNA sense strand
guucugcagcucugggaua

SEQ ID NO: 2463613 - RNA, 19 nt, Homo sapiens
  misc_RNA (1)...(19): siRNA sense strand
ucagaaaggcagauggugu

SEQ ID NO: 2463614 - RNA, 19 nt, Homo sapiens
  misc_RNA (1)...(19): siRNA sense strand
cuaacauaguggaggcugu

SEQ ID NO: 2463615 - RNA, 19 nt, Homo sapiens
  misc_RNA (1)...(19): siRNA sense strand
ugguagaugacaacgcuaa

SEQ ID NO: 2463616 - RNA, 19 nt, Homo sapiens
  misc_RNA (1)...(19): siRNA sense strand
uuuuagaagcacagacaaa

SEQ ID NO: 2463617 - RNA, 19 nt, Homo sapiens
  misc_RNA (1)...(19): siRNA sense strand
ugacaguaaugauggccuu

SEQ ID NO: 2463618 - RNA, 19 nt, Homo sapiens
  misc_RNA (1)...(19): siRNA sense strand
gggacgaagccaaguucau

SEQ ID NO: 2463619 - RNA, 19 nt, Homo sapiens
  misc_RNA (1)...(19): siRNA sense strand
gguagauaugauugaggau

SEQ ID NO: 2463620 - RNA, 19 nt, Homo sapiens
  misc_RNA (1)...(19): siRNA sense strand
acgcguaagucaaaaggaa

SEQ ID NO: 2463621 - RNA, 19 nt, Homo sapiens
  misc_RNA (1)...(19): siRNA sense strand
agacuuugcaagaaugaau

SEQ ID NO: 2463622 - RNA, 19 nt, Homo sapiens
  misc_RNA (1)...(19): siRNA sense strand
ggguagauaugauugagga

SEQ ID NO: 2463623 - RNA, 19 nt, Homo sapiens
  misc_RNA (1)...(19): siRNA sense strand
gcucgaagaacaaucaaaa

SEQ ID NO: 2463624 - RNA, 19 nt, Homo sapiens
  misc_RNA (1)...(19): siRNA sense strand
cauacacagaagaucgaaa

SEQ ID NO: 2463625 - RNA, 19 nt, Homo sapiens
  misc_RNA (1)...(19): siRNA sense strand
cccucaaccucuaggcuau

SEQ ID NO: 2463626 - RNA, 19 nt, Homo sapiens
  misc_RNA (1)...(19): siRNA sense strand
augacucagaaguggaaua

SEQ ID NO: 2463627 - RNA, 19 nt, Homo sapiens
  misc_RNA (1)...(19): siRNA sense strand
ggucaggagagauucagaa

SEQ ID NO: 2463628 - RNA, 19 nt, Homo sapiens
  misc_RNA (1)...(19): siRNA sense strand
gcguaagucaaaaggaaga

SEQ ID NO: 2463629 - RNA, 19 nt, Homo sapiens
  misc_RNA (1)...(19): siRNA sense strand
agaaacuggccaugacgua

SEQ ID NO: 2463630 - RNA, 19 nt, Homo sapiens
  misc_RNA (1)...(19): siRNA sense strand
cagaccugguagaugacaa

SEQ ID NO: 2463631 - RNA, 19 nt, Homo sapiens
  misc_RNA (1)...(19): siRNA sense strand
gagugaguuggaagaggaa

SEQ ID NO: 2463632 - RNA, 19 nt, Homo sapiens
  misc_RNA (1)...(19): siRNA sense strand
gaacaaucaaaacgcguaa

SEQ ID NO: 2463633 - RNA, 19 nt, Homo sapiens
  misc_RNA (1)...(19): siRNA sense strand
ucugaauacugaaagggau

SEQ ID NO: 2463634 - RNA, 19 nt, Homo sapiens
  misc_RNA (1)...(19): siRNA sense strand
uggaaauaauccgagcaua

SEQ ID NO: 2463635 - RNA, 19 nt, Homo sapiens
  misc_RNA (1)...(19): siRNA sense strand
ggaugcagcccaugagacu

SEQ ID NO: 2463636 - RNA, 19 nt, Homo sapiens
  misc_RNA (1)...(19): siRNA sense strand
ugacaaggaugacagcaga

SEQ ID NO: 2463637 - RNA, 19 nt, Homo sapiens
  misc_RNA (1)...(19): siRNA sense strand
aguaaaugguccaaggcaa

SEQ ID NO: 2463638 - RNA, 19 nt, Homo sapiens
  misc_RNA (1)...(19): siRNA sense strand
agaagugaauguugcggaa

SEQ ID NO: 2463639 - RNA, 19 nt, Homo sapiens
  misc_RNA (1)...(19): siRNA sense strand
aguucaagaagaauggaaa

SEQ ID NO: 2463640 - RNA, 19 nt, Homo sapiens
  misc_RNA (1)...(19): siRNA sense strand
agaacaaacuucagcagga

SEQ ID NO: 2463641 - RNA, 19 nt, Homo sapiens
  misc_RNA (1)...(19): siRNA sense strand
aauacuugguacaggagaa

SEQ ID NO: 2463642 - RNA, 19 nt, Homo sapiens
  misc_RNA (1)...(19): siRNA sense strand
agaaguuugcugugaggaa

SEQ ID NO: 2463643 - RNA, 19 nt, Homo sapiens
  misc_RNA (1)...(19): siRNA sense strand
ggauguaguagcaacgaau

SEQ ID NO: 2463644 - RNA, 19 nt, Homo sapiens
  misc_RNA (1)...(19): siRNA sense strand
gggaaauugacaaggccau

SEQ ID NO: 2463645 - RNA, 19 nt, Homo sapiens
  misc_RNA (1)...(19): siRNA sense strand
guacaggagaagugaaugu

SEQ ID NO: 2463646 - RNA, 19 nt, Homo sapiens
  misc_RNA (1)...(19): siRNA sense strand
ccuagaaacugcaaggaac

SEQ ID NO: 2463647 - RNA, 19 nt, Homo sapiens
  misc_RNA (1)...(19): siRNA sense strand
cuagaaacugcaaggaaca

SEQ ID NO: 2463648 - RNA, 19 nt, Homo sapiens
  misc_RNA (1)...(19): siRNA sense strand
aggaaaugcaugcugaaau

SEQ ID NO: 2463649 - RNA, 19 nt, Homo sapiens
  misc_RNA (1)...(19): siRNA sense strand
gagcaaaagaaaagaccuu

SEQ ID NO: 2463650 - RNA, 19 nt, Homo sapiens
  misc_RNA (1)...(19): siRNA sense strand
cgaagaaugugcuguggca

SEQ ID NO: 2463651 - RNA, 19 nt, Homo sapiens
  misc_RNA (1)...(19): siRNA sense strand
cuuaaaggauguugccuca

SEQ ID NO: 2463652 - RNA, 19 nt, Homo sapiens
  misc_RNA (1)...(19): siRNA sense strand
ccuaauacuugguacagga

SEQ ID NO: 2463653 - RNA, 19 nt, Homo sapiens
  misc_RNA (1)...(19): siRNA sense strand
ugguacaggagaagugaau

SEQ ID NO: 2463654 - RNA, 19 nt, Homo sapiens
  misc_RNA (1)...(19): siRNA sense strand
ggacucaaaauuagaacaa

SEQ ID NO: 2463655 - RNA, 19 nt, Homo sapiens
  misc_RNA (1)...(19): siRNA sense strand
uagaguugcugaaagggaa

SEQ ID NO: 2463656 - RNA, 19 nt, Homo sapiens
  misc_RNA (1)...(19): siRNA sense strand
cgaaugagaaugugguaac

SEQ ID NO: 2463657 - RNA, 19 nt, Homo sapiens
  misc_RNA (1)...(19): siRNA sense strand
caauagugagcaaaagaaa

SEQ ID NO: 2463658 - RNA, 19 nt, Homo sapiens
  misc_RNA (1)...(19): siRNA sense strand
cgagugucuccuacagaaa

SEQ ID NO: 2463659 - RNA, 19 nt, Homo sapiens
  misc_RNA (1)...(19): siRNA sense strand
ggaauagggaguugggccu

SEQ ID NO: 2463660 - RNA, 19 nt, Homo sapiens
  misc_RNA (1)...(19): siRNA sense strand
ccgaauagaguugcugaaa

SEQ ID NO: 2463661 - RNA, 19 nt, Homo sapiens
  misc_RNA (1)...(19): siRNA sense strand
ccuucgagcaacaggacau

SEQ ID NO: 2463662 - RNA, 19 nt, Homo sapiens
  misc_RNA (1)...(19): siRNA sense strand
guaaaugguccaaggcaac

SEQ ID NO: 2463663 - RNA, 19 nt, Homo sapiens
  misc_RNA (1)...(19): siRNA sense strand
cugcaaggaacaacuacaa

SEQ ID NO: 2463664 - RNA, 19 nt, Homo sapiens
  misc_RNA (1)...(19): siRNA sense strand
aggaauucuucuaugaguu

SEQ ID NO: 2463665 - RNA, 19 nt, Homo sapiens
  misc_RNA (1)...(19): siRNA sense strand
ggaaggagcaugaggucug

SEQ ID NO: 2463666 - RNA, 19 nt, Homo sapiens
  misc_RNA (1)...(19): siRNA sense strand
ucgaagaugccuuggaaac

SEQ ID NO: 2463667 - RNA, 19 nt, Homo sapiens
  misc_RNA (1)...(19): siRNA sense strand
acaaacuucagcaggaauu

SEQ ID NO: 2463668 - RNA, 19 nt, Homo sapiens
  misc_RNA (1)...(19): siRNA sense strand
aguagcaacgaaugagaau

SEQ ID NO: 2463669 - RNA, 19 nt, Homo sapiens
  misc_RNA (1)...(19): siRNA sense strand
augaaggacgcuuuacaaa

SEQ ID NO: 2463670 - RNA, 19 nt, Homo sapiens
  misc_RNA (1)...(19): siRNA sense strand
gugcuguggcauugaacuu

SEQ ID NO: 2463671 - RNA, 19 nt, Homo sapiens
  misc_RNA (1)...(19): siRNA sense strand
uguggaaagugaaaagcua

SEQ ID NO: 2463672 - RNA, 19 nt, Homo sapiens
  misc_RNA (1)...(19): siRNA sense strand
cguuugugcaggaugaaaa

SEQ ID NO: 2463673 - RNA, 19 nt, Homo sapiens
  misc_RNA (1)...(19): siRNA sense strand
guucuugaaagcagcaauu

SEQ ID NO: 2463674 - RNA, 19 nt, Homo sapiens
  misc_RNA (1)...(19): siRNA sense strand
acgaaugagaaugugguaa

SEQ ID NO: 2463675 - RNA, 19 nt, Homo sapiens
  misc_RNA (1)...(19): siRNA sense strand
ugagaaugugguaacuuua

SEQ ID NO: 2463676 - RNA, 19 nt, Homo sapiens
  misc_RNA (1)...(19): siRNA sense strand
uguccugaccuucgagcaa

SEQ ID NO: 2463677 - RNA, 19 nt, Homo sapiens
  misc_RNA (1)...(19): siRNA sense strand
ugaucagguuagugaaucu

SEQ ID NO: 2463678 - RNA, 19 nt, Homo sapiens
  misc_RNA (1)...(19): siRNA sense strand
agauaaacaucauagguga

SEQ ID NO: 2463679 - RNA, 19 nt, Homo sapiens
  misc_RNA (1)...(19): siRNA sense strand
cagcagugcaagagaacau

SEQ ID NO: 2463680 - RNA, 19 nt, Homo sapiens
  misc_RNA (1)...(19): siRNA sense strand
ccauaagagagcucgaaaa

SEQ ID NO: 2463681 - RNA, 19 nt, Homo sapiens
  misc_RNA (1)...(19): siRNA sense strand
ugagaauugaggcgcauaa

SEQ ID NO: 2463682 - RNA, 19 nt, Homo sapiens
  misc_RNA (1)...(19): siRNA sense strand
ccuaaaagacugcaagaca

SEQ ID NO: 2463683 - RNA, 19 nt, Homo sapiens
  misc_RNA (1)...(19): siRNA sense strand
ccuacauggucgaucacau

SEQ ID NO: 2463684 - RNA, 19 nt, Homo sapiens
  misc_RNA (1)...(19): siRNA sense strand
auaacaaagaagggaagua

SEQ ID NO: 2463685 - RNA, 19 nt, Homo sapiens
  misc_RNA (1)...(19): siRNA sense strand
ucaaagucaaccagcggua

SEQ ID NO: 2463686 - RNA, 19 nt, Homo sapiens
  misc_RNA (1)...(19): siRNA sense strand
gugaacaagaaugugaaua

SEQ ID NO: 2463687 - RNA, 19 nt, Homo sapiens
  misc_RNA (1)...(19): siRNA sense strand
ggugaacaagaaugugaau

SEQ ID NO: 2463688 - RNA, 19 nt, Homo sapiens
  misc_RNA (1)...(19): siRNA sense strand
gccauaagagagcucgaaa

SEQ ID NO: 2463689 - RNA, 19 nt, Homo sapiens
  misc_RNA (1)...(19): siRNA sense strand
agaaaagcuuacaggcuca

SEQ ID NO: 2463690 - RNA, 19 nt, Homo sapiens
  misc_RNA (1)...(19): siRNA sense strand
aaacaaagaaggaagcgaa

SEQ ID NO: 2463691 - RNA, 19 nt, Homo sapiens
  misc_RNA (1)...(19): siRNA sense strand
agcaagaggacgugaggaa

SEQ ID NO: 2463692 - RNA, 19 nt, Homo sapiens
  misc_RNA (1)...(19): siRNA sense strand
agugaauguuugagacaca

SEQ ID NO: 2463693 - RNA, 19 nt, Homo sapiens
  misc_RNA (1)...(19): siRNA sense strand
acuugcaaucugagggaaa

SEQ ID NO: 2463694 - RNA, 19 nt, Homo sapiens
  misc_RNA (1)...(19): siRNA sense strand
ucacauaggaggaaagcga

SEQ ID NO: 2463695 - RNA, 19 nt, Homo sapiens
  misc_RNA (1)...(19): siRNA sense strand
cugcaagaucuuagugaga

SEQ ID NO: 2463696 - RNA, 19 nt, Homo sapiens
  misc_RNA (1)...(19): siRNA sense strand
ugaaaaugcucauggccaa

SEQ ID NO: 2463697 - RNA, 19 nt, Homo sapiens
  misc_RNA (1)...(19): siRNA sense strand
aacaaagaaggaagcgaaa

SEQ ID NO: 2463698 - RNA, 19 nt, Homo sapiens
  misc_RNA (1)...(19): siRNA sense strand
gaagaaacaaagaaggaag

SEQ ID NO: 2463699 - RNA, 19 nt, Homo sapiens
  misc_RNA (1)...(19): siRNA sense strand
ucucuaaagaugcggguca

SEQ ID NO: 2463700 - RNA, 19 nt, Homo sapiens
  misc_RNA (1)...(19): siRNA sense strand
uugaagaaacaaagaagga

SEQ ID NO: 2463701 - RNA, 19 nt, Homo sapiens
  misc_RNA (1)...(19): siRNA sense strand
cauuggaagcuuugcugaa

SEQ ID NO: 2463702 - RNA, 19 nt, Homo sapiens
  misc_RNA (1)...(19): siRNA sense strand
aaagcgaaggggaggaaua

SEQ ID NO: 2463703 - RNA, 19 nt, Homo sapiens
  misc_RNA (1)...(19): siRNA sense strand
acagaaagcagcaagagga

SEQ ID NO: 2463704 - RNA, 19 nt, Homo sapiens
  misc_RNA (1)...(19): siRNA sense strand
agagugaauguuugagaca

SEQ ID NO: 2463705 - RNA, 19 nt, Homo sapiens
  misc_RNA (1)...(19): siRNA sense strand
gggaggaauaggagaaguc

SEQ ID NO: 2463706 - RNA, 19 nt, Homo sapiens
  misc_RNA (1)...(19): siRNA sense strand
acuuaugaguuggcggcaa

SEQ ID NO: 2463707 - RNA, 19 nt, Homo sapiens
  misc_RNA (1)...(19): siRNA sense strand
agaaggaagcgaaagagga

SEQ ID NO: 2463708 - RNA, 19 nt, Homo sapiens
  misc_RNA (1)...(19): siRNA sense strand
aggaagcgaaagaggaagu

SEQ ID NO: 2463709 - RNA, 19 nt, Homo sapiens
  misc_RNA (1)...(19): siRNA sense strand
cugaaauguuacagaaagc

SEQ ID NO: 2463710 - RNA, 19 nt, Homo sapiens
  misc_RNA (1)...(19): siRNA sense strand
gaaagcagcaagaggacgu

SEQ ID NO: 2463711 - RNA, 19 nt, Homo sapiens
  misc_RNA (1)...(19): siRNA sense strand
aggaacauggugacgagua

SEQ ID NO: 2463712 - RNA, 19 nt, Homo sapiens
  misc_RNA (1)...(19): siRNA sense strand
auuuacaaaggcaggacaa

SEQ ID NO: 2463713 - RNA, 19 nt, Homo sapiens
  misc_RNA (1)...(19): siRNA sense strand
guuacagaaagcagcaaga

SEQ ID NO: 2463714 - RNA, 19 nt, Homo sapiens
  misc_RNA (1)...(19): siRNA sense strand
gaaugagcguggagagcga

SEQ ID NO: 2463715 - RNA, 19 nt, Homo sapiens
  misc_RNA (1)...(19): siRNA sense strand
cuuggcaacuggaggucaa

SEQ ID NO: 2463716 - RNA, 19 nt, Homo sapiens
  misc_RNA (1)...(19): siRNA sense strand
ccaaaauuaugggaggaaa

SEQ ID NO: 2463717 - RNA, 19 nt, Homo sapiens
  misc_RNA (1)...(19): siRNA sense strand
aagaggaggacaaagaaaa

SEQ ID NO: 2463718 - RNA, 19 nt, Homo sapiens
  misc_RNA (1)...(19): siRNA sense strand
gguuaaugguaucgauccu

SEQ ID NO: 2463719 - RNA, 19 nt, Homo sapiens
  misc_RNA (1)...(19): siRNA sense strand
cguccaucacaaaggucaa

SEQ ID NO: 2463720 - RNA, 19 nt, Homo sapiens
  misc_RNA (1)...(19): siRNA sense strand
ugaccagcgcagugcagaa

SEQ ID NO: 2463721 - RNA, 19 nt, Homo sapiens
  misc_RNA (1)...(19): siRNA sense strand
gugacaaacaagaaaccca

SEQ ID NO: 2463722 - RNA, 19 nt, Homo sapiens
  misc_RNA (1)...(19): siRNA sense strand
gcgauuaggccgagcagag

SEQ ID NO: 2463723 - RNA, 19 nt, Homo sapiens
  misc_RNA (1)...(19): siRNA sense strand
aacuggaggucaaggcgaa

SEQ ID NO: 2463724 - RNA, 19 nt, Homo sapiens
  misc_RNA (1)...(19): siRNA sense strand
augcauugguucaggacuu

SEQ ID NO: 2463725 - RNA, 19 nt, Homo sapiens
  misc_RNA (1)...(19): siRNA sense strand
cagaggagaucguuggguu

SEQ ID NO: 2463726 - RNA, 19 nt, Homo sapiens
  misc_RNA (1)...(19): siRNA sense strand
cauggucauccuagagaaa

SEQ ID NO: 2463727 - RNA, 19 nt, Homo sapiens
  misc_RNA (1)...(19): siRNA sense strand
aggaaauaacaguacaaca

SEQ ID NO: 2463728 - RNA, 19 nt, Homo sapiens
  misc_RNA (1)...(19): siRNA sense strand
acaggaaauaacaguacaa

SEQ ID NO: 2463729 - RNA, 19 nt, Homo sapiens
  misc_RNA (1)...(19): siRNA sense strand
aacaauuguaucagcguua

SEQ ID NO: 2463730 - RNA, 19 nt, Homo sapiens
  misc_RNA (1)...(19): siRNA sense strand
guaauaaaauugacgcuga

SEQ ID NO: 2463731 - RNA, 19 nt, Homo sapiens
  misc_RNA (1)...(19): siRNA sense strand
acucaagcucaacaggaaa

SEQ ID NO: 2463732 - RNA, 19 nt, Homo sapiens
  misc_RNA (1)...(19): siRNA sense strand
agaggagaucguuggguuu

SEQ ID NO: 2463733 - RNA, 19 nt, Homo sapiens
  misc_RNA (1)...(19): siRNA sense strand
auggaaacaacuacagaau

SEQ ID NO: 2463734 - RNA, 19 nt, Homo sapiens
  misc_RNA (1)...(19): siRNA sense strand
ucgaaucagagcagauaau

SEQ ID NO: 2463735 - RNA, 19 nt, Homo sapiens
  misc_RNA (1)...(19): siRNA sense strand
cuuagaaaggagcagagua

SEQ ID NO: 2463736 - RNA, 19 nt, Homo sapiens
  misc_RNA (1)...(19): siRNA sense strand
auuucagagaccaguaaua

SEQ ID NO: 2463737 - RNA, 19 nt, Homo sapiens
  misc_RNA (1)...(19): siRNA sense strand
gagaaaagugaauuugcaa

SEQ ID NO: 2463738 - RNA, 19 nt, Homo sapiens
  misc_RNA (1)...(19): siRNA sense strand
cagucgaaucagagcagau

SEQ ID NO: 2463739 - RNA, 19 nt, Homo sapiens
  misc_RNA (1)...(19): siRNA sense strand
ccuagagaaaagugaauuu

SEQ ID NO: 2463740 - RNA, 19 nt, Homo sapiens
  misc_RNA (1)...(19): siRNA sense strand
acuugaugguggugaacaa

SEQ ID NO: 2463741 - RNA, 19 nt, Homo sapiens
  misc_RNA (1)...(19): siRNA sense strand
ggauccuggugguggucua

SEQ ID NO: 2463742 - RNA, 19 nt, Homo sapiens
  misc_RNA (1)...(19): siRNA sense strand
augaagaagaccuugaaau

SEQ ID NO: 2463743 - RNA, 19 nt, Homo sapiens
  misc_RNA (1)...(19): siRNA sense strand
gggugaagccccagaacuu

SEQ ID NO: 2463744 - RNA, 19 nt, Homo sapiens
  misc_RNA (1)...(19): siRNA sense strand
ugugaugauuccugcguau

SEQ ID NO: 2463745 - RNA, 19 nt, Homo sapiens
  misc_RNA (1)...(19): siRNA sense strand
agguguuucuggaugcaua

SEQ ID NO: 2463746 - RNA, 19 nt, Homo sapiens
  misc_RNA (1)...(19): siRNA sense strand
gugaacaacuggcaggugu

SEQ ID NO: 2463747 - RNA, 19 nt, Homo sapiens
  misc_RNA (1)...(19): siRNA sense strand
uguuggagaugcugcucaa

SEQ ID NO: 2463748 - RNA, 19 nt, Homo sapiens
  misc_RNA (1)...(19): siRNA sense strand
cagcuggaguacugggcca

SEQ ID NO: 2463749 - RNA, 19 nt, Homo sapiens
  misc_RNA (1)...(19): siRNA sense strand
caggacagggagaggcuga

SEQ ID NO: 2463750 - RNA, 19 nt, Homo sapiens
  misc_RNA (1)...(19): siRNA sense strand
ggaagcaggaugaugggca

SEQ ID NO: 2463751 - RNA, 19 nt, Homo sapiens
  misc_RNA (1)...(19): siRNA sense strand
cuucauuacaagaggaauu

SEQ ID NO: 2463752 - RNA, 19 nt, Homo sapiens
  misc_RNA (1)...(19): siRNA sense strand
cagcaagagagaagaacau

SEQ ID NO: 2463753 - RNA, 19 nt, Homo sapiens
  misc_RNA (1)...(19): siRNA sense strand
aguggaagacagugaacaa

SEQ ID NO: 2463754 - RNA, 19 nt, Homo sapiens
  misc_RNA (1)...(19): siRNA sense strand
aggagguacauaagauaaa

SEQ ID NO: 2463755 - RNA, 19 nt, Homo sapiens
  misc_RNA (1)...(19): siRNA sense strand
agagagaagaacauccaaa

SEQ ID NO: 2463756 - RNA, 19 nt, Homo sapiens
  misc_RNA (1)...(19): siRNA sense strand
aggcagcaagagagaagaa

SEQ ID NO: 2463757 - RNA, 19 nt, Homo sapiens
  misc_RNA (1)...(19): siRNA sense strand
cuuagaugacagauggcaa

SEQ ID NO: 2463758 - RNA, 19 nt, Homo sapiens
  misc_RNA (1)...(19): siRNA sense strand
uguuagauacacaagacaa

SEQ ID NO: 2463759 - RNA, 19 nt, Homo sapiens
  misc_RNA (1)...(19): siRNA sense strand
ucucgauguaguagacaau

SEQ ID NO: 2463760 - RNA, 19 nt, Homo sapiens
  misc_RNA (1)...(19): siRNA sense strand
gauuaagagaagagagaaa

SEQ ID NO: 2463761 - RNA, 19 nt, Homo sapiens
  misc_RNA (1)...(19): siRNA sense strand
ccuuagaaguuguggagaa

SEQ ID NO: 2463762 - RNA, 19 nt, Homo sapiens
  misc_RNA (1)...(19): siRNA sense strand
ucggagaagaacagagaaa

SEQ ID NO: 2463763 - RNA, 19 nt, Homo sapiens
  misc_RNA (1)...(19): siRNA sense strand
agaauuuaguagagccaua

SEQ ID NO: 2463764 - RNA, 19 nt, Homo sapiens
  misc_RNA (1)...(19): siRNA sense strand
guauaugacuacuggguga

SEQ ID NO: 2463765 - RNA, 19 nt, Homo sapiens
  misc_RNA (1)...(19): siRNA sense strand
ucgaaagaaucguaagaau

SEQ ID NO: 2463766 - RNA, 19 nt, Homo sapiens
  misc_RNA (1)...(19): siRNA sense strand
agacauugccugugaucaa

SEQ ID NO: 2463767 - RNA, 19 nt, Homo sapiens
  misc_RNA (1)...(19): siRNA sense strand
cagcauagcaagagagaac

SEQ ID NO: 2463768 - RNA, 19 nt, Homo sapiens
  misc_RNA (1)...(19): siRNA sense strand
cuuagaaguuguggagaaa

SEQ ID NO: 2463769 - RNA, 19 nt, Homo sapiens
  misc_RNA (1)...(19): siRNA sense strand
ggagaagaacagagaaaau

SEQ ID NO: 2463770 - RNA, 19 nt, Homo sapiens
  misc_RNA (1)...(19): siRNA sense strand
ccgaauauccacagaacau

SEQ ID NO: 2463771 - RNA, 19 nt, Homo sapiens
  misc_RNA (1)...(19): siRNA sense strand
cuuaacagaaagauggaaa

SEQ ID NO: 2463772 - RNA, 19 nt, Homo sapiens
  misc_RNA (1)...(19): siRNA sense strand
aaugcaaacucgaaagaau

SEQ ID NO: 2463773 - RNA, 19 nt, Homo sapiens
  misc_RNA (1)...(19): siRNA sense strand
gaucaauaagagugacauu

SEQ ID NO: 2463774 - RNA, 19 nt, Homo sapiens
  misc_RNA (1)...(19): siRNA sense strand
auucagaagaugagacuuu

SEQ ID NO: 2463775 - RNA, 19 nt, Homo sapiens
  misc_RNA (1)...(19): siRNA sense strand
aaguugagguauaggcauu

SEQ ID NO: 2463776 - RNA, 19 nt, Homo sapiens
  misc_RNA (1)...(19): siRNA sense strand
gcgaauuggcagaggugga

SEQ ID NO: 2463777 - RNA, 19 nt, Homo sapiens
  misc_RNA (1)...(19): siRNA sense strand
uguacaaaggagaguuuaa

SEQ ID NO: 2463778 - RNA, 19 nt, Homo sapiens
  misc_RNA (1)...(19): siRNA sense strand
aaagauaccauuugggaga

SEQ ID NO: 2463779 - RNA, 19 nt, Homo sapiens
  misc_RNA (1)...(19): siRNA sense strand
uggaaaugauuaagagaag

SEQ ID NO: 2463780 - RNA, 19 nt, Homo sapiens
  misc_RNA (1)...(19): siRNA sense strand
augauuaagagaagagaga

SEQ ID NO: 2463781 - RNA, 19 nt, Homo sapiens
  misc_RNA (1)...(19): siRNA sense strand
caaagaagccuaaagcaga

SEQ ID NO: 2463782 - RNA, 19 nt, Homo sapiens
  misc_RNA (1)...(19): siRNA sense strand
augacuacugggugagaaa

SEQ ID NO: 2463783 - RNA, 19 nt, Homo sapiens
  misc_RNA (1)...(19): siRNA sense strand
agacuaugguggugaaauc

SEQ ID NO: 2463784 - RNA, 19 nt, Homo sapiens
  misc_RNA (1)...(19): siRNA sense strand
ugcuaaacgaagaugauua

SEQ ID NO: 2463785 - RNA, 19 nt, Homo sapiens
  misc_RNA (1)...(19): siRNA sense strand
gagaagagagaaaacaaaa

SEQ ID NO: 2463786 - RNA, 19 nt, Homo sapiens
  misc_RNA (1)...(19): siRNA sense strand
caucauuuacagcgagcaa

SEQ ID NO: 2463787 - RNA, 19 nt, Homo sapiens
  misc_RNA (1)...(19): siRNA sense strand
gagaaaacaaaacgagaau

SEQ ID NO: 2463788 - RNA, 19 nt, Homo sapiens
  misc_RNA (1)...(19): siRNA sense strand
agaugaauuuccacaggua

SEQ ID NO: 2463789 - RNA, 19 nt, Homo sapiens
  misc_RNA (1)...(19): siRNA sense strand
caacaguagcuauggaagu

SEQ ID NO: 2463790 - RNA, 19 nt, Homo sapiens
  misc_RNA (1)...(19): siRNA sense strand
gggagacuaugguggugaa

SEQ ID NO: 2463791 - RNA, 19 nt, Homo sapiens
  misc_RNA (1)...(19): siRNA sense strand
cuacuaaauuuacaggaca

SEQ ID NO: 2463792 - RNA, 19 nt, Homo sapiens
  misc_RNA (1)...(19): siRNA sense strand
ggaaauuaagccuuugcaa

SEQ ID NO: 2463793 - RNA, 19 nt, Homo sapiens
  misc_RNA (1)...(19): siRNA sense strand
ggauuugcaaggaggcgaa

SEQ ID NO: 2463794 - RNA, 19 nt, Homo sapiens
  misc_RNA (1)...(19): siRNA sense strand
cagugauagugaagaaugu

SEQ ID NO: 2463795 - RNA, 19 nt, Homo sapiens
  misc_RNA (1)...(19): siRNA sense strand
gcacagggcucaagcaccu

SEQ ID NO: 2463796 - RNA, 19 nt, Homo sapiens
  misc_RNA (1)...(19): siRNA sense strand
gugagguagccaaggaaca

SEQ ID NO: 2463797 - RNA, 19 nt, Homo sapiens
  misc_RNA (1)...(19): siRNA sense strand
aaauggaauagcagagaca

SEQ ID NO: 2463798 - RNA, 19 nt, Homo sapiens
  misc_RNA (1)...(19): siRNA sense strand
ccaaagaagccuaaagcag

SEQ ID NO: 2463799 - RNA, 19 nt, Homo sapiens
  misc_RNA (1)...(19): siRNA sense strand
aagaauguaccucaagaaa

SEQ ID NO: 2463800 - RNA, 19 nt, Homo sapiens
  misc_RNA (1)...(19): siRNA sense strand
guugaaacugagacgagaa

SEQ ID NO: 2463801 - RNA, 19 nt, Homo sapiens
  misc_RNA (1)...(19): siRNA sense strand
cagucaaugugcauaucaa

SEQ ID NO: 2463802 - RNA, 19 nt, Homo sapiens
  misc_RNA (1)...(19): siRNA sense strand
cagaaagauugggcuuaaa

SEQ ID NO: 2463803 - RNA, 19 nt, Homo sapiens
  misc_RNA (1)...(19): siRNA sense strand
acaaaggagaguuuaaaca

SEQ ID NO: 2463804 - RNA, 19 nt, Homo sapiens
  misc_RNA (1)...(19): siRNA sense strand
cgagaauuuaguagagcca

SEQ ID NO: 2463805 - RNA, 19 nt, Homo sapiens
  misc_RNA (1)...(19): siRNA sense strand
ggaacaucauuuacagcga

SEQ ID NO: 2463806 - RNA, 19 nt, Homo sapiens
  misc_RNA (1)...(19): siRNA sense strand
ucacagaagagcaguuuca

SEQ ID NO: 2463807 - RNA, 19 nt, Homo sapiens
  misc_RNA (1)...(19): siRNA sense strand
aggcagagagcaacgucaa

SEQ ID NO: 2463808 - RNA, 19 nt, Homo sapiens
  misc_RNA (1)...(19): siRNA sense strand
aggaggaggaaucggaaca

SEQ ID NO: 2463809 - RNA, 19 nt, Homo sapiens
  misc_RNA (1)...(19): siRNA sense strand
caagaagauguauaggauu

SEQ ID NO: 2463810 - RNA, 19 nt, Homo sapiens
  misc_RNA (1)...(19): siRNA sense strand
uccaguaaacauugugaaa

SEQ ID NO: 2463811 - RNA, 19 nt, Homo sapiens
  misc_RNA (1)...(19): siRNA sense strand
caguauggacagagugcca

SEQ ID NO: 2463812 - RNA, 19 nt, Homo sapiens
  misc_RNA (1)...(19): siRNA sense strand
caucagcagcauagcaaga

SEQ ID NO: 2463813 - RNA, 19 nt, Homo sapiens
  misc_RNA (1)...(19): siRNA sense strand
ccagauuaugauauggauu

SEQ ID NO: 2463814 - RNA, 19 nt, Homo sapiens
  misc_RNA (1)...(19): siRNA sense strand
agaagaaguacccaaagaa

SEQ ID NO: 2463815 - RNA, 19 nt, Homo sapiens
  misc_RNA (1)...(19): siRNA sense strand
guauggacagagugccaaa

SEQ ID NO: 2463816 - RNA, 19 nt, Homo sapiens
  misc_RNA (1)...(19): siRNA sense strand
agagaaaacaaaacgagaa

SEQ ID NO: 2463817 - RNA, 19 nt, Homo sapiens
  misc_RNA (1)...(19): siRNA sense strand
cagggcagacugugaacaa

SEQ ID NO: 2463818 - RNA, 19 nt, Homo sapiens
  misc_RNA (1)...(19): siRNA sense strand
agacacuucccaugaacaa

SEQ ID NO: 2463819 - RNA, 19 nt, Homo sapiens
  misc_RNA (1)...(19): siRNA sense strand
cgaggagaugaacgagaaa

SEQ ID NO: 2463820 - RNA, 19 nt, Homo sapiens
  misc_RNA (1)...(19): siRNA sense strand
gccaggagugagagagaga

SEQ ID NO: 2463821 - RNA, 19 nt, Homo sapiens
  misc_RNA (1)...(19): siRNA sense strand
gcugcaacgaggagggcuu

SEQ ID NO: 2463822 - RNA, 19 nt, Homo sapiens
  misc_RNA (1)...(19): siRNA sense strand
aguauuggccggaggagca

SEQ ID NO: 2463823 - RNA, 19 nt, Homo sapiens
  misc_RNA (1)...(19): siRNA sense strand
acgaggagggcuuuggcua

SEQ ID NO: 2463824 - RNA, 19 nt, Homo sapiens
  misc_RNA (1)...(19): siRNA sense strand
cugaagggcuccaggacuc

SEQ ID NO: 2463825 - RNA, 19 nt, Homo sapiens
  misc_RNA (1)...(19): siRNA sense strand
ccgucaaguccaugggucu

SEQ ID NO: 2463826 - RNA, 19 nt, Homo sapiens
  misc_RNA (1)...(19): siRNA sense strand
aggcacuggacgaggcuga

SEQ ID NO: 2463827 - RNA, 19 nt, Homo sapiens
  misc_RNA (1)...(19): siRNA sense strand
guuccuacaucaaugccaa

SEQ ID NO: 2463828 - RNA, 19 nt, Homo sapiens
  misc_RNA (1)...(19): siRNA sense strand
ugauggaggcacuggacga

SEQ ID NO: 2463829 - RNA, 19 nt, Homo sapiens
  misc_RNA (1)...(19): siRNA sense strand
aguggauggaggagaagau

SEQ ID NO: 2463830 - RNA, 19 nt, Homo sapiens
  misc_RNA (1)...(19): siRNA sense strand
gggaaugagccuuuggaga

SEQ ID NO: 2463831 - RNA, 19 nt, Homo sapiens
  misc_RNA (1)...(19): siRNA sense strand
ccacugagucggugcagga

SEQ ID NO: 2463832 - RNA, 19 nt, Homo sapiens
  misc_RNA (1)...(19): siRNA sense strand
aggaagaagaggaggagga

SEQ ID NO: 2463833 - RNA, 19 nt, Homo sapiens
  misc_RNA (1)...(19): siRNA sense strand
aagaagaggaggaggagga

SEQ ID NO: 2463834 - RNA, 19 nt, Homo sapiens
  misc_RNA (1)...(19): siRNA sense strand
aggaggaggaggaggauga

SEQ ID NO: 2463835 - RNA, 19 nt, Homo sapiens
  misc_RNA (1)...(19): siRNA sense strand
ccaaguaucuacaggcaga

SEQ ID NO: 2463836 - RNA, 19 nt, Homo sapiens
  misc_RNA (1)...(19): siRNA sense strand
gggcauggcagaagaggca

SEQ ID NO: 2463837 - RNA, 19 nt, Homo sapiens
  misc_RNA (1)...(19): siRNA sense strand
ggaugaagaugaagaggag

SEQ ID NO: 2463838 - RNA, 19 nt, Homo sapiens
  misc_RNA (1)...(19): siRNA sense strand
ugaugaacauguauggaga

SEQ ID NO: 2463839 - RNA, 19 nt, Homo sapiens
  misc_RNA (1)...(19): siRNA sense strand
cagcaagugaagaggagga

SEQ ID NO: 2463840 - RNA, 19 nt, Homo sapiens
  misc_RNA (1)...(19): siRNA sense strand
aggaggaagaagaggagga

SEQ ID NO: 2463841 - RNA, 19 nt, Homo sapiens
  misc_RNA (1)...(19): siRNA sense strand
aggaggaggaggaugaaga

SEQ ID NO: 2463842 - RNA, 19 nt, Homo sapiens
  misc_RNA (1)...(19): siRNA sense strand
aagaugaagaggaggaagu

SEQ ID NO: 2463843 - RNA, 19 nt, Homo sapiens
  misc_RNA (1)...(19): siRNA sense strand
aagaggaggaggaggagga

SEQ ID NO: 2463844 - RNA, 19 nt, Homo sapiens
  misc_RNA (1)...(19): siRNA sense strand
augaagaugaagaggagga

SEQ ID NO: 2463845 - RNA, 19 nt, Homo sapiens
  misc_RNA (1)...(19): siRNA sense strand
cagaauaaugacagugacu

SEQ ID NO: 2463846 - RNA, 19 nt, Homo sapiens
  misc_RNA (1)...(19): siRNA sense strand
uggaaagguuacuucaaaa

SEQ ID NO: 2463847 - RNA, 19 nt, Homo sapiens
  misc_RNA (1)...(19): siRNA sense strand
ugaccugcguacagagcau

SEQ ID NO: 2463848 - RNA, 19 nt, Homo sapiens
  misc_RNA (1)...(19): siRNA sense strand
aggaugaagaugaagagga

SEQ ID NO: 2463849 - RNA, 19 nt, Homo sapiens
  misc_RNA (1)...(19): siRNA sense strand
aggaggaugaagaugaaga

SEQ ID NO: 2463850 - RNA, 19 nt, Homo sapiens
  misc_RNA (1)...(19): siRNA sense strand
ggguuaugauggggugaaa

SEQ ID NO: 2463851 - RNA, 19 nt, Homo sapiens
  misc_RNA (1)...(19): siRNA sense strand
gaagauggacucaggugga

SEQ ID NO: 2463852 - RNA, 19 nt, Homo sapiens
  misc_RNA (1)...(19): siRNA sense strand
guagagaagcuggaggaca

SEQ ID NO: 2463853 - RNA, 19 nt, Homo sapiens
  misc_RNA (1)...(19): siRNA sense strand
gcauggcagaagaggcaga

SEQ ID NO: 2463854 - RNA, 19 nt, Homo sapiens
  misc_RNA (1)...(19): siRNA sense strand
agagaggccuggggagaaa

SEQ ID NO: 2463855 - RNA, 19 nt, Homo sapiens
  misc_RNA (1)...(19): siRNA sense strand
agagcaucuuggacgaauu

SEQ ID NO: 2463856 - RNA, 19 nt, Homo sapiens
  misc_RNA (1)...(19): siRNA sense strand
gaacauguauggagaccug

SEQ ID NO: 2463857 - RNA, 19 nt, Homo sapiens
  misc_RNA (1)...(19): siRNA sense strand
aggugaugguggagaggaa

SEQ ID NO: 2463858 - RNA, 19 nt, Homo sapiens
  misc_RNA (1)...(19): siRNA sense strand
gugaagacgggcaaggcaa

SEQ ID NO: 2463859 - RNA, 19 nt, Homo sapiens
  misc_RNA (1)...(19): siRNA sense strand
aagcagagaccuggguaau

SEQ ID NO: 2463860 - RNA, 19 nt, Homo sapiens
  misc_RNA (1)...(19): siRNA sense strand
gugaugguggagaggaaca

SEQ ID NO: 2463861 - RNA, 19 nt, Homo sapiens
  misc_RNA (1)...(19): siRNA sense strand
guggagaggaacagacacu

SEQ ID NO: 2463862 - RNA, 19 nt, Homo sapiens
  misc_RNA (1)...(19): siRNA sense strand
aggcacuggucaaggagaa

SEQ ID NO: 2463863 - RNA, 19 nt, Homo sapiens
  misc_RNA (1)...(19): siRNA sense strand
aggaagacgaggacgaaga

SEQ ID NO: 2463864 - RNA, 19 nt, Homo sapiens
  misc_RNA (1)...(19): siRNA sense strand
augaggaggaggaggaaga

SEQ ID NO: 2463865 - RNA, 19 nt, Homo sapiens
  misc_RNA (1)...(19): siRNA sense strand
aggaggaagacgaggacga

SEQ ID NO: 2463866 - RNA, 19 nt, Homo sapiens
  misc_RNA (1)...(19): siRNA sense strand
cugcagaggcugaagacca

SEQ ID NO: 2463867 - RNA, 19 nt, Homo sapiens
  misc_RNA (1)...(19): siRNA sense strand
aggaugaggaggaggagga

SEQ ID NO: 2463868 - RNA, 19 nt, Homo sapiens
  misc_RNA (1)...(19): siRNA sense strand
aggaggaggaagaggagga

SEQ ID NO: 2463869 - RNA, 19 nt, Homo sapiens
  misc_RNA (1)...(19): siRNA sense strand
aggaggaagaggaggagga

SEQ ID NO: 2463870 - RNA, 19 nt, Homo sapiens
  misc_RNA (1)...(19): siRNA sense strand
gcugaagaccauuggggua

SEQ ID NO: 2463871 - RNA, 19 nt, Homo sapiens
  misc_RNA (1)...(19): siRNA sense strand
ucucgaagauccugagcga

SEQ ID NO: 2463872 - RNA, 19 nt, Homo sapiens
  misc_RNA (1)...(19): siRNA sense strand
aauuagucccacagaacaa

SEQ ID NO: 2463873 - RNA, 19 nt, Homo sapiens
  misc_RNA (1)...(19): siRNA sense strand
cggaggaugaggaggagga

SEQ ID NO: 2463874 - RNA, 19 nt, Homo sapiens
  misc_RNA (1)...(19): siRNA sense strand
cgccaagacagguggaguu

SEQ ID NO: 2463875 - RNA, 19 nt, Homo sapiens
  misc_RNA (1)...(19): siRNA sense strand
ucgaagauccugagcgagu

SEQ ID NO: 2463876 - RNA, 19 nt, Homo sapiens
  misc_RNA (1)...(19): siRNA sense strand
gaaaguacuuaaacggacu

SEQ ID NO: 2463877 - RNA, 19 nt, Homo sapiens
  misc_RNA (1)...(19): siRNA sense strand
ucaagaagaucaaggagcu

SEQ ID NO: 2463878 - RNA, 19 nt, Homo sapiens
  misc_RNA (1)...(19): siRNA sense strand
ugcagaugaacgagaagaa

SEQ ID NO: 2463879 - RNA, 19 nt, Homo sapiens
  misc_RNA (1)...(19): siRNA sense strand
gcagcauggagaaugggaa

SEQ ID NO: 2463880 - RNA, 19 nt, Homo sapiens
  misc_RNA (1)...(19): siRNA sense strand
ggaaaguacuuaaacggac

SEQ ID NO: 2463881 - RNA, 19 nt, Homo sapiens
  misc_RNA (1)...(19): siRNA sense strand
cagaaguccgccuggugaa

SEQ ID NO: 2463882 - RNA, 19 nt, Homo sapiens
  misc_RNA (1)...(19): siRNA sense strand
acgagaagcuucaggagag

SEQ ID NO: 2463883 - RNA, 19 nt, Homo sapiens
  misc_RNA (1)...(19): siRNA sense strand
agaagaucaaggagcugua

SEQ ID NO: 2463884 - RNA, 19 nt, Homo sapiens
  misc_RNA (1)...(19): siRNA sense strand
agaacaacgagaagcuuca

SEQ ID NO: 2463885 - RNA, 19 nt, Homo sapiens
  misc_RNA (1)...(19): siRNA sense strand
gaguuaaagccgugcaggu

SEQ ID NO: 2463886 - RNA, 19 nt, Homo sapiens
  misc_RNA (1)...(19): siRNA sense strand
ccgacgagaucgaguaccu

SEQ ID NO: 2463887 - RNA, 19 nt, Homo sapiens
  misc_RNA (1)...(19): siRNA sense strand
aggaggaggaggaagagga

SEQ ID NO: 2463888 - RNA, 19 nt, Homo sapiens
  misc_RNA (1)...(19): siRNA sense strand
cugcugaagcccaccgaau

SEQ ID NO: 2463889 - RNA, 19 nt, Homo sapiens
  misc_RNA (1)...(19): siRNA sense strand
agguggaguugauccggaa

SEQ ID NO: 2463890 - RNA, 19 nt, Homo sapiens
  misc_RNA (1)...(19): siRNA sense strand
aagaggaggaggaagacga

SEQ ID NO: 2463891 - RNA, 19 nt, Homo sapiens
  misc_RNA (1)...(19): siRNA sense strand
gggacaaagaugaggcaga

SEQ ID NO: 2463892 - RNA, 19 nt, Homo sapiens
  misc_RNA (1)...(19): siRNA sense strand
cagcaauugaagagaggua

SEQ ID NO: 2463893 - RNA, 19 nt, Homo sapiens
  misc_RNA (1)...(19): siRNA sense strand
gagcagaaaugccgggaca

SEQ ID NO: 2463894 - RNA, 19 nt, Homo sapiens
  misc_RNA (1)...(19): siRNA sense strand
gaauaaacuucuuccggaa

SEQ ID NO: 2463895 - RNA, 19 nt, Homo sapiens
  misc_RNA (1)...(19): siRNA sense strand
agagaagaggccaggaaga

SEQ ID NO: 2463896 - RNA, 19 nt, Homo sapiens
  misc_RNA (1)...(19): siRNA sense strand
uggaagaauucagggaaaa

SEQ ID NO: 2463897 - RNA, 19 nt, Homo sapiens
  misc_RNA (1)...(19): siRNA sense strand
uugaagagagguauggcaa

SEQ ID NO: 2463898 - RNA, 19 nt, Homo sapiens
  misc_RNA (1)...(19): siRNA sense strand
ggaagaagccguguggaca

SEQ ID NO: 2463899 - RNA, 19 nt, Homo sapiens
  misc_RNA (1)...(19): siRNA sense strand
gcaaguagacaauguggca

SEQ ID NO: 2463900 - RNA, 19 nt, Homo sapiens
  misc_RNA (1)...(19): siRNA sense strand
ccguguggacagucugaaa

SEQ ID NO: 2463901 - RNA, 19 nt, Homo sapiens
  misc_RNA (1)...(19): siRNA sense strand
guggacagucugaaaucaa

SEQ ID NO: 2463902 - RNA, 19 nt, Homo sapiens
  misc_RNA (1)...(19): siRNA sense strand
caaagaagaacuaugagca

SEQ ID NO: 2463903 - RNA, 19 nt, Homo sapiens
  misc_RNA (1)...(19): siRNA sense strand
augcagucccagcaggaaa

SEQ ID NO: 2463904 - RNA, 19 nt, Homo sapiens
  misc_RNA (1)...(19): siRNA sense strand
gcaccaucggcuaugacaa

SEQ ID NO: 2463905 - RNA, 19 nt, Homo sapiens
  misc_RNA (1)...(19): siRNA sense strand
uggugaacccgaagcaaca

SEQ ID NO: 2463906 - RNA, 19 nt, Homo sapiens
  misc_RNA (1)...(19): siRNA sense strand
ggcucaagaaugugaacga

SEQ ID NO: 2463907 - RNA, 19 nt, Homo sapiens
  misc_RNA (1)...(19): siRNA sense strand
gauggaagaauucagggaa

SEQ ID NO: 2463908 - RNA, 19 nt, Homo sapiens
  misc_RNA (1)...(19): siRNA sense strand
aggccaggaagauggaaga

SEQ ID NO: 2463909 - RNA, 19 nt, Homo sapiens
  misc_RNA (1)...(19): siRNA sense strand
cucaagaaugugaacgaau

SEQ ID NO: 2463910 - RNA, 19 nt, Homo sapiens
  misc_RNA (1)...(19): siRNA sense strand
cgaauaaacuucuuccgga

SEQ ID NO: 2463911 - RNA, 19 nt, Homo sapiens
  misc_RNA (1)...(19): siRNA sense strand
ccagaagaaugcaguccca

SEQ ID NO: 2463912 - RNA, 19 nt, Homo sapiens
  misc_RNA (1)...(19): siRNA sense strand
aggaagaagccguguggac

SEQ ID NO: 2463913 - RNA, 19 nt, Homo sapiens
  misc_RNA (1)...(19): siRNA sense strand
ugcacagaguuuaagagaa

SEQ ID NO: 2463914 - RNA, 19 nt, Homo sapiens
  misc_RNA (1)...(19): siRNA sense strand
gagaaggaauggaggcaga

SEQ ID NO: 2463915 - RNA, 19 nt, Homo sapiens
  misc_RNA (1)...(19): siRNA sense strand
cuuuggaacugguggagaa

SEQ ID NO: 2463916 - RNA, 19 nt, Homo sapiens
  misc_RNA (1)...(19): siRNA sense strand
caucaauuacgaagugaaa

SEQ ID NO: 2463917 - RNA, 19 nt, Homo sapiens
  misc_RNA (1)...(19): siRNA sense strand
acgacaggauguagagaau

SEQ ID NO: 2463918 - RNA, 19 nt, Homo sapiens
  misc_RNA (1)...(19): siRNA sense strand
ggauguagagaaugagcua

SEQ ID NO: 2463919 - RNA, 19 nt, Homo sapiens
  misc_RNA (1)...(19): siRNA sense strand
gugugaagggagaggauuu

SEQ ID NO: 2463920 - RNA, 19 nt, Homo sapiens
  misc_RNA (1)...(19): siRNA sense strand
cuguagaaauuguggggaa

SEQ ID NO: 2463921 - RNA, 19 nt, Homo sapiens
  misc_RNA (1)...(19): siRNA sense strand
ugaagaugaggaugagaaa

SEQ ID NO: 2463922 - RNA, 19 nt, Homo sapiens
  misc_RNA (1)...(19): siRNA sense strand
gcugaaagacaaagaagca

SEQ ID NO: 2463923 - RNA, 19 nt, Homo sapiens
  misc_RNA (1)...(19): siRNA sense strand
acuugaagauugagaagga

SEQ ID NO: 2463924 - RNA, 19 nt, Homo sapiens
  misc_RNA (1)...(19): siRNA sense strand
ggcaacaagcuuagcgaau

SEQ ID NO: 2463925 - RNA, 19 nt, Homo sapiens
  misc_RNA (1)...(19): siRNA sense strand
cugaagauggcuugaaaga

SEQ ID NO: 2463926 - RNA, 19 nt, Homo sapiens
  misc_RNA (1)...(19): siRNA sense strand
aagcugaagaugaggauga

SEQ ID NO: 2463927 - RNA, 19 nt, Homo sapiens
  misc_RNA (1)...(19): siRNA sense strand
cugaagaugaggaugagaa

SEQ ID NO: 2463928 - RNA, 19 nt, Homo sapiens
  misc_RNA (1)...(19): siRNA sense strand
gcuuaauuauucagaggga

SEQ ID NO: 2463929 - RNA, 19 nt, Homo sapiens
  misc_RNA (1)...(19): siRNA sense strand
ccaaaguagauguggaaac

SEQ ID NO: 2463930 - RNA, 19 nt, Homo sapiens
  misc_RNA (1)...(19): siRNA sense strand
acuaaugauggaagaagaa

SEQ ID NO: 2463931 - RNA, 19 nt, Homo sapiens
  misc_RNA (1)...(19): siRNA sense strand
cacuaaugauggaagaaga

SEQ ID NO: 2463932 - RNA, 19 nt, Homo sapiens
  misc_RNA (1)...(19): siRNA sense strand
uguucaaauugcugccaua

SEQ ID NO: 2463933 - RNA, 19 nt, Homo sapiens
  misc_RNA (1)...(19): siRNA sense strand
ucgacaacaacuagaggaa

SEQ ID NO: 2463934 - RNA, 19 nt, Homo sapiens
  misc_RNA (1)...(19): siRNA sense strand
aagcagagaaggcgcaaau

SEQ ID NO: 2463935 - RNA, 19 nt, Homo sapiens
  misc_RNA (1)...(19): siRNA sense strand
cugauagucugcagaaaca

SEQ ID NO: 2463936 - RNA, 19 nt, Homo sapiens
  misc_RNA (1)...(19): siRNA sense strand
agacaaagaagcaacacau

SEQ ID NO: 2463937 - RNA, 19 nt, Homo sapiens
  misc_RNA (1)...(19): siRNA sense strand
ccugaaacacggucuuaaa

SEQ ID NO: 2463938 - RNA, 19 nt, Homo sapiens
  misc_RNA (1)...(19): siRNA sense strand
agagaaugagcuagcagua

SEQ ID NO: 2463939 - RNA, 19 nt, Homo sapiens
  misc_RNA (1)...(19): siRNA sense strand
ucugauaggccuucgacaa

SEQ ID NO: 2463940 - RNA, 19 nt, Homo sapiens
  misc_RNA (1)...(19): siRNA sense strand
aagauauccaugagaaaca

SEQ ID NO: 2463941 - RNA, 19 nt, Homo sapiens
  misc_RNA (1)...(19): siRNA sense strand
ccaugaggcagcuggaaca

SEQ ID NO: 2463942 - RNA, 19 nt, Homo sapiens
  misc_RNA (1)...(19): siRNA sense strand
aaauggaagcugaagauga

SEQ ID NO: 2463943 - RNA, 19 nt, Homo sapiens
  misc_RNA (1)...(19): siRNA sense strand
ugguuuggcugaaagacaa

SEQ ID NO: 2463944 - RNA, 19 nt, Homo sapiens
  misc_RNA (1)...(19): siRNA sense strand
cgauuagcccucaugcaaa

SEQ ID NO: 2463945 - RNA, 19 nt, Homo sapiens
  misc_RNA (1)...(19): siRNA sense strand
uguagaaauuguggggaaa

SEQ ID NO: 2463946 - RNA, 19 nt, Homo sapiens
  misc_RNA (1)...(19): siRNA sense strand
acgcacuaaugauggaaga

SEQ ID NO: 2463947 - RNA, 19 nt, Homo sapiens
  misc_RNA (1)...(19): siRNA sense strand
cauuaaacuccaggaagaa

SEQ ID NO: 2463948 - RNA, 19 nt, Homo sapiens
  misc_RNA (1)...(19): siRNA sense strand
uaguaugaagcaugagauu

SEQ ID NO: 2463949 - RNA, 19 nt, Homo sapiens
  misc_RNA (1)...(19): siRNA sense strand
aggaauggaggcagacuuu

SEQ ID NO: 2463950 - RNA, 19 nt, Homo sapiens
  misc_RNA (1)...(19): siRNA sense strand
auaucaugaacaagagcaa

SEQ ID NO: 2463951 - RNA, 19 nt, Homo sapiens
  misc_RNA (1)...(19): siRNA sense strand
ggcuagaugaaauguacaa

SEQ ID NO: 2463952 - RNA, 19 nt, Homo sapiens
  misc_RNA (1)...(19): siRNA sense strand
acauaaaagaagccaacaa

SEQ ID NO: 2463953 - RNA, 19 nt, Homo sapiens
  misc_RNA (1)...(19): siRNA sense strand
cauaaaagaagccaacaaa

SEQ ID NO: 2463954 - RNA, 19 nt, Homo sapiens
  misc_RNA (1)...(19): siRNA sense strand
aagaagaaggagcaguaau

SEQ ID NO: 2463955 - RNA, 19 nt, Homo sapiens
  misc_RNA (1)...(19): siRNA sense strand
ccccacagcuguagagaga

SEQ ID NO: 2463956 - RNA, 19 nt, Homo sapiens
  misc_RNA (1)...(19): siRNA sense strand
uugaagauugagaaggaau

SEQ ID NO: 2463957 - RNA, 19 nt, Homo sapiens
  misc_RNA (1)...(19): siRNA sense strand
acaaagcauugcagggacu

SEQ ID NO: 2463958 - RNA, 19 nt, Homo sapiens
  misc_RNA (1)...(19): siRNA sense strand
gaugcuaaucuguguguga

SEQ ID NO: 2463959 - RNA, 19 nt, Homo sapiens
  misc_RNA (1)...(19): siRNA sense strand
uagcaguacaaguuaguau

SEQ ID NO: 2463960 - RNA, 19 nt, Homo sapiens
  misc_RNA (1)...(19): siRNA sense strand
gccaugaaguugcuggaga

SEQ ID NO: 2463961 - RNA, 19 nt, Homo sapiens
  misc_RNA (1)...(19): siRNA sense strand
cuagaggaaguuaaagcaa

SEQ ID NO: 2463962 - RNA, 19 nt, Homo sapiens
  misc_RNA (1)...(19): siRNA sense strand
ggcuaaacugaguaucaaa

SEQ ID NO: 2463963 - RNA, 19 nt, Homo sapiens
  misc_RNA (1)...(19): siRNA sense strand
gaaugagcuagcaguacaa

SEQ ID NO: 2463964 - RNA, 19 nt, Homo sapiens
  misc_RNA (1)...(19): siRNA sense strand
ggagaaacagcuggugcaa

SEQ ID NO: 2463965 - RNA, 19 nt, Homo sapiens
  misc_RNA (1)...(19): siRNA sense strand
gauuagcccucaugcaaaa

SEQ ID NO: 2463966 - RNA, 19 nt, Homo sapiens
  misc_RNA (1)...(19): siRNA sense strand
ccauauuagaccaaaagaa

SEQ ID NO: 2463967 - RNA, 19 nt, Homo sapiens
  misc_RNA (1)...(19): siRNA sense strand
agaagcaacacauuguaaa

SEQ ID NO: 2463968 - RNA, 19 nt, Homo sapiens
  misc_RNA (1)...(19): siRNA sense strand
agucaaauacuaagcugau

SEQ ID NO: 2463969 - RNA, 19 nt, Homo sapiens
  misc_RNA (1)...(19): siRNA sense strand
uaccaaaguagauguggaa

SEQ ID NO: 2463970 - RNA, 19 nt, Homo sapiens
  misc_RNA (1)...(19): siRNA sense strand
gcggagagccauagagcac

SEQ ID NO: 2463971 - RNA, 19 nt, Homo sapiens
  misc_RNA (1)...(19): siRNA sense strand
gggccacaucgcagccaaa

SEQ ID NO: 2463972 - RNA, 19 nt, Homo sapiens
  misc_RNA (1)...(19): siRNA sense strand
aaacuuaucuugcuggaca

SEQ ID NO: 2463973 - RNA, 19 nt, Homo sapiens
  misc_RNA (1)...(19): siRNA sense strand
ucaggaagcugcaggccca

SEQ ID NO: 2463974 - RNA, 19 nt, Homo sapiens
  misc_RNA (1)...(19): siRNA sense strand
gagugagauccgaagaguu

SEQ ID NO: 2463975 - RNA, 19 nt, Homo sapiens
  misc_RNA (1)...(19): siRNA sense strand
cugagcaagucgagggaaa

SEQ ID NO: 2463976 - RNA, 19 nt, Homo sapiens
  misc_RNA (1)...(19): siRNA sense strand
ggugaggaagaaagagaaa

SEQ ID NO: 2463977 - RNA, 19 nt, Homo sapiens
  misc_RNA (1)...(19): siRNA sense strand
gguaagacuacgcuggaaa

SEQ ID NO: 2463978 - RNA, 19 nt, Homo sapiens
  misc_RNA (1)...(19): siRNA sense strand
augaagaagaggaggauga

SEQ ID NO: 2463979 - RNA, 19 nt, Homo sapiens
  misc_RNA (1)...(19): siRNA sense strand
guucaaguggaaugggaaa

SEQ ID NO: 2463980 - RNA, 19 nt, Homo sapiens
  misc_RNA (1)...(19): siRNA sense strand
gggaugaagaagaggagga

SEQ ID NO: 2463981 - RNA, 19 nt, Homo sapiens
  misc_RNA (1)...(19): siRNA sense strand
agauggaacugaagaaaau

SEQ ID NO: 2463982 - RNA, 19 nt, Homo sapiens
  misc_RNA (1)...(19): siRNA sense strand
cacagaaaggccagauaaa

SEQ ID NO: 2463983 - RNA, 19 nt, Homo sapiens
  misc_RNA (1)...(19): siRNA sense strand
agauggaacaguugaaaca

SEQ ID NO: 2463984 - RNA, 19 nt, Homo sapiens
  misc_RNA (1)...(19): siRNA sense strand
cugaaagaguggaucuaga

SEQ ID NO: 2463985 - RNA, 19 nt, Homo sapiens
  misc_RNA (1)...(19): siRNA sense strand
ucagacaaguggagagcca

SEQ ID NO: 2463986 - RNA, 19 nt, Homo sapiens
  misc_RNA (1)...(19): siRNA sense strand
aagaaaagguugagugaac

SEQ ID NO: 2463987 - RNA, 19 nt, Homo sapiens
  misc_RNA (1)...(19): siRNA sense strand
auggaacaguugaaacaaa

SEQ ID NO: 2463988 - RNA, 19 nt, Homo sapiens
  misc_RNA (1)...(19): siRNA sense strand
ugaagauggaacugaagaa

SEQ ID NO: 2463989 - RNA, 19 nt, Homo sapiens
  misc_RNA (1)...(19): siRNA sense strand
ccaagauauccauggugaa

SEQ ID NO: 2463990 - RNA, 19 nt, Homo sapiens
  misc_RNA (1)...(19): siRNA sense strand
aggaggaugaauacgauua

SEQ ID NO: 2463991 - RNA, 19 nt, Homo sapiens
  misc_RNA (1)...(19): siRNA sense strand
auucuaacauccaagcaaa

SEQ ID NO: 2463992 - RNA, 19 nt, Homo sapiens
  misc_RNA (1)...(19): siRNA sense strand
aggaagaaagagaaauuca

SEQ ID NO: 2463993 - RNA, 19 nt, Homo sapiens
  misc_RNA (1)...(19): siRNA sense strand
agagaaauucaguuccaua

SEQ ID NO: 2463994 - RNA, 19 nt, Homo sapiens
  misc_RNA (1)...(19): siRNA sense strand
cugagaagcaguuugucaa

SEQ ID NO: 2463995 - RNA, 19 nt, Homo sapiens
  misc_RNA (1)...(19): siRNA sense strand
cuaaugaagaacucggauu

SEQ ID NO: 2463996 - RNA, 19 nt, Homo sapiens
  misc_RNA (1)...(19): siRNA sense strand
ggccagauaaagaagaaaa

SEQ ID NO: 2463997 - RNA, 19 nt, Homo sapiens
  misc_RNA (1)...(19): siRNA sense strand
gugaggagaguuacaggaa

SEQ ID NO: 2463998 - RNA, 19 nt, Homo sapiens
  misc_RNA (1)...(19): siRNA sense strand
aaacaaaagcugaaacuca

SEQ ID NO: 2463999 - RNA, 19 nt, Homo sapiens
  misc_RNA (1)...(19): siRNA sense strand
guuggaaggauauggccua

SEQ ID NO: 2464000 - RNA, 19 nt, Homo sapiens
  misc_RNA (1)...(19): siRNA sense strand
cggagauggaacaguugaa

SEQ ID NO: 2464001 - RNA, 19 nt, Homo sapiens
  misc_RNA (1)...(19): siRNA sense strand
uggaacaguugaaacaaaa

SEQ ID NO: 2464002 - RNA, 19 nt, Homo sapiens
  misc_RNA (1)...(19): siRNA sense strand
gcgccaagggugcugguau

SEQ ID NO: 2464003 - RNA, 19 nt, Homo sapiens
  misc_RNA (1)...(19): siRNA sense strand
gagcugauugagugugcaa

SEQ ID NO: 2464004 - RNA, 19 nt, Homo sapiens
  misc_RNA (1)...(19): siRNA sense strand
acuuaaugucacaggagau

SEQ ID NO: 2464005 - RNA, 19 nt, Homo sapiens
  misc_RNA (1)...(19): siRNA sense strand
agacaaguggagagccaga

SEQ ID NO: 2464006 - RNA, 19 nt, Homo sapiens
  misc_RNA (1)...(19): siRNA sense strand
cuggugaggaagaaagaga

SEQ ID NO: 2464007 - RNA, 19 nt, Homo sapiens
  misc_RNA (1)...(19): siRNA sense strand
gcauaaaauuuguucagca

SEQ ID NO: 2464008 - RNA, 19 nt, Homo sapiens
  misc_RNA (1)...(19): siRNA sense strand
ugaagaaaauaaagcgcuu

SEQ ID NO: 2464009 - RNA, 19 nt, Homo sapiens
  misc_RNA (1)...(19): siRNA sense strand
ugucagauguguugaaccu

SEQ ID NO: 2464010 - RNA, 19 nt, Homo sapiens
  misc_RNA (1)...(19): siRNA sense strand
cccaagauauccaugguga

SEQ ID NO: 2464011 - RNA, 19 nt, Homo sapiens
  misc_RNA (1)...(19): siRNA sense strand
agaagaaaagguugaguga

SEQ ID NO: 2464012 - RNA, 19 nt, Homo sapiens
  misc_RNA (1)...(19): siRNA sense strand
gaggaguugggaugaagaa

SEQ ID NO: 2464013 - RNA, 19 nt, Homo sapiens
  misc_RNA (1)...(19): siRNA sense strand
augaugcuguagagggaau

SEQ ID NO: 2464014 - RNA, 19 nt, Homo sapiens
  misc_RNA (1)...(19): siRNA sense strand
aggagauguuuguugggau

SEQ ID NO: 2464015 - RNA, 19 nt, Homo sapiens
  misc_RNA (1)...(19): siRNA sense strand
gggcagucuggcacacuaa

SEQ ID NO: 2464016 - RNA, 19 nt, Homo sapiens
  misc_RNA (1)...(19): siRNA sense strand
ccugcaagaaagugcugaa

SEQ ID NO: 2464017 - RNA, 19 nt, Homo sapiens
  misc_RNA (1)...(19): siRNA sense strand
ugagugugcaacugguaaa

SEQ ID NO: 2464018 - RNA, 19 nt, Homo sapiens
  misc_RNA (1)...(19): siRNA sense strand
ucacgcaagcugaugacaa

SEQ ID NO: 2464019 - RNA, 19 nt, Homo sapiens
  misc_RNA (1)...(19): siRNA sense strand
gaaagguaguuuuggcaca

SEQ ID NO: 2464020 - RNA, 19 nt, Homo sapiens
  misc_RNA (1)...(19): siRNA sense strand
ggugaggcuugcugaacca

SEQ ID NO: 2464021 - RNA, 19 nt, Homo sapiens
  misc_RNA (1)...(19): siRNA sense strand
ugaugauucaggaguguuu

SEQ ID NO: 2464022 - RNA, 19 nt, Homo sapiens
  misc_RNA (1)...(19): siRNA sense strand
ggaugaagaagaggaggau

SEQ ID NO: 2464023 - RNA, 19 nt, Homo sapiens
  misc_RNA (1)...(19): siRNA sense strand
aaguggaaugggaaaggua

SEQ ID NO: 2464024 - RNA, 19 nt, Homo sapiens
  misc_RNA (1)...(19): siRNA sense strand
accagaugacauugugaua

SEQ ID NO: 2464025 - RNA, 19 nt, Homo sapiens
  misc_RNA (1)...(19): siRNA sense strand
gucgagggaaauugugaaa

SEQ ID NO: 2464026 - RNA, 19 nt, Homo sapiens
  misc_RNA (1)...(19): siRNA sense strand
aaggccagauaaagaagaa

SEQ ID NO: 2464027 - RNA, 19 nt, Homo sapiens
  misc_RNA (1)...(19): siRNA sense strand
cagauguggcugaaagagu

SEQ ID NO: 2464028 - RNA, 19 nt, Homo sapiens
  misc_RNA (1)...(19): siRNA sense strand
gcaagaaguucgaggagga

SEQ ID NO: 2464029 - RNA, 19 nt, Homo sapiens
  misc_RNA (1)...(19): siRNA sense strand
aggaagaagcuaaggccaa

SEQ ID NO: 2464030 - RNA, 19 nt, Homo sapiens
  misc_RNA (1)...(19): siRNA sense strand
ccaaaggagucaaggucga

SEQ ID NO: 2464031 - RNA, 19 nt, Homo sapiens
  misc_RNA (1)...(19): siRNA sense strand
agaagaucgcugaggaaga

SEQ ID NO: 2464032 - RNA, 19 nt, Homo sapiens
  misc_RNA (1)...(19): siRNA sense strand
agaaguucgaggaggacaa

SEQ ID NO: 2464033 - RNA, 19 nt, Homo sapiens
  misc_RNA (1)...(19): siRNA sense strand
aggcauaugaccagaagau

SEQ ID NO: 2464034 - RNA, 19 nt, Homo sapiens
  misc_RNA (1)...(19): siRNA sense strand
gcugagagcccaaaggagu

SEQ ID NO: 2464035 - RNA, 19 nt, Homo sapiens
  misc_RNA (1)...(19): siRNA sense strand
aagcuaaggccaaggagga

SEQ ID NO: 2464036 - RNA, 19 nt, Homo sapiens
  misc_RNA (1)...(19): siRNA sense strand
agacggaagcgcagccgaa

SEQ ID NO: 2464037 - RNA, 19 nt, Homo sapiens
  misc_RNA (1)...(19): siRNA sense strand
cgacaaggcaccaagucca

SEQ ID NO: 2464038 - RNA, 19 nt, Homo sapiens
  misc_RNA (1)...(19): siRNA sense strand
ccuaugugguguuccagaa

SEQ ID NO: 2464039 - RNA, 19 nt, Homo sapiens
  misc_RNA (1)...(19): siRNA sense strand
gcgcaaauuccgaccguac

SEQ ID NO: 2464040 - RNA, 19 nt, Homo sapiens
  misc_RNA (1)...(19): siRNA sense strand
ggcagcaucgagagagcaa

SEQ ID NO: 2464041 - RNA, 19 nt, Homo sapiens
  misc_RNA (1)...(19): siRNA sense strand
caagagaaccaauggcaga

SEQ ID NO: 2464042 - RNA, 19 nt, Homo sapiens
  misc_RNA (1)...(19): siRNA sense strand
aggaaguuguucacagcaa

SEQ ID NO: 2464043 - RNA, 19 nt, Homo sapiens
  misc_RNA (1)...(19): siRNA sense strand
augcagaugcugaggaagu

SEQ ID NO: 2464044 - RNA, 19 nt, Homo sapiens
  misc_RNA (1)...(19): siRNA sense strand
ccugaaugaggaaggauca

SEQ ID NO: 2464045 - RNA, 19 nt, Homo sapiens
  misc_RNA (1)...(19): siRNA sense strand
ggaucagagaagaggcuac

SEQ ID NO: 2464046 - RNA, 19 nt, Homo sapiens
  misc_RNA (1)...(19): siRNA sense strand
aaacugaagaugugggaaa

SEQ ID NO: 2464047 - RNA, 19 nt, Homo sapiens
  misc_RNA (1)...(19): siRNA sense strand
cagaagucucggauagaaa

SEQ ID NO: 2464048 - RNA, 19 nt, Homo sapiens
  misc_RNA (1)...(19): siRNA sense strand
caauaggaguacaggacuu

SEQ ID NO: 2464049 - RNA, 19 nt, Homo sapiens
  misc_RNA (1)...(19): siRNA sense strand
gggaaagaaaauugagauu

SEQ ID NO: 2464050 - RNA, 19 nt, Homo sapiens
  misc_RNA (1)...(19): siRNA sense strand
acgcaaaggauuauaccaa

SEQ ID NO: 2464051 - RNA, 19 nt, Homo sapiens
  misc_RNA (1)...(19): siRNA sense strand
ugaagaugugggaaagaaa

SEQ ID NO: 2464052 - RNA, 19 nt, Homo sapiens
  misc_RNA (1)...(19): siRNA sense strand
gcaaaguuuacaaggaaga

SEQ ID NO: 2464053 - RNA, 19 nt, Homo sapiens
  misc_RNA (1)...(19): siRNA sense strand
aaauauugaagguggagua

SEQ ID NO: 2464054 - RNA, 19 nt, Homo sapiens
  misc_RNA (1)...(19): siRNA sense strand
guggaaauagucaggcaaa

SEQ ID NO: 2464055 - RNA, 19 nt, Homo sapiens
  misc_RNA (1)...(19): siRNA sense strand
ugagaucagaagagugaaa

SEQ ID NO: 2464056 - RNA, 19 nt, Homo sapiens
  misc_RNA (1)...(19): siRNA sense strand
ggacaaagaucauggcgac

SEQ ID NO: 2464057 - RNA, 19 nt, Homo sapiens
  misc_RNA (1)...(19): siRNA sense strand
gguucagaugggagaggaa

SEQ ID NO: 2464058 - RNA, 19 nt, Homo sapiens
  misc_RNA (1)...(19): siRNA sense strand
gcuuugaaguugcuggauu

SEQ ID NO: 2464059 - RNA, 19 nt, Homo sapiens
  misc_RNA (1)...(19): siRNA sense strand
uggcccaauuaaaggauua

SEQ ID NO: 2464060 - RNA, 19 nt, Homo sapiens
  misc_RNA (1)...(19): siRNA sense strand
acgugauuguggagaauau

SEQ ID NO: 2464061 - RNA, 19 nt, Homo sapiens
  misc_RNA (1)...(19): siRNA sense strand
gcagggaggaggaggagau

SEQ ID NO: 2464062 - RNA, 19 nt, Homo sapiens
  misc_RNA (1)...(19): siRNA sense strand
gaucauggcgacaaggaau

SEQ ID NO: 2464063 - RNA, 19 nt, Homo sapiens
  misc_RNA (1)...(19): siRNA sense strand
cuuacagacuggagagagu

SEQ ID NO: 2464064 - RNA, 19 nt, Homo sapiens
  misc_RNA (1)...(19): siRNA sense strand
guacauuccuaaagggauc

SEQ ID NO: 2464065 - RNA, 19 nt, Homo sapiens
  misc_RNA (1)...(19): siRNA sense strand
gauuaugugaugugugauu

SEQ ID NO: 2464066 - RNA, 19 nt, Homo sapiens
  misc_RNA (1)...(19): siRNA sense strand
uggaaaggguuuaugcuga

SEQ ID NO: 2464067 - RNA, 19 nt, Homo sapiens
  misc_RNA (1)...(19): siRNA sense strand
uggcaggauuuauaaacua

SEQ ID NO: 2464068 - RNA, 19 nt, Homo sapiens
  misc_RNA (1)...(19): siRNA sense strand
gcucagaagcugugggcag

SEQ ID NO: 2464069 - RNA, 19 nt, Homo sapiens
  misc_RNA (1)...(19): siRNA sense strand
gagugaaaucucauaaaga

SEQ ID NO: 2464070 - RNA, 19 nt, Homo sapiens
  misc_RNA (1)...(19): siRNA sense strand
cuaaacaauuccaggccuu

SEQ ID NO: 2464071 - RNA, 19 nt, Homo sapiens
  misc_RNA (1)...(19): siRNA sense strand
uggaaauauugaaggugga

SEQ ID NO: 2464072 - RNA, 19 nt, Homo sapiens
  misc_RNA (1)...(19): siRNA sense strand
agcuauuaaguuaggguua

SEQ ID NO: 2464073 - RNA, 19 nt, Homo sapiens
  misc_RNA (1)...(19): siRNA sense strand
gcggaaacagcuugcaaaa

SEQ ID NO: 2464074 - RNA, 19 nt, Homo sapiens
  misc_RNA (1)...(19): siRNA sense strand
gcacgugauuguggagaau

SEQ ID NO: 2464075 - RNA, 19 nt, Homo sapiens
  misc_RNA (1)...(19): siRNA sense strand
ucucaaacagauucgauua

SEQ ID NO: 2464076 - RNA, 19 nt, Homo sapiens
  misc_RNA (1)...(19): siRNA sense strand
ccuagaacuccuugguaga

SEQ ID NO: 2464077 - RNA, 19 nt, Homo sapiens
  misc_RNA (1)...(19): siRNA sense strand
ggugggaauucuugccauu

SEQ ID NO: 2464078 - RNA, 19 nt, Homo sapiens
  misc_RNA (1)...(19): siRNA sense strand
agacuuacauccaggggaa

SEQ ID NO: 2464079 - RNA, 19 nt, Homo sapiens
  misc_RNA (1)...(19): siRNA sense strand
cuauaaucuuguacacgaa

SEQ ID NO: 2464080 - RNA, 19 nt, Homo sapiens
  misc_RNA (1)...(19): siRNA sense strand
ggaccucagcaauggagaa

SEQ ID NO: 2464081 - RNA, 19 nt, Homo sapiens
  misc_RNA (1)...(19): siRNA sense strand
caaaaugcgcugaagaauu

SEQ ID NO: 2464082 - RNA, 19 nt, Homo sapiens
  misc_RNA (1)...(19): siRNA sense strand
uggaaaaggaccucagcaa

SEQ ID NO: 2464083 - RNA, 19 nt, Homo sapiens
  misc_RNA (1)...(19): siRNA sense strand
cugaagaugugggaaagaa

SEQ ID NO: 2464084 - RNA, 19 nt, Homo sapiens
  misc_RNA (1)...(19): siRNA sense strand
ugagauuacuucaguggau

SEQ ID NO: 2464085 - RNA, 19 nt, Homo sapiens
  misc_RNA (1)...(19): siRNA sense strand
cgcacgugauuguggagaa

SEQ ID NO: 2464086 - RNA, 19 nt, Homo sapiens
  misc_RNA (1)...(19): siRNA sense strand
aaauguagacccaagagaa

SEQ ID NO: 2464087 - RNA, 19 nt, Homo sapiens
  misc_RNA (1)...(19): siRNA sense strand
gaucauauccagaguccca

SEQ ID NO: 2464088 - RNA, 19 nt, Homo sapiens
  misc_RNA (1)...(19): siRNA sense strand
augaacaugcacagacuua

SEQ ID NO: 2464089 - RNA, 19 nt, Homo sapiens
  misc_RNA (1)...(19): siRNA sense strand
cagcuuuaauaaucaggaa

SEQ ID NO: 2464090 - RNA, 19 nt, Homo sapiens
  misc_RNA (1)...(19): siRNA sense strand
agaaauuguuugcaagugu

SEQ ID NO: 2464091 - RNA, 19 nt, Homo sapiens
  misc_RNA (1)...(19): siRNA sense strand
aggaugaaacuguaacaau

SEQ ID NO: 2464092 - RNA, 19 nt, Homo sapiens
  misc_RNA (1)...(19): siRNA sense strand
uauugaagguggaguagca

SEQ ID NO: 2464093 - RNA, 19 nt, Homo sapiens
  misc_RNA (1)...(19): siRNA sense strand
cauuccuguuggagacuua

SEQ ID NO: 2464094 - RNA, 19 nt, Homo sapiens
  misc_RNA (1)...(19): siRNA sense strand
ggaaauagucaggcaaagu

SEQ ID NO: 2464095 - RNA, 19 nt, Homo sapiens
  misc_RNA (1)...(19): siRNA sense strand
ccuauaaucuuguacacga

SEQ ID NO: 2464096 - RNA, 19 nt, Homo sapiens
  misc_RNA (1)...(19): siRNA sense strand
agaugggagaggaauauua

SEQ ID NO: 2464097 - RNA, 19 nt, Homo sapiens
  misc_RNA (1)...(19): siRNA sense strand
ggaaagaaaagcagucuga

SEQ ID NO: 2464098 - RNA, 19 nt, Homo sapiens
  misc_RNA (1)...(19): siRNA sense strand
ggguuaacagcuauucaaa

SEQ ID NO: 2464099 - RNA, 19 nt, Homo sapiens
  misc_RNA (1)...(19): siRNA sense strand
guucacugggacagcauua

SEQ ID NO: 2464100 - RNA, 19 nt, Homo sapiens
  misc_RNA (1)...(19): siRNA sense strand
cuaccaaguuugagcaccu

SEQ ID NO: 2464101 - RNA, 19 nt, Homo sapiens
  misc_RNA (1)...(19): siRNA sense strand
cagacuggagagagugcua

SEQ ID NO: 2464102 - RNA, 19 nt, Homo sapiens
  misc_RNA (1)...(19): siRNA sense strand
gaguggaaauagucaggca

SEQ ID NO: 2464103 - RNA, 19 nt, Homo sapiens
  misc_RNA (1)...(19): siRNA sense strand
auauuuaucugaaggcuga

SEQ ID NO: 2464104 - RNA, 19 nt, Homo sapiens
  misc_RNA (1)...(19): siRNA sense strand
caggggaacagcuggaaaa

SEQ ID NO: 2464105 - RNA, 19 nt, Homo sapiens
  misc_RNA (1)...(19): siRNA sense strand
caggcaaaguuuacaagga

SEQ ID NO: 2464106 - RNA, 19 nt, Homo sapiens
  misc_RNA (1)...(19): siRNA sense strand
acuuauuacuacacugaga

SEQ ID NO: 2464107 - RNA, 19 nt, Homo sapiens
  misc_RNA (1)...(19): siRNA sense strand
uguuguucacucugagaua

SEQ ID NO: 2464108 - RNA, 19 nt, Homo sapiens
  misc_RNA (1)...(19): siRNA sense strand
aaacugaagaugugggaaa

SEQ ID NO: 2464109 - RNA, 19 nt, Homo sapiens
  misc_RNA (1)...(19): siRNA sense strand
cagaagucucggauagaaa

SEQ ID NO: 2464110 - RNA, 19 nt, Homo sapiens
  misc_RNA (1)...(19): siRNA sense strand
caauaggaguacaggacuu

SEQ ID NO: 2464111 - RNA, 19 nt, Homo sapiens
  misc_RNA (1)...(19): siRNA sense strand
gggaaagaaaauugagauu

SEQ ID NO: 2464112 - RNA, 19 nt, Homo sapiens
  misc_RNA (1)...(19): siRNA sense strand
acgcaaaggauuauaccaa

SEQ ID NO: 2464113 - RNA, 19 nt, Homo sapiens
  misc_RNA (1)...(19): siRNA sense strand
ugaagaugugggaaagaaa

SEQ ID NO: 2464114 - RNA, 19 nt, Homo sapiens
  misc_RNA (1)...(19): siRNA sense strand
gcaaaguuuacaaggaaga

SEQ ID NO: 2464115 - RNA, 19 nt, Homo sapiens
  misc_RNA (1)...(19): siRNA sense strand
aaauauugaagguggagua

SEQ ID NO: 2464116 - RNA, 19 nt, Homo sapiens
  misc_RNA (1)...(19): siRNA sense strand
guggaaauagucaggcaaa

SEQ ID NO: 2464117 - RNA, 19 nt, Homo sapiens
  misc_RNA (1)...(19): siRNA sense strand
ugagaucagaagagugaaa

SEQ ID NO: 2464118 - RNA, 19 nt, Homo sapiens
  misc_RNA (1)...(19): siRNA sense strand
ggacaaagaucauggcgac

SEQ ID NO: 2464119 - RNA, 19 nt, Homo sapiens
  misc_RNA (1)...(19): siRNA sense strand
gguucagaugggagaggaa

SEQ ID NO: 2464120 - RNA, 19 nt, Homo sapiens
  misc_RNA (1)...(19): siRNA sense strand
gcuuugaaguugcuggauu

SEQ ID NO: 2464121 - RNA, 19 nt, Homo sapiens
  misc_RNA (1)...(19): siRNA sense strand
uggcccaauuaaaggauua

SEQ ID NO: 2464122 - RNA, 19 nt, Homo sapiens
  misc_RNA (1)...(19): siRNA sense strand
acgugauuguggagaauau

SEQ ID NO: 2464123 - RNA, 19 nt, Homo sapiens
  misc_RNA (1)...(19): siRNA sense strand
gcagggaggaggaggagau

SEQ ID NO: 2464124 - RNA, 19 nt, Homo sapiens
  misc_RNA (1)...(19): siRNA sense strand
gaucauggcgacaaggaau

SEQ ID NO: 2464125 - RNA, 19 nt, Homo sapiens
  misc_RNA (1)...(19): siRNA sense strand
cuuacagacuggagagagu

SEQ ID NO: 2464126 - RNA, 19 nt, Homo sapiens
  misc_RNA (1)...(19): siRNA sense strand
guacauuccuaaagggauc

SEQ ID NO: 2464127 - RNA, 19 nt, Homo sapiens
  misc_RNA (1)...(19): siRNA sense strand
gauuaugugaugugugauu

SEQ ID NO: 2464128 - RNA, 19 nt, Homo sapiens
  misc_RNA (1)...(19): siRNA sense strand
uggaaaggguuuaugcuga

SEQ ID NO: 2464129 - RNA, 19 nt, Homo sapiens
  misc_RNA (1)...(19): siRNA sense strand
uggcaggauuuauaaacua

SEQ ID NO: 2464130 - RNA, 19 nt, Homo sapiens
  misc_RNA (1)...(19): siRNA sense strand
gcucagaagcugugggcag

SEQ ID NO: 2464131 - RNA, 19 nt, Homo sapiens
  misc_RNA (1)...(19): siRNA sense strand
gagugaaaucucauaaaga

SEQ ID NO: 2464132 - RNA, 19 nt, Homo sapiens
  misc_RNA (1)...(19): siRNA sense strand
cuaaacaauuccaggccuu

SEQ ID NO: 2464133 - RNA, 19 nt, Homo sapiens
  misc_RNA (1)...(19): siRNA sense strand
uggaaauauugaaggugga

SEQ ID NO: 2464134 - RNA, 19 nt, Homo sapiens
  misc_RNA (1)...(19): siRNA sense strand
agcuauuaaguuaggguua

SEQ ID NO: 2464135 - RNA, 19 nt, Homo sapiens
  misc_RNA (1)...(19): siRNA sense strand
gcggaaacagcuugcaaaa

SEQ ID NO: 2464136 - RNA, 19 nt, Homo sapiens
  misc_RNA (1)...(19): siRNA sense strand
gcacgugauuguggagaau

SEQ ID NO: 2464137 - RNA, 19 nt, Homo sapiens
  misc_RNA (1)...(19): siRNA sense strand
ucucaaacagauucgauua

SEQ ID NO: 2464138 - RNA, 19 nt, Homo sapiens
  misc_RNA (1)...(19): siRNA sense strand
ccuagaacuccuugguaga

SEQ ID NO: 2464139 - RNA, 19 nt, Homo sapiens
  misc_RNA (1)...(19): siRNA sense strand
ggugggaauucuugccauu

SEQ ID NO: 2464140 - RNA, 19 nt, Homo sapiens
  misc_RNA (1)...(19): siRNA sense strand
agacuuacauccaggggaa

SEQ ID NO: 2464141 - RNA, 19 nt, Homo sapiens
  misc_RNA (1)...(19): siRNA sense strand
cuauaaucuuguacacgaa

SEQ ID NO: 2464142 - RNA, 19 nt, Homo sapiens
  misc_RNA (1)...(19): siRNA sense strand
ggaccucagcaauggagaa

SEQ ID NO: 2464143 - RNA, 19 nt, Homo sapiens
  misc_RNA (1)...(19): siRNA sense strand
caaaaugcgcugaagaauu

SEQ ID NO: 2464144 - RNA, 19 nt, Homo sapiens
  misc_RNA (1)...(19): siRNA sense strand
uggaaaaggaccucagcaa

SEQ ID NO: 2464145 - RNA, 19 nt, Homo sapiens
  misc_RNA (1)...(19): siRNA sense strand
cugaagaugugggaaagaa

SEQ ID NO: 2464146 - RNA, 19 nt, Homo sapiens
  misc_RNA (1)...(19): siRNA sense strand
ugagauuacuucaguggau

SEQ ID NO: 2464147 - RNA, 19 nt, Homo sapiens
  misc_RNA (1)...(19): siRNA sense strand
cgcacgugauuguggagaa

SEQ ID NO: 2464148 - RNA, 19 nt, Homo sapiens
  misc_RNA (1)...(19): siRNA sense strand
aaauguagacccaagagaa

SEQ ID NO: 2464149 - RNA, 19 nt, Homo sapiens
  misc_RNA (1)...(19): siRNA sense strand
gaucauauccagaguccca

SEQ ID NO: 2464150 - RNA, 19 nt, Homo sapiens
  misc_RNA (1)...(19): siRNA sense strand
augaacaugcacagacuua

SEQ ID NO: 2464151 - RNA, 19 nt, Homo sapiens
  misc_RNA (1)...(19): siRNA sense strand
cagcuuuaauaaucaggaa

SEQ ID NO: 2464152 - RNA, 19 nt, Homo sapiens
  misc_RNA (1)...(19): siRNA sense strand
agaaauuguuugcaagugu

SEQ ID NO: 2464153 - RNA, 19 nt, Homo sapiens
  misc_RNA (1)...(19): siRNA sense strand
aggaugaaacuguaacaau

SEQ ID NO: 2464154 - RNA, 19 nt, Homo sapiens
  misc_RNA (1)...(19): siRNA sense strand
uauugaagguggaguagca

SEQ ID NO: 2464155 - RNA, 19 nt, Homo sapiens
  misc_RNA (1)...(19): siRNA sense strand
cauuccuguuggagacuua

SEQ ID NO: 2464156 - RNA, 19 nt, Homo sapiens
  misc_RNA (1)...(19): siRNA sense strand
ggaaauagucaggcaaagu

SEQ ID NO: 2464157 - RNA, 19 nt, Homo sapiens
  misc_RNA (1)...(19): siRNA sense strand
ccuauaaucuuguacacga

SEQ ID NO: 2464158 - RNA, 19 nt, Homo sapiens
  misc_RNA (1)...(19): siRNA sense strand
agaugggagaggaauauua

SEQ ID NO: 2464159 - RNA, 19 nt, Homo sapiens
  misc_RNA (1)...(19): siRNA sense strand
ggaaagaaaagcagucuga

SEQ ID NO: 2464160 - RNA, 19 nt, Homo sapiens
  misc_RNA (1)...(19): siRNA sense strand
ggguuaacagcuauucaaa

SEQ ID NO: 2464161 - RNA, 19 nt, Homo sapiens
  misc_RNA (1)...(19): siRNA sense strand
guucacugggacagcauua

SEQ ID NO: 2464162 - RNA, 19 nt, Homo sapiens
  misc_RNA (1)...(19): siRNA sense strand
cuaccaaguuugagcaccu

SEQ ID NO: 2464163 - RNA, 19 nt, Homo sapiens
  misc_RNA (1)...(19): siRNA sense strand
cagacuggagagagugcua

SEQ ID NO: 2464164 - RNA, 19 nt, Homo sapiens
  misc_RNA (1)...(19): siRNA sense strand
gaguggaaauagucaggca

SEQ ID NO: 2464165 - RNA, 19 nt, Homo sapiens
  misc_RNA (1)...(19): siRNA sense strand
auauuuaucugaaggcuga

SEQ ID NO: 2464166 - RNA, 19 nt, Homo sapiens
  misc_RNA (1)...(19): siRNA sense strand
caggggaacagcuggaaaa

SEQ ID NO: 2464167 - RNA, 19 nt, Homo sapiens
  misc_RNA (1)...(19): siRNA sense strand
caggcaaaguuuacaagga

SEQ ID NO: 2464168 - RNA, 19 nt, Homo sapiens
  misc_RNA (1)...(19): siRNA sense strand
acuuauuacuacacugaga

SEQ ID NO: 2464169 - RNA, 19 nt, Homo sapiens
  misc_RNA (1)...(19): siRNA sense strand
uguuguucacucugagaua

SEQ ID NO: 2464170 - RNA, 19 nt, Homo sapiens
  misc_RNA (1)...(19): siRNA sense strand
ccguagacucggagggcuu

SEQ ID NO: 2464171 - RNA, 19 nt, Homo sapiens
  misc_RNA (1)...(19): siRNA sense strand
gcgcagaagucuugugacc

SEQ ID NO: 2464172 - RNA, 19 nt, Homo sapiens
  misc_RNA (1)...(19): siRNA sense strand
gaugacaccuguuuggaga

SEQ ID NO: 2464173 - RNA, 19 nt, Homo sapiens
  misc_RNA (1)...(19): siRNA sense strand
gaguuauguccgagcgagu

SEQ ID NO: 2464174 - RNA, 19 nt, Homo sapiens
  misc_RNA (1)...(19): siRNA sense strand
gcauaauucaacuggucaa

SEQ ID NO: 2464175 - RNA, 19 nt, Homo sapiens
  misc_RNA (1)...(19): siRNA sense strand
gagcaagaccucugggacu

SEQ ID NO: 2464176 - RNA, 19 nt, Homo sapiens
  misc_RNA (1)...(19): siRNA sense strand
cgggcaaguuuaagaaaau

SEQ ID NO: 2464177 - RNA, 19 nt, Homo sapiens
  misc_RNA (1)...(19): siRNA sense strand
uggcaaagagaaugauaca

SEQ ID NO: 2464178 - RNA, 19 nt, Homo sapiens
  misc_RNA (1)...(19): siRNA sense strand
aguguuuauuucaggcaua

SEQ ID NO: 2464179 - RNA, 19 nt, Homo sapiens
  misc_RNA (1)...(19): siRNA sense strand
ccuguugauaacugggaaa

SEQ ID NO: 2464180 - RNA, 19 nt, Homo sapiens
  misc_RNA (1)...(19): siRNA sense strand
agaucauggcaaugggaca

SEQ ID NO: 2464181 - RNA, 19 nt, Homo sapiens
  misc_RNA (1)...(19): siRNA sense strand
ugggaaaauuguagaucau

SEQ ID NO: 2464182 - RNA, 19 nt, Homo sapiens
  misc_RNA (1)...(19): siRNA sense strand
acuaaagcacauauggaca

SEQ ID NO: 2464183 - RNA, 19 nt, Homo sapiens
  misc_RNA (1)...(19): siRNA sense strand
uggaauuugacuuggcaca

SEQ ID NO: 2464184 - RNA, 19 nt, Homo sapiens
  misc_RNA (1)...(19): siRNA sense strand
cagauuauaaacugguaca

SEQ ID NO: 2464185 - RNA, 19 nt, Homo sapiens
  misc_RNA (1)...(19): siRNA sense strand
uugcacagcccaagggaau

SEQ ID NO: 2464186 - RNA, 19 nt, Homo sapiens
  misc_RNA (1)...(19): siRNA sense strand
cuggauaggcagaucaaga

SEQ ID NO: 2464187 - RNA, 19 nt, Homo sapiens
  misc_RNA (1)...(19): siRNA sense strand
aggugcaucucaaggacaa

SEQ ID NO: 2464188 - RNA, 19 nt, Homo sapiens
  misc_RNA (1)...(19): siRNA sense strand
aagaagaaaguguugguca

SEQ ID NO: 2464189 - RNA, 19 nt, Homo sapiens
  misc_RNA (1)...(19): siRNA sense strand
uggucaaggugcaucucaa

SEQ ID NO: 2464190 - RNA, 19 nt, Homo sapiens
  misc_RNA (1)...(19): siRNA sense strand
cuaagaaaugacagcuaca

SEQ ID NO: 2464191 - RNA, 19 nt, Homo sapiens
  misc_RNA (1)...(19): siRNA sense strand
ucuucaaagcacugggcau

SEQ ID NO: 2464192 - RNA, 19 nt, Homo sapiens
  misc_RNA (1)...(19): siRNA sense strand
ucaaagaagugaucgaccu

SEQ ID NO: 2464193 - RNA, 19 nt, Homo sapiens
  misc_RNA (1)...(19): siRNA sense strand
ggaagagacuguuggccug

SEQ ID NO: 2464194 - RNA, 19 nt, Homo sapiens
  misc_RNA (1)...(19): siRNA sense strand
uggaagaagaggagccaga

SEQ ID NO: 2464195 - RNA, 19 nt, Homo sapiens
  misc_RNA (1)...(19): siRNA sense strand
gaacagagcaggugagcac

SEQ ID NO: 2464196 - RNA, 19 nt, Homo sapiens
  misc_RNA (1)...(19): siRNA sense strand
aagaggagccagaggcgga

SEQ ID NO: 2464197 - RNA, 19 nt, Homo sapiens
  misc_RNA (1)...(19): siRNA sense strand
gggaagacuuugagggugg

SEQ ID NO: 2464198 - RNA, 19 nt, Homo sapiens
  misc_RNA (1)...(19): siRNA sense strand
caaagaggucucagggcca

SEQ ID NO: 2464199 - RNA, 19 nt, Homo sapiens
  misc_RNA (1)...(19): siRNA sense strand
uggacaaggagaagccaga

SEQ ID NO: 2464200 - RNA, 19 nt, Homo sapiens
  misc_RNA (1)...(19): siRNA sense strand
acaaagagccguuacgaac

SEQ ID NO: 2464201 - RNA, 19 nt, Homo sapiens
  misc_RNA (1)...(19): siRNA sense strand
agacuuugagggugggcau

SEQ ID NO: 2464202 - RNA, 19 nt, Homo sapiens
  misc_RNA (1)...(19): siRNA sense strand
gguucaauucugaguuuau

SEQ ID NO: 2464203 - RNA, 19 nt, Homo sapiens
  misc_RNA (1)...(19): siRNA sense strand
acuuauugccucuuguaaa

SEQ ID NO: 2464204 - RNA, 19 nt, Homo sapiens
  misc_RNA (1)...(19): siRNA sense strand
ccuugaacucugaugaaga

SEQ ID NO: 2464205 - RNA, 19 nt, Homo sapiens
  misc_RNA (1)...(19): siRNA sense strand
uucaauugggcgagauuaa

SEQ ID NO: 2464206 - RNA, 19 nt, Homo sapiens
  misc_RNA (1)...(19): siRNA sense strand
ucgcauugaucaaccaaaa

SEQ ID NO: 2464207 - RNA, 19 nt, Homo sapiens
  misc_RNA (1)...(19): siRNA sense strand
uugaagagcuugcuggagu

SEQ ID NO: 2464208 - RNA, 19 nt, Homo sapiens
  misc_RNA (1)...(19): siRNA sense strand
cuuuauucuuggagcagga

SEQ ID NO: 2464209 - RNA, 19 nt, Homo sapiens
  misc_RNA (1)...(19): siRNA sense strand
cauucaauugggcgagauu

SEQ ID NO: 2464210 - RNA, 19 nt, Homo sapiens
  misc_RNA (1)...(19): siRNA sense strand
gcacaguacccaagggaga

SEQ ID NO: 2464211 - RNA, 19 nt, Homo sapiens
  misc_RNA (1)...(19): siRNA sense strand
cguagaaacuuguggccau

SEQ ID NO: 2464212 - RNA, 19 nt, Homo sapiens
  misc_RNA (1)...(19): siRNA sense strand
augaguuggaagaggaaua

SEQ ID NO: 2464213 - RNA, 19 nt, Homo sapiens
  misc_RNA (1)...(19): siRNA sense strand
aggaauaugaugaugaaga

SEQ ID NO: 2464214 - RNA, 19 nt, Homo sapiens
  misc_RNA (1)...(19): siRNA sense strand
cugaaaagcgaaaggagua

SEQ ID NO: 2464215 - RNA, 19 nt, Homo sapiens
  misc_RNA (1)...(19): siRNA sense strand
cugccagccugaagaggaa

SEQ ID NO: 2464216 - RNA, 19 nt, Homo sapiens
  misc_RNA (1)...(19): siRNA sense strand
auggaaagguguaugacau

SEQ ID NO: 2464217 - RNA, 19 nt, Homo sapiens
  misc_RNA (1)...(19): siRNA sense strand
uugcacugauggauggaaa

SEQ ID NO: 2464218 - RNA, 19 nt, Homo sapiens
  misc_RNA (1)...(19): siRNA sense strand
ggaaccagaaggaugggaa

SEQ ID NO: 2464219 - RNA, 19 nt, Homo sapiens
  misc_RNA (1)...(19): siRNA sense strand
ccuaagagugcuagauacu

SEQ ID NO: 2464220 - RNA, 19 nt, Homo sapiens
  misc_RNA (1)...(19): siRNA sense strand
agggagaagccaaaccuaa

SEQ ID NO: 2464221 - RNA, 19 nt, Homo sapiens
  misc_RNA (1)...(19): siRNA sense strand
gcugagagauagcaggcca

SEQ ID NO: 2464222 - RNA, 19 nt, Homo sapiens
  misc_RNA (1)...(19): siRNA sense strand
agaugaaacgaauggcaga

SEQ ID NO: 2464223 - RNA, 19 nt, Homo sapiens
  misc_RNA (1)...(19): siRNA sense strand
gguugaggccacagcauca

SEQ ID NO: 2464224 - RNA, 19 nt, Homo sapiens
  misc_RNA (1)...(19): siRNA sense strand
acccaagggagaagccaaa

SEQ ID NO: 2464225 - RNA, 19 nt, Homo sapiens
  misc_RNA (1)...(19): siRNA sense strand
aagaugaguuggaagagga

SEQ ID NO: 2464226 - RNA, 19 nt, Homo sapiens
  misc_RNA (1)...(19): siRNA sense strand
gaucagagugagacgucuu

SEQ ID NO: 2464227 - RNA, 19 nt, Homo sapiens
  misc_RNA (1)...(19): siRNA sense strand
cagaagaagaaucaggagu

SEQ ID NO: 2464228 - RNA, 19 nt, Homo sapiens
  misc_RNA (1)...(19): siRNA sense strand
ggaaacgaagucaggcaga

SEQ ID NO: 2464229 - RNA, 19 nt, Homo sapiens
  misc_RNA (1)...(19): siRNA sense strand
gguuugaaauggaccggga

SEQ ID NO: 2464230 - RNA, 19 nt, Homo sapiens
  misc_RNA (1)...(19): siRNA sense strand
gggagaguacguagaaacu

SEQ ID NO: 2464231 - RNA, 19 nt, Homo sapiens
  misc_RNA (1)...(19): siRNA sense strand
ucacguguguccagcggaa

SEQ ID NO: 2464232 - RNA, 19 nt, Homo sapiens
  misc_RNA (1)...(19): siRNA sense strand
aacgaauggcagagaauga

SEQ ID NO: 2464233 - RNA, 19 nt, Homo sapiens
  misc_RNA (1)...(19): siRNA sense strand
cgggaaccuaagagugcua

SEQ ID NO: 2464234 - RNA, 19 nt, Homo sapiens
  misc_RNA (1)...(19): siRNA sense strand
aagaggaauaugaugauga

SEQ ID NO: 2464235 - RNA, 19 nt, Homo sapiens
  misc_RNA (1)...(19): siRNA sense strand
gguauuggugggagaguac

SEQ ID NO: 2464236 - RNA, 19 nt, Homo sapiens
  misc_RNA (1)...(19): siRNA sense strand
cagauguugaacugaggaa

SEQ ID NO: 2464237 - RNA, 19 nt, Homo sapiens
  misc_RNA (1)...(19): siRNA sense strand
caaggaaagcauaggaggu

SEQ ID NO: 2464238 - RNA, 19 nt, Homo sapiens
  misc_RNA (1)...(19): siRNA sense strand
ggcuggagggauaaggcua

SEQ ID NO: 2464239 - RNA, 19 nt, Homo sapiens
  misc_RNA (1)...(19): siRNA sense strand
aggaaagcauaggagguuu

SEQ ID NO: 2464240 - RNA, 19 nt, Homo sapiens
  misc_RNA (1)...(19): siRNA sense strand
agaugaguuggaagaggaa

SEQ ID NO: 2464241 - RNA, 19 nt, Homo sapiens
  misc_RNA (1)...(19): siRNA sense strand
cggcugggucggaaacgaa

SEQ ID NO: 2464242 - RNA, 19 nt, Homo sapiens
  misc_RNA (1)...(19): siRNA sense strand
ugguauuggugggagagua

SEQ ID NO: 2464243 - RNA, 19 nt, Homo sapiens
  misc_RNA (1)...(19): siRNA sense strand
cucaaggaggcaaugaaua

SEQ ID NO: 2464244 - RNA, 19 nt, Homo sapiens
  misc_RNA (1)...(19): siRNA sense strand
gggaggaauuggaccguga

SEQ ID NO: 2464245 - RNA, 19 nt, Homo sapiens
  misc_RNA (1)...(19): siRNA sense strand
ccagagaggugguuaggga

SEQ ID NO: 2464246 - RNA, 19 nt, Homo sapiens
  misc_RNA (1)...(19): siRNA sense strand
guccugggucagagagaaa

SEQ ID NO: 2464247 - RNA, 19 nt, Homo sapiens
  misc_RNA (1)...(19): siRNA sense strand
ccacgaggacugaggagca

SEQ ID NO: 2464248 - RNA, 19 nt, Homo sapiens
  misc_RNA (1)...(19): siRNA sense strand
ucgcagcaguagagaggga

SEQ ID NO: 2464249 - RNA, 19 nt, Homo sapiens
  misc_RNA (1)...(19): siRNA sense strand
uugcagaccuccugggcca

SEQ ID NO: 2464250 - RNA, 19 nt, Homo sapiens
  misc_RNA (1)...(19): siRNA sense strand
gggacuuggcucgaggaaa

SEQ ID NO: 2464251 - RNA, 19 nt, Homo sapiens
  misc_RNA (1)...(19): siRNA sense strand
gcagcaguagagagggaca

SEQ ID NO: 2464252 - RNA, 19 nt, Homo sapiens
  misc_RNA (1)...(19): siRNA sense strand
aaacuggaacagaggcgaa

SEQ ID NO: 2464253 - RNA, 19 nt, Homo sapiens
  misc_RNA (1)...(19): siRNA sense strand
aggcaaugcacgggacaau

SEQ ID NO: 2464254 - RNA, 19 nt, Homo sapiens
  misc_RNA (1)...(19): siRNA sense strand
ccugaugaugauaguguuu

SEQ ID NO: 2464255 - RNA, 19 nt, Homo sapiens
  misc_RNA (1)...(19): siRNA sense strand
acaaaugaguuaugggaca

SEQ ID NO: 2464256 - RNA, 19 nt, Homo sapiens
  misc_RNA (1)...(19): siRNA sense strand
acucagaggaaguggauuu

SEQ ID NO: 2464257 - RNA, 19 nt, Homo sapiens
  misc_RNA (1)...(19): siRNA sense strand
aaaugagaguaaagaggaa

SEQ ID NO: 2464258 - RNA, 19 nt, Homo sapiens
  misc_RNA (1)...(19): siRNA sense strand
gggaaauuacaauggccaa

SEQ ID NO: 2464259 - RNA, 19 nt, Homo sapiens
  misc_RNA (1)...(19): siRNA sense strand
ggaaauuacaauggccaaa

SEQ ID NO: 2464260 - RNA, 19 nt, Homo sapiens
  misc_RNA (1)...(19): siRNA sense strand
auucuauacuccagaggua

SEQ ID NO: 2464261 - RNA, 19 nt, Homo sapiens
  misc_RNA (1)...(19): siRNA sense strand
agaggaacuugcagccaaa

SEQ ID NO: 2464262 - RNA, 19 nt, Homo sapiens
  misc_RNA (1)...(19): siRNA sense strand
aaaguaacgucuauggcaa

SEQ ID NO: 2464263 - RNA, 19 nt, Homo sapiens
  misc_RNA (1)...(19): siRNA sense strand
cagccaaacaguaaugcua

SEQ ID NO: 2464264 - RNA, 19 nt, Homo sapiens
  misc_RNA (1)...(19): siRNA sense strand
cagagaggacccaggaaca

SEQ ID NO: 2464265 - RNA, 19 nt, Homo sapiens
  misc_RNA (1)...(19): siRNA sense strand
aaaacuaagucuugcgcaa

SEQ ID NO: 2464266 - RNA, 19 nt, Homo sapiens
  misc_RNA (1)...(19): siRNA sense strand
aagaaaugucagaguacuu

SEQ ID NO: 2464267 - RNA, 19 nt, Homo sapiens
  misc_RNA (1)...(19): siRNA sense strand
cagaaaccaacguggaaaa

SEQ ID NO: 2464268 - RNA, 19 nt, Homo sapiens
  misc_RNA (1)...(19): siRNA sense strand
guuuauguucugaaggcaa

SEQ ID NO: 2464269 - RNA, 19 nt, Homo sapiens
  misc_RNA (1)...(19): siRNA sense strand
cggaaaggcaggaaaccca

SEQ ID NO: 2464270 - RNA, 19 nt, Homo sapiens
  misc_RNA (1)...(19): siRNA sense strand
guagacaccaacacggaaa

SEQ ID NO: 2464271 - RNA, 19 nt, Homo sapiens
  misc_RNA (1)...(19): siRNA sense strand
ccagcaaacagcaguaaaa

SEQ ID NO: 2464272 - RNA, 19 nt, Homo sapiens
  misc_RNA (1)...(19): siRNA sense strand
aggcaagaguacuccaaaa

SEQ ID NO: 2464273 - RNA, 19 nt, Homo sapiens
  misc_RNA (1)...(19): siRNA sense strand
guuacaacucagaggaagu

SEQ ID NO: 2464274 - RNA, 19 nt, Homo sapiens
  misc_RNA (1)...(19): siRNA sense strand
ggaaaugccagaaagacca

SEQ ID NO: 2464275 - RNA, 19 nt, Homo sapiens
  misc_RNA (1)...(19): siRNA sense strand
ggaaaagacuggcaggacu

SEQ ID NO: 2464276 - RNA, 19 nt, Homo sapiens
  misc_RNA (1)...(19): siRNA sense strand
cacugauaauccagaggaa

SEQ ID NO: 2464277 - RNA, 19 nt, Homo sapiens
  misc_RNA (1)...(19): siRNA sense strand
ggaaaauaacucucagaca

SEQ ID NO: 2464278 - RNA, 19 nt, Homo sapiens
  misc_RNA (1)...(19): siRNA sense strand
agaaauauacggaugccau

SEQ ID NO: 2464279 - RNA, 19 nt, Homo sapiens
  misc_RNA (1)...(19): siRNA sense strand
aagaggaacuugcagccaa

SEQ ID NO: 2464280 - RNA, 19 nt, Homo sapiens
  misc_RNA (1)...(19): siRNA sense strand
ccaaaugucauaugggucu

SEQ ID NO: 2464281 - RNA, 19 nt, Homo sapiens
  misc_RNA (1)...(19): siRNA sense strand
ugaaaugccaggaacaaca

SEQ ID NO: 2464282 - RNA, 19 nt, Homo sapiens
  misc_RNA (1)...(19): siRNA sense strand
ccacaaaugaguuauggga

SEQ ID NO: 2464283 - RNA, 19 nt, Homo sapiens
  misc_RNA (1)...(19): siRNA sense strand
uuggaagaccauggagaaa

SEQ ID NO: 2464284 - RNA, 19 nt, Homo sapiens
  misc_RNA (1)...(19): siRNA sense strand
uauccaacuuuaaugggaa

SEQ ID NO: 2464285 - RNA, 19 nt, Homo sapiens
  misc_RNA (1)...(19): siRNA sense strand
caacagaaaccaacgugga

SEQ ID NO: 2464286 - RNA, 19 nt, Homo sapiens
  misc_RNA (1)...(19): siRNA sense strand
caguaaugcuaucccugaa

SEQ ID NO: 2464287 - RNA, 19 nt, Homo sapiens
  misc_RNA (1)...(19): siRNA sense strand
agcuggagcaggagucaaa

SEQ ID NO: 2464288 - RNA, 19 nt, Homo sapiens
  misc_RNA (1)...(19): siRNA sense strand
auccaacuuuaaugggaaa

SEQ ID NO: 2464289 - RNA, 19 nt, Homo sapiens
  misc_RNA (1)...(19): siRNA sense strand
augccaggaacaacagaaa

SEQ ID NO: 2464290 - RNA, 19 nt, Homo sapiens
  misc_RNA (1)...(19): siRNA sense strand
ccacuaaugacauagcaga

SEQ ID NO: 2464291 - RNA, 19 nt, Homo sapiens
  misc_RNA (1)...(19): siRNA sense strand
caggaacaacagaaaccaa

SEQ ID NO: 2464292 - RNA, 19 nt, Homo sapiens
  misc_RNA (1)...(19): siRNA sense strand
auggcugcauugagagaau

SEQ ID NO: 2464293 - RNA, 19 nt, Homo sapiens
  misc_RNA (1)...(19): siRNA sense strand
acuugcagccaaacaguaa

SEQ ID NO: 2464294 - RNA, 19 nt, Homo sapiens
  misc_RNA (1)...(19): siRNA sense strand
caaaagauguccuggucca

SEQ ID NO: 2464295 - RNA, 19 nt, Homo sapiens
  misc_RNA (1)...(19): siRNA sense strand
ggugaauuacucugcucua

SEQ ID NO: 2464296 - RNA, 19 nt, Homo sapiens
  misc_RNA (1)...(19): siRNA sense strand
ucgacgacagugaugauaa

SEQ ID NO: 2464297 - RNA, 19 nt, Homo sapiens
  misc_RNA (1)...(19): siRNA sense strand
aaaugugggcccagguaga

SEQ ID NO: 2464298 - RNA, 19 nt, Homo sapiens
  misc_RNA (1)...(19): siRNA sense strand
acagaaaccaacguggaaa

SEQ ID NO: 2464299 - RNA, 19 nt, Homo sapiens
  misc_RNA (1)...(19): siRNA sense strand
augcuaucccugaaggaau

SEQ ID NO: 2464300 - RNA, 19 nt, Homo sapiens
  misc_RNA (1)...(19): siRNA sense strand
uuuggaagaccauggagaa

SEQ ID NO: 2464301 - RNA, 19 nt, Homo sapiens
  misc_RNA (1)...(19): siRNA sense strand
ccagaggcuucgagggcuu

SEQ ID NO: 2464302 - RNA, 19 nt, Homo sapiens
  misc_RNA (1)...(19): siRNA sense strand
ccgacauggcgcuggagua

SEQ ID NO: 2464303 - RNA, 19 nt, Homo sapiens
  misc_RNA (1)...(19): siRNA sense strand
gcaucaacguggccgacga

SEQ ID NO: 2464304 - RNA, 19 nt, Homo sapiens
  misc_RNA (1)...(19): siRNA sense strand
agguuaugcuugaacagau

SEQ ID NO: 2464305 - RNA, 19 nt, Homo sapiens
  misc_RNA (1)...(19): siRNA sense strand
gcuccaaggucaccgacga

SEQ ID NO: 2464306 - RNA, 19 nt, Homo sapiens
  misc_RNA (1)...(19): siRNA sense strand
gugcaagacuucgggcuga

SEQ ID NO: 2464307 - RNA, 19 nt, Homo sapiens
  misc_RNA (1)...(19): siRNA sense strand
cuccaagaagggugucaaa

SEQ ID NO: 2464308 - RNA, 19 nt, Homo sapiens
  misc_RNA (1)...(19): siRNA sense strand
uggccgagaaccugcgcaa

SEQ ID NO: 2464309 - RNA, 19 nt, Homo sapiens
  misc_RNA (1)...(19): siRNA sense strand
gaaagaaagaggauggaga

SEQ ID NO: 2464310 - RNA, 19 nt, Homo sapiens
  misc_RNA (1)...(19): siRNA sense strand
auucaaagaacuacgggaa

SEQ ID NO: 2464311 - RNA, 19 nt, Homo sapiens
  misc_RNA (1)...(19): siRNA sense strand
aagaggauggagagggcaa

SEQ ID NO: 2464312 - RNA, 19 nt, Homo sapiens
  misc_RNA (1)...(19): siRNA sense strand
ccagaaauaucuugagcac

SEQ ID NO: 2464313 - RNA, 19 nt, Homo sapiens
  misc_RNA (1)...(19): siRNA sense strand
aggacagaugaaagagaau

SEQ ID NO: 2464314 - RNA, 19 nt, Homo sapiens
  misc_RNA (1)...(19): siRNA sense strand
ggacauagccauuuccagu

SEQ ID NO: 2464315 - RNA, 19 nt, Homo sapiens
  misc_RNA (1)...(19): siRNA sense strand
gggucuugguggaucauca

SEQ ID NO: 2464316 - RNA, 19 nt, Homo sapiens
  misc_RNA (1)...(19): siRNA sense strand
gaugagaacagcagcgucu

SEQ ID NO: 2464317 - RNA, 19 nt, Homo sapiens
  misc_RNA (1)...(19): siRNA sense strand
ucauagacaaccagggcca

SEQ ID NO: 2464318 - RNA, 19 nt, Homo sapiens
  misc_RNA (1)...(19): siRNA sense strand
cuaacaagugcuuugaaca

SEQ ID NO: 2464319 - RNA, 19 nt, Homo sapiens
  misc_RNA (1)...(19): siRNA sense strand
cucaaggacagaugaaaga

SEQ ID NO: 2464320 - RNA, 19 nt, Homo sapiens
  misc_RNA (1)...(19): siRNA sense strand
gaugaggagcugaaggugu

SEQ ID NO: 2464321 - RNA, 19 nt, Homo sapiens
  misc_RNA (1)...(19): siRNA sense strand
cucagaagcucuaugcaga

SEQ ID NO: 2464322 - RNA, 19 nt, Homo sapiens
  misc_RNA (1)...(19): siRNA sense strand
aaucaguaacucaaggaca

SEQ ID NO: 2464323 - RNA, 19 nt, Homo sapiens
  misc_RNA (1)...(19): siRNA sense strand
gaaauguucuucaaggagu

SEQ ID NO: 2464324 - RNA, 19 nt, Homo sapiens
  misc_RNA (1)...(19): siRNA sense strand
ggaacugccuccugagcgu

SEQ ID NO: 2464325 - RNA, 19 nt, Homo sapiens
  misc_RNA (1)...(19): siRNA sense strand
agaagaagaacgacggcua

SEQ ID NO: 2464326 - RNA, 19 nt, Homo sapiens
  misc_RNA (1)...(19): siRNA sense strand
gaugaggaccggagcggaa

SEQ ID NO: 2464327 - RNA, 19 nt, Homo sapiens
  misc_RNA (1)...(19): siRNA sense strand
agaugaaagucgugagccu

SEQ ID NO: 2464328 - RNA, 19 nt, Homo sapiens
  misc_RNA (1)...(19): siRNA sense strand
ccauugaugaugacgacaa

SEQ ID NO: 2464329 - RNA, 19 nt, Homo sapiens
  misc_RNA (1)...(19): siRNA sense strand
ggguucaccuugagaggga

SEQ ID NO: 2464330 - RNA, 19 nt, Homo sapiens
  misc_RNA (1)...(19): siRNA sense strand
gcauaauaagagugccaca

SEQ ID NO: 2464331 - RNA, 19 nt, Homo sapiens
  misc_RNA (1)...(19): siRNA sense strand
ggaacauuacagugaagau

SEQ ID NO: 2464332 - RNA, 19 nt, Homo sapiens
  misc_RNA (1)...(19): siRNA sense strand
cuaaggugggagaggucua

SEQ ID NO: 2464333 - RNA, 19 nt, Homo sapiens
  misc_RNA (1)...(19): siRNA sense strand
aggaagagcuggaggggcu

SEQ ID NO: 2464334 - RNA, 19 nt, Homo sapiens
  misc_RNA (1)...(19): siRNA sense strand
augcauaauaagagugcca

SEQ ID NO: 2464335 - RNA, 19 nt, Homo sapiens
  misc_RNA (1)...(19): siRNA sense strand
agaacacagaggaggcauu

SEQ ID NO: 2464336 - RNA, 19 nt, Homo sapiens
  misc_RNA (1)...(19): siRNA sense strand
cugaaagccgugcggauga

SEQ ID NO: 2464337 - RNA, 19 nt, Homo sapiens
  misc_RNA (1)...(19): siRNA sense strand
cugcuuagccauugaugau

SEQ ID NO: 2464338 - RNA, 19 nt, Homo sapiens
  misc_RNA (1)...(19): siRNA sense strand
caaaaugaugcuugcacaa

SEQ ID NO: 2464339 - RNA, 19 nt, Homo sapiens
  misc_RNA (1)...(19): siRNA sense strand
acucaaaggugcgggagca

SEQ ID NO: 2464340 - RNA, 19 nt, Homo sapiens
  misc_RNA (1)...(19): siRNA sense strand
gcacggaucuggaccacca

SEQ ID NO: 2464341 - RNA, 19 nt, Homo sapiens
  misc_RNA (1)...(19): siRNA sense strand
cugcacggccucaggucaa

SEQ ID NO: 2464342 - RNA, 19 nt, Homo sapiens
  misc_RNA (1)...(19): siRNA sense strand
guggauuguaaguggcuga

SEQ ID NO: 2464343 - RNA, 19 nt, Homo sapiens
  misc_RNA (1)...(19): siRNA sense strand
gccugaaggaaacgaaaga

SEQ ID NO: 2464344 - RNA, 19 nt, Homo sapiens
  misc_RNA (1)...(19): siRNA sense strand
uguaaguggcugacgcuga

SEQ ID NO: 2464345 - RNA, 19 nt, Homo sapiens
  misc_RNA (1)...(19): siRNA sense strand
ccaagauaccuguggaaaa

SEQ ID NO: 2464346 - RNA, 19 nt, Homo sapiens
  misc_RNA (1)...(19): siRNA sense strand
cauucauaguagaaagaga

SEQ ID NO: 2464347 - RNA, 19 nt, Homo sapiens
  misc_RNA (1)...(19): siRNA sense strand
augggaaacccgaagauaa

SEQ ID NO: 2464348 - RNA, 19 nt, Homo sapiens
  misc_RNA (1)...(19): siRNA sense strand
agaaguuagccaagaugaa

SEQ ID NO: 2464349 - RNA, 19 nt, Homo sapiens
  misc_RNA (1)...(19): siRNA sense strand
caguuuaacaagaggcuca

SEQ ID NO: 2464350 - RNA, 19 nt, Homo sapiens
  misc_RNA (1)...(19): siRNA sense strand
gcaaaaucaagaagaaaga

SEQ ID NO: 2464351 - RNA, 19 nt, Homo sapiens
  misc_RNA (1)...(19): siRNA sense strand
uuggauugauucaggagaa

SEQ ID NO: 2464352 - RNA, 19 nt, Homo sapiens
  misc_RNA (1)...(19): siRNA sense strand
cuuacgucauggagaguau

SEQ ID NO: 2464353 - RNA, 19 nt, Homo sapiens
  misc_RNA (1)...(19): siRNA sense strand
uggauugauucaggagaaa

SEQ ID NO: 2464354 - RNA, 19 nt, Homo sapiens
  misc_RNA (1)...(19): siRNA sense strand
gcucagaaggcuuacguca

SEQ ID NO: 2464355 - RNA, 19 nt, Homo sapiens
  misc_RNA (1)...(19): siRNA sense strand
aagccaaauacuugccuaa

SEQ ID NO: 2464356 - RNA, 19 nt, Homo sapiens
  misc_RNA (1)...(19): siRNA sense strand
ccaggauccaugagcuuaa

SEQ ID NO: 2464357 - RNA, 19 nt, Homo sapiens
  misc_RNA (1)...(19): siRNA sense strand
aaauugaccaggaagggaa

SEQ ID NO: 2464358 - RNA, 19 nt, Homo sapiens
  misc_RNA (1)...(19): siRNA sense strand
uggagaaauugaagagccu

SEQ ID NO: 2464359 - RNA, 19 nt, Homo sapiens
  misc_RNA (1)...(19): siRNA sense strand
ugcaagucccagaagaaua

SEQ ID NO: 2464360 - RNA, 19 nt, Homo sapiens
  misc_RNA (1)...(19): siRNA sense strand
cagaaaaccuagaugagca

SEQ ID NO: 2464361 - RNA, 19 nt, Homo sapiens
  misc_RNA (1)...(19): siRNA sense strand
cagccauggugaagguguu

SEQ ID NO: 2464362 - RNA, 19 nt, Homo sapiens
  misc_RNA (1)...(19): siRNA sense strand
accuagaugagcagauuaa

SEQ ID NO: 2464363 - RNA, 19 nt, Homo sapiens
  misc_RNA (1)...(19): siRNA sense strand
agaaagugucccagcagau

SEQ ID NO: 2464364 - RNA, 19 nt, Homo sapiens
  misc_RNA (1)...(19): siRNA sense strand
ccagaugaaacuuuggaga

SEQ ID NO: 2464365 - RNA, 19 nt, Homo sapiens
  misc_RNA (1)...(19): siRNA sense strand
agaugagcagauuaagaaa

SEQ ID NO: 2464366 - RNA, 19 nt, Homo sapiens
  misc_RNA (1)...(19): siRNA sense strand
uggaucagugaaagacaaa

SEQ ID NO: 2464367 - RNA, 19 nt, Homo sapiens
  misc_RNA (1)...(19): siRNA sense strand
gcugaguacgccugcacaa

SEQ ID NO: 2464368 - RNA, 19 nt, Homo sapiens
  misc_RNA (1)...(19): siRNA sense strand
ucaucaaccuguauggcau

SEQ ID NO: 2464369 - RNA, 19 nt, Homo sapiens
  misc_RNA (1)...(19): siRNA sense strand
cugaggagcagaaagccaa

SEQ ID NO: 2464370 - RNA, 19 nt, Homo sapiens
  misc_RNA (1)...(19): siRNA sense strand
uggaaaacauccuuggaga

SEQ ID NO: 2464371 - RNA, 19 nt, Homo sapiens
  misc_RNA (1)...(19): siRNA sense strand
gaucagugaaagacaaaau

SEQ ID NO: 2464372 - RNA, 19 nt, Homo sapiens
  misc_RNA (1)...(19): siRNA sense strand
acacaagggacuauccgua

SEQ ID NO: 2464373 - RNA, 19 nt, Homo sapiens
  misc_RNA (1)...(19): siRNA sense strand
aggcaaaaucaagaagaaa

SEQ ID NO: 2464374 - RNA, 19 nt, Homo sapiens
  misc_RNA (1)...(19): siRNA sense strand
acgagguucucuuggccaa

SEQ ID NO: 2464375 - RNA, 19 nt, Homo sapiens
  misc_RNA (1)...(19): siRNA sense strand
uaggcaaaaucaagaagaa

SEQ ID NO: 2464376 - RNA, 19 nt, Homo sapiens
  misc_RNA (1)...(19): siRNA sense strand
uugcaaagacugaggucgu

SEQ ID NO: 2464377 - RNA, 19 nt, Homo sapiens
  misc_RNA (1)...(19): siRNA sense strand
auggaucagugaaagacaa

SEQ ID NO: 2464378 - RNA, 19 nt, Homo sapiens
  misc_RNA (1)...(19): siRNA sense strand
aguuagaaaacgagggaaa

SEQ ID NO: 2464379 - RNA, 19 nt, Homo sapiens
  misc_RNA (1)...(19): siRNA sense strand
agucagagagggagggaga

SEQ ID NO: 2464380 - RNA, 19 nt, Homo sapiens
  misc_RNA (1)...(19): siRNA sense strand
agccacaagacgagagaaa

SEQ ID NO: 2464381 - RNA, 19 nt, Homo sapiens
  misc_RNA (1)...(19): siRNA sense strand
ggacauaacaacuucggaa

SEQ ID NO: 2464382 - RNA, 19 nt, Homo sapiens
  misc_RNA (1)...(19): siRNA sense strand
agagugagggagaggcaaa

SEQ ID NO: 2464383 - RNA, 19 nt, Homo sapiens
  misc_RNA (1)...(19): siRNA sense strand
agacagaaaacaagggcaa

SEQ ID NO: 2464384 - RNA, 19 nt, Homo sapiens
  misc_RNA (1)...(19): siRNA sense strand
ccuagagguccaagggaau

SEQ ID NO: 2464385 - RNA, 19 nt, Homo sapiens
  misc_RNA (1)...(19): siRNA sense strand
gcgaagaauggaaagguca

SEQ ID NO: 2464386 - RNA, 19 nt, Homo sapiens
  misc_RNA (1)...(19): siRNA sense strand
aaggaaagucagagaggga

SEQ ID NO: 2464387 - RNA, 19 nt, Homo sapiens
  misc_RNA (1)...(19): siRNA sense strand
ccaggaaagccaaaagaaa

SEQ ID NO: 2464388 - RNA, 19 nt, Homo sapiens
  misc_RNA (1)...(19): siRNA sense strand
agggaggaucagagagaga

SEQ ID NO: 2464389 - RNA, 19 nt, Homo sapiens
  misc_RNA (1)...(19): siRNA sense strand
uaucauauguggagcggga

SEQ ID NO: 2464390 - RNA, 19 nt, Homo sapiens
  misc_RNA (1)...(19): siRNA sense strand
agggaaaaccagagauaga

SEQ ID NO: 2464391 - RNA, 19 nt, Homo sapiens
  misc_RNA (1)...(19): siRNA sense strand
agccagagagugagggaga

SEQ ID NO: 2464392 - RNA, 19 nt, Homo sapiens
  misc_RNA (1)...(19): siRNA sense strand
ggaugauguacccaggaaa

SEQ ID NO: 2464393 - RNA, 19 nt, Homo sapiens
  misc_RNA (1)...(19): siRNA sense strand
aaccaaggaaagauggaaa

SEQ ID NO: 2464394 - RNA, 19 nt, Homo sapiens
  misc_RNA (1)...(19): siRNA sense strand
agggaaagacagaaaacaa

SEQ ID NO: 2464395 - RNA, 19 nt, Homo sapiens
  misc_RNA (1)...(19): siRNA sense strand
gaauuugacaauauggcua

SEQ ID NO: 2464396 - RNA, 19 nt, Homo sapiens
  misc_RNA (1)...(19): siRNA sense strand
uucaaaaggaagagacaaa

SEQ ID NO: 2464397 - RNA, 19 nt, Homo sapiens
  misc_RNA (1)...(19): siRNA sense strand
agauagagggaaagccaga

SEQ ID NO: 2464398 - RNA, 19 nt, Homo sapiens
  misc_RNA (1)...(19): siRNA sense strand
gugcaggaugagaagagaa

SEQ ID NO: 2464399 - RNA, 19 nt, Homo sapiens
  misc_RNA (1)...(19): siRNA sense strand
agagagggagggagaguca

SEQ ID NO: 2464400 - RNA, 19 nt, Homo sapiens
  misc_RNA (1)...(19): siRNA sense strand
agucagagauggagggagg

SEQ ID NO: 2464401 - RNA, 19 nt, Homo sapiens
  misc_RNA (1)...(19): siRNA sense strand
ugcaggaugagaagagaaa

SEQ ID NO: 2464402 - RNA, 19 nt, Homo sapiens
  misc_RNA (1)...(19): siRNA sense strand
ggcaaaagaaggaaaguca

SEQ ID NO: 2464403 - RNA, 19 nt, Homo sapiens
  misc_RNA (1)...(19): siRNA sense strand
agagggaaaaccagagaua

SEQ ID NO: 2464404 - RNA, 19 nt, Homo sapiens
  misc_RNA (1)...(19): siRNA sense strand
gcucauuaccucaaggagu

SEQ ID NO: 2464405 - RNA, 19 nt, Homo sapiens
  misc_RNA (1)...(19): siRNA sense strand
acauaacaacuucggaaau

SEQ ID NO: 2464406 - RNA, 19 nt, Homo sapiens
  misc_RNA (1)...(19): siRNA sense strand
agggagagucagagaugga

SEQ ID NO: 2464407 - RNA, 19 nt, Homo sapiens
  misc_RNA (1)...(19): siRNA sense strand
agagauagagggaaagcca

SEQ ID NO: 2464408 - RNA, 19 nt, Homo sapiens
  misc_RNA (1)...(19): siRNA sense strand
agagagugaaggagagcca

SEQ ID NO: 2464409 - RNA, 19 nt, Homo sapiens
  misc_RNA (1)...(19): siRNA sense strand
aggauaaaggaaagccaga

SEQ ID NO: 2464410 - RNA, 19 nt, Homo sapiens
  misc_RNA (1)...(19): siRNA sense strand
gguccgugaaagacaggaa

SEQ ID NO: 2464411 - RNA, 19 nt, Homo sapiens
  misc_RNA (1)...(19): siRNA sense strand
ccacaagacgagagaaagc

SEQ ID NO: 2464412 - RNA, 19 nt, Homo sapiens
  misc_RNA (1)...(19): siRNA sense strand
acaagaaguuagaaaacga

SEQ ID NO: 2464413 - RNA, 19 nt, Homo sapiens
  misc_RNA (1)...(19): siRNA sense strand
acagaaaacaagggcaaaa

SEQ ID NO: 2464414 - RNA, 19 nt, Homo sapiens
  misc_RNA (1)...(19): siRNA sense strand
uggaauggcggaaggggaa

SEQ ID NO: 2464415 - RNA, 19 nt, Homo sapiens
  misc_RNA (1)...(19): siRNA sense strand
agccagagagugaaggaga

SEQ ID NO: 2464416 - RNA, 19 nt, Homo sapiens
  misc_RNA (1)...(19): siRNA sense strand
gcuucaaaccaaggaaaga

SEQ ID NO: 2464417 - RNA, 19 nt, Homo sapiens
  misc_RNA (1)...(19): siRNA sense strand
ccacaucugucaaugcgaa

SEQ ID NO: 2464418 - RNA, 19 nt, Homo sapiens
  misc_RNA (1)...(19): siRNA sense strand
agcaaugaggacaugauaa

SEQ ID NO: 2464419 - RNA, 19 nt, Homo sapiens
  misc_RNA (1)...(19): siRNA sense strand
gacaggaaaaggaggggaa

SEQ ID NO: 2464420 - RNA, 19 nt, Homo sapiens
  misc_RNA (1)...(19): siRNA sense strand
gggcaaaacaggagaugag

SEQ ID NO: 2464421 - RNA, 19 nt, Homo sapiens
  misc_RNA (1)...(19): siRNA sense strand
ugaaggagagccagggagu

SEQ ID NO: 2464422 - RNA, 19 nt, Homo sapiens
  misc_RNA (1)...(19): siRNA sense strand
aggaguauaaagaggccau

SEQ ID NO: 2464423 - RNA, 19 nt, Homo sapiens
  misc_RNA (1)...(19): siRNA sense strand
gccuguaaucccagcguuu

SEQ ID NO: 2464424 - RNA, 19 nt, Homo sapiens
  misc_RNA (1)...(19): siRNA sense strand
cagcaggaguauuggcaca

SEQ ID NO: 2464425 - RNA, 19 nt, Homo sapiens
  misc_RNA (1)...(19): siRNA sense strand
cgacacaggaauugcccua

SEQ ID NO: 2464426 - RNA, 19 nt, Homo sapiens
  misc_RNA (1)...(19): siRNA sense strand
aagucaagcagcaggagua

SEQ ID NO: 2464427 - RNA, 19 nt, Homo sapiens
  misc_RNA (1)...(19): siRNA sense strand
uaacauggcugaugaggca

SEQ ID NO: 2464428 - RNA, 19 nt, Homo sapiens
  misc_RNA (1)...(19): siRNA sense strand
cuacagaugacuggagcaa

SEQ ID NO: 2464429 - RNA, 19 nt, Homo sapiens
  misc_RNA (1)...(19): siRNA sense strand
ggaaagugguuguacgggu

SEQ ID NO: 2464430 - RNA, 19 nt, Homo sapiens
  misc_RNA (1)...(19): siRNA sense strand
ugauaaauggagugaucga

SEQ ID NO: 2464431 - RNA, 19 nt, Homo sapiens
  misc_RNA (1)...(19): siRNA sense strand
gcaaaugaaucuugggugg

SEQ ID NO: 2464432 - RNA, 19 nt, Homo sapiens
  misc_RNA (1)...(19): siRNA sense strand
gggugaagcagcugaccga

SEQ ID NO: 2464433 - RNA, 19 nt, Homo sapiens
  misc_RNA (1)...(19): siRNA sense strand
guguauugauaaauggagu

SEQ ID NO: 2464434 - RNA, 19 nt, Homo sapiens
  misc_RNA (1)...(19): siRNA sense strand
cuuaaugauguaacggcua

SEQ ID NO: 2464435 - RNA, 19 nt, Homo sapiens
  misc_RNA (1)...(19): siRNA sense strand
guaacaucuugucaggcua

SEQ ID NO: 2464436 - RNA, 19 nt, Homo sapiens
  misc_RNA (1)...(19): siRNA sense strand
gcuagucuuuggaugggaa

SEQ ID NO: 2464437 - RNA, 19 nt, Homo sapiens
  misc_RNA (1)...(19): siRNA sense strand
agugaucgacacaggaauu

SEQ ID NO: 2464438 - RNA, 19 nt, Homo sapiens
  misc_RNA (1)...(19): siRNA sense strand
gaguauuggcacagagcuc

SEQ ID NO: 2464439 - RNA, 19 nt, Homo sapiens
  misc_RNA (1)...(19): siRNA sense strand
ccggaaauucugcgggaaa

SEQ ID NO: 2464440 - RNA, 19 nt, Homo sapiens
  misc_RNA (1)...(19): siRNA sense strand
uggcagagguucagggacu

SEQ ID NO: 2464441 - RNA, 19 nt, Homo sapiens
  misc_RNA (1)...(19): siRNA sense strand
ccguugaggaggacagcua

SEQ ID NO: 2464442 - RNA, 19 nt, Homo sapiens
  misc_RNA (1)...(19): siRNA sense strand
ugggagaugggaagcgaaa

SEQ ID NO: 2464443 - RNA, 19 nt, Homo sapiens
  misc_RNA (1)...(19): siRNA sense strand
caaggaaacuggaggagac

SEQ ID NO: 2464444 - RNA, 19 nt, Homo sapiens
  misc_RNA (1)...(19): siRNA sense strand
gcugagagcuuucggguug

SEQ ID NO: 2464445 - RNA, 19 nt, Homo sapiens
  misc_RNA (1)...(19): siRNA sense strand
guugacgcccacagagaaa

SEQ ID NO: 2464446 - RNA, 19 nt, Homo sapiens
  misc_RNA (1)...(19): siRNA sense strand
caaagagggugcugcagga

SEQ ID NO: 2464447 - RNA, 19 nt, Homo sapiens
  misc_RNA (1)...(19): siRNA sense strand
cggaaguccaagagcagga

SEQ ID NO: 2464448 - RNA, 19 nt, Homo sapiens
  misc_RNA (1)...(19): siRNA sense strand
cagugaguccagaagagaa

SEQ ID NO: 2464449 - RNA, 19 nt, Homo sapiens
  misc_RNA (1)...(19): siRNA sense strand
cccaagaaguugacgccca

SEQ ID NO: 2464450 - RNA, 19 nt, Homo sapiens
  misc_RNA (1)...(19): siRNA sense strand
acuccaaacagcccgguaa

SEQ ID NO: 2464451 - RNA, 19 nt, Homo sapiens
  misc_RNA (1)...(19): siRNA sense strand
gcaaggaaacuggaggaga

SEQ ID NO: 2464452 - RNA, 19 nt, Homo sapiens
  misc_RNA (1)...(19): siRNA sense strand
aggcaaagagggugcugca

SEQ ID NO: 2464453 - RNA, 19 nt, Homo sapiens
  misc_RNA (1)...(19): siRNA sense strand
cugagaaggagguaaaaga

SEQ ID NO: 2464454 - RNA, 19 nt, Homo sapiens
  misc_RNA (1)...(19): siRNA sense strand
guauuugaccugagugacu

SEQ ID NO: 2464455 - RNA, 19 nt, Homo sapiens
  misc_RNA (1)...(19): siRNA sense strand
aguccagaagagaaggaau

SEQ ID NO: 2464456 - RNA, 19 nt, Homo sapiens
  misc_RNA (1)...(19): siRNA sense strand
ucgaauuggagccaggcaa

SEQ ID NO: 2464457 - RNA, 19 nt, Homo sapiens
  misc_RNA (1)...(19): siRNA sense strand
ucguggagaccucgguuaa

SEQ ID NO: 2464458 - RNA, 19 nt, Homo sapiens
  misc_RNA (1)...(19): siRNA sense strand
agaauaaguucaaacagga

SEQ ID NO: 2464459 - RNA, 19 nt, Homo sapiens
  misc_RNA (1)...(19): siRNA sense strand
augguuagagagagagauu

SEQ ID NO: 2464460 - RNA, 19 nt, Homo sapiens
  misc_RNA (1)...(19): siRNA sense strand
acacaaucggcguggaguu

SEQ ID NO: 2464461 - RNA, 19 nt, Homo sapiens
  misc_RNA (1)...(19): siRNA sense strand
ggugauuggcagugcagga

SEQ ID NO: 2464462 - RNA, 19 nt, Homo sapiens
  misc_RNA (1)...(19): siRNA sense strand
agcuagacccggagaggau

SEQ ID NO: 2464463 - RNA, 19 nt, Homo sapiens
  misc_RNA (1)...(19): siRNA sense strand
gagaauaaguucaaacagg

SEQ ID NO: 2464464 - RNA, 19 nt, Homo sapiens
  misc_RNA (1)...(19): siRNA sense strand
aaacaggacuccaaccaca

SEQ ID NO: 2464465 - RNA, 19 nt, Homo sapiens
  misc_RNA (1)...(19): siRNA sense strand
ggucaacgugggugggaag

SEQ ID NO: 2464466 - RNA, 19 nt, Homo sapiens
  misc_RNA (1)...(19): siRNA sense strand
agaaggaccuggacccuga

SEQ ID NO: 2464467 - RNA, 19 nt, Homo sapiens
  misc_RNA (1)...(19): siRNA sense strand
gagcugauguuccuggaga

SEQ ID NO: 2464468 - RNA, 19 nt, Homo sapiens
  misc_RNA (1)...(19): siRNA sense strand
gggccaagcucaucggcaa

SEQ ID NO: 2464469 - RNA, 19 nt, Homo sapiens
  misc_RNA (1)...(19): siRNA sense strand
gggaaggcucuuacggcaa

SEQ ID NO: 2464470 - RNA, 19 nt, Homo sapiens
  misc_RNA (1)...(19): siRNA sense strand
cagaaaauguauaugguga

SEQ ID NO: 2464471 - RNA, 19 nt, Homo sapiens
  misc_RNA (1)...(19): siRNA sense strand
uguuauacaacgaagagaa

SEQ ID NO: 2464472 - RNA, 19 nt, Homo sapiens
  misc_RNA (1)...(19): siRNA sense strand
ccaacgugaagaaggaaau

SEQ ID NO: 2464473 - RNA, 19 nt, Homo sapiens
  misc_RNA (1)...(19): siRNA sense strand
acgaagagaagcagaaaau

SEQ ID NO: 2464474 - RNA, 19 nt, Homo sapiens
  misc_RNA (1)...(19): siRNA sense strand
acaacgaagagaagcagaa

SEQ ID NO: 2464475 - RNA, 19 nt, Homo sapiens
  misc_RNA (1)...(19): siRNA sense strand
aagaagaagaaguugcgaa

SEQ ID NO: 2464476 - RNA, 19 nt, Homo sapiens
  misc_RNA (1)...(19): siRNA sense strand
guguguggcaugcaggaaa

SEQ ID NO: 2464477 - RNA, 19 nt, Homo sapiens
  misc_RNA (1)...(19): siRNA sense strand
gccaacgugaagaaggaaa

SEQ ID NO: 2464478 - RNA, 19 nt, Homo sapiens
  misc_RNA (1)...(19): siRNA sense strand
cugaggagguuacggcaca

SEQ ID NO: 2464479 - RNA, 19 nt, Homo sapiens
  misc_RNA (1)...(19): siRNA sense strand
gcauguucacggagggcga

SEQ ID NO: 2464480 - RNA, 19 nt, Homo sapiens
  misc_RNA (1)...(19): siRNA sense strand
agaagaagaaguugcgaag

SEQ ID NO: 2464481 - RNA, 19 nt, Homo sapiens
  misc_RNA (1)...(19): siRNA sense strand
gcaugacuguggugccgua

SEQ ID NO: 2464482 - RNA, 19 nt, Homo sapiens
  misc_RNA (1)...(19): siRNA sense strand
uauacaacgaagagaagca

SEQ ID NO: 2464483 - RNA, 19 nt, Homo sapiens
  misc_RNA (1)...(19): siRNA sense strand
uggacagcgugccggagaa

SEQ ID NO: 2464484 - RNA, 19 nt, Homo sapiens
  misc_RNA (1)...(19): siRNA sense strand
uggaaauugaaauggaaga

SEQ ID NO: 2464485 - RNA, 19 nt, Homo sapiens
  misc_RNA (1)...(19): siRNA sense strand
gauaaauggaugaacagca

SEQ ID NO: 2464486 - RNA, 19 nt, Homo sapiens
  misc_RNA (1)...(19): siRNA sense strand
gggaagugaaaacgugaaa

SEQ ID NO: 2464487 - RNA, 19 nt, Homo sapiens
  misc_RNA (1)...(19): siRNA sense strand
agacauaugaacugggaag

SEQ ID NO: 2464488 - RNA, 19 nt, Homo sapiens
  misc_RNA (1)...(19): siRNA sense strand
uugaaauggaagagcuuga

SEQ ID NO: 2464489 - RNA, 19 nt, Homo sapiens
  misc_RNA (1)...(19): siRNA sense strand
agaaggaaucaaaucacaa

SEQ ID NO: 2464490 - RNA, 19 nt, Homo sapiens
  misc_RNA (1)...(19): siRNA sense strand
gaaucaaaucacaacccaa

SEQ ID NO: 2464491 - RNA, 19 nt, Homo sapiens
  misc_RNA (1)...(19): siRNA sense strand
aggagauacaacuguggaa

SEQ ID NO: 2464492 - RNA, 19 nt, Homo sapiens
  misc_RNA (1)...(19): siRNA sense strand
uugaaggaagagaaggaau

SEQ ID NO: 2464493 - RNA, 19 nt, Homo sapiens
  misc_RNA (1)...(19): siRNA sense strand
aauugaaauggaagagcuu

SEQ ID NO: 2464494 - RNA, 19 nt, Homo sapiens
  misc_RNA (1)...(19): siRNA sense strand
ccucauuugcacagugaaa

SEQ ID NO: 2464495 - RNA, 19 nt, Homo sapiens
  misc_RNA (1)...(19): siRNA sense strand
uugaauaccugaagcgaca

SEQ ID NO: 2464496 - RNA, 19 nt, Homo sapiens
  misc_RNA (1)...(19): siRNA sense strand
cgguuauaauccuugggaa

SEQ ID NO: 2464497 - RNA, 19 nt, Homo sapiens
  misc_RNA (1)...(19): siRNA sense strand
aagcuaaaccagagccuga

SEQ ID NO: 2464498 - RNA, 19 nt, Homo sapiens
  misc_RNA (1)...(19): siRNA sense strand
aggacaagugcccaggaaa

SEQ ID NO: 2464499 - RNA, 19 nt, Homo sapiens
  misc_RNA (1)...(19): siRNA sense strand
ggaaauuacacaaacccau

SEQ ID NO: 2464500 - RNA, 19 nt, Homo sapiens
  misc_RNA (1)...(19): siRNA sense strand
uggauaucacccagaguau

SEQ ID NO: 2464501 - RNA, 19 nt, Homo sapiens
  misc_RNA (1)...(19): siRNA sense strand
caguaucaccacagcaaaa

SEQ ID NO: 2464502 - RNA, 19 nt, Homo sapiens
  misc_RNA (1)...(19): siRNA sense strand
uauuucaagccuagaagaa

SEQ ID NO: 2464503 - RNA, 19 nt, Homo sapiens
  misc_RNA (1)...(19): siRNA sense strand
cagaacuauuucaagccua

SEQ ID NO: 2464504 - RNA, 19 nt, Homo sapiens
  misc_RNA (1)...(19): siRNA sense strand
gccugauauacuugaagaa

SEQ ID NO: 2464505 - RNA, 19 nt, Homo sapiens
  misc_RNA (1)...(19): siRNA sense strand
gcguaagcuggcagacaaa

SEQ ID NO: 2464506 - RNA, 19 nt, Homo sapiens
  misc_RNA (1)...(19): siRNA sense strand
aaacagaucacaaaggaga

SEQ ID NO: 2464507 - RNA, 19 nt, Homo sapiens
  misc_RNA (1)...(19): siRNA sense strand
augaaggagaugaaaguuu

SEQ ID NO: 2464508 - RNA, 19 nt, Homo sapiens
  misc_RNA (1)...(19): siRNA sense strand
ccaaacaccuccaauucua

SEQ ID NO: 2464509 - RNA, 19 nt, Homo sapiens
  misc_RNA (1)...(19): siRNA sense strand
ucaauauaggauaggugaa

SEQ ID NO: 2464510 - RNA, 19 nt, Homo sapiens
  misc_RNA (1)...(19): siRNA sense strand
ccgcaacaucgcuaagcaa

SEQ ID NO: 2464511 - RNA, 19 nt, Homo sapiens
  misc_RNA (1)...(19): siRNA sense strand
cagcuguaaagcagaguau

SEQ ID NO: 2464512 - RNA, 19 nt, Homo sapiens
  misc_RNA (1)...(19): siRNA sense strand
uugugaagcauuuaagcaa

SEQ ID NO: 2464513 - RNA, 19 nt, Homo sapiens
  misc_RNA (1)...(19): siRNA sense strand
ccaaagacaauaaagagca

SEQ ID NO: 2464514 - RNA, 19 nt, Homo sapiens
  misc_RNA (1)...(19): siRNA sense strand
acaauaaagagcaguucau

SEQ ID NO: 2464515 - RNA, 19 nt, Homo sapiens
  misc_RNA (1)...(19): siRNA sense strand
gcucuauuuaugaaggaga

SEQ ID NO: 2464516 - RNA, 19 nt, Homo sapiens
  misc_RNA (1)...(19): siRNA sense strand
ccauaucaucagcuguaaa

SEQ ID NO: 2464517 - RNA, 19 nt, Homo sapiens
  misc_RNA (1)...(19): siRNA sense strand
augccaaagacaauaaaga

SEQ ID NO: 2464518 - RNA, 19 nt, Homo sapiens
  misc_RNA (1)...(19): siRNA sense strand
agaaaaggcuacagaggaa

SEQ ID NO: 2464519 - RNA, 19 nt, Homo sapiens
  misc_RNA (1)...(19): siRNA sense strand
caaagaaacuggagaggcu

SEQ ID NO: 2464520 - RNA, 19 nt, Homo sapiens
  misc_RNA (1)...(19): siRNA sense strand
aagcaaaacugaagcaaau

SEQ ID NO: 2464521 - RNA, 19 nt, Homo sapiens
  misc_RNA (1)...(19): siRNA sense strand
uggcauuaaaggaggaauu

SEQ ID NO: 2464522 - RNA, 19 nt, Homo sapiens
  misc_RNA (1)...(19): siRNA sense strand
gcaaaguaggagauggaca

SEQ ID NO: 2464523 - RNA, 19 nt, Homo sapiens
  misc_RNA (1)...(19): siRNA sense strand
ucauugaguauguguguaa

SEQ ID NO: 2464524 - RNA, 19 nt, Homo sapiens
  misc_RNA (1)...(19): siRNA sense strand
aagaauaacaugggagaga

SEQ ID NO: 2464525 - RNA, 19 nt, Homo sapiens
  misc_RNA (1)...(19): siRNA sense strand
cagugaaguggaugaaauu

SEQ ID NO: 2464526 - RNA, 19 nt, Homo sapiens
  misc_RNA (1)...(19): siRNA sense strand
cugaaaaugcugugugcaa

SEQ ID NO: 2464527 - RNA, 19 nt, Homo sapiens
  misc_RNA (1)...(19): siRNA sense strand
gcugaugcugucugggaua

SEQ ID NO: 2464528 - RNA, 19 nt, Homo sapiens
  misc_RNA (1)...(19): siRNA sense strand
ggugaauaaagauggcauu

SEQ ID NO: 2464529 - RNA, 19 nt, Homo sapiens
  misc_RNA (1)...(19): siRNA sense strand
ugaagaauaacaugggaga

SEQ ID NO: 2464530 - RNA, 19 nt, Homo sapiens
  misc_RNA (1)...(19): siRNA sense strand
guguauagaccaagauugu

SEQ ID NO: 2464531 - RNA, 19 nt, Homo sapiens
  misc_RNA (1)...(19): siRNA sense strand
augcaaaguaggagaugga

SEQ ID NO: 2464532 - RNA, 19 nt, Homo sapiens
  misc_RNA (1)...(19): siRNA sense strand
uagaaaaugggaagcaaaa

SEQ ID NO: 2464533 - RNA, 19 nt, Homo sapiens
  misc_RNA (1)...(19): siRNA sense strand
gcagaugaaacuaggagca

SEQ ID NO: 2464534 - RNA, 19 nt, Homo sapiens
  misc_RNA (1)...(19): siRNA sense strand
cugaagauguuuugaacuu

SEQ ID NO: 2464535 - RNA, 19 nt, Homo sapiens
  misc_RNA (1)...(19): siRNA sense strand
agaugaagcagaugaaacu

SEQ ID NO: 2464536 - RNA, 19 nt, Homo sapiens
  misc_RNA (1)...(19): siRNA sense strand
gaagcaaaacugaagcaaa

SEQ ID NO: 2464537 - RNA, 19 nt, Homo sapiens
  misc_RNA (1)...(19): siRNA sense strand
cggaguuuauacaagaaau

SEQ ID NO: 2464538 - RNA, 19 nt, Homo sapiens
  misc_RNA (1)...(19): siRNA sense strand
gagcaaugaaacccagaau

SEQ ID NO: 2464539 - RNA, 19 nt, Homo sapiens
  misc_RNA (1)...(19): siRNA sense strand
gaauaacaugggagagaag

SEQ ID NO: 2464540 - RNA, 19 nt, Homo sapiens
  misc_RNA (1)...(19): siRNA sense strand
aaacauuggaagagcccau

SEQ ID NO: 2464541 - RNA, 19 nt, Homo sapiens
  misc_RNA (1)...(19): siRNA sense strand
cuaugaaguuauuccugaa

SEQ ID NO: 2464542 - RNA, 19 nt, Homo sapiens
  misc_RNA (1)...(19): siRNA sense strand
acugaagcaaauugaagaa

SEQ ID NO: 2464543 - RNA, 19 nt, Homo sapiens
  misc_RNA (1)...(19): siRNA sense strand
cagaugaaacuaggagcaa

SEQ ID NO: 2464544 - RNA, 19 nt, Homo sapiens
  misc_RNA (1)...(19): siRNA sense strand
gcaaauugaagaacgagca

SEQ ID NO: 2464545 - RNA, 19 nt, Homo sapiens
  misc_RNA (1)...(19): siRNA sense strand
gcuguaaagaagacguuca

SEQ ID NO: 2464546 - RNA, 19 nt, Homo sapiens
  misc_RNA (1)...(19): siRNA sense strand
agacaacaggccauggauu

SEQ ID NO: 2464547 - RNA, 19 nt, Homo sapiens
  misc_RNA (1)...(19): siRNA sense strand
uggaaugcaaaguaggaga

SEQ ID NO: 2464548 - RNA, 19 nt, Homo sapiens
  misc_RNA (1)...(19): siRNA sense strand
uggagguuacugaagauaa

SEQ ID NO: 2464549 - RNA, 19 nt, Homo sapiens
  misc_RNA (1)...(19): siRNA sense strand
gugugaaaacauuggaaga

SEQ ID NO: 2464550 - RNA, 19 nt, Homo sapiens
  misc_RNA (1)...(19): siRNA sense strand
agaugaaacuaggagcaau

SEQ ID NO: 2464551 - RNA, 19 nt, Homo sapiens
  misc_RNA (1)...(19): siRNA sense strand
ggaaugcaaaguaggagau

SEQ ID NO: 2464552 - RNA, 19 nt, Homo sapiens
  misc_RNA (1)...(19): siRNA sense strand
caagauuguccaagccaga

SEQ ID NO: 2464553 - RNA, 19 nt, Homo sapiens
  misc_RNA (1)...(19): siRNA sense strand
cccuguauguaaagcagaa

SEQ ID NO: 2464554 - RNA, 19 nt, Homo sapiens
  misc_RNA (1)...(19): siRNA sense strand
gaugaaacuaggagcaaug

SEQ ID NO: 2464555 - RNA, 19 nt, Homo sapiens
  misc_RNA (1)...(19): siRNA sense strand
auagaaaaugggaagcaaa

SEQ ID NO: 2464556 - RNA, 19 nt, Homo sapiens
  misc_RNA (1)...(19): siRNA sense strand
gcuaugaaguuauuccuga

SEQ ID NO: 2464557 - RNA, 19 nt, Homo sapiens
  misc_RNA (1)...(19): siRNA sense strand
caucgaauucaaagaaacu

SEQ ID NO: 2464558 - RNA, 19 nt, Homo sapiens
  misc_RNA (1)...(19): siRNA sense strand
aagauguuucugacgaaua

SEQ ID NO: 2464559 - RNA, 19 nt, Homo sapiens
  misc_RNA (1)...(19): siRNA sense strand
cagaugaagcagaugaaac

SEQ ID NO: 2464560 - RNA, 19 nt, Homo sapiens
  misc_RNA (1)...(19): siRNA sense strand
cucagauacuuuacgaauu

SEQ ID NO: 2464561 - RNA, 19 nt, Homo sapiens
  misc_RNA (1)...(19): siRNA sense strand
ccaucucagaauaaacaaa

SEQ ID NO: 2464562 - RNA, 19 nt, Homo sapiens
  misc_RNA (1)...(19): siRNA sense strand
aguagaaaccauugaaggu

SEQ ID NO: 2464563 - RNA, 19 nt, Homo sapiens
  misc_RNA (1)...(19): siRNA sense strand
gaggaagaagaguuuacaa

SEQ ID NO: 2464564 - RNA, 19 nt, Homo sapiens
  misc_RNA (1)...(19): siRNA sense strand
uuauaacagugaaguggau

SEQ ID NO: 2464565 - RNA, 19 nt, Homo sapiens
  misc_RNA (1)...(19): siRNA sense strand
ucucagauacuuuacgaau

SEQ ID NO: 2464566 - RNA, 19 nt, Homo sapiens
  misc_RNA (1)...(19): siRNA sense strand
agaguuuacaacagaugaa

SEQ ID NO: 2464567 - RNA, 19 nt, Homo sapiens
  misc_RNA (1)...(19): siRNA sense strand
cggcagaguuucaagggcu

SEQ ID NO: 2464568 - RNA, 19 nt, Homo sapiens
  misc_RNA (1)...(19): siRNA sense strand
gauacuauuaggagggaau

SEQ ID NO: 2464569 - RNA, 19 nt, Homo sapiens
  misc_RNA (1)...(19): siRNA sense strand
gguuuaggucggagcgcaa

SEQ ID NO: 2464570 - RNA, 19 nt, Homo sapiens
  misc_RNA (1)...(19): siRNA sense strand
caguuugaaauaugggaaa

SEQ ID NO: 2464571 - RNA, 19 nt, Homo sapiens
  misc_RNA (1)...(19): siRNA sense strand
agugcuaaguaaaggauau

SEQ ID NO: 2464572 - RNA, 19 nt, Homo sapiens
  misc_RNA (1)...(19): siRNA sense strand
ccucgaaguuggagugcca

SEQ ID NO: 2464573 - RNA, 19 nt, Homo sapiens
  misc_RNA (1)...(19): siRNA sense strand
gggaugaagcaguggguuc

SEQ ID NO: 2464574 - RNA, 19 nt, Homo sapiens
  misc_RNA (1)...(19): siRNA sense strand
acuacaauauggauggcua

SEQ ID NO: 2464575 - RNA, 19 nt, Homo sapiens
  misc_RNA (1)...(19): siRNA sense strand
aaagcagaugauagagaaa

SEQ ID NO: 2464576 - RNA, 19 nt, Homo sapiens
  misc_RNA (1)...(19): siRNA sense strand
cauuguagugcuaaguaaa

SEQ ID NO: 2464577 - RNA, 19 nt, Homo sapiens
  misc_RNA (1)...(19): siRNA sense strand
uugcagacuuugauggaga

SEQ ID NO: 2464578 - RNA, 19 nt, Homo sapiens
  misc_RNA (1)...(19): siRNA sense strand
aauuaugccaagagugaau

SEQ ID NO: 2464579 - RNA, 19 nt, Homo sapiens
  misc_RNA (1)...(19): siRNA sense strand
acauuuacgaagauggaau

SEQ ID NO: 2464580 - RNA, 19 nt, Homo sapiens
  misc_RNA (1)...(19): siRNA sense strand
agaaagcagaugauagaga

SEQ ID NO: 2464581 - RNA, 19 nt, Homo sapiens
  misc_RNA (1)...(19): siRNA sense strand
gcuaaguaaaggauauaca

SEQ ID NO: 2464582 - RNA, 19 nt, Homo sapiens
  misc_RNA (1)...(19): siRNA sense strand
uguagaugcaaauggguau

SEQ ID NO: 2464583 - RNA, 19 nt, Homo sapiens
  misc_RNA (1)...(19): siRNA sense strand
cuacaauauggauggcuau

SEQ ID NO: 2464584 - RNA, 19 nt, Homo sapiens
  misc_RNA (1)...(19): siRNA sense strand
cuguagaugcaaaugggua

SEQ ID NO: 2464585 - RNA, 19 nt, Homo sapiens
  misc_RNA (1)...(19): siRNA sense strand
gugcuaaguaaaggauaua

SEQ ID NO: 2464586 - RNA, 19 nt, Homo sapiens
  misc_RNA (1)...(19): siRNA sense strand
ggaaaagaaagcagaugau

SEQ ID NO: 2464587 - RNA, 19 nt, Homo sapiens
  misc_RNA (1)...(19): siRNA sense strand
gggaauuuaucauggcauc

SEQ ID NO: 2464588 - RNA, 19 nt, Homo sapiens
  misc_RNA (1)...(19): siRNA sense strand
auaugauggugguuggaca

SEQ ID NO: 2464589 - RNA, 19 nt, Homo sapiens
  misc_RNA (1)...(19): siRNA sense strand
agaaaugacuuaaucgucu

SEQ ID NO: 2464590 - RNA, 19 nt, Homo sapiens
  misc_RNA (1)...(19): siRNA sense strand
gaacacaucuggaagcaac

SEQ ID NO: 2464591 - RNA, 19 nt, Homo sapiens
  misc_RNA (1)...(19): siRNA sense strand
cugacagaccuaaaucaaa

SEQ ID NO: 2464592 - RNA, 19 nt, Homo sapiens
  misc_RNA (1)...(19): siRNA sense strand
aaaauuaugccaagaguga

SEQ ID NO: 2464593 - RNA, 19 nt, Homo sapiens
  misc_RNA (1)...(19): siRNA sense strand
aggaaaagaaagcagauga

SEQ ID NO: 2464594 - RNA, 19 nt, Homo sapiens
  misc_RNA (1)...(19): siRNA sense strand
caacaaugaccaagcccua

SEQ ID NO: 2464595 - RNA, 19 nt, Homo sapiens
  misc_RNA (1)...(19): siRNA sense strand
uggcaggaugacagcauaa

SEQ ID NO: 2464596 - RNA, 19 nt, Homo sapiens
  misc_RNA (1)...(19): siRNA sense strand
ugaagaugauacacggaga

SEQ ID NO: 2464597 - RNA, 19 nt, Homo sapiens
  misc_RNA (1)...(19): siRNA sense strand
acgugauccuugagcccaa

SEQ ID NO: 2464598 - RNA, 19 nt, Homo sapiens
  misc_RNA (1)...(19): siRNA sense strand
gaugcaagcugcugugcca

SEQ ID NO: 2464599 - RNA, 19 nt, Homo sapiens
  misc_RNA (1)...(19): siRNA sense strand
cggucaaggugaagaucuc

SEQ ID NO: 2464600 - RNA, 19 nt, Homo sapiens
  misc_RNA (1)...(19): siRNA sense strand
agccauguccgaugagcaa

SEQ ID NO: 2464601 - RNA, 19 nt, Homo sapiens
  misc_RNA (1)...(19): siRNA sense strand
ugaaagucuggcaggauga

SEQ ID NO: 2464602 - RNA, 19 nt, Homo sapiens
  misc_RNA (1)...(19): siRNA sense strand
gguuguaccaggagaaggu

SEQ ID NO: 2464603 - RNA, 19 nt, Homo sapiens
  misc_RNA (1)...(19): siRNA sense strand
cgacaucacaguggggaaa

SEQ ID NO: 2464604 - RNA, 19 nt, Homo sapiens
  misc_RNA (1)...(19): siRNA sense strand
ccccaaacaugaaugacaa

SEQ ID NO: 2464605 - RNA, 19 nt, Homo sapiens
  misc_RNA (1)...(19): siRNA sense strand
gaacgaagcgcgaggccau

SEQ ID NO: 2464606 - RNA, 19 nt, Homo sapiens
  misc_RNA (1)...(19): siRNA sense strand
gcgagggcuuugagcgcau

SEQ ID NO: 2464607 - RNA, 19 nt, Homo sapiens
  misc_RNA (1)...(19): siRNA sense strand
ccuacaaagagaagaugaa

SEQ ID NO: 2464608 - RNA, 19 nt, Homo sapiens
  misc_RNA (1)...(19): siRNA sense strand
ggaggaaggaugaaagcca

SEQ ID NO: 2464609 - RNA, 19 nt, Homo sapiens
  misc_RNA (1)...(19): siRNA sense strand
gggagacaguguaggagga

SEQ ID NO: 2464610 - RNA, 19 nt, Homo sapiens
  misc_RNA (1)...(19): siRNA sense strand
ucaagauggcuaaggaaaa

SEQ ID NO: 2464611 - RNA, 19 nt, Homo sapiens
  misc_RNA (1)...(19): siRNA sense strand
aaagaagagcucaggcaga

SEQ ID NO: 2464612 - RNA, 19 nt, Homo sapiens
  misc_RNA (1)...(19): siRNA sense strand
gaccugaauuggugcguca

SEQ ID NO: 2464613 - RNA, 19 nt, Homo sapiens
  misc_RNA (1)...(19): siRNA sense strand
aggaugaaagccagcggaa

SEQ ID NO: 2464614 - RNA, 19 nt, Homo sapiens
  misc_RNA (1)...(19): siRNA sense strand
ccaacaaggagaacaggga

SEQ ID NO: 2464615 - RNA, 19 nt, Homo sapiens
  misc_RNA (1)...(19): siRNA sense strand
gcugaggagcgaaggaagu

SEQ ID NO: 2464616 - RNA, 19 nt, Homo sapiens
  misc_RNA (1)...(19): siRNA sense strand
agaaagaagagcucaggca

SEQ ID NO: 2464617 - RNA, 19 nt, Homo sapiens
  misc_RNA (1)...(19): siRNA sense strand
aucaagauggcuaaggaaa

SEQ ID NO: 2464618 - RNA, 19 nt, Homo sapiens
  misc_RNA (1)...(19): siRNA sense strand
aagagaagaugaaggagcu

SEQ ID NO: 2464619 - RNA, 19 nt, Homo sapiens
  misc_RNA (1)...(19): siRNA sense strand
ggaaguaccaggaagcgga

SEQ ID NO: 2464620 - RNA, 19 nt, Homo sapiens
  misc_RNA (1)...(19): siRNA sense strand
uaugaaggcugguguggga

SEQ ID NO: 2464621 - RNA, 19 nt, Homo sapiens
  misc_RNA (1)...(19): siRNA sense strand
cugccuacaaagagaagau

SEQ ID NO: 2464622 - RNA, 19 nt, Homo sapiens
  misc_RNA (1)...(19): siRNA sense strand
ggcugcaagagaaggacaa

SEQ ID NO: 2464623 - RNA, 19 nt, Homo sapiens
  misc_RNA (1)...(19): siRNA sense strand
ggacaaggacccugggauc

SEQ ID NO: 2464624 - RNA, 19 nt, Homo sapiens
  misc_RNA (1)...(19): siRNA sense strand
ugauggugcacauggcaaa

SEQ ID NO: 2464625 - RNA, 19 nt, Homo sapiens
  misc_RNA (1)...(19): siRNA sense strand
agcugaaagaugaggacuu

SEQ ID NO: 2464626 - RNA, 19 nt, Homo sapiens
  misc_RNA (1)...(19): siRNA sense strand
agcauaugcccuaggguga

SEQ ID NO: 2464627 - RNA, 19 nt, Homo sapiens
  misc_RNA (1)...(19): siRNA sense strand
gccucaagcacuucaacaa

SEQ ID NO: 2464628 - RNA, 19 nt, Homo sapiens
  misc_RNA (1)...(19): siRNA sense strand
agacugaggaggaggcgaa

SEQ ID NO: 2464629 - RNA, 19 nt, Homo sapiens
  misc_RNA (1)...(19): siRNA sense strand
ccgugaaggcucuagguau

SEQ ID NO: 2464630 - RNA, 19 nt, Homo sapiens
  misc_RNA (1)...(19): siRNA sense strand
ggaagaaugugguuugcga

SEQ ID NO: 2464631 - RNA, 19 nt, Homo sapiens
  misc_RNA (1)...(19): siRNA sense strand
ggaccuacauuguggaccu

SEQ ID NO: 2464632 - RNA, 19 nt, Homo sapiens
  misc_RNA (1)...(19): siRNA sense strand
ucaugagccugguagggaa

SEQ ID NO: 2464633 - RNA, 19 nt, Homo sapiens
  misc_RNA (1)...(19): siRNA sense strand
gugaggcacuucagcggaa

SEQ ID NO: 2464634 - RNA, 19 nt, Homo sapiens
  misc_RNA (1)...(19): siRNA sense strand
ggcucuagguauugggaag

SEQ ID NO: 2464635 - RNA, 19 nt, Homo sapiens
  misc_RNA (1)...(19): siRNA sense strand
aucaagaggucgagccgau

SEQ ID NO: 2464636 - RNA, 19 nt, Homo sapiens
  misc_RNA (1)...(19): siRNA sense strand
aagaaugugguuugcgaga

SEQ ID NO: 2464637 - RNA, 19 nt, Homo sapiens
  misc_RNA (1)...(19): siRNA sense strand
ccgugaaugcgcugggcua

SEQ ID NO: 2464638 - RNA, 19 nt, Homo sapiens
  misc_RNA (1)...(19): siRNA sense strand
ccaagaagaggaagcccaa

SEQ ID NO: 2464639 - RNA, 19 nt, Homo sapiens
  misc_RNA (1)...(19): siRNA sense strand
auggaguggugcagaagaa

SEQ ID NO: 2464640 - RNA, 19 nt, Homo sapiens
  misc_RNA (1)...(19): siRNA sense strand
uggagcaggugguggccaa

SEQ ID NO: 2464641 - RNA, 19 nt, Homo sapiens
  misc_RNA (1)...(19): siRNA sense strand
ggacaucacugaagaggac

SEQ ID NO: 2464642 - RNA, 19 nt, Homo sapiens
  misc_RNA (1)...(19): siRNA sense strand
aagaggaccuggaggccau

SEQ ID NO: 2464643 - RNA, 19 nt, Homo sapiens
  misc_RNA (1)...(19): siRNA sense strand
acgcaggagcuucgggaca

SEQ ID NO: 2464644 - RNA, 19 nt, Homo sapiens
  misc_RNA (1)...(19): siRNA sense strand
gagaaggucuuuaacggga

SEQ ID NO: 2464645 - RNA, 19 nt, Homo sapiens
  misc_RNA (1)...(19): siRNA sense strand
gcagaagaaaauugcagaa

SEQ ID NO: 2464646 - RNA, 19 nt, Homo sapiens
  misc_RNA (1)...(19): siRNA sense strand
gcuagauguuggaccgagu

SEQ ID NO: 2464647 - RNA, 19 nt, Homo sapiens
  misc_RNA (1)...(19): siRNA sense strand
ccuuagggacaccgaguga

SEQ ID NO: 2464648 - RNA, 19 nt, Homo sapiens
  misc_RNA (1)...(19): siRNA sense strand
uccugcagauggagagcaa

SEQ ID NO: 2464649 - RNA, 19 nt, Homo sapiens
  misc_RNA (1)...(19): siRNA sense strand
cuccauggugucagagcaa

SEQ ID NO: 2464650 - RNA, 19 nt, Homo sapiens
  misc_RNA (1)...(19): siRNA sense strand
ccagagagcaagcugcaga

SEQ ID NO: 2464651 - RNA, 19 nt, Homo sapiens
  misc_RNA (1)...(19): siRNA sense strand
ccgugaagcagauggccga

SEQ ID NO: 2464652 - RNA, 19 nt, Homo sapiens
  misc_RNA (1)...(19): siRNA sense strand
ggaguggugcagaagaaaa

SEQ ID NO: 2464653 - RNA, 19 nt, Homo sapiens
  misc_RNA (1)...(19): siRNA sense strand
ccagcgaauuccagaggca

SEQ ID NO: 2464654 - RNA, 19 nt, Homo sapiens
  misc_RNA (1)...(19): siRNA sense strand
ggaggaaccugcaaccaga

SEQ ID NO: 2464655 - RNA, 19 nt, Homo sapiens
  misc_RNA (1)...(19): siRNA sense strand
gguucaacucugagcuguu

SEQ ID NO: 2464656 - RNA, 19 nt, Homo sapiens
  misc_RNA (1)...(19): siRNA sense strand
uggggaaaguggagacaaa

SEQ ID NO: 2464657 - RNA, 19 nt, Homo sapiens
  misc_RNA (1)...(19): siRNA sense strand
uggaagagcuggugacccu

SEQ ID NO: 2464658 - RNA, 19 nt, Homo sapiens
  misc_RNA (1)...(19): siRNA sense strand
cugcaguaccagauggaca

SEQ ID NO: 2464659 - RNA, 19 nt, Homo sapiens
  misc_RNA (1)...(19): siRNA sense strand
aguaccagauggacagcaa

SEQ ID NO: 2464660 - RNA, 19 nt, Homo sapiens
  misc_RNA (1)...(19): siRNA sense strand
ugaucaaggaauucaagaa

SEQ ID NO: 2464661 - RNA, 19 nt, Homo sapiens
  misc_RNA (1)...(19): siRNA sense strand
aagaagagguguuggacug

SEQ ID NO: 2464662 - RNA, 19 nt, Homo sapiens
  misc_RNA (1)...(19): siRNA sense strand
cgcagcacuuaauggguaa

SEQ ID NO: 2464663 - RNA, 19 nt, Homo sapiens
  misc_RNA (1)...(19): siRNA sense strand
acgcagcacuuaaugggua

SEQ ID NO: 2464664 - RNA, 19 nt, Homo sapiens
  misc_RNA (1)...(19): siRNA sense strand
ugaacguguuuguggggaa

SEQ ID NO: 2464665 - RNA, 19 nt, Homo sapiens
  misc_RNA (1)...(19): siRNA sense strand
agacaaaucaacuggaccu

SEQ ID NO: 2464666 - RNA, 19 nt, Homo sapiens
  misc_RNA (1)...(19): siRNA sense strand
cguccuuugucaagaacca

SEQ ID NO: 2464667 - RNA, 19 nt, Homo sapiens
  misc_RNA (1)...(19): siRNA sense strand
acagcaaauacccgaggaa

SEQ ID NO: 2464668 - RNA, 19 nt, Homo sapiens
  misc_RNA (1)...(19): siRNA sense strand
ggacuuuggugcugacgca

SEQ ID NO: 2464669 - RNA, 19 nt, Homo sapiens
  misc_RNA (1)...(19): siRNA sense strand
gagggaaacugcucaggga

SEQ ID NO: 2464670 - RNA, 19 nt, Homo sapiens
  misc_RNA (1)...(19): siRNA sense strand
gggacagcaggaaguggaa

SEQ ID NO: 2464671 - RNA, 19 nt, Homo sapiens
  misc_RNA (1)...(19): siRNA sense strand
ccauaaacaaccugacaau

SEQ ID NO: 2464672 - RNA, 19 nt, Homo sapiens
  misc_RNA (1)...(19): siRNA sense strand
gagccaaggaagagaaacu

SEQ ID NO: 2464673 - RNA, 19 nt, Homo sapiens
  misc_RNA (1)...(19): siRNA sense strand
cacaugaagcugaggaaga

SEQ ID NO: 2464674 - RNA, 19 nt, Homo sapiens
  misc_RNA (1)...(19): siRNA sense strand
augaacaagaggagguauu

SEQ ID NO: 2464675 - RNA, 19 nt, Homo sapiens
  misc_RNA (1)...(19): siRNA sense strand
agguauuacuagaacaguu

SEQ ID NO: 2464676 - RNA, 19 nt, Homo sapiens
  misc_RNA (1)...(19): siRNA sense strand
cagcagaagcagcgccuga

SEQ ID NO: 2464677 - RNA, 19 nt, Homo sapiens
  misc_RNA (1)...(19): siRNA sense strand
ccgaaauacagaaagaugu

SEQ ID NO: 2464678 - RNA, 19 nt, Homo sapiens
  misc_RNA (1)...(19): siRNA sense strand
gauugaaaguagcugcaca

SEQ ID NO: 2464679 - RNA, 19 nt, Homo sapiens
  misc_RNA (1)...(19): siRNA sense strand
cugaggaagaaucugauaa

SEQ ID NO: 2464680 - RNA, 19 nt, Homo sapiens
  misc_RNA (1)...(19): siRNA sense strand
cuguagaagagccaaggaa

SEQ ID NO: 2464681 - RNA, 19 nt, Homo sapiens
  misc_RNA (1)...(19): siRNA sense strand
gcuccuacuucaacagcau

SEQ ID NO: 2464682 - RNA, 19 nt, Homo sapiens
  misc_RNA (1)...(19): siRNA sense strand
gcaugaacuuagugagagc

SEQ ID NO: 2464683 - RNA, 19 nt, Homo sapiens
  misc_RNA (1)...(19): siRNA sense strand
uuggagggaaagauggaaa

SEQ ID NO: 2464684 - RNA, 19 nt, Homo sapiens
  misc_RNA (1)...(19): siRNA sense strand
cagauaugaaugaacaaga

SEQ ID NO: 2464685 - RNA, 19 nt, Homo sapiens
  misc_RNA (1)...(19): siRNA sense strand
uggaauacagauugccauu

SEQ ID NO: 2464686 - RNA, 19 nt, Homo sapiens
  misc_RNA (1)...(19): siRNA sense strand
ugaaugaacaagaggaggu

SEQ ID NO: 2464687 - RNA, 19 nt, Homo sapiens
  misc_RNA (1)...(19): siRNA sense strand
gggaaagauggaaauagau

SEQ ID NO: 2464688 - RNA, 19 nt, Homo sapiens
  misc_RNA (1)...(19): siRNA sense strand
uucgaaaggaagaugcaaa

SEQ ID NO: 2464689 - RNA, 19 nt, Homo sapiens
  misc_RNA (1)...(19): siRNA sense strand
uggagggaaagauggaaau

SEQ ID NO: 2464690 - RNA, 19 nt, Homo sapiens
  misc_RNA (1)...(19): siRNA sense strand
cgacaagccaaaaugguuu

SEQ ID NO: 2464691 - RNA, 19 nt, Homo sapiens
  misc_RNA (1)...(19): siRNA sense strand
cuucagcaggcgauagcaa

SEQ ID NO: 2464692 - RNA, 19 nt, Homo sapiens
  misc_RNA (1)...(19): siRNA sense strand
gcgugaagaaagagaggaa

SEQ ID NO: 2464693 - RNA, 19 nt, Homo sapiens
  misc_RNA (1)...(19): siRNA sense strand
gagaaaagaucgagaggga

SEQ ID NO: 2464694 - RNA, 19 nt, Homo sapiens
  misc_RNA (1)...(19): siRNA sense strand
gcgcaggagacaagggcaa

SEQ ID NO: 2464695 - RNA, 19 nt, Homo sapiens
  misc_RNA (1)...(19): siRNA sense strand
gaaaagaucgagagggaca

SEQ ID NO: 2464696 - RNA, 19 nt, Homo sapiens
  misc_RNA (1)...(19): siRNA sense strand
cgcuuugagugaagaggaa

SEQ ID NO: 2464697 - RNA, 19 nt, Homo sapiens
  misc_RNA (1)...(19): siRNA sense strand
aggaacaaacuaagaggau

SEQ ID NO: 2464698 - RNA, 19 nt, Homo sapiens
  misc_RNA (1)...(19): siRNA sense strand
gggacaaagcagagagagc

SEQ ID NO: 2464699 - RNA, 19 nt, Homo sapiens
  misc_RNA (1)...(19): siRNA sense strand
gggcaagaguugucagcag

SEQ ID NO: 2464700 - RNA, 19 nt, Homo sapiens
  misc_RNA (1)...(19): siRNA sense strand
ugagugaagaggaaagaca

SEQ ID NO: 2464701 - RNA, 19 nt, Homo sapiens
  misc_RNA (1)...(19): siRNA sense strand
ucacagggaaccagggcau

SEQ ID NO: 2464702 - RNA, 19 nt, Homo sapiens
  misc_RNA (1)...(19): siRNA sense strand
caagaaguaugguggcagu

SEQ ID NO: 2464703 - RNA, 19 nt, Homo sapiens
  misc_RNA (1)...(19): siRNA sense strand
aagaggaaagacaggaaca

SEQ ID NO: 2464704 - RNA, 19 nt, Homo sapiens
  misc_RNA (1)...(19): siRNA sense strand
ccgauguggacgagccuuu

SEQ ID NO: 2464705 - RNA, 19 nt, Homo sapiens
  misc_RNA (1)...(19): siRNA sense strand
agaagcagcgggagcguga

SEQ ID NO: 2464706 - RNA, 19 nt, Homo sapiens
  misc_RNA (1)...(19): siRNA sense strand
agaggaaagacaggaacaa

SEQ ID NO: 2464707 - RNA, 19 nt, Homo sapiens
  misc_RNA (1)...(19): siRNA sense strand
aggaaagacaggaacaaac

SEQ ID NO: 2464708 - RNA, 19 nt, Homo sapiens
  misc_RNA (1)...(19): siRNA sense strand
uguuggagcugguggccca

SEQ ID NO: 2464709 - RNA, 19 nt, Homo sapiens
  misc_RNA (1)...(19): siRNA sense strand
aagaaagagaggaacggga

SEQ ID NO: 2464710 - RNA, 19 nt, Homo sapiens
  misc_RNA (1)...(19): siRNA sense strand
ugauggagcacgaagacga

SEQ ID NO: 2464711 - RNA, 19 nt, Homo sapiens
  misc_RNA (1)...(19): siRNA sense strand
uaggcaaguucgagagcau

SEQ ID NO: 2464712 - RNA, 19 nt, Homo sapiens
  misc_RNA (1)...(19): siRNA sense strand
cugccgacauccagcacaa

SEQ ID NO: 2464713 - RNA, 19 nt, Homo sapiens
  misc_RNA (1)...(19): siRNA sense strand
acuucuacuacauggauua

SEQ ID NO: 2464714 - RNA, 19 nt, Homo sapiens
  misc_RNA (1)...(19): siRNA sense strand
ucgagagcauggaggacga

SEQ ID NO: 2464715 - RNA, 19 nt, Homo sapiens
  misc_RNA (1)...(19): siRNA sense strand
ccuucgaccgccaggguau

SEQ ID NO: 2464716 - RNA, 19 nt, Homo sapiens
  misc_RNA (1)...(19): siRNA sense strand
acagaaaacacuaggacua

SEQ ID NO: 2464717 - RNA, 19 nt, Homo sapiens
  misc_RNA (1)...(19): siRNA sense strand
guauaaaugcagugacgga

SEQ ID NO: 2464718 - RNA, 19 nt, Homo sapiens
  misc_RNA (1)...(19): siRNA sense strand
uuugcgagccauugggaaa

SEQ ID NO: 2464719 - RNA, 19 nt, Homo sapiens
  misc_RNA (1)...(19): siRNA sense strand
agcgcaaugaagugagaaa

SEQ ID NO: 2464720 - RNA, 19 nt, Homo sapiens
  misc_RNA (1)...(19): siRNA sense strand
aggaagaaacagugaagcu

SEQ ID NO: 2464721 - RNA, 19 nt, Homo sapiens
  misc_RNA (1)...(19): siRNA sense strand
aagaaugauaccaagaaga

SEQ ID NO: 2464722 - RNA, 19 nt, Homo sapiens
  misc_RNA (1)...(19): siRNA sense strand
accaagaagauguacgcaa

SEQ ID NO: 2464723 - RNA, 19 nt, Homo sapiens
  misc_RNA (1)...(19): siRNA sense strand
acgcaaugaaguacaugaa

SEQ ID NO: 2464724 - RNA, 19 nt, Homo sapiens
  misc_RNA (1)...(19): siRNA sense strand
caccaguguuugaugaaaa

SEQ ID NO: 2464725 - RNA, 19 nt, Homo sapiens
  misc_RNA (1)...(19): siRNA sense strand
agaaaugucuucaaggaac

SEQ ID NO: 2464726 - RNA, 19 nt, Homo sapiens
  misc_RNA (1)...(19): siRNA sense strand
uggucauggcccuggacua

SEQ ID NO: 2464727 - RNA, 19 nt, Homo sapiens
  misc_RNA (1)...(19): siRNA sense strand
gcgcaaugaagugagaaau

SEQ ID NO: 2464728 - RNA, 19 nt, Homo sapiens
  misc_RNA (1)...(19): siRNA sense strand
cgcaucauucacagggaua

SEQ ID NO: 2464729 - RNA, 19 nt, Homo sapiens
  misc_RNA (1)...(19): siRNA sense strand
ugaaagacuauguggccaa

SEQ ID NO: 2464730 - RNA, 19 nt, Homo sapiens
  misc_RNA (1)...(19): siRNA sense strand
gagacuuggaugaggugaa

SEQ ID NO: 2464731 - RNA, 19 nt, Homo sapiens
  misc_RNA (1)...(19): siRNA sense strand
acuauguggccaagggaga

SEQ ID NO: 2464732 - RNA, 19 nt, Homo sapiens
  misc_RNA (1)...(19): siRNA sense strand
ccaagggagaagaugucaa

SEQ ID NO: 2464733 - RNA, 19 nt, Homo sapiens
  misc_RNA (1)...(19): siRNA sense strand
agcuugaaauccuggaauu

SEQ ID NO: 2464734 - RNA, 19 nt, Homo sapiens
  misc_RNA (1)...(19): siRNA sense strand
acuuggaugaggugaaaga

SEQ ID NO: 2464735 - RNA, 19 nt, Homo sapiens
  misc_RNA (1)...(19): siRNA sense strand
cggccagggaagagcacuu

SEQ ID NO: 2464736 - RNA, 19 nt, Homo sapiens
  misc_RNA (1)...(19): siRNA sense strand
agagcaaggaugugaugau

SEQ ID NO: 2464737 - RNA, 19 nt, Homo sapiens
  misc_RNA (1)...(19): siRNA sense strand
acaaggaugaugaggaacu

SEQ ID NO: 2464738 - RNA, 19 nt, Homo sapiens
  misc_RNA (1)...(19): siRNA sense strand
ucaacaaggaugaugagga

SEQ ID NO: 2464739 - RNA, 19 nt, Homo sapiens
  misc_RNA (1)...(19): siRNA sense strand
gcgucuacuuguaccguga

SEQ ID NO: 2464740 - RNA, 19 nt, Homo sapiens
  misc_RNA (1)...(19): siRNA sense strand
ggaacuaccuguacgggcu

SEQ ID NO: 2464741 - RNA, 19 nt, Homo sapiens
  misc_RNA (1)...(19): siRNA sense strand
augaggaacugauugccaa

SEQ ID NO: 2464742 - RNA, 19 nt, Homo sapiens
  misc_RNA (1)...(19): siRNA sense strand
agaacaauucgaagagaaa

SEQ ID NO: 2464743 - RNA, 19 nt, Homo sapiens
  misc_RNA (1)...(19): siRNA sense strand
uuucaaagcagguggaaga

SEQ ID NO: 2464744 - RNA, 19 nt, Homo sapiens
  misc_RNA (1)...(19): siRNA sense strand
ggugaaaaccagauugaaa

SEQ ID NO: 2464745 - RNA, 19 nt, Homo sapiens
  misc_RNA (1)...(19): siRNA sense strand
cauuacuauuggauggaaa

SEQ ID NO: 2464746 - RNA, 19 nt, Homo sapiens
  misc_RNA (1)...(19): siRNA sense strand
uugaaauguuagaggcaga

SEQ ID NO: 2464747 - RNA, 19 nt, Homo sapiens
  misc_RNA (1)...(19): siRNA sense strand
aaguaaaggaacacaagaa

SEQ ID NO: 2464748 - RNA, 19 nt, Homo sapiens
  misc_RNA (1)...(19): siRNA sense strand
caguuaaaccugucgggua

SEQ ID NO: 2464749 - RNA, 19 nt, Homo sapiens
  misc_RNA (1)...(19): siRNA sense strand
uguugaaggcagcgaggaa

SEQ ID NO: 2464750 - RNA, 19 nt, Homo sapiens
  misc_RNA (1)...(19): siRNA sense strand
augaaaagguugaagcauu

SEQ ID NO: 2464751 - RNA, 19 nt, Homo sapiens
  misc_RNA (1)...(19): siRNA sense strand
cagccauaauaaacugaaa

SEQ ID NO: 2464752 - RNA, 19 nt, Homo sapiens
  misc_RNA (1)...(19): siRNA sense strand
aggaauugcacguagguga

SEQ ID NO: 2464753 - RNA, 19 nt, Homo sapiens
  misc_RNA (1)...(19): siRNA sense strand
cuuuauauccuuggaguua

SEQ ID NO: 2464754 - RNA, 19 nt, Homo sapiens
  misc_RNA (1)...(19): siRNA sense strand
auucaaaucucuuggaaac

SEQ ID NO: 2464755 - RNA, 19 nt, Homo sapiens
  misc_RNA (1)...(19): siRNA sense strand
ggguagaaaccucagugaa

SEQ ID NO: 2464756 - RNA, 19 nt, Homo sapiens
  misc_RNA (1)...(19): siRNA sense strand
ccugcauaucagagggauu

SEQ ID NO: 2464757 - RNA, 19 nt, Homo sapiens
  misc_RNA (1)...(19): siRNA sense strand
gcauggaaucacuagaauu

SEQ ID NO: 2464758 - RNA, 19 nt, Homo sapiens
  misc_RNA (1)...(19): siRNA sense strand
aggcagaacaucuuaaaca

SEQ ID NO: 2464759 - RNA, 19 nt, Homo sapiens
  misc_RNA (1)...(19): siRNA sense strand
ccauauuaaugaaaggaac

SEQ ID NO: 2464760 - RNA, 19 nt, Homo sapiens
  misc_RNA (1)...(19): siRNA sense strand
aggaagagcggccaguuaa

SEQ ID NO: 2464761 - RNA, 19 nt, Homo sapiens
  misc_RNA (1)...(19): siRNA sense strand
guuuggugcuacugaaaga

SEQ ID NO: 2464762 - RNA, 19 nt, Homo sapiens
  misc_RNA (1)...(19): siRNA sense strand
acugacuguucuugauaua

SEQ ID NO: 2464763 - RNA, 19 nt, Homo sapiens
  misc_RNA (1)...(19): siRNA sense strand
cuauaagagagcuagaaaa

SEQ ID NO: 2464764 - RNA, 19 nt, Homo sapiens
  misc_RNA (1)...(19): siRNA sense strand
cguuggaccuucaaaauaa

SEQ ID NO: 2464765 - RNA, 19 nt, Homo sapiens
  misc_RNA (1)...(19): siRNA sense strand
gauugaaauguuagaggca

SEQ ID NO: 2464766 - RNA, 19 nt, Homo sapiens
  misc_RNA (1)...(19): siRNA sense strand
augguagaacugaaggaaa

SEQ ID NO: 2464767 - RNA, 19 nt, Homo sapiens
  misc_RNA (1)...(19): siRNA sense strand
aguuaaaccugucggguag

SEQ ID NO: 2464768 - RNA, 19 nt, Homo sapiens
  misc_RNA (1)...(19): siRNA sense strand
cuucagaaacuuaauguca

SEQ ID NO: 2464769 - RNA, 19 nt, Homo sapiens
  misc_RNA (1)...(19): siRNA sense strand
auucaauucuugugcuaga

SEQ ID NO: 2464770 - RNA, 19 nt, Homo sapiens
  misc_RNA (1)...(19): siRNA sense strand
gguguuugaugcaguaaaa

SEQ ID NO: 2464771 - RNA, 19 nt, Homo sapiens
  misc_RNA (1)...(19): siRNA sense strand
agguugaagcauuuggauu

SEQ ID NO: 2464772 - RNA, 19 nt, Homo sapiens
  misc_RNA (1)...(19): siRNA sense strand
cugaaguucuauaucguau

SEQ ID NO: 2464773 - RNA, 19 nt, Homo sapiens
  misc_RNA (1)...(19): siRNA sense strand
ccucagaaaaugaagauga

SEQ ID NO: 2464774 - RNA, 19 nt, Homo sapiens
  misc_RNA (1)...(19): siRNA sense strand
gaacauuacuauuggaugg

SEQ ID NO: 2464775 - RNA, 19 nt, Homo sapiens
  misc_RNA (1)...(19): siRNA sense strand
gguggaagagacugcggua

SEQ ID NO: 2464776 - RNA, 19 nt, Homo sapiens
  misc_RNA (1)...(19): siRNA sense strand
ccuaagcaacaaugauauu

SEQ ID NO: 2464777 - RNA, 19 nt, Homo sapiens
  misc_RNA (1)...(19): siRNA sense strand
gugaaaaccagauugaaau

SEQ ID NO: 2464778 - RNA, 19 nt, Homo sapiens
  misc_RNA (1)...(19): siRNA sense strand
guuaugugugcuucagaaa

SEQ ID NO: 2464779 - RNA, 19 nt, Homo sapiens
  misc_RNA (1)...(19): siRNA sense strand
acugaaagauggugggagc

SEQ ID NO: 2464780 - RNA, 19 nt, Homo sapiens
  misc_RNA (1)...(19): siRNA sense strand
aagugaauccagagucaau

SEQ ID NO: 2464781 - RNA, 19 nt, Homo sapiens
  misc_RNA (1)...(19): siRNA sense strand
uggaaucacugguaagacu

SEQ ID NO: 2464782 - RNA, 19 nt, Homo sapiens
  misc_RNA (1)...(19): siRNA sense strand
cuuggaaaggcuugaccua

SEQ ID NO: 2464783 - RNA, 19 nt, Homo sapiens
  misc_RNA (1)...(19): siRNA sense strand
guaaaggaacacaagaagu

SEQ ID NO: 2464784 - RNA, 19 nt, Homo sapiens
  misc_RNA (1)...(19): siRNA sense strand
guagucuauugaaggaauu

SEQ ID NO: 2464785 - RNA, 19 nt, Homo sapiens
  misc_RNA (1)...(19): siRNA sense strand
uaucagagggauuugaaca

SEQ ID NO: 2464786 - RNA, 19 nt, Homo sapiens
  misc_RNA (1)...(19): siRNA sense strand
ugcuagaccugagggauaa

SEQ ID NO: 2464787 - RNA, 19 nt, Homo sapiens
  misc_RNA (1)...(19): siRNA sense strand
gagcucgguaauuguguaa

SEQ ID NO: 2464788 - RNA, 19 nt, Homo sapiens
  misc_RNA (1)...(19): siRNA sense strand
uugaaggcagcgaggaaga

SEQ ID NO: 2464789 - RNA, 19 nt, Homo sapiens
  misc_RNA (1)...(19): siRNA sense strand
aaaggaugguagaacugaa

SEQ ID NO: 2464790 - RNA, 19 nt, Homo sapiens
  misc_RNA (1)...(19): siRNA sense strand
ccuuuauauccuuggaguu

SEQ ID NO: 2464791 - RNA, 19 nt, Homo sapiens
  misc_RNA (1)...(19): siRNA sense strand
guagauaauuuggguggua

SEQ ID NO: 2464792 - RNA, 19 nt, Homo sapiens
  misc_RNA (1)...(19): siRNA sense strand
cgcuaugagcuaagggaga

SEQ ID NO: 2464793 - RNA, 19 nt, Homo sapiens
  misc_RNA (1)...(19): siRNA sense strand
ucucuaggcuguuauguua

SEQ ID NO: 2464794 - RNA, 19 nt, Homo sapiens
  misc_RNA (1)...(19): siRNA sense strand
ccucugauauguuaaagua

SEQ ID NO: 2464795 - RNA, 19 nt, Homo sapiens
  misc_RNA (1)...(19): siRNA sense strand
aauuuguguuuguggaaga

SEQ ID NO: 2464796 - RNA, 19 nt, Homo sapiens
  misc_RNA (1)...(19): siRNA sense strand
acugugagguggaggugau

SEQ ID NO: 2464797 - RNA, 19 nt, Homo sapiens
  misc_RNA (1)...(19): siRNA sense strand
cuguggucuuaguagauaa

SEQ ID NO: 2464798 - RNA, 19 nt, Homo sapiens
  misc_RNA (1)...(19): siRNA sense strand
aagggagaacauugagcaa

SEQ ID NO: 2464799 - RNA, 19 nt, Homo sapiens
  misc_RNA (1)...(19): siRNA sense strand
cgcuaugagcuaagggaga

SEQ ID NO: 2464800 - RNA, 19 nt, Homo sapiens
  misc_RNA (1)...(19): siRNA sense strand
aauuuguguuuguggaaga

SEQ ID NO: 2464801 - RNA, 19 nt, Homo sapiens
  misc_RNA (1)...(19): siRNA sense strand
acugugagguggaggugau

SEQ ID NO: 2464802 - RNA, 19 nt, Homo sapiens
  misc_RNA (1)...(19): siRNA sense strand
aagggagaacauugagcaa

SEQ ID NO: 2464803 - RNA, 19 nt, Homo sapiens
  misc_RNA (1)...(19): siRNA sense strand
cgcuaugagcuaagggaga

SEQ ID NO: 2464804 - RNA, 19 nt, Homo sapiens
  misc_RNA (1)...(19): siRNA sense strand
aauuuguguuuguggaaga

SEQ ID NO: 2464805 - RNA, 19 nt, Homo sapiens
  misc_RNA (1)...(19): siRNA sense strand
acugugagguggaggugau

SEQ ID NO: 2464806 - RNA, 19 nt, Homo sapiens
  misc_RNA (1)...(19): siRNA sense strand
cuguggucuuaguagauaa

SEQ ID NO: 2464807 - RNA, 19 nt, Homo sapiens
  misc_RNA (1)...(19): siRNA sense strand
aagggagaacauugagcaa

SEQ ID NO: 2464808 - RNA, 19 nt, Homo sapiens
  misc_RNA (1)...(19): siRNA sense strand
gaaauuaaaugguggcaga

SEQ ID NO: 2464809 - RNA, 19 nt, Homo sapiens
  misc_RNA (1)...(19): siRNA sense strand
ggugguaauacgaggaaau

SEQ ID NO: 2464810 - RNA, 19 nt, Homo sapiens
  misc_RNA (1)...(19): siRNA sense strand
auauuggaauggugguaau

SEQ ID NO: 2464811 - RNA, 19 nt, Homo sapiens
  misc_RNA (1)...(19): siRNA sense strand
auuaaaugguggcagacau

SEQ ID NO: 2464812 - RNA, 19 nt, Homo sapiens
  misc_RNA (1)...(19): siRNA sense strand
cuaguggacaacagaacaa

SEQ ID NO: 2464813 - RNA, 19 nt, Homo sapiens
  misc_RNA (1)...(19): siRNA sense strand
agccuuggaacgaguauaa

SEQ ID NO: 2464814 - RNA, 19 nt, Homo sapiens
  misc_RNA (1)...(19): siRNA sense strand
gaacaauauuggaauggug

SEQ ID NO: 2464815 - RNA, 19 nt, Homo sapiens
  misc_RNA (1)...(19): siRNA sense strand
ccgcauugucagaggguuu

SEQ ID NO: 2464816 - RNA, 19 nt, Homo sapiens
  misc_RNA (1)...(19): siRNA sense strand
cuguauugcaguaaagaaa

SEQ ID NO: 2464817 - RNA, 19 nt, Homo sapiens
  misc_RNA (1)...(19): siRNA sense strand
caguaaaaccacaggcuaa

SEQ ID NO: 2464818 - RNA, 19 nt, Homo sapiens
  misc_RNA (1)...(19): siRNA sense strand
caauagagcaguaccggaa

SEQ ID NO: 2464819 - RNA, 19 nt, Homo sapiens
  misc_RNA (1)...(19): siRNA sense strand
ccuacaguguugugaaaga

SEQ ID NO: 2464820 - RNA, 19 nt, Homo sapiens
  misc_RNA (1)...(19): siRNA sense strand
gcauggaagagaagaacuu

SEQ ID NO: 2464821 - RNA, 19 nt, Homo sapiens
  misc_RNA (1)...(19): siRNA sense strand
ccaaaaugauagugccaau

SEQ ID NO: 2464822 - RNA, 19 nt, Homo sapiens
  misc_RNA (1)...(19): siRNA sense strand
cuaacaaggcagauaugaa

SEQ ID NO: 2464823 - RNA, 19 nt, Homo sapiens
  misc_RNA (1)...(19): siRNA sense strand
ugaugaugcaauugugaua

SEQ ID NO: 2464824 - RNA, 19 nt, Homo sapiens
  misc_RNA (1)...(19): siRNA sense strand
auucaguggaagugguuaa

SEQ ID NO: 2464825 - RNA, 19 nt, Homo sapiens
  misc_RNA (1)...(19): siRNA sense strand
ggagaaggaagaagaacca

SEQ ID NO: 2464826 - RNA, 19 nt, Homo sapiens
  misc_RNA (1)...(19): siRNA sense strand
aggaaaggauuuuggaaca

SEQ ID NO: 2464827 - RNA, 19 nt, Homo sapiens
  misc_RNA (1)...(19): siRNA sense strand
uggaaauacagcuaagcaa

SEQ ID NO: 2464828 - RNA, 19 nt, Homo sapiens
  misc_RNA (1)...(19): siRNA sense strand
acaauuaguacaaggccua

SEQ ID NO: 2464829 - RNA, 19 nt, Homo sapiens
  misc_RNA (1)...(19): siRNA sense strand
uuuacuaggcguugacaaa

SEQ ID NO: 2464830 - RNA, 19 nt, Homo sapiens
  misc_RNA (1)...(19): siRNA sense strand
ugauucugauggagagcaa

SEQ ID NO: 2464831 - RNA, 19 nt, Homo sapiens
  misc_RNA (1)...(19): siRNA sense strand
guguugugaaagagggaau

SEQ ID NO: 2464832 - RNA, 19 nt, Homo sapiens
  misc_RNA (1)...(19): siRNA sense strand
cuugaauauugcugaugaa

SEQ ID NO: 2464833 - RNA, 19 nt, Homo sapiens
  misc_RNA (1)...(19): siRNA sense strand
cagaauaaucuuggaugaa

SEQ ID NO: 2464834 - RNA, 19 nt, Homo sapiens
  misc_RNA (1)...(19): siRNA sense strand
aguccaauacaaaggaauu

SEQ ID NO: 2464835 - RNA, 19 nt, Homo sapiens
  misc_RNA (1)...(19): siRNA sense strand
guacaaggccuaaaggacu

SEQ ID NO: 2464836 - RNA, 19 nt, Homo sapiens
  misc_RNA (1)...(19): siRNA sense strand
uggaagugguuaauggcau

SEQ ID NO: 2464837 - RNA, 19 nt, Homo sapiens
  misc_RNA (1)...(19): siRNA sense strand
ccaugcaggagaaggaaga

SEQ ID NO: 2464838 - RNA, 19 nt, Homo sapiens
  misc_RNA (1)...(19): siRNA sense strand
cuaucugacaaaugcaaua

SEQ ID NO: 2464839 - RNA, 19 nt, Homo sapiens
  misc_RNA (1)...(19): siRNA sense strand
ugucagaggguuucagaga

SEQ ID NO: 2464840 - RNA, 19 nt, Homo sapiens
  misc_RNA (1)...(19): siRNA sense strand
aggaaggaaccaugacuuu

SEQ ID NO: 2464841 - RNA, 19 nt, Homo sapiens
  misc_RNA (1)...(19): siRNA sense strand
cuccagauccagaaguuaa

SEQ ID NO: 2464842 - RNA, 19 nt, Homo sapiens
  misc_RNA (1)...(19): siRNA sense strand
cggcaagacgagucacaga

SEQ ID NO: 2464843 - RNA, 19 nt, Homo sapiens
  misc_RNA (1)...(19): siRNA sense strand
augcaauugugauaagaga

SEQ ID NO: 2464844 - RNA, 19 nt, Homo sapiens
  misc_RNA (1)...(19): siRNA sense strand
cagccaugcaggagaagga

SEQ ID NO: 2464845 - RNA, 19 nt, Homo sapiens
  misc_RNA (1)...(19): siRNA sense strand
aagcagccaugcaggagaa

SEQ ID NO: 2464846 - RNA, 19 nt, Homo sapiens
  misc_RNA (1)...(19): siRNA sense strand
gagcaguaccggaaggaug

SEQ ID NO: 2464847 - RNA, 19 nt, Homo sapiens
  misc_RNA (1)...(19): siRNA sense strand
guagcguugcauuggauaa

SEQ ID NO: 2464848 - RNA, 19 nt, Homo sapiens
  misc_RNA (1)...(19): siRNA sense strand
ucacaaacagaaugguuca

SEQ ID NO: 2464849 - RNA, 19 nt, Homo sapiens
  misc_RNA (1)...(19): siRNA sense strand
cgucaaacgugcugggugg

SEQ ID NO: 2464850 - RNA, 19 nt, Homo sapiens
  misc_RNA (1)...(19): siRNA sense strand
aaaucagaguccaauacaa

SEQ ID NO: 2464851 - RNA, 19 nt, Homo sapiens
  misc_RNA (1)...(19): siRNA sense strand
gagacauggacguaauaca

SEQ ID NO: 2464852 - RNA, 19 nt, Homo sapiens
  misc_RNA (1)...(19): siRNA sense strand
ccaguagaccugagggaag

SEQ ID NO: 2464853 - RNA, 19 nt, Homo sapiens
  misc_RNA (1)...(19): siRNA sense strand
acaccuaacaaggcagaua

SEQ ID NO: 2464854 - RNA, 19 nt, Homo sapiens
  misc_RNA (1)...(19): siRNA sense strand
guaccucaaaggagccaaa

SEQ ID NO: 2464855 - RNA, 19 nt, Homo sapiens
  misc_RNA (1)...(19): siRNA sense strand
aggaagaagaaccaguuau

SEQ ID NO: 2464856 - RNA, 19 nt, Homo sapiens
  misc_RNA (1)...(19): siRNA sense strand
aacuaaagcucaagaggcu

SEQ ID NO: 2464857 - RNA, 19 nt, Homo sapiens
  misc_RNA (1)...(19): siRNA sense strand
ccggaaggauggccgcauu

SEQ ID NO: 2464858 - RNA, 19 nt, Homo sapiens
  misc_RNA (1)...(19): siRNA sense strand
ugagggaagguguggccaa

SEQ ID NO: 2464859 - RNA, 19 nt, Homo sapiens
  misc_RNA (1)...(19): siRNA sense strand
ccuccaacuucauuuacaa

SEQ ID NO: 2464860 - RNA, 19 nt, Homo sapiens
  misc_RNA (1)...(19): siRNA sense strand
gagugcugcuugagagugu

SEQ ID NO: 2464861 - RNA, 19 nt, Homo sapiens
  misc_RNA (1)...(19): siRNA sense strand
gcucuagaacucacaaaca

SEQ ID NO: 2464862 - RNA, 19 nt, Homo sapiens
  misc_RNA (1)...(19): siRNA sense strand
gugccaauucaguggaagu

SEQ ID NO: 2464863 - RNA, 19 nt, Homo sapiens
  misc_RNA (1)...(19): siRNA sense strand
ugguuaauggcauggaaga

SEQ ID NO: 2464864 - RNA, 19 nt, Homo sapiens
  misc_RNA (1)...(19): siRNA sense strand
auggcauggaagagaagaa

SEQ ID NO: 2464865 - RNA, 19 nt, Homo sapiens
  misc_RNA (1)...(19): siRNA sense strand
ggaaauacagcuaagcaag

SEQ ID NO: 2464866 - RNA, 19 nt, Homo sapiens
  misc_RNA (1)...(19): siRNA sense strand
ggguacgcuagcugggauu

SEQ ID NO: 2464867 - RNA, 19 nt, Homo sapiens
  misc_RNA (1)...(19): siRNA sense strand
caagaagaccaaaagguuu

SEQ ID NO: 2464868 - RNA, 19 nt, Homo sapiens
  misc_RNA (1)...(19): siRNA sense strand
ggaauuucucauugccgua

SEQ ID NO: 2464869 - RNA, 19 nt, Homo sapiens
  misc_RNA (1)...(19): siRNA sense strand
gguagauuccaguggucga

SEQ ID NO: 2464870 - RNA, 19 nt, Homo sapiens
  misc_RNA (1)...(19): siRNA sense strand
gcuauguggugaaggaggu

SEQ ID NO: 2464871 - RNA, 19 nt, Homo sapiens
  misc_RNA (1)...(19): siRNA sense strand
ggaagugguuaauggcaug

SEQ ID NO: 2464872 - RNA, 19 nt, Homo sapiens
  misc_RNA (1)...(19): siRNA sense strand
agacucuugugcugcguua

SEQ ID NO: 2464873 - RNA, 19 nt, Homo sapiens
  misc_RNA (1)...(19): siRNA sense strand
aggugugcccacugagaau

SEQ ID NO: 2464874 - RNA, 19 nt, Homo sapiens
  misc_RNA (1)...(19): siRNA sense strand
ccucaaaggagccaaaucu

SEQ ID NO: 2464875 - RNA, 19 nt, Homo sapiens
  misc_RNA (1)...(19): siRNA sense strand
cugaguggcuuaaugacau

SEQ ID NO: 2464876 - RNA, 19 nt, Homo sapiens
  misc_RNA (1)...(19): siRNA sense strand
agaaccagcuaccaggaau

SEQ ID NO: 2464877 - RNA, 19 nt, Homo sapiens
  misc_RNA (1)...(19): siRNA sense strand
aggaaauccaggagaggaa

SEQ ID NO: 2464878 - RNA, 19 nt, Homo sapiens
  misc_RNA (1)...(19): siRNA sense strand
acauggaggcccugggaca

SEQ ID NO: 2464879 - RNA, 19 nt, Homo sapiens
  misc_RNA (1)...(19): siRNA sense strand
uuggagaaggagaaacaaa

SEQ ID NO: 2464880 - RNA, 19 nt, Homo sapiens
  misc_RNA (1)...(19): siRNA sense strand
gguagugaccaaaggaacu

SEQ ID NO: 2464881 - RNA, 19 nt, Homo sapiens
  misc_RNA (1)...(19): siRNA sense strand
aagagcuggugaaggaaau

SEQ ID NO: 2464882 - RNA, 19 nt, Homo sapiens
  misc_RNA (1)...(19): siRNA sense strand
agagugaugaugaaggaau

SEQ ID NO: 2464883 - RNA, 19 nt, Homo sapiens
  misc_RNA (1)...(19): siRNA sense strand
auuuggagaaggagaaaca

SEQ ID NO: 2464884 - RNA, 19 nt, Homo sapiens
  misc_RNA (1)...(19): siRNA sense strand
gggagcaguucaagccuca

SEQ ID NO: 2464885 - RNA, 19 nt, Homo sapiens
  misc_RNA (1)...(19): siRNA sense strand
ggaaggacauggaggaacg

SEQ ID NO: 2464886 - RNA, 19 nt, Homo sapiens
  misc_RNA (1)...(19): siRNA sense strand
aggacauggaggaacggaa

SEQ ID NO: 2464887 - RNA, 19 nt, Homo sapiens
  misc_RNA (1)...(19): siRNA sense strand
acagaaggagugaggaacu

SEQ ID NO: 2464888 - RNA, 19 nt, Homo sapiens
  misc_RNA (1)...(19): siRNA sense strand
cugaaaucucccagaaacu

SEQ ID NO: 2464889 - RNA, 19 nt, Homo sapiens
  misc_RNA (1)...(19): siRNA sense strand
uggaggaacggaaaagaaa

SEQ ID NO: 2464890 - RNA, 19 nt, Homo sapiens
  misc_RNA (1)...(19): siRNA sense strand
caucaugaaaagaggagau

SEQ ID NO: 2464891 - RNA, 19 nt, Homo sapiens
  misc_RNA (1)...(19): siRNA sense strand
caggaaaggagguggcuga

SEQ ID NO: 2464892 - RNA, 19 nt, Homo sapiens
  misc_RNA (1)...(19): siRNA sense strand
gcaagaaccucaaccggga

SEQ ID NO: 2464893 - RNA, 19 nt, Homo sapiens
  misc_RNA (1)...(19): siRNA sense strand
aggaagaggaggaggagga

SEQ ID NO: 2464894 - RNA, 19 nt, Homo sapiens
  misc_RNA (1)...(19): siRNA sense strand
ccgaggaggaagaggagga

SEQ ID NO: 2464895 - RNA, 19 nt, Homo sapiens
  misc_RNA (1)...(19): siRNA sense strand
gcguggugcuagaggagga

SEQ ID NO: 2464896 - RNA, 19 nt, Homo sapiens
  misc_RNA (1)...(19): siRNA sense strand
aagaagaggaggaggcacu

SEQ ID NO: 2464897 - RNA, 19 nt, Homo sapiens
  misc_RNA (1)...(19): siRNA sense strand
agucagaaggcaaagaaca

SEQ ID NO: 2464898 - RNA, 19 nt, Homo sapiens
  misc_RNA (1)...(19): siRNA sense strand
aggaggaagaggaggagga

SEQ ID NO: 2464899 - RNA, 19 nt, Homo sapiens
  misc_RNA (1)...(19): siRNA sense strand
cgcuguacuuggagagcau

SEQ ID NO: 2464900 - RNA, 19 nt, Homo sapiens
  misc_RNA (1)...(19): siRNA sense strand
gcggaaacuggcuggcgua

SEQ ID NO: 2464901 - RNA, 19 nt, Homo sapiens
  misc_RNA (1)...(19): siRNA sense strand
auggagaagaagaggagga

SEQ ID NO: 2464902 - RNA, 19 nt, Homo sapiens
  misc_RNA (1)...(19): siRNA sense strand
aggagaugguccagcagca

SEQ ID NO: 2464903 - RNA, 19 nt, Homo sapiens
  misc_RNA (1)...(19): siRNA sense strand
gagaagaagaggaggaggc

SEQ ID NO: 2464904 - RNA, 19 nt, Homo sapiens
  misc_RNA (1)...(19): siRNA sense strand
gggugacaucauccggaaa

SEQ ID NO: 2464905 - RNA, 19 nt, Homo sapiens
  misc_RNA (1)...(19): siRNA sense strand
gcgucuucuucgugggcca

SEQ ID NO: 2464906 - RNA, 19 nt, Homo sapiens
  misc_RNA (1)...(19): siRNA sense strand
ugagcagucagaaggcaaa

SEQ ID NO: 2464907 - RNA, 19 nt, Homo sapiens
  misc_RNA (1)...(19): siRNA sense strand
agaaagaaucagagaaaga

SEQ ID NO: 2464908 - RNA, 19 nt, Homo sapiens
  misc_RNA (1)...(19): siRNA sense strand
cggaaaagcaaaagcgaua

SEQ ID NO: 2464909 - RNA, 19 nt, Homo sapiens
  misc_RNA (1)...(19): siRNA sense strand
cggaaggaucugaggguga

SEQ ID NO: 2464910 - RNA, 19 nt, Homo sapiens
  misc_RNA (1)...(19): siRNA sense strand
ggaagaaggugaaagacca

SEQ ID NO: 2464911 - RNA, 19 nt, Homo sapiens
  misc_RNA (1)...(19): siRNA sense strand
aggugaaagaccaaagaaa

SEQ ID NO: 2464912 - RNA, 19 nt, Homo sapiens
  misc_RNA (1)...(19): siRNA sense strand
cggaagaaagagaagaaaa

SEQ ID NO: 2464913 - RNA, 19 nt, Homo sapiens
  misc_RNA (1)...(19): siRNA sense strand
agaacaaagacaagcacaa

SEQ ID NO: 2464914 - RNA, 19 nt, Homo sapiens
  misc_RNA (1)...(19): siRNA sense strand
uaguaaacaaagaggaaga

SEQ ID NO: 2464915 - RNA, 19 nt, Homo sapiens
  misc_RNA (1)...(19): siRNA sense strand
agaugaagauguuugggaa

SEQ ID NO: 2464916 - RNA, 19 nt, Homo sapiens
  misc_RNA (1)...(19): siRNA sense strand
cuuaguaaacaaagaggaa

SEQ ID NO: 2464917 - RNA, 19 nt, Homo sapiens
  misc_RNA (1)...(19): siRNA sense strand
ccucauaacgccagcaaaa

SEQ ID NO: 2464918 - RNA, 19 nt, Homo sapiens
  misc_RNA (1)...(19): siRNA sense strand
caugaaacagggucagaaa

SEQ ID NO: 2464919 - RNA, 19 nt, Homo sapiens
  misc_RNA (1)...(19): siRNA sense strand
ucuuagugaauuugggaua

SEQ ID NO: 2464920 - RNA, 19 nt, Homo sapiens
  misc_RNA (1)...(19): siRNA sense strand
ggaaagaaggacaaggagu

SEQ ID NO: 2464921 - RNA, 19 nt, Homo sapiens
  misc_RNA (1)...(19): siRNA sense strand
uggagaaauuggacugaau

SEQ ID NO: 2464922 - RNA, 19 nt, Homo sapiens
  misc_RNA (1)...(19): siRNA sense strand
uggaagaggaagaugauga

SEQ ID NO: 2464923 - RNA, 19 nt, Homo sapiens
  misc_RNA (1)...(19): siRNA sense strand
cuucaauacuguuggcuca

SEQ ID NO: 2464924 - RNA, 19 nt, Homo sapiens
  misc_RNA (1)...(19): siRNA sense strand
uggcgaucuuggagaaauu

SEQ ID NO: 2464925 - RNA, 19 nt, Homo sapiens
  misc_RNA (1)...(19): siRNA sense strand
uaucagagucagcuggaaa

SEQ ID NO: 2464926 - RNA, 19 nt, Homo sapiens
  misc_RNA (1)...(19): siRNA sense strand
gaagaaggugaaagaccaa

SEQ ID NO: 2464927 - RNA, 19 nt, Homo sapiens
  misc_RNA (1)...(19): siRNA sense strand
gggcugaguugcuuggaga

SEQ ID NO: 2464928 - RNA, 19 nt, Homo sapiens
  misc_RNA (1)...(19): siRNA sense strand
cgcacaggcugaaggagaa

SEQ ID NO: 2464929 - RNA, 19 nt, Homo sapiens
  misc_RNA (1)...(19): siRNA sense strand
aagacaagcacaaggccaa

SEQ ID NO: 2464930 - RNA, 19 nt, Homo sapiens
  misc_RNA (1)...(19): siRNA sense strand
ggcggaagaaagagaagaa

SEQ ID NO: 2464931 - RNA, 19 nt, Homo sapiens
  misc_RNA (1)...(19): siRNA sense strand
ggguuggaaagaaggacaa

SEQ ID NO: 2464932 - RNA, 19 nt, Homo sapiens
  misc_RNA (1)...(19): siRNA sense strand
cagccagagugacgaggaa

SEQ ID NO: 2464933 - RNA, 19 nt, Homo sapiens
  misc_RNA (1)...(19): siRNA sense strand
acagaacagagcagacaaa

SEQ ID NO: 2464934 - RNA, 19 nt, Homo sapiens
  misc_RNA (1)...(19): siRNA sense strand
acgcacaggcugaaggaga

SEQ ID NO: 2464935 - RNA, 19 nt, Homo sapiens
  misc_RNA (1)...(19): siRNA sense strand
caguggugguucugagaga

SEQ ID NO: 2464936 - RNA, 19 nt, Homo sapiens
  misc_RNA (1)...(19): siRNA sense strand
gcacaaacacaaaggcaag

SEQ ID NO: 2464937 - RNA, 19 nt, Homo sapiens
  misc_RNA (1)...(19): siRNA sense strand
agauaaugugcauggucua

SEQ ID NO: 2464938 - RNA, 19 nt, Homo sapiens
  misc_RNA (1)...(19): siRNA sense strand
uggacugaauaaaggaaga

SEQ ID NO: 2464939 - RNA, 19 nt, Homo sapiens
  misc_RNA (1)...(19): siRNA sense strand
gaaucaaagaaaugaagca

SEQ ID NO: 2464940 - RNA, 19 nt, Homo sapiens
  misc_RNA (1)...(19): siRNA sense strand
gcaaggugacagugaagau

SEQ ID NO: 2464941 - RNA, 19 nt, Homo sapiens
  misc_RNA (1)...(19): siRNA sense strand
ggugaaagaccaaagaaac

SEQ ID NO: 2464942 - RNA, 19 nt, Homo sapiens
  misc_RNA (1)...(19): siRNA sense strand
cugugaagaugaagauguu

SEQ ID NO: 2464943 - RNA, 19 nt, Homo sapiens
  misc_RNA (1)...(19): siRNA sense strand
agaggaucuuagugaauuu

SEQ ID NO: 2464944 - RNA, 19 nt, Homo sapiens
  misc_RNA (1)...(19): siRNA sense strand
ccucuaaacacgaaaagaa

SEQ ID NO: 2464945 - RNA, 19 nt, Homo sapiens
  misc_RNA (1)...(19): siRNA sense strand
agcacaaggccaagaaaga

SEQ ID NO: 2464946 - RNA, 19 nt, Homo sapiens
  misc_RNA (1)...(19): siRNA sense strand
aagaggaagaugaugauau

SEQ ID NO: 2464947 - RNA, 19 nt, Homo sapiens
  misc_RNA (1)...(19): siRNA sense strand
aaagaaaugaagcaggcaa

SEQ ID NO: 2464948 - RNA, 19 nt, Homo sapiens
  misc_RNA (1)...(19): siRNA sense strand
agaaagagcacaggcggaa

SEQ ID NO: 2464949 - RNA, 19 nt, Homo sapiens
  misc_RNA (1)...(19): siRNA sense strand
gugcauuauuucagaccca

SEQ ID NO: 2464950 - RNA, 19 nt, Homo sapiens
  misc_RNA (1)...(19): siRNA sense strand
ucuggaagaaggugaaaga

SEQ ID NO: 2464951 - RNA, 19 nt, Homo sapiens
  misc_RNA (1)...(19): siRNA sense strand
caacaaagauguggacgca

SEQ ID NO: 2464952 - RNA, 19 nt, Homo sapiens
  misc_RNA (1)...(19): siRNA sense strand
agaugaaagagaagaguuc

SEQ ID NO: 2464953 - RNA, 19 nt, Homo sapiens
  misc_RNA (1)...(19): siRNA sense strand
ggacugaauaaaggaagaa

SEQ ID NO: 2464954 - RNA, 19 nt, Homo sapiens
  misc_RNA (1)...(19): siRNA sense strand
gcagguauuaucagaguca

SEQ ID NO: 2464955 - RNA, 19 nt, Homo sapiens
  misc_RNA (1)...(19): siRNA sense strand
cgacaaaucaagaaaacca

SEQ ID NO: 2464956 - RNA, 19 nt, Homo sapiens
  misc_RNA (1)...(19): siRNA sense strand
cugaagauuuuauggauga

SEQ ID NO: 2464957 - RNA, 19 nt, Homo sapiens
  misc_RNA (1)...(19): siRNA sense strand
accuaaagauaaugugcau

SEQ ID NO: 2464958 - RNA, 19 nt, Homo sapiens
  misc_RNA (1)...(19): siRNA sense strand
cagagaaagaccuucggua

SEQ ID NO: 2464959 - RNA, 19 nt, Homo sapiens
  misc_RNA (1)...(19): siRNA sense strand
agaaacacaggaagcacaa

SEQ ID NO: 2464960 - RNA, 19 nt, Homo sapiens
  misc_RNA (1)...(19): siRNA sense strand
aaggcaagcaaaagaauaa

SEQ ID NO: 2464961 - RNA, 19 nt, Homo sapiens
  misc_RNA (1)...(19): siRNA sense strand
agggugaagaugaugacua

SEQ ID NO: 2464962 - RNA, 19 nt, Homo sapiens
  misc_RNA (1)...(19): siRNA sense strand
guguaggugcccuggaaga

SEQ ID NO: 2464963 - RNA, 19 nt, Homo sapiens
  misc_RNA (1)...(19): siRNA sense strand
agagagaaucaaagaaaug

SEQ ID NO: 2464964 - RNA, 19 nt, Homo sapiens
  misc_RNA (1)...(19): siRNA sense strand
uaccaagagugaagcguga

SEQ ID NO: 2464965 - RNA, 19 nt, Homo sapiens
  misc_RNA (1)...(19): siRNA sense strand
caggaagcacaaacacaaa

SEQ ID NO: 2464966 - RNA, 19 nt, Homo sapiens
  misc_RNA (1)...(19): siRNA sense strand
aaacacaaaggcaagcaaa

SEQ ID NO: 2464967 - RNA, 19 nt, Homo sapiens
  misc_RNA (1)...(19): siRNA sense strand
ucuuaguacacaugaaaca

SEQ ID NO: 2464968 - RNA, 19 nt, Homo sapiens
  misc_RNA (1)...(19): siRNA sense strand
agaaugaugucggggauaa

SEQ ID NO: 2464969 - RNA, 19 nt, Homo sapiens
  misc_RNA (1)...(19): siRNA sense strand
gcggaagaaagagaagaaa

SEQ ID NO: 2464970 - RNA, 19 nt, Homo sapiens
  misc_RNA (1)...(19): siRNA sense strand
ccaaagacagaauacgaga

SEQ ID NO: 2464971 - RNA, 19 nt, Homo sapiens
  misc_RNA (1)...(19): siRNA sense strand
aaagacaaagagagaauca

SEQ ID NO: 2464972 - RNA, 19 nt, Homo sapiens
  misc_RNA (1)...(19): siRNA sense strand
gaacauggcauuagguggu

SEQ ID NO: 2464973 - RNA, 19 nt, Homo sapiens
  misc_RNA (1)...(19): siRNA sense strand
cccucgagaccaagagaau

SEQ ID NO: 2464974 - RNA, 19 nt, Homo sapiens
  misc_RNA (1)...(19): siRNA sense strand
acaggaagcacaaacacaa

SEQ ID NO: 2464975 - RNA, 19 nt, Homo sapiens
  misc_RNA (1)...(19): siRNA sense strand
guuugaagggacagagcaa

SEQ ID NO: 2464976 - RNA, 19 nt, Homo sapiens
  misc_RNA (1)...(19): siRNA sense strand
ugaaggacccagaggccaa

SEQ ID NO: 2464977 - RNA, 19 nt, Homo sapiens
  misc_RNA (1)...(19): siRNA sense strand
cgagacaaggccagggaca

SEQ ID NO: 2464978 - RNA, 19 nt, Homo sapiens
  misc_RNA (1)...(19): siRNA sense strand
ccugcaguuugguggacua

SEQ ID NO: 2464979 - RNA, 19 nt, Homo sapiens
  misc_RNA (1)...(19): siRNA sense strand
ucgaagggaggcagagaga

SEQ ID NO: 2464980 - RNA, 19 nt, Homo sapiens
  misc_RNA (1)...(19): siRNA sense strand
gggagaagagggaguucca

SEQ ID NO: 2464981 - RNA, 19 nt, Homo sapiens
  misc_RNA (1)...(19): siRNA sense strand
aagagaagccgcuggagga

SEQ ID NO: 2464982 - RNA, 19 nt, Homo sapiens
  misc_RNA (1)...(19): siRNA sense strand
gagcaagagcaaagagagc

SEQ ID NO: 2464983 - RNA, 19 nt, Homo sapiens
  misc_RNA (1)...(19): siRNA sense strand
cggagcaagagcaaagaga

SEQ ID NO: 2464984 - RNA, 19 nt, Homo sapiens
  misc_RNA (1)...(19): siRNA sense strand
ccagaagagaauaucgcuu

SEQ ID NO: 2464985 - RNA, 19 nt, Homo sapiens
  misc_RNA (1)...(19): siRNA sense strand
acgagaagccgauguaaaa

SEQ ID NO: 2464986 - RNA, 19 nt, Homo sapiens
  misc_RNA (1)...(19): siRNA sense strand
uagaaaagccgaagauaca

SEQ ID NO: 2464987 - RNA, 19 nt, Homo sapiens
  misc_RNA (1)...(19): siRNA sense strand
gauacgaggcucuaggaga

SEQ ID NO: 2464988 - RNA, 19 nt, Homo sapiens
  misc_RNA (1)...(19): siRNA sense strand
gggacaguuaagacacaua

SEQ ID NO: 2464989 - RNA, 19 nt, Homo sapiens
  misc_RNA (1)...(19): siRNA sense strand
cagaugaaccagcagaaaa

SEQ ID NO: 2464990 - RNA, 19 nt, Homo sapiens
  misc_RNA (1)...(19): siRNA sense strand
aacgagaagccgauguaaa

SEQ ID NO: 2464991 - RNA, 19 nt, Homo sapiens
  misc_RNA (1)...(19): siRNA sense strand
acugaugauucaacgagaa

SEQ ID NO: 2464992 - RNA, 19 nt, Homo sapiens
  misc_RNA (1)...(19): siRNA sense strand
acgggaaagaaaagauaaa

SEQ ID NO: 2464993 - RNA, 19 nt, Homo sapiens
  misc_RNA (1)...(19): siRNA sense strand
cuaggauagauuuggauga

SEQ ID NO: 2464994 - RNA, 19 nt, Homo sapiens
  misc_RNA (1)...(19): siRNA sense strand
agcuguggcugaaggauau

SEQ ID NO: 2464995 - RNA, 19 nt, Homo sapiens
  misc_RNA (1)...(19): siRNA sense strand
agguaacugcuguggcauu

SEQ ID NO: 2464996 - RNA, 19 nt, Homo sapiens
  misc_RNA (1)...(19): siRNA sense strand
aggauauggaguaauagua

SEQ ID NO: 2464997 - RNA, 19 nt, Homo sapiens
  misc_RNA (1)...(19): siRNA sense strand
uggauaaacauggcacaaa

SEQ ID NO: 2464998 - RNA, 19 nt, Homo sapiens
  misc_RNA (1)...(19): siRNA sense strand
gggaaagaaaagauaaagu

SEQ ID NO: 2464999 - RNA, 19 nt, Homo sapiens
  misc_RNA (1)...(19): siRNA sense strand
uggcaaaacgauucgagaa

SEQ ID NO: 2465000 - RNA, 19 nt, Homo sapiens
  misc_RNA (1)...(19): siRNA sense strand
gcucagaaccauuagacac

SEQ ID NO: 2465001 - RNA, 19 nt, Homo sapiens
  misc_RNA (1)...(19): siRNA sense strand
gcaucaagcacgaagagcu

SEQ ID NO: 2465002 - RNA, 19 nt, Homo sapiens
  misc_RNA (1)...(19): siRNA sense strand
ggaaggagcuggugagcag

SEQ ID NO: 2465003 - RNA, 19 nt, Homo sapiens
  misc_RNA (1)...(19): siRNA sense strand
caacaaaggcagcugaaga

SEQ ID NO: 2465004 - RNA, 19 nt, Homo sapiens
  misc_RNA (1)...(19): siRNA sense strand
cggcagaagcacacagaca

SEQ ID NO: 2465005 - RNA, 19 nt, Homo sapiens
  misc_RNA (1)...(19): siRNA sense strand
aacaaaggcagcugaagaa

SEQ ID NO: 2465006 - RNA, 19 nt, Homo sapiens
  misc_RNA (1)...(19): siRNA sense strand
agcugaagaagcagaagaa

SEQ ID NO: 2465007 - RNA, 19 nt, Homo sapiens
  misc_RNA (1)...(19): siRNA sense strand
cagcugaagaagcagaaga

SEQ ID NO: 2465008 - RNA, 19 nt, Homo sapiens
  misc_RNA (1)...(19): siRNA sense strand
ggcagaagcacacagacaa

SEQ ID NO: 2465009 - RNA, 19 nt, Homo sapiens
  misc_RNA (1)...(19): siRNA sense strand
ccaaggagcaacaaaggca

SEQ ID NO: 2465010 - RNA, 19 nt, Homo sapiens
  misc_RNA (1)...(19): siRNA sense strand
auguaaagaaugugggaaa

SEQ ID NO: 2465011 - RNA, 19 nt, Homo sapiens
  misc_RNA (1)...(19): siRNA sense strand
auguaaugaaugugggaaa

SEQ ID NO: 2465012 - RNA, 19 nt, Homo sapiens
  misc_RNA (1)...(19): siRNA sense strand
gaauaaugagagugagaga

SEQ ID NO: 2465013 - RNA, 19 nt, Homo sapiens
  misc_RNA (1)...(19): siRNA sense strand
aauucauacuggagagaga

SEQ ID NO: 2465014 - RNA, 19 nt, Homo sapiens
  misc_RNA (1)...(19): siRNA sense strand
augugaagaaugugguaaa

SEQ ID NO: 2465015 - RNA, 19 nt, Homo sapiens
  misc_RNA (1)...(19): siRNA sense strand
aagacauguuggagggaca

SEQ ID NO: 2465016 - RNA, 19 nt, Homo sapiens
  misc_RNA (1)...(19): siRNA sense strand
augcaaugaguguggcaaa

SEQ ID NO: 2465017 - RNA, 19 nt, Homo sapiens
  misc_RNA (1)...(19): siRNA sense strand
cugaagaaucugagccaca

SEQ ID NO: 2465018 - RNA, 19 nt, Homo sapiens
  misc_RNA (1)...(19): siRNA sense strand
ugagaaagaccgggagaau

SEQ ID NO: 2465019 - RNA, 19 nt, Homo sapiens
  misc_RNA (1)...(19): siRNA sense strand
caauguaaugagugugcaa

SEQ ID NO: 2465020 - RNA, 19 nt, Homo sapiens
  misc_RNA (1)...(19): siRNA sense strand
ccuuaugagugccaagaau

SEQ ID NO: 2465021 - RNA, 19 nt, Homo sapiens
  misc_RNA (1)...(19): siRNA sense strand
ccuuauuagacaccagaaa

SEQ ID NO: 2465022 - RNA, 19 nt, Homo sapiens
  misc_RNA (1)...(19): siRNA sense strand
ccuuaugaauguagcgagu

SEQ ID NO: 2465023 - RNA, 19 nt, Homo sapiens
  misc_RNA (1)...(19): siRNA sense strand
gagcaggaugugaagaaga

SEQ ID NO: 2465024 - RNA, 19 nt, Homo sapiens
  misc_RNA (1)...(19): siRNA sense strand
uggaagagguuauagagca

SEQ ID NO: 2465025 - RNA, 19 nt, Homo sapiens
  misc_RNA (1)...(19): siRNA sense strand
ggaagagguuauagagcag

SEQ ID NO: 2465026 - RNA, 19 nt, Homo sapiens
  misc_RNA (1)...(19): siRNA sense strand
ugguaaagccuucagucaa

SEQ ID NO: 2465027 - RNA, 19 nt, Homo sapiens
  misc_RNA (1)...(19): siRNA sense strand
ccaucaauguaaugagugu

SEQ ID NO: 2465028 - RNA, 19 nt, Homo sapiens
  misc_RNA (1)...(19): siRNA sense strand
gggagauacaacagaggga

SEQ ID NO: 2465029 - RNA, 19 nt, Homo sapiens
  misc_RNA (1)...(19): siRNA sense strand
uggcaaagccuucaagcau

SEQ ID NO: 2465030 - RNA, 19 nt, Homo sapiens
  misc_RNA (1)...(19): siRNA sense strand
uggaaagacauuuggaacu

SEQ ID NO: 2465031 - RNA, 19 nt, Homo sapiens
  misc_RNA (1)...(19): siRNA sense strand
caagaaugucagaagacuu

SEQ ID NO: 2465032 - RNA, 19 nt, Homo sapiens
  misc_RNA (1)...(19): siRNA sense strand
uggagcaggaugugaagaa

SEQ ID NO: 2465033 - RNA, 19 nt, Homo sapiens
  misc_RNA (1)...(19): siRNA sense strand
gccagaacucagagauuau

SEQ ID NO: 2465034 - RNA, 19 nt, Homo sapiens
  misc_RNA (1)...(19): siRNA sense strand
auguagcgagugugagaaa

SEQ ID NO: 2465035 - RNA, 19 nt, Homo sapiens
  misc_RNA (1)...(19): siRNA sense strand
aguccauggaagagguuau

SEQ ID NO: 2465036 - RNA, 19 nt, Homo sapiens
  misc_RNA (1)...(19): siRNA sense strand
uggccagaacucagagauu

SEQ ID NO: 2465037 - RNA, 19 nt, Homo sapiens
  misc_RNA (1)...(19): siRNA sense strand
auguaaagaauguggaaag

SEQ ID NO: 2465038 - RNA, 19 nt, Homo sapiens
  misc_RNA (1)...(19): siRNA sense strand
guguaaugaaugugggaag

SEQ ID NO: 2465039 - RNA, 19 nt, Homo sapiens
  misc_RNA (1)...(19): siRNA sense strand
ccaaaacuuccuagagauu

SEQ ID NO: 2465040 - RNA, 19 nt, Homo sapiens
  misc_RNA (1)...(19): siRNA sense strand
ggaacuaauucaagccuuc

SEQ ID NO: 2465041 - RNA, 19 nt, Homo sapiens
  misc_RNA (1)...(19): siRNA sense strand
gcuuguaaugaauguggaa

SEQ ID NO: 2465042 - RNA, 19 nt, Homo sapiens
  misc_RNA (1)...(19): siRNA sense strand
gagauacaacagagggagu

SEQ ID NO: 2465043 - RNA, 19 nt, Homo sapiens
  misc_RNA (1)...(19): siRNA sense strand
ccaugaaugcaaugagugu

SEQ ID NO: 2465044 - RNA, 19 nt, Homo sapiens
  misc_RNA (1)...(19): siRNA sense strand
uguaaugaaugugggaaaa

SEQ ID NO: 2465045 - RNA, 19 nt, Homo sapiens
  misc_RNA (1)...(19): siRNA sense strand
ccauggaagagguuauaga

SEQ ID NO: 2465046 - RNA, 19 nt, Homo sapiens
  misc_RNA (1)...(19): siRNA sense strand
gugagaaagaccgggagaa

SEQ ID NO: 2465047 - RNA, 19 nt, Homo sapiens
  misc_RNA (1)...(19): siRNA sense strand
cccuauguauguaaggaau

SEQ ID NO: 2465048 - RNA, 19 nt, Homo sapiens
  misc_RNA (1)...(19): siRNA sense strand
gagggacauucgagagagu

SEQ ID NO: 2465049 - RNA, 19 nt, Homo sapiens
  misc_RNA (1)...(19): siRNA sense strand
ggacugagaacaaggaggu

SEQ ID NO: 2465050 - RNA, 19 nt, Homo sapiens
  misc_RNA (1)...(19): siRNA sense strand
gugguaaagccuucaguca

SEQ ID NO: 2465051 - RNA, 19 nt, Homo sapiens
  misc_RNA (1)...(19): siRNA sense strand
guuuggagcaggaugugaa

SEQ ID NO: 2465052 - RNA, 19 nt, Homo sapiens
  misc_RNA (1)...(19): siRNA sense strand
cuaugaaugcuuugagugu

SEQ ID NO: 2465053 - RNA, 19 nt, Homo sapiens
  misc_RNA (1)...(19): siRNA sense strand
cugagaacaaggaggugau

SEQ ID NO: 2465054 - RNA, 19 nt, Homo sapiens
  misc_RNA (1)...(19): siRNA sense strand
gugaagaagacauguugga

SEQ ID NO: 2465055 - RNA, 19 nt, Homo sapiens
  misc_RNA (1)...(19): siRNA sense strand
acaaggaggugauucccaa

SEQ ID NO: 2465056 - RNA, 19 nt, Homo sapiens
  misc_RNA (1)...(19): siRNA sense strand
cccuauaaaugugaagaau

SEQ ID NO: 2465057 - RNA, 19 nt, Homo sapiens
  misc_RNA (1)...(19): siRNA sense strand
cugaagaaagauaccauga

SEQ ID NO: 2465058 - RNA, 19 nt, Homo sapiens
  misc_RNA (1)...(19): siRNA sense strand
gucacauggcaaugagaaa

SEQ ID NO: 2465059 - RNA, 19 nt, Homo sapiens
  misc_RNA (1)...(19): siRNA sense strand
gcaaugagaaacuugggaa

SEQ ID NO: 2465060 - RNA, 19 nt, Homo sapiens
  misc_RNA (1)...(19): siRNA sense strand
ugaagaagaucaaaggaac

SEQ ID NO: 2465061 - RNA, 19 nt, Homo sapiens
  misc_RNA (1)...(19): siRNA sense strand
gggcaagauccaggggaaa

SEQ ID NO: 2465062 - RNA, 19 nt, Homo sapiens
  misc_RNA (1)...(19): siRNA sense strand
gcugggaggaaauggaaaa

SEQ ID NO: 2465063 - RNA, 19 nt, Homo sapiens
  misc_RNA (1)...(19): siRNA sense strand
ugaccgucguucugggcaa

SEQ ID NO: 2465064 - RNA, 19 nt, Homo sapiens
  misc_RNA (1)...(19): siRNA sense strand
acacuaagcucuaccagca

SEQ ID NO: 2465065 - RNA, 19 nt, Homo sapiens
  misc_RNA (1)...(19): siRNA sense strand
cuucauagauaucgcccuu

SEQ ID NO: 2465066 - RNA, 19 nt, Homo sapiens
  misc_RNA (1)...(19): siRNA sense strand
ccugacaaggugagaaagu

SEQ ID NO: 2465067 - RNA, 19 nt, Homo sapiens
  misc_RNA (1)...(19): siRNA sense strand
ugggcaagauccaggggaa

SEQ ID NO: 2465068 - RNA, 19 nt, Homo sapiens
  misc_RNA (1)...(19): siRNA sense strand
ggaccaaagacagaggaga

SEQ ID NO: 2465069 - RNA, 19 nt, Homo sapiens
  misc_RNA (1)...(19): siRNA sense strand
cugcaguucuucuacgcaa

SEQ ID NO: 2465070 - RNA, 19 nt, Homo sapiens
  misc_RNA (1)...(19): siRNA sense strand
ucuccauaucugaaacuaa

SEQ ID NO: 2465071 - RNA, 19 nt, Homo sapiens
  misc_RNA (1)...(19): siRNA sense strand
uccauuuacaggacagaaa

SEQ ID NO: 2465072 - RNA, 19 nt, Homo sapiens
  misc_RNA (1)...(19): siRNA sense strand
cugugaauuuggaagucau

SEQ ID NO: 2465073 - RNA, 19 nt, Homo sapiens
  misc_RNA (1)...(19): siRNA sense strand
cauuaagcuugaugggcua

SEQ ID NO: 2465074 - RNA, 19 nt, Homo sapiens
  misc_RNA (1)...(19): siRNA sense strand
augaagaagcagaggaguu

SEQ ID NO: 2465075 - RNA, 19 nt, Homo sapiens
  misc_RNA (1)...(19): siRNA sense strand
cagcagauguccuggcaga

SEQ ID NO: 2465076 - RNA, 19 nt, Homo sapiens
  misc_RNA (1)...(19): siRNA sense strand
ugaugaaaccauggagaaa

SEQ ID NO: 2465077 - RNA, 19 nt, Homo sapiens
  misc_RNA (1)...(19): siRNA sense strand
gggcagaggaagaguugga

SEQ ID NO: 2465078 - RNA, 19 nt, Homo sapiens
  misc_RNA (1)...(19): siRNA sense strand
gugcuauuguacuggcuaa

SEQ ID NO: 2465079 - RNA, 19 nt, Homo sapiens
  misc_RNA (1)...(19): siRNA sense strand
cgaagaagaaagaaugcau

SEQ ID NO: 2465080 - RNA, 19 nt, Homo sapiens
  misc_RNA (1)...(19): siRNA sense strand
agaaaguggaggcgacaau

SEQ ID NO: 2465081 - RNA, 19 nt, Homo sapiens
  misc_RNA (1)...(19): siRNA sense strand
gaggaguugaugaggaaga

SEQ ID NO: 2465082 - RNA, 19 nt, Homo sapiens
  misc_RNA (1)...(19): siRNA sense strand
ccgccagcauccugagcua

SEQ ID NO: 2465083 - RNA, 19 nt, Homo sapiens
  misc_RNA (1)...(19): siRNA sense strand
uguugauggcucaggcaaa

SEQ ID NO: 2465084 - RNA, 19 nt, Homo sapiens
  misc_RNA (1)...(19): siRNA sense strand
gcagaggaguugaugagga

SEQ ID NO: 2465085 - RNA, 19 nt, Homo sapiens
  misc_RNA (1)...(19): siRNA sense strand
cuacagaaggguuugaaaa

SEQ ID NO: 2465086 - RNA, 19 nt, Homo sapiens
  misc_RNA (1)...(19): siRNA sense strand
ggaaguugaauguggcuca

SEQ ID NO: 2465087 - RNA, 19 nt, Homo sapiens
  misc_RNA (1)...(19): siRNA sense strand
aaagaaugcauguugggaa

SEQ ID NO: 2465088 - RNA, 19 nt, Homo sapiens
  misc_RNA (1)...(19): siRNA sense strand
gugaauuuggugauaggaa

SEQ ID NO: 2465089 - RNA, 19 nt, Homo sapiens
  misc_RNA (1)...(19): siRNA sense strand
uugaugaggaagauugaaa

SEQ ID NO: 2465090 - RNA, 19 nt, Homo sapiens
  misc_RNA (1)...(19): siRNA sense strand
gaagcauaucgcugagauu

SEQ ID NO: 2465091 - RNA, 19 nt, Homo sapiens
  misc_RNA (1)...(19): siRNA sense strand
gcuaugagcagcugggcca

SEQ ID NO: 2465092 - RNA, 19 nt, Homo sapiens
  misc_RNA (1)...(19): siRNA sense strand
augaugaaaccauggagaa

SEQ ID NO: 2465093 - RNA, 19 nt, Homo sapiens
  misc_RNA (1)...(19): siRNA sense strand
ugagauuauaggauggaau

SEQ ID NO: 2465094 - RNA, 19 nt, Homo sapiens
  misc_RNA (1)...(19): siRNA sense strand
caagaaacccucaccgaca

SEQ ID NO: 2465095 - RNA, 19 nt, Homo sapiens
  misc_RNA (1)...(19): siRNA sense strand
acaaauacaaagaagccau

SEQ ID NO: 2465096 - RNA, 19 nt, Homo sapiens
  misc_RNA (1)...(19): siRNA sense strand
augcauguugggaagaaua

SEQ ID NO: 2465097 - RNA, 19 nt, Homo sapiens
  misc_RNA (1)...(19): siRNA sense strand
agauugaaaaggaggaaga

SEQ ID NO: 2465098 - RNA, 19 nt, Homo sapiens
  misc_RNA (1)...(19): siRNA sense strand
cuacuggaaucuugaaaau

SEQ ID NO: 2465099 - RNA, 19 nt, Homo sapiens
  misc_RNA (1)...(19): siRNA sense strand
ccuacagaaggguuugaaa

SEQ ID NO: 2465100 - RNA, 19 nt, Homo sapiens
  misc_RNA (1)...(19): siRNA sense strand
gcaggaaaacaaauacaaa

SEQ ID NO: 2465101 - RNA, 19 nt, Homo sapiens
  misc_RNA (1)...(19): siRNA sense strand
aagaaugcauguugggaag

SEQ ID NO: 2465102 - RNA, 19 nt, Homo sapiens
  misc_RNA (1)...(19): siRNA sense strand
aggaagaguuggacccugu

SEQ ID NO: 2465103 - RNA, 19 nt, Homo sapiens
  misc_RNA (1)...(19): siRNA sense strand
cagugaaugaauaugauga

SEQ ID NO: 2465104 - RNA, 19 nt, Homo sapiens
  misc_RNA (1)...(19): siRNA sense strand
cccucgaagaagaaagaau

SEQ ID NO: 2465105 - RNA, 19 nt, Homo sapiens
  misc_RNA (1)...(19): siRNA sense strand
acaaugagaccgauggcca

SEQ ID NO: 2465106 - RNA, 19 nt, Homo sapiens
  misc_RNA (1)...(19): siRNA sense strand
gcaugaccaccgagggcuu

SEQ ID NO: 2465107 - RNA, 19 nt, Homo sapiens
  misc_RNA (1)...(19): siRNA sense strand
caaccuuaaggcagccaua

SEQ ID NO: 2465108 - RNA, 19 nt, Homo sapiens
  misc_RNA (1)...(19): siRNA sense strand
ugggaagaauacagucaca

SEQ ID NO: 2465109 - RNA, 19 nt, Homo sapiens
  misc_RNA (1)...(19): siRNA sense strand
ccuuccuucuccuggauaa

SEQ ID NO: 2465110 - RNA, 19 nt, Homo sapiens
  misc_RNA (1)...(19): siRNA sense strand
ucaaguauagcgagggcga

SEQ ID NO: 2465111 - RNA, 19 nt, Homo sapiens
  misc_RNA (1)...(19): siRNA sense strand
aggcagugaaugaauauga

SEQ ID NO: 2465112 - RNA, 19 nt, Homo sapiens
  misc_RNA (1)...(19): siRNA sense strand
ggucauugaucgcuggcua

SEQ ID NO: 2465113 - RNA, 19 nt, Homo sapiens
  misc_RNA (1)...(19): siRNA sense strand
gaucagugguacagagccu

SEQ ID NO: 2465114 - RNA, 19 nt, Homo sapiens
  misc_RNA (1)...(19): siRNA sense strand
ucagcauaguuaaggguga

SEQ ID NO: 2465115 - RNA, 19 nt, Homo sapiens
  misc_RNA (1)...(19): siRNA sense strand
ucacaggggccuugaaaau

SEQ ID NO: 2465116 - RNA, 19 nt, Homo sapiens
  misc_RNA (1)...(19): siRNA sense strand
cauaaaagucugaaaggca

SEQ ID NO: 2465117 - RNA, 19 nt, Homo sapiens
  misc_RNA (1)...(19): siRNA sense strand
cggcaacugguuuggaaaa

SEQ ID NO: 2465118 - RNA, 19 nt, Homo sapiens
  misc_RNA (1)...(19): siRNA sense strand
aggaaggagagguuugauu

SEQ ID NO: 2465119 - RNA, 19 nt, Homo sapiens
  misc_RNA (1)...(19): siRNA sense strand
auaaaagucugaaaggcaa

SEQ ID NO: 2465120 - RNA, 19 nt, Homo sapiens
  misc_RNA (1)...(19): siRNA sense strand
cggaaucuuuggugggauc

SEQ ID NO: 2465121 - RNA, 19 nt, Homo sapiens
  misc_RNA (1)...(19): siRNA sense strand
cggcuggagcaauguguuu

SEQ ID NO: 2465122 - RNA, 19 nt, Homo sapiens
  misc_RNA (1)...(19): siRNA sense strand
ccuguucggcuuaggguau

SEQ ID NO: 2465123 - RNA, 19 nt, Homo sapiens
  misc_RNA (1)...(19): siRNA sense strand
agggaauggauaugaacua

SEQ ID NO: 2465124 - RNA, 19 nt, Homo sapiens
  misc_RNA (1)...(19): siRNA sense strand
augaagaagaagaagauga

SEQ ID NO: 2465125 - RNA, 19 nt, Homo sapiens
  misc_RNA (1)...(19): siRNA sense strand
auccaaaggaagaaagaau

SEQ ID NO: 2465126 - RNA, 19 nt, Homo sapiens
  misc_RNA (1)...(19): siRNA sense strand
ugguuaugaagaagaagaa

SEQ ID NO: 2465127 - RNA, 19 nt, Homo sapiens
  misc_RNA (1)...(19): siRNA sense strand
aagaagaagaugagaacag

SEQ ID NO: 2465128 - RNA, 19 nt, Homo sapiens
  misc_RNA (1)...(19): siRNA sense strand
agaaaauugagauggacaa

SEQ ID NO: 2465129 - RNA, 19 nt, Homo sapiens
  misc_RNA (1)...(19): siRNA sense strand
gggugaugaagaugguuau

SEQ ID NO: 2465130 - RNA, 19 nt, Homo sapiens
  misc_RNA (1)...(19): siRNA sense strand
cucagaagagaaagagcaa

SEQ ID NO: 2465131 - RNA, 19 nt, Homo sapiens
  misc_RNA (1)...(19): siRNA sense strand
cggaagauucagagcccga

SEQ ID NO: 2465132 - RNA, 19 nt, Homo sapiens
  misc_RNA (1)...(19): siRNA sense strand
cgaaagauaaaggagggaa

SEQ ID NO: 2465133 - RNA, 19 nt, Homo sapiens
  misc_RNA (1)...(19): siRNA sense strand
agauggacaaauuggaaaa

SEQ ID NO: 2465134 - RNA, 19 nt, Homo sapiens
  misc_RNA (1)...(19): siRNA sense strand
agagaaagagcaaguggga

SEQ ID NO: 2465135 - RNA, 19 nt, Homo sapiens
  misc_RNA (1)...(19): siRNA sense strand
ccauugugaagaaggccaa

SEQ ID NO: 2465136 - RNA, 19 nt, Homo sapiens
  misc_RNA (1)...(19): siRNA sense strand
aggauaauacagaagcaga

SEQ ID NO: 2465137 - RNA, 19 nt, Homo sapiens
  misc_RNA (1)...(19): siRNA sense strand
uagccaaggcccagaaaau

SEQ ID NO: 2465138 - RNA, 19 nt, Homo sapiens
  misc_RNA (1)...(19): siRNA sense strand
acuaugaggcauuagccaa

SEQ ID NO: 2465139 - RNA, 19 nt, Homo sapiens
  misc_RNA (1)...(19): siRNA sense strand
acuccuacuaugaggcauu

SEQ ID NO: 2465140 - RNA, 19 nt, Homo sapiens
  misc_RNA (1)...(19): siRNA sense strand
aggcauuagccaaggccca

SEQ ID NO: 2465141 - RNA, 19 nt, Homo sapiens
  misc_RNA (1)...(19): siRNA sense strand
cagaaaauugagauggaca

SEQ ID NO: 2465142 - RNA, 19 nt, Homo sapiens
  misc_RNA (1)...(19): siRNA sense strand
augaagaugguuaugaaga

SEQ ID NO: 2465143 - RNA, 19 nt, Homo sapiens
  misc_RNA (1)...(19): siRNA sense strand
acuacauuauccaaaggaa

SEQ ID NO: 2465144 - RNA, 19 nt, Homo sapiens
  misc_RNA (1)...(19): siRNA sense strand
ccauaauaccucagagaaa

SEQ ID NO: 2465145 - RNA, 19 nt, Homo sapiens
  misc_RNA (1)...(19): siRNA sense strand
gagaaaaugaagagcuaua

SEQ ID NO: 2465146 - RNA, 19 nt, Homo sapiens
  misc_RNA (1)...(19): siRNA sense strand
acauuaaggcccaggacua

SEQ ID NO: 2465147 - RNA, 19 nt, Homo sapiens
  misc_RNA (1)...(19): siRNA sense strand
agaaacaacaucuggaaau

SEQ ID NO: 2465148 - RNA, 19 nt, Homo sapiens
  misc_RNA (1)...(19): siRNA sense strand
cuaaggaagcuguggccaa

SEQ ID NO: 2465149 - RNA, 19 nt, Homo sapiens
  misc_RNA (1)...(19): siRNA sense strand
aaggagaugggaugagaaa

SEQ ID NO: 2465150 - RNA, 19 nt, Homo sapiens
  misc_RNA (1)...(19): siRNA sense strand
ggacaauaccaaagcccuu

SEQ ID NO: 2465151 - RNA, 19 nt, Homo sapiens
  misc_RNA (1)...(19): siRNA sense strand
gcuuugaggaugaggaugu

SEQ ID NO: 2465152 - RNA, 19 nt, Homo sapiens
  misc_RNA (1)...(19): siRNA sense strand
augaagagcuauagugaag

SEQ ID NO: 2465153 - RNA, 19 nt, Homo sapiens
  misc_RNA (1)...(19): siRNA sense strand
ccaucaaaggcccaaguua

SEQ ID NO: 2465154 - RNA, 19 nt, Homo sapiens
  misc_RNA (1)...(19): siRNA sense strand
gcuauagugaaguggccaa

SEQ ID NO: 2465155 - RNA, 19 nt, Homo sapiens
  misc_RNA (1)...(19): siRNA sense strand
gauaauguuacucgagaga

SEQ ID NO: 2465156 - RNA, 19 nt, Homo sapiens
  misc_RNA (1)...(19): siRNA sense strand
gguacagauucccaggcaa

SEQ ID NO: 2465157 - RNA, 19 nt, Homo sapiens
  misc_RNA (1)...(19): siRNA sense strand
auggugaaaucaucagaaa

SEQ ID NO: 2465158 - RNA, 19 nt, Homo sapiens
  misc_RNA (1)...(19): siRNA sense strand
gggaaacccaagacuggaa

SEQ ID NO: 2465159 - RNA, 19 nt, Homo sapiens
  misc_RNA (1)...(19): siRNA sense strand
cgucauuguggcuguaaau

SEQ ID NO: 2465160 - RNA, 19 nt, Homo sapiens
  misc_RNA (1)...(19): siRNA sense strand
acgugugcaucgugaauau

SEQ ID NO: 2465161 - RNA, 19 nt, Homo sapiens
  misc_RNA (1)...(19): siRNA sense strand
cuaaggacuuucauggaga

SEQ ID NO: 2465162 - RNA, 19 nt, Homo sapiens
  misc_RNA (1)...(19): siRNA sense strand
caucuauaccucugcauau

SEQ ID NO: 2465163 - RNA, 19 nt, Homo sapiens
  misc_RNA (1)...(19): siRNA sense strand
accaaauagcgguagguuu

SEQ ID NO: 2465164 - RNA, 19 nt, Homo sapiens
  misc_RNA (1)...(19): siRNA sense strand
gugaaaugccgcuguaacu

SEQ ID NO: 2465165 - RNA, 19 nt, Homo sapiens
  misc_RNA (1)...(19): siRNA sense strand
ggagaugggaugagaaagc

SEQ ID NO: 2465166 - RNA, 19 nt, Homo sapiens
  misc_RNA (1)...(19): siRNA sense strand
agagaagcccacuugcaaa

SEQ ID NO: 2465167 - RNA, 19 nt, Homo sapiens
  misc_RNA (1)...(19): siRNA sense strand
guuccaagucucaggaugu

SEQ ID NO: 2465168 - RNA, 19 nt, Homo sapiens
  misc_RNA (1)...(19): siRNA sense strand
ccacuauagauccaagauu

SEQ ID NO: 2465169 - RNA, 19 nt, Homo sapiens
  misc_RNA (1)...(19): siRNA sense strand
gugaaaucaucagaaacaa

SEQ ID NO: 2465170 - RNA, 19 nt, Homo sapiens
  misc_RNA (1)...(19): siRNA sense strand
cuuaggaaugguacagauu

SEQ ID NO: 2465171 - RNA, 19 nt, Homo sapiens
  misc_RNA (1)...(19): siRNA sense strand
aggauguggucauaauuau

SEQ ID NO: 2465172 - RNA, 19 nt, Homo sapiens
  misc_RNA (1)...(19): siRNA sense strand
agagaaaugcgaaggaccu

SEQ ID NO: 2465173 - RNA, 19 nt, Homo sapiens
  misc_RNA (1)...(19): siRNA sense strand
uugcauuuauaguggaguu

SEQ ID NO: 2465174 - RNA, 19 nt, Homo sapiens
  misc_RNA (1)...(19): siRNA sense strand
ugaauuuguuugccagaca

SEQ ID NO: 2465175 - RNA, 19 nt, Homo sapiens
  misc_RNA (1)...(19): siRNA sense strand
gcgaugaauaccagguugu

SEQ ID NO: 2465176 - RNA, 19 nt, Homo sapiens
  misc_RNA (1)...(19): siRNA sense strand
gagaagcccacuugcaaaa

SEQ ID NO: 2465177 - RNA, 19 nt, Homo sapiens
  misc_RNA (1)...(19): siRNA sense strand
auuaugaggaucagcaaaa

SEQ ID NO: 2465178 - RNA, 19 nt, Homo sapiens
  misc_RNA (1)...(19): siRNA sense strand
ccaagagaaaugcgaagga

SEQ ID NO: 2465179 - RNA, 19 nt, Homo sapiens
  misc_RNA (1)...(19): siRNA sense strand
gggaugagaaagcgugcca

SEQ ID NO: 2465180 - RNA, 19 nt, Homo sapiens
  misc_RNA (1)...(19): siRNA sense strand
caaugaagucacugggaga

SEQ ID NO: 2465181 - RNA, 19 nt, Homo sapiens
  misc_RNA (1)...(19): siRNA sense strand
cuccagacacucagggaaa

SEQ ID NO: 2465182 - RNA, 19 nt, Homo sapiens
  misc_RNA (1)...(19): siRNA sense strand
ccacuuugcugauggcaga

SEQ ID NO: 2465183 - RNA, 19 nt, Homo sapiens
  misc_RNA (1)...(19): siRNA sense strand
agugagagccauugugaga

SEQ ID NO: 2465184 - RNA, 19 nt, Homo sapiens
  misc_RNA (1)...(19): siRNA sense strand
ccaagugcaaagugagaga

SEQ ID NO: 2465185 - RNA, 19 nt, Homo sapiens
  misc_RNA (1)...(19): siRNA sense strand
gggugaggauggauggguu

SEQ ID NO: 2465186 - RNA, 19 nt, Homo sapiens
  misc_RNA (1)...(19): siRNA sense strand
ugacaaagacagagaucac

SEQ ID NO: 2465187 - RNA, 19 nt, Homo sapiens
  misc_RNA (1)...(19): siRNA sense strand
uggccaucgugguaguaaa

SEQ ID NO: 2465188 - RNA, 19 nt, Homo sapiens
  misc_RNA (1)...(19): siRNA sense strand
guuugcaaauguaggccaa

SEQ ID NO: 2465189 - RNA, 19 nt, Homo sapiens
  misc_RNA (1)...(19): siRNA sense strand
guugaucagcagagaugaa

SEQ ID NO: 2465190 - RNA, 19 nt, Homo sapiens
  misc_RNA (1)...(19): siRNA sense strand
guggaugggcugcaagcaa

SEQ ID NO: 2465191 - RNA, 19 nt, Homo sapiens
  misc_RNA (1)...(19): siRNA sense strand
cuggagauaacauuggaaa

SEQ ID NO: 2465192 - RNA, 19 nt, Homo sapiens
  misc_RNA (1)...(19): siRNA sense strand
uggagauaacauuggaaaa

SEQ ID NO: 2465193 - RNA, 19 nt, Homo sapiens
  misc_RNA (1)...(19): siRNA sense strand
gagccaagugacaaagaca

SEQ ID NO: 2465194 - RNA, 19 nt, Homo sapiens
  misc_RNA (1)...(19): siRNA sense strand
ccaggaagugagagccauu

SEQ ID NO: 2465195 - RNA, 19 nt, Homo sapiens
  misc_RNA (1)...(19): siRNA sense strand
augcagaguuacagcacca

SEQ ID NO: 2465196 - RNA, 19 nt, Homo sapiens
  misc_RNA (1)...(19): siRNA sense strand
aggcaaaagacauggcaca

SEQ ID NO: 2465197 - RNA, 19 nt, Homo sapiens
  misc_RNA (1)...(19): siRNA sense strand
ggguuuucaugcaggcaaa

SEQ ID NO: 2465198 - RNA, 19 nt, Homo sapiens
  misc_RNA (1)...(19): siRNA sense strand
ccguaauugugcagcucuu

SEQ ID NO: 2465199 - RNA, 19 nt, Homo sapiens
  misc_RNA (1)...(19): siRNA sense strand
gugagaaucagcaagaaca

SEQ ID NO: 2465200 - RNA, 19 nt, Homo sapiens
  misc_RNA (1)...(19): siRNA sense strand
ccagacacucagggaaaua

SEQ ID NO: 2465201 - RNA, 19 nt, Homo sapiens
  misc_RNA (1)...(19): siRNA sense strand
cagguguugaugaggcaaa

SEQ ID NO: 2465202 - RNA, 19 nt, Homo sapiens
  misc_RNA (1)...(19): siRNA sense strand
uguauauacuggaaagucu

SEQ ID NO: 2465203 - RNA, 19 nt, Homo sapiens
  misc_RNA (1)...(19): siRNA sense strand
gccaagugacaaagacaga

SEQ ID NO: 2465204 - RNA, 19 nt, Homo sapiens
  misc_RNA (1)...(19): siRNA sense strand
aagugcaaagugagagaau

SEQ ID NO: 2465205 - RNA, 19 nt, Homo sapiens
  misc_RNA (1)...(19): siRNA sense strand
cagauauguugcuacaaaa

SEQ ID NO: 2465206 - RNA, 19 nt, Homo sapiens
  misc_RNA (1)...(19): siRNA sense strand
acaaagagagugaguccca

SEQ ID NO: 2465207 - RNA, 19 nt, Homo sapiens
  misc_RNA (1)...(19): siRNA sense strand
gcagagaugaacuucggaa

SEQ ID NO: 2465208 - RNA, 19 nt, Homo sapiens
  misc_RNA (1)...(19): siRNA sense strand
gaccaagugcaaagugaga

SEQ ID NO: 2465209 - RNA, 19 nt, Homo sapiens
  misc_RNA (1)...(19): siRNA sense strand
caggaaauguggaugggcu

SEQ ID NO: 2465210 - RNA, 19 nt, Homo sapiens
  misc_RNA (1)...(19): siRNA sense strand
cugaccaagugcaaaguga

SEQ ID NO: 2465211 - RNA, 19 nt, Homo sapiens
  misc_RNA (1)...(19): siRNA sense strand
caagugacaaagacagaga

SEQ ID NO: 2465212 - RNA, 19 nt, Homo sapiens
  misc_RNA (1)...(19): siRNA sense strand
ucaacugggacaugaccaa

SEQ ID NO: 2465213 - RNA, 19 nt, Homo sapiens
  misc_RNA (1)...(19): siRNA sense strand
ccaaagcccuccuggccuu

SEQ ID NO: 2465214 - RNA, 19 nt, Homo sapiens
  misc_RNA (1)...(19): siRNA sense strand
gaacaauaguggacagcca

SEQ ID NO: 2465215 - RNA, 19 nt, Homo sapiens
  misc_RNA (1)...(19): siRNA sense strand
gggcuuuggaauaggaaca

SEQ ID NO: 2465216 - RNA, 19 nt, Homo sapiens
  misc_RNA (1)...(19): siRNA sense strand
gugucgauucugagcaaua

SEQ ID NO: 2465217 - RNA, 19 nt, Homo sapiens
  misc_RNA (1)...(19): siRNA sense strand
ucuuggaagcaaacagaaa

SEQ ID NO: 2465218 - RNA, 19 nt, Homo sapiens
  misc_RNA (1)...(19): siRNA sense strand
ucggaaaagcccaguguaa

SEQ ID NO: 2465219 - RNA, 19 nt, Homo sapiens
  misc_RNA (1)...(19): siRNA sense strand
caacaauggaggaugucau

SEQ ID NO: 2465220 - RNA, 19 nt, Homo sapiens
  misc_RNA (1)...(19): siRNA sense strand
acaaagaaauggaagcauc

SEQ ID NO: 2465221 - RNA, 19 nt, Homo sapiens
  misc_RNA (1)...(19): siRNA sense strand
guuuauuguuggugccaca

SEQ ID NO: 2465222 - RNA, 19 nt, Homo sapiens
  misc_RNA (1)...(19): siRNA sense strand
cuuuggaauaggaacaaua

SEQ ID NO: 2465223 - RNA, 19 nt, Homo sapiens
  misc_RNA (1)...(19): siRNA sense strand
auggaaaugcucaggucaa

SEQ ID NO: 2465224 - RNA, 19 nt, Homo sapiens
  misc_RNA (1)...(19): siRNA sense strand
ucaguaugauuguaggcaa

SEQ ID NO: 2465225 - RNA, 19 nt, Homo sapiens
  misc_RNA (1)...(19): siRNA sense strand
guuacagcuaucagauuaa

SEQ ID NO: 2465226 - RNA, 19 nt, Homo sapiens
  misc_RNA (1)...(19): siRNA sense strand
uggcaggucaucagggaga

SEQ ID NO: 2465227 - RNA, 19 nt, Homo sapiens
  misc_RNA (1)...(19): siRNA sense strand
cgucguauuugcaugguga

SEQ ID NO: 2465228 - RNA, 19 nt, Homo sapiens
  misc_RNA (1)...(19): siRNA sense strand
ugaugauggcuguuggauu

SEQ ID NO: 2465229 - RNA, 19 nt, Homo sapiens
  misc_RNA (1)...(19): siRNA sense strand
uuaaguucuuggaagcaaa

SEQ ID NO: 2465230 - RNA, 19 nt, Homo sapiens
  misc_RNA (1)...(19): siRNA sense strand
auucaacaauggaggaugu

SEQ ID NO: 2465231 - RNA, 19 nt, Homo sapiens
  misc_RNA (1)...(19): siRNA sense strand
gugaaugaaacucaagaca

SEQ ID NO: 2465232 - RNA, 19 nt, Homo sapiens
  misc_RNA (1)...(19): siRNA sense strand
gaagcaaacagaaaagcaa

SEQ ID NO: 2465233 - RNA, 19 nt, Homo sapiens
  misc_RNA (1)...(19): siRNA sense strand
cuauuguggcugugaacuu

SEQ ID NO: 2465234 - RNA, 19 nt, Homo sapiens
  misc_RNA (1)...(19): siRNA sense strand
gguaugaaguuguuggcuc

SEQ ID NO: 2465235 - RNA, 19 nt, Homo sapiens
  misc_RNA (1)...(19): siRNA sense strand
ccuaugugggacuggguau

SEQ ID NO: 2465236 - RNA, 19 nt, Homo sapiens
  misc_RNA (1)...(19): siRNA sense strand
cuuaauucagccucaguaa

SEQ ID NO: 2465237 - RNA, 19 nt, Homo sapiens
  misc_RNA (1)...(19): siRNA sense strand
uggugucgauucugagcaa

SEQ ID NO: 2465238 - RNA, 19 nt, Homo sapiens
  misc_RNA (1)...(19): siRNA sense strand
ccuagugaaugaaacucaa

SEQ ID NO: 2465239 - RNA, 19 nt, Homo sapiens
  misc_RNA (1)...(19): siRNA sense strand
ugucauccuucgugcaaaa

SEQ ID NO: 2465240 - RNA, 19 nt, Homo sapiens
  misc_RNA (1)...(19): siRNA sense strand
ucaaaagggguuacagcua

SEQ ID NO: 2465241 - RNA, 19 nt, Homo sapiens
  misc_RNA (1)...(19): siRNA sense strand
aagggauuccagugaacaa

SEQ ID NO: 2465242 - RNA, 19 nt, Homo sapiens
  misc_RNA (1)...(19): siRNA sense strand
ggguuacagcuaucagauu

SEQ ID NO: 2465243 - RNA, 19 nt, Homo sapiens
  misc_RNA (1)...(19): siRNA sense strand
cggcaaaacccaucaacca

SEQ ID NO: 2465244 - RNA, 19 nt, Homo sapiens
  misc_RNA (1)...(19): siRNA sense strand
acaaagcucuggaggccga

SEQ ID NO: 2465245 - RNA, 19 nt, Homo sapiens
  misc_RNA (1)...(19): siRNA sense strand
gggaugaugagcugcaaaa

SEQ ID NO: 2465246 - RNA, 19 nt, Homo sapiens
  misc_RNA (1)...(19): siRNA sense strand
guccugggaaugagagcaa

SEQ ID NO: 2465247 - RNA, 19 nt, Homo sapiens
  misc_RNA (1)...(19): siRNA sense strand
ucauggaaucugugguaaa

SEQ ID NO: 2465248 - RNA, 19 nt, Homo sapiens
  misc_RNA (1)...(19): siRNA sense strand
gaggagaaggagaggcuga

SEQ ID NO: 2465249 - RNA, 19 nt, Homo sapiens
  misc_RNA (1)...(19): siRNA sense strand
gggagaagaagcaggagga

SEQ ID NO: 2465250 - RNA, 19 nt, Homo sapiens
  misc_RNA (1)...(19): siRNA sense strand
cagaauucaaagagagcga

SEQ ID NO: 2465251 - RNA, 19 nt, Homo sapiens
  misc_RNA (1)...(19): siRNA sense strand
guaaagaacuguggccaga

SEQ ID NO: 2465252 - RNA, 19 nt, Homo sapiens
  misc_RNA (1)...(19): siRNA sense strand
ccaucaagaagaaagucaa

SEQ ID NO: 2465253 - RNA, 19 nt, Homo sapiens
  misc_RNA (1)...(19): siRNA sense strand
cggcagaagaagcaggagu

SEQ ID NO: 2465254 - RNA, 19 nt, Homo sapiens
  misc_RNA (1)...(19): siRNA sense strand
agucagucuccaugggcua

SEQ ID NO: 2465255 - RNA, 19 nt, Homo sapiens
  misc_RNA (1)...(19): siRNA sense strand
agaccauggaggagcugaa

SEQ ID NO: 2465256 - RNA, 19 nt, Homo sapiens
  misc_RNA (1)...(19): siRNA sense strand
ucaugaagguggaggggca

SEQ ID NO: 2465257 - RNA, 19 nt, Homo sapiens
  misc_RNA (1)...(19): siRNA sense strand
ggguggacgcugaggaaug

SEQ ID NO: 2465258 - RNA, 19 nt, Homo sapiens
  misc_RNA (1)...(19): siRNA sense strand
agguaaacguccguaacaa

SEQ ID NO: 2465259 - RNA, 19 nt, Homo sapiens
  misc_RNA (1)...(19): siRNA sense strand
caggagaaggagcggcaga

SEQ ID NO: 2465260 - RNA, 19 nt, Homo sapiens
  misc_RNA (1)...(19): siRNA sense strand
aggaccugcugaagagaca

SEQ ID NO: 2465261 - RNA, 19 nt, Homo sapiens
  misc_RNA (1)...(19): siRNA sense strand
cggaggagaaggagaggcu

SEQ ID NO: 2465262 - RNA, 19 nt, Homo sapiens
  misc_RNA (1)...(19): siRNA sense strand
aaccggaacuacugggaga

SEQ ID NO: 2465263 - RNA, 19 nt, Homo sapiens
  misc_RNA (1)...(19): siRNA sense strand
agaagaagcaggaguaccu

SEQ ID NO: 2465264 - RNA, 19 nt, Homo sapiens
  misc_RNA (1)...(19): siRNA sense strand
cagacuggguggacgcuga

SEQ ID NO: 2465265 - RNA, 19 nt, Homo sapiens
  misc_RNA (1)...(19): siRNA sense strand
uggaggagcugaaggaccu

SEQ ID NO: 2465266 - RNA, 19 nt, Homo sapiens
  misc_RNA (1)...(19): siRNA sense strand
aagaagaaagucaacgaca

SEQ ID NO: 2465267 - RNA, 19 nt, Homo sapiens
  misc_RNA (1)...(19): siRNA sense strand
ccaaguacaagguggucca

SEQ ID NO: 2465268 - RNA, 19 nt, Homo sapiens
  misc_RNA (1)...(19): siRNA sense strand
aguacaaggugguccagga

SEQ ID NO: 2465269 - RNA, 19 nt, Homo sapiens
  misc_RNA (1)...(19): siRNA sense strand
gguaaagaacuguggccag

SEQ ID NO: 2465270 - RNA, 19 nt, Homo sapiens
  misc_RNA (1)...(19): siRNA sense strand
ucaaagagagcgaugccau

SEQ ID NO: 2465271 - RNA, 19 nt, Homo sapiens
  misc_RNA (1)...(19): siRNA sense strand
agacagacucucagcccau

SEQ ID NO: 2465272 - RNA, 19 nt, Homo sapiens
  misc_RNA (1)...(19): siRNA sense strand
ucuaauaagagcugggcuu

SEQ ID NO: 2465273 - RNA, 19 nt, Homo sapiens
  misc_RNA (1)...(19): siRNA sense strand
cagauuggcuguaggucca

SEQ ID NO: 2465274 - RNA, 19 nt, Homo sapiens
  misc_RNA (1)...(19): siRNA sense strand
cugcacaugaagaaacuaa

SEQ ID NO: 2465275 - RNA, 19 nt, Homo sapiens
  misc_RNA (1)...(19): siRNA sense strand
agaaauaaaaccacagaca

SEQ ID NO: 2465276 - RNA, 19 nt, Homo sapiens
  misc_RNA (1)...(19): siRNA sense strand
uagaauaccuuuagugccu

SEQ ID NO: 2465277 - RNA, 19 nt, Homo sapiens
  misc_RNA (1)...(19): siRNA sense strand
aggaauauucucagagcuu

SEQ ID NO: 2465278 - RNA, 19 nt, Homo sapiens
  misc_RNA (1)...(19): siRNA sense strand
ggacaguuguaaacggcau

SEQ ID NO: 2465279 - RNA, 19 nt, Homo sapiens
  misc_RNA (1)...(19): siRNA sense strand
gugcuguugcauugggaaa

SEQ ID NO: 2465280 - RNA, 19 nt, Homo sapiens
  misc_RNA (1)...(19): siRNA sense strand
ccucaagacagcagcuaca

SEQ ID NO: 2465281 - RNA, 19 nt, Homo sapiens
  misc_RNA (1)...(19): siRNA sense strand
gaauauucucagagcuuca

SEQ ID NO: 2465282 - RNA, 19 nt, Homo sapiens
  misc_RNA (1)...(19): siRNA sense strand
caggacaauaucaggaaca

SEQ ID NO: 2465283 - RNA, 19 nt, Homo sapiens
  misc_RNA (1)...(19): siRNA sense strand
ugugucagcaugagaggaa

SEQ ID NO: 2465284 - RNA, 19 nt, Homo sapiens
  misc_RNA (1)...(19): siRNA sense strand
aggacaauaucaggaacaa

SEQ ID NO: 2465285 - RNA, 19 nt, Homo sapiens
  misc_RNA (1)...(19): siRNA sense strand
ccuggauagucaugauuca

SEQ ID NO: 2465286 - RNA, 19 nt, Homo sapiens
  misc_RNA (1)...(19): siRNA sense strand
ggaaagagucuguuguggu

SEQ ID NO: 2465287 - RNA, 19 nt, Homo sapiens
  misc_RNA (1)...(19): siRNA sense strand
uuggaagaucugaagagaa

SEQ ID NO: 2465288 - RNA, 19 nt, Homo sapiens
  misc_RNA (1)...(19): siRNA sense strand
gggcugcaguacagggacu

SEQ ID NO: 2465289 - RNA, 19 nt, Homo sapiens
  misc_RNA (1)...(19): siRNA sense strand
gcuuccaugacaagguuua

SEQ ID NO: 2465290 - RNA, 19 nt, Homo sapiens
  misc_RNA (1)...(19): siRNA sense strand
acgaacuguuuggaggaaa

SEQ ID NO: 2465291 - RNA, 19 nt, Homo sapiens
  misc_RNA (1)...(19): siRNA sense strand
acuuaauggccucaagaca

SEQ ID NO: 2465292 - RNA, 19 nt, Homo sapiens
  misc_RNA (1)...(19): siRNA sense strand
agucaugauucaagccagu

SEQ ID NO: 2465293 - RNA, 19 nt, Homo sapiens
  misc_RNA (1)...(19): siRNA sense strand
acgaagcggaauucagcaa

SEQ ID NO: 2465294 - RNA, 19 nt, Homo sapiens
  misc_RNA (1)...(19): siRNA sense strand
gagacacagcagaggcaaa

SEQ ID NO: 2465295 - RNA, 19 nt, Homo sapiens
  misc_RNA (1)...(19): siRNA sense strand
ccauaugggacaugcggaa

SEQ ID NO: 2465296 - RNA, 19 nt, Homo sapiens
  misc_RNA (1)...(19): siRNA sense strand
agacaaaagaagcugaaaa

SEQ ID NO: 2465297 - RNA, 19 nt, Homo sapiens
  misc_RNA (1)...(19): siRNA sense strand
cacacaaagcugagauauu

SEQ ID NO: 2465298 - RNA, 19 nt, Homo sapiens
  misc_RNA (1)...(19): siRNA sense strand
guagagaccauaugggaca

SEQ ID NO: 2465299 - RNA, 19 nt, Homo sapiens
  misc_RNA (1)...(19): siRNA sense strand
ccucaagucccaggagaaa

SEQ ID NO: 2465300 - RNA, 19 nt, Homo sapiens
  misc_RNA (1)...(19): siRNA sense strand
ccgugaugggucagacaaa

SEQ ID NO: 2465301 - RNA, 19 nt, Homo sapiens
  misc_RNA (1)...(19): siRNA sense strand
acgaagaggcuuugcagau

SEQ ID NO: 2465302 - RNA, 19 nt, Homo sapiens
  misc_RNA (1)...(19): siRNA sense strand
ggaacacugacgagagaca

SEQ ID NO: 2465303 - RNA, 19 nt, Homo sapiens
  misc_RNA (1)...(19): siRNA sense strand
cguuauuggcugagcagga

SEQ ID NO: 2465304 - RNA, 19 nt, Homo sapiens
  misc_RNA (1)...(19): siRNA sense strand
gguuuaaagaagcugaaga

SEQ ID NO: 2465305 - RNA, 19 nt, Homo sapiens
  misc_RNA (1)...(19): siRNA sense strand
cugaaggauuccaucaaau

SEQ ID NO: 2465306 - RNA, 19 nt, Homo sapiens
  misc_RNA (1)...(19): siRNA sense strand
cagaaaaggcaguggccca

SEQ ID NO: 2465307 - RNA, 19 nt, Homo sapiens
  misc_RNA (1)...(19): siRNA sense strand
aaggaaaccaauuaagaga

SEQ ID NO: 2465308 - RNA, 19 nt, Homo sapiens
  misc_RNA (1)...(19): siRNA sense strand
acaagaaguucgagaaaag

SEQ ID NO: 2465309 - RNA, 19 nt, Homo sapiens
  misc_RNA (1)...(19): siRNA sense strand
gggaagacucuacagguca

SEQ ID NO: 2465310 - RNA, 19 nt, Homo sapiens
  misc_RNA (1)...(19): siRNA sense strand
auucaggucuggaguucaa

SEQ ID NO: 2465311 - RNA, 19 nt, Homo sapiens
  misc_RNA (1)...(19): siRNA sense strand
gccgauacgaagaggcuuu

SEQ ID NO: 2465312 - RNA, 19 nt, Homo sapiens
  misc_RNA (1)...(19): siRNA sense strand
augccaagguucacuacaa

SEQ ID NO: 2465313 - RNA, 19 nt, Homo sapiens
  misc_RNA (1)...(19): siRNA sense strand
cugaagaaauauaccaaac

SEQ ID NO: 2465314 - RNA, 19 nt, Homo sapiens
  misc_RNA (1)...(19): siRNA sense strand
ggaaaauaugugucugcaa

SEQ ID NO: 2465315 - RNA, 19 nt, Homo sapiens
  misc_RNA (1)...(19): siRNA sense strand
uggcugagcaggagcgguu

SEQ ID NO: 2465316 - RNA, 19 nt, Homo sapiens
  misc_RNA (1)...(19): siRNA sense strand
ggcacacaaagcugagaua

SEQ ID NO: 2465317 - RNA, 19 nt, Homo sapiens
  misc_RNA (1)...(19): siRNA sense strand
gauuacaagaaguucgaga

SEQ ID NO: 2465318 - RNA, 19 nt, Homo sapiens
  misc_RNA (1)...(19): siRNA sense strand
auagcaagcaggagaacca

SEQ ID NO: 2465319 - RNA, 19 nt, Homo sapiens
  misc_RNA (1)...(19): siRNA sense strand
gcacuugaugcuauagaca

SEQ ID NO: 2465320 - RNA, 19 nt, Homo sapiens
  misc_RNA (1)...(19): siRNA sense strand
ccaaaggacccaaaaguca

SEQ ID NO: 2465321 - RNA, 19 nt, Homo sapiens
  misc_RNA (1)...(19): siRNA sense strand
aggaagaagcuaucaccuu

SEQ ID NO: 2465322 - RNA, 19 nt, Homo sapiens
  misc_RNA (1)...(19): siRNA sense strand
aaugaaauuuggcugucaa

SEQ ID NO: 2465323 - RNA, 19 nt, Homo sapiens
  misc_RNA (1)...(19): siRNA sense strand
gcuuauuaugagagagccu

SEQ ID NO: 2465324 - RNA, 19 nt, Homo sapiens
  misc_RNA (1)...(19): siRNA sense strand
cagaaugaaauuuggcugu

SEQ ID NO: 2465325 - RNA, 19 nt, Homo sapiens
  misc_RNA (1)...(19): siRNA sense strand
gagacacagcagaggcaaa

SEQ ID NO: 2465326 - RNA, 19 nt, Homo sapiens
  misc_RNA (1)...(19): siRNA sense strand
ccauaugggacaugcggaa

SEQ ID NO: 2465327 - RNA, 19 nt, Homo sapiens
  misc_RNA (1)...(19): siRNA sense strand
agacaaaagaagcugaaaa

SEQ ID NO: 2465328 - RNA, 19 nt, Homo sapiens
  misc_RNA (1)...(19): siRNA sense strand
cacacaaagcugagauauu

SEQ ID NO: 2465329 - RNA, 19 nt, Homo sapiens
  misc_RNA (1)...(19): siRNA sense strand
guagagaccauaugggaca

SEQ ID NO: 2465330 - RNA, 19 nt, Homo sapiens
  misc_RNA (1)...(19): siRNA sense strand
ccucaagucccaggagaaa

SEQ ID NO: 2465331 - RNA, 19 nt, Homo sapiens
  misc_RNA (1)...(19): siRNA sense strand
ccgugaugggucagacaaa

SEQ ID NO: 2465332 - RNA, 19 nt, Homo sapiens
  misc_RNA (1)...(19): siRNA sense strand
acgaagaggcuuugcagau

SEQ ID NO: 2465333 - RNA, 19 nt, Homo sapiens
  misc_RNA (1)...(19): siRNA sense strand
ggaacacugacgagagaca

SEQ ID NO: 2465334 - RNA, 19 nt, Homo sapiens
  misc_RNA (1)...(19): siRNA sense strand
cguuauuggcugagcagga

SEQ ID NO: 2465335 - RNA, 19 nt, Homo sapiens
  misc_RNA (1)...(19): siRNA sense strand
gguuuaaagaagcugaaga

SEQ ID NO: 2465336 - RNA, 19 nt, Homo sapiens
  misc_RNA (1)...(19): siRNA sense strand
cugaaggauuccaucaaau

SEQ ID NO: 2465337 - RNA, 19 nt, Homo sapiens
  misc_RNA (1)...(19): siRNA sense strand
cagaaaaggcaguggccca

SEQ ID NO: 2465338 - RNA, 19 nt, Homo sapiens
  misc_RNA (1)...(19): siRNA sense strand
aaggaaaccaauuaagaga

SEQ ID NO: 2465339 - RNA, 19 nt, Homo sapiens
  misc_RNA (1)...(19): siRNA sense strand
acaagaaguucgagaaaag

SEQ ID NO: 2465340 - RNA, 19 nt, Homo sapiens
  misc_RNA (1)...(19): siRNA sense strand
gggaagacucuacagguca

SEQ ID NO: 2465341 - RNA, 19 nt, Homo sapiens
  misc_RNA (1)...(19): siRNA sense strand
auucaggucuggaguucaa

SEQ ID NO: 2465342 - RNA, 19 nt, Homo sapiens
  misc_RNA (1)...(19): siRNA sense strand
gccgauacgaagaggcuuu

SEQ ID NO: 2465343 - RNA, 19 nt, Homo sapiens
  misc_RNA (1)...(19): siRNA sense strand
augccaagguucacuacaa

SEQ ID NO: 2465344 - RNA, 19 nt, Homo sapiens
  misc_RNA (1)...(19): siRNA sense strand
cugaagaaauauaccaaac

SEQ ID NO: 2465345 - RNA, 19 nt, Homo sapiens
  misc_RNA (1)...(19): siRNA sense strand
ggaaaauaugugucugcaa

SEQ ID NO: 2465346 - RNA, 19 nt, Homo sapiens
  misc_RNA (1)...(19): siRNA sense strand
uggcugagcaggagcgguu

SEQ ID NO: 2465347 - RNA, 19 nt, Homo sapiens
  misc_RNA (1)...(19): siRNA sense strand
ggcacacaaagcugagaua

SEQ ID NO: 2465348 - RNA, 19 nt, Homo sapiens
  misc_RNA (1)...(19): siRNA sense strand
gauuacaagaaguucgaga

SEQ ID NO: 2465349 - RNA, 19 nt, Homo sapiens
  misc_RNA (1)...(19): siRNA sense strand
auagcaagcaggagaacca

SEQ ID NO: 2465350 - RNA, 19 nt, Homo sapiens
  misc_RNA (1)...(19): siRNA sense strand
gcacuugaugcuauagaca

SEQ ID NO: 2465351 - RNA, 19 nt, Homo sapiens
  misc_RNA (1)...(19): siRNA sense strand
ccaaaggacccaaaaguca

SEQ ID NO: 2465352 - RNA, 19 nt, Homo sapiens
  misc_RNA (1)...(19): siRNA sense strand
aggaagaagcuaucaccuu

SEQ ID NO: 2465353 - RNA, 19 nt, Homo sapiens
  misc_RNA (1)...(19): siRNA sense strand
aaugaaauuuggcugucaa

SEQ ID NO: 2465354 - RNA, 19 nt, Homo sapiens
  misc_RNA (1)...(19): siRNA sense strand
gcuuauuaugagagagccu

SEQ ID NO: 2465355 - RNA, 19 nt, Homo sapiens
  misc_RNA (1)...(19): siRNA sense strand
cagaaugaaauuuggcugu

SEQ ID NO: 2465356 - RNA, 19 nt, Homo sapiens
  misc_RNA (1)...(19): siRNA sense strand
aagagagaguggagugcau

SEQ ID NO: 2465357 - RNA, 19 nt, Homo sapiens
  misc_RNA (1)...(19): siRNA sense strand
aggucagccugcuaggaaa

SEQ ID NO: 2465358 - RNA, 19 nt, Homo sapiens
  misc_RNA (1)...(19): siRNA sense strand
cugcauaucagguggaacu

SEQ ID NO: 2465359 - RNA, 19 nt, Homo sapiens
  misc_RNA (1)...(19): siRNA sense strand
cuguggaggaggugcagaa

SEQ ID NO: 2465360 - RNA, 19 nt, Homo sapiens
  misc_RNA (1)...(19): siRNA sense strand
augaagagccuguggcagu

SEQ ID NO: 2465361 - RNA, 19 nt, Homo sapiens
  misc_RNA (1)...(19): siRNA sense strand
ccuuacugugggagacuua

SEQ ID NO: 2465362 - RNA, 19 nt, Homo sapiens
  misc_RNA (1)...(19): siRNA sense strand
uccggaagcugguggaaaa

SEQ ID NO: 2465363 - RNA, 19 nt, Homo sapiens
  misc_RNA (1)...(19): siRNA sense strand
cgucacagucccaauaaaa

SEQ ID NO: 2465364 - RNA, 19 nt, Homo sapiens
  misc_RNA (1)...(19): siRNA sense strand
ccgacuaugcagaggagaa

SEQ ID NO: 2465365 - RNA, 19 nt, Homo sapiens
  misc_RNA (1)...(19): siRNA sense strand
augcagaggagaaggagau

SEQ ID NO: 2465366 - RNA, 19 nt, Homo sapiens
  misc_RNA (1)...(19): siRNA sense strand
cggcguggugaaauagaua

SEQ ID NO: 2465367 - RNA, 19 nt, Homo sapiens
  misc_RNA (1)...(19): siRNA sense strand
cggagaagccacggaaaca

SEQ ID NO: 2465368 - RNA, 19 nt, Homo sapiens
  misc_RNA (1)...(19): siRNA sense strand
cagaggagaaggagaucca

SEQ ID NO: 2465369 - RNA, 19 nt, Homo sapiens
  misc_RNA (1)...(19): siRNA sense strand
aagccaaacaggagcggga

SEQ ID NO: 2465370 - RNA, 19 nt, Homo sapiens
  misc_RNA (1)...(19): siRNA sense strand
gggauguggagcuggaguu

SEQ ID NO: 2465371 - RNA, 19 nt, Homo sapiens
  misc_RNA (1)...(19): siRNA sense strand
uggcaaaagucacuaucaa

SEQ ID NO: 2465372 - RNA, 19 nt, Homo sapiens
  misc_RNA (1)...(19): siRNA sense strand
aaauagauauggcgaccga

SEQ ID NO: 2465373 - RNA, 19 nt, Homo sapiens
  misc_RNA (1)...(19): siRNA sense strand
agcuggaguuggagacuga

SEQ ID NO: 2465374 - RNA, 19 nt, Homo sapiens
  misc_RNA (1)...(19): siRNA sense strand
gaggagaaggagauccaga

SEQ ID NO: 2465375 - RNA, 19 nt, Homo sapiens
  misc_RNA (1)...(19): siRNA sense strand
gcagaaagccaaacaggag

SEQ ID NO: 2465376 - RNA, 19 nt, Homo sapiens
  misc_RNA (1)...(19): siRNA sense strand
ggugaaauagauauggcga

SEQ ID NO: 2465377 - RNA, 19 nt, Homo sapiens
  misc_RNA (1)...(19): siRNA sense strand
ucacuaucaagaaggaaga

SEQ ID NO: 2465378 - RNA, 19 nt, Homo sapiens
  misc_RNA (1)...(19): siRNA sense strand
cuaacaaguuugaggacaa

SEQ ID NO: 2465379 - RNA, 19 nt, Homo sapiens
  misc_RNA (1)...(19): siRNA sense strand
aggacaagacuguggcaua

SEQ ID NO: 2465380 - RNA, 19 nt, Homo sapiens
  misc_RNA (1)...(19): siRNA sense strand
ugaagguggccgugaauua

SEQ ID NO: 2465381 - RNA, 19 nt, Homo sapiens
  misc_RNA (1)...(19): siRNA sense strand
aggauuacuuugauggcaa

SEQ ID NO: 2465382 - RNA, 19 nt, Homo sapiens
  misc_RNA (1)...(19): siRNA sense strand
gguagugguagcagagaau

SEQ ID NO: 2465383 - RNA, 19 nt, Homo sapiens
  misc_RNA (1)...(19): siRNA sense strand
aagauuugauacagggcaa

SEQ ID NO: 2465384 - RNA, 19 nt, Homo sapiens
  misc_RNA (1)...(19): siRNA sense strand
uggcauauacagagcaaaa

SEQ ID NO: 2465385 - RNA, 19 nt, Homo sapiens
  misc_RNA (1)...(19): siRNA sense strand
gaacgaguaugaugauaau

SEQ ID NO: 2465386 - RNA, 19 nt, Homo sapiens
  misc_RNA (1)...(19): siRNA sense strand
cccuguaauucaagaagaa

SEQ ID NO: 2465387 - RNA, 19 nt, Homo sapiens
  misc_RNA (1)...(19): siRNA sense strand
agaagaaggcacaggagga

SEQ ID NO: 2465388 - RNA, 19 nt, Homo sapiens
  misc_RNA (1)...(19): siRNA sense strand
agaagaagaagaaggcaca

SEQ ID NO: 2465389 - RNA, 19 nt, Homo sapiens
  misc_RNA (1)...(19): siRNA sense strand
cugcuaaaggagagaaguu

SEQ ID NO: 2465390 - RNA, 19 nt, Homo sapiens
  misc_RNA (1)...(19): siRNA sense strand
cagccaacaagaagcuaaa

SEQ ID NO: 2465391 - RNA, 19 nt, Homo sapiens
  misc_RNA (1)...(19): siRNA sense strand
cuuacuaugauguggacua

SEQ ID NO: 2465392 - RNA, 19 nt, Homo sapiens
  misc_RNA (1)...(19): siRNA sense strand
augauaauggagaggguau

SEQ ID NO: 2465393 - RNA, 19 nt, Homo sapiens
  misc_RNA (1)...(19): siRNA sense strand
agguagugguagcagagaa

SEQ ID NO: 2465394 - RNA, 19 nt, Homo sapiens
  misc_RNA (1)...(19): siRNA sense strand
ccauaugaagucagagguu

SEQ ID NO: 2465395 - RNA, 19 nt, Homo sapiens
  misc_RNA (1)...(19): siRNA sense strand
gauauuuagagauggugaa

SEQ ID NO: 2465396 - RNA, 19 nt, Homo sapiens
  misc_RNA (1)...(19): siRNA sense strand
ugaugguggcaaagaaauu

SEQ ID NO: 2465397 - RNA, 19 nt, Homo sapiens
  misc_RNA (1)...(19): siRNA sense strand
caaauaucgucauagccaa

SEQ ID NO: 2465398 - RNA, 19 nt, Homo sapiens
  misc_RNA (1)...(19): siRNA sense strand
acaugacagaagacaauaa

SEQ ID NO: 2465399 - RNA, 19 nt, Homo sapiens
  misc_RNA (1)...(19): siRNA sense strand
gcaaagaaauuccuggaug

SEQ ID NO: 2465400 - RNA, 19 nt, Homo sapiens
  misc_RNA (1)...(19): siRNA sense strand
aggaggaguucucgcguga

SEQ ID NO: 2465401 - RNA, 19 nt, Homo sapiens
  misc_RNA (1)...(19): siRNA sense strand
ggccgugaauuaagugauu

SEQ ID NO: 2465402 - RNA, 19 nt, Homo sapiens
  misc_RNA (1)...(19): siRNA sense strand
cugaggaagaauuuaagaa

SEQ ID NO: 2465403 - RNA, 19 nt, Homo sapiens
  misc_RNA (1)...(19): siRNA sense strand
aaugaugguggcaaagaaa

SEQ ID NO: 2465404 - RNA, 19 nt, Homo sapiens
  misc_RNA (1)...(19): siRNA sense strand
uagugguagcagagaauuu

SEQ ID NO: 2465405 - RNA, 19 nt, Homo sapiens
  misc_RNA (1)...(19): siRNA sense strand
cagcaaagacccaaauauc

SEQ ID NO: 2465406 - RNA, 19 nt, Homo sapiens
  misc_RNA (1)...(19): siRNA sense strand
ccaaauaucgucauagcca

SEQ ID NO: 2465407 - RNA, 19 nt, Homo sapiens
  misc_RNA (1)...(19): siRNA sense strand
cccugaagauauuuagaga

SEQ ID NO: 2465408 - RNA, 19 nt, Homo sapiens
  misc_RNA (1)...(19): siRNA sense strand
ugauacagggcaaggacuu

SEQ ID NO: 2465409 - RNA, 19 nt, Homo sapiens
  misc_RNA (1)...(19): siRNA sense strand
auaugaagguggccgugaa

SEQ ID NO: 2465410 - RNA, 19 nt, Homo sapiens
  misc_RNA (1)...(19): siRNA sense strand
ugaagguagugguagcaga

SEQ ID NO: 2465411 - RNA, 19 nt, Homo sapiens
  misc_RNA (1)...(19): siRNA sense strand
uaggacugcugauggaauu

SEQ ID NO: 2465412 - RNA, 19 nt, Homo sapiens
  misc_RNA (1)...(19): siRNA sense strand
gcugcagcuaccagauuaa

SEQ ID NO: 2465413 - RNA, 19 nt, Homo sapiens
  misc_RNA (1)...(19): siRNA sense strand
ugaugauaauggagagggu

SEQ ID NO: 2465414 - RNA, 19 nt, Homo sapiens
  misc_RNA (1)...(19): siRNA sense strand
aacccaagaagaagaagaa

SEQ ID NO: 2465415 - RNA, 19 nt, Homo sapiens
  misc_RNA (1)...(19): siRNA sense strand
uacuggagaaacaggguaa

SEQ ID NO: 2465416 - RNA, 19 nt, Homo sapiens
  misc_RNA (1)...(19): siRNA sense strand
caaagaaauuccuggaugc

SEQ ID NO: 2465417 - RNA, 19 nt, Homo sapiens
  misc_RNA (1)...(19): siRNA sense strand
ccagccaacaagaagcuaa

SEQ ID NO: 2465418 - RNA, 19 nt, Homo sapiens
  misc_RNA (1)...(19): siRNA sense strand
aaccuaucccagagagcaa

SEQ ID NO: 2465419 - RNA, 19 nt, Homo sapiens
  misc_RNA (1)...(19): siRNA sense strand
agacccaaauaucgucaua

SEQ ID NO: 2465420 - RNA, 19 nt, Homo sapiens
  misc_RNA (1)...(19): siRNA sense strand
cauaugaagucagagguuu

SEQ ID NO: 2465421 - RNA, 19 nt, Homo sapiens
  misc_RNA (1)...(19): siRNA sense strand
ucuacaaagagaagcuaca

SEQ ID NO: 2465422 - RNA, 19 nt, Homo sapiens
  misc_RNA (1)...(19): siRNA sense strand
ccgauuugcacauacgaau

SEQ ID NO: 2465423 - RNA, 19 nt, Homo sapiens
  misc_RNA (1)...(19): siRNA sense strand
aggcacaggaggaucucua

SEQ ID NO: 2465424 - RNA, 19 nt, Homo sapiens
  misc_RNA (1)...(19): siRNA sense strand
gggaguugcugcagaggga

SEQ ID NO: 2465425 - RNA, 19 nt, Homo sapiens
  misc_RNA (1)...(19): siRNA sense strand
cugcagagggagaaggaca

SEQ ID NO: 2465426 - RNA, 19 nt, Homo sapiens
  misc_RNA (1)...(19): siRNA sense strand
gagucaauguccagcccua

SEQ ID NO: 2465427 - RNA, 19 nt, Homo sapiens
  misc_RNA (1)...(19): siRNA sense strand
gugaugaagucaaagcaca

SEQ ID NO: 2465428 - RNA, 19 nt, Homo sapiens
  misc_RNA (1)...(19): siRNA sense strand
cugcuuaaggacucagaaa

SEQ ID NO: 2465429 - RNA, 19 nt, Homo sapiens
  misc_RNA (1)...(19): siRNA sense strand
gcuacaugucugacgucaa

SEQ ID NO: 2465430 - RNA, 19 nt, Homo sapiens
  misc_RNA (1)...(19): siRNA sense strand
gugaagagcaagacugcca

SEQ ID NO: 2465431 - RNA, 19 nt, Homo sapiens
  misc_RNA (1)...(19): siRNA sense strand
ggaaaggggugaaggcugu

SEQ ID NO: 2465432 - RNA, 19 nt, Homo sapiens
  misc_RNA (1)...(19): siRNA sense strand
acauuggcuuagaggugaa

SEQ ID NO: 2465433 - RNA, 19 nt, Homo sapiens
  misc_RNA (1)...(19): siRNA sense strand
acacauuugaggaccgaau

SEQ ID NO: 2465434 - RNA, 19 nt, Homo sapiens
  misc_RNA (1)...(19): siRNA sense strand
caacauuggcuuagaggug

SEQ ID NO: 2465435 - RNA, 19 nt, Homo sapiens
  misc_RNA (1)...(19): siRNA sense strand
gauccugagaugugggagu

SEQ ID NO: 2465436 - RNA, 19 nt, Homo sapiens
  misc_RNA (1)...(19): siRNA sense strand
ugucugacgucaagcggau

SEQ ID NO: 2465437 - RNA, 19 nt, Homo sapiens
  misc_RNA (1)...(19): siRNA sense strand
aaauugagcugcugugcca

SEQ ID NO: 2465438 - RNA, 19 nt, Homo sapiens
  misc_RNA (1)...(19): siRNA sense strand
ccaucuucuucgagucuau

SEQ ID NO: 2465439 - RNA, 19 nt, Homo sapiens
  misc_RNA (1)...(19): siRNA sense strand
cugaagaaugcucgggcca

SEQ ID NO: 2465440 - RNA, 19 nt, Homo sapiens
  misc_RNA (1)...(19): siRNA sense strand
ccuauaagcucaaccccaa

SEQ ID NO: 2465441 - RNA, 19 nt, Homo sapiens
  misc_RNA (1)...(19): siRNA sense strand
ugguggaugaggaagguaa

SEQ ID NO: 2465442 - RNA, 19 nt, Homo sapiens
  misc_RNA (1)...(19): siRNA sense strand
ugaugauggaagagggcca

SEQ ID NO: 2465443 - RNA, 19 nt, Homo sapiens
  misc_RNA (1)...(19): siRNA sense strand
ccgaagaauggguagaauc

SEQ ID NO: 2465444 - RNA, 19 nt, Homo sapiens
  misc_RNA (1)...(19): siRNA sense strand
ccagauaugaugauggaag

SEQ ID NO: 2465445 - RNA, 19 nt, Homo sapiens
  misc_RNA (1)...(19): siRNA sense strand
acucaagauucaucagaaa

SEQ ID NO: 2465446 - RNA, 19 nt, Homo sapiens
  misc_RNA (1)...(19): siRNA sense strand
augcaauacuuguggaaaa

SEQ ID NO: 2465447 - RNA, 19 nt, Homo sapiens
  misc_RNA (1)...(19): siRNA sense strand
gugcaaugaauguggaaaa

SEQ ID NO: 2465448 - RNA, 19 nt, Homo sapiens
  misc_RNA (1)...(19): siRNA sense strand
acucauuguucaucagaaa

SEQ ID NO: 2465449 - RNA, 19 nt, Homo sapiens
  misc_RNA (1)...(19): siRNA sense strand
aauucauacaggagagaaa

SEQ ID NO: 2465450 - RNA, 19 nt, Homo sapiens
  misc_RNA (1)...(19): siRNA sense strand
aagaauucauaguggagaa

SEQ ID NO: 2465451 - RNA, 19 nt, Homo sapiens
  misc_RNA (1)...(19): siRNA sense strand
acacaagagugaagcccua

SEQ ID NO: 2465452 - RNA, 19 nt, Homo sapiens
  misc_RNA (1)...(19): siRNA sense strand
augcaauaacuguggcaaa

SEQ ID NO: 2465453 - RNA, 19 nt, Homo sapiens
  misc_RNA (1)...(19): siRNA sense strand
auguagugaaugugggaaa

SEQ ID NO: 2465454 - RNA, 19 nt, Homo sapiens
  misc_RNA (1)...(19): siRNA sense strand
ucacagugcaucagagaau

SEQ ID NO: 2465455 - RNA, 19 nt, Homo sapiens
  misc_RNA (1)...(19): siRNA sense strand
aauucauacuggagagaga

SEQ ID NO: 2465456 - RNA, 19 nt, Homo sapiens
  misc_RNA (1)...(19): siRNA sense strand
cgauuucagcagagaggaa

SEQ ID NO: 2465457 - RNA, 19 nt, Homo sapiens
  misc_RNA (1)...(19): siRNA sense strand
aguucacacaggagagaaa

SEQ ID NO: 2465458 - RNA, 19 nt, Homo sapiens
  misc_RNA (1)...(19): siRNA sense strand
agucacaacuucagguaca

SEQ ID NO: 2465459 - RNA, 19 nt, Homo sapiens
  misc_RNA (1)...(19): siRNA sense strand
ggaaagagcuucaccugga

SEQ ID NO: 2465460 - RNA, 19 nt, Homo sapiens
  misc_RNA (1)...(19): siRNA sense strand
ucucauuacacaucagaaa

SEQ ID NO: 2465461 - RNA, 19 nt, Homo sapiens
  misc_RNA (1)...(19): siRNA sense strand
agucacaguucaagguaca

SEQ ID NO: 2465462 - RNA, 19 nt, Homo sapiens
  misc_RNA (1)...(19): siRNA sense strand
cagaauucauaccggagaa

SEQ ID NO: 2465463 - RNA, 19 nt, Homo sapiens
  misc_RNA (1)...(19): siRNA sense strand
cagcugcccaggagagaaa

SEQ ID NO: 2465464 - RNA, 19 nt, Homo sapiens
  misc_RNA (1)...(19): siRNA sense strand
acacaugagaagauucaaa

SEQ ID NO: 2465465 - RNA, 19 nt, Homo sapiens
  misc_RNA (1)...(19): siRNA sense strand
gggaaagccuucaaccaga

SEQ ID NO: 2465466 - RNA, 19 nt, Homo sapiens
  misc_RNA (1)...(19): siRNA sense strand
augugaugcuggagaccua

SEQ ID NO: 2465467 - RNA, 19 nt, Homo sapiens
  misc_RNA (1)...(19): siRNA sense strand
acgaauucacacaggagaa

SEQ ID NO: 2465468 - RNA, 19 nt, Homo sapiens
  misc_RNA (1)...(19): siRNA sense strand
aacucauacaggagagaaa

SEQ ID NO: 2465469 - RNA, 19 nt, Homo sapiens
  misc_RNA (1)...(19): siRNA sense strand
gugggaaggccuuuagcaa

SEQ ID NO: 2465470 - RNA, 19 nt, Homo sapiens
  misc_RNA (1)...(19): siRNA sense strand
ccgaauaugggaaggucuu

SEQ ID NO: 2465471 - RNA, 19 nt, Homo sapiens
  misc_RNA (1)...(19): siRNA sense strand
cggaaggcacacuugauua

SEQ ID NO: 2465472 - RNA, 19 nt, Homo sapiens
  misc_RNA (1)...(19): siRNA sense strand
guguggcaucugugggaaa

SEQ ID NO: 2465473 - RNA, 19 nt, Homo sapiens
  misc_RNA (1)...(19): siRNA sense strand
ccuuaugagugcagugacu

SEQ ID NO: 2465474 - RNA, 19 nt, Homo sapiens
  misc_RNA (1)...(19): siRNA sense strand
ccgaagaauucauagugga

SEQ ID NO: 2465475 - RNA, 19 nt, Homo sapiens
  misc_RNA (1)...(19): siRNA sense strand
ucauguuggagcaaggaaa

SEQ ID NO: 2465476 - RNA, 19 nt, Homo sapiens
  misc_RNA (1)...(19): siRNA sense strand
ugagaagauucaaaguaga

SEQ ID NO: 2465477 - RNA, 19 nt, Homo sapiens
  misc_RNA (1)...(19): siRNA sense strand
cagaagucagaguugauua

SEQ ID NO: 2465478 - RNA, 19 nt, Homo sapiens
  misc_RNA (1)...(19): siRNA sense strand
agucagaguugauuacaca

SEQ ID NO: 2465479 - RNA, 19 nt, Homo sapiens
  misc_RNA (1)...(19): siRNA sense strand
ggagagaaauuaugggacc

SEQ ID NO: 2465480 - RNA, 19 nt, Homo sapiens
  misc_RNA (1)...(19): siRNA sense strand
ggaaaggccuucacccaga

SEQ ID NO: 2465481 - RNA, 19 nt, Homo sapiens
  misc_RNA (1)...(19): siRNA sense strand
ggagaaaagcccuauguau

SEQ ID NO: 2465482 - RNA, 19 nt, Homo sapiens
  misc_RNA (1)...(19): siRNA sense strand
uggcaaagcguucacacaa

SEQ ID NO: 2465483 - RNA, 19 nt, Homo sapiens
  misc_RNA (1)...(19): siRNA sense strand
ccuuaugaaugcagugacu

SEQ ID NO: 2465484 - RNA, 19 nt, Homo sapiens
  misc_RNA (1)...(19): siRNA sense strand
ccuuaugaaugcagugacu

SEQ ID NO: 2465485 - RNA, 19 nt, Homo sapiens
  misc_RNA (1)...(19): siRNA sense strand
gggaagucuuucacuaaaa

SEQ ID NO: 2465486 - RNA, 19 nt, Homo sapiens
  misc_RNA (1)...(19): siRNA sense strand
aacacacacuggagacaaa

SEQ ID NO: 2465487 - RNA, 19 nt, Homo sapiens
  misc_RNA (1)...(19): siRNA sense strand
ggagagaagccuuacgugu

SEQ ID NO: 2465488 - RNA, 19 nt, Homo sapiens
  misc_RNA (1)...(19): siRNA sense strand
agagaaaccuguaccggga

SEQ ID NO: 2465489 - RNA, 19 nt, Homo sapiens
  misc_RNA (1)...(19): siRNA sense strand
acacaaaaguccacacuca

SEQ ID NO: 2465490 - RNA, 19 nt, Homo sapiens
  misc_RNA (1)...(19): siRNA sense strand
cgaauucacacaggagaaa

SEQ ID NO: 2465491 - RNA, 19 nt, Homo sapiens
  misc_RNA (1)...(19): siRNA sense strand
gugggaagucuuucacuaa

SEQ ID NO: 2465492 - RNA, 19 nt, Homo sapiens
  misc_RNA (1)...(19): siRNA sense strand
gagagaaauuaugggacca

SEQ ID NO: 2465493 - RNA, 19 nt, Homo sapiens
  misc_RNA (1)...(19): siRNA sense strand
augcacugacuguggcaaa

SEQ ID NO: 2465494 - RNA, 19 nt, Homo sapiens
  misc_RNA (1)...(19): siRNA sense strand
cccuauauauguaccgaau

SEQ ID NO: 2465495 - RNA, 19 nt, Homo sapiens
  misc_RNA (1)...(19): siRNA sense strand
guaucaaguuccuaaacca

SEQ ID NO: 2465496 - RNA, 19 nt, Homo sapiens
  misc_RNA (1)...(19): siRNA sense strand
ggaaaggaaccaugggcac

SEQ ID NO: 2465497 - RNA, 19 nt, Homo sapiens
  misc_RNA (1)...(19): siRNA sense strand
aauaaaugugggaaggcau

SEQ ID NO: 2465498 - RNA, 19 nt, Homo sapiens
  misc_RNA (1)...(19): siRNA sense strand
ccuucagggauguggcuau

SEQ ID NO: 2465499 - RNA, 19 nt, Homo sapiens
  misc_RNA (1)...(19): siRNA sense strand
gugaaugugggaaagguuu

SEQ ID NO: 2465500 - RNA, 19 nt, Homo sapiens
  misc_RNA (1)...(19): siRNA sense strand
ugcaauaacuguggcaaau

SEQ ID NO: 2465501 - RNA, 19 nt, Homo sapiens
  misc_RNA (1)...(19): siRNA sense strand
auguggucacugugggaaa

SEQ ID NO: 2465502 - RNA, 19 nt, Homo sapiens
  misc_RNA (1)...(19): siRNA sense strand
gaaugcaauacuuguggaa

SEQ ID NO: 2465503 - RNA, 19 nt, Homo sapiens
  misc_RNA (1)...(19): siRNA sense strand
caguaugaaugccacgaau

SEQ ID NO: 2465504 - RNA, 19 nt, Homo sapiens
  misc_RNA (1)...(19): siRNA sense strand
ugaauaaacaucagacaac

SEQ ID NO: 2465505 - RNA, 19 nt, Homo sapiens
  misc_RNA (1)...(19): siRNA sense strand
ccuggaagucacaguucaa

SEQ ID NO: 2465506 - RNA, 19 nt, Homo sapiens
  misc_RNA (1)...(19): siRNA sense strand
ccagaaaacacaauugauu

SEQ ID NO: 2465507 - RNA, 19 nt, Homo sapiens
  misc_RNA (1)...(19): siRNA sense strand
ccauguucauaaacgaauu

SEQ ID NO: 2465508 - RNA, 19 nt, Homo sapiens
  misc_RNA (1)...(19): siRNA sense strand
aaagcgaagucaugggaga

SEQ ID NO: 2465509 - RNA, 19 nt, Homo sapiens
  misc_RNA (1)...(19): siRNA sense strand
ugagaaacauucagggucu

SEQ ID NO: 2465510 - RNA, 19 nt, Homo sapiens
  misc_RNA (1)...(19): siRNA sense strand
ucaugaucuucuucggaaa

SEQ ID NO: 2465511 - RNA, 19 nt, Homo sapiens
  misc_RNA (1)...(19): siRNA sense strand
ggaucugagcuaaaggaca

SEQ ID NO: 2465512 - RNA, 19 nt, Homo sapiens
  misc_RNA (1)...(19): siRNA sense strand
aggacuuggaucugagcua

SEQ ID NO: 2465513 - RNA, 19 nt, Homo sapiens
  misc_RNA (1)...(19): siRNA sense strand
gaucugagcuaaaggacag

SEQ ID NO: 2465514 - RNA, 19 nt, Homo sapiens
  misc_RNA (1)...(19): siRNA sense strand
agauggaauucaaggcagu

SEQ ID NO: 2465515 - RNA, 19 nt, Homo sapiens
  misc_RNA (1)...(19): siRNA sense strand
aggcagugcagcagguuca

SEQ ID NO: 2465516 - RNA, 19 nt, Homo sapiens
  misc_RNA (1)...(19): siRNA sense strand
gacuauuggauuugaggau

SEQ ID NO: 2465517 - RNA, 19 nt, Homo sapiens
  misc_RNA (1)...(19): siRNA sense strand
cuggauguuuugaggggua

SEQ ID NO: 2465518 - RNA, 19 nt, Homo sapiens
  misc_RNA (1)...(19): siRNA sense strand
gggucuauuugcuccgcua

SEQ ID NO: 2465519 - RNA, 19 nt, Homo sapiens
  misc_RNA (1)...(19): siRNA sense strand
gacuuggaucugagcuaaa

SEQ ID NO: 2465520 - RNA, 19 nt, Homo sapiens
  misc_RNA (1)...(19): siRNA sense strand
cguaauaacuugcacagga

SEQ ID NO: 2465521 - RNA, 19 nt, Homo sapiens
  misc_RNA (1)...(19): siRNA sense strand
ggaaacaagugguggugug

SEQ ID NO: 2465522 - RNA, 19 nt, Homo sapiens
  misc_RNA (1)...(19): siRNA sense strand
acaucaagcaggcagaauu

SEQ ID NO: 2465523 - RNA, 19 nt, Homo sapiens
  misc_RNA (1)...(19): siRNA sense strand
cgagagaagcagcaaacca

SEQ ID NO: 2465524 - RNA, 19 nt, Homo sapiens
  misc_RNA (1)...(19): siRNA sense strand
gcuauggugagguaggcaa

SEQ ID NO: 2465525 - RNA, 19 nt, Homo sapiens
  misc_RNA (1)...(19): siRNA sense strand
caacacaggcuuuggcacu

SEQ ID NO: 2465526 - RNA, 19 nt, Homo sapiens
  misc_RNA (1)...(19): siRNA sense strand
augcaggaguucaccaaau

SEQ ID NO: 2465527 - RNA, 19 nt, Homo sapiens
  misc_RNA (1)...(19): siRNA sense strand
gcauuguggaagagagcgu

SEQ ID NO: 2465528 - RNA, 19 nt, Homo sapiens
  misc_RNA (1)...(19): siRNA sense strand
aagcaauggaggaaagaua

SEQ ID NO: 2465529 - RNA, 19 nt, Homo sapiens
  misc_RNA (1)...(19): siRNA sense strand
aaagaagagcugaggcaaa

SEQ ID NO: 2465530 - RNA, 19 nt, Homo sapiens
  misc_RNA (1)...(19): siRNA sense strand
agauuaugccaguggaaua

SEQ ID NO: 2465531 - RNA, 19 nt, Homo sapiens
  misc_RNA (1)...(19): siRNA sense strand
agagagaagaauugagauu

SEQ ID NO: 2465532 - RNA, 19 nt, Homo sapiens
  misc_RNA (1)...(19): siRNA sense strand
gaggcaaagaugugaagaa

SEQ ID NO: 2465533 - RNA, 19 nt, Homo sapiens
  misc_RNA (1)...(19): siRNA sense strand
gaguugaugaguaaagaaa

SEQ ID NO: 2465534 - RNA, 19 nt, Homo sapiens
  misc_RNA (1)...(19): siRNA sense strand
agagaaagagagaagaauu

SEQ ID NO: 2465535 - RNA, 19 nt, Homo sapiens
  misc_RNA (1)...(19): siRNA sense strand
ccagcaaauuaaagcagaa

SEQ ID NO: 2465536 - RNA, 19 nt, Homo sapiens
  misc_RNA (1)...(19): siRNA sense strand
gaugaagauaugaaagcaa

SEQ ID NO: 2465537 - RNA, 19 nt, Homo sapiens
  misc_RNA (1)...(19): siRNA sense strand
guaaagaaauauugagcuc

SEQ ID NO: 2465538 - RNA, 19 nt, Homo sapiens
  misc_RNA (1)...(19): siRNA sense strand
aggcaaagaugugaagaau

SEQ ID NO: 2465539 - RNA, 19 nt, Homo sapiens
  misc_RNA (1)...(19): siRNA sense strand
uagaacaauuacaggaaga

SEQ ID NO: 2465540 - RNA, 19 nt, Homo sapiens
  misc_RNA (1)...(19): siRNA sense strand
gugaaaacuuuacaggaaa

SEQ ID NO: 2465541 - RNA, 19 nt, Homo sapiens
  misc_RNA (1)...(19): siRNA sense strand
aggcgaaaguuccagcaaa

SEQ ID NO: 2465542 - RNA, 19 nt, Homo sapiens
  misc_RNA (1)...(19): siRNA sense strand
cuaauugagcagcgugaua

SEQ ID NO: 2465543 - RNA, 19 nt, Homo sapiens
  misc_RNA (1)...(19): siRNA sense strand
uaagaaagcaguuggcaga

SEQ ID NO: 2465544 - RNA, 19 nt, Homo sapiens
  misc_RNA (1)...(19): siRNA sense strand
gagucuagcauuccagaaa

SEQ ID NO: 2465545 - RNA, 19 nt, Homo sapiens
  misc_RNA (1)...(19): siRNA sense strand
gaugugaagaauuggauau

SEQ ID NO: 2465546 - RNA, 19 nt, Homo sapiens
  misc_RNA (1)...(19): siRNA sense strand
gaaacugagcagaggcuga

SEQ ID NO: 2465547 - RNA, 19 nt, Homo sapiens
  misc_RNA (1)...(19): siRNA sense strand
uuggagaauuggagcaaca

SEQ ID NO: 2465548 - RNA, 19 nt, Homo sapiens
  misc_RNA (1)...(19): siRNA sense strand
gugaaugcaaaguagcaaa

SEQ ID NO: 2465549 - RNA, 19 nt, Homo sapiens
  misc_RNA (1)...(19): siRNA sense strand
ggcaaagaugugaagaauu

SEQ ID NO: 2465550 - RNA, 19 nt, Homo sapiens
  misc_RNA (1)...(19): siRNA sense strand
gugaagaauuggauaugca

SEQ ID NO: 2465551 - RNA, 19 nt, Homo sapiens
  misc_RNA (1)...(19): siRNA sense strand
uggcagagaaagagagaag

SEQ ID NO: 2465552 - RNA, 19 nt, Homo sapiens
  misc_RNA (1)...(19): siRNA sense strand
gagaauugcagcagcagau

SEQ ID NO: 2465553 - RNA, 19 nt, Homo sapiens
  misc_RNA (1)...(19): siRNA sense strand
agaaaucuuuacaggaaca

SEQ ID NO: 2465554 - RNA, 19 nt, Homo sapiens
  misc_RNA (1)...(19): siRNA sense strand
cagaagaaagaugaagaua

SEQ ID NO: 2465555 - RNA, 19 nt, Homo sapiens
  misc_RNA (1)...(19): siRNA sense strand
gaaucuugguuaagccgaa

SEQ ID NO: 2465556 - RNA, 19 nt, Homo sapiens
  misc_RNA (1)...(19): siRNA sense strand
ucaggaagcacuagcagaa

SEQ ID NO: 2465557 - RNA, 19 nt, Homo sapiens
  misc_RNA (1)...(19): siRNA sense strand
aagaaggcucugagaauga

SEQ ID NO: 2465558 - RNA, 19 nt, Homo sapiens
  misc_RNA (1)...(19): siRNA sense strand
gcucugagaaugaacguau

SEQ ID NO: 2465559 - RNA, 19 nt, Homo sapiens
  misc_RNA (1)...(19): siRNA sense strand
auauaaugacacuggaaga

SEQ ID NO: 2465560 - RNA, 19 nt, Homo sapiens
  misc_RNA (1)...(19): siRNA sense strand
gugaagaacuugaaaagca

SEQ ID NO: 2465561 - RNA, 19 nt, Homo sapiens
  misc_RNA (1)...(19): siRNA sense strand
gcagcuugguuuaacgaau

SEQ ID NO: 2465562 - RNA, 19 nt, Homo sapiens
  misc_RNA (1)...(19): siRNA sense strand
caaaugaugcuguuggaga

SEQ ID NO: 2465563 - RNA, 19 nt, Homo sapiens
  misc_RNA (1)...(19): siRNA sense strand
ggcacaaguucuucaucaa

SEQ ID NO: 2465564 - RNA, 19 nt, Homo sapiens
  misc_RNA (1)...(19): siRNA sense strand
uugagauucuggagaguga

SEQ ID NO: 2465565 - RNA, 19 nt, Homo sapiens
  misc_RNA (1)...(19): siRNA sense strand
aagccgaauuaaagaggau

SEQ ID NO: 2465566 - RNA, 19 nt, Homo sapiens
  misc_RNA (1)...(19): siRNA sense strand
aggagcagcuagaacagaa

SEQ ID NO: 2465567 - RNA, 19 nt, Homo sapiens
  misc_RNA (1)...(19): siRNA sense strand
gugaaaagaagcaagaaca

SEQ ID NO: 2465568 - RNA, 19 nt, Homo sapiens
  misc_RNA (1)...(19): siRNA sense strand
ggagcagcuagaacagaaa

SEQ ID NO: 2465569 - RNA, 19 nt, Homo sapiens
  misc_RNA (1)...(19): siRNA sense strand
acaagaacucauugaagau

SEQ ID NO: 2465570 - RNA, 19 nt, Homo sapiens
  misc_RNA (1)...(19): siRNA sense strand
gaagcuuuacuuaaggaaa

SEQ ID NO: 2465571 - RNA, 19 nt, Homo sapiens
  misc_RNA (1)...(19): siRNA sense strand
gguguuuauucgacugcaa

SEQ ID NO: 2465572 - RNA, 19 nt, Homo sapiens
  misc_RNA (1)...(19): siRNA sense strand
uguuaaagucccugcuaca

SEQ ID NO: 2465573 - RNA, 19 nt, Homo sapiens
  misc_RNA (1)...(19): siRNA sense strand
uggaagaauugcagcgaga

SEQ ID NO: 2465574 - RNA, 19 nt, Homo sapiens
  misc_RNA (1)...(19): siRNA sense strand
cugugaaagcugagccaaa

SEQ ID NO: 2465575 - RNA, 19 nt, Homo sapiens
  misc_RNA (1)...(19): siRNA sense strand
uugaaagagcagagagaga

SEQ ID NO: 2465576 - RNA, 19 nt, Homo sapiens
  misc_RNA (1)...(19): siRNA sense strand
aguugaaaguccuguuaaa

SEQ ID NO: 2465577 - RNA, 19 nt, Homo sapiens
  misc_RNA (1)...(19): siRNA sense strand
ugaaagaaaugaaggucga

SEQ ID NO: 2465578 - RNA, 19 nt, Homo sapiens
  misc_RNA (1)...(19): siRNA sense strand
agguagaauucuuguugaa

SEQ ID NO: 2465579 - RNA, 19 nt, Homo sapiens
  misc_RNA (1)...(19): siRNA sense strand
augcaaugagagagagaau

SEQ ID NO: 2465580 - RNA, 19 nt, Homo sapiens
  misc_RNA (1)...(19): siRNA sense strand
cagaaaagaccaauguuaa

SEQ ID NO: 2465581 - RNA, 19 nt, Homo sapiens
  misc_RNA (1)...(19): siRNA sense strand
cuggauggauuuugggaua

SEQ ID NO: 2465582 - RNA, 19 nt, Homo sapiens
  misc_RNA (1)...(19): siRNA sense strand
auaaggaauacgaacgaaa

SEQ ID NO: 2465583 - RNA, 19 nt, Homo sapiens
  misc_RNA (1)...(19): siRNA sense strand
agagaaagcuaaacgagga

SEQ ID NO: 2465584 - RNA, 19 nt, Homo sapiens
  misc_RNA (1)...(19): siRNA sense strand
aggaaaggugccaaguaaa

SEQ ID NO: 2465585 - RNA, 19 nt, Homo sapiens
  misc_RNA (1)...(19): siRNA sense strand
cuuaugaaggaaagguuua

SEQ ID NO: 2465586 - RNA, 19 nt, Homo sapiens
  misc_RNA (1)...(19): siRNA sense strand
uaccaaaggaaguugauaa

SEQ ID NO: 2465587 - RNA, 19 nt, Homo sapiens
  misc_RNA (1)...(19): siRNA sense strand
aauugaaagagcagagaga

SEQ ID NO: 2465588 - RNA, 19 nt, Homo sapiens
  misc_RNA (1)...(19): siRNA sense strand
cuuguaaagucgauaguga

SEQ ID NO: 2465589 - RNA, 19 nt, Homo sapiens
  misc_RNA (1)...(19): siRNA sense strand
guagaaaugagaugggcau

SEQ ID NO: 2465590 - RNA, 19 nt, Homo sapiens
  misc_RNA (1)...(19): siRNA sense strand
ucuacaaccaggagaauuu

SEQ ID NO: 2465591 - RNA, 19 nt, Homo sapiens
  misc_RNA (1)...(19): siRNA sense strand
aauguuaagccaagggcaa

SEQ ID NO: 2465592 - RNA, 19 nt, Homo sapiens
  misc_RNA (1)...(19): siRNA sense strand
gagaaagcuaaacgaggaa

SEQ ID NO: 2465593 - RNA, 19 nt, Homo sapiens
  misc_RNA (1)...(19): siRNA sense strand
accaaaggaaguugauaaa

SEQ ID NO: 2465594 - RNA, 19 nt, Homo sapiens
  misc_RNA (1)...(19): siRNA sense strand
aaaacgaaccagaaggaaa

SEQ ID NO: 2465595 - RNA, 19 nt, Homo sapiens
  misc_RNA (1)...(19): siRNA sense strand
ggaaaacuuaccugagaua

SEQ ID NO: 2465596 - RNA, 19 nt, Homo sapiens
  misc_RNA (1)...(19): siRNA sense strand
cagauguuguggaaggaau

SEQ ID NO: 2465597 - RNA, 19 nt, Homo sapiens
  misc_RNA (1)...(19): siRNA sense strand
ccagaaaagaccaauguua

SEQ ID NO: 2465598 - RNA, 19 nt, Homo sapiens
  misc_RNA (1)...(19): siRNA sense strand
ccaaagaccaaauggagca

SEQ ID NO: 2465599 - RNA, 19 nt, Homo sapiens
  misc_RNA (1)...(19): siRNA sense strand
gucaaaggccaaagaccaa

SEQ ID NO: 2465600 - RNA, 19 nt, Homo sapiens
  misc_RNA (1)...(19): siRNA sense strand
accaaauggagcagacuaa

SEQ ID NO: 2465601 - RNA, 19 nt, Homo sapiens
  misc_RNA (1)...(19): siRNA sense strand
aagaaaugaaggucgaauu

SEQ ID NO: 2465602 - RNA, 19 nt, Homo sapiens
  misc_RNA (1)...(19): siRNA sense strand
agacagacuugaaggugga

SEQ ID NO: 2465603 - RNA, 19 nt, Homo sapiens
  misc_RNA (1)...(19): siRNA sense strand
agauugauaacgagaguga

SEQ ID NO: 2465604 - RNA, 19 nt, Homo sapiens
  misc_RNA (1)...(19): siRNA sense strand
ggugccaaguaaaggaaga

SEQ ID NO: 2465605 - RNA, 19 nt, Homo sapiens
  misc_RNA (1)...(19): siRNA sense strand
uggaguagcagaugauauu

SEQ ID NO: 2465606 - RNA, 19 nt, Homo sapiens
  misc_RNA (1)...(19): siRNA sense strand
uuacaaggucaaaggccaa

SEQ ID NO: 2465607 - RNA, 19 nt, Homo sapiens
  misc_RNA (1)...(19): siRNA sense strand
aaggaauacgaacgaaaua

SEQ ID NO: 2465608 - RNA, 19 nt, Homo sapiens
  misc_RNA (1)...(19): siRNA sense strand
uaaaggaagaccugccaaa

SEQ ID NO: 2465609 - RNA, 19 nt, Homo sapiens
  misc_RNA (1)...(19): siRNA sense strand
agucgacacaggaaggaua

SEQ ID NO: 2465610 - RNA, 19 nt, Homo sapiens
  misc_RNA (1)...(19): siRNA sense strand
uuuaaauggccuuccaaua

SEQ ID NO: 2465611 - RNA, 19 nt, Homo sapiens
  misc_RNA (1)...(19): siRNA sense strand
agguauagcaaguaaacca

SEQ ID NO: 2465612 - RNA, 19 nt, Homo sapiens
  misc_RNA (1)...(19): siRNA sense strand
ucuucuugcugguggagua

SEQ ID NO: 2465613 - RNA, 19 nt, Homo sapiens
  misc_RNA (1)...(19): siRNA sense strand
uggaaggaauggaacugaa

SEQ ID NO: 2465614 - RNA, 19 nt, Homo sapiens
  misc_RNA (1)...(19): siRNA sense strand
agucgauagugaagaaaau

SEQ ID NO: 2465615 - RNA, 19 nt, Homo sapiens
  misc_RNA (1)...(19): siRNA sense strand
ucgcacagcaguuggucaa

SEQ ID NO: 2465616 - RNA, 19 nt, Homo sapiens
  misc_RNA (1)...(19): siRNA sense strand
guacggauuacaaggucaa

SEQ ID NO: 2465617 - RNA, 19 nt, Homo sapiens
  misc_RNA (1)...(19): siRNA sense strand
ucacugucucagaaagaaa

SEQ ID NO: 2465618 - RNA, 19 nt, Homo sapiens
  misc_RNA (1)...(19): siRNA sense strand
aggaaagguuuaaacaguu

SEQ ID NO: 2465619 - RNA, 19 nt, Homo sapiens
  misc_RNA (1)...(19): siRNA sense strand
ggaaggaauggaacugaau

SEQ ID NO: 2465620 - RNA, 19 nt, Homo sapiens
  misc_RNA (1)...(19): siRNA sense strand
guggaguagcagaugauau

SEQ ID NO: 2465621 - RNA, 19 nt, Homo sapiens
  misc_RNA (1)...(19): siRNA sense strand
agaauuaggcaggaagaau

SEQ ID NO: 2465622 - RNA, 19 nt, Homo sapiens
  misc_RNA (1)...(19): siRNA sense strand
ggaaacuugaauuggacau

SEQ ID NO: 2465623 - RNA, 19 nt, Homo sapiens
  misc_RNA (1)...(19): siRNA sense strand
cauuccagaugaugcuaaa

SEQ ID NO: 2465624 - RNA, 19 nt, Homo sapiens
  misc_RNA (1)...(19): siRNA sense strand
acaggaugaugcuggaaga

SEQ ID NO: 2465625 - RNA, 19 nt, Homo sapiens
  misc_RNA (1)...(19): siRNA sense strand
gcaagaaguuugaggagga

SEQ ID NO: 2465626 - RNA, 19 nt, Homo sapiens
  misc_RNA (1)...(19): siRNA sense strand
aggaagaagcuaaggccaa

SEQ ID NO: 2465627 - RNA, 19 nt, Homo sapiens
  misc_RNA (1)...(19): siRNA sense strand
agaagaucgcugaggaaga

SEQ ID NO: 2465628 - RNA, 19 nt, Homo sapiens
  misc_RNA (1)...(19): siRNA sense strand
agaaguuugaggaggacaa

SEQ ID NO: 2465629 - RNA, 19 nt, Homo sapiens
  misc_RNA (1)...(19): siRNA sense strand
aggcauaugaccagaagau

SEQ ID NO: 2465630 - RNA, 19 nt, Homo sapiens
  misc_RNA (1)...(19): siRNA sense strand
aagcuaaggccaaggagga

SEQ ID NO: 2465631 - RNA, 19 nt, Homo sapiens
  misc_RNA (1)...(19): siRNA sense strand
ggcagcaucgagagagcaa

SEQ ID NO: 2465632 - RNA, 19 nt, Homo sapiens
  misc_RNA (1)...(19): siRNA sense strand
ugcuagaagagaagggcaa

SEQ ID NO: 2465633 - RNA, 19 nt, Homo sapiens
  misc_RNA (1)...(19): siRNA sense strand
aggaagaagaggaggaggu

SEQ ID NO: 2465634 - RNA, 19 nt, Homo sapiens
  misc_RNA (1)...(19): siRNA sense strand
agagaagggcaaacgggua

SEQ ID NO: 2465635 - RNA, 19 nt, Homo sapiens
  misc_RNA (1)...(19): siRNA sense strand
gcaaacggguaaucgccaa

SEQ ID NO: 2465636 - RNA, 19 nt, Homo sapiens
  misc_RNA (1)...(19): siRNA sense strand
gagggacguuggaggguca

SEQ ID NO: 2465637 - RNA, 19 nt, Homo sapiens
  misc_RNA (1)...(19): siRNA sense strand
cacccaaagcugaagaaga

SEQ ID NO: 2465638 - RNA, 19 nt, Homo sapiens
  misc_RNA (1)...(19): siRNA sense strand
guacaaggucugggaggga

SEQ ID NO: 2465639 - RNA, 19 nt, Homo sapiens
  misc_RNA (1)...(19): siRNA sense strand
caguaaauauggagagcau

SEQ ID NO: 2465640 - RNA, 19 nt, Homo sapiens
  misc_RNA (1)...(19): siRNA sense strand
ggauauuagaccacagaaa

SEQ ID NO: 2465641 - RNA, 19 nt, Homo sapiens
  misc_RNA (1)...(19): siRNA sense strand
cagagaaggcagaagaaau

SEQ ID NO: 2465642 - RNA, 19 nt, Homo sapiens
  misc_RNA (1)...(19): siRNA sense strand
ugagaaucgaaguggaaua

SEQ ID NO: 2465643 - RNA, 19 nt, Homo sapiens
  misc_RNA (1)...(19): siRNA sense strand
caaagaagccagugagcca

SEQ ID NO: 2465644 - RNA, 19 nt, Homo sapiens
  misc_RNA (1)...(19): siRNA sense strand
gagcaagaaaagaaagaaa

SEQ ID NO: 2465645 - RNA, 19 nt, Homo sapiens
  misc_RNA (1)...(19): siRNA sense strand
aggugauaguagaaguaaa

SEQ ID NO: 2465646 - RNA, 19 nt, Homo sapiens
  misc_RNA (1)...(19): siRNA sense strand
agaaguaccagaagaacaa

SEQ ID NO: 2465647 - RNA, 19 nt, Homo sapiens
  misc_RNA (1)...(19): siRNA sense strand
cagauugucaugugggaua

SEQ ID NO: 2465648 - RNA, 19 nt, Homo sapiens
  misc_RNA (1)...(19): siRNA sense strand
aggaaggcgaagugauaua

SEQ ID NO: 2465649 - RNA, 19 nt, Homo sapiens
  misc_RNA (1)...(19): siRNA sense strand
aagucaagcaucuggaaua

SEQ ID NO: 2465650 - RNA, 19 nt, Homo sapiens
  misc_RNA (1)...(19): siRNA sense strand
aaauggacuaugagaguua

SEQ ID NO: 2465651 - RNA, 19 nt, Homo sapiens
  misc_RNA (1)...(19): siRNA sense strand
acauaagcacucagacaaa

SEQ ID NO: 2465652 - RNA, 19 nt, Homo sapiens
  misc_RNA (1)...(19): siRNA sense strand
ggugauaguagaaguaaaa

SEQ ID NO: 2465653 - RNA, 19 nt, Homo sapiens
  misc_RNA (1)...(19): siRNA sense strand
cugacacauuugagauuaa

SEQ ID NO: 2465654 - RNA, 19 nt, Homo sapiens
  misc_RNA (1)...(19): siRNA sense strand
ccaccaagacccaagaaau

SEQ ID NO: 2465655 - RNA, 19 nt, Homo sapiens
  misc_RNA (1)...(19): siRNA sense strand
cagaaguaccagaagaaca

SEQ ID NO: 2465656 - RNA, 19 nt, Homo sapiens
  misc_RNA (1)...(19): siRNA sense strand
cuucauagcccaacggaga

SEQ ID NO: 2465657 - RNA, 19 nt, Homo sapiens
  misc_RNA (1)...(19): siRNA sense strand
acuagaaauggcaaagaaa

SEQ ID NO: 2465658 - RNA, 19 nt, Homo sapiens
  misc_RNA (1)...(19): siRNA sense strand
uugcaaaacacaagacaaa

SEQ ID NO: 2465659 - RNA, 19 nt, Homo sapiens
  misc_RNA (1)...(19): siRNA sense strand
ggaagaaucaguuacggaa

SEQ ID NO: 2465660 - RNA, 19 nt, Homo sapiens
  misc_RNA (1)...(19): siRNA sense strand
agacauggaaccaguaaau

SEQ ID NO: 2465661 - RNA, 19 nt, Homo sapiens
  misc_RNA (1)...(19): siRNA sense strand
agaaauugaggaagaauca

SEQ ID NO: 2465662 - RNA, 19 nt, Homo sapiens
  misc_RNA (1)...(19): siRNA sense strand
uccuugaaccggagaguaa

SEQ ID NO: 2465663 - RNA, 19 nt, Homo sapiens
  misc_RNA (1)...(19): siRNA sense strand
gggaacagaggaaggcgaa

SEQ ID NO: 2465664 - RNA, 19 nt, Homo sapiens
  misc_RNA (1)...(19): siRNA sense strand
cagaagaaaugaacccgua

SEQ ID NO: 2465665 - RNA, 19 nt, Homo sapiens
  misc_RNA (1)...(19): siRNA sense strand
gcuccaaaacaaaagaaaa

SEQ ID NO: 2465666 - RNA, 19 nt, Homo sapiens
  misc_RNA (1)...(19): siRNA sense strand
gcacagagcaaaacagaga

SEQ ID NO: 2465667 - RNA, 19 nt, Homo sapiens
  misc_RNA (1)...(19): siRNA sense strand
cuacaucggccgagaagau

SEQ ID NO: 2465668 - RNA, 19 nt, Homo sapiens
  misc_RNA (1)...(19): siRNA sense strand
ucgaaaacgaagugaauuu

SEQ ID NO: 2465669 - RNA, 19 nt, Homo sapiens
  misc_RNA (1)...(19): siRNA sense strand
aaauguuagcacagagcaa

SEQ ID NO: 2465670 - RNA, 19 nt, Homo sapiens
  misc_RNA (1)...(19): siRNA sense strand
ggagaaaacccaugaacca

SEQ ID NO: 2465671 - RNA, 19 nt, Homo sapiens
  misc_RNA (1)...(19): siRNA sense strand
cccagaaguaccagaagaa

SEQ ID NO: 2465672 - RNA, 19 nt, Homo sapiens
  misc_RNA (1)...(19): siRNA sense strand
auagaugacuucugcacaa

SEQ ID NO: 2465673 - RNA, 19 nt, Homo sapiens
  misc_RNA (1)...(19): siRNA sense strand
aaucaaagucacagagaag

SEQ ID NO: 2465674 - RNA, 19 nt, Homo sapiens
  misc_RNA (1)...(19): siRNA sense strand
acauggaaccaguaaauau

SEQ ID NO: 2465675 - RNA, 19 nt, Homo sapiens
  misc_RNA (1)...(19): siRNA sense strand
aaagacaucacguggcaaa

SEQ ID NO: 2465676 - RNA, 19 nt, Homo sapiens
  misc_RNA (1)...(19): siRNA sense strand
gcaaaacacaagacaaaau

SEQ ID NO: 2465677 - RNA, 19 nt, Homo sapiens
  misc_RNA (1)...(19): siRNA sense strand
ugauauacacagauuggaa

SEQ ID NO: 2465678 - RNA, 19 nt, Homo sapiens
  misc_RNA (1)...(19): siRNA sense strand
aagaacaaaugcaggcuga

SEQ ID NO: 2465679 - RNA, 19 nt, Homo sapiens
  misc_RNA (1)...(19): siRNA sense strand
agaacauauuccugaagau

SEQ ID NO: 2465680 - RNA, 19 nt, Homo sapiens
  misc_RNA (1)...(19): siRNA sense strand
cauuaaggcaggugauagu

SEQ ID NO: 2465681 - RNA, 19 nt, Homo sapiens
  misc_RNA (1)...(19): siRNA sense strand
aaaagaaggaggaaaguau

SEQ ID NO: 2465682 - RNA, 19 nt, Homo sapiens
  misc_RNA (1)...(19): siRNA sense strand
ugaagaugucacagaugaa

SEQ ID NO: 2465683 - RNA, 19 nt, Homo sapiens
  misc_RNA (1)...(19): siRNA sense strand
uggaacuagaaauggcaaa

SEQ ID NO: 2465684 - RNA, 19 nt, Homo sapiens
  misc_RNA (1)...(19): siRNA sense strand
accagaagaacaagaagaa

SEQ ID NO: 2465685 - RNA, 19 nt, Homo sapiens
  misc_RNA (1)...(19): siRNA sense strand
gggauaagaccgauaccca

SEQ ID NO: 2465686 - RNA, 19 nt, Homo sapiens
  misc_RNA (1)...(19): siRNA sense strand
uggaauaugcugucaacuu

SEQ ID NO: 2465687 - RNA, 19 nt, Homo sapiens
  misc_RNA (1)...(19): siRNA sense strand
gaagaaucaguuacggaau

SEQ ID NO: 2465688 - RNA, 19 nt, Homo sapiens
  misc_RNA (1)...(19): siRNA sense strand
uaucauugcuggaggcugu

SEQ ID NO: 2465689 - RNA, 19 nt, Homo sapiens
  misc_RNA (1)...(19): siRNA sense strand
ccaagauaagccugaauga

SEQ ID NO: 2465690 - RNA, 19 nt, Homo sapiens
  misc_RNA (1)...(19): siRNA sense strand
cuagaaauggcaaagaaaa

SEQ ID NO: 2465691 - RNA, 19 nt, Homo sapiens
  misc_RNA (1)...(19): siRNA sense strand
cagauuggaaaauggaaaa

SEQ ID NO: 2465692 - RNA, 19 nt, Homo sapiens
  misc_RNA (1)...(19): siRNA sense strand
ccauauggaaagaaggugu

SEQ ID NO: 2465693 - RNA, 19 nt, Homo sapiens
  misc_RNA (1)...(19): siRNA sense strand
ugaaagagaagucaagcau

SEQ ID NO: 2465694 - RNA, 19 nt, Homo sapiens
  misc_RNA (1)...(19): siRNA sense strand
caaccuuggccuaaucaaa

SEQ ID NO: 2465695 - RNA, 19 nt, Homo sapiens
  misc_RNA (1)...(19): siRNA sense strand
ccuuaaagcaaauggaaaa

SEQ ID NO: 2465696 - RNA, 19 nt, Homo sapiens
  misc_RNA (1)...(19): siRNA sense strand
gaugaaagauguaucccaa

SEQ ID NO: 2465697 - RNA, 19 nt, Homo sapiens
  misc_RNA (1)...(19): siRNA sense strand
cagaagaaugcaaaagaaa

SEQ ID NO: 2465698 - RNA, 19 nt, Homo sapiens
  misc_RNA (1)...(19): siRNA sense strand
ucugaagauaaucgagaaa

SEQ ID NO: 2465699 - RNA, 19 nt, Homo sapiens
  misc_RNA (1)...(19): siRNA sense strand
caauguuauaucagaggaa

SEQ ID NO: 2465700 - RNA, 19 nt, Homo sapiens
  misc_RNA (1)...(19): siRNA sense strand
uacagaugcaagugagaaa

SEQ ID NO: 2465701 - RNA, 19 nt, Homo sapiens
  misc_RNA (1)...(19): siRNA sense strand
aagcaaacaaagaucacaa

SEQ ID NO: 2465702 - RNA, 19 nt, Homo sapiens
  misc_RNA (1)...(19): siRNA sense strand
gcaagauuagugaagacaa

SEQ ID NO: 2465703 - RNA, 19 nt, Homo sapiens
  misc_RNA (1)...(19): siRNA sense strand
accuuaaagcaaauggaaa

SEQ ID NO: 2465704 - RNA, 19 nt, Homo sapiens
  misc_RNA (1)...(19): siRNA sense strand
cugaaaauguugcaaaaga

SEQ ID NO: 2465705 - RNA, 19 nt, Homo sapiens
  misc_RNA (1)...(19): siRNA sense strand
uuaucaaagcaacaggaaa

SEQ ID NO: 2465706 - RNA, 19 nt, Homo sapiens
  misc_RNA (1)...(19): siRNA sense strand
cauuggaaggagaagauuu

SEQ ID NO: 2465707 - RNA, 19 nt, Homo sapiens
  misc_RNA (1)...(19): siRNA sense strand
gugagaaauagcaaagcuu

SEQ ID NO: 2465708 - RNA, 19 nt, Homo sapiens
  misc_RNA (1)...(19): siRNA sense strand
auguuauaucagaggaaga

SEQ ID NO: 2465709 - RNA, 19 nt, Homo sapiens
  misc_RNA (1)...(19): siRNA sense strand
gagagaauuuggagcaccu

SEQ ID NO: 2465710 - RNA, 19 nt, Homo sapiens
  misc_RNA (1)...(19): siRNA sense strand
aagcuuugagagugaacaa

SEQ ID NO: 2465711 - RNA, 19 nt, Homo sapiens
  misc_RNA (1)...(19): siRNA sense strand
uuucaaacccagaugcuau

SEQ ID NO: 2465712 - RNA, 19 nt, Homo sapiens
  misc_RNA (1)...(19): siRNA sense strand
gcacuuuguucuucagcca

SEQ ID NO: 2465713 - RNA, 19 nt, Homo sapiens
  misc_RNA (1)...(19): siRNA sense strand
aagcaagauuagugaagac

SEQ ID NO: 2465714 - RNA, 19 nt, Homo sapiens
  misc_RNA (1)...(19): siRNA sense strand
uucacagaguccaaagaaa

SEQ ID NO: 2465715 - RNA, 19 nt, Homo sapiens
  misc_RNA (1)...(19): siRNA sense strand
agagugaacaagcaaacaa

SEQ ID NO: 2465716 - RNA, 19 nt, Homo sapiens
  misc_RNA (1)...(19): siRNA sense strand
cucugaaaauguugcaaaa

SEQ ID NO: 2465717 - RNA, 19 nt, Homo sapiens
  misc_RNA (1)...(19): siRNA sense strand
ccuccuaaguucugguucu

SEQ ID NO: 2465718 - RNA, 19 nt, Homo sapiens
  misc_RNA (1)...(19): siRNA sense strand
acccagaccagaagauaau

SEQ ID NO: 2465719 - RNA, 19 nt, Homo sapiens
  misc_RNA (1)...(19): siRNA sense strand
ccaaauucaugaagccugu

SEQ ID NO: 2465720 - RNA, 19 nt, Homo sapiens
  misc_RNA (1)...(19): siRNA sense strand
agaggaagaaaaugagcua

SEQ ID NO: 2465721 - RNA, 19 nt, Homo sapiens
  misc_RNA (1)...(19): siRNA sense strand
agcuaagacucaauguuau

SEQ ID NO: 2465722 - RNA, 19 nt, Homo sapiens
  misc_RNA (1)...(19): siRNA sense strand
cagacaccuuaaagcaaau

SEQ ID NO: 2465723 - RNA, 19 nt, Homo sapiens
  misc_RNA (1)...(19): siRNA sense strand
aacccagaccagaagauaa

SEQ ID NO: 2465724 - RNA, 19 nt, Homo sapiens
  misc_RNA (1)...(19): siRNA sense strand
ggaagaaaacagcucgaau

SEQ ID NO: 2465725 - RNA, 19 nt, Homo sapiens
  misc_RNA (1)...(19): siRNA sense strand
agucaguagucagaagaau

SEQ ID NO: 2465726 - RNA, 19 nt, Homo sapiens
  misc_RNA (1)...(19): siRNA sense strand
aggagaagauuuugagaag

SEQ ID NO: 2465727 - RNA, 19 nt, Homo sapiens
  misc_RNA (1)...(19): siRNA sense strand
uaucagaggaagaaaauga

SEQ ID NO: 2465728 - RNA, 19 nt, Homo sapiens
  misc_RNA (1)...(19): siRNA sense strand
uugacaaguuaaagaugga

SEQ ID NO: 2465729 - RNA, 19 nt, Homo sapiens
  misc_RNA (1)...(19): siRNA sense strand
gcauauuaucagauggauu

SEQ ID NO: 2465730 - RNA, 19 nt, Homo sapiens
  misc_RNA (1)...(19): siRNA sense strand
aggaagaagaggaagguca

SEQ ID NO: 2465731 - RNA, 19 nt, Homo sapiens
  misc_RNA (1)...(19): siRNA sense strand
gcuccaggaagaagaggaa

SEQ ID NO: 2465732 - RNA, 19 nt, Homo sapiens
  misc_RNA (1)...(19): siRNA sense strand
aaguaaaagucaugacaga

SEQ ID NO: 2465733 - RNA, 19 nt, Homo sapiens
  misc_RNA (1)...(19): siRNA sense strand
gaggaaggucagugaacca

SEQ ID NO: 2465734 - RNA, 19 nt, Homo sapiens
  misc_RNA (1)...(19): siRNA sense strand
ugaaaauggugaagaaacu

SEQ ID NO: 2465735 - RNA, 19 nt, Homo sapiens
  misc_RNA (1)...(19): siRNA sense strand
ucaacgugcaagugggauu

SEQ ID NO: 2465736 - RNA, 19 nt, Homo sapiens
  misc_RNA (1)...(19): siRNA sense strand
gaagauauuaagaaagcca

SEQ ID NO: 2465737 - RNA, 19 nt, Homo sapiens
  misc_RNA (1)...(19): siRNA sense strand
ugaaaguggaacaaacaau

SEQ ID NO: 2465738 - RNA, 19 nt, Homo sapiens
  misc_RNA (1)...(19): siRNA sense strand
agaagaaugcaaugaccau

SEQ ID NO: 2465739 - RNA, 19 nt, Homo sapiens
  misc_RNA (1)...(19): siRNA sense strand
uggaacaaacaaugaagau

SEQ ID NO: 2465740 - RNA, 19 nt, Homo sapiens
  misc_RNA (1)...(19): siRNA sense strand
augaggaagaagaaugcaa

SEQ ID NO: 2465741 - RNA, 19 nt, Homo sapiens
  misc_RNA (1)...(19): siRNA sense strand
cugugaugaggaagaagaa

SEQ ID NO: 2465742 - RNA, 19 nt, Homo sapiens
  misc_RNA (1)...(19): siRNA sense strand
gguugauggugaagagcau

SEQ ID NO: 2465743 - RNA, 19 nt, Homo sapiens
  misc_RNA (1)...(19): siRNA sense strand
ccacaaugcugcuggggau

SEQ ID NO: 2465744 - RNA, 19 nt, Homo sapiens
  misc_RNA (1)...(19): siRNA sense strand
gagaaagaggagaagagga

SEQ ID NO: 2465745 - RNA, 19 nt, Homo sapiens
  misc_RNA (1)...(19): siRNA sense strand
acagacaaccuaugggaca

SEQ ID NO: 2465746 - RNA, 19 nt, Homo sapiens
  misc_RNA (1)...(19): siRNA sense strand
uggugaagaagcugaguga

SEQ ID NO: 2465747 - RNA, 19 nt, Homo sapiens
  misc_RNA (1)...(19): siRNA sense strand
ggaauaugcugagcggcua

SEQ ID NO: 2465748 - RNA, 19 nt, Homo sapiens
  misc_RNA (1)...(19): siRNA sense strand
gaucagagacugguggaga

SEQ ID NO: 2465749 - RNA, 19 nt, Homo sapiens
  misc_RNA (1)...(19): siRNA sense strand
ggaaacaugucaggcccaa

SEQ ID NO: 2465750 - RNA, 19 nt, Homo sapiens
  misc_RNA (1)...(19): siRNA sense strand
aggaauaugcugagcggcu

SEQ ID NO: 2465751 - RNA, 19 nt, Homo sapiens
  misc_RNA (1)...(19): siRNA sense strand
gcggcuacccacugaguca

SEQ ID NO: 2465752 - RNA, 19 nt, Homo sapiens
  misc_RNA (1)...(19): siRNA sense strand
agaaaguucaccagagaca

SEQ ID NO: 2465753 - RNA, 19 nt, Homo sapiens
  misc_RNA (1)...(19): siRNA sense strand
gaggaaaguugaggggcua

SEQ ID NO: 2465754 - RNA, 19 nt, Homo sapiens
  misc_RNA (1)...(19): siRNA sense strand
agaccaccguugugcgcua

SEQ ID NO: 2465755 - RNA, 19 nt, Homo sapiens
  misc_RNA (1)...(19): siRNA sense strand
uggauggaagagaggagaa

SEQ ID NO: 2465756 - RNA, 19 nt, Homo sapiens
  misc_RNA (1)...(19): siRNA sense strand
cuggaaauuggauggaaga

SEQ ID NO: 2465757 - RNA, 19 nt, Homo sapiens
  misc_RNA (1)...(19): siRNA sense strand
ugguaugggaagaggaaag

SEQ ID NO: 2465758 - RNA, 19 nt, Homo sapiens
  misc_RNA (1)...(19): siRNA sense strand
ggccugaagcagagcacuu

SEQ ID NO: 2465759 - RNA, 19 nt, Homo sapiens
  misc_RNA (1)...(19): siRNA sense strand
auggaagagaggagaaagu

SEQ ID NO: 2465760 - RNA, 19 nt, Homo sapiens
  misc_RNA (1)...(19): siRNA sense strand
cggaggacgaggugaucga

SEQ ID NO: 2465761 - RNA, 19 nt, Homo sapiens
  misc_RNA (1)...(19): siRNA sense strand
acaucgagcucuacagcca

SEQ ID NO: 2465762 - RNA, 19 nt, Homo sapiens
  misc_RNA (1)...(19): siRNA sense strand
gcaucagcccggacagcau

SEQ ID NO: 2465763 - RNA, 19 nt, Homo sapiens
  misc_RNA (1)...(19): siRNA sense strand
ccgaauaaugauaggacua

SEQ ID NO: 2465764 - RNA, 19 nt, Homo sapiens
  misc_RNA (1)...(19): siRNA sense strand
gaugaaaggacaagaggga

SEQ ID NO: 2465765 - RNA, 19 nt, Homo sapiens
  misc_RNA (1)...(19): siRNA sense strand
uguuuauaccugagacaaa

SEQ ID NO: 2465766 - RNA, 19 nt, Homo sapiens
  misc_RNA (1)...(19): siRNA sense strand
aggaaaugguugugagcuc

SEQ ID NO: 2465767 - RNA, 19 nt, Homo sapiens
  misc_RNA (1)...(19): siRNA sense strand
ggguccugauagacagaua

SEQ ID NO: 2465768 - RNA, 19 nt, Homo sapiens
  misc_RNA (1)...(19): siRNA sense strand
cagauauggaagaaggaca

SEQ ID NO: 2465769 - RNA, 19 nt, Homo sapiens
  misc_RNA (1)...(19): siRNA sense strand
ccaagaagaauuagugcca

SEQ ID NO: 2465770 - RNA, 19 nt, Homo sapiens
  misc_RNA (1)...(19): siRNA sense strand
caguuggauuucaaagcaa

SEQ ID NO: 2465771 - RNA, 19 nt, Homo sapiens
  misc_RNA (1)...(19): siRNA sense strand
uaucaauggagcuagcaaa

SEQ ID NO: 2465772 - RNA, 19 nt, Homo sapiens
  misc_RNA (1)...(19): siRNA sense strand
gagucaucaccaagaagaa

SEQ ID NO: 2465773 - RNA, 19 nt, Homo sapiens
  misc_RNA (1)...(19): siRNA sense strand
ggaaguacauguuuggucu

SEQ ID NO: 2465774 - RNA, 19 nt, Homo sapiens
  misc_RNA (1)...(19): siRNA sense strand
uguacaaaucacuggccaa

SEQ ID NO: 2465775 - RNA, 19 nt, Homo sapiens
  misc_RNA (1)...(19): siRNA sense strand
gaucagaggacgagccaug

SEQ ID NO: 2465776 - RNA, 19 nt, Homo sapiens
  misc_RNA (1)...(19): siRNA sense strand
acugaauaccagauaguca

SEQ ID NO: 2465777 - RNA, 19 nt, Homo sapiens
  misc_RNA (1)...(19): siRNA sense strand
cugucaaccaacaacaaua

SEQ ID NO: 2465778 - RNA, 19 nt, Homo sapiens
  misc_RNA (1)...(19): siRNA sense strand
uauggaagaaggacagcaa

SEQ ID NO: 2465779 - RNA, 19 nt, Homo sapiens
  misc_RNA (1)...(19): siRNA sense strand
gaacaaauaucaauggagc

SEQ ID NO: 2465780 - RNA, 19 nt, Homo sapiens
  misc_RNA (1)...(19): siRNA sense strand
cugccaugggugugcuuua

SEQ ID NO: 2465781 - RNA, 19 nt, Homo sapiens
  misc_RNA (1)...(19): siRNA sense strand
ucuuauagugggacgcauu

SEQ ID NO: 2465782 - RNA, 19 nt, Homo sapiens
  misc_RNA (1)...(19): siRNA sense strand
guggccuccugguggguua

SEQ ID NO: 2465783 - RNA, 19 nt, Homo sapiens
  misc_RNA (1)...(19): siRNA sense strand
ggguuaugaacuugggauc

SEQ ID NO: 2465784 - RNA, 19 nt, Homo sapiens
  misc_RNA (1)...(19): siRNA sense strand
gguuaugaacuugggauca

SEQ ID NO: 2465785 - RNA, 19 nt, Homo sapiens
  misc_RNA (1)...(19): siRNA sense strand
agaccaugucggcagcaaa

SEQ ID NO: 2465786 - RNA, 19 nt, Homo sapiens
  misc_RNA (1)...(19): siRNA sense strand
agggaugcucuuuggaaca

SEQ ID NO: 2465787 - RNA, 19 nt, Homo sapiens
  misc_RNA (1)...(19): siRNA sense strand
ucguaaaucucaacaucca

SEQ ID NO: 2465788 - RNA, 19 nt, Homo sapiens
  misc_RNA (1)...(19): siRNA sense strand
acaagaaggaagaggcauu

SEQ ID NO: 2465789 - RNA, 19 nt, Homo sapiens
  misc_RNA (1)...(19): siRNA sense strand
aggaagaggcauugcucaa

SEQ ID NO: 2465790 - RNA, 19 nt, Homo sapiens
  misc_RNA (1)...(19): siRNA sense strand
cucacagggucaagagaaa

SEQ ID NO: 2465791 - RNA, 19 nt, Homo sapiens
  misc_RNA (1)...(19): siRNA sense strand
ggacagaggcagugaggag

SEQ ID NO: 2465792 - RNA, 19 nt, Homo sapiens
  misc_RNA (1)...(19): siRNA sense strand
ccacaagaaggaagaggca

SEQ ID NO: 2465793 - RNA, 19 nt, Homo sapiens
  misc_RNA (1)...(19): siRNA sense strand
aguacagugcagagaauuu

SEQ ID NO: 2465794 - RNA, 19 nt, Homo sapiens
  misc_RNA (1)...(19): siRNA sense strand
caauagacucccaggaacu

SEQ ID NO: 2465795 - RNA, 19 nt, Homo sapiens
  misc_RNA (1)...(19): siRNA sense strand
ggugucuccaugagggaua

SEQ ID NO: 2465796 - RNA, 19 nt, Homo sapiens
  misc_RNA (1)...(19): siRNA sense strand
ggccaugggcaaagcaaca

SEQ ID NO: 2465797 - RNA, 19 nt, Homo sapiens
  misc_RNA (1)...(19): siRNA sense strand
gugagagauguuaggucua

SEQ ID NO: 2465798 - RNA, 19 nt, Homo sapiens
  misc_RNA (1)...(19): siRNA sense strand
agagagcagaucagggcua

SEQ ID NO: 2465799 - RNA, 19 nt, Homo sapiens
  misc_RNA (1)...(19): siRNA sense strand
ggguggacugagaagaauu

SEQ ID NO: 2465800 - RNA, 19 nt, Homo sapiens
  misc_RNA (1)...(19): siRNA sense strand
gggcuagaguccugcagca

SEQ ID NO: 2465801 - RNA, 19 nt, Homo sapiens
  misc_RNA (1)...(19): siRNA sense strand
ccuuuggauuccuggguga

SEQ ID NO: 2465802 - RNA, 19 nt, Homo sapiens
  misc_RNA (1)...(19): siRNA sense strand
acaggagaacagugggaga

SEQ ID NO: 2465803 - RNA, 19 nt, Homo sapiens
  misc_RNA (1)...(19): siRNA sense strand
auucaucaaacgugaggaa

SEQ ID NO: 2465804 - RNA, 19 nt, Homo sapiens
  misc_RNA (1)...(19): siRNA sense strand
aggcauugcucaagaacag

SEQ ID NO: 2465805 - RNA, 19 nt, Homo sapiens
  misc_RNA (1)...(19): siRNA sense strand
acauauaccaagagaagcu

SEQ ID NO: 2465806 - RNA, 19 nt, Homo sapiens
  misc_RNA (1)...(19): siRNA sense strand
gaacagugggagagggguu

SEQ ID NO: 2465807 - RNA, 19 nt, Homo sapiens
  misc_RNA (1)...(19): siRNA sense strand
cugagcaguuccagaggau

SEQ ID NO: 2465808 - RNA, 19 nt, Homo sapiens
  misc_RNA (1)...(19): siRNA sense strand
ccagaguuucccagcacaa

SEQ ID NO: 2465809 - RNA, 19 nt, Homo sapiens
  misc_RNA (1)...(19): siRNA sense strand
ggugaaacuucuagcggag

SEQ ID NO: 2465810 - RNA, 19 nt, Homo sapiens
  misc_RNA (1)...(19): siRNA sense strand
cagcagaaauggagcaugg

SEQ ID NO: 2465811 - RNA, 19 nt, Homo sapiens
  misc_RNA (1)...(19): siRNA sense strand
cagacauauaccaagagaa

SEQ ID NO: 2465812 - RNA, 19 nt, Homo sapiens
  misc_RNA (1)...(19): siRNA sense strand
agugagagauguuaggucu

SEQ ID NO: 2465813 - RNA, 19 nt, Homo sapiens
  misc_RNA (1)...(19): siRNA sense strand
gaaccaagacacagagcag

SEQ ID NO: 2465814 - RNA, 19 nt, Homo sapiens
  misc_RNA (1)...(19): siRNA sense strand
acacagagcaggagaccuc

SEQ ID NO: 2465815 - RNA, 19 nt, Homo sapiens
  misc_RNA (1)...(19): siRNA sense strand
cagaaauggagcauggucu

SEQ ID NO: 2465816 - RNA, 19 nt, Homo sapiens
  misc_RNA (1)...(19): siRNA sense strand
gaggcagugaggagaccua

SEQ ID NO: 2465817 - RNA, 19 nt, Homo sapiens
  misc_RNA (1)...(19): siRNA sense strand
gaccuauaggccagaguuu

SEQ ID NO: 2465818 - RNA, 19 nt, Homo sapiens
  misc_RNA (1)...(19): siRNA sense strand
gguuucaaggauagaaguu

SEQ ID NO: 2465819 - RNA, 19 nt, Homo sapiens
  misc_RNA (1)...(19): siRNA sense strand
ggucuaaggaucugggcag

SEQ ID NO: 2465820 - RNA, 19 nt, Homo sapiens
  misc_RNA (1)...(19): siRNA sense strand
ggcuguaguccuucaaauu

SEQ ID NO: 2465821 - RNA, 19 nt, Homo sapiens
  misc_RNA (1)...(19): siRNA sense strand
caacuaaccuacacugcca

SEQ ID NO: 2465822 - RNA, 19 nt, Homo sapiens
  misc_RNA (1)...(19): siRNA sense strand
cagaaagaagcaagggccu

SEQ ID NO: 2465823 - RNA, 19 nt, Homo sapiens
  misc_RNA (1)...(19): siRNA sense strand
uuuaagaagacaaggagaa

SEQ ID NO: 2465824 - RNA, 19 nt, Homo sapiens
  misc_RNA (1)...(19): siRNA sense strand
uggaaugggaaguggauga

SEQ ID NO: 2465825 - RNA, 19 nt, Homo sapiens
  misc_RNA (1)...(19): siRNA sense strand
aaauagaguugaugaggca

SEQ ID NO: 2465826 - RNA, 19 nt, Homo sapiens
  misc_RNA (1)...(19): siRNA sense strand
guuuaaucaagcacagaaa

SEQ ID NO: 2465827 - RNA, 19 nt, Homo sapiens
  misc_RNA (1)...(19): siRNA sense strand
ggaucauaguggcugguau

SEQ ID NO: 2465828 - RNA, 19 nt, Homo sapiens
  misc_RNA (1)...(19): siRNA sense strand
ucaaagaugcaaaugggaa

SEQ ID NO: 2465829 - RNA, 19 nt, Homo sapiens
  misc_RNA (1)...(19): siRNA sense strand
aagaagacaaggagaacca

SEQ ID NO: 2465830 - RNA, 19 nt, Homo sapiens
  misc_RNA (1)...(19): siRNA sense strand
cccuagaaauuaugcaaaa

SEQ ID NO: 2465831 - RNA, 19 nt, Homo sapiens
  misc_RNA (1)...(19): siRNA sense strand
ugguaucaucguauagaaa

SEQ ID NO: 2465832 - RNA, 19 nt, Homo sapiens
  misc_RNA (1)...(19): siRNA sense strand
auagaguugaugaggcaaa

SEQ ID NO: 2465833 - RNA, 19 nt, Homo sapiens
  misc_RNA (1)...(19): siRNA sense strand
acaagcaacucuucggcua

SEQ ID NO: 2465834 - RNA, 19 nt, Homo sapiens
  misc_RNA (1)...(19): siRNA sense strand
uggaaagaggaaucagaau

SEQ ID NO: 2465835 - RNA, 19 nt, Homo sapiens
  misc_RNA (1)...(19): siRNA sense strand
augguauggugguggaaga

SEQ ID NO: 2465836 - RNA, 19 nt, Homo sapiens
  misc_RNA (1)...(19): siRNA sense strand
auugccagcuggaaggaaa

SEQ ID NO: 2465837 - RNA, 19 nt, Homo sapiens
  misc_RNA (1)...(19): siRNA sense strand
gauaaggcugccagaguca

SEQ ID NO: 2465838 - RNA, 19 nt, Homo sapiens
  misc_RNA (1)...(19): siRNA sense strand
augcaaaacuuccagcaaa

SEQ ID NO: 2465839 - RNA, 19 nt, Homo sapiens
  misc_RNA (1)...(19): siRNA sense strand
gaaggcaagauuuggaaaa

SEQ ID NO: 2465840 - RNA, 19 nt, Homo sapiens
  misc_RNA (1)...(19): siRNA sense strand
ugaugaggcaaauguacua

SEQ ID NO: 2465841 - RNA, 19 nt, Homo sapiens
  misc_RNA (1)...(19): siRNA sense strand
gguuuaaucaagcacagaa

SEQ ID NO: 2465842 - RNA, 19 nt, Homo sapiens
  misc_RNA (1)...(19): siRNA sense strand
ugauuuaagaagacaagga

SEQ ID NO: 2465843 - RNA, 19 nt, Homo sapiens
  misc_RNA (1)...(19): siRNA sense strand
ucccaaagaggcagagcuu

SEQ ID NO: 2465844 - RNA, 19 nt, Homo sapiens
  misc_RNA (1)...(19): siRNA sense strand
gcaagauuuggaaaagaaa

SEQ ID NO: 2465845 - RNA, 19 nt, Homo sapiens
  misc_RNA (1)...(19): siRNA sense strand
gguuauacuggaugggaaa

SEQ ID NO: 2465846 - RNA, 19 nt, Homo sapiens
  misc_RNA (1)...(19): siRNA sense strand
cagagaaugcaaugggaaa

SEQ ID NO: 2465847 - RNA, 19 nt, Homo sapiens
  misc_RNA (1)...(19): siRNA sense strand
ggaagaagcccgacggaca

SEQ ID NO: 2465848 - RNA, 19 nt, Homo sapiens
  misc_RNA (1)...(19): siRNA sense strand
gcuuuauaauuuagggcua

SEQ ID NO: 2465849 - RNA, 19 nt, Homo sapiens
  misc_RNA (1)...(19): siRNA sense strand
gcuuuauagaucagggaua

SEQ ID NO: 2465850 - RNA, 19 nt, Homo sapiens
  misc_RNA (1)...(19): siRNA sense strand
cugaaagcgccuauagaaa

SEQ ID NO: 2465851 - RNA, 19 nt, Homo sapiens
  misc_RNA (1)...(19): siRNA sense strand
cgguuauacuggaugggaa

SEQ ID NO: 2465852 - RNA, 19 nt, Homo sapiens
  misc_RNA (1)...(19): siRNA sense strand
gcagaaugcaaauggacau

SEQ ID NO: 2465853 - RNA, 19 nt, Homo sapiens
  misc_RNA (1)...(19): siRNA sense strand
ggugauggauacuggacau

SEQ ID NO: 2465854 - RNA, 19 nt, Homo sapiens
  misc_RNA (1)...(19): siRNA sense strand
cuguggaacaucauggaaa

SEQ ID NO: 2465855 - RNA, 19 nt, Homo sapiens
  misc_RNA (1)...(19): siRNA sense strand
guguauacaaggaagcaau

SEQ ID NO: 2465856 - RNA, 19 nt, Homo sapiens
  misc_RNA (1)...(19): siRNA sense strand
uguacaacaugauggguga

SEQ ID NO: 2465857 - RNA, 19 nt, Homo sapiens
  misc_RNA (1)...(19): siRNA sense strand
gcguagacagagaaugcaa

SEQ ID NO: 2465858 - RNA, 19 nt, Homo sapiens
  misc_RNA (1)...(19): siRNA sense strand
augaagcagcugagaagua

SEQ ID NO: 2465859 - RNA, 19 nt, Homo sapiens
  misc_RNA (1)...(19): siRNA sense strand
cuuuguaauugcagagcga

SEQ ID NO: 2465860 - RNA, 19 nt, Homo sapiens
  misc_RNA (1)...(19): siRNA sense strand
ugggaaaacuguaacaaau

SEQ ID NO: 2465861 - RNA, 19 nt, Homo sapiens
  misc_RNA (1)...(19): siRNA sense strand
ggacauucauggcuggcuu

SEQ ID NO: 2465862 - RNA, 19 nt, Homo sapiens
  misc_RNA (1)...(19): siRNA sense strand
uugcagaagcacuacauua

SEQ ID NO: 2465863 - RNA, 19 nt, Homo sapiens
  misc_RNA (1)...(19): siRNA sense strand
accagaacucagagacuaa

SEQ ID NO: 2465864 - RNA, 19 nt, Homo sapiens
  misc_RNA (1)...(19): siRNA sense strand
guuuguacaaccuaggaaa

SEQ ID NO: 2465865 - RNA, 19 nt, Homo sapiens
  misc_RNA (1)...(19): siRNA sense strand
cauauaugcguuuaagcaa

SEQ ID NO: 2465866 - RNA, 19 nt, Homo sapiens
  misc_RNA (1)...(19): siRNA sense strand
caacaugaugggugaagca

SEQ ID NO: 2465867 - RNA, 19 nt, Homo sapiens
  misc_RNA (1)...(19): siRNA sense strand
acaugaugggugaagcaua

SEQ ID NO: 2465868 - RNA, 19 nt, Homo sapiens
  misc_RNA (1)...(19): siRNA sense strand
gguugaaucccuggagcua

SEQ ID NO: 2465869 - RNA, 19 nt, Homo sapiens
  misc_RNA (1)...(19): siRNA sense strand
caaugaagcagcugagaag

SEQ ID NO: 2465870 - RNA, 19 nt, Homo sapiens
  misc_RNA (1)...(19): siRNA sense strand
cggagaucccagaugaaaa

SEQ ID NO: 2465871 - RNA, 19 nt, Homo sapiens
  misc_RNA (1)...(19): siRNA sense strand
uguggaacaucauggaaaa

SEQ ID NO: 2465872 - RNA, 19 nt, Homo sapiens
  misc_RNA (1)...(19): siRNA sense strand
cguaagagugaggcugaaa

SEQ ID NO: 2465873 - RNA, 19 nt, Homo sapiens
  misc_RNA (1)...(19): siRNA sense strand
aaaaguaaacccagcuaaa

SEQ ID NO: 2465874 - RNA, 19 nt, Homo sapiens
  misc_RNA (1)...(19): siRNA sense strand
aggaagcaauucagaaaau

SEQ ID NO: 2465875 - RNA, 19 nt, Homo sapiens
  misc_RNA (1)...(19): siRNA sense strand
acagagaaugcaaugggaa

SEQ ID NO: 2465876 - RNA, 19 nt, Homo sapiens
  misc_RNA (1)...(19): siRNA sense strand
cagcuaaagcaugggguaa

SEQ ID NO: 2465877 - RNA, 19 nt, Homo sapiens
  misc_RNA (1)...(19): siRNA sense strand
uuucagauguggaguacca

SEQ ID NO: 2465878 - RNA, 19 nt, Homo sapiens
  misc_RNA (1)...(19): siRNA sense strand
gagcaaaauuucugaagcu

SEQ ID NO: 2465879 - RNA, 19 nt, Homo sapiens
  misc_RNA (1)...(19): siRNA sense strand
cagcagguuugcagaagca

SEQ ID NO: 2465880 - RNA, 19 nt, Homo sapiens
  misc_RNA (1)...(19): siRNA sense strand
gauccaagacugaccacau

SEQ ID NO: 2465881 - RNA, 19 nt, Homo sapiens
  misc_RNA (1)...(19): siRNA sense strand
cggaggcaguggcaggaau

SEQ ID NO: 2465882 - RNA, 19 nt, Homo sapiens
  misc_RNA (1)...(19): siRNA sense strand
uugaagagcccgagcguag

SEQ ID NO: 2465883 - RNA, 19 nt, Homo sapiens
  misc_RNA (1)...(19): siRNA sense strand
ggguaaccuuggaaauguu

SEQ ID NO: 2465884 - RNA, 19 nt, Homo sapiens
  misc_RNA (1)...(19): siRNA sense strand
ucaaugaagcagcugagaa

SEQ ID NO: 2465885 - RNA, 19 nt, Homo sapiens
  misc_RNA (1)...(19): siRNA sense strand
gcccgagcguagacagaga

SEQ ID NO: 2465886 - RNA, 19 nt, Homo sapiens
  misc_RNA (1)...(19): siRNA sense strand
cagaaugcaaauggacaua

SEQ ID NO: 2465887 - RNA, 19 nt, Homo sapiens
  misc_RNA (1)...(19): siRNA sense strand
guaccagaacucagagacu

SEQ ID NO: 2465888 - RNA, 19 nt, Homo sapiens
  misc_RNA (1)...(19): siRNA sense strand
aggaauggagacuggcaga

SEQ ID NO: 2465889 - RNA, 19 nt, Homo sapiens
  misc_RNA (1)...(19): siRNA sense strand
gaaggaacaaggagugacu

SEQ ID NO: 2465890 - RNA, 19 nt, Homo sapiens
  misc_RNA (1)...(19): siRNA sense strand
gauuacagugggugcuaga

SEQ ID NO: 2465891 - RNA, 19 nt, Homo sapiens
  misc_RNA (1)...(19): siRNA sense strand
cagaaugaggaaaugcuuu

SEQ ID NO: 2465892 - RNA, 19 nt, Homo sapiens
  misc_RNA (1)...(19): siRNA sense strand
ucuuaaaguguucggagau

SEQ ID NO: 2465893 - RNA, 19 nt, Homo sapiens
  misc_RNA (1)...(19): siRNA sense strand
guauauggaaucacugaga

SEQ ID NO: 2465894 - RNA, 19 nt, Homo sapiens
  misc_RNA (1)...(19): siRNA sense strand
guaacaaauggcaagcaga

SEQ ID NO: 2465895 - RNA, 19 nt, Homo sapiens
  misc_RNA (1)...(19): siRNA sense strand
agaucagggauaaaaguaa

SEQ ID NO: 2465896 - RNA, 19 nt, Homo sapiens
  misc_RNA (1)...(19): siRNA sense strand
cagguuugcagaagcacua

SEQ ID NO: 2465897 - RNA, 19 nt, Homo sapiens
  misc_RNA (1)...(19): siRNA sense strand
gaaccaaggaaggacggaa

SEQ ID NO: 2465898 - RNA, 19 nt, Homo sapiens
  misc_RNA (1)...(19): siRNA sense strand
acaaggaagcaauucagaa

SEQ ID NO: 2465899 - RNA, 19 nt, Homo sapiens
  misc_RNA (1)...(19): siRNA sense strand
gugaauugcaagaaggaga

SEQ ID NO: 2465900 - RNA, 19 nt, Homo sapiens
  misc_RNA (1)...(19): siRNA sense strand
aggaagaagaggaaguaga

SEQ ID NO: 2465901 - RNA, 19 nt, Homo sapiens
  misc_RNA (1)...(19): siRNA sense strand
aagaaaugggagcaaguaa

SEQ ID NO: 2465902 - RNA, 19 nt, Homo sapiens
  misc_RNA (1)...(19): siRNA sense strand
agaggaaguagaugaacaa

SEQ ID NO: 2465903 - RNA, 19 nt, Homo sapiens
  misc_RNA (1)...(19): siRNA sense strand
aaagauauauccagagcca

SEQ ID NO: 2465904 - RNA, 19 nt, Homo sapiens
  misc_RNA (1)...(19): siRNA sense strand
caagaagaaaugggagcaa

SEQ ID NO: 2465905 - RNA, 19 nt, Homo sapiens
  misc_RNA (1)...(19): siRNA sense strand
ggucauauuucuuggaguc

SEQ ID NO: 2465906 - RNA, 19 nt, Homo sapiens
  misc_RNA (1)...(19): siRNA sense strand
agaaagaaauucaggaagg

SEQ ID NO: 2465907 - RNA, 19 nt, Homo sapiens
  misc_RNA (1)...(19): siRNA sense strand
aggaaguagaugaacaaaa

SEQ ID NO: 2465908 - RNA, 19 nt, Homo sapiens
  misc_RNA (1)...(19): siRNA sense strand
uagccaauaugaaaggcaa

SEQ ID NO: 2465909 - RNA, 19 nt, Homo sapiens
  misc_RNA (1)...(19): siRNA sense strand
cccugaagaaauugaagaa

SEQ ID NO: 2465910 - RNA, 19 nt, Homo sapiens
  misc_RNA (1)...(19): siRNA sense strand
auaugaaaggcaaggugaa

SEQ ID NO: 2465911 - RNA, 19 nt, Homo sapiens
  misc_RNA (1)...(19): siRNA sense strand
agaagaaaugggagcaagu

SEQ ID NO: 2465912 - RNA, 19 nt, Homo sapiens
  misc_RNA (1)...(19): siRNA sense strand
aaacaucauugcaugggaa

SEQ ID NO: 2465913 - RNA, 19 nt, Homo sapiens
  misc_RNA (1)...(19): siRNA sense strand
acuaaagauaacaaggaca

SEQ ID NO: 2465914 - RNA, 19 nt, Homo sapiens
  misc_RNA (1)...(19): siRNA sense strand
uaugaaaggcaaggugaaa

SEQ ID NO: 2465915 - RNA, 19 nt, Homo sapiens
  misc_RNA (1)...(19): siRNA sense strand
caauaaaguccaugcuaac

SEQ ID NO: 2465916 - RNA, 19 nt, Homo sapiens
  misc_RNA (1)...(19): siRNA sense strand
uauccagagccaagaagaa

SEQ ID NO: 2465917 - RNA, 19 nt, Homo sapiens
  misc_RNA (1)...(19): siRNA sense strand
ggugugaagaaaagaaaau

SEQ ID NO: 2465918 - RNA, 19 nt, Homo sapiens
  misc_RNA (1)...(19): siRNA sense strand
guuauaaaucuggggaaua

SEQ ID NO: 2465919 - RNA, 19 nt, Homo sapiens
  misc_RNA (1)...(19): siRNA sense strand
gugaaaagauauauccaga

SEQ ID NO: 2465920 - RNA, 19 nt, Homo sapiens
  misc_RNA (1)...(19): siRNA sense strand
uggaaugcagagagcagua

SEQ ID NO: 2465921 - RNA, 19 nt, Homo sapiens
  misc_RNA (1)...(19): siRNA sense strand
augaugaaccacagaacuu

SEQ ID NO: 2465922 - RNA, 19 nt, Homo sapiens
  misc_RNA (1)...(19): siRNA sense strand
gacaaagaccccugaagaa

SEQ ID NO: 2465923 - RNA, 19 nt, Homo sapiens
  misc_RNA (1)...(19): siRNA sense strand
ccugaagaaauugaagaaa

SEQ ID NO: 2465924 - RNA, 19 nt, Homo sapiens
  misc_RNA (1)...(19): siRNA sense strand
aagcuuuaacugaagagaa

SEQ ID NO: 2465925 - RNA, 19 nt, Homo sapiens
  misc_RNA (1)...(19): siRNA sense strand
ggauuuaugaugaaccaca

SEQ ID NO: 2465926 - RNA, 19 nt, Homo sapiens
  misc_RNA (1)...(19): siRNA sense strand
auaucacacuacagaaaga

SEQ ID NO: 2465927 - RNA, 19 nt, Homo sapiens
  misc_RNA (1)...(19): siRNA sense strand
uguuauaaaucuggggaau

SEQ ID NO: 2465928 - RNA, 19 nt, Homo sapiens
  misc_RNA (1)...(19): siRNA sense strand
guauuaaaugcuacugaga

SEQ ID NO: 2465929 - RNA, 19 nt, Homo sapiens
  misc_RNA (1)...(19): siRNA sense strand
uugaggaagaagaggaagu

SEQ ID NO: 2465930 - RNA, 19 nt, Homo sapiens
  misc_RNA (1)...(19): siRNA sense strand
ccccaagaccccaaaauaa

SEQ ID NO: 2465931 - RNA, 19 nt, Homo sapiens
  misc_RNA (1)...(19): siRNA sense strand
aaggcaaggugaaauaaaa

SEQ ID NO: 2465932 - RNA, 19 nt, Homo sapiens
  misc_RNA (1)...(19): siRNA sense strand
gggaaaccaaagacugaca

SEQ ID NO: 2465933 - RNA, 19 nt, Homo sapiens
  misc_RNA (1)...(19): siRNA sense strand
ccgacaaaacuuagccaau

SEQ ID NO: 2465934 - RNA, 19 nt, Homo sapiens
  misc_RNA (1)...(19): siRNA sense strand
aaaucgaaaugcggagaau

SEQ ID NO: 2465935 - RNA, 19 nt, Homo sapiens
  misc_RNA (1)...(19): siRNA sense strand
agauauauccagagccaag

SEQ ID NO: 2465936 - RNA, 19 nt, Homo sapiens
  misc_RNA (1)...(19): siRNA sense strand
cuuaagagagagaaggaaa

SEQ ID NO: 2465937 - RNA, 19 nt, Homo sapiens
  misc_RNA (1)...(19): siRNA sense strand
cuugaagguaguuggauua

SEQ ID NO: 2465938 - RNA, 19 nt, Homo sapiens
  misc_RNA (1)...(19): siRNA sense strand
uggaagcaagcgugggaaa

SEQ ID NO: 2465939 - RNA, 19 nt, Homo sapiens
  misc_RNA (1)...(19): siRNA sense strand
agaaauggcaauuggagau

SEQ ID NO: 2465940 - RNA, 19 nt, Homo sapiens
  misc_RNA (1)...(19): siRNA sense strand
gcaaaaugugaauggacaa

SEQ ID NO: 2465941 - RNA, 19 nt, Homo sapiens
  misc_RNA (1)...(19): siRNA sense strand
agacaaguuuagagcaagu

SEQ ID NO: 2465942 - RNA, 19 nt, Homo sapiens
  misc_RNA (1)...(19): siRNA sense strand
acaucguaaugcaggcaaa

SEQ ID NO: 2465943 - RNA, 19 nt, Homo sapiens
  misc_RNA (1)...(19): siRNA sense strand
cagcagcaucugaagcaaa

SEQ ID NO: 2465944 - RNA, 19 nt, Homo sapiens
  misc_RNA (1)...(19): siRNA sense strand
caaagaaacuuacagcaca

SEQ ID NO: 2465945 - RNA, 19 nt, Homo sapiens
  misc_RNA (1)...(19): siRNA sense strand
uuaagagagagaaggaaau

SEQ ID NO: 2465946 - RNA, 19 nt, Homo sapiens
  misc_RNA (1)...(19): siRNA sense strand
uugaaauagcugaagugaa

SEQ ID NO: 2465947 - RNA, 19 nt, Homo sapiens
  misc_RNA (1)...(19): siRNA sense strand
aagaaauggcaauuggaga

SEQ ID NO: 2465948 - RNA, 19 nt, Homo sapiens
  misc_RNA (1)...(19): siRNA sense strand
caucugaagcaaagcauca

SEQ ID NO: 2465949 - RNA, 19 nt, Homo sapiens
  misc_RNA (1)...(19): siRNA sense strand
gguaguuggauuaacagaa

SEQ ID NO: 2465950 - RNA, 19 nt, Homo sapiens
  misc_RNA (1)...(19): siRNA sense strand
acaagaucaaccuaagaaa

SEQ ID NO: 2465951 - RNA, 19 nt, Homo sapiens
  misc_RNA (1)...(19): siRNA sense strand
gaggcagauuggauagaca

SEQ ID NO: 2465952 - RNA, 19 nt, Homo sapiens
  misc_RNA (1)...(19): siRNA sense strand
ucagauuaguagaguaacu

SEQ ID NO: 2465953 - RNA, 19 nt, Homo sapiens
  misc_RNA (1)...(19): siRNA sense strand
ccuaagaaagauaucucaa

SEQ ID NO: 2465954 - RNA, 19 nt, Homo sapiens
  misc_RNA (1)...(19): siRNA sense strand
uggacagcaucuacagcua

SEQ ID NO: 2465955 - RNA, 19 nt, Homo sapiens
  misc_RNA (1)...(19): siRNA sense strand
ggcaaauuccacaguaaca

SEQ ID NO: 2465956 - RNA, 19 nt, Homo sapiens
  misc_RNA (1)...(19): siRNA sense strand
ucucaguuccgaagaaaca

SEQ ID NO: 2465957 - RNA, 19 nt, Homo sapiens
  misc_RNA (1)...(19): siRNA sense strand
ccgaagaaacaggaugaau

SEQ ID NO: 2465958 - RNA, 19 nt, Homo sapiens
  misc_RNA (1)...(19): siRNA sense strand
uugacaaagaaauggcaau

SEQ ID NO: 2465959 - RNA, 19 nt, Homo sapiens
  misc_RNA (1)...(19): siRNA sense strand
cugucuaguccucagauua

SEQ ID NO: 2465960 - RNA, 19 nt, Homo sapiens
  misc_RNA (1)...(19): siRNA sense strand
agaucauauucuccagcaa

SEQ ID NO: 2465961 - RNA, 19 nt, Homo sapiens
  misc_RNA (1)...(19): siRNA sense strand
gccucagggucuaagaaaa

SEQ ID NO: 2465962 - RNA, 19 nt, Homo sapiens
  misc_RNA (1)...(19): siRNA sense strand
ggaagcaagcgugggaaaa

SEQ ID NO: 2465963 - RNA, 19 nt, Homo sapiens
  misc_RNA (1)...(19): siRNA sense strand
gcaaugaauucgaggagca

SEQ ID NO: 2465964 - RNA, 19 nt, Homo sapiens
  misc_RNA (1)...(19): siRNA sense strand
cagauauguaugagagcaa

SEQ ID NO: 2465965 - RNA, 19 nt, Homo sapiens
  misc_RNA (1)...(19): siRNA sense strand
uggccaaggaggagaagaa

SEQ ID NO: 2465966 - RNA, 19 nt, Homo sapiens
  misc_RNA (1)...(19): siRNA sense strand
uugaagaagaacaggagaa

SEQ ID NO: 2465967 - RNA, 19 nt, Homo sapiens
  misc_RNA (1)...(19): siRNA sense strand
ugaagaacucaguggagaa

SEQ ID NO: 2465968 - RNA, 19 nt, Homo sapiens
  misc_RNA (1)...(19): siRNA sense strand
ugaaagugcuguuggcuga

SEQ ID NO: 2465969 - RNA, 19 nt, Homo sapiens
  misc_RNA (1)...(19): siRNA sense strand
aggcagcaguucaggaaga

SEQ ID NO: 2465970 - RNA, 19 nt, Homo sapiens
  misc_RNA (1)...(19): siRNA sense strand
ccaaagagcagcaggcgga

SEQ ID NO: 2465971 - RNA, 19 nt, Homo sapiens
  misc_RNA (1)...(19): siRNA sense strand
aggcaaagaagcaugucaa

SEQ ID NO: 2465972 - RNA, 19 nt, Homo sapiens
  misc_RNA (1)...(19): siRNA sense strand
ggagaaucggaguaaggaa

SEQ ID NO: 2465973 - RNA, 19 nt, Homo sapiens
  misc_RNA (1)...(19): siRNA sense strand
gagagaguuuugagagcua

SEQ ID NO: 2465974 - RNA, 19 nt, Homo sapiens
  misc_RNA (1)...(19): siRNA sense strand
gccuguugauggagaagaa

SEQ ID NO: 2465975 - RNA, 19 nt, Homo sapiens
  misc_RNA (1)...(19): siRNA sense strand
gguuggaugauguggaaca

SEQ ID NO: 2465976 - RNA, 19 nt, Homo sapiens
  misc_RNA (1)...(19): siRNA sense strand
agauccaggaagaaaguaa

SEQ ID NO: 2465977 - RNA, 19 nt, Homo sapiens
  misc_RNA (1)...(19): siRNA sense strand
ggaaggagauugaagaccu

SEQ ID NO: 2465978 - RNA, 19 nt, Homo sapiens
  misc_RNA (1)...(19): siRNA sense strand
agaaacuguucaagaagau

SEQ ID NO: 2465979 - RNA, 19 nt, Homo sapiens
  misc_RNA (1)...(19): siRNA sense strand
cugaaggagaaucggagua

SEQ ID NO: 2465980 - RNA, 19 nt, Homo sapiens
  misc_RNA (1)...(19): siRNA sense strand
agcagaagauugcgaguca

SEQ ID NO: 2465981 - RNA, 19 nt, Homo sapiens
  misc_RNA (1)...(19): siRNA sense strand
cggagaaggccaaagagca

SEQ ID NO: 2465982 - RNA, 19 nt, Homo sapiens
  misc_RNA (1)...(19): siRNA sense strand
gaggaagcucucaaggcaa

SEQ ID NO: 2465983 - RNA, 19 nt, Homo sapiens
  misc_RNA (1)...(19): siRNA sense strand
agaaauugucccacgauga

SEQ ID NO: 2465984 - RNA, 19 nt, Homo sapiens
  misc_RNA (1)...(19): siRNA sense strand
ggaggaagcucucaaggca

SEQ ID NO: 2465985 - RNA, 19 nt, Homo sapiens
  misc_RNA (1)...(19): siRNA sense strand
gcgagucaguacaaggaga

SEQ ID NO: 2465986 - RNA, 19 nt, Homo sapiens
  misc_RNA (1)...(19): siRNA sense strand
aggaggacuaugaggcauu

SEQ ID NO: 2465987 - RNA, 19 nt, Homo sapiens
  misc_RNA (1)...(19): siRNA sense strand
gccaaggaggagaagaauu

SEQ ID NO: 2465988 - RNA, 19 nt, Homo sapiens
  misc_RNA (1)...(19): siRNA sense strand
ggagaaggccaaagagcag

SEQ ID NO: 2465989 - RNA, 19 nt, Homo sapiens
  misc_RNA (1)...(19): siRNA sense strand
agaacucaguggagaaacu

SEQ ID NO: 2465990 - RNA, 19 nt, Homo sapiens
  misc_RNA (1)...(19): siRNA sense strand
cugaacuggaugagaagau

SEQ ID NO: 2465991 - RNA, 19 nt, Homo sapiens
  misc_RNA (1)...(19): siRNA sense strand
cugaaugaucgcaaugaau

SEQ ID NO: 2465992 - RNA, 19 nt, Homo sapiens
  misc_RNA (1)...(19): siRNA sense strand
gagaagaacuacauggagc

SEQ ID NO: 2465993 - RNA, 19 nt, Homo sapiens
  misc_RNA (1)...(19): siRNA sense strand
cggaaacugcagaaacaga

SEQ ID NO: 2465994 - RNA, 19 nt, Homo sapiens
  misc_RNA (1)...(19): siRNA sense strand
gaauccaggacgagaucau

SEQ ID NO: 2465995 - RNA, 19 nt, Homo sapiens
  misc_RNA (1)...(19): siRNA sense strand
aagcaugucaagaagaaca

SEQ ID NO: 2465996 - RNA, 19 nt, Homo sapiens
  misc_RNA (1)...(19): siRNA sense strand
gucaguacaaggagaucaa

SEQ ID NO: 2465997 - RNA, 19 nt, Homo sapiens
  misc_RNA (1)...(19): siRNA sense strand
agaacaggggagagaguuu

SEQ ID NO: 2465998 - RNA, 19 nt, Homo sapiens
  misc_RNA (1)...(19): siRNA sense strand
uggaggauaaacugaggaa

SEQ ID NO: 2465999 - RNA, 19 nt, Homo sapiens
  misc_RNA (1)...(19): siRNA sense strand
aagaagaacaggagaaaag

SEQ ID NO: 2466000 - RNA, 19 nt, Homo sapiens
  misc_RNA (1)...(19): siRNA sense strand
ucaacaacgacauggagau

SEQ ID NO: 2466001 - RNA, 19 nt, Homo sapiens
  misc_RNA (1)...(19): siRNA sense strand
cccaggaaccuucggagaa

SEQ ID NO: 2466002 - RNA, 19 nt, Homo sapiens
  misc_RNA (1)...(19): siRNA sense strand
agauugaagaccuacgauu

SEQ ID NO: 2466003 - RNA, 19 nt, Homo sapiens
  misc_RNA (1)...(19): siRNA sense strand
cguaugucacggagcucaa

SEQ ID NO: 2466004 - RNA, 19 nt, Homo sapiens
  misc_RNA (1)...(19): siRNA sense strand
acaagaggacccaacgaau

SEQ ID NO: 2466005 - RNA, 19 nt, Homo sapiens
  misc_RNA (1)...(19): siRNA sense strand
ugaagacagagcaggauga

SEQ ID NO: 2466006 - RNA, 19 nt, Homo sapiens
  misc_RNA (1)...(19): siRNA sense strand
aauucgaggagcaggccaa

SEQ ID NO: 2466007 - RNA, 19 nt, Homo sapiens
  misc_RNA (1)...(19): siRNA sense strand
cugcagaaacagauucaca

SEQ ID NO: 2466008 - RNA, 19 nt, Homo sapiens
  misc_RNA (1)...(19): siRNA sense strand
agcagaggguggaggccau

SEQ ID NO: 2466009 - RNA, 19 nt, Homo sapiens
  misc_RNA (1)...(19): siRNA sense strand
acacaagauugacaggaga

SEQ ID NO: 2466010 - RNA, 19 nt, Homo sapiens
  misc_RNA (1)...(19): siRNA sense strand
accuaaagaaugugcagaa

SEQ ID NO: 2466011 - RNA, 19 nt, Homo sapiens
  misc_RNA (1)...(19): siRNA sense strand
gcagcauauaacaggaauu

SEQ ID NO: 2466012 - RNA, 19 nt, Homo sapiens
  misc_RNA (1)...(19): siRNA sense strand
cuaaagaaugugcagaaaa

SEQ ID NO: 2466013 - RNA, 19 nt, Homo sapiens
  misc_RNA (1)...(19): siRNA sense strand
cuccagaaauauaagguca

SEQ ID NO: 2466014 - RNA, 19 nt, Homo sapiens
  misc_RNA (1)...(19): siRNA sense strand
acagaaagcuagcucggaa

SEQ ID NO: 2466015 - RNA, 19 nt, Homo sapiens
  misc_RNA (1)...(19): siRNA sense strand
cagaaagcuagcucggaaa

SEQ ID NO: 2466016 - RNA, 19 nt, Homo sapiens
  misc_RNA (1)...(19): siRNA sense strand
agaaugaacucgaagagca

SEQ ID NO: 2466017 - RNA, 19 nt, Homo sapiens
  misc_RNA (1)...(19): siRNA sense strand
cuuaaagaacugugggagu

SEQ ID NO: 2466018 - RNA, 19 nt, Homo sapiens
  misc_RNA (1)...(19): siRNA sense strand
ugaucagaacagaaagcua

SEQ ID NO: 2466019 - RNA, 19 nt, Homo sapiens
  misc_RNA (1)...(19): siRNA sense strand
uggcaggcaagaaggacua

SEQ ID NO: 2466020 - RNA, 19 nt, Homo sapiens
  misc_RNA (1)...(19): siRNA sense strand
cugugggagucaaguaaaa

SEQ ID NO: 2466021 - RNA, 19 nt, Homo sapiens
  misc_RNA (1)...(19): siRNA sense strand
cgguccagauggcaggcaa

SEQ ID NO: 2466022 - RNA, 19 nt, Homo sapiens
  misc_RNA (1)...(19): siRNA sense strand
uguaaagugccaucagaca

SEQ ID NO: 2466023 - RNA, 19 nt, Homo sapiens
  misc_RNA (1)...(19): siRNA sense strand
gggaacugaucgaggugga

SEQ ID NO: 2466024 - RNA, 19 nt, Homo sapiens
  misc_RNA (1)...(19): siRNA sense strand
agucagaugaagaaagcau

SEQ ID NO: 2466025 - RNA, 19 nt, Homo sapiens
  misc_RNA (1)...(19): siRNA sense strand
augauguaauggaggauga

SEQ ID NO: 2466026 - RNA, 19 nt, Homo sapiens
  misc_RNA (1)...(19): siRNA sense strand
aguucaugguggagucauu

SEQ ID NO: 2466027 - RNA, 19 nt, Homo sapiens
  misc_RNA (1)...(19): siRNA sense strand
ggagaacugucuuggccau

SEQ ID NO: 2466028 - RNA, 19 nt, Homo sapiens
  misc_RNA (1)...(19): siRNA sense strand
gacuaaagcuauaugugga

SEQ ID NO: 2466029 - RNA, 19 nt, Homo sapiens
  misc_RNA (1)...(19): siRNA sense strand
augaagaaagcaugaacau

SEQ ID NO: 2466030 - RNA, 19 nt, Homo sapiens
  misc_RNA (1)...(19): siRNA sense strand
auguagaggacgacuauau

SEQ ID NO: 2466031 - RNA, 19 nt, Homo sapiens
  misc_RNA (1)...(19): siRNA sense strand
ggucuguccaaguuguaaa

SEQ ID NO: 2466032 - RNA, 19 nt, Homo sapiens
  misc_RNA (1)...(19): siRNA sense strand
gcauggaguacuuugccaa

SEQ ID NO: 2466033 - RNA, 19 nt, Homo sapiens
  misc_RNA (1)...(19): siRNA sense strand
uggaugauguaauggagga

SEQ ID NO: 2466034 - RNA, 19 nt, Homo sapiens
  misc_RNA (1)...(19): siRNA sense strand
ggucagauugaguuguaca

SEQ ID NO: 2466035 - RNA, 19 nt, Homo sapiens
  misc_RNA (1)...(19): siRNA sense strand
auggagaagaccuagaauu

SEQ ID NO: 2466036 - RNA, 19 nt, Homo sapiens
  misc_RNA (1)...(19): siRNA sense strand
accaaaggaacgugaagau

SEQ ID NO: 2466037 - RNA, 19 nt, Homo sapiens
  misc_RNA (1)...(19): siRNA sense strand
aggaugauucucugcgauu

SEQ ID NO: 2466038 - RNA, 19 nt, Homo sapiens
  misc_RNA (1)...(19): siRNA sense strand
caagaaacgcaguggccaa

SEQ ID NO: 2466039 - RNA, 19 nt, Homo sapiens
  misc_RNA (1)...(19): siRNA sense strand
gcgccguguucguggacaa

SEQ ID NO: 2466040 - RNA, 19 nt, Homo sapiens
  misc_RNA (1)...(19): siRNA sense strand
gcagcaagauccuggccaa

SEQ ID NO: 2466041 - RNA, 19 nt, Homo sapiens
  misc_RNA (1)...(19): siRNA sense strand
ucgacaacauccagggaga

SEQ ID NO: 2466042 - RNA, 19 nt, Homo sapiens
  misc_RNA (1)...(19): siRNA sense strand
gugauguacuccauggcaa

SEQ ID NO: 2466043 - RNA, 19 nt, Homo sapiens
  misc_RNA (1)...(19): siRNA sense strand
ugauguacuccauggcaaa

SEQ ID NO: 2466044 - RNA, 19 nt, Homo sapiens
  misc_RNA (1)...(19): siRNA sense strand
acgcaguggccaacaacaa

SEQ ID NO: 2466045 - RNA, 19 nt, Homo sapiens
  misc_RNA (1)...(19): siRNA sense strand
cagaaugcugagauggaau

SEQ ID NO: 2466046 - RNA, 19 nt, Homo sapiens
  misc_RNA (1)...(19): siRNA sense strand
gaagagaacgagaccgcau

SEQ ID NO: 2466047 - RNA, 19 nt, Homo sapiens
  misc_RNA (1)...(19): siRNA sense strand
gaacgagaccgcaucggaa

SEQ ID NO: 2466048 - RNA, 19 nt, Homo sapiens
  misc_RNA (1)...(19): siRNA sense strand
cggaaaucuugaucagcca

SEQ ID NO: 2466049 - RNA, 19 nt, Homo sapiens
  misc_RNA (1)...(19): siRNA sense strand
guuaaagacuugaugcuuc

SEQ ID NO: 2466050 - RNA, 19 nt, Homo sapiens
  misc_RNA (1)...(19): siRNA sense strand
agggagaugcaguuaaaga

SEQ ID NO: 2466051 - RNA, 19 nt, Homo sapiens
  misc_RNA (1)...(19): siRNA sense strand
cggcaugagcagcgugacu

SEQ ID NO: 2466052 - RNA, 19 nt, Homo sapiens
  misc_RNA (1)...(19): siRNA sense strand
gcgagauggaccggaggaa

SEQ ID NO: 2466053 - RNA, 19 nt, Homo sapiens
  misc_RNA (1)...(19): siRNA sense strand
agaaacuuaccaagagaau

SEQ ID NO: 2466054 - RNA, 19 nt, Homo sapiens
  misc_RNA (1)...(19): siRNA sense strand
auggagaauuugugaaucu

SEQ ID NO: 2466055 - RNA, 19 nt, Homo sapiens
  misc_RNA (1)...(19): siRNA sense strand
caucuaaaucagagacauc

SEQ ID NO: 2466056 - RNA, 19 nt, Homo sapiens
  misc_RNA (1)...(19): siRNA sense strand
agccagauuaccagaaauu

SEQ ID NO: 2466057 - RNA, 19 nt, Homo sapiens
  misc_RNA (1)...(19): siRNA sense strand
agaaacuuaccaagagaau

SEQ ID NO: 2466058 - RNA, 19 nt, Homo sapiens
  misc_RNA (1)...(19): siRNA sense strand
auggagaauuugugaaucu

SEQ ID NO: 2466059 - RNA, 19 nt, Homo sapiens
  misc_RNA (1)...(19): siRNA sense strand
caucuaaaucagagacauc

SEQ ID NO: 2466060 - RNA, 19 nt, Homo sapiens
  misc_RNA (1)...(19): siRNA sense strand
agccagauuaccagaaauu

SEQ ID NO: 2466061 - RNA, 19 nt, Homo sapiens
  misc_RNA (1)...(19): siRNA sense strand
agcaaguggcagaggauaa

SEQ ID NO: 2466062 - RNA, 19 nt, Homo sapiens
  misc_RNA (1)...(19): siRNA sense strand
acacaaaagauguuggaca

SEQ ID NO: 2466063 - RNA, 19 nt, Homo sapiens
  misc_RNA (1)...(19): siRNA sense strand
cuucaaaauuucaggucuu

SEQ ID NO: 2466064 - RNA, 19 nt, Homo sapiens
  misc_RNA (1)...(19): siRNA sense strand
aggaagaggaggaggagga

SEQ ID NO: 2466065 - RNA, 19 nt, Homo sapiens
  misc_RNA (1)...(19): siRNA sense strand
acacagaagaaguagaaga

SEQ ID NO: 2466066 - RNA, 19 nt, Homo sapiens
  misc_RNA (1)...(19): siRNA sense strand
agugacagcccuagugaaa

SEQ ID NO: 2466067 - RNA, 19 nt, Homo sapiens
  misc_RNA (1)...(19): siRNA sense strand
cugcugaagaacagauuaa

SEQ ID NO: 2466068 - RNA, 19 nt, Homo sapiens
  misc_RNA (1)...(19): siRNA sense strand
gaaacuacagaaagggcaa

SEQ ID NO: 2466069 - RNA, 19 nt, Homo sapiens
  misc_RNA (1)...(19): siRNA sense strand
caagauuccugcagggcuu

SEQ ID NO: 2466070 - RNA, 19 nt, Homo sapiens
  misc_RNA (1)...(19): siRNA sense strand
gugugaagggagaggagau

SEQ ID NO: 2466071 - RNA, 19 nt, Homo sapiens
  misc_RNA (1)...(19): siRNA sense strand
aggauuacuacgaggauga

SEQ ID NO: 2466072 - RNA, 19 nt, Homo sapiens
  misc_RNA (1)...(19): siRNA sense strand
uggacaguaugaaggcaaa

SEQ ID NO: 2466073 - RNA, 19 nt, Homo sapiens
  misc_RNA (1)...(19): siRNA sense strand
ugagagaaucgauaagcaa

SEQ ID NO: 2466074 - RNA, 19 nt, Homo sapiens
  misc_RNA (1)...(19): siRNA sense strand
gguuuaagauggagguccu

SEQ ID NO: 2466075 - RNA, 19 nt, Homo sapiens
  misc_RNA (1)...(19): siRNA sense strand
acgaggaugaugaggaaga

SEQ ID NO: 2466076 - RNA, 19 nt, Homo sapiens
  misc_RNA (1)...(19): siRNA sense strand
ggguugagagaaucgauaa

SEQ ID NO: 2466077 - RNA, 19 nt, Homo sapiens
  misc_RNA (1)...(19): siRNA sense strand
ugaagggagaggagaucua

SEQ ID NO: 2466078 - RNA, 19 nt, Homo sapiens
  misc_RNA (1)...(19): siRNA sense strand
aggaggaggaggaugguuu

SEQ ID NO: 2466079 - RNA, 19 nt, Homo sapiens
  misc_RNA (1)...(19): siRNA sense strand
caaguaaauaugaggagga

SEQ ID NO: 2466080 - RNA, 19 nt, Homo sapiens
  misc_RNA (1)...(19): siRNA sense strand
ccuccugaaacuacagaaa

SEQ ID NO: 2466081 - RNA, 19 nt, Homo sapiens
  misc_RNA (1)...(19): siRNA sense strand
guuggugagcggagacuua

SEQ ID NO: 2466082 - RNA, 19 nt, Homo sapiens
  misc_RNA (1)...(19): siRNA sense strand
uggaggugacggaggaauu

SEQ ID NO: 2466083 - RNA, 19 nt, Homo sapiens
  misc_RNA (1)...(19): siRNA sense strand
gugcccaaucagagaaauu

SEQ ID NO: 2466084 - RNA, 19 nt, Homo sapiens
  misc_RNA (1)...(19): siRNA sense strand
ucgugaaguuacagacaca

SEQ ID NO: 2466085 - RNA, 19 nt, Homo sapiens
  misc_RNA (1)...(19): siRNA sense strand
aggaggaggaagaggagga

SEQ ID NO: 2466086 - RNA, 19 nt, Homo sapiens
  misc_RNA (1)...(19): siRNA sense strand
aggaggaagaggaggagga

SEQ ID NO: 2466087 - RNA, 19 nt, Homo sapiens
  misc_RNA (1)...(19): siRNA sense strand
gcagauuaaaguauggaca

SEQ ID NO: 2466088 - RNA, 19 nt, Homo sapiens
  misc_RNA (1)...(19): siRNA sense strand
uuguagaagaugaagauga

SEQ ID NO: 2466089 - RNA, 19 nt, Homo sapiens
  misc_RNA (1)...(19): siRNA sense strand
ggcaacaguuaguggucuu

SEQ ID NO: 2466090 - RNA, 19 nt, Homo sapiens
  misc_RNA (1)...(19): siRNA sense strand
guaagaugcagcaggcaga

SEQ ID NO: 2466091 - RNA, 19 nt, Homo sapiens
  misc_RNA (1)...(19): siRNA sense strand
aggaccaggaggaggaaga

SEQ ID NO: 2466092 - RNA, 19 nt, Homo sapiens
  misc_RNA (1)...(19): siRNA sense strand
acauggaggagcuggaaaa

SEQ ID NO: 2466093 - RNA, 19 nt, Homo sapiens
  misc_RNA (1)...(19): siRNA sense strand
uguuagaauagcagcucaa

SEQ ID NO: 2466094 - RNA, 19 nt, Homo sapiens
  misc_RNA (1)...(19): siRNA sense strand
uuuacaagaagcugagcaa

SEQ ID NO: 2466095 - RNA, 19 nt, Homo sapiens
  misc_RNA (1)...(19): siRNA sense strand
caguaguacgaaauacaaa

SEQ ID NO: 2466096 - RNA, 19 nt, Homo sapiens
  misc_RNA (1)...(19): siRNA sense strand
ugacaaacggcuacaggau

SEQ ID NO: 2466097 - RNA, 19 nt, Homo sapiens
  misc_RNA (1)...(19): siRNA sense strand
acugagcacugguggaaga

SEQ ID NO: 2466098 - RNA, 19 nt, Homo sapiens
  misc_RNA (1)...(19): siRNA sense strand
aagaggaggaggaggagga

SEQ ID NO: 2466099 - RNA, 19 nt, Homo sapiens
  misc_RNA (1)...(19): siRNA sense strand
uagaagaugaagaugauga

SEQ ID NO: 2466100 - RNA, 19 nt, Homo sapiens
  misc_RNA (1)...(19): siRNA sense strand
caaugagaggcgaguucua

SEQ ID NO: 2466101 - RNA, 19 nt, Homo sapiens
  misc_RNA (1)...(19): siRNA sense strand
cagucaucuugaaacaaua

SEQ ID NO: 2466102 - RNA, 19 nt, Homo sapiens
  misc_RNA (1)...(19): siRNA sense strand
gguccuaaaggcagugaca

SEQ ID NO: 2466103 - RNA, 19 nt, Homo sapiens
  misc_RNA (1)...(19): siRNA sense strand
cagaagaaguagaagaucc

SEQ ID NO: 2466104 - RNA, 19 nt, Homo sapiens
  misc_RNA (1)...(19): siRNA sense strand
agauuaaggugcuggaggu

SEQ ID NO: 2466105 - RNA, 19 nt, Homo sapiens
  misc_RNA (1)...(19): siRNA sense strand
ugaugcaaguggugagcca

SEQ ID NO: 2466106 - RNA, 19 nt, Homo sapiens
  misc_RNA (1)...(19): siRNA sense strand
cacagaagaaguagaagau

SEQ ID NO: 2466107 - RNA, 19 nt, Homo sapiens
  misc_RNA (1)...(19): siRNA sense strand
augugaggacagaaguaaa

SEQ ID NO: 2466108 - RNA, 19 nt, Homo sapiens
  misc_RNA (1)...(19): siRNA sense strand
gcagaauggcggagagugc

SEQ ID NO: 2466109 - RNA, 19 nt, Homo sapiens
  misc_RNA (1)...(19): siRNA sense strand
gcccaaucagagaaauuua

SEQ ID NO: 2466110 - RNA, 19 nt, Homo sapiens
  misc_RNA (1)...(19): siRNA sense strand
aggaugaugaggaagauga

SEQ ID NO: 2466111 - RNA, 19 nt, Homo sapiens
  misc_RNA (1)...(19): siRNA sense strand
acagcauggaugagggcau

SEQ ID NO: 2466112 - RNA, 19 nt, Homo sapiens
  misc_RNA (1)...(19): siRNA sense strand
ccucacuggcucaggacau

SEQ ID NO: 2466113 - RNA, 19 nt, Homo sapiens
  misc_RNA (1)...(19): siRNA sense strand
ugugaggacagaaguaaau

SEQ ID NO: 2466114 - RNA, 19 nt, Homo sapiens
  misc_RNA (1)...(19): siRNA sense strand
ccagaaugaaagugcagca

SEQ ID NO: 2466115 - RNA, 19 nt, Homo sapiens
  misc_RNA (1)...(19): siRNA sense strand
gacaacaguaguacgaaau

SEQ ID NO: 2466116 - RNA, 19 nt, Homo sapiens
  misc_RNA (1)...(19): siRNA sense strand
gcccauaugaucuguaaca

SEQ ID NO: 2466117 - RNA, 19 nt, Homo sapiens
  misc_RNA (1)...(19): siRNA sense strand
uuaagaaagccuugccuga

SEQ ID NO: 2466118 - RNA, 19 nt, Homo sapiens
  misc_RNA (1)...(19): siRNA sense strand
aggaagcguuaguggauac

SEQ ID NO: 2466119 - RNA, 19 nt, Homo sapiens
  misc_RNA (1)...(19): siRNA sense strand
gugauggcugaguggacaa

SEQ ID NO: 2466120 - RNA, 19 nt, Homo sapiens
  misc_RNA (1)...(19): siRNA sense strand
gcucuguggcacucuguaa

SEQ ID NO: 2466121 - RNA, 19 nt, Homo sapiens
  misc_RNA (1)...(19): siRNA sense strand
caguaugaaggcaaaguca

SEQ ID NO: 2466122 - RNA, 19 nt, Homo sapiens
  misc_RNA (1)...(19): siRNA sense strand
aagaaguuguagagaacau

SEQ ID NO: 2466123 - RNA, 19 nt, Homo sapiens
  misc_RNA (1)...(19): siRNA sense strand
uguccaugauaaagagcaa

SEQ ID NO: 2466124 - RNA, 19 nt, Homo sapiens
  misc_RNA (1)...(19): siRNA sense strand
acucccagcagguggaaua

SEQ ID NO: 2466125 - RNA, 19 nt, Homo sapiens
  misc_RNA (1)...(19): siRNA sense strand
aguugauguccaugauaaa

SEQ ID NO: 2466126 - RNA, 19 nt, Homo sapiens
  misc_RNA (1)...(19): siRNA sense strand
gcauuuaugaugaaggagu

SEQ ID NO: 2466127 - RNA, 19 nt, Homo sapiens
  misc_RNA (1)...(19): siRNA sense strand
aaaagaaguuguagagaac

SEQ ID NO: 2466128 - RNA, 19 nt, Homo sapiens
  misc_RNA (1)...(19): siRNA sense strand
caugacaaaugaaggccau

SEQ ID NO: 2466129 - RNA, 19 nt, Homo sapiens
  misc_RNA (1)...(19): siRNA sense strand
cuauagagucugcaugaca

SEQ ID NO: 2466130 - RNA, 19 nt, Homo sapiens
  misc_RNA (1)...(19): siRNA sense strand
cccacaagcuagagggcag

SEQ ID NO: 2466131 - RNA, 19 nt, Homo sapiens
  misc_RNA (1)...(19): siRNA sense strand
ggaaaaggaaagagugaaa

SEQ ID NO: 2466132 - RNA, 19 nt, Homo sapiens
  misc_RNA (1)...(19): siRNA sense strand
aaggagagagagagggaaa

SEQ ID NO: 2466133 - RNA, 19 nt, Homo sapiens
  misc_RNA (1)...(19): siRNA sense strand
ggaaaaggacagagagaga

SEQ ID NO: 2466134 - RNA, 19 nt, Homo sapiens
  misc_RNA (1)...(19): siRNA sense strand
cagugaaagaagagagaga

SEQ ID NO: 2466135 - RNA, 19 nt, Homo sapiens
  misc_RNA (1)...(19): siRNA sense strand
gugaaagaagagagagaga

SEQ ID NO: 2466136 - RNA, 19 nt, Homo sapiens
  misc_RNA (1)...(19): siRNA sense strand
aaagagaaagacagggaaa

SEQ ID NO: 2466137 - RNA, 19 nt, Homo sapiens
  misc_RNA (1)...(19): siRNA sense strand
gagacaaagagaaggaaaa

SEQ ID NO: 2466138 - RNA, 19 nt, Homo sapiens
  misc_RNA (1)...(19): siRNA sense strand
cgagaaaagaucaaggaaa

SEQ ID NO: 2466139 - RNA, 19 nt, Homo sapiens
  misc_RNA (1)...(19): siRNA sense strand
aggaaaaggaacaggacaa

SEQ ID NO: 2466140 - RNA, 19 nt, Homo sapiens
  misc_RNA (1)...(19): siRNA sense strand
uuaaagagaaagagcacaa

SEQ ID NO: 2466141 - RNA, 19 nt, Homo sapiens
  misc_RNA (1)...(19): siRNA sense strand
cgagacaaagagaaggaaa

SEQ ID NO: 2466142 - RNA, 19 nt, Homo sapiens
  misc_RNA (1)...(19): siRNA sense strand
agaaaagacacucgagaaa

SEQ ID NO: 2466143 - RNA, 19 nt, Homo sapiens
  misc_RNA (1)...(19): siRNA sense strand
uggaaagagcaaugaaaga

SEQ ID NO: 2466144 - RNA, 19 nt, Homo sapiens
  misc_RNA (1)...(19): siRNA sense strand
gggaaaaggaccgggaaaa

SEQ ID NO: 2466145 - RNA, 19 nt, Homo sapiens
  misc_RNA (1)...(19): siRNA sense strand
agagagagagaacgggaaa

SEQ ID NO: 2466146 - RNA, 19 nt, Homo sapiens
  misc_RNA (1)...(19): siRNA sense strand
gggaaggagaaguuggaga

SEQ ID NO: 2466147 - RNA, 19 nt, Homo sapiens
  misc_RNA (1)...(19): siRNA sense strand
agggaaaggcguaggagga

SEQ ID NO: 2466148 - RNA, 19 nt, Homo sapiens
  misc_RNA (1)...(19): siRNA sense strand
cguucaagacagaaagaca

SEQ ID NO: 2466149 - RNA, 19 nt, Homo sapiens
  misc_RNA (1)...(19): siRNA sense strand
agcagaaauaagaaggaua

SEQ ID NO: 2466150 - RNA, 19 nt, Homo sapiens
  misc_RNA (1)...(19): siRNA sense strand
caccaaggacugaggaaaa

SEQ ID NO: 2466151 - RNA, 19 nt, Homo sapiens
  misc_RNA (1)...(19): siRNA sense strand
cgggaaaaggaccgggaaa

SEQ ID NO: 2466152 - RNA, 19 nt, Homo sapiens
  misc_RNA (1)...(19): siRNA sense strand
aaggaaagagugaaagaga

SEQ ID NO: 2466153 - RNA, 19 nt, Homo sapiens
  misc_RNA (1)...(19): siRNA sense strand
auucacgggacaagagaaa

SEQ ID NO: 2466154 - RNA, 19 nt, Homo sapiens
  misc_RNA (1)...(19): siRNA sense strand
agggaaaaggagagagaga

SEQ ID NO: 2466155 - RNA, 19 nt, Homo sapiens
  misc_RNA (1)...(19): siRNA sense strand
cgggacaaggaacgggaaa

SEQ ID NO: 2466156 - RNA, 19 nt, Homo sapiens
  misc_RNA (1)...(19): siRNA sense strand
acagaaagacagacguaga

SEQ ID NO: 2466157 - RNA, 19 nt, Homo sapiens
  misc_RNA (1)...(19): siRNA sense strand
cgcucuaaaucaagggaga

SEQ ID NO: 2466158 - RNA, 19 nt, Homo sapiens
  misc_RNA (1)...(19): siRNA sense strand
aaagagugaaagagaaaga

SEQ ID NO: 2466159 - RNA, 19 nt, Homo sapiens
  misc_RNA (1)...(19): siRNA sense strand
agggagagacggaagucaa

SEQ ID NO: 2466160 - RNA, 19 nt, Homo sapiens
  misc_RNA (1)...(19): siRNA sense strand
ggaccacaucagugaaaga

SEQ ID NO: 2466161 - RNA, 19 nt, Homo sapiens
  misc_RNA (1)...(19): siRNA sense strand
aaagaaaaggaacgagaaa

SEQ ID NO: 2466162 - RNA, 19 nt, Homo sapiens
  misc_RNA (1)...(19): siRNA sense strand
aagugaaguuugugcggau

SEQ ID NO: 2466163 - RNA, 19 nt, Homo sapiens
  misc_RNA (1)...(19): siRNA sense strand
gagaaaagacacucgagaa

SEQ ID NO: 2466164 - RNA, 19 nt, Homo sapiens
  misc_RNA (1)...(19): siRNA sense strand
ugaaagagaaagacaggga

SEQ ID NO: 2466165 - RNA, 19 nt, Homo sapiens
  misc_RNA (1)...(19): siRNA sense strand
ggaaaagaucacaaucaaa

SEQ ID NO: 2466166 - RNA, 19 nt, Homo sapiens
  misc_RNA (1)...(19): siRNA sense strand
gggaaaaggaacgugaaaa

SEQ ID NO: 2466167 - RNA, 19 nt, Homo sapiens
  misc_RNA (1)...(19): siRNA sense strand
aggaacaggacaaagaaaa

SEQ ID NO: 2466168 - RNA, 19 nt, Homo sapiens
  misc_RNA (1)...(19): siRNA sense strand
aggcguaggaggaggagca

SEQ ID NO: 2466169 - RNA, 19 nt, Homo sapiens
  misc_RNA (1)...(19): siRNA sense strand
cguaggaggaggagcagga

SEQ ID NO: 2466170 - RNA, 19 nt, Homo sapiens
  misc_RNA (1)...(19): siRNA sense strand
caugagaaggaucgagaca

SEQ ID NO: 2466171 - RNA, 19 nt, Homo sapiens
  misc_RNA (1)...(19): siRNA sense strand
ggaucgagacaaagagaag

SEQ ID NO: 2466172 - RNA, 19 nt, Homo sapiens
  misc_RNA (1)...(19): siRNA sense strand
gauagagaugggaaggaga

SEQ ID NO: 2466173 - RNA, 19 nt, Homo sapiens
  misc_RNA (1)...(19): siRNA sense strand
gagaaguuggagaagaaca

SEQ ID NO: 2466174 - RNA, 19 nt, Homo sapiens
  misc_RNA (1)...(19): siRNA sense strand
aggaaaagaucacaaucaa

SEQ ID NO: 2466175 - RNA, 19 nt, Homo sapiens
  misc_RNA (1)...(19): siRNA sense strand
aagaaaaggaacgggguaa

SEQ ID NO: 2466176 - RNA, 19 nt, Homo sapiens
  misc_RNA (1)...(19): siRNA sense strand
cagagagagagaacgggaa

SEQ ID NO: 2466177 - RNA, 19 nt, Homo sapiens
  misc_RNA (1)...(19): siRNA sense strand
aagaaguaaugaagcgagu

SEQ ID NO: 2466178 - RNA, 19 nt, Homo sapiens
  misc_RNA (1)...(19): siRNA sense strand
caaucaaaacacaggagua

SEQ ID NO: 2466179 - RNA, 19 nt, Homo sapiens
  misc_RNA (1)...(19): siRNA sense strand
ggaaaaggaacaggacaaa

SEQ ID NO: 2466180 - RNA, 19 nt, Homo sapiens
  misc_RNA (1)...(19): siRNA sense strand
ggacugaggaaaacaaaau

SEQ ID NO: 2466181 - RNA, 19 nt, Homo sapiens
  misc_RNA (1)...(19): siRNA sense strand
aaauacagcacaaugggaa

SEQ ID NO: 2466182 - RNA, 19 nt, Homo sapiens
  misc_RNA (1)...(19): siRNA sense strand
gggacaaggaacgggaaaa

SEQ ID NO: 2466183 - RNA, 19 nt, Homo sapiens
  misc_RNA (1)...(19): siRNA sense strand
aggaggaggagcaggaguu

SEQ ID NO: 2466184 - RNA, 19 nt, Homo sapiens
  misc_RNA (1)...(19): siRNA sense strand
auagagaugggaaggagaa

SEQ ID NO: 2466185 - RNA, 19 nt, Homo sapiens
  misc_RNA (1)...(19): siRNA sense strand
aagugugagcaaagaagua

SEQ ID NO: 2466186 - RNA, 19 nt, Homo sapiens
  misc_RNA (1)...(19): siRNA sense strand
ccauaauagaucacguuca

SEQ ID NO: 2466187 - RNA, 19 nt, Homo sapiens
  misc_RNA (1)...(19): siRNA sense strand
cagauucaagugugagcaa

SEQ ID NO: 2466188 - RNA, 19 nt, Homo sapiens
  misc_RNA (1)...(19): siRNA sense strand
ucuggaaagagcaaugaaa

SEQ ID NO: 2466189 - RNA, 19 nt, Homo sapiens
  misc_RNA (1)...(19): siRNA sense strand
aaauccaggucuagcucaa

SEQ ID NO: 2466190 - RNA, 19 nt, Homo sapiens
  misc_RNA (1)...(19): siRNA sense strand
aagaagagagagagaacgu

SEQ ID NO: 2466191 - RNA, 19 nt, Homo sapiens
  misc_RNA (1)...(19): siRNA sense strand
cggcagacggaaauggaau

SEQ ID NO: 2466192 - RNA, 19 nt, Homo sapiens
  misc_RNA (1)...(19): siRNA sense strand
gugaggagacagagggcga

SEQ ID NO: 2466193 - RNA, 19 nt, Homo sapiens
  misc_RNA (1)...(19): siRNA sense strand
acgaaaacgugcggaggaa

SEQ ID NO: 2466194 - RNA, 19 nt, Homo sapiens
  misc_RNA (1)...(19): siRNA sense strand
caggagagcagaaggagga

SEQ ID NO: 2466195 - RNA, 19 nt, Homo sapiens
  misc_RNA (1)...(19): siRNA sense strand
aggaccagucugaagauaa

SEQ ID NO: 2466196 - RNA, 19 nt, Homo sapiens
  misc_RNA (1)...(19): siRNA sense strand
ccuucggagaugaggguuu

SEQ ID NO: 2466197 - RNA, 19 nt, Homo sapiens
  misc_RNA (1)...(19): siRNA sense strand
gagagcagaaggaggacca

SEQ ID NO: 2466198 - RNA, 19 nt, Homo sapiens
  misc_RNA (1)...(19): siRNA sense strand
gcaagguggcuucaggaga

SEQ ID NO: 2466199 - RNA, 19 nt, Homo sapiens
  misc_RNA (1)...(19): siRNA sense strand
gauuaaaaggguugguaaa

SEQ ID NO: 2466200 - RNA, 19 nt, Homo sapiens
  misc_RNA (1)...(19): siRNA sense strand
gggccaaagcagagaagga

SEQ ID NO: 2466201 - RNA, 19 nt, Homo sapiens
  misc_RNA (1)...(19): siRNA sense strand
gcgugaacgaugugcggaa

SEQ ID NO: 2466202 - RNA, 19 nt, Homo sapiens
  misc_RNA (1)...(19): siRNA sense strand
aagcagagaaggaggagga

SEQ ID NO: 2466203 - RNA, 19 nt, Homo sapiens
  misc_RNA (1)...(19): siRNA sense strand
aagcagaaggagagggcca

SEQ ID NO: 2466204 - RNA, 19 nt, Homo sapiens
  misc_RNA (1)...(19): siRNA sense strand
uggaggagaugguggagga

SEQ ID NO: 2466205 - RNA, 19 nt, Homo sapiens
  misc_RNA (1)...(19): siRNA sense strand
aggcagaagaggaggcugu

SEQ ID NO: 2466206 - RNA, 19 nt, Homo sapiens
  misc_RNA (1)...(19): siRNA sense strand
ccuaugaaggcaacagcaa

SEQ ID NO: 2466207 - RNA, 19 nt, Homo sapiens
  misc_RNA (1)...(19): siRNA sense strand
aggaggauguggagccuga

SEQ ID NO: 2466208 - RNA, 19 nt, Homo sapiens
  misc_RNA (1)...(19): siRNA sense strand
ucauggagaagguggccaa

SEQ ID NO: 2466209 - RNA, 19 nt, Homo sapiens
  misc_RNA (1)...(19): siRNA sense strand
augccgugucugagauuaa

SEQ ID NO: 2466210 - RNA, 19 nt, Homo sapiens
  misc_RNA (1)...(19): siRNA sense strand
ccaaagcagagaaggagga

SEQ ID NO: 2466211 - RNA, 19 nt, Homo sapiens
  misc_RNA (1)...(19): siRNA sense strand
aggagaugguggaggagcu

SEQ ID NO: 2466212 - RNA, 19 nt, Homo sapiens
  misc_RNA (1)...(19): siRNA sense strand
cuguguaccagaagaccaa

SEQ ID NO: 2466213 - RNA, 19 nt, Homo sapiens
  misc_RNA (1)...(19): siRNA sense strand
agauuaaaaggguugguaa

SEQ ID NO: 2466214 - RNA, 19 nt, Homo sapiens
  misc_RNA (1)...(19): siRNA sense strand
aaagacagcuucugggcca

SEQ ID NO: 2466215 - RNA, 19 nt, Homo sapiens
  misc_RNA (1)...(19): siRNA sense strand
agaugguggaggagcucaa

SEQ ID NO: 2466216 - RNA, 19 nt, Homo sapiens
  misc_RNA (1)...(19): siRNA sense strand
gggagauuuucaagcagaa

SEQ ID NO: 2466217 - RNA, 19 nt, Homo sapiens
  misc_RNA (1)...(19): siRNA sense strand
gcagagaaggaggaggaga

SEQ ID NO: 2466218 - RNA, 19 nt, Homo sapiens
  misc_RNA (1)...(19): siRNA sense strand
aauuagaagagcugagaaa

SEQ ID NO: 2466219 - RNA, 19 nt, Homo sapiens
  misc_RNA (1)...(19): siRNA sense strand
aggagaagaagauaagaaa

SEQ ID NO: 2466220 - RNA, 19 nt, Homo sapiens
  misc_RNA (1)...(19): siRNA sense strand
agucaggagaagaagauaa

SEQ ID NO: 2466221 - RNA, 19 nt, Homo sapiens
  misc_RNA (1)...(19): siRNA sense strand
agagaaagcuauaguggga

SEQ ID NO: 2466222 - RNA, 19 nt, Homo sapiens
  misc_RNA (1)...(19): siRNA sense strand
agcuagaggagaugggaaa

SEQ ID NO: 2466223 - RNA, 19 nt, Homo sapiens
  misc_RNA (1)...(19): siRNA sense strand
augagaaguucgagcgaga

SEQ ID NO: 2466224 - RNA, 19 nt, Homo sapiens
  misc_RNA (1)...(19): siRNA sense strand
ggucaaaacagaaggcgaa

SEQ ID NO: 2466225 - RNA, 19 nt, Homo sapiens
  misc_RNA (1)...(19): siRNA sense strand
ugggaaaucuggagaaaau

SEQ ID NO: 2466226 - RNA, 19 nt, Homo sapiens
  misc_RNA (1)...(19): siRNA sense strand
caggagaagaagauaagaa

SEQ ID NO: 2466227 - RNA, 19 nt, Homo sapiens
  misc_RNA (1)...(19): siRNA sense strand
ugaaggauguucugggaga

SEQ ID NO: 2466228 - RNA, 19 nt, Homo sapiens
  misc_RNA (1)...(19): siRNA sense strand
gaagaaaaguauaagcaca

SEQ ID NO: 2466229 - RNA, 19 nt, Homo sapiens
  misc_RNA (1)...(19): siRNA sense strand
aggcaagaagagacuaaua

SEQ ID NO: 2466230 - RNA, 19 nt, Homo sapiens
  misc_RNA (1)...(19): siRNA sense strand
ggagaagaagauaagaaaa

SEQ ID NO: 2466231 - RNA, 19 nt, Homo sapiens
  misc_RNA (1)...(19): siRNA sense strand
gcgaaauggaagaaggaug

SEQ ID NO: 2466232 - RNA, 19 nt, Homo sapiens
  misc_RNA (1)...(19): siRNA sense strand
aggaagaauugcaugcaca

SEQ ID NO: 2466233 - RNA, 19 nt, Homo sapiens
  misc_RNA (1)...(19): siRNA sense strand
gugcaagaugguagcaaga

SEQ ID NO: 2466234 - RNA, 19 nt, Homo sapiens
  misc_RNA (1)...(19): siRNA sense strand
agaaaaugcuucaaaccaa

SEQ ID NO: 2466235 - RNA, 19 nt, Homo sapiens
  misc_RNA (1)...(19): siRNA sense strand
cagaaggcgaaauggaaga

SEQ ID NO: 2466236 - RNA, 19 nt, Homo sapiens
  misc_RNA (1)...(19): siRNA sense strand
uagcaagaaaggacaagaa

SEQ ID NO: 2466237 - RNA, 19 nt, Homo sapiens
  misc_RNA (1)...(19): siRNA sense strand
gcuaucaacuuguucggaa

SEQ ID NO: 2466238 - RNA, 19 nt, Homo sapiens
  misc_RNA (1)...(19): siRNA sense strand
cuaucaacuuguucggaau

SEQ ID NO: 2466239 - RNA, 19 nt, Homo sapiens
  misc_RNA (1)...(19): siRNA sense strand
agugggaaaucuggagaaa

SEQ ID NO: 2466240 - RNA, 19 nt, Homo sapiens
  misc_RNA (1)...(19): siRNA sense strand
cgcaagaacuccacaggga

SEQ ID NO: 2466241 - RNA, 19 nt, Homo sapiens
  misc_RNA (1)...(19): siRNA sense strand
auggaagagaaguggucaa

SEQ ID NO: 2466242 - RNA, 19 nt, Homo sapiens
  misc_RNA (1)...(19): siRNA sense strand
acaagaacagggagcucaa

SEQ ID NO: 2466243 - RNA, 19 nt, Homo sapiens
  misc_RNA (1)...(19): siRNA sense strand
gaacaaaugaacagagacc

SEQ ID NO: 2466244 - RNA, 19 nt, Homo sapiens
  misc_RNA (1)...(19): siRNA sense strand
gugcugucuuugagaacuu

SEQ ID NO: 2466245 - RNA, 19 nt, Homo sapiens
  misc_RNA (1)...(19): siRNA sense strand
cuccagaaagagaaagcua

SEQ ID NO: 2466246 - RNA, 19 nt, Homo sapiens
  misc_RNA (1)...(19): siRNA sense strand
aggucaugcaggaagaauu

SEQ ID NO: 2466247 - RNA, 19 nt, Homo sapiens
  misc_RNA (1)...(19): siRNA sense strand
ccauacagauccugacgga

SEQ ID NO: 2466248 - RNA, 19 nt, Homo sapiens
  misc_RNA (1)...(19): siRNA sense strand
aaacaacaucaaagugaca

SEQ ID NO: 2466249 - RNA, 19 nt, Homo sapiens
  misc_RNA (1)...(19): siRNA sense strand
uggaagagaaguggucaaa

SEQ ID NO: 2466250 - RNA, 19 nt, Homo sapiens
  misc_RNA (1)...(19): siRNA sense strand
ucgaaauggagucaggaga

SEQ ID NO: 2466251 - RNA, 19 nt, Homo sapiens
  misc_RNA (1)...(19): siRNA sense strand
agaacuucauucaagagaa

SEQ ID NO: 2466252 - RNA, 19 nt, Homo sapiens
  misc_RNA (1)...(19): siRNA sense strand
aauggaagaaggaugagaa

SEQ ID NO: 2466253 - RNA, 19 nt, Homo sapiens
  misc_RNA (1)...(19): siRNA sense strand
aggcgaaauggaagaagga

SEQ ID NO: 2466254 - RNA, 19 nt, Homo sapiens
  misc_RNA (1)...(19): siRNA sense strand
ugggaaaagaauacaagua

SEQ ID NO: 2466255 - RNA, 19 nt, Homo sapiens
  misc_RNA (1)...(19): siRNA sense strand
aaagaggugcccuggagaa

SEQ ID NO: 2466256 - RNA, 19 nt, Homo sapiens
  misc_RNA (1)...(19): siRNA sense strand
auaaauagacauuggcaug

SEQ ID NO: 2466257 - RNA, 19 nt, Homo sapiens
  misc_RNA (1)...(19): siRNA sense strand
cugagaugaaacagaacuu

SEQ ID NO: 2466258 - RNA, 19 nt, Homo sapiens
  misc_RNA (1)...(19): siRNA sense strand
aagcuagaggagaugggaa

SEQ ID NO: 2466259 - RNA, 19 nt, Homo sapiens
  misc_RNA (1)...(19): siRNA sense strand
gcccuggagaagagaccaa

SEQ ID NO: 2466260 - RNA, 19 nt, Homo sapiens
  misc_RNA (1)...(19): siRNA sense strand
gagaacaacuacaaagcag

SEQ ID NO: 2466261 - RNA, 19 nt, Homo sapiens
  misc_RNA (1)...(19): siRNA sense strand
uugcugaaacugaagaaaa

SEQ ID NO: 2466262 - RNA, 19 nt, Homo sapiens
  misc_RNA (1)...(19): siRNA sense strand
aggaaaaggaagaggcaaa

SEQ ID NO: 2466263 - RNA, 19 nt, Homo sapiens
  misc_RNA (1)...(19): siRNA sense strand
ggaaagaccuugaucccaa

SEQ ID NO: 2466264 - RNA, 19 nt, Homo sapiens
  misc_RNA (1)...(19): siRNA sense strand
ggagauaaaguguggguga

SEQ ID NO: 2466265 - RNA, 19 nt, Homo sapiens
  misc_RNA (1)...(19): siRNA sense strand
caaucaagggacugggaaa

SEQ ID NO: 2466266 - RNA, 19 nt, Homo sapiens
  misc_RNA (1)...(19): siRNA sense strand
gauacaggcaagagggcaa

SEQ ID NO: 2466267 - RNA, 19 nt, Homo sapiens
  misc_RNA (1)...(19): siRNA sense strand
cugaugaggaagaggaaaa

SEQ ID NO: 2466268 - RNA, 19 nt, Homo sapiens
  misc_RNA (1)...(19): siRNA sense strand
gaagagaggcggaggcgau

SEQ ID NO: 2466269 - RNA, 19 nt, Homo sapiens
  misc_RNA (1)...(19): siRNA sense strand
gcagcaaagaagaagaaaa

SEQ ID NO: 2466270 - RNA, 19 nt, Homo sapiens
  misc_RNA (1)...(19): siRNA sense strand
gcuuauuggccgagagaug

SEQ ID NO: 2466271 - RNA, 19 nt, Homo sapiens
  misc_RNA (1)...(19): siRNA sense strand
aggaagaggaaaaggaaga

SEQ ID NO: 2466272 - RNA, 19 nt, Homo sapiens
  misc_RNA (1)...(19): siRNA sense strand
aagaaggagaagaagaaaa

SEQ ID NO: 2466273 - RNA, 19 nt, Homo sapiens
  misc_RNA (1)...(19): siRNA sense strand
ggcaagagggcaaggcaca

SEQ ID NO: 2466274 - RNA, 19 nt, Homo sapiens
  misc_RNA (1)...(19): siRNA sense strand
agauaguagauguuggaga

SEQ ID NO: 2466275 - RNA, 19 nt, Homo sapiens
  misc_RNA (1)...(19): siRNA sense strand
aagaagaagcacaaggagu

SEQ ID NO: 2466276 - RNA, 19 nt, Homo sapiens
  misc_RNA (1)...(19): siRNA sense strand
gagcaagaagagaggcgga

SEQ ID NO: 2466277 - RNA, 19 nt, Homo sapiens
  misc_RNA (1)...(19): siRNA sense strand
aggcaaagucagcagaguu

SEQ ID NO: 2466278 - RNA, 19 nt, Homo sapiens
  misc_RNA (1)...(19): siRNA sense strand
aggcagcaaagaagaagaa

SEQ ID NO: 2466279 - RNA, 19 nt, Homo sapiens
  misc_RNA (1)...(19): siRNA sense strand
aggccugagaccauggaaa

SEQ ID NO: 2466280 - RNA, 19 nt, Homo sapiens
  misc_RNA (1)...(19): siRNA sense strand
ggccugagaccauggaaaa

SEQ ID NO: 2466281 - RNA, 19 nt, Homo sapiens
  misc_RNA (1)...(19): siRNA sense strand
ggugaagcuuauuggccga

SEQ ID NO: 2466282 - RNA, 19 nt, Homo sapiens
  misc_RNA (1)...(19): siRNA sense strand
aaaagaagaagaagcacaa

SEQ ID NO: 2466283 - RNA, 19 nt, Homo sapiens
  misc_RNA (1)...(19): siRNA sense strand
agcacaagaagaagcacaa

SEQ ID NO: 2466284 - RNA, 19 nt, Homo sapiens
  misc_RNA (1)...(19): siRNA sense strand
auguuaucauugagcaaga

SEQ ID NO: 2466285 - RNA, 19 nt, Homo sapiens
  misc_RNA (1)...(19): siRNA sense strand
cagcagaguuugagaagcc

SEQ ID NO: 2466286 - RNA, 19 nt, Homo sapiens
  misc_RNA (1)...(19): siRNA sense strand
gguugucaaucaagggacu

SEQ ID NO: 2466287 - RNA, 19 nt, Homo sapiens
  misc_RNA (1)...(19): siRNA sense strand
gcuaagugcuucugucgca

SEQ ID NO: 2466288 - RNA, 19 nt, Homo sapiens
  misc_RNA (1)...(19): siRNA sense strand
gcaucuguggccuggcuaa

SEQ ID NO: 2466289 - RNA, 19 nt, Homo sapiens
  misc_RNA (1)...(19): siRNA sense strand
agacgaaugaagaggacaa

SEQ ID NO: 2466290 - RNA, 19 nt, Homo sapiens
  misc_RNA (1)...(19): siRNA sense strand
cuacaugaggaaugagaau

SEQ ID NO: 2466291 - RNA, 19 nt, Homo sapiens
  misc_RNA (1)...(19): siRNA sense strand
caaacagauaugagacgaa

SEQ ID NO: 2466292 - RNA, 19 nt, Homo sapiens
  misc_RNA (1)...(19): siRNA sense strand
agcucaacaucgaggacua

SEQ ID NO: 2466293 - RNA, 19 nt, Homo sapiens
  misc_RNA (1)...(19): siRNA sense strand
cgggagaccuuccagggua

SEQ ID NO: 2466294 - RNA, 19 nt, Homo sapiens
  misc_RNA (1)...(19): siRNA sense strand
ccaagaaguuccaggucac

SEQ ID NO: 2466295 - RNA, 19 nt, Homo sapiens
  misc_RNA (1)...(19): siRNA sense strand
guauggaggaacagcauca

SEQ ID NO: 2466296 - RNA, 19 nt, Homo sapiens
  misc_RNA (1)...(19): siRNA sense strand
ugucugaguaagagcaaca

SEQ ID NO: 2466297 - RNA, 19 nt, Homo sapiens
  misc_RNA (1)...(19): siRNA sense strand
ggacaggucaucuggggua

SEQ ID NO: 2466298 - RNA, 19 nt, Homo sapiens
  misc_RNA (1)...(19): siRNA sense strand
uuuacaggaaguacagaaa

SEQ ID NO: 2466299 - RNA, 19 nt, Homo sapiens
  misc_RNA (1)...(19): siRNA sense strand
acgagcugcuugagaacuu

SEQ ID NO: 2466300 - RNA, 19 nt, Homo sapiens
  misc_RNA (1)...(19): siRNA sense strand
cuuaaagaagaugggcaaa

SEQ ID NO: 2466301 - RNA, 19 nt, Homo sapiens
  misc_RNA (1)...(19): siRNA sense strand
cggcacacucugcagaaau

SEQ ID NO: 2466302 - RNA, 19 nt, Homo sapiens
  misc_RNA (1)...(19): siRNA sense strand
ucguuuacucugugaugua

SEQ ID NO: 2466303 - RNA, 19 nt, Homo sapiens
  misc_RNA (1)...(19): siRNA sense strand
cugcugagcucuggcggua

SEQ ID NO: 2466304 - RNA, 19 nt, Homo sapiens
  misc_RNA (1)...(19): siRNA sense strand
augcaagcagugugggaaa

SEQ ID NO: 2466305 - RNA, 19 nt, Homo sapiens
  misc_RNA (1)...(19): siRNA sense strand
gcucagaacucauacagca

SEQ ID NO: 2466306 - RNA, 19 nt, Homo sapiens
  misc_RNA (1)...(19): siRNA sense strand
uuggaaaugcagaaaggua

SEQ ID NO: 2466307 - RNA, 19 nt, Homo sapiens
  misc_RNA (1)...(19): siRNA sense strand
gccuuuagccagagcucaa

SEQ ID NO: 2466308 - RNA, 19 nt, Homo sapiens
  misc_RNA (1)...(19): siRNA sense strand
ggucugcacuccagggcau

SEQ ID NO: 2466309 - RNA, 19 nt, Homo sapiens
  misc_RNA (1)...(19): siRNA sense strand
cccuaugaguguagucaau

SEQ ID NO: 2466310 - RNA, 19 nt, Homo sapiens
  misc_RNA (1)...(19): siRNA sense strand
cuugauucaugcagggaca

SEQ ID NO: 2466311 - RNA, 19 nt, Homo sapiens
  misc_RNA (1)...(19): siRNA sense strand
gcuggagaccugugggcuu

SEQ ID NO: 2466312 - RNA, 19 nt, Homo sapiens
  misc_RNA (1)...(19): siRNA sense strand
ggucguaccucaugcagca

SEQ ID NO: 2466313 - RNA, 19 nt, Homo sapiens
  misc_RNA (1)...(19): siRNA sense strand
augcagaaagguaaaguga

SEQ ID NO: 2466314 - RNA, 19 nt, Homo sapiens
  misc_RNA (1)...(19): siRNA sense strand
gguaaagugacaccggaga

SEQ ID NO: 2466315 - RNA, 19 nt, Homo sapiens
  misc_RNA (1)...(19): siRNA sense strand
ggucacaccuucugcagca

SEQ ID NO: 2466316 - RNA, 19 nt, Homo sapiens
  misc_RNA (1)...(19): siRNA sense strand
aguucauaccagagagcca

SEQ ID NO: 2466317 - RNA, 19 nt, Homo sapiens
  misc_RNA (1)...(19): siRNA sense strand
gggaaagguuuuaacagga

SEQ ID NO: 2466318 - RNA, 19 nt, Homo sapiens
  misc_RNA (1)...(19): siRNA sense strand
gcauuacaagagugguuau

SEQ ID NO: 2466319 - RNA, 19 nt, Homo sapiens
  misc_RNA (1)...(19): siRNA sense strand
gggacaaaccccuacaaau

SEQ ID NO: 2466320 - RNA, 19 nt, Homo sapiens
  misc_RNA (1)...(19): siRNA sense strand
cggcagaauacaagagcuu

SEQ ID NO: 2466321 - RNA, 19 nt, Homo sapiens
  misc_RNA (1)...(19): siRNA sense strand
augccgaauaucagcgaaa

SEQ ID NO: 2466322 - RNA, 19 nt, Homo sapiens
  misc_RNA (1)...(19): siRNA sense strand
agaagaacuugguugcgau

SEQ ID NO: 2466323 - RNA, 19 nt, Homo sapiens
  misc_RNA (1)...(19): siRNA sense strand
ccgcaggcgauucguggaa

SEQ ID NO: 2466324 - RNA, 19 nt, Homo sapiens
  misc_RNA (1)...(19): siRNA sense strand
acuuggaggucgagggaga

SEQ ID NO: 2466325 - RNA, 19 nt, Homo sapiens
  misc_RNA (1)...(19): siRNA sense strand
gggcaaacacugugagcac

SEQ ID NO: 2466326 - RNA, 19 nt, Homo sapiens
  misc_RNA (1)...(19): siRNA sense strand
uggagguacuagaggcuga

SEQ ID NO: 2466327 - RNA, 19 nt, Homo sapiens
  misc_RNA (1)...(19): siRNA sense strand
ucaagaaagccuaccgcaa

SEQ ID NO: 2466328 - RNA, 19 nt, Homo sapiens
  misc_RNA (1)...(19): siRNA sense strand
acaauaaggaggaggcgga

SEQ ID NO: 2466329 - RNA, 19 nt, Homo sapiens
  misc_RNA (1)...(19): siRNA sense strand
aggaagacgggcagcucaa

SEQ ID NO: 2466330 - RNA, 19 nt, Homo sapiens
  misc_RNA (1)...(19): siRNA sense strand
cagcucaaauggauggaca

SEQ ID NO: 2466331 - RNA, 19 nt, Homo sapiens
  misc_RNA (1)...(19): siRNA sense strand
aggcggagaagaaguucaa

SEQ ID NO: 2466332 - RNA, 19 nt, Homo sapiens
  misc_RNA (1)...(19): siRNA sense strand
ccgacaagaacccugacaa

SEQ ID NO: 2466333 - RNA, 19 nt, Homo sapiens
  misc_RNA (1)...(19): siRNA sense strand
ccgagaugaucaauggcca

SEQ ID NO: 2466334 - RNA, 19 nt, Homo sapiens
  misc_RNA (1)...(19): siRNA sense strand
cggugacugugaacggcaa

SEQ ID NO: 2466335 - RNA, 19 nt, Homo sapiens
  misc_RNA (1)...(19): siRNA sense strand
uagcagaauaaauggacaa

SEQ ID NO: 2466336 - RNA, 19 nt, Homo sapiens
  misc_RNA (1)...(19): siRNA sense strand
uugaaauguuccaggguca

SEQ ID NO: 2466337 - RNA, 19 nt, Homo sapiens
  misc_RNA (1)...(19): siRNA sense strand
aggaagaggaucugaggca

SEQ ID NO: 2466338 - RNA, 19 nt, Homo sapiens
  misc_RNA (1)...(19): siRNA sense strand
aguaaaaggccacggagua

SEQ ID NO: 2466339 - RNA, 19 nt, Homo sapiens
  misc_RNA (1)...(19): siRNA sense strand
cagaaguucaagaguaaaa

SEQ ID NO: 2466340 - RNA, 19 nt, Homo sapiens
  misc_RNA (1)...(19): siRNA sense strand
guuucaggagugaggcuaa

SEQ ID NO: 2466341 - RNA, 19 nt, Homo sapiens
  misc_RNA (1)...(19): siRNA sense strand
ggugaaggcucuuaugcga

SEQ ID NO: 2466342 - RNA, 19 nt, Homo sapiens
  misc_RNA (1)...(19): siRNA sense strand
gguuuucaguggaggaaga

SEQ ID NO: 2466343 - RNA, 19 nt, Homo sapiens
  misc_RNA (1)...(19): siRNA sense strand
ccuugaacagcuggagaaa

SEQ ID NO: 2466344 - RNA, 19 nt, Homo sapiens
  misc_RNA (1)...(19): siRNA sense strand
cuuacuugaacuuggagaa

SEQ ID NO: 2466345 - RNA, 19 nt, Homo sapiens
  misc_RNA (1)...(19): siRNA sense strand
ccagaaaggucaccaccca

SEQ ID NO: 2466346 - RNA, 19 nt, Homo sapiens
  misc_RNA (1)...(19): siRNA sense strand
ggggauuagcagaauaaau

SEQ ID NO: 2466347 - RNA, 19 nt, Homo sapiens
  misc_RNA (1)...(19): siRNA sense strand
caacugaaauauauggaga

SEQ ID NO: 2466348 - RNA, 19 nt, Homo sapiens
  misc_RNA (1)...(19): siRNA sense strand
acuucaugccuauggaaua

SEQ ID NO: 2466349 - RNA, 19 nt, Homo sapiens
  misc_RNA (1)...(19): siRNA sense strand
cagaaggagccaauggaca

SEQ ID NO: 2466350 - RNA, 19 nt, Homo sapiens
  misc_RNA (1)...(19): siRNA sense strand
cugaaauagagaacugcua

SEQ ID NO: 2466351 - RNA, 19 nt, Homo sapiens
  misc_RNA (1)...(19): siRNA sense strand
acgaaugcacagaaauauu

SEQ ID NO: 2466352 - RNA, 19 nt, Homo sapiens
  misc_RNA (1)...(19): siRNA sense strand
ggcaguugguggaggccuu

SEQ ID NO: 2466353 - RNA, 19 nt, Homo sapiens
  misc_RNA (1)...(19): siRNA sense strand
uaucuuggauuuauggcaa

SEQ ID NO: 2466354 - RNA, 19 nt, Homo sapiens
  misc_RNA (1)...(19): siRNA sense strand
ugcauguggguuagggaaa

SEQ ID NO: 2466355 - RNA, 19 nt, Homo sapiens
  misc_RNA (1)...(19): siRNA sense strand
aguggauaaacuugagcaa

SEQ ID NO: 2466356 - RNA, 19 nt, Homo sapiens
  misc_RNA (1)...(19): siRNA sense strand
ggacagagaacgaaugcac

SEQ ID NO: 2466357 - RNA, 19 nt, Homo sapiens
  misc_RNA (1)...(19): siRNA sense strand
gcacuuuacuucuucccaa

SEQ ID NO: 2466358 - RNA, 19 nt, Homo sapiens
  misc_RNA (1)...(19): siRNA sense strand
cagaaauauugucagccuu

SEQ ID NO: 2466359 - RNA, 19 nt, Homo sapiens
  misc_RNA (1)...(19): siRNA sense strand
gucagaaagaaaagacuua

SEQ ID NO: 2466360 - RNA, 19 nt, Homo sapiens
  misc_RNA (1)...(19): siRNA sense strand
ccgccaaagaggaaagaga

SEQ ID NO: 2466361 - RNA, 19 nt, Homo sapiens
  misc_RNA (1)...(19): siRNA sense strand
caggaauauguguuggaua

SEQ ID NO: 2466362 - RNA, 19 nt, Homo sapiens
  misc_RNA (1)...(19): siRNA sense strand
ucuacaugcugguggcaau

SEQ ID NO: 2466363 - RNA, 19 nt, Homo sapiens
  misc_RNA (1)...(19): siRNA sense strand
gagaaguaccagaaaggca

SEQ ID NO: 2466364 - RNA, 19 nt, Homo sapiens
  misc_RNA (1)...(19): siRNA sense strand
cagaaaacggagugggagu

SEQ ID NO: 2466365 - RNA, 19 nt, Homo sapiens
  misc_RNA (1)...(19): siRNA sense strand
agagaaugcaguucaccaa

SEQ ID NO: 2466366 - RNA, 19 nt, Homo sapiens
  misc_RNA (1)...(19): siRNA sense strand
aaucauuauucaugccaca

SEQ ID NO: 2466367 - RNA, 19 nt, Homo sapiens
  misc_RNA (1)...(19): siRNA sense strand
ucaccaaagcgaaacaaaa

SEQ ID NO: 2466368 - RNA, 19 nt, Homo sapiens
  misc_RNA (1)...(19): siRNA sense strand
agaaguaccagaaaggcau

SEQ ID NO: 2466369 - RNA, 19 nt, Homo sapiens
  misc_RNA (1)...(19): siRNA sense strand
cuuaauuacucucuggcuu

SEQ ID NO: 2466370 - RNA, 19 nt, Homo sapiens
  misc_RNA (1)...(19): siRNA sense strand
cggucgagaucuucuaaaa

SEQ ID NO: 2466371 - RNA, 19 nt, Homo sapiens
  misc_RNA (1)...(19): siRNA sense strand
gcacagagaaugaggagca

SEQ ID NO: 2466372 - RNA, 19 nt, Homo sapiens
  misc_RNA (1)...(19): siRNA sense strand
gaagaaaggaagacggacu

SEQ ID NO: 2466373 - RNA, 19 nt, Homo sapiens
  misc_RNA (1)...(19): siRNA sense strand
aggaagaguucgaccgcuu

SEQ ID NO: 2466374 - RNA, 19 nt, Homo sapiens
  misc_RNA (1)...(19): siRNA sense strand
aguccgagguggaggucau

SEQ ID NO: 2466375 - RNA, 19 nt, Homo sapiens
  misc_RNA (1)...(19): siRNA sense strand
aaucagagggagaggacga

SEQ ID NO: 2466376 - RNA, 19 nt, Homo sapiens
  misc_RNA (1)...(19): siRNA sense strand
agguggagaucgaggacca

SEQ ID NO: 2466377 - RNA, 19 nt, Homo sapiens
  misc_RNA (1)...(19): siRNA sense strand
aggaggagcugcugaggga

SEQ ID NO: 2466378 - RNA, 19 nt, Homo sapiens
  misc_RNA (1)...(19): siRNA sense strand
gcgcuagaagaaaggaaga

SEQ ID NO: 2466379 - RNA, 19 nt, Homo sapiens
  misc_RNA (1)...(19): siRNA sense strand
agacugacagccagggcaa

SEQ ID NO: 2466380 - RNA, 19 nt, Homo sapiens
  misc_RNA (1)...(19): siRNA sense strand
ccaggaauguccagccgua

SEQ ID NO: 2466381 - RNA, 19 nt, Homo sapiens
  misc_RNA (1)...(19): siRNA sense strand
agaacaaccagcacggcua

SEQ ID NO: 2466382 - RNA, 19 nt, Homo sapiens
  misc_RNA (1)...(19): siRNA sense strand
aguucguggccgagaagua

SEQ ID NO: 2466383 - RNA, 19 nt, Homo sapiens
  misc_RNA (1)...(19): siRNA sense strand
caggguacacugagcgcua

SEQ ID NO: 2466384 - RNA, 19 nt, Homo sapiens
  misc_RNA (1)...(19): siRNA sense strand
uggacgucccugagaacaa

SEQ ID NO: 2466385 - RNA, 19 nt, Homo sapiens
  misc_RNA (1)...(19): siRNA sense strand
uuuuaaaaucccagggcua

SEQ ID NO: 2466386 - RNA, 19 nt, Homo sapiens
  misc_RNA (1)...(19): siRNA sense strand
acugauccgagcagggaaa

SEQ ID NO: 2466387 - RNA, 19 nt, Homo sapiens
  misc_RNA (1)...(19): siRNA sense strand
gcaaauacgccugggccau

SEQ ID NO: 2466388 - RNA, 19 nt, Homo sapiens
  misc_RNA (1)...(19): siRNA sense strand
caggacaggcagcaagaau

SEQ ID NO: 2466389 - RNA, 19 nt, Homo sapiens
  misc_RNA (1)...(19): siRNA sense strand
acgccgugguugugauuga

SEQ ID NO: 2466390 - RNA, 19 nt, Homo sapiens
  misc_RNA (1)...(19): siRNA sense strand
gggaagguucagagggccu

SEQ ID NO: 2466391 - RNA, 19 nt, Homo sapiens
  misc_RNA (1)...(19): siRNA sense strand
ccaaugagcccaaccgcuu

SEQ ID NO: 2466392 - RNA, 19 nt, Homo sapiens
  misc_RNA (1)...(19): siRNA sense strand
gccucaagacgcugcgaau

SEQ ID NO: 2466393 - RNA, 19 nt, Homo sapiens
  misc_RNA (1)...(19): siRNA sense strand
ggcaaauacgccugggcca

SEQ ID NO: 2466394 - RNA, 19 nt, Homo sapiens
  misc_RNA (1)...(19): siRNA sense strand
guacaaagucaccgccguu

SEQ ID NO: 2466395 - RNA, 19 nt, Homo sapiens
  misc_RNA (1)...(19): siRNA sense strand
acuuccaguuugugcagaa

SEQ ID NO: 2466396 - RNA, 19 nt, Homo sapiens
  misc_RNA (1)...(19): siRNA sense strand
gugaaugggaagacggaaa

SEQ ID NO: 2466397 - RNA, 19 nt, Homo sapiens
  misc_RNA (1)...(19): siRNA sense strand
ggauauauuuauugccaga

SEQ ID NO: 2466398 - RNA, 19 nt, Homo sapiens
  misc_RNA (1)...(19): siRNA sense strand
uuagaggaccugugggaaa

SEQ ID NO: 2466399 - RNA, 19 nt, Homo sapiens
  misc_RNA (1)...(19): siRNA sense strand
cuaucuggaucgagggauu

SEQ ID NO: 2466400 - RNA, 19 nt, Homo sapiens
  misc_RNA (1)...(19): siRNA sense strand
gggagggaugagagguuua

SEQ ID NO: 2466401 - RNA, 19 nt, Homo sapiens
  misc_RNA (1)...(19): siRNA sense strand
agacagucaguuaggcaaa

SEQ ID NO: 2466402 - RNA, 19 nt, Homo sapiens
  misc_RNA (1)...(19): siRNA sense strand
ucauaauggaauugcagaa

SEQ ID NO: 2466403 - RNA, 19 nt, Homo sapiens
  misc_RNA (1)...(19): siRNA sense strand
guguuaagcuuauggccau

SEQ ID NO: 2466404 - RNA, 19 nt, Homo sapiens
  misc_RNA (1)...(19): siRNA sense strand
aguuaggcaaagagaacaa

SEQ ID NO: 2466405 - RNA, 19 nt, Homo sapiens
  misc_RNA (1)...(19): siRNA sense strand
ugggaaaaucugaguuuaa

SEQ ID NO: 2466406 - RNA, 19 nt, Homo sapiens
  misc_RNA (1)...(19): siRNA sense strand
gggaagacggaaauagcuu

SEQ ID NO: 2466407 - RNA, 19 nt, Homo sapiens
  misc_RNA (1)...(19): siRNA sense strand
aggcaaagagaacaaacua

SEQ ID NO: 2466408 - RNA, 19 nt, Homo sapiens
  misc_RNA (1)...(19): siRNA sense strand
caaccaaagaugagcuguu

SEQ ID NO: 2466409 - RNA, 19 nt, Homo sapiens
  misc_RNA (1)...(19): siRNA sense strand
agacuuagugaaagaacuu

SEQ ID NO: 2466410 - RNA, 19 nt, Homo sapiens
  misc_RNA (1)...(19): siRNA sense strand
agcaagaggcuguaccuaa

SEQ ID NO: 2466411 - RNA, 19 nt, Homo sapiens
  misc_RNA (1)...(19): siRNA sense strand
agacaucuuuauugagcau

SEQ ID NO: 2466412 - RNA, 19 nt, Homo sapiens
  misc_RNA (1)...(19): siRNA sense strand
ucuucaaacacaaguggaa

SEQ ID NO: 2466413 - RNA, 19 nt, Homo sapiens
  misc_RNA (1)...(19): siRNA sense strand
agaagaaacaauugggcgu

SEQ ID NO: 2466414 - RNA, 19 nt, Homo sapiens
  misc_RNA (1)...(19): siRNA sense strand
gaaagaaagugacaaccga

SEQ ID NO: 2466415 - RNA, 19 nt, Homo sapiens
  misc_RNA (1)...(19): siRNA sense strand
ugcuaggagucaagaguca

SEQ ID NO: 2466416 - RNA, 19 nt, Homo sapiens
  misc_RNA (1)...(19): siRNA sense strand
gagagugugucaagcgcuu

SEQ ID NO: 2466417 - RNA, 19 nt, Homo sapiens
  misc_RNA (1)...(19): siRNA sense strand
auacagaacggaagagauc

SEQ ID NO: 2466418 - RNA, 19 nt, Homo sapiens
  misc_RNA (1)...(19): siRNA sense strand
ccuaagaggcaguccacca

SEQ ID NO: 2466419 - RNA, 19 nt, Homo sapiens
  misc_RNA (1)...(19): siRNA sense strand
cagaauaccuuccagacca

SEQ ID NO: 2466420 - RNA, 19 nt, Homo sapiens
  misc_RNA (1)...(19): siRNA sense strand
uuacagaaagaaagugaca

SEQ ID NO: 2466421 - RNA, 19 nt, Homo sapiens
  misc_RNA (1)...(19): siRNA sense strand
acagaaagaaagugacaac

SEQ ID NO: 2466422 - RNA, 19 nt, Homo sapiens
  misc_RNA (1)...(19): siRNA sense strand
ggcaaagagaacaaacuau

SEQ ID NO: 2466423 - RNA, 19 nt, Homo sapiens
  misc_RNA (1)...(19): siRNA sense strand
agaauaccuuccagaccaa

SEQ ID NO: 2466424 - RNA, 19 nt, Homo sapiens
  misc_RNA (1)...(19): siRNA sense strand
aacacaaguggaagugaaa

SEQ ID NO: 2466425 - RNA, 19 nt, Homo sapiens
  misc_RNA (1)...(19): siRNA sense strand
guuuagaggaccuguggga

SEQ ID NO: 2466426 - RNA, 19 nt, Homo sapiens
  misc_RNA (1)...(19): siRNA sense strand
auauuacaguaguagggaa

SEQ ID NO: 2466427 - RNA, 19 nt, Homo sapiens
  misc_RNA (1)...(19): siRNA sense strand
ugaaguguggcaagaagaa

SEQ ID NO: 2466428 - RNA, 19 nt, Homo sapiens
  misc_RNA (1)...(19): siRNA sense strand
aacaauacagagaagacaa

SEQ ID NO: 2466429 - RNA, 19 nt, Homo sapiens
  misc_RNA (1)...(19): siRNA sense strand
aagaaagugacaaccgaau

SEQ ID NO: 2466430 - RNA, 19 nt, Homo sapiens
  misc_RNA (1)...(19): siRNA sense strand
gccaaaguggugagagugu

SEQ ID NO: 2466431 - RNA, 19 nt, Homo sapiens
  misc_RNA (1)...(19): siRNA sense strand
cuggcaggaauuuggcaua

SEQ ID NO: 2466432 - RNA, 19 nt, Homo sapiens
  misc_RNA (1)...(19): siRNA sense strand
guagauauuccucgagcca

SEQ ID NO: 2466433 - RNA, 19 nt, Homo sapiens
  misc_RNA (1)...(19): siRNA sense strand
cugggagggaugagagguu

SEQ ID NO: 2466434 - RNA, 19 nt, Homo sapiens
  misc_RNA (1)...(19): siRNA sense strand
ggcaaagaaagcagggaga

SEQ ID NO: 2466435 - RNA, 19 nt, Homo sapiens
  misc_RNA (1)...(19): siRNA sense strand
ccugauaacauguucgcaa

SEQ ID NO: 2466436 - RNA, 19 nt, Homo sapiens
  misc_RNA (1)...(19): siRNA sense strand
cccuaaggccggaggacuu

SEQ ID NO: 2466437 - RNA, 19 nt, Homo sapiens
  misc_RNA (1)...(19): siRNA sense strand
cuucuuuagcagaguggaa

SEQ ID NO: 2466438 - RNA, 19 nt, Homo sapiens
  misc_RNA (1)...(19): siRNA sense strand
cuuugaaaugggcagguaa

SEQ ID NO: 2466439 - RNA, 19 nt, Homo sapiens
  misc_RNA (1)...(19): siRNA sense strand
gcaaaauauggcuggguca

SEQ ID NO: 2466440 - RNA, 19 nt, Homo sapiens
  misc_RNA (1)...(19): siRNA sense strand
gcucagacauccaagucca

SEQ ID NO: 2466441 - RNA, 19 nt, Homo sapiens
  misc_RNA (1)...(19): siRNA sense strand
cauagagacuggugcccuu

SEQ ID NO: 2466442 - RNA, 19 nt, Homo sapiens
  misc_RNA (1)...(19): siRNA sense strand
cuuuugacuuugacagaua

SEQ ID NO: 2466443 - RNA, 19 nt, Homo sapiens
  misc_RNA (1)...(19): siRNA sense strand
accgaacugaugagagaaa

SEQ ID NO: 2466444 - RNA, 19 nt, Homo sapiens
  misc_RNA (1)...(19): siRNA sense strand
cagggagaaugguggaacu

SEQ ID NO: 2466445 - RNA, 19 nt, Homo sapiens
  misc_RNA (1)...(19): siRNA sense strand
ugugcuugacagaggacaa

SEQ ID NO: 2466446 - RNA, 19 nt, Homo sapiens
  misc_RNA (1)...(19): siRNA sense strand
auauuucggcagugggaau

SEQ ID NO: 2466447 - RNA, 19 nt, Homo sapiens
  misc_RNA (1)...(19): siRNA sense strand
ucugagagucuuagagaag

SEQ ID NO: 2466448 - RNA, 19 nt, Homo sapiens
  misc_RNA (1)...(19): siRNA sense strand
uggaaugugauaugcucaa

SEQ ID NO: 2466449 - RNA, 19 nt, Homo sapiens
  misc_RNA (1)...(19): siRNA sense strand
caucuagcccucugcggaa

SEQ ID NO: 2466450 - RNA, 19 nt, Homo sapiens
  misc_RNA (1)...(19): siRNA sense strand
agauguaacuguuuggaga

SEQ ID NO: 2466451 - RNA, 19 nt, Homo sapiens
  misc_RNA (1)...(19): siRNA sense strand
gggcuauaaagaagggcuu

SEQ ID NO: 2466452 - RNA, 19 nt, Homo sapiens
  misc_RNA (1)...(19): siRNA sense strand
ucuccuauacugugggcua

SEQ ID NO: 2466453 - RNA, 19 nt, Homo sapiens
  misc_RNA (1)...(19): siRNA sense strand
guagauacagccauggcaa

SEQ ID NO: 2466454 - RNA, 19 nt, Homo sapiens
  misc_RNA (1)...(19): siRNA sense strand
auguaacuguuuggagaaa

SEQ ID NO: 2466455 - RNA, 19 nt, Homo sapiens
  misc_RNA (1)...(19): siRNA sense strand
gggccuugucguuuggauu

SEQ ID NO: 2466456 - RNA, 19 nt, Homo sapiens
  misc_RNA (1)...(19): siRNA sense strand
cuauggugauuuacgaaaa

SEQ ID NO: 2466457 - RNA, 19 nt, Homo sapiens
  misc_RNA (1)...(19): siRNA sense strand
gaagaaagacagagggcug

SEQ ID NO: 2466458 - RNA, 19 nt, Homo sapiens
  misc_RNA (1)...(19): siRNA sense strand
gagacauggaagaaagaca

SEQ ID NO: 2466459 - RNA, 19 nt, Homo sapiens
  misc_RNA (1)...(19): siRNA sense strand
acaucaaaccccagauaaa

SEQ ID NO: 2466460 - RNA, 19 nt, Homo sapiens
  misc_RNA (1)...(19): siRNA sense strand
uugucaacgugaagcagaa

SEQ ID NO: 2466461 - RNA, 19 nt, Homo sapiens
  misc_RNA (1)...(19): siRNA sense strand
aguacaacagugacaacaa

SEQ ID NO: 2466462 - RNA, 19 nt, Homo sapiens
  misc_RNA (1)...(19): siRNA sense strand
ccaccaauggagagaaauc

SEQ ID NO: 2466463 - RNA, 19 nt, Homo sapiens
  misc_RNA (1)...(19): siRNA sense strand
cuucaguacaacagugaca

SEQ ID NO: 2466464 - RNA, 19 nt, Homo sapiens
  misc_RNA (1)...(19): siRNA sense strand
gccaguaagaucaaggaga

SEQ ID NO: 2466465 - RNA, 19 nt, Homo sapiens
  misc_RNA (1)...(19): siRNA sense strand
gaucaugguugguggucac

SEQ ID NO: 2466466 - RNA, 19 nt, Homo sapiens
  misc_RNA (1)...(19): siRNA sense strand
ggugugaagcgcaggucuu

SEQ ID NO: 2466467 - RNA, 19 nt, Homo sapiens
  misc_RNA (1)...(19): siRNA sense strand
ccaguaagaucaaggagac

SEQ ID NO: 2466468 - RNA, 19 nt, Homo sapiens
  misc_RNA (1)...(19): siRNA sense strand
caguaagaucaaggagaca

SEQ ID NO: 2466469 - RNA, 19 nt, Homo sapiens
  misc_RNA (1)...(19): siRNA sense strand
uggaaaagaaggaggaaga

SEQ ID NO: 2466470 - RNA, 19 nt, Homo sapiens
  misc_RNA (1)...(19): siRNA sense strand
aagaagaaccggagggaag

SEQ ID NO: 2466471 - RNA, 19 nt, Homo sapiens
  misc_RNA (1)...(19): siRNA sense strand
aaccaguaauggagagaca

SEQ ID NO: 2466472 - RNA, 19 nt, Homo sapiens
  misc_RNA (1)...(19): siRNA sense strand
gggugaaguccacaggcaa

SEQ ID NO: 2466473 - RNA, 19 nt, Homo sapiens
  misc_RNA (1)...(19): siRNA sense strand
ucgaagacaugauugggua

SEQ ID NO: 2466474 - RNA, 19 nt, Homo sapiens
  misc_RNA (1)...(19): siRNA sense strand
ccucuuuaccuguggcauu

SEQ ID NO: 2466475 - RNA, 19 nt, Homo sapiens
  misc_RNA (1)...(19): siRNA sense strand
acgacaacaucgaagacau

SEQ ID NO: 2466476 - RNA, 19 nt, Homo sapiens
  misc_RNA (1)...(19): siRNA sense strand
gaucauuggcuuaggcaac

SEQ ID NO: 2466477 - RNA, 19 nt, Homo sapiens
  misc_RNA (1)...(19): siRNA sense strand
acgaagacacagagggcuu

SEQ ID NO: 2466478 - RNA, 19 nt, Homo sapiens
  misc_RNA (1)...(19): siRNA sense strand
cggcagacucagacgaaga

SEQ ID NO: 2466479 - RNA, 19 nt, Homo sapiens
  misc_RNA (1)...(19): siRNA sense strand
cggcaaacggagaacguca

SEQ ID NO: 2466480 - RNA, 19 nt, Homo sapiens
  misc_RNA (1)...(19): siRNA sense strand
gggacagcucgaagagaga

SEQ ID NO: 2466481 - RNA, 19 nt, Homo sapiens
  misc_RNA (1)...(19): siRNA sense strand
agacugagaaagaagccaa

SEQ ID NO: 2466482 - RNA, 19 nt, Homo sapiens
  misc_RNA (1)...(19): siRNA sense strand
ccugaaggacagagagauc

SEQ ID NO: 2466483 - RNA, 19 nt, Homo sapiens
  misc_RNA (1)...(19): siRNA sense strand
gagacaaccuggagacccu

SEQ ID NO: 2466484 - RNA, 19 nt, Homo sapiens
  misc_RNA (1)...(19): siRNA sense strand
cgaaagaggcauccggucu

SEQ ID NO: 2466485 - RNA, 19 nt, Homo sapiens
  misc_RNA (1)...(19): siRNA sense strand
ucugagggccugugcgaau

SEQ ID NO: 2466486 - RNA, 19 nt, Homo sapiens
  misc_RNA (1)...(19): siRNA sense strand
gcucgaagagagagggccu

SEQ ID NO: 2466487 - RNA, 19 nt, Homo sapiens
  misc_RNA (1)...(19): siRNA sense strand
acucagacgaagacacaga

SEQ ID NO: 2466488 - RNA, 19 nt, Homo sapiens
  misc_RNA (1)...(19): siRNA sense strand
acacagagggcuuuggagu

SEQ ID NO: 2466489 - RNA, 19 nt, Homo sapiens
  misc_RNA (1)...(19): siRNA sense strand
acuugagguuccugcgaga

SEQ ID NO: 2466490 - RNA, 19 nt, Homo sapiens
  misc_RNA (1)...(19): siRNA sense strand
gugaauuugagcaucgcaa

SEQ ID NO: 2466491 - RNA, 19 nt, Homo sapiens
  misc_RNA (1)...(19): siRNA sense strand
ucuggaagcuggugcggca

SEQ ID NO: 2466492 - RNA, 19 nt, Homo sapiens
  misc_RNA (1)...(19): siRNA sense strand
ugaagaagaaguagggaga

SEQ ID NO: 2466493 - RNA, 19 nt, Homo sapiens
  misc_RNA (1)...(19): siRNA sense strand
agacagguugacagauaaa

SEQ ID NO: 2466494 - RNA, 19 nt, Homo sapiens
  misc_RNA (1)...(19): siRNA sense strand
uguagagaaacgaggucaa

SEQ ID NO: 2466495 - RNA, 19 nt, Homo sapiens
  misc_RNA (1)...(19): siRNA sense strand
gggauuacgauuagggaug

SEQ ID NO: 2466496 - RNA, 19 nt, Homo sapiens
  misc_RNA (1)...(19): siRNA sense strand
aagaagaaguagggagacu

SEQ ID NO: 2466497 - RNA, 19 nt, Homo sapiens
  misc_RNA (1)...(19): siRNA sense strand
ucucauacaucaugcccua

SEQ ID NO: 2466498 - RNA, 19 nt, Homo sapiens
  misc_RNA (1)...(19): siRNA sense strand
ggcaaaacgcccagcaauu

SEQ ID NO: 2466499 - RNA, 19 nt, Homo sapiens
  misc_RNA (1)...(19): siRNA sense strand
agaugauaagucagcuaaa

SEQ ID NO: 2466500 - RNA, 19 nt, Homo sapiens
  misc_RNA (1)...(19): siRNA sense strand
acacagaaagacuggaagu

SEQ ID NO: 2466501 - RNA, 19 nt, Homo sapiens
  misc_RNA (1)...(19): siRNA sense strand
aaagaugauaagucagcua

SEQ ID NO: 2466502 - RNA, 19 nt, Homo sapiens
  misc_RNA (1)...(19): siRNA sense strand
uggaauugguuuuaaguga

SEQ ID NO: 2466503 - RNA, 19 nt, Homo sapiens
  misc_RNA (1)...(19): siRNA sense strand
cgauuagggaugugguacu

SEQ ID NO: 2466504 - RNA, 19 nt, Homo sapiens
  misc_RNA (1)...(19): siRNA sense strand
auacugagaugcagcggau

SEQ ID NO: 2466505 - RNA, 19 nt, Homo sapiens
  misc_RNA (1)...(19): siRNA sense strand
gauaauuuccucauggcau

SEQ ID NO: 2466506 - RNA, 19 nt, Homo sapiens
  misc_RNA (1)...(19): siRNA sense strand
gaaagaaaggcaaagcagu

SEQ ID NO: 2466507 - RNA, 19 nt, Homo sapiens
  misc_RNA (1)...(19): siRNA sense strand
ucgcaggaggcgugaagau

SEQ ID NO: 2466508 - RNA, 19 nt, Homo sapiens
  misc_RNA (1)...(19): siRNA sense strand
aaaaggaaagaaaggcaaa

SEQ ID NO: 2466509 - RNA, 19 nt, Homo sapiens
  misc_RNA (1)...(19): siRNA sense strand
cuucagacagguugacaga

SEQ ID NO: 2466510 - RNA, 19 nt, Homo sapiens
  misc_RNA (1)...(19): siRNA sense strand
agaugaaaccagaacucuu

SEQ ID NO: 2466511 - RNA, 19 nt, Homo sapiens
  misc_RNA (1)...(19): siRNA sense strand
gugcuguggaaaggagaaa

SEQ ID NO: 2466512 - RNA, 19 nt, Homo sapiens
  misc_RNA (1)...(19): siRNA sense strand
ucuugaauucagaagguuu

SEQ ID NO: 2466513 - RNA, 19 nt, Homo sapiens
  misc_RNA (1)...(19): siRNA sense strand
ggaaagaaaggcaaagcag

SEQ ID NO: 2466514 - RNA, 19 nt, Homo sapiens
  misc_RNA (1)...(19): siRNA sense strand
cuugacagagauugaagaa

SEQ ID NO: 2466515 - RNA, 19 nt, Homo sapiens
  misc_RNA (1)...(19): siRNA sense strand
ugaggaaucaggaggggaa

SEQ ID NO: 2466516 - RNA, 19 nt, Homo sapiens
  misc_RNA (1)...(19): siRNA sense strand
gcagcaugcaacagggcaa

SEQ ID NO: 2466517 - RNA, 19 nt, Homo sapiens
  misc_RNA (1)...(19): siRNA sense strand
ccagaaagcuccagccaca

SEQ ID NO: 2466518 - RNA, 19 nt, Homo sapiens
  misc_RNA (1)...(19): siRNA sense strand
aggaggaggaggaggaaga

SEQ ID NO: 2466519 - RNA, 19 nt, Homo sapiens
  misc_RNA (1)...(19): siRNA sense strand
ggaagaugauagagacgga

SEQ ID NO: 2466520 - RNA, 19 nt, Homo sapiens
  misc_RNA (1)...(19): siRNA sense strand
gugaggaggaggaggagga

SEQ ID NO: 2466521 - RNA, 19 nt, Homo sapiens
  misc_RNA (1)...(19): siRNA sense strand
uguucaucuuccagcgaaa

SEQ ID NO: 2466522 - RNA, 19 nt, Homo sapiens
  misc_RNA (1)...(19): siRNA sense strand
gcaugaggcuuaacgcaga

SEQ ID NO: 2466523 - RNA, 19 nt, Homo sapiens
  misc_RNA (1)...(19): siRNA sense strand
agacacagcuggaucacga

SEQ ID NO: 2466524 - RNA, 19 nt, Homo sapiens
  misc_RNA (1)...(19): siRNA sense strand
aggaggaggaggaagagau

SEQ ID NO: 2466525 - RNA, 19 nt, Homo sapiens
  misc_RNA (1)...(19): siRNA sense strand
gggugcagacagaacacaa

SEQ ID NO: 2466526 - RNA, 19 nt, Homo sapiens
  misc_RNA (1)...(19): siRNA sense strand
caagaagacaaccagggaa

SEQ ID NO: 2466527 - RNA, 19 nt, Homo sapiens
  misc_RNA (1)...(19): siRNA sense strand
aaggagacccaaaggcaga

SEQ ID NO: 2466528 - RNA, 19 nt, Homo sapiens
  misc_RNA (1)...(19): siRNA sense strand
acagugaggaggaggagga

SEQ ID NO: 2466529 - RNA, 19 nt, Homo sapiens
  misc_RNA (1)...(19): siRNA sense strand
uggcgggacaagaagacaa

SEQ ID NO: 2466530 - RNA, 19 nt, Homo sapiens
  misc_RNA (1)...(19): siRNA sense strand
cagacagaacacaaggaca

SEQ ID NO: 2466531 - RNA, 19 nt, Homo sapiens
  misc_RNA (1)...(19): siRNA sense strand
cagacagaaaugagaggaa

SEQ ID NO: 2466532 - RNA, 19 nt, Homo sapiens
  misc_RNA (1)...(19): siRNA sense strand
agacagaauuacaugggau

SEQ ID NO: 2466533 - RNA, 19 nt, Homo sapiens
  misc_RNA (1)...(19): siRNA sense strand
agguuauaaucgagauaca

SEQ ID NO: 2466534 - RNA, 19 nt, Homo sapiens
  misc_RNA (1)...(19): siRNA sense strand
gacagaaaugagaggaaaa

SEQ ID NO: 2466535 - RNA, 19 nt, Homo sapiens
  misc_RNA (1)...(19): siRNA sense strand
aguaaggcuucuagaaaau

SEQ ID NO: 2466536 - RNA, 19 nt, Homo sapiens
  misc_RNA (1)...(19): siRNA sense strand
uaguguacaucaagcgcua

SEQ ID NO: 2466537 - RNA, 19 nt, Homo sapiens
  misc_RNA (1)...(19): siRNA sense strand
acgaaggaaauaugaacau

SEQ ID NO: 2466538 - RNA, 19 nt, Homo sapiens
  misc_RNA (1)...(19): siRNA sense strand
caggcuggaaagugguuaa

SEQ ID NO: 2466539 - RNA, 19 nt, Homo sapiens
  misc_RNA (1)...(19): siRNA sense strand
guucuaaaaguguggauuu

SEQ ID NO: 2466540 - RNA, 19 nt, Homo sapiens
  misc_RNA (1)...(19): siRNA sense strand
cuuccaacuuaguaaacuu

SEQ ID NO: 2466541 - RNA, 19 nt, Homo sapiens
  misc_RNA (1)...(19): siRNA sense strand
ucgacuuaguguacaucaa

SEQ ID NO: 2466542 - RNA, 19 nt, Homo sapiens
  misc_RNA (1)...(19): siRNA sense strand
aagauggaauaaaggcaca

SEQ ID NO: 2466543 - RNA, 19 nt, Homo sapiens
  misc_RNA (1)...(19): siRNA sense strand
auaauaugguacacaggau

SEQ ID NO: 2466544 - RNA, 19 nt, Homo sapiens
  misc_RNA (1)...(19): siRNA sense strand
acuucauccucaaugcaaa

SEQ ID NO: 2466545 - RNA, 19 nt, Homo sapiens
  misc_RNA (1)...(19): siRNA sense strand
caaugcaaaagauggaaua

SEQ ID NO: 2466546 - RNA, 19 nt, Homo sapiens
  misc_RNA (1)...(19): siRNA sense strand
ccugaagacaccagagaga

SEQ ID NO: 2466547 - RNA, 19 nt, Homo sapiens
  misc_RNA (1)...(19): siRNA sense strand
augcaacagaacagugaaa

SEQ ID NO: 2466548 - RNA, 19 nt, Homo sapiens
  misc_RNA (1)...(19): siRNA sense strand
aaguagaagcuuuguguca

SEQ ID NO: 2466549 - RNA, 19 nt, Homo sapiens
  misc_RNA (1)...(19): siRNA sense strand
gagaaggacugcaaaccca

SEQ ID NO: 2466550 - RNA, 19 nt, Homo sapiens
  misc_RNA (1)...(19): siRNA sense strand
agucagaaugaaucccaaa

SEQ ID NO: 2466551 - RNA, 19 nt, Homo sapiens
  misc_RNA (1)...(19): siRNA sense strand
ccagcaaaacaaagaaaca

SEQ ID NO: 2466552 - RNA, 19 nt, Homo sapiens
  misc_RNA (1)...(19): siRNA sense strand
uagacgaguuggagcggaa

SEQ ID NO: 2466553 - RNA, 19 nt, Homo sapiens
  misc_RNA (1)...(19): siRNA sense strand
gcaucaaggagguggagca

SEQ ID NO: 2466554 - RNA, 19 nt, Homo sapiens
  misc_RNA (1)...(19): siRNA sense strand
ggagaagagaagaugcaga

SEQ ID NO: 2466555 - RNA, 19 nt, Homo sapiens
  misc_RNA (1)...(19): siRNA sense strand
ugaaagugauggcgagcga

SEQ ID NO: 2466556 - RNA, 19 nt, Homo sapiens
  misc_RNA (1)...(19): siRNA sense strand
ggaacaacaucccuggaga

SEQ ID NO: 2466557 - RNA, 19 nt, Homo sapiens
  misc_RNA (1)...(19): siRNA sense strand
ugaucaaggccaagagcca

SEQ ID NO: 2466558 - RNA, 19 nt, Homo sapiens
  misc_RNA (1)...(19): siRNA sense strand
cugaggaggagcugaucaa

SEQ ID NO: 2466559 - RNA, 19 nt, Homo sapiens
  misc_RNA (1)...(19): siRNA sense strand
cugcaugcucagcgaggaa

SEQ ID NO: 2466560 - RNA, 19 nt, Homo sapiens
  misc_RNA (1)...(19): siRNA sense strand
gaggagaaguccaagcagu

SEQ ID NO: 2466561 - RNA, 19 nt, Homo sapiens
  misc_RNA (1)...(19): siRNA sense strand
aggagaaguccaagcaguu

SEQ ID NO: 2466562 - RNA, 19 nt, Homo sapiens
  misc_RNA (1)...(19): siRNA sense strand
gugagaaggccaugcagga

SEQ ID NO: 2466563 - RNA, 19 nt, Homo sapiens
  misc_RNA (1)...(19): siRNA sense strand
gaggagagugagaaggcca

SEQ ID NO: 2466564 - RNA, 19 nt, Homo sapiens
  misc_RNA (1)...(19): siRNA sense strand
agaagcaggugguggccga

SEQ ID NO: 2466565 - RNA, 19 nt, Homo sapiens
  misc_RNA (1)...(19): siRNA sense strand
cuggacagggagagcgaga

SEQ ID NO: 2466566 - RNA, 19 nt, Homo sapiens
  misc_RNA (1)...(19): siRNA sense strand
aggcugaggaggagcugau

SEQ ID NO: 2466567 - RNA, 19 nt, Homo sapiens
  misc_RNA (1)...(19): siRNA sense strand
uggcaagagaggugaagaa

SEQ ID NO: 2466568 - RNA, 19 nt, Homo sapiens
  misc_RNA (1)...(19): siRNA sense strand
gagaagacacucauauuaa

SEQ ID NO: 2466569 - RNA, 19 nt, Homo sapiens
  misc_RNA (1)...(19): siRNA sense strand
cgaaaaguacuguguguua

SEQ ID NO: 2466570 - RNA, 19 nt, Homo sapiens
  misc_RNA (1)...(19): siRNA sense strand
acgcacaauuucugccaaa

SEQ ID NO: 2466571 - RNA, 19 nt, Homo sapiens
  misc_RNA (1)...(19): siRNA sense strand
gaggauagacuacgcacaa

SEQ ID NO: 2466572 - RNA, 19 nt, Homo sapiens
  misc_RNA (1)...(19): siRNA sense strand
acgagguagcuuugggcaa

SEQ ID NO: 2466573 - RNA, 19 nt, Homo sapiens
  misc_RNA (1)...(19): siRNA sense strand
guggauaaaaucacagaaa

SEQ ID NO: 2466574 - RNA, 19 nt, Homo sapiens
  misc_RNA (1)...(19): siRNA sense strand
ggauagacuacgcacaauu

SEQ ID NO: 2466575 - RNA, 19 nt, Homo sapiens
  misc_RNA (1)...(19): siRNA sense strand
uggcagcaucugugaggaa

SEQ ID NO: 2466576 - RNA, 19 nt, Homo sapiens
  misc_RNA (1)...(19): siRNA sense strand
ugaagaaaguggaugugca

SEQ ID NO: 2466577 - RNA, 19 nt, Homo sapiens
  misc_RNA (1)...(19): siRNA sense strand
aagcauauggcaauggcua

SEQ ID NO: 2466578 - RNA, 19 nt, Homo sapiens
  misc_RNA (1)...(19): siRNA sense strand
cgagguagcuuugggcaau

SEQ ID NO: 2466579 - RNA, 19 nt, Homo sapiens
  misc_RNA (1)...(19): siRNA sense strand
agagaagacacucauauua

SEQ ID NO: 2466580 - RNA, 19 nt, Homo sapiens
  misc_RNA (1)...(19): siRNA sense strand
aggugaagaaaguggaugu

SEQ ID NO: 2466581 - RNA, 19 nt, Homo sapiens
  misc_RNA (1)...(19): siRNA sense strand
cugucaaguaguaagaaga

SEQ ID NO: 2466582 - RNA, 19 nt, Homo sapiens
  misc_RNA (1)...(19): siRNA sense strand
ucuaugagcagcagaggau

SEQ ID NO: 2466583 - RNA, 19 nt, Homo sapiens
  misc_RNA (1)...(19): siRNA sense strand
ggaugccagcaaagagaau

SEQ ID NO: 2466584 - RNA, 19 nt, Homo sapiens
  misc_RNA (1)...(19): siRNA sense strand
agcaugaagcauauggcaa

SEQ ID NO: 2466585 - RNA, 19 nt, Homo sapiens
  misc_RNA (1)...(19): siRNA sense strand
ccuaauagcugcccacgga

SEQ ID NO: 2466586 - RNA, 19 nt, Homo sapiens
  misc_RNA (1)...(19): siRNA sense strand
ugaccaaagagaagacacu

SEQ ID NO: 2466587 - RNA, 19 nt, Homo sapiens
  misc_RNA (1)...(19): siRNA sense strand
gcagcaucugugaggaaca

SEQ ID NO: 2466588 - RNA, 19 nt, Homo sapiens
  misc_RNA (1)...(19): siRNA sense strand
gggcugagcagaucuguga

SEQ ID NO: 2466589 - RNA, 19 nt, Homo sapiens
  misc_RNA (1)...(19): siRNA sense strand
cugaugaaauugacaccga

SEQ ID NO: 2466590 - RNA, 19 nt, Homo sapiens
  misc_RNA (1)...(19): siRNA sense strand
guguaagcaaugugggaaa

SEQ ID NO: 2466591 - RNA, 19 nt, Homo sapiens
  misc_RNA (1)...(19): siRNA sense strand
auguaaggaaugugggaaa

SEQ ID NO: 2466592 - RNA, 19 nt, Homo sapiens
  misc_RNA (1)...(19): siRNA sense strand
auguaaggaaugugggaaa

SEQ ID NO: 2466593 - RNA, 19 nt, Homo sapiens
  misc_RNA (1)...(19): siRNA sense strand
auguaagauaugugggaaa

SEQ ID NO: 2466594 - RNA, 19 nt, Homo sapiens
  misc_RNA (1)...(19): siRNA sense strand
ccguaugaauguaaggaau

SEQ ID NO: 2466595 - RNA, 19 nt, Homo sapiens
  misc_RNA (1)...(19): siRNA sense strand
aauucacaguggagagaaa

SEQ ID NO: 2466596 - RNA, 19 nt, Homo sapiens
  misc_RNA (1)...(19): siRNA sense strand
gacacacaauggagagaaa

SEQ ID NO: 2466597 - RNA, 19 nt, Homo sapiens
  misc_RNA (1)...(19): siRNA sense strand
uggagaaagacguuauaaa

SEQ ID NO: 2466598 - RNA, 19 nt, Homo sapiens
  misc_RNA (1)...(19): siRNA sense strand
auguaaacagugugguaaa

SEQ ID NO: 2466599 - RNA, 19 nt, Homo sapiens
  misc_RNA (1)...(19): siRNA sense strand
aagaauacacucuggagaa

SEQ ID NO: 2466600 - RNA, 19 nt, Homo sapiens
  misc_RNA (1)...(19): siRNA sense strand
gaacaucagaggugacauu

SEQ ID NO: 2466601 - RNA, 19 nt, Homo sapiens
  misc_RNA (1)...(19): siRNA sense strand
uugaauacgugguaggaca

SEQ ID NO: 2466602 - RNA, 19 nt, Homo sapiens
  misc_RNA (1)...(19): siRNA sense strand
auguaagcagugugggaaa

SEQ ID NO: 2466603 - RNA, 19 nt, Homo sapiens
  misc_RNA (1)...(19): siRNA sense strand
gggaagugaugcuggaaac

SEQ ID NO: 2466604 - RNA, 19 nt, Homo sapiens
  misc_RNA (1)...(19): siRNA sense strand
agucaugaaaggacacaaa

SEQ ID NO: 2466605 - RNA, 19 nt, Homo sapiens
  misc_RNA (1)...(19): siRNA sense strand
gguggaaagaccagaacau

SEQ ID NO: 2466606 - RNA, 19 nt, Homo sapiens
  misc_RNA (1)...(19): siRNA sense strand
auguaaguuuugugggaaa

SEQ ID NO: 2466607 - RNA, 19 nt, Homo sapiens
  misc_RNA (1)...(19): siRNA sense strand
ucguagacaugaaaggauu

SEQ ID NO: 2466608 - RNA, 19 nt, Homo sapiens
  misc_RNA (1)...(19): siRNA sense strand
aaauguaagcaguguggua

SEQ ID NO: 2466609 - RNA, 19 nt, Homo sapiens
  misc_RNA (1)...(19): siRNA sense strand
auaucaggagugugggaaa

SEQ ID NO: 2466610 - RNA, 19 nt, Homo sapiens
  misc_RNA (1)...(19): siRNA sense strand
gacugaacuuccaggagaa

SEQ ID NO: 2466611 - RNA, 19 nt, Homo sapiens
  misc_RNA (1)...(19): siRNA sense strand
gagaaguuggccuagguaa

SEQ ID NO: 2466612 - RNA, 19 nt, Homo sapiens
  misc_RNA (1)...(19): siRNA sense strand
auguaaggaauguggaaaa

SEQ ID NO: 2466613 - RNA, 19 nt, Homo sapiens
  misc_RNA (1)...(19): siRNA sense strand
agaccagaacauugaauau

SEQ ID NO: 2466614 - RNA, 19 nt, Homo sapiens
  misc_RNA (1)...(19): siRNA sense strand
gggaaagccuucagagcug

SEQ ID NO: 2466615 - RNA, 19 nt, Homo sapiens
  misc_RNA (1)...(19): siRNA sense strand
aacucacacuggagagaaa

SEQ ID NO: 2466616 - RNA, 19 nt, Homo sapiens
  misc_RNA (1)...(19): siRNA sense strand
gaauguaagcaguguggga

SEQ ID NO: 2466617 - RNA, 19 nt, Homo sapiens
  misc_RNA (1)...(19): siRNA sense strand
augcgagcaaugugggaaa

SEQ ID NO: 2466618 - RNA, 19 nt, Homo sapiens
  misc_RNA (1)...(19): siRNA sense strand
caccaaaaccccaggagaa

SEQ ID NO: 2466619 - RNA, 19 nt, Homo sapiens
  misc_RNA (1)...(19): siRNA sense strand
acauuggacacaaggcaua

SEQ ID NO: 2466620 - RNA, 19 nt, Homo sapiens
  misc_RNA (1)...(19): siRNA sense strand
caauguaaggaauguggaa

SEQ ID NO: 2466621 - RNA, 19 nt, Homo sapiens
  misc_RNA (1)...(19): siRNA sense strand
auguaagcagugugguaaa

SEQ ID NO: 2466622 - RNA, 19 nt, Homo sapiens
  misc_RNA (1)...(19): siRNA sense strand
gugugagcaaugacggaaa

SEQ ID NO: 2466623 - RNA, 19 nt, Homo sapiens
  misc_RNA (1)...(19): siRNA sense strand
caggagucucauagaagaa

SEQ ID NO: 2466624 - RNA, 19 nt, Homo sapiens
  misc_RNA (1)...(19): siRNA sense strand
agacugaacuuccaggaga

SEQ ID NO: 2466625 - RNA, 19 nt, Homo sapiens
  misc_RNA (1)...(19): siRNA sense strand
auucaugaaaggacacaaa

SEQ ID NO: 2466626 - RNA, 19 nt, Homo sapiens
  misc_RNA (1)...(19): siRNA sense strand
ucaaagucaugaaaggaca

SEQ ID NO: 2466627 - RNA, 19 nt, Homo sapiens
  misc_RNA (1)...(19): siRNA sense strand
gacucacccugaagagaaa

SEQ ID NO: 2466628 - RNA, 19 nt, Homo sapiens
  misc_RNA (1)...(19): siRNA sense strand
ggaauauggaccaaagcca

SEQ ID NO: 2466629 - RNA, 19 nt, Homo sapiens
  misc_RNA (1)...(19): siRNA sense strand
cccaaugcuuguaaaguau

SEQ ID NO: 2466630 - RNA, 19 nt, Homo sapiens
  misc_RNA (1)...(19): siRNA sense strand
ucgaauucaugaaaggaca

SEQ ID NO: 2466631 - RNA, 19 nt, Homo sapiens
  misc_RNA (1)...(19): siRNA sense strand
gcuuguaaaguauguggaa

SEQ ID NO: 2466632 - RNA, 19 nt, Homo sapiens
  misc_RNA (1)...(19): siRNA sense strand
gaggaaacucuacagggaa

SEQ ID NO: 2466633 - RNA, 19 nt, Homo sapiens
  misc_RNA (1)...(19): siRNA sense strand
cccuaugaguguaagcaau

SEQ ID NO: 2466634 - RNA, 19 nt, Homo sapiens
  misc_RNA (1)...(19): siRNA sense strand
guguggagaaguuggccua

SEQ ID NO: 2466635 - RNA, 19 nt, Homo sapiens
  misc_RNA (1)...(19): siRNA sense strand
cuuguaaaguauguggaaa

SEQ ID NO: 2466636 - RNA, 19 nt, Homo sapiens
  misc_RNA (1)...(19): siRNA sense strand
aggagaaacuucaggaguc

SEQ ID NO: 2466637 - RNA, 19 nt, Homo sapiens
  misc_RNA (1)...(19): siRNA sense strand
cagucauuguggagaaacu

SEQ ID NO: 2466638 - RNA, 19 nt, Homo sapiens
  misc_RNA (1)...(19): siRNA sense strand
aggauguggcugugaacuu

SEQ ID NO: 2466639 - RNA, 19 nt, Homo sapiens
  misc_RNA (1)...(19): siRNA sense strand
agggaagugaugcuggaaa

SEQ ID NO: 2466640 - RNA, 19 nt, Homo sapiens
  misc_RNA (1)...(19): siRNA sense strand
cccuaugcauguaaggaau

SEQ ID NO: 2466641 - RNA, 19 nt, Homo sapiens
  misc_RNA (1)...(19): siRNA sense strand
agauugcacucuggagaaa

SEQ ID NO: 2466642 - RNA, 19 nt, Homo sapiens
  misc_RNA (1)...(19): siRNA sense strand
gagcaaugacggaaagccu

SEQ ID NO: 2466643 - RNA, 19 nt, Homo sapiens
  misc_RNA (1)...(19): siRNA sense strand
uggaagaggcugauggcaa

SEQ ID NO: 2466644 - RNA, 19 nt, Homo sapiens
  misc_RNA (1)...(19): siRNA sense strand
acguaaggguggagggcuu

SEQ ID NO: 2466645 - RNA, 19 nt, Homo sapiens
  misc_RNA (1)...(19): siRNA sense strand
uggcaaaggcugagaugau

SEQ ID NO: 2466646 - RNA, 19 nt, Homo sapiens
  misc_RNA (1)...(19): siRNA sense strand
cggacaggugcaagaaaua

SEQ ID NO: 2466647 - RNA, 19 nt, Homo sapiens
  misc_RNA (1)...(19): siRNA sense strand
gagaaauucaauggagaaa

SEQ ID NO: 2466648 - RNA, 19 nt, Homo sapiens
  misc_RNA (1)...(19): siRNA sense strand
gggacugggagaagaagaa

SEQ ID NO: 2466649 - RNA, 19 nt, Homo sapiens
  misc_RNA (1)...(19): siRNA sense strand
ucaagaagcuguuggagga

SEQ ID NO: 2466650 - RNA, 19 nt, Homo sapiens
  misc_RNA (1)...(19): siRNA sense strand
gggccuauuuccugagaca

SEQ ID NO: 2466651 - RNA, 19 nt, Homo sapiens
  misc_RNA (1)...(19): siRNA sense strand
ggugcaagaaauagauaau

SEQ ID NO: 2466652 - RNA, 19 nt, Homo sapiens
  misc_RNA (1)...(19): siRNA sense strand
uggagaaauucaauggaga

SEQ ID NO: 2466653 - RNA, 19 nt, Homo sapiens
  misc_RNA (1)...(19): siRNA sense strand
cuggagaauuacauggauu

SEQ ID NO: 2466654 - RNA, 19 nt, Homo sapiens
  misc_RNA (1)...(19): siRNA sense strand
uggaggaagugaaagaaaa

SEQ ID NO: 2466655 - RNA, 19 nt, Homo sapiens
  misc_RNA (1)...(19): siRNA sense strand
cugucaggcauuagagaau

SEQ ID NO: 2466656 - RNA, 19 nt, Homo sapiens
  misc_RNA (1)...(19): siRNA sense strand
uguuggaggaagugaaaga

SEQ ID NO: 2466657 - RNA, 19 nt, Homo sapiens
  misc_RNA (1)...(19): siRNA sense strand
guaagauggcaaaggcuga

SEQ ID NO: 2466658 - RNA, 19 nt, Homo sapiens
  misc_RNA (1)...(19): siRNA sense strand
gcuaacgagaagagagcca

SEQ ID NO: 2466659 - RNA, 19 nt, Homo sapiens
  misc_RNA (1)...(19): siRNA sense strand
agaagagagccaaggaguu

SEQ ID NO: 2466660 - RNA, 19 nt, Homo sapiens
  misc_RNA (1)...(19): siRNA sense strand
acggacaggugcaagaaau

SEQ ID NO: 2466661 - RNA, 19 nt, Homo sapiens
  misc_RNA (1)...(19): siRNA sense strand
ggaagaggcugauggcaag

SEQ ID NO: 2466662 - RNA, 19 nt, Homo sapiens
  misc_RNA (1)...(19): siRNA sense strand
gaauuguguaagauggcaa

SEQ ID NO: 2466663 - RNA, 19 nt, Homo sapiens
  misc_RNA (1)...(19): siRNA sense strand
gagaagagagccaaggagu

SEQ ID NO: 2466664 - RNA, 19 nt, Homo sapiens
  misc_RNA (1)...(19): siRNA sense strand
gugccauguugcuguacaa

SEQ ID NO: 2466665 - RNA, 19 nt, Homo sapiens
  misc_RNA (1)...(19): siRNA sense strand
cugaauugcaggaugacau

SEQ ID NO: 2466666 - RNA, 19 nt, Homo sapiens
  misc_RNA (1)...(19): siRNA sense strand
cggacaucaaacaggaauu

SEQ ID NO: 2466667 - RNA, 19 nt, Homo sapiens
  misc_RNA (1)...(19): siRNA sense strand
cugucuugguugucagcaa

SEQ ID NO: 2466668 - RNA, 19 nt, Homo sapiens
  misc_RNA (1)...(19): siRNA sense strand
aggcauuagagaauccaaa

SEQ ID NO: 2466669 - RNA, 19 nt, Homo sapiens
  misc_RNA (1)...(19): siRNA sense strand
aggcugagaugauggagga

SEQ ID NO: 2466670 - RNA, 19 nt, Homo sapiens
  misc_RNA (1)...(19): siRNA sense strand
ugggagaugcagaagaaga

SEQ ID NO: 2466671 - RNA, 19 nt, Homo sapiens
  misc_RNA (1)...(19): siRNA sense strand
uggagaauuacauggauuu

SEQ ID NO: 2466672 - RNA, 19 nt, Homo sapiens
  misc_RNA (1)...(19): siRNA sense strand
gcuguuggaggaagugaaa

SEQ ID NO: 2466673 - RNA, 19 nt, Homo sapiens
  misc_RNA (1)...(19): siRNA sense strand
gagaaacagucuuuggucu

SEQ ID NO: 2466674 - RNA, 19 nt, Homo sapiens
  misc_RNA (1)...(19): siRNA sense strand
aggaggaggagcuggcgaa

SEQ ID NO: 2466675 - RNA, 19 nt, Homo sapiens
  misc_RNA (1)...(19): siRNA sense strand
gaaaaggaaggauggagaa

SEQ ID NO: 2466676 - RNA, 19 nt, Homo sapiens
  misc_RNA (1)...(19): siRNA sense strand
agaugauggaggacggaca

SEQ ID NO: 2466677 - RNA, 19 nt, Homo sapiens
  misc_RNA (1)...(19): siRNA sense strand
gcugcuuuccggagaagaa

SEQ ID NO: 2466678 - RNA, 19 nt, Homo sapiens
  misc_RNA (1)...(19): siRNA sense strand
gcucaaacagcaaccucaa

SEQ ID NO: 2466679 - RNA, 19 nt, Homo sapiens
  misc_RNA (1)...(19): siRNA sense strand
agauguugucguuggaaaa

SEQ ID NO: 2466680 - RNA, 19 nt, Homo sapiens
  misc_RNA (1)...(19): siRNA sense strand
caagaagccugcagccuca

SEQ ID NO: 2466681 - RNA, 19 nt, Homo sapiens
  misc_RNA (1)...(19): siRNA sense strand
acgacgucacucugagaaa

SEQ ID NO: 2466682 - RNA, 19 nt, Homo sapiens
  misc_RNA (1)...(19): siRNA sense strand
uuggaggaagugaaagaaa

SEQ ID NO: 2466683 - RNA, 19 nt, Homo sapiens
  misc_RNA (1)...(19): siRNA sense strand
ggcaaggagacauugacaa

SEQ ID NO: 2466684 - RNA, 19 nt, Homo sapiens
  misc_RNA (1)...(19): siRNA sense strand
cugcagaaaguggagauua

SEQ ID NO: 2466685 - RNA, 19 nt, Homo sapiens
  misc_RNA (1)...(19): siRNA sense strand
guugaagaccuaugaaacu

SEQ ID NO: 2466686 - RNA, 19 nt, Homo sapiens
  misc_RNA (1)...(19): siRNA sense strand
ugaaaaggaaggauggaga

SEQ ID NO: 2466687 - RNA, 19 nt, Homo sapiens
  misc_RNA (1)...(19): siRNA sense strand
aacaaagcuuccugaguga

SEQ ID NO: 2466688 - RNA, 19 nt, Homo sapiens
  misc_RNA (1)...(19): siRNA sense strand
caaaccuggacuugaguau

SEQ ID NO: 2466689 - RNA, 19 nt, Homo sapiens
  misc_RNA (1)...(19): siRNA sense strand
gguugaagaccuaugaaac

SEQ ID NO: 2466690 - RNA, 19 nt, Homo sapiens
  misc_RNA (1)...(19): siRNA sense strand
gggcgcugauccaggacau

SEQ ID NO: 2466691 - RNA, 19 nt, Homo sapiens
  misc_RNA (1)...(19): siRNA sense strand
caugcgugccuuugagcua

SEQ ID NO: 2466692 - RNA, 19 nt, Homo sapiens
  misc_RNA (1)...(19): siRNA sense strand
gaaaagaaucccaagcuga

SEQ ID NO: 2466693 - RNA, 19 nt, Homo sapiens
  misc_RNA (1)...(19): siRNA sense strand
ugaaggaggucuugggcug

SEQ ID NO: 2466694 - RNA, 19 nt, Homo sapiens
  misc_RNA (1)...(19): siRNA sense strand
gggcacaucgagugggaac

SEQ ID NO: 2466695 - RNA, 19 nt, Homo sapiens
  misc_RNA (1)...(19): siRNA sense strand
ggaagugaaagaaaagaau

SEQ ID NO: 2466696 - RNA, 19 nt, Homo sapiens
  misc_RNA (1)...(19): siRNA sense strand
uagcccaagcacagagaau

SEQ ID NO: 2466697 - RNA, 19 nt, Homo sapiens
  misc_RNA (1)...(19): siRNA sense strand
cagaaaguggagauuaaaa

SEQ ID NO: 2466698 - RNA, 19 nt, Homo sapiens
  misc_RNA (1)...(19): siRNA sense strand
gaaaauuggauaaggaaug

SEQ ID NO: 2466699 - RNA, 19 nt, Homo sapiens
  misc_RNA (1)...(19): siRNA sense strand
aggugcaagaaauagauaa

SEQ ID NO: 2466700 - RNA, 19 nt, Homo sapiens
  misc_RNA (1)...(19): siRNA sense strand
gagaggaccuggaaaggcu

SEQ ID NO: 2466701 - RNA, 19 nt, Homo sapiens
  misc_RNA (1)...(19): siRNA sense strand
agaagcuguuggaggaagu

SEQ ID NO: 2466702 - RNA, 19 nt, Homo sapiens
  misc_RNA (1)...(19): siRNA sense strand
aggaagugaaagaaaagaa

SEQ ID NO: 2466703 - RNA, 19 nt, Homo sapiens
  misc_RNA (1)...(19): siRNA sense strand
uagcaaagccaggugaaaa

SEQ ID NO: 2466704 - RNA, 19 nt, Homo sapiens
  misc_RNA (1)...(19): siRNA sense strand
auuguaaacugcagaccuu

SEQ ID NO: 2466705 - RNA, 19 nt, Homo sapiens
  misc_RNA (1)...(19): siRNA sense strand
uggaagaggcugauggcaa

SEQ ID NO: 2466706 - RNA, 19 nt, Homo sapiens
  misc_RNA (1)...(19): siRNA sense strand
acguaaggguggagggcuu

SEQ ID NO: 2466707 - RNA, 19 nt, Homo sapiens
  misc_RNA (1)...(19): siRNA sense strand
uggcaaaggcugagaugau

SEQ ID NO: 2466708 - RNA, 19 nt, Homo sapiens
  misc_RNA (1)...(19): siRNA sense strand
cggacaggugcaagaaaua

SEQ ID NO: 2466709 - RNA, 19 nt, Homo sapiens
  misc_RNA (1)...(19): siRNA sense strand
gagaaauucaauggagaaa

SEQ ID NO: 2466710 - RNA, 19 nt, Homo sapiens
  misc_RNA (1)...(19): siRNA sense strand
gggacugggagaagaagaa

SEQ ID NO: 2466711 - RNA, 19 nt, Homo sapiens
  misc_RNA (1)...(19): siRNA sense strand
ucaagaagcuguuggagga

SEQ ID NO: 2466712 - RNA, 19 nt, Homo sapiens
  misc_RNA (1)...(19): siRNA sense strand
gggccuauuuccugagaca

SEQ ID NO: 2466713 - RNA, 19 nt, Homo sapiens
  misc_RNA (1)...(19): siRNA sense strand
ggugcaagaaauagauaau

SEQ ID NO: 2466714 - RNA, 19 nt, Homo sapiens
  misc_RNA (1)...(19): siRNA sense strand
uggagaaauucaauggaga

SEQ ID NO: 2466715 - RNA, 19 nt, Homo sapiens
  misc_RNA (1)...(19): siRNA sense strand
cuggagaauuacauggauu

SEQ ID NO: 2466716 - RNA, 19 nt, Homo sapiens
  misc_RNA (1)...(19): siRNA sense strand
uggaggaagugaaagaaaa

SEQ ID NO: 2466717 - RNA, 19 nt, Homo sapiens
  misc_RNA (1)...(19): siRNA sense strand
cugucaggcauuagagaau

SEQ ID NO: 2466718 - RNA, 19 nt, Homo sapiens
  misc_RNA (1)...(19): siRNA sense strand
uguuggaggaagugaaaga

SEQ ID NO: 2466719 - RNA, 19 nt, Homo sapiens
  misc_RNA (1)...(19): siRNA sense strand
guaagauggcaaaggcuga

SEQ ID NO: 2466720 - RNA, 19 nt, Homo sapiens
  misc_RNA (1)...(19): siRNA sense strand
gcuaacgagaagagagcca

SEQ ID NO: 2466721 - RNA, 19 nt, Homo sapiens
  misc_RNA (1)...(19): siRNA sense strand
agaagagagccaaggaguu

SEQ ID NO: 2466722 - RNA, 19 nt, Homo sapiens
  misc_RNA (1)...(19): siRNA sense strand
acggacaggugcaagaaau

SEQ ID NO: 2466723 - RNA, 19 nt, Homo sapiens
  misc_RNA (1)...(19): siRNA sense strand
ggaagaggcugauggcaag

SEQ ID NO: 2466724 - RNA, 19 nt, Homo sapiens
  misc_RNA (1)...(19): siRNA sense strand
gaauuguguaagauggcaa

SEQ ID NO: 2466725 - RNA, 19 nt, Homo sapiens
  misc_RNA (1)...(19): siRNA sense strand
gagaagagagccaaggagu

SEQ ID NO: 2466726 - RNA, 19 nt, Homo sapiens
  misc_RNA (1)...(19): siRNA sense strand
gugccauguugcuguacaa

SEQ ID NO: 2466727 - RNA, 19 nt, Homo sapiens
  misc_RNA (1)...(19): siRNA sense strand
cugaauugcaggaugacau

SEQ ID NO: 2466728 - RNA, 19 nt, Homo sapiens
  misc_RNA (1)...(19): siRNA sense strand
cggacaucaaacaggaauu

SEQ ID NO: 2466729 - RNA, 19 nt, Homo sapiens
  misc_RNA (1)...(19): siRNA sense strand
cugucuugguugucagcaa

SEQ ID NO: 2466730 - RNA, 19 nt, Homo sapiens
  misc_RNA (1)...(19): siRNA sense strand
aggcauuagagaauccaaa

SEQ ID NO: 2466731 - RNA, 19 nt, Homo sapiens
  misc_RNA (1)...(19): siRNA sense strand
aggcugagaugauggagga

SEQ ID NO: 2466732 - RNA, 19 nt, Homo sapiens
  misc_RNA (1)...(19): siRNA sense strand
ugggagaugcagaagaaga

SEQ ID NO: 2466733 - RNA, 19 nt, Homo sapiens
  misc_RNA (1)...(19): siRNA sense strand
uggagaauuacauggauuu

SEQ ID NO: 2466734 - RNA, 19 nt, Homo sapiens
  misc_RNA (1)...(19): siRNA sense strand
gcuguuggaggaagugaaa

SEQ ID NO: 2466735 - RNA, 19 nt, Homo sapiens
  misc_RNA (1)...(19): siRNA sense strand
gagaaacagucuuuggucu

SEQ ID NO: 2466736 - RNA, 19 nt, Homo sapiens
  misc_RNA (1)...(19): siRNA sense strand
aggaggaggagcuggcgaa

SEQ ID NO: 2466737 - RNA, 19 nt, Homo sapiens
  misc_RNA (1)...(19): siRNA sense strand
gaaaaggaaggauggagaa

SEQ ID NO: 2466738 - RNA, 19 nt, Homo sapiens
  misc_RNA (1)...(19): siRNA sense strand
agaugauggaggacggaca

SEQ ID NO: 2466739 - RNA, 19 nt, Homo sapiens
  misc_RNA (1)...(19): siRNA sense strand
gcugcuuuccggagaagaa

SEQ ID NO: 2466740 - RNA, 19 nt, Homo sapiens
  misc_RNA (1)...(19): siRNA sense strand
gcucaaacagcaaccucaa

SEQ ID NO: 2466741 - RNA, 19 nt, Homo sapiens
  misc_RNA (1)...(19): siRNA sense strand
agauguugucguuggaaaa

SEQ ID NO: 2466742 - RNA, 19 nt, Homo sapiens
  misc_RNA (1)...(19): siRNA sense strand
caagaagccugcagccuca

SEQ ID NO: 2466743 - RNA, 19 nt, Homo sapiens
  misc_RNA (1)...(19): siRNA sense strand
acgacgucacucugagaaa

SEQ ID NO: 2466744 - RNA, 19 nt, Homo sapiens
  misc_RNA (1)...(19): siRNA sense strand
uuggaggaagugaaagaaa

SEQ ID NO: 2466745 - RNA, 19 nt, Homo sapiens
  misc_RNA (1)...(19): siRNA sense strand
ggcaaggagacauugacaa

SEQ ID NO: 2466746 - RNA, 19 nt, Homo sapiens
  misc_RNA (1)...(19): siRNA sense strand
cugcagaaaguggagauua

SEQ ID NO: 2466747 - RNA, 19 nt, Homo sapiens
  misc_RNA (1)...(19): siRNA sense strand
guugaagaccuaugaaacu

SEQ ID NO: 2466748 - RNA, 19 nt, Homo sapiens
  misc_RNA (1)...(19): siRNA sense strand
ugaaaaggaaggauggaga

SEQ ID NO: 2466749 - RNA, 19 nt, Homo sapiens
  misc_RNA (1)...(19): siRNA sense strand
aacaaagcuuccugaguga

SEQ ID NO: 2466750 - RNA, 19 nt, Homo sapiens
  misc_RNA (1)...(19): siRNA sense strand
caaaccuggacuugaguau

SEQ ID NO: 2466751 - RNA, 19 nt, Homo sapiens
  misc_RNA (1)...(19): siRNA sense strand
gguugaagaccuaugaaac

SEQ ID NO: 2466752 - RNA, 19 nt, Homo sapiens
  misc_RNA (1)...(19): siRNA sense strand
gggcgcugauccaggacau

SEQ ID NO: 2466753 - RNA, 19 nt, Homo sapiens
  misc_RNA (1)...(19): siRNA sense strand
caugcgugccuuugagcua

SEQ ID NO: 2466754 - RNA, 19 nt, Homo sapiens
  misc_RNA (1)...(19): siRNA sense strand
gaaaagaaucccaagcuga

SEQ ID NO: 2466755 - RNA, 19 nt, Homo sapiens
  misc_RNA (1)...(19): siRNA sense strand
ugaaggaggucuugggcug

SEQ ID NO: 2466756 - RNA, 19 nt, Homo sapiens
  misc_RNA (1)...(19): siRNA sense strand
gggcacaucgagugggaac

SEQ ID NO: 2466757 - RNA, 19 nt, Homo sapiens
  misc_RNA (1)...(19): siRNA sense strand
ggaagugaaagaaaagaau

SEQ ID NO: 2466758 - RNA, 19 nt, Homo sapiens
  misc_RNA (1)...(19): siRNA sense strand
uagcccaagcacagagaau

SEQ ID NO: 2466759 - RNA, 19 nt, Homo sapiens
  misc_RNA (1)...(19): siRNA sense strand
cagaaaguggagauuaaaa

SEQ ID NO: 2466760 - RNA, 19 nt, Homo sapiens
  misc_RNA (1)...(19): siRNA sense strand
gaaaauuggauaaggaaug

SEQ ID NO: 2466761 - RNA, 19 nt, Homo sapiens
  misc_RNA (1)...(19): siRNA sense strand
aggugcaagaaauagauaa

SEQ ID NO: 2466762 - RNA, 19 nt, Homo sapiens
  misc_RNA (1)...(19): siRNA sense strand
gagaggaccuggaaaggcu

SEQ ID NO: 2466763 - RNA, 19 nt, Homo sapiens
  misc_RNA (1)...(19): siRNA sense strand
agaagcuguuggaggaagu

SEQ ID NO: 2466764 - RNA, 19 nt, Homo sapiens
  misc_RNA (1)...(19): siRNA sense strand
aggaagugaaagaaaagaa

SEQ ID NO: 2466765 - RNA, 19 nt, Homo sapiens
  misc_RNA (1)...(19): siRNA sense strand
uagcaaagccaggugaaaa

SEQ ID NO: 2466766 - RNA, 19 nt, Homo sapiens
  misc_RNA (1)...(19): siRNA sense strand
auuguaaacugcagaccuu

SEQ ID NO: 2466767 - RNA, 19 nt, Homo sapiens
  misc_RNA (1)...(19): siRNA sense strand
acauuugagaugagaaaga

SEQ ID NO: 2466768 - RNA, 19 nt, Homo sapiens
  misc_RNA (1)...(19): siRNA sense strand
aaucauggaaggagcgaca

SEQ ID NO: 2466769 - RNA, 19 nt, Homo sapiens
  misc_RNA (1)...(19): siRNA sense strand
cugacuggauauuggaaca

SEQ ID NO: 2466770 - RNA, 19 nt, Homo sapiens
  misc_RNA (1)...(19): siRNA sense strand
cuggaagaacaaagagcau

SEQ ID NO: 2466771 - RNA, 19 nt, Homo sapiens
  misc_RNA (1)...(19): siRNA sense strand
acauauguggaaagaguga

SEQ ID NO: 2466772 - RNA, 19 nt, Homo sapiens
  misc_RNA (1)...(19): siRNA sense strand
caccagaagagaauggaga

SEQ ID NO: 2466773 - RNA, 19 nt, Homo sapiens
  misc_RNA (1)...(19): siRNA sense strand
gaaccugaccuuucggaca

SEQ ID NO: 2466774 - RNA, 19 nt, Homo sapiens
  misc_RNA (1)...(19): siRNA sense strand
gguaguacguagagcuccu

SEQ ID NO: 2466775 - RNA, 19 nt, Homo sapiens
  misc_RNA (1)...(19): siRNA sense strand
cugcaaucuuuaucgcaau

SEQ ID NO: 2466776 - RNA, 19 nt, Homo sapiens
  misc_RNA (1)...(19): siRNA sense strand
cgacacaagcugacuggca

SEQ ID NO: 2466777 - RNA, 19 nt, Homo sapiens
  misc_RNA (1)...(19): siRNA sense strand
gcaaugagaaggacagcgu

SEQ ID NO: 2466778 - RNA, 19 nt, Homo sapiens
  misc_RNA (1)...(19): siRNA sense strand
cugcaaagucaguggguua

SEQ ID NO: 2466779 - RNA, 19 nt, Homo sapiens
  misc_RNA (1)...(19): siRNA sense strand
gcacaaacguaaagcccaa

SEQ ID NO: 2466780 - RNA, 19 nt, Homo sapiens
  misc_RNA (1)...(19): siRNA sense strand
ugaaaagcguggugcaaaa

SEQ ID NO: 2466781 - RNA, 19 nt, Homo sapiens
  misc_RNA (1)...(19): siRNA sense strand
acaagaucuuugagggaau

SEQ ID NO: 2466782 - RNA, 19 nt, Homo sapiens
  misc_RNA (1)...(19): siRNA sense strand
cguucuagaucaagggaca

SEQ ID NO: 2466783 - RNA, 19 nt, Homo sapiens
  misc_RNA (1)...(19): siRNA sense strand
ccuagaugaugaugggaau

SEQ ID NO: 2466784 - RNA, 19 nt, Homo sapiens
  misc_RNA (1)...(19): siRNA sense strand
caagaaugaagcagggauu

SEQ ID NO: 2466785 - RNA, 19 nt, Homo sapiens
  misc_RNA (1)...(19): siRNA sense strand
ccaagaaacagaagcccaa

SEQ ID NO: 2466786 - RNA, 19 nt, Homo sapiens
  misc_RNA (1)...(19): siRNA sense strand
caggaagaaagcaagaaua

SEQ ID NO: 2466787 - RNA, 19 nt, Homo sapiens
  misc_RNA (1)...(19): siRNA sense strand
acaagaugcuggugcguga

SEQ ID NO: 2466788 - RNA, 19 nt, Homo sapiens
  misc_RNA (1)...(19): siRNA sense strand
cagcugaaccugaggagau

SEQ ID NO: 2466789 - RNA, 19 nt, Homo sapiens
  misc_RNA (1)...(19): siRNA sense strand
gagaugugccuguggaaaa

SEQ ID NO: 2466790 - RNA, 19 nt, Homo sapiens
  misc_RNA (1)...(19): siRNA sense strand
uggcagagaaacaaacuaa

SEQ ID NO: 2466791 - RNA, 19 nt, Homo sapiens
  misc_RNA (1)...(19): siRNA sense strand
uuacaaaggaacugcaaaa

SEQ ID NO: 2466792 - RNA, 19 nt, Homo sapiens
  misc_RNA (1)...(19): siRNA sense strand
ggcaaagcuaacaguaaua

SEQ ID NO: 2466793 - RNA, 19 nt, Homo sapiens
  misc_RNA (1)...(19): siRNA sense strand
gcuugugguugcugcuaaa

SEQ ID NO: 2466794 - RNA, 19 nt, Homo sapiens
  misc_RNA (1)...(19): siRNA sense strand
cauguagaguggcuggaaa

SEQ ID NO: 2466795 - RNA, 19 nt, Homo sapiens
  misc_RNA (1)...(19): siRNA sense strand
agauggaaagagaggucaa

SEQ ID NO: 2466796 - RNA, 19 nt, Homo sapiens
  misc_RNA (1)...(19): siRNA sense strand
ccucagauauuuuggaaga

SEQ ID NO: 2466797 - RNA, 19 nt, Homo sapiens
  misc_RNA (1)...(19): siRNA sense strand
ccucaggauaacaggucaa

SEQ ID NO: 2466798 - RNA, 19 nt, Homo sapiens
  misc_RNA (1)...(19): siRNA sense strand
acggcaaagcuaacaguaa

SEQ ID NO: 2466799 - RNA, 19 nt, Homo sapiens
  misc_RNA (1)...(19): siRNA sense strand
ugaggaaauucaaggcaca

SEQ ID NO: 2466800 - RNA, 19 nt, Homo sapiens
  misc_RNA (1)...(19): siRNA sense strand
ccacaagcucaaaagaaaa

SEQ ID NO: 2466801 - RNA, 19 nt, Homo sapiens
  misc_RNA (1)...(19): siRNA sense strand
ccagaagaggaaacagcua

SEQ ID NO: 2466802 - RNA, 19 nt, Homo sapiens
  misc_RNA (1)...(19): siRNA sense strand
auccaaagccaaagaucua

SEQ ID NO: 2466803 - RNA, 19 nt, Homo sapiens
  misc_RNA (1)...(19): siRNA sense strand
caccauucuuugagaugaa

SEQ ID NO: 2466804 - RNA, 19 nt, Homo sapiens
  misc_RNA (1)...(19): siRNA sense strand
gggaaagaacugcacaaca

SEQ ID NO: 2466805 - RNA, 19 nt, Homo sapiens
  misc_RNA (1)...(19): siRNA sense strand
guuacgagucaaugggaga

SEQ ID NO: 2466806 - RNA, 19 nt, Homo sapiens
  misc_RNA (1)...(19): siRNA sense strand
ugaaauagaguacaggcua

SEQ ID NO: 2466807 - RNA, 19 nt, Homo sapiens
  misc_RNA (1)...(19): siRNA sense strand
ccucagccaggaagagaua

SEQ ID NO: 2466808 - RNA, 19 nt, Homo sapiens
  misc_RNA (1)...(19): siRNA sense strand
agauccagcaggugaacaa

SEQ ID NO: 2466809 - RNA, 19 nt, Homo sapiens
  misc_RNA (1)...(19): siRNA sense strand
ugacuguucaagaaggaaa

SEQ ID NO: 2466810 - RNA, 19 nt, Homo sapiens
  misc_RNA (1)...(19): siRNA sense strand
cugauuaacggcaaagcua

SEQ ID NO: 2466811 - RNA, 19 nt, Homo sapiens
  misc_RNA (1)...(19): siRNA sense strand
uaucuggaguguagaguca

SEQ ID NO: 2466812 - RNA, 19 nt, Homo sapiens
  misc_RNA (1)...(19): siRNA sense strand
auguagaguggcuggaaau

SEQ ID NO: 2466813 - RNA, 19 nt, Homo sapiens
  misc_RNA (1)...(19): siRNA sense strand
ggacaguggagacgaaaau

SEQ ID NO: 2466814 - RNA, 19 nt, Homo sapiens
  misc_RNA (1)...(19): siRNA sense strand
ucagccaggaagagauaaa

SEQ ID NO: 2466815 - RNA, 19 nt, Homo sapiens
  misc_RNA (1)...(19): siRNA sense strand
aggcauugcuaccaggaca

SEQ ID NO: 2466816 - RNA, 19 nt, Homo sapiens
  misc_RNA (1)...(19): siRNA sense strand
ggaaacgagcggaguccau

SEQ ID NO: 2466817 - RNA, 19 nt, Homo sapiens
  misc_RNA (1)...(19): siRNA sense strand
aggaagaaagcaagaauac

SEQ ID NO: 2466818 - RNA, 19 nt, Homo sapiens
  misc_RNA (1)...(19): siRNA sense strand
auacaauuauggcugcaaa

SEQ ID NO: 2466819 - RNA, 19 nt, Homo sapiens
  misc_RNA (1)...(19): siRNA sense strand
agaucugacuguucaagaa

SEQ ID NO: 2466820 - RNA, 19 nt, Homo sapiens
  misc_RNA (1)...(19): siRNA sense strand
gcucaaaagaaaacaacuu

SEQ ID NO: 2466821 - RNA, 19 nt, Homo sapiens
  misc_RNA (1)...(19): siRNA sense strand
gaaauagaguacaggcuag

SEQ ID NO: 2466822 - RNA, 19 nt, Homo sapiens
  misc_RNA (1)...(19): siRNA sense strand
agaagggagccgaguuuau

SEQ ID NO: 2466823 - RNA, 19 nt, Homo sapiens
  misc_RNA (1)...(19): siRNA sense strand
guguagagucacuggaaac

SEQ ID NO: 2466824 - RNA, 19 nt, Homo sapiens
  misc_RNA (1)...(19): siRNA sense strand
cuuuacauguucagcaaga

SEQ ID NO: 2466825 - RNA, 19 nt, Homo sapiens
  misc_RNA (1)...(19): siRNA sense strand
uggacugauuaacggcaaa

SEQ ID NO: 2466826 - RNA, 19 nt, Homo sapiens
  misc_RNA (1)...(19): siRNA sense strand
acaugcaggaagaaagcaa

SEQ ID NO: 2466827 - RNA, 19 nt, Homo sapiens
  misc_RNA (1)...(19): siRNA sense strand
gccgcaaagccaagaaaca

SEQ ID NO: 2466828 - RNA, 19 nt, Homo sapiens
  misc_RNA (1)...(19): siRNA sense strand
ugauuaacggcaaagcuaa

SEQ ID NO: 2466829 - RNA, 19 nt, Homo sapiens
  misc_RNA (1)...(19): siRNA sense strand
cagagacucaucagugaaa

SEQ ID NO: 2466830 - RNA, 19 nt, Homo sapiens
  misc_RNA (1)...(19): siRNA sense strand
ugagcaugcaccaggacaa

SEQ ID NO: 2466831 - RNA, 19 nt, Homo sapiens
  misc_RNA (1)...(19): siRNA sense strand
uuacauguucagcaagaaa

SEQ ID NO: 2466832 - RNA, 19 nt, Homo sapiens
  misc_RNA (1)...(19): siRNA sense strand
auuuaaagccgcaaagcca

SEQ ID NO: 2466833 - RNA, 19 nt, Homo sapiens
  misc_RNA (1)...(19): siRNA sense strand
ucuuugagaugaagcugaa

SEQ ID NO: 2466834 - RNA, 19 nt, Homo sapiens
  misc_RNA (1)...(19): siRNA sense strand
ggaaagaacaagugaaaau

SEQ ID NO: 2466835 - RNA, 19 nt, Homo sapiens
  misc_RNA (1)...(19): siRNA sense strand
cuauggaagaugaaggaaa

SEQ ID NO: 2466836 - RNA, 19 nt, Homo sapiens
  misc_RNA (1)...(19): siRNA sense strand
uagcaaagaagaugagaau

SEQ ID NO: 2466837 - RNA, 19 nt, Homo sapiens
  misc_RNA (1)...(19): siRNA sense strand
gagaauggaaagagaacuu

SEQ ID NO: 2466838 - RNA, 19 nt, Homo sapiens
  misc_RNA (1)...(19): siRNA sense strand
gcugaaauggaaagaacaa

SEQ ID NO: 2466839 - RNA, 19 nt, Homo sapiens
  misc_RNA (1)...(19): siRNA sense strand
gggugaaauucguggagca

SEQ ID NO: 2466840 - RNA, 19 nt, Homo sapiens
  misc_RNA (1)...(19): siRNA sense strand
auggaaagaacaagugaaa

SEQ ID NO: 2466841 - RNA, 19 nt, Homo sapiens
  misc_RNA (1)...(19): siRNA sense strand
agaacuuaaccaugagaaa

SEQ ID NO: 2466842 - RNA, 19 nt, Homo sapiens
  misc_RNA (1)...(19): siRNA sense strand
uagcugaaguacaggacaa

SEQ ID NO: 2466843 - RNA, 19 nt, Homo sapiens
  misc_RNA (1)...(19): siRNA sense strand
cugaaguacaggacaauua

SEQ ID NO: 2466844 - RNA, 19 nt, Homo sapiens
  misc_RNA (1)...(19): siRNA sense strand
gugaaaugaccaaagaaau

SEQ ID NO: 2466845 - RNA, 19 nt, Homo sapiens
  misc_RNA (1)...(19): siRNA sense strand
agacagagaaggaugaaaa

SEQ ID NO: 2466846 - RNA, 19 nt, Homo sapiens
  misc_RNA (1)...(19): siRNA sense strand
ugugaaaugaccaaagaaa

SEQ ID NO: 2466847 - RNA, 19 nt, Homo sapiens
  misc_RNA (1)...(19): siRNA sense strand
acaacaugaaagagaacaa

SEQ ID NO: 2466848 - RNA, 19 nt, Homo sapiens
  misc_RNA (1)...(19): siRNA sense strand
gggaaucagcagaaaguga

SEQ ID NO: 2466849 - RNA, 19 nt, Homo sapiens
  misc_RNA (1)...(19): siRNA sense strand
gaguuuaagaagagguuca

SEQ ID NO: 2466850 - RNA, 19 nt, Homo sapiens
  misc_RNA (1)...(19): siRNA sense strand
agcacaacuucgagaacaa

SEQ ID NO: 2466851 - RNA, 19 nt, Homo sapiens
  misc_RNA (1)...(19): siRNA sense strand
ccuuaugcaucucaggaaa

SEQ ID NO: 2466852 - RNA, 19 nt, Homo sapiens
  misc_RNA (1)...(19): siRNA sense strand
cuaacuaugaucagagcaa

SEQ ID NO: 2466853 - RNA, 19 nt, Homo sapiens
  misc_RNA (1)...(19): siRNA sense strand
agagcaaauuugaagaaca

SEQ ID NO: 2466854 - RNA, 19 nt, Homo sapiens
  misc_RNA (1)...(19): siRNA sense strand
aagaagagaaguugaagau

SEQ ID NO: 2466855 - RNA, 19 nt, Homo sapiens
  misc_RNA (1)...(19): siRNA sense strand
guaaacaacucuugcagga

SEQ ID NO: 2466856 - RNA, 19 nt, Homo sapiens
  misc_RNA (1)...(19): siRNA sense strand
ugaaauucguggagcaagu

SEQ ID NO: 2466857 - RNA, 19 nt, Homo sapiens
  misc_RNA (1)...(19): siRNA sense strand
aggcacaacaugaaagaga

SEQ ID NO: 2466858 - RNA, 19 nt, Homo sapiens
  misc_RNA (1)...(19): siRNA sense strand
ggaaaacgagaaagugaaa

SEQ ID NO: 2466859 - RNA, 19 nt, Homo sapiens
  misc_RNA (1)...(19): siRNA sense strand
acuaagaagagaaguugaa

SEQ ID NO: 2466860 - RNA, 19 nt, Homo sapiens
  misc_RNA (1)...(19): siRNA sense strand
ggaaacaagagauggagca

SEQ ID NO: 2466861 - RNA, 19 nt, Homo sapiens
  misc_RNA (1)...(19): siRNA sense strand
cuuaaaaggagucuagaaa

SEQ ID NO: 2466862 - RNA, 19 nt, Homo sapiens
  misc_RNA (1)...(19): siRNA sense strand
cccaucagcuugaggaaga

SEQ ID NO: 2466863 - RNA, 19 nt, Homo sapiens
  misc_RNA (1)...(19): siRNA sense strand
gggaacaaagaaagcguga

SEQ ID NO: 2466864 - RNA, 19 nt, Homo sapiens
  misc_RNA (1)...(19): siRNA sense strand
uuagaugggaacaaagaaa

SEQ ID NO: 2466865 - RNA, 19 nt, Homo sapiens
  misc_RNA (1)...(19): siRNA sense strand
ggugaaauucguggagcaa

SEQ ID NO: 2466866 - RNA, 19 nt, Homo sapiens
  misc_RNA (1)...(19): siRNA sense strand
caaguugggagaauggaaa

SEQ ID NO: 2466867 - RNA, 19 nt, Homo sapiens
  misc_RNA (1)...(19): siRNA sense strand
aguugaagacagagaagga

SEQ ID NO: 2466868 - RNA, 19 nt, Homo sapiens
  misc_RNA (1)...(19): siRNA sense strand
acacgaacuaagaagagaa

SEQ ID NO: 2466869 - RNA, 19 nt, Homo sapiens
  misc_RNA (1)...(19): siRNA sense strand
cugcagaccauuauaaaga

SEQ ID NO: 2466870 - RNA, 19 nt, Homo sapiens
  misc_RNA (1)...(19): siRNA sense strand
gagaaagcaaaaugcaaua

SEQ ID NO: 2466871 - RNA, 19 nt, Homo sapiens
  misc_RNA (1)...(19): siRNA sense strand
gaaaauggaaggucagaau

SEQ ID NO: 2466872 - RNA, 19 nt, Homo sapiens
  misc_RNA (1)...(19): siRNA sense strand
aacaagagauggagcagau

SEQ ID NO: 2466873 - RNA, 19 nt, Homo sapiens
  misc_RNA (1)...(19): siRNA sense strand
ucgagaacaaguugggaga

SEQ ID NO: 2466874 - RNA, 19 nt, Homo sapiens
  misc_RNA (1)...(19): siRNA sense strand
gggagaauggaaagagaac

SEQ ID NO: 2466875 - RNA, 19 nt, Homo sapiens
  misc_RNA (1)...(19): siRNA sense strand
aaaauguggccaagaguua

SEQ ID NO: 2466876 - RNA, 19 nt, Homo sapiens
  misc_RNA (1)...(19): siRNA sense strand
ccaaaugaugauggagaau

SEQ ID NO: 2466877 - RNA, 19 nt, Homo sapiens
  misc_RNA (1)...(19): siRNA sense strand
uagacaguuuaaaggacaa

SEQ ID NO: 2466878 - RNA, 19 nt, Homo sapiens
  misc_RNA (1)...(19): siRNA sense strand
guuaauugccguucuggaa

SEQ ID NO: 2466879 - RNA, 19 nt, Homo sapiens
  misc_RNA (1)...(19): siRNA sense strand
agagaaggaugaaaaggaa

SEQ ID NO: 2466880 - RNA, 19 nt, Homo sapiens
  misc_RNA (1)...(19): siRNA sense strand
augcaguggcagaacuuaa

SEQ ID NO: 2466881 - RNA, 19 nt, Homo sapiens
  misc_RNA (1)...(19): siRNA sense strand
ucacaaagaaaacggggaa

SEQ ID NO: 2466882 - RNA, 19 nt, Homo sapiens
  misc_RNA (1)...(19): siRNA sense strand
aaauccagcagaaaggaaa

SEQ ID NO: 2466883 - RNA, 19 nt, Homo sapiens
  misc_RNA (1)...(19): siRNA sense strand
gcuaaagaacucagugaug

SEQ ID NO: 2466884 - RNA, 19 nt, Homo sapiens
  misc_RNA (1)...(19): siRNA sense strand
aggaagauauugugucagu

SEQ ID NO: 2466885 - RNA, 19 nt, Homo sapiens
  misc_RNA (1)...(19): siRNA sense strand
ucaguaacacauaaagcaa

SEQ ID NO: 2466886 - RNA, 19 nt, Homo sapiens
  misc_RNA (1)...(19): siRNA sense strand
ggagcaacuucguaaagca

SEQ ID NO: 2466887 - RNA, 19 nt, Homo sapiens
  misc_RNA (1)...(19): siRNA sense strand
gaaagucacuggaaggugu

SEQ ID NO: 2466888 - RNA, 19 nt, Homo sapiens
  misc_RNA (1)...(19): siRNA sense strand
gcacaacaugaaagagaac

SEQ ID NO: 2466889 - RNA, 19 nt, Homo sapiens
  misc_RNA (1)...(19): siRNA sense strand
acaaagaaagcgugauuac

SEQ ID NO: 2466890 - RNA, 19 nt, Homo sapiens
  misc_RNA (1)...(19): siRNA sense strand
ccauagagaaacugagaau

SEQ ID NO: 2466891 - RNA, 19 nt, Homo sapiens
  misc_RNA (1)...(19): siRNA sense strand
cugaaaguauugaggacau

SEQ ID NO: 2466892 - RNA, 19 nt, Homo sapiens
  misc_RNA (1)...(19): siRNA sense strand
caucagaguuuaugcccua

SEQ ID NO: 2466893 - RNA, 19 nt, Homo sapiens
  misc_RNA (1)...(19): siRNA sense strand
cuggaaaguauuuggaaca

SEQ ID NO: 2466894 - RNA, 19 nt, Homo sapiens
  misc_RNA (1)...(19): siRNA sense strand
agauggaagcagauauuaa

SEQ ID NO: 2466895 - RNA, 19 nt, Homo sapiens
  misc_RNA (1)...(19): siRNA sense strand
gggaaugauagaucgacaa

SEQ ID NO: 2466896 - RNA, 19 nt, Homo sapiens
  misc_RNA (1)...(19): siRNA sense strand
gcacggauucagagagcau

SEQ ID NO: 2466897 - RNA, 19 nt, Homo sapiens
  misc_RNA (1)...(19): siRNA sense strand
ucacaaaagagcuggggaa

SEQ ID NO: 2466898 - RNA, 19 nt, Homo sapiens
  misc_RNA (1)...(19): siRNA sense strand
gaagagaagagaaaggcau

SEQ ID NO: 2466899 - RNA, 19 nt, Homo sapiens
  misc_RNA (1)...(19): siRNA sense strand
ggaacuauaaguagcaaaa

SEQ ID NO: 2466900 - RNA, 19 nt, Homo sapiens
  misc_RNA (1)...(19): siRNA sense strand
gugacaauaacuuggaauu

SEQ ID NO: 2466901 - RNA, 19 nt, Homo sapiens
  misc_RNA (1)...(19): siRNA sense strand
agucaauggccaugagguu

SEQ ID NO: 2466902 - RNA, 19 nt, Homo sapiens
  misc_RNA (1)...(19): siRNA sense strand
uuaaagaagucaauggcca

SEQ ID NO: 2466903 - RNA, 19 nt, Homo sapiens
  misc_RNA (1)...(19): siRNA sense strand
guuagaagagacugggaca

SEQ ID NO: 2466904 - RNA, 19 nt, Homo sapiens
  misc_RNA (1)...(19): siRNA sense strand
augcagaauuugaucguca

SEQ ID NO: 2466905 - RNA, 19 nt, Homo sapiens
  misc_RNA (1)...(19): siRNA sense strand
uccuggaagagaagagaaa

SEQ ID NO: 2466906 - RNA, 19 nt, Homo sapiens
  misc_RNA (1)...(19): siRNA sense strand
ggcagaauugguugguaua

SEQ ID NO: 2466907 - RNA, 19 nt, Homo sapiens
  misc_RNA (1)...(19): siRNA sense strand
cuacuggagcagaagaaau

SEQ ID NO: 2466908 - RNA, 19 nt, Homo sapiens
  misc_RNA (1)...(19): siRNA sense strand
cuaccaagcuucugaccga

SEQ ID NO: 2466909 - RNA, 19 nt, Homo sapiens
  misc_RNA (1)...(19): siRNA sense strand
agguauuugugaaguguca

SEQ ID NO: 2466910 - RNA, 19 nt, Homo sapiens
  misc_RNA (1)...(19): siRNA sense strand
acuucaugugggagauaua

SEQ ID NO: 2466911 - RNA, 19 nt, Homo sapiens
  misc_RNA (1)...(19): siRNA sense strand
caaccuaauaccuugcaaa

SEQ ID NO: 2466912 - RNA, 19 nt, Homo sapiens
  misc_RNA (1)...(19): siRNA sense strand
aagagaagagaaaggcauu

SEQ ID NO: 2466913 - RNA, 19 nt, Homo sapiens
  misc_RNA (1)...(19): siRNA sense strand
ugaagaaaacaguggauga

SEQ ID NO: 2466914 - RNA, 19 nt, Homo sapiens
  misc_RNA (1)...(19): siRNA sense strand
agagaaacugagaauggaa

SEQ ID NO: 2466915 - RNA, 19 nt, Homo sapiens
  misc_RNA (1)...(19): siRNA sense strand
caagggaauuauggagaau

SEQ ID NO: 2466916 - RNA, 19 nt, Homo sapiens
  misc_RNA (1)...(19): siRNA sense strand
auggagaauccuauuguaa

SEQ ID NO: 2466917 - RNA, 19 nt, Homo sapiens
  misc_RNA (1)...(19): siRNA sense strand
ggccaugagguuggaaaua

SEQ ID NO: 2466918 - RNA, 19 nt, Homo sapiens
  misc_RNA (1)...(19): siRNA sense strand
cugcaaacugccauagaga

SEQ ID NO: 2466919 - RNA, 19 nt, Homo sapiens
  misc_RNA (1)...(19): siRNA sense strand
uguaaauagagaagaucca

SEQ ID NO: 2466920 - RNA, 19 nt, Homo sapiens
  misc_RNA (1)...(19): siRNA sense strand
agcagaagaaauagaccua

SEQ ID NO: 2466921 - RNA, 19 nt, Homo sapiens
  misc_RNA (1)...(19): siRNA sense strand
cauucguauucuugguauu

SEQ ID NO: 2466922 - RNA, 19 nt, Homo sapiens
  misc_RNA (1)...(19): siRNA sense strand
acuuggaauuagucaauga

SEQ ID NO: 2466923 - RNA, 19 nt, Homo sapiens
  misc_RNA (1)...(19): siRNA sense strand
ggaagagaagagaaaggca

SEQ ID NO: 2466924 - RNA, 19 nt, Homo sapiens
  misc_RNA (1)...(19): siRNA sense strand
augaaaauguggcagaauu

SEQ ID NO: 2466925 - RNA, 19 nt, Homo sapiens
  misc_RNA (1)...(19): siRNA sense strand
ggggaaugauagaucgaca

SEQ ID NO: 2466926 - RNA, 19 nt, Homo sapiens
  misc_RNA (1)...(19): siRNA sense strand
uagaagagacugggacaau

SEQ ID NO: 2466927 - RNA, 19 nt, Homo sapiens
  misc_RNA (1)...(19): siRNA sense strand
cagauauuaaagcuggaaa

SEQ ID NO: 2466928 - RNA, 19 nt, Homo sapiens
  misc_RNA (1)...(19): siRNA sense strand
gcuggaaaguauuuggaac

SEQ ID NO: 2466929 - RNA, 19 nt, Homo sapiens
  misc_RNA (1)...(19): siRNA sense strand
aaggaaaucucuauggaac

SEQ ID NO: 2466930 - RNA, 19 nt, Homo sapiens
  misc_RNA (1)...(19): siRNA sense strand
cucuaauaaauguggauga

SEQ ID NO: 2466931 - RNA, 19 nt, Homo sapiens
  misc_RNA (1)...(19): siRNA sense strand
caguagaugccauucguau

SEQ ID NO: 2466932 - RNA, 19 nt, Homo sapiens
  misc_RNA (1)...(19): siRNA sense strand
uaaagaagucaauggccau

SEQ ID NO: 2466933 - RNA, 19 nt, Homo sapiens
  misc_RNA (1)...(19): siRNA sense strand
aggccgaagaagcuugaaa

SEQ ID NO: 2466934 - RNA, 19 nt, Homo sapiens
  misc_RNA (1)...(19): siRNA sense strand
auugaggacaucagaguuu

SEQ ID NO: 2466935 - RNA, 19 nt, Homo sapiens
  misc_RNA (1)...(19): siRNA sense strand
uggaacuauaaguagcaaa

SEQ ID NO: 2466936 - RNA, 19 nt, Homo sapiens
  misc_RNA (1)...(19): siRNA sense strand
cgucaugaaauccagauau

SEQ ID NO: 2466937 - RNA, 19 nt, Homo sapiens
  misc_RNA (1)...(19): siRNA sense strand
gacucugacuugaagaaaa

SEQ ID NO: 2466938 - RNA, 19 nt, Homo sapiens
  misc_RNA (1)...(19): siRNA sense strand
ggaugaaaauguggcagaa

SEQ ID NO: 2466939 - RNA, 19 nt, Homo sapiens
  misc_RNA (1)...(19): siRNA sense strand
ggugugacauuuaggguug

SEQ ID NO: 2466940 - RNA, 19 nt, Homo sapiens
  misc_RNA (1)...(19): siRNA sense strand
uggccaugagguuggaaau

SEQ ID NO: 2466941 - RNA, 19 nt, Homo sapiens
  misc_RNA (1)...(19): siRNA sense strand
uauaugaggagguagccaa

SEQ ID NO: 2466942 - RNA, 19 nt, Homo sapiens
  misc_RNA (1)...(19): siRNA sense strand
ccauacaaugacaaccuaa

SEQ ID NO: 2466943 - RNA, 19 nt, Homo sapiens
  misc_RNA (1)...(19): siRNA sense strand
aaagagcaggagaaggaaa

SEQ ID NO: 2466944 - RNA, 19 nt, Homo sapiens
  misc_RNA (1)...(19): siRNA sense strand
aagagcaggagaaggaaaa

SEQ ID NO: 2466945 - RNA, 19 nt, Homo sapiens
  misc_RNA (1)...(19): siRNA sense strand
ccacaaagauugaacgaca

SEQ ID NO: 2466946 - RNA, 19 nt, Homo sapiens
  misc_RNA (1)...(19): siRNA sense strand
aggcaggagucuagggcau

SEQ ID NO: 2466947 - RNA, 19 nt, Homo sapiens
  misc_RNA (1)...(19): siRNA sense strand
guauugacucggagacaaa

SEQ ID NO: 2466948 - RNA, 19 nt, Homo sapiens
  misc_RNA (1)...(19): siRNA sense strand
uggcagaggaagaaggaga

SEQ ID NO: 2466949 - RNA, 19 nt, Homo sapiens
  misc_RNA (1)...(19): siRNA sense strand
aaacagucgaauagagcaa

SEQ ID NO: 2466950 - RNA, 19 nt, Homo sapiens
  misc_RNA (1)...(19): siRNA sense strand
ccagaaugaauguggccaa

SEQ ID NO: 2466951 - RNA, 19 nt, Homo sapiens
  misc_RNA (1)...(19): siRNA sense strand
ugaagaacccaaaggaaaa

SEQ ID NO: 2466952 - RNA, 19 nt, Homo sapiens
  misc_RNA (1)...(19): siRNA sense strand
aggaagaugcugagaagga

SEQ ID NO: 2466953 - RNA, 19 nt, Homo sapiens
  misc_RNA (1)...(19): siRNA sense strand
uggaacagucugagcacaa

SEQ ID NO: 2466954 - RNA, 19 nt, Homo sapiens
  misc_RNA (1)...(19): siRNA sense strand
gggaaacgaggcugaggaa

SEQ ID NO: 2466955 - RNA, 19 nt, Homo sapiens
  misc_RNA (1)...(19): siRNA sense strand
aggccaagaccaagaguga

SEQ ID NO: 2466956 - RNA, 19 nt, Homo sapiens
  misc_RNA (1)...(19): siRNA sense strand
ggucccauuuagagaguau

SEQ ID NO: 2466957 - RNA, 19 nt, Homo sapiens
  misc_RNA (1)...(19): siRNA sense strand
cguuaaaucuuuugacaga

SEQ ID NO: 2466958 - RNA, 19 nt, Homo sapiens
  misc_RNA (1)...(19): siRNA sense strand
agaagaaggauguggaaac

SEQ ID NO: 2466959 - RNA, 19 nt, Homo sapiens
  misc_RNA (1)...(19): siRNA sense strand
caagagugacagugggaca

SEQ ID NO: 2466960 - RNA, 19 nt, Homo sapiens
  misc_RNA (1)...(19): siRNA sense strand
gagaagaaggauguggaaa

SEQ ID NO: 2466961 - RNA, 19 nt, Homo sapiens
  misc_RNA (1)...(19): siRNA sense strand
gcugaagaacccaaaggaa

SEQ ID NO: 2466962 - RNA, 19 nt, Homo sapiens
  misc_RNA (1)...(19): siRNA sense strand
gagaggaaccaaaggagga

SEQ ID NO: 2466963 - RNA, 19 nt, Homo sapiens
  misc_RNA (1)...(19): siRNA sense strand
gccaagaccaagagugaca

SEQ ID NO: 2466964 - RNA, 19 nt, Homo sapiens
  misc_RNA (1)...(19): siRNA sense strand
agaagauaugggagaugaa

SEQ ID NO: 2466965 - RNA, 19 nt, Homo sapiens
  misc_RNA (1)...(19): siRNA sense strand
aagacaaagaggagaggca

SEQ ID NO: 2466966 - RNA, 19 nt, Homo sapiens
  misc_RNA (1)...(19): siRNA sense strand
ggaccugaagggaguggaa

SEQ ID NO: 2466967 - RNA, 19 nt, Homo sapiens
  misc_RNA (1)...(19): siRNA sense strand
cugucagugugaagaggaa

SEQ ID NO: 2466968 - RNA, 19 nt, Homo sapiens
  misc_RNA (1)...(19): siRNA sense strand
guucaacuguggaggggaa

SEQ ID NO: 2466969 - RNA, 19 nt, Homo sapiens
  misc_RNA (1)...(19): siRNA sense strand
ucagaauaauaauggcaga

SEQ ID NO: 2466970 - RNA, 19 nt, Homo sapiens
  misc_RNA (1)...(19): siRNA sense strand
guaacaaggaagaugcuga

SEQ ID NO: 2466971 - RNA, 19 nt, Homo sapiens
  misc_RNA (1)...(19): siRNA sense strand
cucggaaccuggagaagaa

SEQ ID NO: 2466972 - RNA, 19 nt, Homo sapiens
  misc_RNA (1)...(19): siRNA sense strand
agauggaccugaagggagu

SEQ ID NO: 2466973 - RNA, 19 nt, Homo sapiens
  misc_RNA (1)...(19): siRNA sense strand
agaggaagaaggagaaaau

SEQ ID NO: 2466974 - RNA, 19 nt, Homo sapiens
  misc_RNA (1)...(19): siRNA sense strand
ugacagaagaagaacaguu

SEQ ID NO: 2466975 - RNA, 19 nt, Homo sapiens
  misc_RNA (1)...(19): siRNA sense strand
caaagcuggcagaggaaga

SEQ ID NO: 2466976 - RNA, 19 nt, Homo sapiens
  misc_RNA (1)...(19): siRNA sense strand
gaccaaagcuggcagagga

SEQ ID NO: 2466977 - RNA, 19 nt, Homo sapiens
  misc_RNA (1)...(19): siRNA sense strand
gcuuugaccaguaagagaa

SEQ ID NO: 2466978 - RNA, 19 nt, Homo sapiens
  misc_RNA (1)...(19): siRNA sense strand
cugagaaggaaguagcuau

SEQ ID NO: 2466979 - RNA, 19 nt, Homo sapiens
  misc_RNA (1)...(19): siRNA sense strand
cagauugcuuaguggacuu

SEQ ID NO: 2466980 - RNA, 19 nt, Homo sapiens
  misc_RNA (1)...(19): siRNA sense strand
ggcagaggaagaaggagaa

SEQ ID NO: 2466981 - RNA, 19 nt, Homo sapiens
  misc_RNA (1)...(19): siRNA sense strand
agggauuguugaagaaacu

SEQ ID NO: 2466982 - RNA, 19 nt, Homo sapiens
  misc_RNA (1)...(19): siRNA sense strand
cugauggaguagacccuaa

SEQ ID NO: 2466983 - RNA, 19 nt, Homo sapiens
  misc_RNA (1)...(19): siRNA sense strand
ugagaaggaaguagcuauu

SEQ ID NO: 2466984 - RNA, 19 nt, Homo sapiens
  misc_RNA (1)...(19): siRNA sense strand
cucuagacauugacaagaa

SEQ ID NO: 2466985 - RNA, 19 nt, Homo sapiens
  misc_RNA (1)...(19): siRNA sense strand
gcagaggaagaaggagaaa

SEQ ID NO: 2466986 - RNA, 19 nt, Homo sapiens
  misc_RNA (1)...(19): siRNA sense strand
gccaggaggaggaagaaga

SEQ ID NO: 2466987 - RNA, 19 nt, Homo sapiens
  misc_RNA (1)...(19): siRNA sense strand
ucacauaucagucagggaa

SEQ ID NO: 2466988 - RNA, 19 nt, Homo sapiens
  misc_RNA (1)...(19): siRNA sense strand
uuggauggagucagaauaa

SEQ ID NO: 2466989 - RNA, 19 nt, Homo sapiens
  misc_RNA (1)...(19): siRNA sense strand
gugauggagaggaaccaaa

SEQ ID NO: 2466990 - RNA, 19 nt, Homo sapiens
  misc_RNA (1)...(19): siRNA sense strand
gcuuaguccuuaugccaga

SEQ ID NO: 2466991 - RNA, 19 nt, Homo sapiens
  misc_RNA (1)...(19): siRNA sense strand
aguuggagguuuaucaaaa

SEQ ID NO: 2466992 - RNA, 19 nt, Homo sapiens
  misc_RNA (1)...(19): siRNA sense strand
gaagggaguggaagagcau

SEQ ID NO: 2466993 - RNA, 19 nt, Homo sapiens
  misc_RNA (1)...(19): siRNA sense strand
ggaaaauggguugcagaaa

SEQ ID NO: 2466994 - RNA, 19 nt, Homo sapiens
  misc_RNA (1)...(19): siRNA sense strand
aagacaaaacagucgaaua

SEQ ID NO: 2466995 - RNA, 19 nt, Homo sapiens
  misc_RNA (1)...(19): siRNA sense strand
gcaauggucugauggagga

SEQ ID NO: 2466996 - RNA, 19 nt, Homo sapiens
  misc_RNA (1)...(19): siRNA sense strand
ggaaacgaggcugaggaaa

SEQ ID NO: 2466997 - RNA, 19 nt, Homo sapiens
  misc_RNA (1)...(19): siRNA sense strand
ucugccaguuggagguuua

SEQ ID NO: 2466998 - RNA, 19 nt, Homo sapiens
  misc_RNA (1)...(19): siRNA sense strand
gagaugaagacaaagagga

SEQ ID NO: 2466999 - RNA, 19 nt, Homo sapiens
  misc_RNA (1)...(19): siRNA sense strand
gagauaucuuggauggagu

SEQ ID NO: 2467000 - RNA, 19 nt, Homo sapiens
  misc_RNA (1)...(19): siRNA sense strand
aggaaaauggguugcagaa

SEQ ID NO: 2467001 - RNA, 19 nt, Homo sapiens
  misc_RNA (1)...(19): siRNA sense strand
ccaaaggucuccaggacac

SEQ ID NO: 2467002 - RNA, 19 nt, Homo sapiens
  misc_RNA (1)...(19): siRNA sense strand
ugggagaugaagacaaaga

SEQ ID NO: 2467003 - RNA, 19 nt, Homo sapiens
  misc_RNA (1)...(19): siRNA sense strand
uaauaauggcagauaagga

SEQ ID NO: 2467004 - RNA, 19 nt, Homo sapiens
  misc_RNA (1)...(19): siRNA sense strand
acaaggaagaugcugagaa

SEQ ID NO: 2467005 - RNA, 19 nt, Homo sapiens
  misc_RNA (1)...(19): siRNA sense strand
cacauaucagucagggaaa

SEQ ID NO: 2467006 - RNA, 19 nt, Homo sapiens
  misc_RNA (1)...(19): siRNA sense strand
agccaguguuugagaaugu

SEQ ID NO: 2467007 - RNA, 19 nt, Homo sapiens
  misc_RNA (1)...(19): siRNA sense strand
gugagcaagacaaggauaa

SEQ ID NO: 2467008 - RNA, 19 nt, Homo sapiens
  misc_RNA (1)...(19): siRNA sense strand
ucuacaugguggugaagaa

SEQ ID NO: 2467009 - RNA, 19 nt, Homo sapiens
  misc_RNA (1)...(19): siRNA sense strand
ccacggagaaugugugcaa

SEQ ID NO: 2467010 - RNA, 19 nt, Homo sapiens
  misc_RNA (1)...(19): siRNA sense strand
uuauaaugcugcagaggau

SEQ ID NO: 2467011 - RNA, 19 nt, Homo sapiens
  misc_RNA (1)...(19): siRNA sense strand
uggccaaagugaagaacga

SEQ ID NO: 2467012 - RNA, 19 nt, Homo sapiens
  misc_RNA (1)...(19): siRNA sense strand
gugaaagcgacuuggugaa

SEQ ID NO: 2467013 - RNA, 19 nt, Homo sapiens
  misc_RNA (1)...(19): siRNA sense strand
ggauauucaguuugagaca

SEQ ID NO: 2467014 - RNA, 19 nt, Homo sapiens
  misc_RNA (1)...(19): siRNA sense strand
gcgaugaagacuuggcaga

SEQ ID NO: 2467015 - RNA, 19 nt, Homo sapiens
  misc_RNA (1)...(19): siRNA sense strand
gcaccguccaggagaacaa

SEQ ID NO: 2467016 - RNA, 19 nt, Homo sapiens
  misc_RNA (1)...(19): siRNA sense strand
acguaaauggggugaauua

SEQ ID NO: 2467017 - RNA, 19 nt, Homo sapiens
  misc_RNA (1)...(19): siRNA sense strand
cuucagcaccagugagcaa

SEQ ID NO: 2467018 - RNA, 19 nt, Homo sapiens
  misc_RNA (1)...(19): siRNA sense strand
acugagaguuggaucaaau

SEQ ID NO: 2467019 - RNA, 19 nt, Homo sapiens
  misc_RNA (1)...(19): siRNA sense strand
ggggagguggugagagaua

SEQ ID NO: 2467020 - RNA, 19 nt, Homo sapiens
  misc_RNA (1)...(19): siRNA sense strand
uguauauccuggacaacaa

SEQ ID NO: 2467021 - RNA, 19 nt, Homo sapiens
  misc_RNA (1)...(19): siRNA sense strand
aagcaaugguauggagaga

SEQ ID NO: 2467022 - RNA, 19 nt, Homo sapiens
  misc_RNA (1)...(19): siRNA sense strand
ccaagaacuggaagauuau

SEQ ID NO: 2467023 - RNA, 19 nt, Homo sapiens
  misc_RNA (1)...(19): siRNA sense strand
gcaggaguucagaggagaa

SEQ ID NO: 2467024 - RNA, 19 nt, Homo sapiens
  misc_RNA (1)...(19): siRNA sense strand
aucaaauggcucaaagaaa

SEQ ID NO: 2467025 - RNA, 19 nt, Homo sapiens
  misc_RNA (1)...(19): siRNA sense strand
gagaaauggaacuacaaga

SEQ ID NO: 2467026 - RNA, 19 nt, Homo sapiens
  misc_RNA (1)...(19): siRNA sense strand
aggagaauauuguggccau

SEQ ID NO: 2467027 - RNA, 19 nt, Homo sapiens
  misc_RNA (1)...(19): siRNA sense strand
caugaggaacagaaggaau

SEQ ID NO: 2467028 - RNA, 19 nt, Homo sapiens
  misc_RNA (1)...(19): siRNA sense strand
gagggugucaugaaggaaa

SEQ ID NO: 2467029 - RNA, 19 nt, Homo sapiens
  misc_RNA (1)...(19): siRNA sense strand
aguccgaggagcuggcuaa

SEQ ID NO: 2467030 - RNA, 19 nt, Homo sapiens
  misc_RNA (1)...(19): siRNA sense strand
acuuaggacccaagauuau

SEQ ID NO: 2467031 - RNA, 19 nt, Homo sapiens
  misc_RNA (1)...(19): siRNA sense strand
gagacugagaguuggauca

SEQ ID NO: 2467032 - RNA, 19 nt, Homo sapiens
  misc_RNA (1)...(19): siRNA sense strand
agugagaaauggaacuaca

SEQ ID NO: 2467033 - RNA, 19 nt, Homo sapiens
  misc_RNA (1)...(19): siRNA sense strand
aagaaacacaccaaggaau

SEQ ID NO: 2467034 - RNA, 19 nt, Homo sapiens
  misc_RNA (1)...(19): siRNA sense strand
acuucuacaugguggugaa

SEQ ID NO: 2467035 - RNA, 19 nt, Homo sapiens
  misc_RNA (1)...(19): siRNA sense strand
uggaaggcacccagaucaa

SEQ ID NO: 2467036 - RNA, 19 nt, Homo sapiens
  misc_RNA (1)...(19): siRNA sense strand
gcgacacggacgcggaaau

SEQ ID NO: 2467037 - RNA, 19 nt, Homo sapiens
  misc_RNA (1)...(19): siRNA sense strand
aagugaagaacgacaucaa

SEQ ID NO: 2467038 - RNA, 19 nt, Homo sapiens
  misc_RNA (1)...(19): siRNA sense strand
ggaucaaauggcucaaaga

SEQ ID NO: 2467039 - RNA, 19 nt, Homo sapiens
  misc_RNA (1)...(19): siRNA sense strand
cugcagaucgccaagaauu

SEQ ID NO: 2467040 - RNA, 19 nt, Homo sapiens
  misc_RNA (1)...(19): siRNA sense strand
ccaaagugaagaacgacau

SEQ ID NO: 2467041 - RNA, 19 nt, Homo sapiens
  misc_RNA (1)...(19): siRNA sense strand
cagaucaaccaaagugaga

SEQ ID NO: 2467042 - RNA, 19 nt, Homo sapiens
  misc_RNA (1)...(19): siRNA sense strand
gcaccagugagcaagacaa

SEQ ID NO: 2467043 - RNA, 19 nt, Homo sapiens
  misc_RNA (1)...(19): siRNA sense strand
augaagacuuggcagaaca

SEQ ID NO: 2467044 - RNA, 19 nt, Homo sapiens
  misc_RNA (1)...(19): siRNA sense strand
cgguguggaugguggccuu

SEQ ID NO: 2467045 - RNA, 19 nt, Homo sapiens
  misc_RNA (1)...(19): siRNA sense strand
aaaugaagacaaugagacu

SEQ ID NO: 2467046 - RNA, 19 nt, Homo sapiens
  misc_RNA (1)...(19): siRNA sense strand
cauuauggccugaugaagu

SEQ ID NO: 2467047 - RNA, 19 nt, Homo sapiens
  misc_RNA (1)...(19): siRNA sense strand
ggagaauauuguggccauu

SEQ ID NO: 2467048 - RNA, 19 nt, Homo sapiens
  misc_RNA (1)...(19): siRNA sense strand
gagaauggcuugaaccuac

SEQ ID NO: 2467049 - RNA, 19 nt, Homo sapiens
  misc_RNA (1)...(19): siRNA sense strand
uccggaaggaagacagaaa

SEQ ID NO: 2467050 - RNA, 19 nt, Homo sapiens
  misc_RNA (1)...(19): siRNA sense strand
cgaugaagacuuggcagaa

SEQ ID NO: 2467051 - RNA, 19 nt, Homo sapiens
  misc_RNA (1)...(19): siRNA sense strand
guguggagcuggaugagca

SEQ ID NO: 2467052 - RNA, 19 nt, Homo sapiens
  misc_RNA (1)...(19): siRNA sense strand
aggaggagacugagaguug

SEQ ID NO: 2467053 - RNA, 19 nt, Homo sapiens
  misc_RNA (1)...(19): siRNA sense strand
aggaacagaaggaaugaca

SEQ ID NO: 2467054 - RNA, 19 nt, Homo sapiens
  misc_RNA (1)...(19): siRNA sense strand
gggcuguggcuuuguauca

SEQ ID NO: 2467055 - RNA, 19 nt, Homo sapiens
  misc_RNA (1)...(19): siRNA sense strand
cacuguauauccuggacaa

SEQ ID NO: 2467056 - RNA, 19 nt, Homo sapiens
  misc_RNA (1)...(19): siRNA sense strand
ugcccaaggagguggaaaa

SEQ ID NO: 2467057 - RNA, 19 nt, Homo sapiens
  misc_RNA (1)...(19): siRNA sense strand
acucuaagauugauccaca

SEQ ID NO: 2467058 - RNA, 19 nt, Homo sapiens
  misc_RNA (1)...(19): siRNA sense strand
ggaaugaguccaagccacu

SEQ ID NO: 2467059 - RNA, 19 nt, Homo sapiens
  misc_RNA (1)...(19): siRNA sense strand
auuccaaggccacggagaa

SEQ ID NO: 2467060 - RNA, 19 nt, Homo sapiens
  misc_RNA (1)...(19): siRNA sense strand
acauagaacuccacgacgu

SEQ ID NO: 2467061 - RNA, 19 nt, Homo sapiens
  misc_RNA (1)...(19): siRNA sense strand
ucugaaagagauugcuaau

SEQ ID NO: 2467062 - RNA, 19 nt, Homo sapiens
  misc_RNA (1)...(19): siRNA sense strand
gugagaaauggaacuacaa

SEQ ID NO: 2467063 - RNA, 19 nt, Homo sapiens
  misc_RNA (1)...(19): siRNA sense strand
ccgucuauuaccagggcaa

SEQ ID NO: 2467064 - RNA, 19 nt, Homo sapiens
  misc_RNA (1)...(19): siRNA sense strand
ggaaaagaagucugagaau

SEQ ID NO: 2467065 - RNA, 19 nt, Homo sapiens
  misc_RNA (1)...(19): siRNA sense strand
acuugaaaacugugagaaa

SEQ ID NO: 2467066 - RNA, 19 nt, Homo sapiens
  misc_RNA (1)...(19): siRNA sense strand
aggaggaggaagaagagaa

SEQ ID NO: 2467067 - RNA, 19 nt, Homo sapiens
  misc_RNA (1)...(19): siRNA sense strand
aggauuauacagagaugaa

SEQ ID NO: 2467068 - RNA, 19 nt, Homo sapiens
  misc_RNA (1)...(19): siRNA sense strand
cucagaaggaggaggaaga

SEQ ID NO: 2467069 - RNA, 19 nt, Homo sapiens
  misc_RNA (1)...(19): siRNA sense strand
ggagaaaacaauagagaag

SEQ ID NO: 2467070 - RNA, 19 nt, Homo sapiens
  misc_RNA (1)...(19): siRNA sense strand
uggcaggauuauacagaga

SEQ ID NO: 2467071 - RNA, 19 nt, Homo sapiens
  misc_RNA (1)...(19): siRNA sense strand
ggaucaagaaaugcagaaa

SEQ ID NO: 2467072 - RNA, 19 nt, Homo sapiens
  misc_RNA (1)...(19): siRNA sense strand
auaaaucgaccuugggcua

SEQ ID NO: 2467073 - RNA, 19 nt, Homo sapiens
  misc_RNA (1)...(19): siRNA sense strand
acuaguuguuggaaggaga

SEQ ID NO: 2467074 - RNA, 19 nt, Homo sapiens
  misc_RNA (1)...(19): siRNA sense strand
cuagugacgaagagcuuaa

SEQ ID NO: 2467075 - RNA, 19 nt, Homo sapiens
  misc_RNA (1)...(19): siRNA sense strand
acuaugaaauucugggagu

SEQ ID NO: 2467076 - RNA, 19 nt, Homo sapiens
  misc_RNA (1)...(19): siRNA sense strand
gcuaugaugaauacggaga

SEQ ID NO: 2467077 - RNA, 19 nt, Homo sapiens
  misc_RNA (1)...(19): siRNA sense strand
gauugaaacagaaagcaga

SEQ ID NO: 2467078 - RNA, 19 nt, Homo sapiens
  misc_RNA (1)...(19): siRNA sense strand
agaaaacaauagagaagga

SEQ ID NO: 2467079 - RNA, 19 nt, Homo sapiens
  misc_RNA (1)...(19): siRNA sense strand
aagcagagucgcugaaacu

SEQ ID NO: 2467080 - RNA, 19 nt, Homo sapiens
  misc_RNA (1)...(19): siRNA sense strand
gcacaaaaggaaaagaagu

SEQ ID NO: 2467081 - RNA, 19 nt, Homo sapiens
  misc_RNA (1)...(19): siRNA sense strand
augaauacggagaugaaca

SEQ ID NO: 2467082 - RNA, 19 nt, Homo sapiens
  misc_RNA (1)...(19): siRNA sense strand
cgcaguuagaagaaacaaa

SEQ ID NO: 2467083 - RNA, 19 nt, Homo sapiens
  misc_RNA (1)...(19): siRNA sense strand
ugaacgauugaaacagaaa

SEQ ID NO: 2467084 - RNA, 19 nt, Homo sapiens
  misc_RNA (1)...(19): siRNA sense strand
ggguacaaaggaucaagaa

SEQ ID NO: 2467085 - RNA, 19 nt, Homo sapiens
  misc_RNA (1)...(19): siRNA sense strand
guaacugcaugaaggcaca

SEQ ID NO: 2467086 - RNA, 19 nt, Homo sapiens
  misc_RNA (1)...(19): siRNA sense strand
ugauaagagacuucgcuau

SEQ ID NO: 2467087 - RNA, 19 nt, Homo sapiens
  misc_RNA (1)...(19): siRNA sense strand
uggaaggagaaacaacaaa

SEQ ID NO: 2467088 - RNA, 19 nt, Homo sapiens
  misc_RNA (1)...(19): siRNA sense strand
gugacgaagagcuuaagaa

SEQ ID NO: 2467089 - RNA, 19 nt, Homo sapiens
  misc_RNA (1)...(19): siRNA sense strand
gagacuucgcuaugaugaa

SEQ ID NO: 2467090 - RNA, 19 nt, Homo sapiens
  misc_RNA (1)...(19): siRNA sense strand
gaagaaacaaauacccaga

SEQ ID NO: 2467091 - RNA, 19 nt, Homo sapiens
  misc_RNA (1)...(19): siRNA sense strand
cugcaugacuuggagaaaa

SEQ ID NO: 2467092 - RNA, 19 nt, Homo sapiens
  misc_RNA (1)...(19): siRNA sense strand
aggaagaagagaaaccuca

SEQ ID NO: 2467093 - RNA, 19 nt, Homo sapiens
  misc_RNA (1)...(19): siRNA sense strand
cgucuucuuuggaggacau

SEQ ID NO: 2467094 - RNA, 19 nt, Homo sapiens
  misc_RNA (1)...(19): siRNA sense strand
acaaauacccagaagacac

SEQ ID NO: 2467095 - RNA, 19 nt, Homo sapiens
  misc_RNA (1)...(19): siRNA sense strand
acucauuggccuacgcaga

SEQ ID NO: 2467096 - RNA, 19 nt, Homo sapiens
  misc_RNA (1)...(19): siRNA sense strand
ggaaauaacacacacgaca

SEQ ID NO: 2467097 - RNA, 19 nt, Homo sapiens
  misc_RNA (1)...(19): siRNA sense strand
caucauuggcuuaaggcau

SEQ ID NO: 2467098 - RNA, 19 nt, Homo sapiens
  misc_RNA (1)...(19): siRNA sense strand
agucuaauuucgaggagca

SEQ ID NO: 2467099 - RNA, 19 nt, Homo sapiens
  misc_RNA (1)...(19): siRNA sense strand
cucccaaagcuaaaggaaa

SEQ ID NO: 2467100 - RNA, 19 nt, Homo sapiens
  misc_RNA (1)...(19): siRNA sense strand
uuacaaaggagaagcagca

SEQ ID NO: 2467101 - RNA, 19 nt, Homo sapiens
  misc_RNA (1)...(19): siRNA sense strand
gucgaaaagcuguggaaau

SEQ ID NO: 2467102 - RNA, 19 nt, Homo sapiens
  misc_RNA (1)...(19): siRNA sense strand
cuaauuucgaggagcauau

SEQ ID NO: 2467103 - RNA, 19 nt, Homo sapiens
  misc_RNA (1)...(19): siRNA sense strand
aaggagaagcagcaggaga

SEQ ID NO: 2467104 - RNA, 19 nt, Homo sapiens
  misc_RNA (1)...(19): siRNA sense strand
cggccauuucuguaggaau

SEQ ID NO: 2467105 - RNA, 19 nt, Homo sapiens
  misc_RNA (1)...(19): siRNA sense strand
uaucuauggaaaugagaca

SEQ ID NO: 2467106 - RNA, 19 nt, Homo sapiens
  misc_RNA (1)...(19): siRNA sense strand
caaaggagaagcagcagga

SEQ ID NO: 2467107 - RNA, 19 nt, Homo sapiens
  misc_RNA (1)...(19): siRNA sense strand
augcauuggaagagauuaa

SEQ ID NO: 2467108 - RNA, 19 nt, Homo sapiens
  misc_RNA (1)...(19): siRNA sense strand
aggaagaagaacuaaggaa

SEQ ID NO: 2467109 - RNA, 19 nt, Homo sapiens
  misc_RNA (1)...(19): siRNA sense strand
aaaaggaagacgaagaaaa

SEQ ID NO: 2467110 - RNA, 19 nt, Homo sapiens
  misc_RNA (1)...(19): siRNA sense strand
aggaucaaugagagauaaa

SEQ ID NO: 2467111 - RNA, 19 nt, Homo sapiens
  misc_RNA (1)...(19): siRNA sense strand
cagagguauuagaggcaga

SEQ ID NO: 2467112 - RNA, 19 nt, Homo sapiens
  misc_RNA (1)...(19): siRNA sense strand
ggaagaagaacuaaggaag

SEQ ID NO: 2467113 - RNA, 19 nt, Homo sapiens
  misc_RNA (1)...(19): siRNA sense strand
uauuagaggcagagggauc

SEQ ID NO: 2467114 - RNA, 19 nt, Homo sapiens
  misc_RNA (1)...(19): siRNA sense strand
gguauuagaggcagaggga

SEQ ID NO: 2467115 - RNA, 19 nt, Homo sapiens
  misc_RNA (1)...(19): siRNA sense strand
uggcagaagaaauugaaaa

SEQ ID NO: 2467116 - RNA, 19 nt, Homo sapiens
  misc_RNA (1)...(19): siRNA sense strand
agcuaaggaagaagaacua

SEQ ID NO: 2467117 - RNA, 19 nt, Homo sapiens
  misc_RNA (1)...(19): siRNA sense strand
gaguaagugaggaugccua

SEQ ID NO: 2467118 - RNA, 19 nt, Homo sapiens
  misc_RNA (1)...(19): siRNA sense strand
aggaagacgaagaaaagaa

SEQ ID NO: 2467119 - RNA, 19 nt, Homo sapiens
  misc_RNA (1)...(19): siRNA sense strand
cugucaagcaguauccaaa

SEQ ID NO: 2467120 - RNA, 19 nt, Homo sapiens
  misc_RNA (1)...(19): siRNA sense strand
ugagcugauggcagagaaa

SEQ ID NO: 2467121 - RNA, 19 nt, Homo sapiens
  misc_RNA (1)...(19): siRNA sense strand
aguucaauuuuguggggaa

SEQ ID NO: 2467122 - RNA, 19 nt, Homo sapiens
  misc_RNA (1)...(19): siRNA sense strand
cuugaagaggcuacaggaa

SEQ ID NO: 2467123 - RNA, 19 nt, Homo sapiens
  misc_RNA (1)...(19): siRNA sense strand
cugacuacaaugaugaaau

SEQ ID NO: 2467124 - RNA, 19 nt, Homo sapiens
  misc_RNA (1)...(19): siRNA sense strand
ucauggaguaagugaggau

SEQ ID NO: 2467125 - RNA, 19 nt, Homo sapiens
  misc_RNA (1)...(19): siRNA sense strand
guucaauuuuguggggaaa

SEQ ID NO: 2467126 - RNA, 19 nt, Homo sapiens
  misc_RNA (1)...(19): siRNA sense strand
aggaagaaacaggugcuaa

SEQ ID NO: 2467127 - RNA, 19 nt, Homo sapiens
  misc_RNA (1)...(19): siRNA sense strand
aagcuaaggaagaagaacu

SEQ ID NO: 2467128 - RNA, 19 nt, Homo sapiens
  misc_RNA (1)...(19): siRNA sense strand
cugauggcagagaaagaua

SEQ ID NO: 2467129 - RNA, 19 nt, Homo sapiens
  misc_RNA (1)...(19): siRNA sense strand
augaaauucgucaggaaca

SEQ ID NO: 2467130 - RNA, 19 nt, Homo sapiens
  misc_RNA (1)...(19): siRNA sense strand
aggagaaauauuugccuga

SEQ ID NO: 2467131 - RNA, 19 nt, Homo sapiens
  misc_RNA (1)...(19): siRNA sense strand
agcugauggcagagaaaga

SEQ ID NO: 2467132 - RNA, 19 nt, Homo sapiens
  misc_RNA (1)...(19): siRNA sense strand
uggucguggcagagguauu

SEQ ID NO: 2467133 - RNA, 19 nt, Homo sapiens
  misc_RNA (1)...(19): siRNA sense strand
gggcagcagaagugggcaa

SEQ ID NO: 2467134 - RNA, 19 nt, Homo sapiens
  misc_RNA (1)...(19): siRNA sense strand
gugcaaguggccucggaaa

SEQ ID NO: 2467135 - RNA, 19 nt, Homo sapiens
  misc_RNA (1)...(19): siRNA sense strand
ggcaugagccugaggagca

SEQ ID NO: 2467136 - RNA, 19 nt, Homo sapiens
  misc_RNA (1)...(19): siRNA sense strand
cguggagagcagacaggaa

SEQ ID NO: 2467137 - RNA, 19 nt, Homo sapiens
  misc_RNA (1)...(19): siRNA sense strand
gggaugggucacagaacca

SEQ ID NO: 2467138 - RNA, 19 nt, Homo sapiens
  misc_RNA (1)...(19): siRNA sense strand
gcaccugagccaaucggaa

SEQ ID NO: 2467139 - RNA, 19 nt, Homo sapiens
  misc_RNA (1)...(19): siRNA sense strand
ggaagcuggaggcgugcaa

SEQ ID NO: 2467140 - RNA, 19 nt, Homo sapiens
  misc_RNA (1)...(19): siRNA sense strand
agagucugcaugcgggaaa

SEQ ID NO: 2467141 - RNA, 19 nt, Homo sapiens
  misc_RNA (1)...(19): siRNA sense strand
caacagucuuggagggcca

SEQ ID NO: 2467142 - RNA, 19 nt, Homo sapiens
  misc_RNA (1)...(19): siRNA sense strand
cugaaauuggagaaugaaa

SEQ ID NO: 2467143 - RNA, 19 nt, Homo sapiens
  misc_RNA (1)...(19): siRNA sense strand
gcucaagugcaguggcuga

SEQ ID NO: 2467144 - RNA, 19 nt, Homo sapiens
  misc_RNA (1)...(19): siRNA sense strand
ggguuagaggcuacagauu

SEQ ID NO: 2467145 - RNA, 19 nt, Homo sapiens
  misc_RNA (1)...(19): siRNA sense strand
uauaguuacaugagaguca

SEQ ID NO: 2467146 - RNA, 19 nt, Homo sapiens
  misc_RNA (1)...(19): siRNA sense strand
aagagaagccugaucccaa

SEQ ID NO: 2467147 - RNA, 19 nt, Homo sapiens
  misc_RNA (1)...(19): siRNA sense strand
ccagaagccaccagagcca

SEQ ID NO: 2467148 - RNA, 19 nt, Homo sapiens
  misc_RNA (1)...(19): siRNA sense strand
gcuagaguuccuugagcuu

SEQ ID NO: 2467149 - RNA, 19 nt, Homo sapiens
  misc_RNA (1)...(19): siRNA sense strand
caugagagucagagggcac

SEQ ID NO: 2467150 - RNA, 19 nt, Homo sapiens
  misc_RNA (1)...(19): siRNA sense strand
uggugagcuuuguuggcaa

SEQ ID NO: 2467151 - RNA, 19 nt, Homo sapiens
  misc_RNA (1)...(19): siRNA sense strand
gggagauggacccgagagu

SEQ ID NO: 2467152 - RNA, 19 nt, Homo sapiens
  misc_RNA (1)...(19): siRNA sense strand
cgagaguccaccagcugaa

SEQ ID NO: 2467153 - RNA, 19 nt, Homo sapiens
  misc_RNA (1)...(19): siRNA sense strand
ggucauuuugccagagauu

SEQ ID NO: 2467154 - RNA, 19 nt, Homo sapiens
  misc_RNA (1)...(19): siRNA sense strand
caauagcccaagagcccaa

SEQ ID NO: 2467155 - RNA, 19 nt, Homo sapiens
  misc_RNA (1)...(19): siRNA sense strand
cugaugaggaagaggacaa

SEQ ID NO: 2467156 - RNA, 19 nt, Homo sapiens
  misc_RNA (1)...(19): siRNA sense strand
cuacagaccuggagggaac

SEQ ID NO: 2467157 - RNA, 19 nt, Homo sapiens
  misc_RNA (1)...(19): siRNA sense strand
ugaacuggagacuggaaua

SEQ ID NO: 2467158 - RNA, 19 nt, Homo sapiens
  misc_RNA (1)...(19): siRNA sense strand
gcaauaagacuaagccagu

SEQ ID NO: 2467159 - RNA, 19 nt, Homo sapiens
  misc_RNA (1)...(19): siRNA sense strand
augaggaagaggacaacaa

SEQ ID NO: 2467160 - RNA, 19 nt, Homo sapiens
  misc_RNA (1)...(19): siRNA sense strand
gcuuagaugacauggcuca

SEQ ID NO: 2467161 - RNA, 19 nt, Homo sapiens
  misc_RNA (1)...(19): siRNA sense strand
cagacauguuggcagagaa

SEQ ID NO: 2467162 - RNA, 19 nt, Homo sapiens
  misc_RNA (1)...(19): siRNA sense strand
caaucaggccaguguucua

SEQ ID NO: 2467163 - RNA, 19 nt, Homo sapiens
  misc_RNA (1)...(19): siRNA sense strand
aaggcagaccgaagagaau

SEQ ID NO: 2467164 - RNA, 19 nt, Homo sapiens
  misc_RNA (1)...(19): siRNA sense strand
gaggaagaggacaacaaau

SEQ ID NO: 2467165 - RNA, 19 nt, Homo sapiens
  misc_RNA (1)...(19): siRNA sense strand
auacagugagucagaucaa

SEQ ID NO: 2467166 - RNA, 19 nt, Homo sapiens
  misc_RNA (1)...(19): siRNA sense strand
gaauguugguguugcccau

SEQ ID NO: 2467167 - RNA, 19 nt, Homo sapiens
  misc_RNA (1)...(19): siRNA sense strand
cuggcagaguuguggcaga

SEQ ID NO: 2467168 - RNA, 19 nt, Homo sapiens
  misc_RNA (1)...(19): siRNA sense strand
aggcaauaguggauccguu

SEQ ID NO: 2467169 - RNA, 19 nt, Homo sapiens
  misc_RNA (1)...(19): siRNA sense strand
gcucaggugaauaugucua

SEQ ID NO: 2467170 - RNA, 19 nt, Homo sapiens
  misc_RNA (1)...(19): siRNA sense strand
cuggagggacucagcaaau

SEQ ID NO: 2467171 - RNA, 19 nt, Homo sapiens
  misc_RNA (1)...(19): siRNA sense strand
ucucagugccggaacaaaa

SEQ ID NO: 2467172 - RNA, 19 nt, Homo sapiens
  misc_RNA (1)...(19): siRNA sense strand
cuggauucccugugaggau

SEQ ID NO: 2467173 - RNA, 19 nt, Homo sapiens
  misc_RNA (1)...(19): siRNA sense strand
gugacacugaugaggaaga

SEQ ID NO: 2467174 - RNA, 19 nt, Homo sapiens
  misc_RNA (1)...(19): siRNA sense strand
cugaagaacaugaacugga

SEQ ID NO: 2467175 - RNA, 19 nt, Homo sapiens
  misc_RNA (1)...(19): siRNA sense strand
aaucuaaccaugagcuuca

SEQ ID NO: 2467176 - RNA, 19 nt, Homo sapiens
  misc_RNA (1)...(19): siRNA sense strand
caaugauuccagaggccau

SEQ ID NO: 2467177 - RNA, 19 nt, Homo sapiens
  misc_RNA (1)...(19): siRNA sense strand
cugaugaggaagaggacaa

SEQ ID NO: 2467178 - RNA, 19 nt, Homo sapiens
  misc_RNA (1)...(19): siRNA sense strand
cuacagaccuggagggaac

SEQ ID NO: 2467179 - RNA, 19 nt, Homo sapiens
  misc_RNA (1)...(19): siRNA sense strand
ugaacuggagacuggaaua

SEQ ID NO: 2467180 - RNA, 19 nt, Homo sapiens
  misc_RNA (1)...(19): siRNA sense strand
gcaauaagacuaagccagu

SEQ ID NO: 2467181 - RNA, 19 nt, Homo sapiens
  misc_RNA (1)...(19): siRNA sense strand
augaggaagaggacaacaa

SEQ ID NO: 2467182 - RNA, 19 nt, Homo sapiens
  misc_RNA (1)...(19): siRNA sense strand
gcuuagaugacauggcuca

SEQ ID NO: 2467183 - RNA, 19 nt, Homo sapiens
  misc_RNA (1)...(19): siRNA sense strand
cagacauguuggcagagaa

SEQ ID NO: 2467184 - RNA, 19 nt, Homo sapiens
  misc_RNA (1)...(19): siRNA sense strand
caaucaggccaguguucua

SEQ ID NO: 2467185 - RNA, 19 nt, Homo sapiens
  misc_RNA (1)...(19): siRNA sense strand
aaggcagaccgaagagaau

SEQ ID NO: 2467186 - RNA, 19 nt, Homo sapiens
  misc_RNA (1)...(19): siRNA sense strand
gaggaagaggacaacaaau

SEQ ID NO: 2467187 - RNA, 19 nt, Homo sapiens
  misc_RNA (1)...(19): siRNA sense strand
auacagugagucagaucaa

SEQ ID NO: 2467188 - RNA, 19 nt, Homo sapiens
  misc_RNA (1)...(19): siRNA sense strand
gaauguugguguugcccau

SEQ ID NO: 2467189 - RNA, 19 nt, Homo sapiens
  misc_RNA (1)...(19): siRNA sense strand
cuggcagaguuguggcaga

SEQ ID NO: 2467190 - RNA, 19 nt, Homo sapiens
  misc_RNA (1)...(19): siRNA sense strand
aggcaauaguggauccguu

SEQ ID NO: 2467191 - RNA, 19 nt, Homo sapiens
  misc_RNA (1)...(19): siRNA sense strand
gcucaggugaauaugucua

SEQ ID NO: 2467192 - RNA, 19 nt, Homo sapiens
  misc_RNA (1)...(19): siRNA sense strand
cuggagggacucagcaaau

SEQ ID NO: 2467193 - RNA, 19 nt, Homo sapiens
  misc_RNA (1)...(19): siRNA sense strand
ucucagugccggaacaaaa

SEQ ID NO: 2467194 - RNA, 19 nt, Homo sapiens
  misc_RNA (1)...(19): siRNA sense strand
cuggauucccugugaggau

SEQ ID NO: 2467195 - RNA, 19 nt, Homo sapiens
  misc_RNA (1)...(19): siRNA sense strand
gugacacugaugaggaaga

SEQ ID NO: 2467196 - RNA, 19 nt, Homo sapiens
  misc_RNA (1)...(19): siRNA sense strand
cugaagaacaugaacugga

SEQ ID NO: 2467197 - RNA, 19 nt, Homo sapiens
  misc_RNA (1)...(19): siRNA sense strand
aaucuaaccaugagcuuca

SEQ ID NO: 2467198 - RNA, 19 nt, Homo sapiens
  misc_RNA (1)...(19): siRNA sense strand
caaugauuccagaggccau

SEQ ID NO: 2467199 - RNA, 19 nt, Homo sapiens
  misc_RNA (1)...(19): siRNA sense strand
cugaugaggaagaggacaa

SEQ ID NO: 2467200 - RNA, 19 nt, Homo sapiens
  misc_RNA (1)...(19): siRNA sense strand
cuacagaccuggagggaac

SEQ ID NO: 2467201 - RNA, 19 nt, Homo sapiens
  misc_RNA (1)...(19): siRNA sense strand
ugaacuggagacuggaaua

SEQ ID NO: 2467202 - RNA, 19 nt, Homo sapiens
  misc_RNA (1)...(19): siRNA sense strand
gcaauaagacuaagccagu

SEQ ID NO: 2467203 - RNA, 19 nt, Homo sapiens
  misc_RNA (1)...(19): siRNA sense strand
augaggaagaggacaacaa

SEQ ID NO: 2467204 - RNA, 19 nt, Homo sapiens
  misc_RNA (1)...(19): siRNA sense strand
gcuuagaugacauggcuca

SEQ ID NO: 2467205 - RNA, 19 nt, Homo sapiens
  misc_RNA (1)...(19): siRNA sense strand
cagacauguuggcagagaa

SEQ ID NO: 2467206 - RNA, 19 nt, Homo sapiens
  misc_RNA (1)...(19): siRNA sense strand
caaucaggccaguguucua

SEQ ID NO: 2467207 - RNA, 19 nt, Homo sapiens
  misc_RNA (1)...(19): siRNA sense strand
aaggcagaccgaagagaau

SEQ ID NO: 2467208 - RNA, 19 nt, Homo sapiens
  misc_RNA (1)...(19): siRNA sense strand
gaggaagaggacaacaaau

SEQ ID NO: 2467209 - RNA, 19 nt, Homo sapiens
  misc_RNA (1)...(19): siRNA sense strand
auacagugagucagaucaa

SEQ ID NO: 2467210 - RNA, 19 nt, Homo sapiens
  misc_RNA (1)...(19): siRNA sense strand
gaauguugguguugcccau

SEQ ID NO: 2467211 - RNA, 19 nt, Homo sapiens
  misc_RNA (1)...(19): siRNA sense strand
cuggcagaguuguggcaga

SEQ ID NO: 2467212 - RNA, 19 nt, Homo sapiens
  misc_RNA (1)...(19): siRNA sense strand
aggcaauaguggauccguu

SEQ ID NO: 2467213 - RNA, 19 nt, Homo sapiens
  misc_RNA (1)...(19): siRNA sense strand
gcucaggugaauaugucua

SEQ ID NO: 2467214 - RNA, 19 nt, Homo sapiens
  misc_RNA (1)...(19): siRNA sense strand
cuggagggacucagcaaau

SEQ ID NO: 2467215 - RNA, 19 nt, Homo sapiens
  misc_RNA (1)...(19): siRNA sense strand
ucucagugccggaacaaaa

SEQ ID NO: 2467216 - RNA, 19 nt, Homo sapiens
  misc_RNA (1)...(19): siRNA sense strand
cuggauucccugugaggau

SEQ ID NO: 2467217 - RNA, 19 nt, Homo sapiens
  misc_RNA (1)...(19): siRNA sense strand
gugacacugaugaggaaga

SEQ ID NO: 2467218 - RNA, 19 nt, Homo sapiens
  misc_RNA (1)...(19): siRNA sense strand
cugaagaacaugaacugga

SEQ ID NO: 2467219 - RNA, 19 nt, Homo sapiens
  misc_RNA (1)...(19): siRNA sense strand
aaucuaaccaugagcuuca

SEQ ID NO: 2467220 - RNA, 19 nt, Homo sapiens
  misc_RNA (1)...(19): siRNA sense strand
caaugauuccagaggccau

SEQ ID NO: 2467221 - RNA, 19 nt, Homo sapiens
  misc_RNA (1)...(19): siRNA sense strand
cugaugaggaagaggacaa

SEQ ID NO: 2467222 - RNA, 19 nt, Homo sapiens
  misc_RNA (1)...(19): siRNA sense strand
cuacagaccuggagggaac

SEQ ID NO: 2467223 - RNA, 19 nt, Homo sapiens
  misc_RNA (1)...(19): siRNA sense strand
ugaacuggagacuggaaua

SEQ ID NO: 2467224 - RNA, 19 nt, Homo sapiens
  misc_RNA (1)...(19): siRNA sense strand
gcaauaagacuaagccagu

SEQ ID NO: 2467225 - RNA, 19 nt, Homo sapiens
  misc_RNA (1)...(19): siRNA sense strand
augaggaagaggacaacaa

SEQ ID NO: 2467226 - RNA, 19 nt, Homo sapiens
  misc_RNA (1)...(19): siRNA sense strand
gcuuagaugacauggcuca

SEQ ID NO: 2467227 - RNA, 19 nt, Homo sapiens
  misc_RNA (1)...(19): siRNA sense strand
cagacauguuggcagagaa

SEQ ID NO: 2467228 - RNA, 19 nt, Homo sapiens
  misc_RNA (1)...(19): siRNA sense strand
caaucaggccaguguucua

SEQ ID NO: 2467229 - RNA, 19 nt, Homo sapiens
  misc_RNA (1)...(19): siRNA sense strand
aaggcagaccgaagagaau

SEQ ID NO: 2467230 - RNA, 19 nt, Homo sapiens
  misc_RNA (1)...(19): siRNA sense strand
gaggaagaggacaacaaau

SEQ ID NO: 2467231 - RNA, 19 nt, Homo sapiens
  misc_RNA (1)...(19): siRNA sense strand
auacagugagucagaucaa

SEQ ID NO: 2467232 - RNA, 19 nt, Homo sapiens
  misc_RNA (1)...(19): siRNA sense strand
gaauguugguguugcccau

SEQ ID NO: 2467233 - RNA, 19 nt, Homo sapiens
  misc_RNA (1)...(19): siRNA sense strand
cuggcagaguuguggcaga

SEQ ID NO: 2467234 - RNA, 19 nt, Homo sapiens
  misc_RNA (1)...(19): siRNA sense strand
aggcaauaguggauccguu

SEQ ID NO: 2467235 - RNA, 19 nt, Homo sapiens
  misc_RNA (1)...(19): siRNA sense strand
gcucaggugaauaugucua

SEQ ID NO: 2467236 - RNA, 19 nt, Homo sapiens
  misc_RNA (1)...(19): siRNA sense strand
cuggagggacucagcaaau

SEQ ID NO: 2467237 - RNA, 19 nt, Homo sapiens
  misc_RNA (1)...(19): siRNA sense strand
ucucagugccggaacaaaa

SEQ ID NO: 2467238 - RNA, 19 nt, Homo sapiens
  misc_RNA (1)...(19): siRNA sense strand
cuggauucccugugaggau

SEQ ID NO: 2467239 - RNA, 19 nt, Homo sapiens
  misc_RNA (1)...(19): siRNA sense strand
gugacacugaugaggaaga

SEQ ID NO: 2467240 - RNA, 19 nt, Homo sapiens
  misc_RNA (1)...(19): siRNA sense strand
cugaagaacaugaacugga

SEQ ID NO: 2467241 - RNA, 19 nt, Homo sapiens
  misc_RNA (1)...(19): siRNA sense strand
aaucuaaccaugagcuuca

SEQ ID NO: 2467242 - RNA, 19 nt, Homo sapiens
  misc_RNA (1)...(19): siRNA sense strand
caaugauuccagaggccau

SEQ ID NO: 2467243 - RNA, 19 nt, Homo sapiens
  misc_RNA (1)...(19): siRNA sense strand
agauggaaauggagggaca

SEQ ID NO: 2467244 - RNA, 19 nt, Homo sapiens
  misc_RNA (1)...(19): siRNA sense strand
gcugaaggaaggaagcaaa

SEQ ID NO: 2467245 - RNA, 19 nt, Homo sapiens
  misc_RNA (1)...(19): siRNA sense strand
acacaaaagacaaaagcua

SEQ ID NO: 2467246 - RNA, 19 nt, Homo sapiens
  misc_RNA (1)...(19): siRNA sense strand
ggaaagagcuuguaccauc

SEQ ID NO: 2467247 - RNA, 19 nt, Homo sapiens
  misc_RNA (1)...(19): siRNA sense strand
aggaagaggacuuugguga

SEQ ID NO: 2467248 - RNA, 19 nt, Homo sapiens
  misc_RNA (1)...(19): siRNA sense strand
ggaaagaaaugauggaucc

SEQ ID NO: 2467249 - RNA, 19 nt, Homo sapiens
  misc_RNA (1)...(19): siRNA sense strand
gggcauuguauacaugaaa

SEQ ID NO: 2467250 - RNA, 19 nt, Homo sapiens
  misc_RNA (1)...(19): siRNA sense strand
ccaaugagaacaagaccau

SEQ ID NO: 2467251 - RNA, 19 nt, Homo sapiens
  misc_RNA (1)...(19): siRNA sense strand
cuacauuguuuuaggacuu

SEQ ID NO: 2467252 - RNA, 19 nt, Homo sapiens
  misc_RNA (1)...(19): siRNA sense strand
guuugaagacuaugcaaga

SEQ ID NO: 2467253 - RNA, 19 nt, Homo sapiens
  misc_RNA (1)...(19): siRNA sense strand
aagaaaugauggauccaca

SEQ ID NO: 2467254 - RNA, 19 nt, Homo sapiens
  misc_RNA (1)...(19): siRNA sense strand
gcugcaaaugguaucaaua

SEQ ID NO: 2467255 - RNA, 19 nt, Homo sapiens
  misc_RNA (1)...(19): siRNA sense strand
auacaaagucauagcucca

SEQ ID NO: 2467256 - RNA, 19 nt, Homo sapiens
  misc_RNA (1)...(19): siRNA sense strand
cugugaagaucuggaaaga

SEQ ID NO: 2467257 - RNA, 19 nt, Homo sapiens
  misc_RNA (1)...(19): siRNA sense strand
cgucaguucuguaagacca

SEQ ID NO: 2467258 - RNA, 19 nt, Homo sapiens
  misc_RNA (1)...(19): siRNA sense strand
uggugugauuggaauuaua

SEQ ID NO: 2467259 - RNA, 19 nt, Homo sapiens
  misc_RNA (1)...(19): siRNA sense strand
uggacgagccauacgauau

SEQ ID NO: 2467260 - RNA, 19 nt, Homo sapiens
  misc_RNA (1)...(19): siRNA sense strand
ccguauugcuaaaccuaca

SEQ ID NO: 2467261 - RNA, 19 nt, Homo sapiens
  misc_RNA (1)...(19): siRNA sense strand
uuugaaaguugcaguuaca

SEQ ID NO: 2467262 - RNA, 19 nt, Homo sapiens
  misc_RNA (1)...(19): siRNA sense strand
aguuacagaugaaguuaca

SEQ ID NO: 2467263 - RNA, 19 nt, Homo sapiens
  misc_RNA (1)...(19): siRNA sense strand
ggucuuaccugauugcaca

SEQ ID NO: 2467264 - RNA, 19 nt, Homo sapiens
  misc_RNA (1)...(19): siRNA sense strand
agacaaaagcuacugggaa

SEQ ID NO: 2467265 - RNA, 19 nt, Homo sapiens
  misc_RNA (1)...(19): siRNA sense strand
uguuguagaacucgggauu

SEQ ID NO: 2467266 - RNA, 19 nt, Homo sapiens
  misc_RNA (1)...(19): siRNA sense strand
gcaauauauggcagaaacu

SEQ ID NO: 2467267 - RNA, 19 nt, Homo sapiens
  misc_RNA (1)...(19): siRNA sense strand
gcuacuuauuacugggcca

SEQ ID NO: 2467268 - RNA, 19 nt, Homo sapiens
  misc_RNA (1)...(19): siRNA sense strand
cuacagacagccagggcca

SEQ ID NO: 2467269 - RNA, 19 nt, Homo sapiens
  misc_RNA (1)...(19): siRNA sense strand
gacaaaagcuacugggaag

SEQ ID NO: 2467270 - RNA, 19 nt, Homo sapiens
  misc_RNA (1)...(19): siRNA sense strand
aaaucaaaccugugaccca

SEQ ID NO: 2467271 - RNA, 19 nt, Homo sapiens
  misc_RNA (1)...(19): siRNA sense strand
aguugcaguuacagaugaa

SEQ ID NO: 2467272 - RNA, 19 nt, Homo sapiens
  misc_RNA (1)...(19): siRNA sense strand
guauagguguucuggccuu

SEQ ID NO: 2467273 - RNA, 19 nt, Homo sapiens
  misc_RNA (1)...(19): siRNA sense strand
agaacuugguauuggauuc

SEQ ID NO: 2467274 - RNA, 19 nt, Homo sapiens
  misc_RNA (1)...(19): siRNA sense strand
caauaggaaguaagaugau

SEQ ID NO: 2467275 - RNA, 19 nt, Homo sapiens
  misc_RNA (1)...(19): siRNA sense strand
guucauagcuggaugccuc

SEQ ID NO: 2467276 - RNA, 19 nt, Homo sapiens
  misc_RNA (1)...(19): siRNA sense strand
gauuggugugauuggaauu

SEQ ID NO: 2467277 - RNA, 19 nt, Homo sapiens
  misc_RNA (1)...(19): siRNA sense strand
gccuauauuaugauugcaa

SEQ ID NO: 2467278 - RNA, 19 nt, Homo sapiens
  misc_RNA (1)...(19): siRNA sense strand
aagaaguguuguagaacuc

SEQ ID NO: 2467279 - RNA, 19 nt, Homo sapiens
  misc_RNA (1)...(19): siRNA sense strand
guggaaagagcuuguacca

SEQ ID NO: 2467280 - RNA, 19 nt, Homo sapiens
  misc_RNA (1)...(19): siRNA sense strand
uuauauuacuacuggguac

SEQ ID NO: 2467281 - RNA, 19 nt, Homo sapiens
  misc_RNA (1)...(19): siRNA sense strand
augcaaauguucagagaca

SEQ ID NO: 2467282 - RNA, 19 nt, Homo sapiens
  misc_RNA (1)...(19): siRNA sense strand
caaucuucuucguggaaua

SEQ ID NO: 2467283 - RNA, 19 nt, Homo sapiens
  misc_RNA (1)...(19): siRNA sense strand
aagcauuggcagaaggcua

SEQ ID NO: 2467284 - RNA, 19 nt, Homo sapiens
  misc_RNA (1)...(19): siRNA sense strand
auguggaaguagaggauca

SEQ ID NO: 2467285 - RNA, 19 nt, Homo sapiens
  misc_RNA (1)...(19): siRNA sense strand
aaucaugggaguuggaaca

SEQ ID NO: 2467286 - RNA, 19 nt, Homo sapiens
  misc_RNA (1)...(19): siRNA sense strand
caaaguacauugagcagca

SEQ ID NO: 2467287 - RNA, 19 nt, Homo sapiens
  misc_RNA (1)...(19): siRNA sense strand
agugggaagaugucagaaa

SEQ ID NO: 2467288 - RNA, 19 nt, Homo sapiens
  misc_RNA (1)...(19): siRNA sense strand
auggaaauggcaagagauu

SEQ ID NO: 2467289 - RNA, 19 nt, Homo sapiens
  misc_RNA (1)...(19): siRNA sense strand
accaagagagaaagaacaa

SEQ ID NO: 2467290 - RNA, 19 nt, Homo sapiens
  misc_RNA (1)...(19): siRNA sense strand
agcaguggcccuuggaaua

SEQ ID NO: 2467291 - RNA, 19 nt, Homo sapiens
  misc_RNA (1)...(19): siRNA sense strand
cagcaguggcccuuggaau

SEQ ID NO: 2467292 - RNA, 19 nt, Homo sapiens
  misc_RNA (1)...(19): siRNA sense strand
cugagaaauccaaguuuau

SEQ ID NO: 2467293 - RNA, 19 nt, Homo sapiens
  misc_RNA (1)...(19): siRNA sense strand
gguugcaauuauaggacca

SEQ ID NO: 2467294 - RNA, 19 nt, Homo sapiens
  misc_RNA (1)...(19): siRNA sense strand
ugggaaucucuuaguuaua

SEQ ID NO: 2467295 - RNA, 19 nt, Homo sapiens
  misc_RNA (1)...(19): siRNA sense strand
gcuucuaaauccggaaauu

SEQ ID NO: 2467296 - RNA, 19 nt, Homo sapiens
  misc_RNA (1)...(19): siRNA sense strand
ccauucagccuuugggcau

SEQ ID NO: 2467297 - RNA, 19 nt, Homo sapiens
  misc_RNA (1)...(19): siRNA sense strand
ccucaggcauagugggaag

SEQ ID NO: 2467298 - RNA, 19 nt, Homo sapiens
  misc_RNA (1)...(19): siRNA sense strand
gggaguuauugaugguagu

SEQ ID NO: 2467299 - RNA, 19 nt, Homo sapiens
  misc_RNA (1)...(19): siRNA sense strand
cauuaugugccaaacuaua

SEQ ID NO: 2467300 - RNA, 19 nt, Homo sapiens
  misc_RNA (1)...(19): siRNA sense strand
uuguaaaccuagaucacau

SEQ ID NO: 2467301 - RNA, 19 nt, Homo sapiens
  misc_RNA (1)...(19): siRNA sense strand
aggcauagugggaagaugu

SEQ ID NO: 2467302 - RNA, 19 nt, Homo sapiens
  misc_RNA (1)...(19): siRNA sense strand
ugggaagaugucagaaaga

SEQ ID NO: 2467303 - RNA, 19 nt, Homo sapiens
  misc_RNA (1)...(19): siRNA sense strand
gcaccaucacucagauaga

SEQ ID NO: 2467304 - RNA, 19 nt, Homo sapiens
  misc_RNA (1)...(19): siRNA sense strand
aauaauuggagcagggugu

SEQ ID NO: 2467305 - RNA, 19 nt, Homo sapiens
  misc_RNA (1)...(19): siRNA sense strand
ugucaaaccuccaacagga

SEQ ID NO: 2467306 - RNA, 19 nt, Homo sapiens
  misc_RNA (1)...(19): siRNA sense strand
ggauuuaaaagauguggaa

SEQ ID NO: 2467307 - RNA, 19 nt, Homo sapiens
  misc_RNA (1)...(19): siRNA sense strand
ucuccuaagcauugcagua

SEQ ID NO: 2467308 - RNA, 19 nt, Homo sapiens
  misc_RNA (1)...(19): siRNA sense strand
gagcaguacaaauaugaga

SEQ ID NO: 2467309 - RNA, 19 nt, Homo sapiens
  misc_RNA (1)...(19): siRNA sense strand
ugucaauucuccuaagcau

SEQ ID NO: 2467310 - RNA, 19 nt, Homo sapiens
  misc_RNA (1)...(19): siRNA sense strand
accaaagaguuuaccaaga

SEQ ID NO: 2467311 - RNA, 19 nt, Homo sapiens
  misc_RNA (1)...(19): siRNA sense strand
agagaaagaacaauggugu

SEQ ID NO: 2467312 - RNA, 19 nt, Homo sapiens
  misc_RNA (1)...(19): siRNA sense strand
agauguggaaguagaggau

SEQ ID NO: 2467313 - RNA, 19 nt, Homo sapiens
  misc_RNA (1)...(19): siRNA sense strand
ccuaagcauugcaguacuu

SEQ ID NO: 2467314 - RNA, 19 nt, Homo sapiens
  misc_RNA (1)...(19): siRNA sense strand
aguucuucauggagcagua

SEQ ID NO: 2467315 - RNA, 19 nt, Homo sapiens
  misc_RNA (1)...(19): siRNA sense strand
agaggaucaugcagauuau

SEQ ID NO: 2467316 - RNA, 19 nt, Homo sapiens
  misc_RNA (1)...(19): siRNA sense strand
gggcaaucuucuucgugga

SEQ ID NO: 2467317 - RNA, 19 nt, Homo sapiens
  misc_RNA (1)...(19): siRNA sense strand
agaugcaaauguucagaga

SEQ ID NO: 2467318 - RNA, 19 nt, Homo sapiens
  misc_RNA (1)...(19): siRNA sense strand
acacauuagcaauaagagu

SEQ ID NO: 2467319 - RNA, 19 nt, Homo sapiens
  misc_RNA (1)...(19): siRNA sense strand
aguagaggaucaugcagau

SEQ ID NO: 2467320 - RNA, 19 nt, Homo sapiens
  misc_RNA (1)...(19): siRNA sense strand
ccagggagaaaaugcaaaa

SEQ ID NO: 2467321 - RNA, 19 nt, Homo sapiens
  misc_RNA (1)...(19): siRNA sense strand
aaguagaggaucaugcaga

SEQ ID NO: 2467322 - RNA, 19 nt, Homo sapiens
  misc_RNA (1)...(19): siRNA sense strand
gguguguaaucaugggagu

SEQ ID NO: 2467323 - RNA, 19 nt, Homo sapiens
  misc_RNA (1)...(19): siRNA sense strand
ugacauuggcuuuguaaac

SEQ ID NO: 2467324 - RNA, 19 nt, Homo sapiens
  misc_RNA (1)...(19): siRNA sense strand
cagucauccuccagggcca

SEQ ID NO: 2467325 - RNA, 19 nt, Homo sapiens
  misc_RNA (1)...(19): siRNA sense strand
ccucagacucagcggccua

SEQ ID NO: 2467326 - RNA, 19 nt, Homo sapiens
  misc_RNA (1)...(19): siRNA sense strand
cagaggagcagcaggacca

SEQ ID NO: 2467327 - RNA, 19 nt, Homo sapiens
  misc_RNA (1)...(19): siRNA sense strand
aagcagaggagcagcagga

SEQ ID NO: 2467328 - RNA, 19 nt, Homo sapiens
  misc_RNA (1)...(19): siRNA sense strand
gaacaaaguaagaaggcaa

SEQ ID NO: 2467329 - RNA, 19 nt, Homo sapiens
  misc_RNA (1)...(19): siRNA sense strand
acacauggugcuagauaaa

SEQ ID NO: 2467330 - RNA, 19 nt, Homo sapiens
  misc_RNA (1)...(19): siRNA sense strand
cuucauuguuaaaggagua

SEQ ID NO: 2467331 - RNA, 19 nt, Homo sapiens
  misc_RNA (1)...(19): siRNA sense strand
ccaauauggcugugaaaca

SEQ ID NO: 2467332 - RNA, 19 nt, Homo sapiens
  misc_RNA (1)...(19): siRNA sense strand
cagcagucgucaugggcaa

SEQ ID NO: 2467333 - RNA, 19 nt, Homo sapiens
  misc_RNA (1)...(19): siRNA sense strand
gggagguggaccaaagaaa

SEQ ID NO: 2467334 - RNA, 19 nt, Homo sapiens
  misc_RNA (1)...(19): siRNA sense strand
ggauacaaccagcgaaaca

SEQ ID NO: 2467335 - RNA, 19 nt, Homo sapiens
  misc_RNA (1)...(19): siRNA sense strand
gugagaaaguagaaaacaa

SEQ ID NO: 2467336 - RNA, 19 nt, Homo sapiens
  misc_RNA (1)...(19): siRNA sense strand
caugagaagagcaggauau

SEQ ID NO: 2467337 - RNA, 19 nt, Homo sapiens
  misc_RNA (1)...(19): siRNA sense strand
cagacaaggcguccagaaa

SEQ ID NO: 2467338 - RNA, 19 nt, Homo sapiens
  misc_RNA (1)...(19): siRNA sense strand
gggaguagaagaugugaau

SEQ ID NO: 2467339 - RNA, 19 nt, Homo sapiens
  misc_RNA (1)...(19): siRNA sense strand
ucguggaggcugauagaaa

SEQ ID NO: 2467340 - RNA, 19 nt, Homo sapiens
  misc_RNA (1)...(19): siRNA sense strand
ggaugcugcuacaaggaaa

SEQ ID NO: 2467341 - RNA, 19 nt, Homo sapiens
  misc_RNA (1)...(19): siRNA sense strand
cgauuuuauuugaggcaua

SEQ ID NO: 2467342 - RNA, 19 nt, Homo sapiens
  misc_RNA (1)...(19): siRNA sense strand
ggaucaucguggaggcuga

SEQ ID NO: 2467343 - RNA, 19 nt, Homo sapiens
  misc_RNA (1)...(19): siRNA sense strand
ccauggguguugagaguga

SEQ ID NO: 2467344 - RNA, 19 nt, Homo sapiens
  misc_RNA (1)...(19): siRNA sense strand
guaaauaaguccaugccca

SEQ ID NO: 2467345 - RNA, 19 nt, Homo sapiens
  misc_RNA (1)...(19): siRNA sense strand
ggccauggguguugagagu

SEQ ID NO: 2467346 - RNA, 19 nt, Homo sapiens
  misc_RNA (1)...(19): siRNA sense strand
gugaaacagcauauagauu

SEQ ID NO: 2467347 - RNA, 19 nt, Homo sapiens
  misc_RNA (1)...(19): siRNA sense strand
caaaauagaagaagcaaga

SEQ ID NO: 2467348 - RNA, 19 nt, Homo sapiens
  misc_RNA (1)...(19): siRNA sense strand
ggaaacaagccauggguac

SEQ ID NO: 2467349 - RNA, 19 nt, Homo sapiens
  misc_RNA (1)...(19): siRNA sense strand
uaggauacaaccagcgaaa

SEQ ID NO: 2467350 - RNA, 19 nt, Homo sapiens
  misc_RNA (1)...(19): siRNA sense strand
ucaaaaugcugcugagaca

SEQ ID NO: 2467351 - RNA, 19 nt, Homo sapiens
  misc_RNA (1)...(19): siRNA sense strand
gaagauaaugaaagccaau

SEQ ID NO: 2467352 - RNA, 19 nt, Homo sapiens
  misc_RNA (1)...(19): siRNA sense strand
ccuacauaauugucaagaa

SEQ ID NO: 2467353 - RNA, 19 nt, Homo sapiens
  misc_RNA (1)...(19): siRNA sense strand
guuugagagacaugacaua

SEQ ID NO: 2467354 - RNA, 19 nt, Homo sapiens
  misc_RNA (1)...(19): siRNA sense strand
aggaaauugugcagaugau

SEQ ID NO: 2467355 - RNA, 19 nt, Homo sapiens
  misc_RNA (1)...(19): siRNA sense strand
ggaccaaagaaaaccaaaa

SEQ ID NO: 2467356 - RNA, 19 nt, Homo sapiens
  misc_RNA (1)...(19): siRNA sense strand
aaauagaagaagcaagaga

SEQ ID NO: 2467357 - RNA, 19 nt, Homo sapiens
  misc_RNA (1)...(19): siRNA sense strand
aggcaugugguuugguuaa

SEQ ID NO: 2467358 - RNA, 19 nt, Homo sapiens
  misc_RNA (1)...(19): siRNA sense strand
agacagaggcuuugggcgu

SEQ ID NO: 2467359 - RNA, 19 nt, Homo sapiens
  misc_RNA (1)...(19): siRNA sense strand
cagcucuacccaugagaaa

SEQ ID NO: 2467360 - RNA, 19 nt, Homo sapiens
  misc_RNA (1)...(19): siRNA sense strand
agaagauaaugaaagccaa

SEQ ID NO: 2467361 - RNA, 19 nt, Homo sapiens
  misc_RNA (1)...(19): siRNA sense strand
ggcccaaggagauaauaaa

SEQ ID NO: 2467362 - RNA, 19 nt, Homo sapiens
  misc_RNA (1)...(19): siRNA sense strand
auucaauuuccgagccaaa

SEQ ID NO: 2467363 - RNA, 19 nt, Homo sapiens
  misc_RNA (1)...(19): siRNA sense strand
cagaaugcccauaaugcua

SEQ ID NO: 2467364 - RNA, 19 nt, Homo sapiens
  misc_RNA (1)...(19): siRNA sense strand
gaacagaggagcacgugau

SEQ ID NO: 2467365 - RNA, 19 nt, Homo sapiens
  misc_RNA (1)...(19): siRNA sense strand
agaagaagcaagagagcuc

SEQ ID NO: 2467366 - RNA, 19 nt, Homo sapiens
  misc_RNA (1)...(19): siRNA sense strand
gguaacaagcgacuggaau

SEQ ID NO: 2467367 - RNA, 19 nt, Homo sapiens
  misc_RNA (1)...(19): siRNA sense strand
aagugaaggauguguguga

SEQ ID NO: 2467368 - RNA, 19 nt, Homo sapiens
  misc_RNA (1)...(19): siRNA sense strand
gcuagagagacuaaugauu

SEQ ID NO: 2467369 - RNA, 19 nt, Homo sapiens
  misc_RNA (1)...(19): siRNA sense strand
cgaggcagccagaggauca

SEQ ID NO: 2467370 - RNA, 19 nt, Homo sapiens
  misc_RNA (1)...(19): siRNA sense strand
ucuuagaugcagaugguau

SEQ ID NO: 2467371 - RNA, 19 nt, Homo sapiens
  misc_RNA (1)...(19): siRNA sense strand
uggcuaugauauugaagau

SEQ ID NO: 2467372 - RNA, 19 nt, Homo sapiens
  misc_RNA (1)...(19): siRNA sense strand
aaguaauguaccacagcaa

SEQ ID NO: 2467373 - RNA, 19 nt, Homo sapiens
  misc_RNA (1)...(19): siRNA sense strand
gggaaacaagccaugggua

SEQ ID NO: 2467374 - RNA, 19 nt, Homo sapiens
  misc_RNA (1)...(19): siRNA sense strand
guacaggaauuuugaagau

SEQ ID NO: 2467375 - RNA, 19 nt, Homo sapiens
  misc_RNA (1)...(19): siRNA sense strand
ugugaaacaaggacgauuu

SEQ ID NO: 2467376 - RNA, 19 nt, Homo sapiens
  misc_RNA (1)...(19): siRNA sense strand
caagagagcuccuggcuuc

SEQ ID NO: 2467377 - RNA, 19 nt, Homo sapiens
  misc_RNA (1)...(19): siRNA sense strand
ccaggugauuccuaagcaa

SEQ ID NO: 2467378 - RNA, 19 nt, Homo sapiens
  misc_RNA (1)...(19): siRNA sense strand
gaauuuauuauguggggaa

SEQ ID NO: 2467379 - RNA, 19 nt, Homo sapiens
  misc_RNA (1)...(19): siRNA sense strand
guugagagugaccaggaaa

SEQ ID NO: 2467380 - RNA, 19 nt, Homo sapiens
  misc_RNA (1)...(19): siRNA sense strand
ccacccacuuggagauuga

SEQ ID NO: 2467381 - RNA, 19 nt, Homo sapiens
  misc_RNA (1)...(19): siRNA sense strand
cguggaggcugauagaaaa

SEQ ID NO: 2467382 - RNA, 19 nt, Homo sapiens
  misc_RNA (1)...(19): siRNA sense strand
gcgaaacagaauugauacu

SEQ ID NO: 2467383 - RNA, 19 nt, Homo sapiens
  misc_RNA (1)...(19): siRNA sense strand
agacaaggcguccagaaau

SEQ ID NO: 2467384 - RNA, 19 nt, Homo sapiens
  misc_RNA (1)...(19): siRNA sense strand
cauuguuaaaggaguagaa

SEQ ID NO: 2467385 - RNA, 19 nt, Homo sapiens
  misc_RNA (1)...(19): siRNA sense strand
gcuaaauguacguugaaac

SEQ ID NO: 2467386 - RNA, 19 nt, Homo sapiens
  misc_RNA (1)...(19): siRNA sense strand
aacaaaguaagaaggcaaa

SEQ ID NO: 2467387 - RNA, 19 nt, Homo sapiens
  misc_RNA (1)...(19): siRNA sense strand
cuuagaugcagaugguauu

SEQ ID NO: 2467388 - RNA, 19 nt, Homo sapiens
  misc_RNA (1)...(19): siRNA sense strand
gugacuguuuaaucgguua

SEQ ID NO: 2467389 - RNA, 19 nt, Homo sapiens
  misc_RNA (1)...(19): siRNA sense strand
auaaaguugacgacagaga

SEQ ID NO: 2467390 - RNA, 19 nt, Homo sapiens
  misc_RNA (1)...(19): siRNA sense strand
gguuauaacuacuugggga

SEQ ID NO: 2467391 - RNA, 19 nt, Homo sapiens
  misc_RNA (1)...(19): siRNA sense strand
uuguaaacagugugguaaa

SEQ ID NO: 2467392 - RNA, 19 nt, Homo sapiens
  misc_RNA (1)...(19): siRNA sense strand
augcaaggugugcgggaaa

SEQ ID NO: 2467393 - RNA, 19 nt, Homo sapiens
  misc_RNA (1)...(19): siRNA sense strand
agaccaggacauugagaau

SEQ ID NO: 2467394 - RNA, 19 nt, Homo sapiens
  misc_RNA (1)...(19): siRNA sense strand
augucaggaaugugggaaa

SEQ ID NO: 2467395 - RNA, 19 nt, Homo sapiens
  misc_RNA (1)...(19): siRNA sense strand
auguacaaggugugguaaa

SEQ ID NO: 2467396 - RNA, 19 nt, Homo sapiens
  misc_RNA (1)...(19): siRNA sense strand
ggaaauagugagagccuuc

SEQ ID NO: 2467397 - RNA, 19 nt, Homo sapiens
  misc_RNA (1)...(19): siRNA sense strand
ugaaagaacucauagugga

SEQ ID NO: 2467398 - RNA, 19 nt, Homo sapiens
  misc_RNA (1)...(19): siRNA sense strand
augcagcgugugugggaaa

SEQ ID NO: 2467399 - RNA, 19 nt, Homo sapiens
  misc_RNA (1)...(19): siRNA sense strand
agagaugugacgcuggaaa

SEQ ID NO: 2467400 - RNA, 19 nt, Homo sapiens
  misc_RNA (1)...(19): siRNA sense strand
aggauguggcugugaacuu

SEQ ID NO: 2467401 - RNA, 19 nt, Homo sapiens
  misc_RNA (1)...(19): siRNA sense strand
gguggggaauggagagaga

SEQ ID NO: 2467402 - RNA, 19 nt, Homo sapiens
  misc_RNA (1)...(19): siRNA sense strand
aacucauaguggaggaaaa

SEQ ID NO: 2467403 - RNA, 19 nt, Homo sapiens
  misc_RNA (1)...(19): siRNA sense strand
uggacguaaagaagggaau

SEQ ID NO: 2467404 - RNA, 19 nt, Homo sapiens
  misc_RNA (1)...(19): siRNA sense strand
ccguaaacagaaacaacau

SEQ ID NO: 2467405 - RNA, 19 nt, Homo sapiens
  misc_RNA (1)...(19): siRNA sense strand
uggaaagagguccuauaaa

SEQ ID NO: 2467406 - RNA, 19 nt, Homo sapiens
  misc_RNA (1)...(19): siRNA sense strand
agcucaugcuggacacaaa

SEQ ID NO: 2467407 - RNA, 19 nt, Homo sapiens
  misc_RNA (1)...(19): siRNA sense strand
aauggaaagaccaggacau

SEQ ID NO: 2467408 - RNA, 19 nt, Homo sapiens
  misc_RNA (1)...(19): siRNA sense strand
auugagaaucuguaccaaa

SEQ ID NO: 2467409 - RNA, 19 nt, Homo sapiens
  misc_RNA (1)...(19): siRNA sense strand
uggagaaagaccuuaugaa

SEQ ID NO: 2467410 - RNA, 19 nt, Homo sapiens
  misc_RNA (1)...(19): siRNA sense strand
caguaacaccaacucgaaa

SEQ ID NO: 2467411 - RNA, 19 nt, Homo sapiens
  misc_RNA (1)...(19): siRNA sense strand
ucgaaagagaccuuaugaa

SEQ ID NO: 2467412 - RNA, 19 nt, Homo sapiens
  misc_RNA (1)...(19): siRNA sense strand
cugaacaagaaaagucaaa

SEQ ID NO: 2467413 - RNA, 19 nt, Homo sapiens
  misc_RNA (1)...(19): siRNA sense strand
acuggaaagagguccuaua

SEQ ID NO: 2467414 - RNA, 19 nt, Homo sapiens
  misc_RNA (1)...(19): siRNA sense strand
cugcagagagcaaggagau

SEQ ID NO: 2467415 - RNA, 19 nt, Homo sapiens
  misc_RNA (1)...(19): siRNA sense strand
agauucacguguacggcua

SEQ ID NO: 2467416 - RNA, 19 nt, Homo sapiens
  misc_RNA (1)...(19): siRNA sense strand
augcggacaucuacgacaa

SEQ ID NO: 2467417 - RNA, 19 nt, Homo sapiens
  misc_RNA (1)...(19): siRNA sense strand
cugagaaaaucaaagccaa

SEQ ID NO: 2467418 - RNA, 19 nt, Homo sapiens
  misc_RNA (1)...(19): siRNA sense strand
gggaaaagccaaaguuuaa

SEQ ID NO: 2467419 - RNA, 19 nt, Homo sapiens
  misc_RNA (1)...(19): siRNA sense strand
ccucaauaccaguuaauaa

SEQ ID NO: 2467420 - RNA, 19 nt, Homo sapiens
  misc_RNA (1)...(19): siRNA sense strand
ggcaaaucucagugggaaa

SEQ ID NO: 2467421 - RNA, 19 nt, Homo sapiens
  misc_RNA (1)...(19): siRNA sense strand
ccacauuggcugacguuaa

SEQ ID NO: 2467422 - RNA, 19 nt, Homo sapiens
  misc_RNA (1)...(19): siRNA sense strand
ccacacaaacagaaauaaa

SEQ ID NO: 2467423 - RNA, 19 nt, Homo sapiens
  misc_RNA (1)...(19): siRNA sense strand
gaguauauccauagacaau

SEQ ID NO: 2467424 - RNA, 19 nt, Homo sapiens
  misc_RNA (1)...(19): siRNA sense strand
gggcauauuaucugggauu

SEQ ID NO: 2467425 - RNA, 19 nt, Homo sapiens
  misc_RNA (1)...(19): siRNA sense strand
acaacugaggugagagaaa

SEQ ID NO: 2467426 - RNA, 19 nt, Homo sapiens
  misc_RNA (1)...(19): siRNA sense strand
agacauagaccuuggacuu

SEQ ID NO: 2467427 - RNA, 19 nt, Homo sapiens
  misc_RNA (1)...(19): siRNA sense strand
uggguaaagaagagacaaa

SEQ ID NO: 2467428 - RNA, 19 nt, Homo sapiens
  misc_RNA (1)...(19): siRNA sense strand
gggauggugugaagggcaa

SEQ ID NO: 2467429 - RNA, 19 nt, Homo sapiens
  misc_RNA (1)...(19): siRNA sense strand
gauauaaacaggagggacu

SEQ ID NO: 2467430 - RNA, 19 nt, Homo sapiens
  misc_RNA (1)...(19): siRNA sense strand
aaugagauucugaggauaa

SEQ ID NO: 2467431 - RNA, 19 nt, Homo sapiens
  misc_RNA (1)...(19): siRNA sense strand
gaacagugguacaggggua

SEQ ID NO: 2467432 - RNA, 19 nt, Homo sapiens
  misc_RNA (1)...(19): siRNA sense strand
uaccauaagugaugagaau

SEQ ID NO: 2467433 - RNA, 19 nt, Homo sapiens
  misc_RNA (1)...(19): siRNA sense strand
gcccaaaccagaugcauaa

SEQ ID NO: 2467434 - RNA, 19 nt, Homo sapiens
  misc_RNA (1)...(19): siRNA sense strand
ucagaaagcacaaagacaa

SEQ ID NO: 2467435 - RNA, 19 nt, Homo sapiens
  misc_RNA (1)...(19): siRNA sense strand
gguaaagaagagacaaaga

SEQ ID NO: 2467436 - RNA, 19 nt, Homo sapiens
  misc_RNA (1)...(19): siRNA sense strand
ccugaauaaagaaaggaua

SEQ ID NO: 2467437 - RNA, 19 nt, Homo sapiens
  misc_RNA (1)...(19): siRNA sense strand
gcacauuggacuucagaga

SEQ ID NO: 2467438 - RNA, 19 nt, Homo sapiens
  misc_RNA (1)...(19): siRNA sense strand
agucaaagucuucaacaua

SEQ ID NO: 2467439 - RNA, 19 nt, Homo sapiens
  misc_RNA (1)...(19): siRNA sense strand
ugaaguguuuagauggaaa

SEQ ID NO: 2467440 - RNA, 19 nt, Homo sapiens
  misc_RNA (1)...(19): siRNA sense strand
ucgucaggcuguaaaguaa

SEQ ID NO: 2467441 - RNA, 19 nt, Homo sapiens
  misc_RNA (1)...(19): siRNA sense strand
agaaaaucuuugagcacaa

SEQ ID NO: 2467442 - RNA, 19 nt, Homo sapiens
  misc_RNA (1)...(19): siRNA sense strand
cagaagacucggcggaaga

SEQ ID NO: 2467443 - RNA, 19 nt, Homo sapiens
  misc_RNA (1)...(19): siRNA sense strand
ggaaacaaugacugcacaa

SEQ ID NO: 2467444 - RNA, 19 nt, Homo sapiens
  misc_RNA (1)...(19): siRNA sense strand
ccuagaaaccagacagcau

SEQ ID NO: 2467445 - RNA, 19 nt, Homo sapiens
  misc_RNA (1)...(19): siRNA sense strand
gaacuauggaggugacaga

SEQ ID NO: 2467446 - RNA, 19 nt, Homo sapiens
  misc_RNA (1)...(19): siRNA sense strand
gcuacuacagccagauaua

SEQ ID NO: 2467447 - RNA, 19 nt, Homo sapiens
  misc_RNA (1)...(19): siRNA sense strand
caacaacugaggugagaga

SEQ ID NO: 2467448 - RNA, 19 nt, Homo sapiens
  misc_RNA (1)...(19): siRNA sense strand
gcuguaaaguaaaggaaac

SEQ ID NO: 2467449 - RNA, 19 nt, Homo sapiens
  misc_RNA (1)...(19): siRNA sense strand
ucaacugaauucugugaaa

SEQ ID NO: 2467450 - RNA, 19 nt, Homo sapiens
  misc_RNA (1)...(19): siRNA sense strand
acacaaagauuaaaugcca

SEQ ID NO: 2467451 - RNA, 19 nt, Homo sapiens
  misc_RNA (1)...(19): siRNA sense strand
ugacaaaauuggugaaaac

SEQ ID NO: 2467452 - RNA, 19 nt, Homo sapiens
  misc_RNA (1)...(19): siRNA sense strand
cggcuaucaugguggcaau

SEQ ID NO: 2467453 - RNA, 19 nt, Homo sapiens
  misc_RNA (1)...(19): siRNA sense strand
gggcaaaucucagugggaa

SEQ ID NO: 2467454 - RNA, 19 nt, Homo sapiens
  misc_RNA (1)...(19): siRNA sense strand
acaggagggacuaaagaaa

SEQ ID NO: 2467455 - RNA, 19 nt, Homo sapiens
  misc_RNA (1)...(19): siRNA sense strand
ucagauaaagguuggauau

SEQ ID NO: 2467456 - RNA, 19 nt, Homo sapiens
  misc_RNA (1)...(19): siRNA sense strand
aagaaaggauacuggaagu

SEQ ID NO: 2467457 - RNA, 19 nt, Homo sapiens
  misc_RNA (1)...(19): siRNA sense strand
acauuggacuucagagaca

SEQ ID NO: 2467458 - RNA, 19 nt, Homo sapiens
  misc_RNA (1)...(19): siRNA sense strand
gcuucuaccacaaggauau

SEQ ID NO: 2467459 - RNA, 19 nt, Homo sapiens
  misc_RNA (1)...(19): siRNA sense strand
cuguggaaaugauaguaaa

SEQ ID NO: 2467460 - RNA, 19 nt, Homo sapiens
  misc_RNA (1)...(19): siRNA sense strand
ccacaagaguuggguuauu

SEQ ID NO: 2467461 - RNA, 19 nt, Homo sapiens
  misc_RNA (1)...(19): siRNA sense strand
caagaaugacaucuaguaa

SEQ ID NO: 2467462 - RNA, 19 nt, Homo sapiens
  misc_RNA (1)...(19): siRNA sense strand
cagagaagacauagaccuu

SEQ ID NO: 2467463 - RNA, 19 nt, Homo sapiens
  misc_RNA (1)...(19): siRNA sense strand
gagaguguacagacaguua

SEQ ID NO: 2467464 - RNA, 19 nt, Homo sapiens
  misc_RNA (1)...(19): siRNA sense strand
cuucagaggccacgguaau

SEQ ID NO: 2467465 - RNA, 19 nt, Homo sapiens
  misc_RNA (1)...(19): siRNA sense strand
cgguaaucucugucaggaa

SEQ ID NO: 2467466 - RNA, 19 nt, Homo sapiens
  misc_RNA (1)...(19): siRNA sense strand
ccucacaagcucugacaau

SEQ ID NO: 2467467 - RNA, 19 nt, Homo sapiens
  misc_RNA (1)...(19): siRNA sense strand
cagauaaagguuggauaua

SEQ ID NO: 2467468 - RNA, 19 nt, Homo sapiens
  misc_RNA (1)...(19): siRNA sense strand
cuacaguggcugaaacuau

SEQ ID NO: 2467469 - RNA, 19 nt, Homo sapiens
  misc_RNA (1)...(19): siRNA sense strand
ccuacagacaggacagcua

SEQ ID NO: 2467470 - RNA, 19 nt, Homo sapiens
  misc_RNA (1)...(19): siRNA sense strand
aagcaucuccagagggcaa

SEQ ID NO: 2467471 - RNA, 19 nt, Homo sapiens
  misc_RNA (1)...(19): siRNA sense strand
gaccacacaaacagaaaua

SEQ ID NO: 2467472 - RNA, 19 nt, Homo sapiens
  misc_RNA (1)...(19): siRNA sense strand
gcacacauauauucgguga

SEQ ID NO: 2467473 - RNA, 19 nt, Homo sapiens
  misc_RNA (1)...(19): siRNA sense strand
uaucaaauccuauggacau

SEQ ID NO: 2467474 - RNA, 19 nt, Homo sapiens
  misc_RNA (1)...(19): siRNA sense strand
ccaacuaggcuuauugaga

SEQ ID NO: 2467475 - RNA, 19 nt, Homo sapiens
  misc_RNA (1)...(19): siRNA sense strand
uagaacucuuccugaauaa

SEQ ID NO: 2467476 - RNA, 19 nt, Homo sapiens
  misc_RNA (1)...(19): siRNA sense strand
aaugacagauacaggauuu

SEQ ID NO: 2467477 - RNA, 19 nt, Homo sapiens
  misc_RNA (1)...(19): siRNA sense strand
accuauaaguggcuauuaa

SEQ ID NO: 2467478 - RNA, 19 nt, Homo sapiens
  misc_RNA (1)...(19): siRNA sense strand
ccucugaucugcaugaaau

SEQ ID NO: 2467479 - RNA, 19 nt, Homo sapiens
  misc_RNA (1)...(19): siRNA sense strand
ggcuguaaaguaaaggaaa

SEQ ID NO: 2467480 - RNA, 19 nt, Homo sapiens
  misc_RNA (1)...(19): siRNA sense strand
cagugaaugaacagauauu

SEQ ID NO: 2467481 - RNA, 19 nt, Homo sapiens
  misc_RNA (1)...(19): siRNA sense strand
cagaauugacaucuacaaa

SEQ ID NO: 2467482 - RNA, 19 nt, Homo sapiens
  misc_RNA (1)...(19): siRNA sense strand
ggaaagugcuucugagacc

SEQ ID NO: 2467483 - RNA, 19 nt, Homo sapiens
  misc_RNA (1)...(19): siRNA sense strand
acuauggaggugacagaaa

SEQ ID NO: 2467484 - RNA, 19 nt, Homo sapiens
  misc_RNA (1)...(19): siRNA sense strand
ucuaagagcacuggagcua

SEQ ID NO: 2467485 - RNA, 19 nt, Homo sapiens
  misc_RNA (1)...(19): siRNA sense strand
cagaugacauuguguacau

SEQ ID NO: 2467486 - RNA, 19 nt, Homo sapiens
  misc_RNA (1)...(19): siRNA sense strand
cagaguauauccauagaca

SEQ ID NO: 2467487 - RNA, 19 nt, Homo sapiens
  misc_RNA (1)...(19): siRNA sense strand
cagcaacaacacaaagauu

SEQ ID NO: 2467488 - RNA, 19 nt, Homo sapiens
  misc_RNA (1)...(19): siRNA sense strand
ccguaauggaacugaaaua

SEQ ID NO: 2467489 - RNA, 19 nt, Homo sapiens
  misc_RNA (1)...(19): siRNA sense strand
cuaccuaccucaagggcaa

SEQ ID NO: 2467490 - RNA, 19 nt, Homo sapiens
  misc_RNA (1)...(19): siRNA sense strand
ggagagucguggugcggaa

SEQ ID NO: 2467491 - RNA, 19 nt, Homo sapiens
  misc_RNA (1)...(19): siRNA sense strand
ccugauugggagagacaaa

SEQ ID NO: 2467492 - RNA, 19 nt, Homo sapiens
  misc_RNA (1)...(19): siRNA sense strand
ccaugaaauacguggccaa

SEQ ID NO: 2467493 - RNA, 19 nt, Homo sapiens
  misc_RNA (1)...(19): siRNA sense strand
cagaggaggaguugggaca

SEQ ID NO: 2467494 - RNA, 19 nt, Homo sapiens
  misc_RNA (1)...(19): siRNA sense strand
ggacaugggcacagccaga

SEQ ID NO: 2467495 - RNA, 19 nt, Homo sapiens
  misc_RNA (1)...(19): siRNA sense strand
gagucaggcuggaggggaa

SEQ ID NO: 2467496 - RNA, 19 nt, Homo sapiens
  misc_RNA (1)...(19): siRNA sense strand
ucauggugcuccugggcua

SEQ ID NO: 2467497 - RNA, 19 nt, Homo sapiens
  misc_RNA (1)...(19): siRNA sense strand
uggaaugaaaggauagaca

SEQ ID NO: 2467498 - RNA, 19 nt, Homo sapiens
  misc_RNA (1)...(19): siRNA sense strand
gggcaauaccugagggagg

SEQ ID NO: 2467499 - RNA, 19 nt, Homo sapiens
  misc_RNA (1)...(19): siRNA sense strand
uacaagaagcuuugcgcaa

SEQ ID NO: 2467500 - RNA, 19 nt, Homo sapiens
  misc_RNA (1)...(19): siRNA sense strand
ggaccaagagaauggagca

SEQ ID NO: 2467501 - RNA, 19 nt, Homo sapiens
  misc_RNA (1)...(19): siRNA sense strand
agagaauggagcaggggaa

SEQ ID NO: 2467502 - RNA, 19 nt, Homo sapiens
  misc_RNA (1)...(19): siRNA sense strand
caucauggacuuugggaac

SEQ ID NO: 2467503 - RNA, 19 nt, Homo sapiens
  misc_RNA (1)...(19): siRNA sense strand
uguaugagguggugagggu

SEQ ID NO: 2467504 - RNA, 19 nt, Homo sapiens
  misc_RNA (1)...(19): siRNA sense strand
aagcauggaaugaaaggau

SEQ ID NO: 2467505 - RNA, 19 nt, Homo sapiens
  misc_RNA (1)...(19): siRNA sense strand
cgacagauguggcucgacu

SEQ ID NO: 2467506 - RNA, 19 nt, Homo sapiens
  misc_RNA (1)...(19): siRNA sense strand
cugaaguugcugagaccuu

SEQ ID NO: 2467507 - RNA, 19 nt, Homo sapiens
  misc_RNA (1)...(19): siRNA sense strand
gcucagauucccaggcacu

SEQ ID NO: 2467508 - RNA, 19 nt, Homo sapiens
  misc_RNA (1)...(19): siRNA sense strand
aggaguugggacagaguca

SEQ ID NO: 2467509 - RNA, 19 nt, Homo sapiens
  misc_RNA (1)...(19): siRNA sense strand
ggugacacgcugagccuga

SEQ ID NO: 2467510 - RNA, 19 nt, Homo sapiens
  misc_RNA (1)...(19): siRNA sense strand
ccaacgagguggacgagga

SEQ ID NO: 2467511 - RNA, 19 nt, Homo sapiens
  misc_RNA (1)...(19): siRNA sense strand
acaagaagauccaaggacu

SEQ ID NO: 2467512 - RNA, 19 nt, Homo sapiens
  misc_RNA (1)...(19): siRNA sense strand
cuccagaagaaguagaauu

SEQ ID NO: 2467513 - RNA, 19 nt, Homo sapiens
  misc_RNA (1)...(19): siRNA sense strand
aggaauauuucaaagcagu

SEQ ID NO: 2467514 - RNA, 19 nt, Homo sapiens
  misc_RNA (1)...(19): siRNA sense strand
gaaaugguauggaggcgca

SEQ ID NO: 2467515 - RNA, 19 nt, Homo sapiens
  misc_RNA (1)...(19): siRNA sense strand
aggaaguggccucgucaau

SEQ ID NO: 2467516 - RNA, 19 nt, Homo sapiens
  misc_RNA (1)...(19): siRNA sense strand
caguauuucaagggaggaa

SEQ ID NO: 2467517 - RNA, 19 nt, Homo sapiens
  misc_RNA (1)...(19): siRNA sense strand
gcucagaagcagaggccaa

SEQ ID NO: 2467518 - RNA, 19 nt, Homo sapiens
  misc_RNA (1)...(19): siRNA sense strand
aagcagaggccaaggcaca

SEQ ID NO: 2467519 - RNA, 19 nt, Homo sapiens
  misc_RNA (1)...(19): siRNA sense strand
aggccaaggcacagauaga

SEQ ID NO: 2467520 - RNA, 19 nt, Homo sapiens
  misc_RNA (1)...(19): siRNA sense strand
gugaacaaccucagggauc

SEQ ID NO: 2467521 - RNA, 19 nt, Homo sapiens
  misc_RNA (1)...(19): siRNA sense strand
cugucaagagcucgguaua

SEQ ID NO: 2467522 - RNA, 19 nt, Homo sapiens
  misc_RNA (1)...(19): siRNA sense strand
ggagaauggcacaggcuuc

SEQ ID NO: 2467523 - RNA, 19 nt, Homo sapiens
  misc_RNA (1)...(19): siRNA sense strand
guguccuggucaugggcua

SEQ ID NO: 2467524 - RNA, 19 nt, Homo sapiens
  misc_RNA (1)...(19): siRNA sense strand
aggcucaggaagagaagaa

SEQ ID NO: 2467525 - RNA, 19 nt, Homo sapiens
  misc_RNA (1)...(19): siRNA sense strand
aggaagagaagaagaugau

SEQ ID NO: 2467526 - RNA, 19 nt, Homo sapiens
  misc_RNA (1)...(19): siRNA sense strand
caggaagagaagaagauga

SEQ ID NO: 2467527 - RNA, 19 nt, Homo sapiens
  misc_RNA (1)...(19): siRNA sense strand
caguaaacauugaggaucc

SEQ ID NO: 2467528 - RNA, 19 nt, Homo sapiens
  misc_RNA (1)...(19): siRNA sense strand
gaugaugaguuacugggaa

SEQ ID NO: 2467529 - RNA, 19 nt, Homo sapiens
  misc_RNA (1)...(19): siRNA sense strand
ccuucuggacauuugaaua

SEQ ID NO: 2467530 - RNA, 19 nt, Homo sapiens
  misc_RNA (1)...(19): siRNA sense strand
uugugugugucuauggaua

SEQ ID NO: 2467531 - RNA, 19 nt, Homo sapiens
  misc_RNA (1)...(19): siRNA sense strand
ugacaauuguguugcucca

SEQ ID NO: 2467532 - RNA, 19 nt, Homo sapiens
  misc_RNA (1)...(19): siRNA sense strand
cuaccaggucuuugacaga

SEQ ID NO: 2467533 - RNA, 19 nt, Homo sapiens
  misc_RNA (1)...(19): siRNA sense strand
cacaguaaacauugaggau

SEQ ID NO: 2467534 - RNA, 19 nt, Homo sapiens
  misc_RNA (1)...(19): siRNA sense strand
cagcacagauggagggagu

SEQ ID NO: 2467535 - RNA, 19 nt, Homo sapiens
  misc_RNA (1)...(19): siRNA sense strand
ggugcugggaggagagcua

SEQ ID NO: 2467536 - RNA, 19 nt, Homo sapiens
  misc_RNA (1)...(19): siRNA sense strand
ggagaugacuacacagcca

SEQ ID NO: 2467537 - RNA, 19 nt, Homo sapiens
  misc_RNA (1)...(19): siRNA sense strand
aguuacuaccacagggcaa

SEQ ID NO: 2467538 - RNA, 19 nt, Homo sapiens
  misc_RNA (1)...(19): siRNA sense strand
ccgucuaugcaaagaugua

SEQ ID NO: 2467539 - RNA, 19 nt, Homo sapiens
  misc_RNA (1)...(19): siRNA sense strand
agguuggaguggaguuuga

SEQ ID NO: 2467540 - RNA, 19 nt, Homo sapiens
  misc_RNA (1)...(19): siRNA sense strand
ucaacaagguucugagcag

SEQ ID NO: 2467541 - RNA, 19 nt, Homo sapiens
  misc_RNA (1)...(19): siRNA sense strand
cggggaagccagaagauaa

SEQ ID NO: 2467542 - RNA, 19 nt, Homo sapiens
  misc_RNA (1)...(19): siRNA sense strand
acucagagacccugggcau

SEQ ID NO: 2467543 - RNA, 19 nt, Homo sapiens
  misc_RNA (1)...(19): siRNA sense strand
gggcguaccuucucgguga

SEQ ID NO: 2467544 - RNA, 19 nt, Homo sapiens
  misc_RNA (1)...(19): siRNA sense strand
caucagaacuuguccacca

SEQ ID NO: 2467545 - RNA, 19 nt, Homo sapiens
  misc_RNA (1)...(19): siRNA sense strand
uggacuacguggaggagca

SEQ ID NO: 2467546 - RNA, 19 nt, Homo sapiens
  misc_RNA (1)...(19): siRNA sense strand
gcauugagguguuccgcau

SEQ ID NO: 2467547 - RNA, 19 nt, Homo sapiens
  misc_RNA (1)...(19): siRNA sense strand
cagccggaggagagccaaa

SEQ ID NO: 2467548 - RNA, 19 nt, Homo sapiens
  misc_RNA (1)...(19): siRNA sense strand
guguuagcagccaaagaaa

SEQ ID NO: 2467549 - RNA, 19 nt, Homo sapiens
  misc_RNA (1)...(19): siRNA sense strand
cguuccuggugguggccaa

SEQ ID NO: 2467550 - RNA, 19 nt, Homo sapiens
  misc_RNA (1)...(19): siRNA sense strand
augcaaguccagaaugauu

SEQ ID NO: 2467551 - RNA, 19 nt, Homo sapiens
  misc_RNA (1)...(19): siRNA sense strand
ucaugggacuggugaggca

SEQ ID NO: 2467552 - RNA, 19 nt, Homo sapiens
  misc_RNA (1)...(19): siRNA sense strand
augagaagggucaggaguu

SEQ ID NO: 2467553 - RNA, 19 nt, Homo sapiens
  misc_RNA (1)...(19): siRNA sense strand
guguaaacuaugugggaaa

SEQ ID NO: 2467554 - RNA, 19 nt, Homo sapiens
  misc_RNA (1)...(19): siRNA sense strand
ccguauaaauguaaggaau

SEQ ID NO: 2467555 - RNA, 19 nt, Homo sapiens
  misc_RNA (1)...(19): siRNA sense strand
auguaaacaaugugggaaa

SEQ ID NO: 2467556 - RNA, 19 nt, Homo sapiens
  misc_RNA (1)...(19): siRNA sense strand
auguaaguauugugggaaa

SEQ ID NO: 2467557 - RNA, 19 nt, Homo sapiens
  misc_RNA (1)...(19): siRNA sense strand
augcaagguaugugggaaa

SEQ ID NO: 2467558 - RNA, 19 nt, Homo sapiens
  misc_RNA (1)...(19): siRNA sense strand
auguaaggaaugugggaaa

SEQ ID NO: 2467559 - RNA, 19 nt, Homo sapiens
  misc_RNA (1)...(19): siRNA sense strand
ggaguagauccaugggaaa

SEQ ID NO: 2467560 - RNA, 19 nt, Homo sapiens
  misc_RNA (1)...(19): siRNA sense strand
auguaagauaugugggaaa

SEQ ID NO: 2467561 - RNA, 19 nt, Homo sapiens
  misc_RNA (1)...(19): siRNA sense strand
auguaagauaugugggaaa

SEQ ID NO: 2467562 - RNA, 19 nt, Homo sapiens
  misc_RNA (1)...(19): siRNA sense strand
cccuauaaguguaaagaau

SEQ ID NO: 2467563 - RNA, 19 nt, Homo sapiens
  misc_RNA (1)...(19): siRNA sense strand
gaauguaagcaguguggaa

SEQ ID NO: 2467564 - RNA, 19 nt, Homo sapiens
  misc_RNA (1)...(19): siRNA sense strand
augcaaggaaugugguaaa

SEQ ID NO: 2467565 - RNA, 19 nt, Homo sapiens
  misc_RNA (1)...(19): siRNA sense strand
ccauaugaguaucaagaau

SEQ ID NO: 2467566 - RNA, 19 nt, Homo sapiens
  misc_RNA (1)...(19): siRNA sense strand
auguaagcaaugugggaaa

SEQ ID NO: 2467567 - RNA, 19 nt, Homo sapiens
  misc_RNA (1)...(19): siRNA sense strand
guguaaagaauguggggaa

SEQ ID NO: 2467568 - RNA, 19 nt, Homo sapiens
  misc_RNA (1)...(19): siRNA sense strand
uaaaugugaaugugggaaa

SEQ ID NO: 2467569 - RNA, 19 nt, Homo sapiens
  misc_RNA (1)...(19): siRNA sense strand
auauguaaguuguguggaa

SEQ ID NO: 2467570 - RNA, 19 nt, Homo sapiens
  misc_RNA (1)...(19): siRNA sense strand
ccguaugaauguaaguauu

SEQ ID NO: 2467571 - RNA, 19 nt, Homo sapiens
  misc_RNA (1)...(19): siRNA sense strand
caguauugugaacgagaaa

SEQ ID NO: 2467572 - RNA, 19 nt, Homo sapiens
  misc_RNA (1)...(19): siRNA sense strand
gaauguaaguauuguggga

SEQ ID NO: 2467573 - RNA, 19 nt, Homo sapiens
  misc_RNA (1)...(19): siRNA sense strand
uggaaauggaccucauaaa

SEQ ID NO: 2467574 - RNA, 19 nt, Homo sapiens
  misc_RNA (1)...(19): siRNA sense strand
cccuauaaguguaaacuau

SEQ ID NO: 2467575 - RNA, 19 nt, Homo sapiens
  misc_RNA (1)...(19): siRNA sense strand
cgagaaaauaccuggagua

SEQ ID NO: 2467576 - RNA, 19 nt, Homo sapiens
  misc_RNA (1)...(19): siRNA sense strand
acauuagaguugacaguga

SEQ ID NO: 2467577 - RNA, 19 nt, Homo sapiens
  misc_RNA (1)...(19): siRNA sense strand
ccauauacacauacacaau

SEQ ID NO: 2467578 - RNA, 19 nt, Homo sapiens
  misc_RNA (1)...(19): siRNA sense strand
caguuuaugucgaaggcau

SEQ ID NO: 2467579 - RNA, 19 nt, Homo sapiens
  misc_RNA (1)...(19): siRNA sense strand
acucuaugauuguaaggaa

SEQ ID NO: 2467580 - RNA, 19 nt, Homo sapiens
  misc_RNA (1)...(19): siRNA sense strand
ggaaaagccuucaggucuu

SEQ ID NO: 2467581 - RNA, 19 nt, Homo sapiens
  misc_RNA (1)...(19): siRNA sense strand
uuucagagacacaugauaa

SEQ ID NO: 2467582 - RNA, 19 nt, Homo sapiens
  misc_RNA (1)...(19): siRNA sense strand
aacucacacuggagagaaa

SEQ ID NO: 2467583 - RNA, 19 nt, Homo sapiens
  misc_RNA (1)...(19): siRNA sense strand
aacucacacuggagagaaa

SEQ ID NO: 2467584 - RNA, 19 nt, Homo sapiens
  misc_RNA (1)...(19): siRNA sense strand
gauuguaaggaaugugcaa

SEQ ID NO: 2467585 - RNA, 19 nt, Homo sapiens
  misc_RNA (1)...(19): siRNA sense strand
cagcaaugugggaaagcau

SEQ ID NO: 2467586 - RNA, 19 nt, Homo sapiens
  misc_RNA (1)...(19): siRNA sense strand
gacucacacuggagaacaa

SEQ ID NO: 2467587 - RNA, 19 nt, Homo sapiens
  misc_RNA (1)...(19): siRNA sense strand
cauuagaguugacagugaa

SEQ ID NO: 2467588 - RNA, 19 nt, Homo sapiens
  misc_RNA (1)...(19): siRNA sense strand
cgaaagaguucauacugga

SEQ ID NO: 2467589 - RNA, 19 nt, Homo sapiens
  misc_RNA (1)...(19): siRNA sense strand
gugcaaagacaugaaagaa

SEQ ID NO: 2467590 - RNA, 19 nt, Homo sapiens
  misc_RNA (1)...(19): siRNA sense strand
aaauguaaacaaugcggaa

SEQ ID NO: 2467591 - RNA, 19 nt, Homo sapiens
  misc_RNA (1)...(19): siRNA sense strand
cccuaugaaugcaaggaau

SEQ ID NO: 2467592 - RNA, 19 nt, Homo sapiens
  misc_RNA (1)...(19): siRNA sense strand
auguaaacaaugcggaaaa

SEQ ID NO: 2467593 - RNA, 19 nt, Homo sapiens
  misc_RNA (1)...(19): siRNA sense strand
agugcaaagacaugaaaga

SEQ ID NO: 2467594 - RNA, 19 nt, Homo sapiens
  misc_RNA (1)...(19): siRNA sense strand
cucuaugauuguaaggaau

SEQ ID NO: 2467595 - RNA, 19 nt, Homo sapiens
  misc_RNA (1)...(19): siRNA sense strand
acacugaagagaaaccaua

SEQ ID NO: 2467596 - RNA, 19 nt, Homo sapiens
  misc_RNA (1)...(19): siRNA sense strand
uuucgaagacacaugauaa

SEQ ID NO: 2467597 - RNA, 19 nt, Homo sapiens
  misc_RNA (1)...(19): siRNA sense strand
uuucgaagacacaugauaa

SEQ ID NO: 2467598 - RNA, 19 nt, Homo sapiens
  misc_RNA (1)...(19): siRNA sense strand
augaaaggacccacaguau

SEQ ID NO: 2467599 - RNA, 19 nt, Homo sapiens
  misc_RNA (1)...(19): siRNA sense strand
aguucauacuggagagaag

SEQ ID NO: 2467600 - RNA, 19 nt, Homo sapiens
  misc_RNA (1)...(19): siRNA sense strand
cuggagagaagccguauaa

SEQ ID NO: 2467601 - RNA, 19 nt, Homo sapiens
  misc_RNA (1)...(19): siRNA sense strand
uaucaagaauauggagaga

SEQ ID NO: 2467602 - RNA, 19 nt, Homo sapiens
  misc_RNA (1)...(19): siRNA sense strand
aacucacacugaagagaaa

SEQ ID NO: 2467603 - RNA, 19 nt, Homo sapiens
  misc_RNA (1)...(19): siRNA sense strand
caauuacauucgaguacau

SEQ ID NO: 2467604 - RNA, 19 nt, Homo sapiens
  misc_RNA (1)...(19): siRNA sense strand
gauaaugcacacuggagau

SEQ ID NO: 2467605 - RNA, 19 nt, Homo sapiens
  misc_RNA (1)...(19): siRNA sense strand
gaauguaagcaauguggga

SEQ ID NO: 2467606 - RNA, 19 nt, Homo sapiens
  misc_RNA (1)...(19): siRNA sense strand
agcuaauacccaaggaaau

SEQ ID NO: 2467607 - RNA, 19 nt, Homo sapiens
  misc_RNA (1)...(19): siRNA sense strand
ccuuaauaacuuaccagaa

SEQ ID NO: 2467608 - RNA, 19 nt, Homo sapiens
  misc_RNA (1)...(19): siRNA sense strand
ccaaggaaauucaacacca

SEQ ID NO: 2467609 - RNA, 19 nt, Homo sapiens
  misc_RNA (1)...(19): siRNA sense strand
aggaaauucaacaccaaau

SEQ ID NO: 2467610 - RNA, 19 nt, Homo sapiens
  misc_RNA (1)...(19): siRNA sense strand
acuuaccagaagagacuaa

SEQ ID NO: 2467611 - RNA, 19 nt, Homo sapiens
  misc_RNA (1)...(19): siRNA sense strand
agcuaauacccaaggaaau

SEQ ID NO: 2467612 - RNA, 19 nt, Homo sapiens
  misc_RNA (1)...(19): siRNA sense strand
ccuuaauaacuuaccagaa

SEQ ID NO: 2467613 - RNA, 19 nt, Homo sapiens
  misc_RNA (1)...(19): siRNA sense strand
ccaaggaaauucaacacca

SEQ ID NO: 2467614 - RNA, 19 nt, Homo sapiens
  misc_RNA (1)...(19): siRNA sense strand
aggaaauucaacaccaaau

SEQ ID NO: 2467615 - RNA, 19 nt, Homo sapiens
  misc_RNA (1)...(19): siRNA sense strand
acuuaccagaagagacuaa

SEQ ID NO: 2467616 - RNA, 19 nt, Homo sapiens
  misc_RNA (1)...(19): siRNA sense strand
acguaaagaaugugggaaa

SEQ ID NO: 2467617 - RNA, 19 nt, Homo sapiens
  misc_RNA (1)...(19): siRNA sense strand
auguaaagaaugugggaaa

SEQ ID NO: 2467618 - RNA, 19 nt, Homo sapiens
  misc_RNA (1)...(19): siRNA sense strand
ccuuauaaaugucaggaau

SEQ ID NO: 2467619 - RNA, 19 nt, Homo sapiens
  misc_RNA (1)...(19): siRNA sense strand
auguaaaguaugugggaga

SEQ ID NO: 2467620 - RNA, 19 nt, Homo sapiens
  misc_RNA (1)...(19): siRNA sense strand
aacucauacuggagagaaa

SEQ ID NO: 2467621 - RNA, 19 nt, Homo sapiens
  misc_RNA (1)...(19): siRNA sense strand
auguaaggaaugcgggaaa

SEQ ID NO: 2467622 - RNA, 19 nt, Homo sapiens
  misc_RNA (1)...(19): siRNA sense strand
agagaugugaugcgggaaa

SEQ ID NO: 2467623 - RNA, 19 nt, Homo sapiens
  misc_RNA (1)...(19): siRNA sense strand
ccauauaaauguaagcagu

SEQ ID NO: 2467624 - RNA, 19 nt, Homo sapiens
  misc_RNA (1)...(19): siRNA sense strand
auguaagcagugugggaaa

SEQ ID NO: 2467625 - RNA, 19 nt, Homo sapiens
  misc_RNA (1)...(19): siRNA sense strand
gaauguaguuuguguggga

SEQ ID NO: 2467626 - RNA, 19 nt, Homo sapiens
  misc_RNA (1)...(19): siRNA sense strand
agucauaugauuaggcaca

SEQ ID NO: 2467627 - RNA, 19 nt, Homo sapiens
  misc_RNA (1)...(19): siRNA sense strand
agcucauaauggagauaaa

SEQ ID NO: 2467628 - RNA, 19 nt, Homo sapiens
  misc_RNA (1)...(19): siRNA sense strand
augucaggaaugugggaaa

SEQ ID NO: 2467629 - RNA, 19 nt, Homo sapiens
  misc_RNA (1)...(19): siRNA sense strand
cccuaugaauguaaagaau

SEQ ID NO: 2467630 - RNA, 19 nt, Homo sapiens
  misc_RNA (1)...(19): siRNA sense strand
augucagguaugugggaaa

SEQ ID NO: 2467631 - RNA, 19 nt, Homo sapiens
  misc_RNA (1)...(19): siRNA sense strand
cccuaugaauguaaggaau

SEQ ID NO: 2467632 - RNA, 19 nt, Homo sapiens
  misc_RNA (1)...(19): siRNA sense strand
ccuucgaauaccugugaaa

SEQ ID NO: 2467633 - RNA, 19 nt, Homo sapiens
  misc_RNA (1)...(19): siRNA sense strand
aguaagaccaugugaaugu

SEQ ID NO: 2467634 - RNA, 19 nt, Homo sapiens
  misc_RNA (1)...(19): siRNA sense strand
caguuauguucgaaagcau

SEQ ID NO: 2467635 - RNA, 19 nt, Homo sapiens
  misc_RNA (1)...(19): siRNA sense strand
aacucacacuggagagaaa

SEQ ID NO: 2467636 - RNA, 19 nt, Homo sapiens
  misc_RNA (1)...(19): siRNA sense strand
aacucacacuggagagaaa

SEQ ID NO: 2467637 - RNA, 19 nt, Homo sapiens
  misc_RNA (1)...(19): siRNA sense strand
ugauaaagcacacuggaga

SEQ ID NO: 2467638 - RNA, 19 nt, Homo sapiens
  misc_RNA (1)...(19): siRNA sense strand
gauaaagcacacuggagau

SEQ ID NO: 2467639 - RNA, 19 nt, Homo sapiens
  misc_RNA (1)...(19): siRNA sense strand
auguaguuugugugggaaa

SEQ ID NO: 2467640 - RNA, 19 nt, Homo sapiens
  misc_RNA (1)...(19): siRNA sense strand
cgggaaaccuuuagaaacc

SEQ ID NO: 2467641 - RNA, 19 nt, Homo sapiens
  misc_RNA (1)...(19): siRNA sense strand
gaauguaaacaguguggga

SEQ ID NO: 2467642 - RNA, 19 nt, Homo sapiens
  misc_RNA (1)...(19): siRNA sense strand
acucagugaaaguaaagaa

SEQ ID NO: 2467643 - RNA, 19 nt, Homo sapiens
  misc_RNA (1)...(19): siRNA sense strand
uguccgaacacaugaaaga

SEQ ID NO: 2467644 - RNA, 19 nt, Homo sapiens
  misc_RNA (1)...(19): siRNA sense strand
augucagguaugugguaaa

SEQ ID NO: 2467645 - RNA, 19 nt, Homo sapiens
  misc_RNA (1)...(19): siRNA sense strand
agaccagagcauugaagau

SEQ ID NO: 2467646 - RNA, 19 nt, Homo sapiens
  misc_RNA (1)...(19): siRNA sense strand
aggauguggcugugaacuu

SEQ ID NO: 2467647 - RNA, 19 nt, Homo sapiens
  misc_RNA (1)...(19): siRNA sense strand
agacacaugauuaggcaca

SEQ ID NO: 2467648 - RNA, 19 nt, Homo sapiens
  misc_RNA (1)...(19): siRNA sense strand
auguaagcaauguggaaaa

SEQ ID NO: 2467649 - RNA, 19 nt, Homo sapiens
  misc_RNA (1)...(19): siRNA sense strand
uggaagagggacucaguga

SEQ ID NO: 2467650 - RNA, 19 nt, Homo sapiens
  misc_RNA (1)...(19): siRNA sense strand
gauuaagcacacuggagau

SEQ ID NO: 2467651 - RNA, 19 nt, Homo sapiens
  misc_RNA (1)...(19): siRNA sense strand
cgaaagaacucacacugga

SEQ ID NO: 2467652 - RNA, 19 nt, Homo sapiens
  misc_RNA (1)...(19): siRNA sense strand
ugaaagaacucauacugga

SEQ ID NO: 2467653 - RNA, 19 nt, Homo sapiens
  misc_RNA (1)...(19): siRNA sense strand
ugaaagaacucauacugga

SEQ ID NO: 2467654 - RNA, 19 nt, Homo sapiens
  misc_RNA (1)...(19): siRNA sense strand
auaguaagaccaugugaau

SEQ ID NO: 2467655 - RNA, 19 nt, Homo sapiens
  misc_RNA (1)...(19): siRNA sense strand
uggagagaaaccauauaaa

SEQ ID NO: 2467656 - RNA, 19 nt, Homo sapiens
  misc_RNA (1)...(19): siRNA sense strand
ucgaagacaugaaagaacu

SEQ ID NO: 2467657 - RNA, 19 nt, Homo sapiens
  misc_RNA (1)...(19): siRNA sense strand
uggagauggaccuuauaaa

SEQ ID NO: 2467658 - RNA, 19 nt, Homo sapiens
  misc_RNA (1)...(19): siRNA sense strand
uggagauggaccuuauaaa

SEQ ID NO: 2467659 - RNA, 19 nt, Homo sapiens
  misc_RNA (1)...(19): siRNA sense strand
ugguagagccuuugacugu

SEQ ID NO: 2467660 - RNA, 19 nt, Homo sapiens
  misc_RNA (1)...(19): siRNA sense strand
uggagauggaccuuauaaa

SEQ ID NO: 2467661 - RNA, 19 nt, Homo sapiens
  misc_RNA (1)...(19): siRNA sense strand
cccuaugaauguaagcaau

SEQ ID NO: 2467662 - RNA, 19 nt, Homo sapiens
  misc_RNA (1)...(19): siRNA sense strand
uccgaagacacaugauaaa

SEQ ID NO: 2467663 - RNA, 19 nt, Homo sapiens
  misc_RNA (1)...(19): siRNA sense strand
gcauugaagauugguacaa

SEQ ID NO: 2467664 - RNA, 19 nt, Homo sapiens
  misc_RNA (1)...(19): siRNA sense strand
aagaacucauacuggagaa

SEQ ID NO: 2467665 - RNA, 19 nt, Homo sapiens
  misc_RNA (1)...(19): siRNA sense strand
ugaaagaacucauaccgga

SEQ ID NO: 2467666 - RNA, 19 nt, Homo sapiens
  misc_RNA (1)...(19): siRNA sense strand
acagagaugugaugcggga

SEQ ID NO: 2467667 - RNA, 19 nt, Homo sapiens
  misc_RNA (1)...(19): siRNA sense strand
aggggagaauuuuaagaaa

SEQ ID NO: 2467668 - RNA, 19 nt, Homo sapiens
  misc_RNA (1)...(19): siRNA sense strand
cguaaagaaugugggaaag

SEQ ID NO: 2467669 - RNA, 19 nt, Homo sapiens
  misc_RNA (1)...(19): siRNA sense strand
aaauguaagcaguguggga

SEQ ID NO: 2467670 - RNA, 19 nt, Homo sapiens
  misc_RNA (1)...(19): siRNA sense strand
gcacacuggagauggacca

SEQ ID NO: 2467671 - RNA, 19 nt, Homo sapiens
  misc_RNA (1)...(19): siRNA sense strand
gggaaagucuucaugcauc

SEQ ID NO: 2467672 - RNA, 19 nt, Homo sapiens
  misc_RNA (1)...(19): siRNA sense strand
cagaagagccagugccaca

SEQ ID NO: 2467673 - RNA, 19 nt, Homo sapiens
  misc_RNA (1)...(19): siRNA sense strand
gggcagccuuuguggccua

SEQ ID NO: 2467674 - RNA, 19 nt, Homo sapiens
  misc_RNA (1)...(19): siRNA sense strand
gcaacaacauugacgagga

SEQ ID NO: 2467675 - RNA, 19 nt, Homo sapiens
  misc_RNA (1)...(19): siRNA sense strand
gcaguuagcagaagagcca

SEQ ID NO: 2467676 - RNA, 19 nt, Homo sapiens
  misc_RNA (1)...(19): siRNA sense strand
ccgccgaguucgagcucuu

SEQ ID NO: 2467677 - RNA, 19 nt, Homo sapiens
  misc_RNA (1)...(19): siRNA sense strand
gaaugaagcugaccgagga

SEQ ID NO: 2467678 - RNA, 19 nt, Homo sapiens
  misc_RNA (1)...(19): siRNA sense strand
ucuauaagcugguggccgu

SEQ ID NO: 2467679 - RNA, 19 nt, Homo sapiens
  misc_RNA (1)...(19): siRNA sense strand
caaauuaguuccagggcuu

SEQ ID NO: 2467680 - RNA, 19 nt, Homo sapiens
  misc_RNA (1)...(19): siRNA sense strand
augaagagaagaagggauu

SEQ ID NO: 2467681 - RNA, 19 nt, Homo sapiens
  misc_RNA (1)...(19): siRNA sense strand
aaucuaaggaggaggugaa

SEQ ID NO: 2467682 - RNA, 19 nt, Homo sapiens
  misc_RNA (1)...(19): siRNA sense strand
aaucaagaucacugagcua

SEQ ID NO: 2467683 - RNA, 19 nt, Homo sapiens
  misc_RNA (1)...(19): siRNA sense strand
aggagagguugcagaugaa

SEQ ID NO: 2467684 - RNA, 19 nt, Homo sapiens
  misc_RNA (1)...(19): siRNA sense strand
agauuggaucggaaaguaa

SEQ ID NO: 2467685 - RNA, 19 nt, Homo sapiens
  misc_RNA (1)...(19): siRNA sense strand
cugugaugcacuuaagaaa

SEQ ID NO: 2467686 - RNA, 19 nt, Homo sapiens
  misc_RNA (1)...(19): siRNA sense strand
ugaagauagaggagagguu

SEQ ID NO: 2467687 - RNA, 19 nt, Homo sapiens
  misc_RNA (1)...(19): siRNA sense strand
agaacagauuggaucggaa

SEQ ID NO: 2467688 - RNA, 19 nt, Homo sapiens
  misc_RNA (1)...(19): siRNA sense strand
ucaagaucacugagcuaaa

SEQ ID NO: 2467689 - RNA, 19 nt, Homo sapiens
  misc_RNA (1)...(19): siRNA sense strand
cggaaaguaaacaaagaca

SEQ ID NO: 2467690 - RNA, 19 nt, Homo sapiens
  misc_RNA (1)...(19): siRNA sense strand
cagcaaugacugugaugca

SEQ ID NO: 2467691 - RNA, 19 nt, Homo sapiens
  misc_RNA (1)...(19): siRNA sense strand
aagagaaaucuaaggagga

SEQ ID NO: 2467692 - RNA, 19 nt, Homo sapiens
  misc_RNA (1)...(19): siRNA sense strand
cagcccagcaggagguauu

SEQ ID NO: 2467693 - RNA, 19 nt, Homo sapiens
  misc_RNA (1)...(19): siRNA sense strand
ccauugaauucuuugacca

SEQ ID NO: 2467694 - RNA, 19 nt, Homo sapiens
  misc_RNA (1)...(19): siRNA sense strand
aguucgaccuacuuguaaa

SEQ ID NO: 2467695 - RNA, 19 nt, Homo sapiens
  misc_RNA (1)...(19): siRNA sense strand
agaucagucaccagagaga

SEQ ID NO: 2467696 - RNA, 19 nt, Homo sapiens
  misc_RNA (1)...(19): siRNA sense strand
agguugcagaugaagauaa

SEQ ID NO: 2467697 - RNA, 19 nt, Homo sapiens
  misc_RNA (1)...(19): siRNA sense strand
augaauggaaccagcaaca

SEQ ID NO: 2467698 - RNA, 19 nt, Homo sapiens
  misc_RNA (1)...(19): siRNA sense strand
uaaugaagauagaggagag

SEQ ID NO: 2467699 - RNA, 19 nt, Homo sapiens
  misc_RNA (1)...(19): siRNA sense strand
guaaaauggacauaccuaa

SEQ ID NO: 2467700 - RNA, 19 nt, Homo sapiens
  misc_RNA (1)...(19): siRNA sense strand
acuacugaauauaagguca

SEQ ID NO: 2467701 - RNA, 19 nt, Homo sapiens
  misc_RNA (1)...(19): siRNA sense strand
aaugaagagaagaagggau

SEQ ID NO: 2467702 - RNA, 19 nt, Homo sapiens
  misc_RNA (1)...(19): siRNA sense strand
cauugaugccacaaccaua

SEQ ID NO: 2467703 - RNA, 19 nt, Homo sapiens
  misc_RNA (1)...(19): siRNA sense strand
gcgauaaggaaaagguuaa

SEQ ID NO: 2467704 - RNA, 19 nt, Homo sapiens
  misc_RNA (1)...(19): siRNA sense strand
gugaagaggagaagaaaau

SEQ ID NO: 2467705 - RNA, 19 nt, Homo sapiens
  misc_RNA (1)...(19): siRNA sense strand
auuucaaguucaaggagua

SEQ ID NO: 2467706 - RNA, 19 nt, Homo sapiens
  misc_RNA (1)...(19): siRNA sense strand
cagcgaaagugaaggcagu

SEQ ID NO: 2467707 - RNA, 19 nt, Homo sapiens
  misc_RNA (1)...(19): siRNA sense strand
ggugaagaggagaagaaaa

SEQ ID NO: 2467708 - RNA, 19 nt, Homo sapiens
  misc_RNA (1)...(19): siRNA sense strand
ccagaugacuuuaaggcca

SEQ ID NO: 2467709 - RNA, 19 nt, Homo sapiens
  misc_RNA (1)...(19): siRNA sense strand
cagcagaaggugaaggugu

SEQ ID NO: 2467710 - RNA, 19 nt, Homo sapiens
  misc_RNA (1)...(19): siRNA sense strand
uggacaacgaagacagcua

SEQ ID NO: 2467711 - RNA, 19 nt, Homo sapiens
  misc_RNA (1)...(19): siRNA sense strand
uuggugaagaggagaagaa

SEQ ID NO: 2467712 - RNA, 19 nt, Homo sapiens
  misc_RNA (1)...(19): siRNA sense strand
ccaagaucaaggucaacaa

SEQ ID NO: 2467713 - RNA, 19 nt, Homo sapiens
  misc_RNA (1)...(19): siRNA sense strand
cggugaugcugcugccaga

SEQ ID NO: 2467714 - RNA, 19 nt, Homo sapiens
  misc_RNA (1)...(19): siRNA sense strand
aguaugaccucaaggguuc

SEQ ID NO: 2467715 - RNA, 19 nt, Homo sapiens
  misc_RNA (1)...(19): siRNA sense strand
aggaugagucagaggugga

SEQ ID NO: 2467716 - RNA, 19 nt, Homo sapiens
  misc_RNA (1)...(19): siRNA sense strand
agucagagguggaugggga

SEQ ID NO: 2467717 - RNA, 19 nt, Homo sapiens
  misc_RNA (1)...(19): siRNA sense strand
gggauauggacuuucucaa

SEQ ID NO: 2467718 - RNA, 19 nt, Homo sapiens
  misc_RNA (1)...(19): siRNA sense strand
caguaugaugccaagaaga

SEQ ID NO: 2467719 - RNA, 19 nt, Homo sapiens
  misc_RNA (1)...(19): siRNA sense strand
ccaagaagaaagcagcuca

SEQ ID NO: 2467720 - RNA, 19 nt, Homo sapiens
  misc_RNA (1)...(19): siRNA sense strand
cggcaaaccaagaggagaa

SEQ ID NO: 2467721 - RNA, 19 nt, Homo sapiens
  misc_RNA (1)...(19): siRNA sense strand
gaaaagaacagaagcgaga

SEQ ID NO: 2467722 - RNA, 19 nt, Homo sapiens
  misc_RNA (1)...(19): siRNA sense strand
agaaagagaccaugggcca

SEQ ID NO: 2467723 - RNA, 19 nt, Homo sapiens
  misc_RNA (1)...(19): siRNA sense strand
aguugacauuggagugaaa

SEQ ID NO: 2467724 - RNA, 19 nt, Homo sapiens
  misc_RNA (1)...(19): siRNA sense strand
agucaaauguacuccgcaa

SEQ ID NO: 2467725 - RNA, 19 nt, Homo sapiens
  misc_RNA (1)...(19): siRNA sense strand
aggaaaaguucuaccaaau

SEQ ID NO: 2467726 - RNA, 19 nt, Homo sapiens
  misc_RNA (1)...(19): siRNA sense strand
aggaaauggcugaaaacaa

SEQ ID NO: 2467727 - RNA, 19 nt, Homo sapiens
  misc_RNA (1)...(19): siRNA sense strand
cuuacaaccggaaggcaaa

SEQ ID NO: 2467728 - RNA, 19 nt, Homo sapiens
  misc_RNA (1)...(19): siRNA sense strand
cuuugagguuccagagaga

SEQ ID NO: 2467729 - RNA, 19 nt, Homo sapiens
  misc_RNA (1)...(19): siRNA sense strand
aggcaacaacaaagaaaga

SEQ ID NO: 2467730 - RNA, 19 nt, Homo sapiens
  misc_RNA (1)...(19): siRNA sense strand
uagcaauuuccgugaguuu

SEQ ID NO: 2467731 - RNA, 19 nt, Homo sapiens
  misc_RNA (1)...(19): siRNA sense strand
aggcaaagauguugauccu

SEQ ID NO: 2467732 - RNA, 19 nt, Homo sapiens
  misc_RNA (1)...(19): siRNA sense strand
gaaaaggacgguagggaca

SEQ ID NO: 2467733 - RNA, 19 nt, Homo sapiens
  misc_RNA (1)...(19): siRNA sense strand
gggcaaugaaaaugaaaga

SEQ ID NO: 2467734 - RNA, 19 nt, Homo sapiens
  misc_RNA (1)...(19): siRNA sense strand
uagugaagucccugagauu

SEQ ID NO: 2467735 - RNA, 19 nt, Homo sapiens
  misc_RNA (1)...(19): siRNA sense strand
aaaacaaacgcaagcaaaa

SEQ ID NO: 2467736 - RNA, 19 nt, Homo sapiens
  misc_RNA (1)...(19): siRNA sense strand
uggcugagaccuugaaaca

SEQ ID NO: 2467737 - RNA, 19 nt, Homo sapiens
  misc_RNA (1)...(19): siRNA sense strand
aaguacaucaggaggauau

SEQ ID NO: 2467738 - RNA, 19 nt, Homo sapiens
  misc_RNA (1)...(19): siRNA sense strand
ugaucagagagcaggaaau

SEQ ID NO: 2467739 - RNA, 19 nt, Homo sapiens
  misc_RNA (1)...(19): siRNA sense strand
ccgaaguacaucaggagga

SEQ ID NO: 2467740 - RNA, 19 nt, Homo sapiens
  misc_RNA (1)...(19): siRNA sense strand
acguaaaguucaacagaug

SEQ ID NO: 2467741 - RNA, 19 nt, Homo sapiens
  misc_RNA (1)...(19): siRNA sense strand
ccuugaaacaggaacugaa

SEQ ID NO: 2467742 - RNA, 19 nt, Homo sapiens
  misc_RNA (1)...(19): siRNA sense strand
aucaagugguuuagcaauu

SEQ ID NO: 2467743 - RNA, 19 nt, Homo sapiens
  misc_RNA (1)...(19): siRNA sense strand
ccagagacugugagcugua

SEQ ID NO: 2467744 - RNA, 19 nt, Homo sapiens
  misc_RNA (1)...(19): siRNA sense strand
ccuuauucgggaagugcaa

SEQ ID NO: 2467745 - RNA, 19 nt, Homo sapiens
  misc_RNA (1)...(19): siRNA sense strand
ugucggaaggucagauaau

SEQ ID NO: 2467746 - RNA, 19 nt, Homo sapiens
  misc_RNA (1)...(19): siRNA sense strand
agccgaagcgagaaggcaa

SEQ ID NO: 2467747 - RNA, 19 nt, Homo sapiens
  misc_RNA (1)...(19): siRNA sense strand
gcaaagauguugauccuuc

SEQ ID NO: 2467748 - RNA, 19 nt, Homo sapiens
  misc_RNA (1)...(19): siRNA sense strand
agggauaccacgagucuga

SEQ ID NO: 2467749 - RNA, 19 nt, Homo sapiens
  misc_RNA (1)...(19): siRNA sense strand
cugaacaugcacuacaaua

SEQ ID NO: 2467750 - RNA, 19 nt, Homo sapiens
  misc_RNA (1)...(19): siRNA sense strand
aaaacaagccgaagcgaga

SEQ ID NO: 2467751 - RNA, 19 nt, Homo sapiens
  misc_RNA (1)...(19): siRNA sense strand
ccuacuucuccgacguaaa

SEQ ID NO: 2467752 - RNA, 19 nt, Homo sapiens
  misc_RNA (1)...(19): siRNA sense strand
uggaagaaggccauauaca

SEQ ID NO: 2467753 - RNA, 19 nt, Homo sapiens
  misc_RNA (1)...(19): siRNA sense strand
gaaagagaccaugggccaa

SEQ ID NO: 2467754 - RNA, 19 nt, Homo sapiens
  misc_RNA (1)...(19): siRNA sense strand
gugaagucccugagauuuu

SEQ ID NO: 2467755 - RNA, 19 nt, Homo sapiens
  misc_RNA (1)...(19): siRNA sense strand
ucaucaagugguuuagcaa

SEQ ID NO: 2467756 - RNA, 19 nt, Homo sapiens
  misc_RNA (1)...(19): siRNA sense strand
ucggaaggucagauaauga

SEQ ID NO: 2467757 - RNA, 19 nt, Homo sapiens
  misc_RNA (1)...(19): siRNA sense strand
guuuauugaccgagcucga

SEQ ID NO: 2467758 - RNA, 19 nt, Homo sapiens
  misc_RNA (1)...(19): siRNA sense strand
aaguucaacagaugcauua

SEQ ID NO: 2467759 - RNA, 19 nt, Homo sapiens
  misc_RNA (1)...(19): siRNA sense strand
uugagguuccagagagauu

SEQ ID NO: 2467760 - RNA, 19 nt, Homo sapiens
  misc_RNA (1)...(19): siRNA sense strand
aaacaaagaugaaaggcaa

SEQ ID NO: 2467761 - RNA, 19 nt, Homo sapiens
  misc_RNA (1)...(19): siRNA sense strand
acuuagaacuguugggaau

SEQ ID NO: 2467762 - RNA, 19 nt, Homo sapiens
  misc_RNA (1)...(19): siRNA sense strand
uggaagaggcguugggcau

SEQ ID NO: 2467763 - RNA, 19 nt, Homo sapiens
  misc_RNA (1)...(19): siRNA sense strand
ggaugcaagaacagguaua

SEQ ID NO: 2467764 - RNA, 19 nt, Homo sapiens
  misc_RNA (1)...(19): siRNA sense strand
ccgugaggguccuggaaga

SEQ ID NO: 2467765 - RNA, 19 nt, Homo sapiens
  misc_RNA (1)...(19): siRNA sense strand
gagacaaaguaguugggca

SEQ ID NO: 2467766 - RNA, 19 nt, Homo sapiens
  misc_RNA (1)...(19): siRNA sense strand
guuacaaagcugugggacu

SEQ ID NO: 2467767 - RNA, 19 nt, Homo sapiens
  misc_RNA (1)...(19): siRNA sense strand
agaugaaaggcaauacaaa

SEQ ID NO: 2467768 - RNA, 19 nt, Homo sapiens
  misc_RNA (1)...(19): siRNA sense strand
cuggauaaaacuagcaaaa

SEQ ID NO: 2467769 - RNA, 19 nt, Homo sapiens
  misc_RNA (1)...(19): siRNA sense strand
cugaaugguaugaguuaau

SEQ ID NO: 2467770 - RNA, 19 nt, Homo sapiens
  misc_RNA (1)...(19): siRNA sense strand
cuagagaagauuugcugaa

SEQ ID NO: 2467771 - RNA, 19 nt, Homo sapiens
  misc_RNA (1)...(19): siRNA sense strand
gggaaugaccagaacucuu

SEQ ID NO: 2467772 - RNA, 19 nt, Homo sapiens
  misc_RNA (1)...(19): siRNA sense strand
agcgaauaguccaggaaaa

SEQ ID NO: 2467773 - RNA, 19 nt, Homo sapiens
  misc_RNA (1)...(19): siRNA sense strand
cgauauagguccaaguccu

SEQ ID NO: 2467774 - RNA, 19 nt, Homo sapiens
  misc_RNA (1)...(19): siRNA sense strand
aagagauaccagaugacaa

SEQ ID NO: 2467775 - RNA, 19 nt, Homo sapiens
  misc_RNA (1)...(19): siRNA sense strand
ugggauguuaauagugaaa

SEQ ID NO: 2467776 - RNA, 19 nt, Homo sapiens
  misc_RNA (1)...(19): siRNA sense strand
acaaacaagcagcugacaa

SEQ ID NO: 2467777 - RNA, 19 nt, Homo sapiens
  misc_RNA (1)...(19): siRNA sense strand
agagaagauuugcugaaaa

SEQ ID NO: 2467778 - RNA, 19 nt, Homo sapiens
  misc_RNA (1)...(19): siRNA sense strand
agacaaaguaguugggcag

SEQ ID NO: 2467779 - RNA, 19 nt, Homo sapiens
  misc_RNA (1)...(19): siRNA sense strand
gaaacugcaaagaggacau

SEQ ID NO: 2467780 - RNA, 19 nt, Homo sapiens
  misc_RNA (1)...(19): siRNA sense strand
gggaacaaaacaaauguaa

SEQ ID NO: 2467781 - RNA, 19 nt, Homo sapiens
  misc_RNA (1)...(19): siRNA sense strand
guuaauagugaaagaugca

SEQ ID NO: 2467782 - RNA, 19 nt, Homo sapiens
  misc_RNA (1)...(19): siRNA sense strand
agaacaggcuacagauacu

SEQ ID NO: 2467783 - RNA, 19 nt, Homo sapiens
  misc_RNA (1)...(19): siRNA sense strand
aagaaagauuugaagcacu

SEQ ID NO: 2467784 - RNA, 19 nt, Homo sapiens
  misc_RNA (1)...(19): siRNA sense strand
uggugacacuacaguuaaa

SEQ ID NO: 2467785 - RNA, 19 nt, Homo sapiens
  misc_RNA (1)...(19): siRNA sense strand
caucccagaaggugaagaa

SEQ ID NO: 2467786 - RNA, 19 nt, Homo sapiens
  misc_RNA (1)...(19): siRNA sense strand
augcaguaccugaaguaau

SEQ ID NO: 2467787 - RNA, 19 nt, Homo sapiens
  misc_RNA (1)...(19): siRNA sense strand
gcgccuacuaccuggaaca

SEQ ID NO: 2467788 - RNA, 19 nt, Homo sapiens
  misc_RNA (1)...(19): siRNA sense strand
cagauuaugcuuuuggaaa

SEQ ID NO: 2467789 - RNA, 19 nt, Homo sapiens
  misc_RNA (1)...(19): siRNA sense strand
ugugaacagcauugaguuu

SEQ ID NO: 2467790 - RNA, 19 nt, Homo sapiens
  misc_RNA (1)...(19): siRNA sense strand
ucagaaagaacgugauuuu

SEQ ID NO: 2467791 - RNA, 19 nt, Homo sapiens
  misc_RNA (1)...(19): siRNA sense strand
cuggcaaugaggugaauuu

SEQ ID NO: 2467792 - RNA, 19 nt, Homo sapiens
  misc_RNA (1)...(19): siRNA sense strand
gucugaaugguaugaguua

SEQ ID NO: 2467793 - RNA, 19 nt, Homo sapiens
  misc_RNA (1)...(19): siRNA sense strand
ucgugaagccagggaacaa

SEQ ID NO: 2467794 - RNA, 19 nt, Homo sapiens
  misc_RNA (1)...(19): siRNA sense strand
ugcaaagaggacauaguua

SEQ ID NO: 2467795 - RNA, 19 nt, Homo sapiens
  misc_RNA (1)...(19): siRNA sense strand
ucacaagcucugcagacaa

SEQ ID NO: 2467796 - RNA, 19 nt, Homo sapiens
  misc_RNA (1)...(19): siRNA sense strand
ucugcaauuucuugaucaa

SEQ ID NO: 2467797 - RNA, 19 nt, Homo sapiens
  misc_RNA (1)...(19): siRNA sense strand
cuccuuggaaagagacaaa

SEQ ID NO: 2467798 - RNA, 19 nt, Homo sapiens
  misc_RNA (1)...(19): siRNA sense strand
acaguuaaauuaugggauc

SEQ ID NO: 2467799 - RNA, 19 nt, Homo sapiens
  misc_RNA (1)...(19): siRNA sense strand
aguuaauacagaaaggagu

SEQ ID NO: 2467800 - RNA, 19 nt, Homo sapiens
  misc_RNA (1)...(19): siRNA sense strand
ggugaagaagaucuggcaa

SEQ ID NO: 2467801 - RNA, 19 nt, Homo sapiens
  misc_RNA (1)...(19): siRNA sense strand
cugaaauuuuggaacggaa

SEQ ID NO: 2467802 - RNA, 19 nt, Homo sapiens
  misc_RNA (1)...(19): siRNA sense strand
cgacuauaaggguguuaca

SEQ ID NO: 2467803 - RNA, 19 nt, Homo sapiens
  misc_RNA (1)...(19): siRNA sense strand
aggcguugggcauggguuu

SEQ ID NO: 2467804 - RNA, 19 nt, Homo sapiens
  misc_RNA (1)...(19): siRNA sense strand
gaagaaacugcaaagagga

SEQ ID NO: 2467805 - RNA, 19 nt, Homo sapiens
  misc_RNA (1)...(19): siRNA sense strand
ucccagaaggugaagaaga

SEQ ID NO: 2467806 - RNA, 19 nt, Homo sapiens
  misc_RNA (1)...(19): siRNA sense strand
gaaccgacuauaagggugu

SEQ ID NO: 2467807 - RNA, 19 nt, Homo sapiens
  misc_RNA (1)...(19): siRNA sense strand
agguccaaguccuggcaau

SEQ ID NO: 2467808 - RNA, 19 nt, Homo sapiens
  misc_RNA (1)...(19): siRNA sense strand
cgaaaggagugcuacgcua

SEQ ID NO: 2467809 - RNA, 19 nt, Homo sapiens
  misc_RNA (1)...(19): siRNA sense strand
gcuaaggacgacagcgaga

SEQ ID NO: 2467810 - RNA, 19 nt, Homo sapiens
  misc_RNA (1)...(19): siRNA sense strand
ccaucaaugccaaggagau

SEQ ID NO: 2467811 - RNA, 19 nt, Homo sapiens
  misc_RNA (1)...(19): siRNA sense strand
uggcagagcuggaggaagg

SEQ ID NO: 2467812 - RNA, 19 nt, Homo sapiens
  misc_RNA (1)...(19): siRNA sense strand
gcaucaacgcccugagcga

SEQ ID NO: 2467813 - RNA, 19 nt, Homo sapiens
  misc_RNA (1)...(19): siRNA sense strand
gcgcaagauugaugagcag

SEQ ID NO: 2467814 - RNA, 19 nt, Homo sapiens
  misc_RNA (1)...(19): siRNA sense strand
cagcaaugacauggaguau

SEQ ID NO: 2467815 - RNA, 19 nt, Homo sapiens
  misc_RNA (1)...(19): siRNA sense strand
ucaaauggcgggaggagca

SEQ ID NO: 2467816 - RNA, 19 nt, Homo sapiens
  misc_RNA (1)...(19): siRNA sense strand
auaaaguggaugagcagau

SEQ ID NO: 2467817 - RNA, 19 nt, Homo sapiens
  misc_RNA (1)...(19): siRNA sense strand
gcacagugaugaucgcuca

SEQ ID NO: 2467818 - RNA, 19 nt, Homo sapiens
  misc_RNA (1)...(19): siRNA sense strand
aacauuaagacuaggguga

SEQ ID NO: 2467819 - RNA, 19 nt, Homo sapiens
  misc_RNA (1)...(19): siRNA sense strand
cccauaaaguggaugagca

SEQ ID NO: 2467820 - RNA, 19 nt, Homo sapiens
  misc_RNA (1)...(19): siRNA sense strand
ccauaaaguggaugagcag

SEQ ID NO: 2467821 - RNA, 19 nt, Homo sapiens
  misc_RNA (1)...(19): siRNA sense strand
ccaucgaggagaccagcaa

SEQ ID NO: 2467822 - RNA, 19 nt, Homo sapiens
  misc_RNA (1)...(19): siRNA sense strand
uggaugaagcuaaggaaau

SEQ ID NO: 2467823 - RNA, 19 nt, Homo sapiens
  misc_RNA (1)...(19): siRNA sense strand
gcagcaugauagagcucaa

SEQ ID NO: 2467824 - RNA, 19 nt, Homo sapiens
  misc_RNA (1)...(19): siRNA sense strand
cuggaugaagcuaaggaaa

SEQ ID NO: 2467825 - RNA, 19 nt, Homo sapiens
  misc_RNA (1)...(19): siRNA sense strand
aauaaaugcuaucuggaca

SEQ ID NO: 2467826 - RNA, 19 nt, Homo sapiens
  misc_RNA (1)...(19): siRNA sense strand
gagcgauuucggaagcaaa

SEQ ID NO: 2467827 - RNA, 19 nt, Homo sapiens
  misc_RNA (1)...(19): siRNA sense strand
gaaauugguuggugcagca

SEQ ID NO: 2467828 - RNA, 19 nt, Homo sapiens
  misc_RNA (1)...(19): siRNA sense strand
gugugaaagugaagaggcu

SEQ ID NO: 2467829 - RNA, 19 nt, Homo sapiens
  misc_RNA (1)...(19): siRNA sense strand
ugacauuugaggaagaaaa

SEQ ID NO: 2467830 - RNA, 19 nt, Homo sapiens
  misc_RNA (1)...(19): siRNA sense strand
accagagacuguaggaaga

SEQ ID NO: 2467831 - RNA, 19 nt, Homo sapiens
  misc_RNA (1)...(19): siRNA sense strand
gcguaaguaaggacaugaa

SEQ ID NO: 2467832 - RNA, 19 nt, Homo sapiens
  misc_RNA (1)...(19): siRNA sense strand
uugcaguagaccagagaga

SEQ ID NO: 2467833 - RNA, 19 nt, Homo sapiens
  misc_RNA (1)...(19): siRNA sense strand
auuuauauguucagccgua

SEQ ID NO: 2467834 - RNA, 19 nt, Homo sapiens
  misc_RNA (1)...(19): siRNA sense strand
cuguaucagaagaagcuaa

SEQ ID NO: 2467835 - RNA, 19 nt, Homo sapiens
  misc_RNA (1)...(19): siRNA sense strand
aggcagagcgauuucggaa

SEQ ID NO: 2467836 - RNA, 19 nt, Homo sapiens
  misc_RNA (1)...(19): siRNA sense strand
gcgagcuguuaaagaugaa

SEQ ID NO: 2467837 - RNA, 19 nt, Homo sapiens
  misc_RNA (1)...(19): siRNA sense strand
gugaagaggcuggaguaau

SEQ ID NO: 2467838 - RNA, 19 nt, Homo sapiens
  misc_RNA (1)...(19): siRNA sense strand
gacuguaggaagaggcaga

SEQ ID NO: 2467839 - RNA, 19 nt, Homo sapiens
  misc_RNA (1)...(19): siRNA sense strand
aagugaagaggcuggagua

SEQ ID NO: 2467840 - RNA, 19 nt, Homo sapiens
  misc_RNA (1)...(19): siRNA sense strand
agugaagaggcuggaguaa

SEQ ID NO: 2467841 - RNA, 19 nt, Homo sapiens
  misc_RNA (1)...(19): siRNA sense strand
cugauguaugcaagcguaa

SEQ ID NO: 2467842 - RNA, 19 nt, Homo sapiens
  misc_RNA (1)...(19): siRNA sense strand
ggauuaaaguauuugcuuc

SEQ ID NO: 2467843 - RNA, 19 nt, Homo sapiens
  misc_RNA (1)...(19): siRNA sense strand
ccaugaaguggaugacuca

SEQ ID NO: 2467844 - RNA, 19 nt, Homo sapiens
  misc_RNA (1)...(19): siRNA sense strand
uggcaugugaugacuuaaa

SEQ ID NO: 2467845 - RNA, 19 nt, Homo sapiens
  misc_RNA (1)...(19): siRNA sense strand
ggcuggaguaauugaaaca

SEQ ID NO: 2467846 - RNA, 19 nt, Homo sapiens
  misc_RNA (1)...(19): siRNA sense strand
guucagaaacucuucaaaa

SEQ ID NO: 2467847 - RNA, 19 nt, Homo sapiens
  misc_RNA (1)...(19): siRNA sense strand
cuuaggaaagccuggaaga

SEQ ID NO: 2467848 - RNA, 19 nt, Homo sapiens
  misc_RNA (1)...(19): siRNA sense strand
uagacaaaccagagacugu

SEQ ID NO: 2467849 - RNA, 19 nt, Homo sapiens
  misc_RNA (1)...(19): siRNA sense strand
gggacggauacaacgacua

SEQ ID NO: 2467850 - RNA, 19 nt, Homo sapiens
  misc_RNA (1)...(19): siRNA sense strand
cggcuucagaggcagauaa

SEQ ID NO: 2467851 - RNA, 19 nt, Homo sapiens
  misc_RNA (1)...(19): siRNA sense strand
guguuguacuuguggaaag

SEQ ID NO: 2467852 - RNA, 19 nt, Homo sapiens
  misc_RNA (1)...(19): siRNA sense strand
ucuaggaaacucagaagau

SEQ ID NO: 2467853 - RNA, 19 nt, Homo sapiens
  misc_RNA (1)...(19): siRNA sense strand
ccagguggucccagugcua

SEQ ID NO: 2467854 - RNA, 19 nt, Homo sapiens
  misc_RNA (1)...(19): siRNA sense strand
aauugugucgucagaauaa

SEQ ID NO: 2467855 - RNA, 19 nt, Homo sapiens
  misc_RNA (1)...(19): siRNA sense strand
ggaagugguuaaagccuga

SEQ ID NO: 2467856 - RNA, 19 nt, Homo sapiens
  misc_RNA (1)...(19): siRNA sense strand
aggcacaggccgaggaugu

SEQ ID NO: 2467857 - RNA, 19 nt, Homo sapiens
  misc_RNA (1)...(19): siRNA sense strand
gagguggagcugagcgcaa

SEQ ID NO: 2467858 - RNA, 19 nt, Homo sapiens
  misc_RNA (1)...(19): siRNA sense strand
gguuaaagccugaacacag

SEQ ID NO: 2467859 - RNA, 19 nt, Homo sapiens
  misc_RNA (1)...(19): siRNA sense strand
acacagaaauucagugccu

SEQ ID NO: 2467860 - RNA, 19 nt, Homo sapiens
  misc_RNA (1)...(19): siRNA sense strand
gccaguguguggagcgaga

SEQ ID NO: 2467861 - RNA, 19 nt, Homo sapiens
  misc_RNA (1)...(19): siRNA sense strand
gccacuaugugaaugggaa

SEQ ID NO: 2467862 - RNA, 19 nt, Homo sapiens
  misc_RNA (1)...(19): siRNA sense strand
cugcaaggagagugggugu

SEQ ID NO: 2467863 - RNA, 19 nt, Homo sapiens
  misc_RNA (1)...(19): siRNA sense strand
aagccugaacacagaaauu

SEQ ID NO: 2467864 - RNA, 19 nt, Homo sapiens
  misc_RNA (1)...(19): siRNA sense strand
ccaacguggugacaggaga

SEQ ID NO: 2467865 - RNA, 19 nt, Homo sapiens
  misc_RNA (1)...(19): siRNA sense strand
accaagacguccaggccau

SEQ ID NO: 2467866 - RNA, 19 nt, Homo sapiens
  misc_RNA (1)...(19): siRNA sense strand
ggcaagaggugcauggaga

SEQ ID NO: 2467867 - RNA, 19 nt, Homo sapiens
  misc_RNA (1)...(19): siRNA sense strand
ucuucuaccuggugggcaa

SEQ ID NO: 2467868 - RNA, 19 nt, Homo sapiens
  misc_RNA (1)...(19): siRNA sense strand
gggcauuucugcagggccu

SEQ ID NO: 2467869 - RNA, 19 nt, Homo sapiens
  misc_RNA (1)...(19): siRNA sense strand
ccucacugcucguggucau

SEQ ID NO: 2467870 - RNA, 19 nt, Homo sapiens
  misc_RNA (1)...(19): siRNA sense strand
aguggaugcagguggguau

SEQ ID NO: 2467871 - RNA, 19 nt, Homo sapiens
  misc_RNA (1)...(19): siRNA sense strand
ggacguacuugcugagccu

SEQ ID NO: 2467872 - RNA, 19 nt, Homo sapiens
  misc_RNA (1)...(19): siRNA sense strand
uguacgacaaccugagcaa

SEQ ID NO: 2467873 - RNA, 19 nt, Homo sapiens
  misc_RNA (1)...(19): siRNA sense strand
uggucaugcacguggccua

SEQ ID NO: 2467874 - RNA, 19 nt, Homo sapiens
  misc_RNA (1)...(19): siRNA sense strand
caugaagaggacagaggaa

SEQ ID NO: 2467875 - RNA, 19 nt, Homo sapiens
  misc_RNA (1)...(19): siRNA sense strand
agauccacuuugagggcaa

SEQ ID NO: 2467876 - RNA, 19 nt, Homo sapiens
  misc_RNA (1)...(19): siRNA sense strand
cgggagaauaagcgaguca

SEQ ID NO: 2467877 - RNA, 19 nt, Homo sapiens
  misc_RNA (1)...(19): siRNA sense strand
gcucugaagacgaagacau

SEQ ID NO: 2467878 - RNA, 19 nt, Homo sapiens
  misc_RNA (1)...(19): siRNA sense strand
gucaagagcaccagcgaga

SEQ ID NO: 2467879 - RNA, 19 nt, Homo sapiens
  misc_RNA (1)...(19): siRNA sense strand
ggcuagacacacaggaaga

SEQ ID NO: 2467880 - RNA, 19 nt, Homo sapiens
  misc_RNA (1)...(19): siRNA sense strand
aggccaaguuugagcugau

SEQ ID NO: 2467881 - RNA, 19 nt, Homo sapiens
  misc_RNA (1)...(19): siRNA sense strand
ucaaggagcuggugcagga

SEQ ID NO: 2467882 - RNA, 19 nt, Homo sapiens
  misc_RNA (1)...(19): siRNA sense strand
gcaagcugcaggaggccaa

SEQ ID NO: 2467883 - RNA, 19 nt, Homo sapiens
  misc_RNA (1)...(19): siRNA sense strand
ugaagaggacagaggaacu

SEQ ID NO: 2467884 - RNA, 19 nt, Homo sapiens
  misc_RNA (1)...(19): siRNA sense strand
guucaguguguuaggacau

SEQ ID NO: 2467885 - RNA, 19 nt, Homo sapiens
  misc_RNA (1)...(19): siRNA sense strand
gguucaguguguuaggaca

SEQ ID NO: 2467886 - RNA, 19 nt, Homo sapiens
  misc_RNA (1)...(19): siRNA sense strand
aggccuauguggaagagau

SEQ ID NO: 2467887 - RNA, 19 nt, Homo sapiens
  misc_RNA (1)...(19): siRNA sense strand
gcggaaggagcuagggaag

SEQ ID NO: 2467888 - RNA, 19 nt, Homo sapiens
  misc_RNA (1)...(19): siRNA sense strand
ccaagauggcugagcugca

SEQ ID NO: 2467889 - RNA, 19 nt, Homo sapiens
  misc_RNA (1)...(19): siRNA sense strand
gaagagaucagcagccuca

SEQ ID NO: 2467890 - RNA, 19 nt, Homo sapiens
  misc_RNA (1)...(19): siRNA sense strand
cccaggaggcucagauaca

SEQ ID NO: 2467891 - RNA, 19 nt, Homo sapiens
  misc_RNA (1)...(19): siRNA sense strand
guacaguccaugaagagga

SEQ ID NO: 2467892 - RNA, 19 nt, Homo sapiens
  misc_RNA (1)...(19): siRNA sense strand
aggaggacaaggaggucau

SEQ ID NO: 2467893 - RNA, 19 nt, Homo sapiens
  misc_RNA (1)...(19): siRNA sense strand
ugacaagagaagaaagaaa

SEQ ID NO: 2467894 - RNA, 19 nt, Homo sapiens
  misc_RNA (1)...(19): siRNA sense strand
aggaagucaucaagaguua

SEQ ID NO: 2467895 - RNA, 19 nt, Homo sapiens
  misc_RNA (1)...(19): siRNA sense strand
aggcaauggaaaugacaaa

SEQ ID NO: 2467896 - RNA, 19 nt, Homo sapiens
  misc_RNA (1)...(19): siRNA sense strand
agagaaaagaagagaacaa

SEQ ID NO: 2467897 - RNA, 19 nt, Homo sapiens
  misc_RNA (1)...(19): siRNA sense strand
cuuauagucaagagggaua

SEQ ID NO: 2467898 - RNA, 19 nt, Homo sapiens
  misc_RNA (1)...(19): siRNA sense strand
ggaacaagcaaaagaagaa

SEQ ID NO: 2467899 - RNA, 19 nt, Homo sapiens
  misc_RNA (1)...(19): siRNA sense strand
gcagaaaggaaaaggaaga

SEQ ID NO: 2467900 - RNA, 19 nt, Homo sapiens
  misc_RNA (1)...(19): siRNA sense strand
aguggaagcuugagcaaca

SEQ ID NO: 2467901 - RNA, 19 nt, Homo sapiens
  misc_RNA (1)...(19): siRNA sense strand
cgugaaggaucuaggaagu

SEQ ID NO: 2467902 - RNA, 19 nt, Homo sapiens
  misc_RNA (1)...(19): siRNA sense strand
gguuaagugagaagaauga

SEQ ID NO: 2467903 - RNA, 19 nt, Homo sapiens
  misc_RNA (1)...(19): siRNA sense strand
cagccuaggaauuuggaua

SEQ ID NO: 2467904 - RNA, 19 nt, Homo sapiens
  misc_RNA (1)...(19): siRNA sense strand
caucaagaguuaaggguuc

SEQ ID NO: 2467905 - RNA, 19 nt, Homo sapiens
  misc_RNA (1)...(19): siRNA sense strand
aggaaaaggaagaugacaa

SEQ ID NO: 2467906 - RNA, 19 nt, Homo sapiens
  misc_RNA (1)...(19): siRNA sense strand
aaagaauagcucugagauu

SEQ ID NO: 2467907 - RNA, 19 nt, Homo sapiens
  misc_RNA (1)...(19): siRNA sense strand
auguauucuuccuggguaa

SEQ ID NO: 2467908 - RNA, 19 nt, Homo sapiens
  misc_RNA (1)...(19): siRNA sense strand
aagaaugagaagacaggaa

SEQ ID NO: 2467909 - RNA, 19 nt, Homo sapiens
  misc_RNA (1)...(19): siRNA sense strand
ugaaacaagcucuggaaga

SEQ ID NO: 2467910 - RNA, 19 nt, Homo sapiens
  misc_RNA (1)...(19): siRNA sense strand
ccaugcacuuugagaauau

SEQ ID NO: 2467911 - RNA, 19 nt, Homo sapiens
  misc_RNA (1)...(19): siRNA sense strand
acaauuugaucgacgggaa

SEQ ID NO: 2467912 - RNA, 19 nt, Homo sapiens
  misc_RNA (1)...(19): siRNA sense strand
uagaauaccguaagagaca

SEQ ID NO: 2467913 - RNA, 19 nt, Homo sapiens
  misc_RNA (1)...(19): siRNA sense strand
ucugaagaaacuagcaaua

SEQ ID NO: 2467914 - RNA, 19 nt, Homo sapiens
  misc_RNA (1)...(19): siRNA sense strand
ggaucuaggaagucaucaa

SEQ ID NO: 2467915 - RNA, 19 nt, Homo sapiens
  misc_RNA (1)...(19): siRNA sense strand
cucuaaauuucaugggcua

SEQ ID NO: 2467916 - RNA, 19 nt, Homo sapiens
  misc_RNA (1)...(19): siRNA sense strand
guggaacaagucagagaaa

SEQ ID NO: 2467917 - RNA, 19 nt, Homo sapiens
  misc_RNA (1)...(19): siRNA sense strand
ccgaaaagauaaagauagu

SEQ ID NO: 2467918 - RNA, 19 nt, Homo sapiens
  misc_RNA (1)...(19): siRNA sense strand
gugcaugccucaaagaaaa

SEQ ID NO: 2467919 - RNA, 19 nt, Homo sapiens
  misc_RNA (1)...(19): siRNA sense strand
aaugaaugguuaagugaga

SEQ ID NO: 2467920 - RNA, 19 nt, Homo sapiens
  misc_RNA (1)...(19): siRNA sense strand
caacaauggugauggcugu

SEQ ID NO: 2467921 - RNA, 19 nt, Homo sapiens
  misc_RNA (1)...(19): siRNA sense strand
caacaaagucugaacagca

SEQ ID NO: 2467922 - RNA, 19 nt, Homo sapiens
  misc_RNA (1)...(19): siRNA sense strand
ggauggaaguuaugguacu

SEQ ID NO: 2467923 - RNA, 19 nt, Homo sapiens
  misc_RNA (1)...(19): siRNA sense strand
gaugacaagagaagaaaga

SEQ ID NO: 2467924 - RNA, 19 nt, Homo sapiens
  misc_RNA (1)...(19): siRNA sense strand
acuugaaaagagagagaaa

SEQ ID NO: 2467925 - RNA, 19 nt, Homo sapiens
  misc_RNA (1)...(19): siRNA sense strand
gccaaaguaaauagaacua

SEQ ID NO: 2467926 - RNA, 19 nt, Homo sapiens
  misc_RNA (1)...(19): siRNA sense strand
agaaugagaagacaggaaa

SEQ ID NO: 2467927 - RNA, 19 nt, Homo sapiens
  misc_RNA (1)...(19): siRNA sense strand
agauuuaacuacaccacua

SEQ ID NO: 2467928 - RNA, 19 nt, Homo sapiens
  misc_RNA (1)...(19): siRNA sense strand
uauacgagcccuaggagua

SEQ ID NO: 2467929 - RNA, 19 nt, Homo sapiens
  misc_RNA (1)...(19): siRNA sense strand
aggacaaucuucagcaaca

SEQ ID NO: 2467930 - RNA, 19 nt, Homo sapiens
  misc_RNA (1)...(19): siRNA sense strand
gagacaaagaucaaagcau

SEQ ID NO: 2467931 - RNA, 19 nt, Homo sapiens
  misc_RNA (1)...(19): siRNA sense strand
cugcaagaaauaaagacua

SEQ ID NO: 2467932 - RNA, 19 nt, Homo sapiens
  misc_RNA (1)...(19): siRNA sense strand
agcgagagccucaaagaaa

SEQ ID NO: 2467933 - RNA, 19 nt, Homo sapiens
  misc_RNA (1)...(19): siRNA sense strand
uugagaaauccaacaguua

SEQ ID NO: 2467934 - RNA, 19 nt, Homo sapiens
  misc_RNA (1)...(19): siRNA sense strand
ugagauuaggcaauggaaa

SEQ ID NO: 2467935 - RNA, 19 nt, Homo sapiens
  misc_RNA (1)...(19): siRNA sense strand
uuaugagaccagacggaaa

SEQ ID NO: 2467936 - RNA, 19 nt, Homo sapiens
  misc_RNA (1)...(19): siRNA sense strand
cagcauacuccaacaucaa

SEQ ID NO: 2467937 - RNA, 19 nt, Homo sapiens
  misc_RNA (1)...(19): siRNA sense strand
agaaaagaaccuacugaaa

SEQ ID NO: 2467938 - RNA, 19 nt, Homo sapiens
  misc_RNA (1)...(19): siRNA sense strand
cagaaguccugcagucaau

SEQ ID NO: 2467939 - RNA, 19 nt, Homo sapiens
  misc_RNA (1)...(19): siRNA sense strand
aggcaguguccuggagaaa

SEQ ID NO: 2467940 - RNA, 19 nt, Homo sapiens
  misc_RNA (1)...(19): siRNA sense strand
gcuacuacaacgccggaaa

SEQ ID NO: 2467941 - RNA, 19 nt, Homo sapiens
  misc_RNA (1)...(19): siRNA sense strand
ggaccaaacaguauuccaa

SEQ ID NO: 2467942 - RNA, 19 nt, Homo sapiens
  misc_RNA (1)...(19): siRNA sense strand
agacaaagaucaaagcaug

SEQ ID NO: 2467943 - RNA, 19 nt, Homo sapiens
  misc_RNA (1)...(19): siRNA sense strand
aguucugaauccauggaaa

SEQ ID NO: 2467944 - RNA, 19 nt, Homo sapiens
  misc_RNA (1)...(19): siRNA sense strand
guucugaauccauggaaaa

SEQ ID NO: 2467945 - RNA, 19 nt, Homo sapiens
  misc_RNA (1)...(19): siRNA sense strand
cagugaugcugaaguuauu

SEQ ID NO: 2467946 - RNA, 19 nt, Homo sapiens
  misc_RNA (1)...(19): siRNA sense strand
gcaaacaguuccaggacac

SEQ ID NO: 2467947 - RNA, 19 nt, Homo sapiens
  misc_RNA (1)...(19): siRNA sense strand
uuacacaugaugauggaua

SEQ ID NO: 2467948 - RNA, 19 nt, Homo sapiens
  misc_RNA (1)...(19): siRNA sense strand
gaugggagacaaagaucaa

SEQ ID NO: 2467949 - RNA, 19 nt, Homo sapiens
  misc_RNA (1)...(19): siRNA sense strand
ugaagagcccagaaacuaa

SEQ ID NO: 2467950 - RNA, 19 nt, Homo sapiens
  misc_RNA (1)...(19): siRNA sense strand
ccacaggacuccaaggucu

SEQ ID NO: 2467951 - RNA, 19 nt, Homo sapiens
  misc_RNA (1)...(19): siRNA sense strand
ugagaguggugaugagguu

SEQ ID NO: 2467952 - RNA, 19 nt, Homo sapiens
  misc_RNA (1)...(19): siRNA sense strand
gggagaaagaacaacacau

SEQ ID NO: 2467953 - RNA, 19 nt, Homo sapiens
  misc_RNA (1)...(19): siRNA sense strand
ggaucgauaugaagaagca

SEQ ID NO: 2467954 - RNA, 19 nt, Homo sapiens
  misc_RNA (1)...(19): siRNA sense strand
ugacaagagaagaaagaaa

SEQ ID NO: 2467955 - RNA, 19 nt, Homo sapiens
  misc_RNA (1)...(19): siRNA sense strand
aggaagucaucaagaguua

SEQ ID NO: 2467956 - RNA, 19 nt, Homo sapiens
  misc_RNA (1)...(19): siRNA sense strand
aggcaauggaaaugacaaa

SEQ ID NO: 2467957 - RNA, 19 nt, Homo sapiens
  misc_RNA (1)...(19): siRNA sense strand
agagaaaagaagagaacaa

SEQ ID NO: 2467958 - RNA, 19 nt, Homo sapiens
  misc_RNA (1)...(19): siRNA sense strand
cuuauagucaagagggaua

SEQ ID NO: 2467959 - RNA, 19 nt, Homo sapiens
  misc_RNA (1)...(19): siRNA sense strand
ggaacaagcaaaagaagaa

SEQ ID NO: 2467960 - RNA, 19 nt, Homo sapiens
  misc_RNA (1)...(19): siRNA sense strand
gcagaaaggaaaaggaaga

SEQ ID NO: 2467961 - RNA, 19 nt, Homo sapiens
  misc_RNA (1)...(19): siRNA sense strand
aguggaagcuugagcaaca

SEQ ID NO: 2467962 - RNA, 19 nt, Homo sapiens
  misc_RNA (1)...(19): siRNA sense strand
cgugaaggaucuaggaagu

SEQ ID NO: 2467963 - RNA, 19 nt, Homo sapiens
  misc_RNA (1)...(19): siRNA sense strand
gguuaagugagaagaauga

SEQ ID NO: 2467964 - RNA, 19 nt, Homo sapiens
  misc_RNA (1)...(19): siRNA sense strand
cagccuaggaauuuggaua

SEQ ID NO: 2467965 - RNA, 19 nt, Homo sapiens
  misc_RNA (1)...(19): siRNA sense strand
caucaagaguuaaggguuc

SEQ ID NO: 2467966 - RNA, 19 nt, Homo sapiens
  misc_RNA (1)...(19): siRNA sense strand
aggaaaaggaagaugacaa

SEQ ID NO: 2467967 - RNA, 19 nt, Homo sapiens
  misc_RNA (1)...(19): siRNA sense strand
aaagaauagcucugagauu

SEQ ID NO: 2467968 - RNA, 19 nt, Homo sapiens
  misc_RNA (1)...(19): siRNA sense strand
auguauucuuccuggguaa

SEQ ID NO: 2467969 - RNA, 19 nt, Homo sapiens
  misc_RNA (1)...(19): siRNA sense strand
aagaaugagaagacaggaa

SEQ ID NO: 2467970 - RNA, 19 nt, Homo sapiens
  misc_RNA (1)...(19): siRNA sense strand
ugaaacaagcucuggaaga

SEQ ID NO: 2467971 - RNA, 19 nt, Homo sapiens
  misc_RNA (1)...(19): siRNA sense strand
ccaugcacuuugagaauau

SEQ ID NO: 2467972 - RNA, 19 nt, Homo sapiens
  misc_RNA (1)...(19): siRNA sense strand
acaauuugaucgacgggaa

SEQ ID NO: 2467973 - RNA, 19 nt, Homo sapiens
  misc_RNA (1)...(19): siRNA sense strand
uagaauaccguaagagaca

SEQ ID NO: 2467974 - RNA, 19 nt, Homo sapiens
  misc_RNA (1)...(19): siRNA sense strand
ucugaagaaacuagcaaua

SEQ ID NO: 2467975 - RNA, 19 nt, Homo sapiens
  misc_RNA (1)...(19): siRNA sense strand
ggaucuaggaagucaucaa

SEQ ID NO: 2467976 - RNA, 19 nt, Homo sapiens
  misc_RNA (1)...(19): siRNA sense strand
cucuaaauuucaugggcua

SEQ ID NO: 2467977 - RNA, 19 nt, Homo sapiens
  misc_RNA (1)...(19): siRNA sense strand
guggaacaagucagagaaa

SEQ ID NO: 2467978 - RNA, 19 nt, Homo sapiens
  misc_RNA (1)...(19): siRNA sense strand
ccgaaaagauaaagauagu

SEQ ID NO: 2467979 - RNA, 19 nt, Homo sapiens
  misc_RNA (1)...(19): siRNA sense strand
gugcaugccucaaagaaaa

SEQ ID NO: 2467980 - RNA, 19 nt, Homo sapiens
  misc_RNA (1)...(19): siRNA sense strand
aaugaaugguuaagugaga

SEQ ID NO: 2467981 - RNA, 19 nt, Homo sapiens
  misc_RNA (1)...(19): siRNA sense strand
caacaauggugauggcugu

SEQ ID NO: 2467982 - RNA, 19 nt, Homo sapiens
  misc_RNA (1)...(19): siRNA sense strand
caacaaagucugaacagca

SEQ ID NO: 2467983 - RNA, 19 nt, Homo sapiens
  misc_RNA (1)...(19): siRNA sense strand
ggauggaaguuaugguacu

SEQ ID NO: 2467984 - RNA, 19 nt, Homo sapiens
  misc_RNA (1)...(19): siRNA sense strand
gaugacaagagaagaaaga

SEQ ID NO: 2467985 - RNA, 19 nt, Homo sapiens
  misc_RNA (1)...(19): siRNA sense strand
acuugaaaagagagagaaa

SEQ ID NO: 2467986 - RNA, 19 nt, Homo sapiens
  misc_RNA (1)...(19): siRNA sense strand
gccaaaguaaauagaacua

SEQ ID NO: 2467987 - RNA, 19 nt, Homo sapiens
  misc_RNA (1)...(19): siRNA sense strand
agaaugagaagacaggaaa

SEQ ID NO: 2467988 - RNA, 19 nt, Homo sapiens
  misc_RNA (1)...(19): siRNA sense strand
agauuuaacuacaccacua

SEQ ID NO: 2467989 - RNA, 19 nt, Homo sapiens
  misc_RNA (1)...(19): siRNA sense strand
uauacgagcccuaggagua

SEQ ID NO: 2467990 - RNA, 19 nt, Homo sapiens
  misc_RNA (1)...(19): siRNA sense strand
aggacaaucuucagcaaca

SEQ ID NO: 2467991 - RNA, 19 nt, Homo sapiens
  misc_RNA (1)...(19): siRNA sense strand
gagacaaagaucaaagcau

SEQ ID NO: 2467992 - RNA, 19 nt, Homo sapiens
  misc_RNA (1)...(19): siRNA sense strand
cugcaagaaauaaagacua

SEQ ID NO: 2467993 - RNA, 19 nt, Homo sapiens
  misc_RNA (1)...(19): siRNA sense strand
agcgagagccucaaagaaa

SEQ ID NO: 2467994 - RNA, 19 nt, Homo sapiens
  misc_RNA (1)...(19): siRNA sense strand
uugagaaauccaacaguua

SEQ ID NO: 2467995 - RNA, 19 nt, Homo sapiens
  misc_RNA (1)...(19): siRNA sense strand
ugagauuaggcaauggaaa

SEQ ID NO: 2467996 - RNA, 19 nt, Homo sapiens
  misc_RNA (1)...(19): siRNA sense strand
uuaugagaccagacggaaa

SEQ ID NO: 2467997 - RNA, 19 nt, Homo sapiens
  misc_RNA (1)...(19): siRNA sense strand
cagcauacuccaacaucaa

SEQ ID NO: 2467998 - RNA, 19 nt, Homo sapiens
  misc_RNA (1)...(19): siRNA sense strand
agaaaagaaccuacugaaa

SEQ ID NO: 2467999 - RNA, 19 nt, Homo sapiens
  misc_RNA (1)...(19): siRNA sense strand
cagaaguccugcagucaau

SEQ ID NO: 2468000 - RNA, 19 nt, Homo sapiens
  misc_RNA (1)...(19): siRNA sense strand
aggcaguguccuggagaaa

SEQ ID NO: 2468001 - RNA, 19 nt, Homo sapiens
  misc_RNA (1)...(19): siRNA sense strand
gcuacuacaacgccggaaa

SEQ ID NO: 2468002 - RNA, 19 nt, Homo sapiens
  misc_RNA (1)...(19): siRNA sense strand
ggaccaaacaguauuccaa

SEQ ID NO: 2468003 - RNA, 19 nt, Homo sapiens
  misc_RNA (1)...(19): siRNA sense strand
agacaaagaucaaagcaug

SEQ ID NO: 2468004 - RNA, 19 nt, Homo sapiens
  misc_RNA (1)...(19): siRNA sense strand
aguucugaauccauggaaa

SEQ ID NO: 2468005 - RNA, 19 nt, Homo sapiens
  misc_RNA (1)...(19): siRNA sense strand
guucugaauccauggaaaa

SEQ ID NO: 2468006 - RNA, 19 nt, Homo sapiens
  misc_RNA (1)...(19): siRNA sense strand
cagugaugcugaaguuauu

SEQ ID NO: 2468007 - RNA, 19 nt, Homo sapiens
  misc_RNA (1)...(19): siRNA sense strand
gcaaacaguuccaggacac

SEQ ID NO: 2468008 - RNA, 19 nt, Homo sapiens
  misc_RNA (1)...(19): siRNA sense strand
uuacacaugaugauggaua

SEQ ID NO: 2468009 - RNA, 19 nt, Homo sapiens
  misc_RNA (1)...(19): siRNA sense strand
gaugggagacaaagaucaa

SEQ ID NO: 2468010 - RNA, 19 nt, Homo sapiens
  misc_RNA (1)...(19): siRNA sense strand
ugaagagcccagaaacuaa

SEQ ID NO: 2468011 - RNA, 19 nt, Homo sapiens
  misc_RNA (1)...(19): siRNA sense strand
ccacaggacuccaaggucu

SEQ ID NO: 2468012 - RNA, 19 nt, Homo sapiens
  misc_RNA (1)...(19): siRNA sense strand
ugagaguggugaugagguu

SEQ ID NO: 2468013 - RNA, 19 nt, Homo sapiens
  misc_RNA (1)...(19): siRNA sense strand
gggagaaagaacaacacau

SEQ ID NO: 2468014 - RNA, 19 nt, Homo sapiens
  misc_RNA (1)...(19): siRNA sense strand
ggaucgauaugaagaagca

SEQ ID NO: 2468015 - RNA, 19 nt, Homo sapiens
  misc_RNA (1)...(19): siRNA sense strand
gaggcugaguugaggguga

SEQ ID NO: 2468016 - RNA, 19 nt, Homo sapiens
  misc_RNA (1)...(19): siRNA sense strand
gcucacagcuccagcacca

SEQ ID NO: 2468017 - RNA, 19 nt, Homo sapiens
  misc_RNA (1)...(19): siRNA sense strand
guacgguaaccuagggcau

SEQ ID NO: 2468018 - RNA, 19 nt, Homo sapiens
  misc_RNA (1)...(19): siRNA sense strand
agcacagacuuuaggcauu

SEQ ID NO: 2468019 - RNA, 19 nt, Homo sapiens
  misc_RNA (1)...(19): siRNA sense strand
cuaaaauaauccuggccuu

SEQ ID NO: 2468020 - RNA, 19 nt, Homo sapiens
  misc_RNA (1)...(19): siRNA sense strand
ugaagaacgccgugggaga

SEQ ID NO: 2468021 - RNA, 19 nt, Homo sapiens
  misc_RNA (1)...(19): siRNA sense strand
accagaaugaagagagaaa

SEQ ID NO: 2468022 - RNA, 19 nt, Homo sapiens
  misc_RNA (1)...(19): siRNA sense strand
acgaauuagcugaggagau

SEQ ID NO: 2468023 - RNA, 19 nt, Homo sapiens
  misc_RNA (1)...(19): siRNA sense strand
ccagaagaaggaauggaaa

SEQ ID NO: 2468024 - RNA, 19 nt, Homo sapiens
  misc_RNA (1)...(19): siRNA sense strand
ggcuauauuaugacacaaa

SEQ ID NO: 2468025 - RNA, 19 nt, Homo sapiens
  misc_RNA (1)...(19): siRNA sense strand
caauauccaaugaggagaa

SEQ ID NO: 2468026 - RNA, 19 nt, Homo sapiens
  misc_RNA (1)...(19): siRNA sense strand
gcugauuauuuaagaagca

SEQ ID NO: 2468027 - RNA, 19 nt, Homo sapiens
  misc_RNA (1)...(19): siRNA sense strand
auugugaaguccagaagaa

SEQ ID NO: 2468028 - RNA, 19 nt, Homo sapiens
  misc_RNA (1)...(19): siRNA sense strand
cagaaugaagagagaaacu

SEQ ID NO: 2468029 - RNA, 19 nt, Homo sapiens
  misc_RNA (1)...(19): siRNA sense strand
cgaugggacaacugaggaa

SEQ ID NO: 2468030 - RNA, 19 nt, Homo sapiens
  misc_RNA (1)...(19): siRNA sense strand
gggcugacccagagaaucu

SEQ ID NO: 2468031 - RNA, 19 nt, Homo sapiens
  misc_RNA (1)...(19): siRNA sense strand
aggaagaagauaacauuga

SEQ ID NO: 2468032 - RNA, 19 nt, Homo sapiens
  misc_RNA (1)...(19): siRNA sense strand
cguuguaccuauuggagga

SEQ ID NO: 2468033 - RNA, 19 nt, Homo sapiens
  misc_RNA (1)...(19): siRNA sense strand
gugaagaauggcagaaugu

SEQ ID NO: 2468034 - RNA, 19 nt, Homo sapiens
  misc_RNA (1)...(19): siRNA sense strand
cagaagaaggaauggaaag

SEQ ID NO: 2468035 - RNA, 19 nt, Homo sapiens
  misc_RNA (1)...(19): siRNA sense strand
aggagaagaccuauauaga

SEQ ID NO: 2468036 - RNA, 19 nt, Homo sapiens
  misc_RNA (1)...(19): siRNA sense strand
ugccaugggauguggagua

SEQ ID NO: 2468037 - RNA, 19 nt, Homo sapiens
  misc_RNA (1)...(19): siRNA sense strand
uguaccuauuggaggacaa

SEQ ID NO: 2468038 - RNA, 19 nt, Homo sapiens
  misc_RNA (1)...(19): siRNA sense strand
caauaaguaaggugggucu

SEQ ID NO: 2468039 - RNA, 19 nt, Homo sapiens
  misc_RNA (1)...(19): siRNA sense strand
ucucaaacggagugggaac

SEQ ID NO: 2468040 - RNA, 19 nt, Homo sapiens
  misc_RNA (1)...(19): siRNA sense strand
caacaauauccaaugagga

SEQ ID NO: 2468041 - RNA, 19 nt, Homo sapiens
  misc_RNA (1)...(19): siRNA sense strand
cugaggaagaagauaacau

SEQ ID NO: 2468042 - RNA, 19 nt, Homo sapiens
  misc_RNA (1)...(19): siRNA sense strand
uggaguugccauuguggaa

SEQ ID NO: 2468043 - RNA, 19 nt, Homo sapiens
  misc_RNA (1)...(19): siRNA sense strand
cacacaugguuaugacaau

SEQ ID NO: 2468044 - RNA, 19 nt, Homo sapiens
  misc_RNA (1)...(19): siRNA sense strand
agaaggaauggaaaggaca

SEQ ID NO: 2468045 - RNA, 19 nt, Homo sapiens
  misc_RNA (1)...(19): siRNA sense strand
ggauuuaguggcuucgcua

SEQ ID NO: 2468046 - RNA, 19 nt, Homo sapiens
  misc_RNA (1)...(19): siRNA sense strand
gugaaguccagaagaagga

SEQ ID NO: 2468047 - RNA, 19 nt, Homo sapiens
  misc_RNA (1)...(19): siRNA sense strand
gugggagauucuuugggaa

SEQ ID NO: 2468048 - RNA, 19 nt, Homo sapiens
  misc_RNA (1)...(19): siRNA sense strand
ucauugaccaggacgaauu

SEQ ID NO: 2468049 - RNA, 19 nt, Homo sapiens
  misc_RNA (1)...(19): siRNA sense strand
gcgucaugugugucagaau

SEQ ID NO: 2468050 - RNA, 19 nt, Homo sapiens
  misc_RNA (1)...(19): siRNA sense strand
uaguggagggugugaccua

SEQ ID NO: 2468051 - RNA, 19 nt, Homo sapiens
  misc_RNA (1)...(19): siRNA sense strand
ggucaacaauagcaccgua

SEQ ID NO: 2468052 - RNA, 19 nt, Homo sapiens
  misc_RNA (1)...(19): siRNA sense strand
aagguuuaguggagggugu

SEQ ID NO: 2468053 - RNA, 19 nt, Homo sapiens
  misc_RNA (1)...(19): siRNA sense strand
uggaaaggacagagaggag

SEQ ID NO: 2468054 - RNA, 19 nt, Homo sapiens
  misc_RNA (1)...(19): siRNA sense strand
agaccuauauagagacaag

SEQ ID NO: 2468055 - RNA, 19 nt, Homo sapiens
  misc_RNA (1)...(19): siRNA sense strand
cugaagagcuggaggccga

SEQ ID NO: 2468056 - RNA, 19 nt, Homo sapiens
  misc_RNA (1)...(19): siRNA sense strand
caucaaagguggacggauc

SEQ ID NO: 2468057 - RNA, 19 nt, Homo sapiens
  misc_RNA (1)...(19): siRNA sense strand
gguuauucccggagguauu

SEQ ID NO: 2468058 - RNA, 19 nt, Homo sapiens
  misc_RNA (1)...(19): siRNA sense strand
acaacaucuucgaggguau

SEQ ID NO: 2468059 - RNA, 19 nt, Homo sapiens
  misc_RNA (1)...(19): siRNA sense strand
caaacaaauaggagagaac

SEQ ID NO: 2468060 - RNA, 19 nt, Homo sapiens
  misc_RNA (1)...(19): siRNA sense strand
ccgacaaguugaagaccau

SEQ ID NO: 2468061 - RNA, 19 nt, Homo sapiens
  misc_RNA (1)...(19): siRNA sense strand
gagcagaccugaagagcug

SEQ ID NO: 2468062 - RNA, 19 nt, Homo sapiens
  misc_RNA (1)...(19): siRNA sense strand
gggauagaggagcggauga

SEQ ID NO: 2468063 - RNA, 19 nt, Homo sapiens
  misc_RNA (1)...(19): siRNA sense strand
cgagggugucaacgggaua

SEQ ID NO: 2468064 - RNA, 19 nt, Homo sapiens
  misc_RNA (1)...(19): siRNA sense strand
gcgucaaaaucaggaauaa

SEQ ID NO: 2468065 - RNA, 19 nt, Homo sapiens
  misc_RNA (1)...(19): siRNA sense strand
aggcggugggcaaggacaa

SEQ ID NO: 2468066 - RNA, 19 nt, Homo sapiens
  misc_RNA (1)...(19): siRNA sense strand
aggugcuggugcaggacaa

SEQ ID NO: 2468067 - RNA, 19 nt, Homo sapiens
  misc_RNA (1)...(19): siRNA sense strand
aacaaauaggagagaacuu

SEQ ID NO: 2468068 - RNA, 19 nt, Homo sapiens
  misc_RNA (1)...(19): siRNA sense strand
cuacugaccucuuucgaga

SEQ ID NO: 2468069 - RNA, 19 nt, Homo sapiens
  misc_RNA (1)...(19): siRNA sense strand
cccagauagaugacaacaa

SEQ ID NO: 2468070 - RNA, 19 nt, Homo sapiens
  misc_RNA (1)...(19): siRNA sense strand
gagcugugaucuuggucca

SEQ ID NO: 2468071 - RNA, 19 nt, Homo sapiens
  misc_RNA (1)...(19): siRNA sense strand
cagaggaaagacagagaca

SEQ ID NO: 2468072 - RNA, 19 nt, Homo sapiens
  misc_RNA (1)...(19): siRNA sense strand
gagagaagcugacugcaga

SEQ ID NO: 2468073 - RNA, 19 nt, Homo sapiens
  misc_RNA (1)...(19): siRNA sense strand
cugcagaugaugaggccuu

SEQ ID NO: 2468074 - RNA, 19 nt, Homo sapiens
  misc_RNA (1)...(19): siRNA sense strand
ggaaauaugacuuugguag

SEQ ID NO: 2468075 - RNA, 19 nt, Homo sapiens
  misc_RNA (1)...(19): siRNA sense strand
guggaaugcagcuggcuau

SEQ ID NO: 2468076 - RNA, 19 nt, Homo sapiens
  misc_RNA (1)...(19): siRNA sense strand
aagacagagacaagcaaau

SEQ ID NO: 2468077 - RNA, 19 nt, Homo sapiens
  misc_RNA (1)...(19): siRNA sense strand
caaagaaacaaccagguca

SEQ ID NO: 2468078 - RNA, 19 nt, Homo sapiens
  misc_RNA (1)...(19): siRNA sense strand
auuacaagaucuggaggaa

SEQ ID NO: 2468079 - RNA, 19 nt, Homo sapiens
  misc_RNA (1)...(19): siRNA sense strand
aacagaaaguggagauacu

SEQ ID NO: 2468080 - RNA, 19 nt, Homo sapiens
  misc_RNA (1)...(19): siRNA sense strand
agcagaauuuagaagaaca

SEQ ID NO: 2468081 - RNA, 19 nt, Homo sapiens
  misc_RNA (1)...(19): siRNA sense strand
agguuagcagagauggaua

SEQ ID NO: 2468082 - RNA, 19 nt, Homo sapiens
  misc_RNA (1)...(19): siRNA sense strand
uggcaaguuuugagguuga

SEQ ID NO: 2468083 - RNA, 19 nt, Homo sapiens
  misc_RNA (1)...(19): siRNA sense strand
aggaaugcagagaggaacu

SEQ ID NO: 2468084 - RNA, 19 nt, Homo sapiens
  misc_RNA (1)...(19): siRNA sense strand
cagaugaauaugaagaaac

SEQ ID NO: 2468085 - RNA, 19 nt, Homo sapiens
  misc_RNA (1)...(19): siRNA sense strand
ggaaaugagaaaagagaaa

SEQ ID NO: 2468086 - RNA, 19 nt, Homo sapiens
  misc_RNA (1)...(19): siRNA sense strand
ccauaaaagugguugacua

SEQ ID NO: 2468087 - RNA, 19 nt, Homo sapiens
  misc_RNA (1)...(19): siRNA sense strand
cugcaauagaaguuggaaa

SEQ ID NO: 2468088 - RNA, 19 nt, Homo sapiens
  misc_RNA (1)...(19): siRNA sense strand
gcucaguuguuguggaaaa

SEQ ID NO: 2468089 - RNA, 19 nt, Homo sapiens
  misc_RNA (1)...(19): siRNA sense strand
augaaauacuugugagcga

SEQ ID NO: 2468090 - RNA, 19 nt, Homo sapiens
  misc_RNA (1)...(19): siRNA sense strand
aggaaauaacucugaagua

SEQ ID NO: 2468091 - RNA, 19 nt, Homo sapiens
  misc_RNA (1)...(19): siRNA sense strand
gggaagaauaugaagaacu

SEQ ID NO: 2468092 - RNA, 19 nt, Homo sapiens
  misc_RNA (1)...(19): siRNA sense strand
agauagaguugaugagaac

SEQ ID NO: 2468093 - RNA, 19 nt, Homo sapiens
  misc_RNA (1)...(19): siRNA sense strand
cauaaaagugguugacuaa

SEQ ID NO: 2468094 - RNA, 19 nt, Homo sapiens
  misc_RNA (1)...(19): siRNA sense strand
cauuaaaucuugaagccau

SEQ ID NO: 2468095 - RNA, 19 nt, Homo sapiens
  misc_RNA (1)...(19): siRNA sense strand
cuucauagucaaggaaaua

SEQ ID NO: 2468096 - RNA, 19 nt, Homo sapiens
  misc_RNA (1)...(19): siRNA sense strand
ugaacuaaguaaauggaga

SEQ ID NO: 2468097 - RNA, 19 nt, Homo sapiens
  misc_RNA (1)...(19): siRNA sense strand
ggagaaaagaugaggugau

SEQ ID NO: 2468098 - RNA, 19 nt, Homo sapiens
  misc_RNA (1)...(19): siRNA sense strand
ucuucauagucaaggaaau

SEQ ID NO: 2468099 - RNA, 19 nt, Homo sapiens
  misc_RNA (1)...(19): siRNA sense strand
agggagaauuggugccaga

SEQ ID NO: 2468100 - RNA, 19 nt, Homo sapiens
  misc_RNA (1)...(19): siRNA sense strand
gguagaaagagcuugucaa

SEQ ID NO: 2468101 - RNA, 19 nt, Homo sapiens
  misc_RNA (1)...(19): siRNA sense strand
accgaauggaaaugagaaa

SEQ ID NO: 2468102 - RNA, 19 nt, Homo sapiens
  misc_RNA (1)...(19): siRNA sense strand
aggaaaagauagaguugau

SEQ ID NO: 2468103 - RNA, 19 nt, Homo sapiens
  misc_RNA (1)...(19): siRNA sense strand
acagaaagcaggaagaacu

SEQ ID NO: 2468104 - RNA, 19 nt, Homo sapiens
  misc_RNA (1)...(19): siRNA sense strand
ugcaauagaaguuggaaaa

SEQ ID NO: 2468105 - RNA, 19 nt, Homo sapiens
  misc_RNA (1)...(19): siRNA sense strand
augcaaaagcugagauuca

SEQ ID NO: 2468106 - RNA, 19 nt, Homo sapiens
  misc_RNA (1)...(19): siRNA sense strand
aguggaaagaugugguaga

SEQ ID NO: 2468107 - RNA, 19 nt, Homo sapiens
  misc_RNA (1)...(19): siRNA sense strand
auacagaugcccaugaaau

SEQ ID NO: 2468108 - RNA, 19 nt, Homo sapiens
  misc_RNA (1)...(19): siRNA sense strand
gugcaaaagcaguggaaag

SEQ ID NO: 2468109 - RNA, 19 nt, Homo sapiens
  misc_RNA (1)...(19): siRNA sense strand
aagcaagagcugaagaagu

SEQ ID NO: 2468110 - RNA, 19 nt, Homo sapiens
  misc_RNA (1)...(19): siRNA sense strand
uagaauuagcagcaguuua

SEQ ID NO: 2468111 - RNA, 19 nt, Homo sapiens
  misc_RNA (1)...(19): siRNA sense strand
caguacuaccagagaacuu

SEQ ID NO: 2468112 - RNA, 19 nt, Homo sapiens
  misc_RNA (1)...(19): siRNA sense strand
ccaaugauuaugaagccaa

SEQ ID NO: 2468113 - RNA, 19 nt, Homo sapiens
  misc_RNA (1)...(19): siRNA sense strand
acaacagaaagcaggaaga

SEQ ID NO: 2468114 - RNA, 19 nt, Homo sapiens
  misc_RNA (1)...(19): siRNA sense strand
aggauguuuaugaagguaa

SEQ ID NO: 2468115 - RNA, 19 nt, Homo sapiens
  misc_RNA (1)...(19): siRNA sense strand
ccagauuuccaaugauuau

SEQ ID NO: 2468116 - RNA, 19 nt, Homo sapiens
  misc_RNA (1)...(19): siRNA sense strand
uaggcaagcaaaaggaaaa

SEQ ID NO: 2468117 - RNA, 19 nt, Homo sapiens
  misc_RNA (1)...(19): siRNA sense strand
caguuuagcuauaauggga

SEQ ID NO: 2468118 - RNA, 19 nt, Homo sapiens
  misc_RNA (1)...(19): siRNA sense strand
guaugguccugguguucaa

SEQ ID NO: 2468119 - RNA, 19 nt, Homo sapiens
  misc_RNA (1)...(19): siRNA sense strand
ggaaaaugugcuugaucuu

SEQ ID NO: 2468120 - RNA, 19 nt, Homo sapiens
  misc_RNA (1)...(19): siRNA sense strand
acugaagaaagucuggaaa

SEQ ID NO: 2468121 - RNA, 19 nt, Homo sapiens
  misc_RNA (1)...(19): siRNA sense strand
uggaaagaugugguagaaa

SEQ ID NO: 2468122 - RNA, 19 nt, Homo sapiens
  misc_RNA (1)...(19): siRNA sense strand
ucaagcaagagcugaagaa

SEQ ID NO: 2468123 - RNA, 19 nt, Homo sapiens
  misc_RNA (1)...(19): siRNA sense strand
gaagaaauguaugugccaa

SEQ ID NO: 2468124 - RNA, 19 nt, Homo sapiens
  misc_RNA (1)...(19): siRNA sense strand
aauugaaggagcugcaaaa

SEQ ID NO: 2468125 - RNA, 19 nt, Homo sapiens
  misc_RNA (1)...(19): siRNA sense strand
cggccaugucagagccaga

SEQ ID NO: 2468126 - RNA, 19 nt, Homo sapiens
  misc_RNA (1)...(19): siRNA sense strand
gugccagaugucagaauuu

SEQ ID NO: 2468127 - RNA, 19 nt, Homo sapiens
  misc_RNA (1)...(19): siRNA sense strand
caagcaaaaggaaaagaua

SEQ ID NO: 2468128 - RNA, 19 nt, Homo sapiens
  misc_RNA (1)...(19): siRNA sense strand
agcaaaaggaaaagauaga

SEQ ID NO: 2468129 - RNA, 19 nt, Homo sapiens
  misc_RNA (1)...(19): siRNA sense strand
uugucaagcaagagcugaa

SEQ ID NO: 2468130 - RNA, 19 nt, Homo sapiens
  misc_RNA (1)...(19): siRNA sense strand
cugcaucagaagaaaugua

SEQ ID NO: 2468131 - RNA, 19 nt, Homo sapiens
  misc_RNA (1)...(19): siRNA sense strand
gaagaaguuuguauccaga

SEQ ID NO: 2468132 - RNA, 19 nt, Homo sapiens
  misc_RNA (1)...(19): siRNA sense strand
ggcuagaagaauaaagaca

SEQ ID NO: 2468133 - RNA, 19 nt, Homo sapiens
  misc_RNA (1)...(19): siRNA sense strand
cuccaaaggcagaugugaa

SEQ ID NO: 2468134 - RNA, 19 nt, Homo sapiens
  misc_RNA (1)...(19): siRNA sense strand
ggugaagauaggugucgaa

SEQ ID NO: 2468135 - RNA, 19 nt, Homo sapiens
  misc_RNA (1)...(19): siRNA sense strand
cgaacuuggcugggagaau

SEQ ID NO: 2468136 - RNA, 19 nt, Homo sapiens
  misc_RNA (1)...(19): siRNA sense strand
uguuaugggcugaugccaa

SEQ ID NO: 2468137 - RNA, 19 nt, Homo sapiens
  misc_RNA (1)...(19): siRNA sense strand
caaaagcgauuaaugggaa

SEQ ID NO: 2468138 - RNA, 19 nt, Homo sapiens
  misc_RNA (1)...(19): siRNA sense strand
cgucaaaggugaagcagga

SEQ ID NO: 2468139 - RNA, 19 nt, Homo sapiens
  misc_RNA (1)...(19): siRNA sense strand
gggcaaaagaggaguaaag

SEQ ID NO: 2468140 - RNA, 19 nt, Homo sapiens
  misc_RNA (1)...(19): siRNA sense strand
caugcuggccauagggauu

SEQ ID NO: 2468141 - RNA, 19 nt, Homo sapiens
  misc_RNA (1)...(19): siRNA sense strand
caaaggugaagcaggacau

SEQ ID NO: 2468142 - RNA, 19 nt, Homo sapiens
  misc_RNA (1)...(19): siRNA sense strand
uugcagaugcuucgggaga

SEQ ID NO: 2468143 - RNA, 19 nt, Homo sapiens
  misc_RNA (1)...(19): siRNA sense strand
gucgaggacugucgggcua

SEQ ID NO: 2468144 - RNA, 19 nt, Homo sapiens
  misc_RNA (1)...(19): siRNA sense strand
gcagaaaccgaccggagga

SEQ ID NO: 2468145 - RNA, 19 nt, Homo sapiens
  misc_RNA (1)...(19): siRNA sense strand
guuacagguagaagagaaa

SEQ ID NO: 2468146 - RNA, 19 nt, Homo sapiens
  misc_RNA (1)...(19): siRNA sense strand
cugaugaagaugauaguaa

SEQ ID NO: 2468147 - RNA, 19 nt, Homo sapiens
  misc_RNA (1)...(19): siRNA sense strand
gcagaugaugagagcuaaa

SEQ ID NO: 2468148 - RNA, 19 nt, Homo sapiens
  misc_RNA (1)...(19): siRNA sense strand
uugcagaggaggagaguga

SEQ ID NO: 2468149 - RNA, 19 nt, Homo sapiens
  misc_RNA (1)...(19): siRNA sense strand
uugcagaugaugagagcua

SEQ ID NO: 2468150 - RNA, 19 nt, Homo sapiens
  misc_RNA (1)...(19): siRNA sense strand
gggugguacagaagcgaua

SEQ ID NO: 2468151 - RNA, 19 nt, Homo sapiens
  misc_RNA (1)...(19): siRNA sense strand
uguuacagguagaagagaa

SEQ ID NO: 2468152 - RNA, 19 nt, Homo sapiens
  misc_RNA (1)...(19): siRNA sense strand
aaacugaagaggugggaga

SEQ ID NO: 2468153 - RNA, 19 nt, Homo sapiens
  misc_RNA (1)...(19): siRNA sense strand
guaauaauaucuuggcaca

SEQ ID NO: 2468154 - RNA, 19 nt, Homo sapiens
  misc_RNA (1)...(19): siRNA sense strand
ggguuagccaagagagaca

SEQ ID NO: 2468155 - RNA, 19 nt, Homo sapiens
  misc_RNA (1)...(19): siRNA sense strand
acaaauaaggaaaggggua

SEQ ID NO: 2468156 - RNA, 19 nt, Homo sapiens
  misc_RNA (1)...(19): siRNA sense strand
agagagaagagcugcagaa

SEQ ID NO: 2468157 - RNA, 19 nt, Homo sapiens
  misc_RNA (1)...(19): siRNA sense strand
aggccaugcuggagaagga

SEQ ID NO: 2468158 - RNA, 19 nt, Homo sapiens
  misc_RNA (1)...(19): siRNA sense strand
aggacgaagaggaggcuuu

SEQ ID NO: 2468159 - RNA, 19 nt, Homo sapiens
  misc_RNA (1)...(19): siRNA sense strand
ggguaaaauugaagaaggu

SEQ ID NO: 2468160 - RNA, 19 nt, Homo sapiens
  misc_RNA (1)...(19): siRNA sense strand
agucagaggacgaagagga

SEQ ID NO: 2468161 - RNA, 19 nt, Homo sapiens
  misc_RNA (1)...(19): siRNA sense strand
gcugcugaacggauggaaa

SEQ ID NO: 2468162 - RNA, 19 nt, Homo sapiens
  misc_RNA (1)...(19): siRNA sense strand
acagagguauccugggcaa

SEQ ID NO: 2468163 - RNA, 19 nt, Homo sapiens
  misc_RNA (1)...(19): siRNA sense strand
aagaaaaggugcagcaagu

SEQ ID NO: 2468164 - RNA, 19 nt, Homo sapiens
  misc_RNA (1)...(19): siRNA sense strand
agaaggauguuuugagaga

SEQ ID NO: 2468165 - RNA, 19 nt, Homo sapiens
  misc_RNA (1)...(19): siRNA sense strand
cagcgcaacuagaaagcau

SEQ ID NO: 2468166 - RNA, 19 nt, Homo sapiens
  misc_RNA (1)...(19): siRNA sense strand
acaugaugaagaagaaaga

SEQ ID NO: 2468167 - RNA, 19 nt, Homo sapiens
  misc_RNA (1)...(19): siRNA sense strand
cacuaaaggaagagaugca

SEQ ID NO: 2468168 - RNA, 19 nt, Homo sapiens
  misc_RNA (1)...(19): siRNA sense strand
caagagagacagagaacac

SEQ ID NO: 2468169 - RNA, 19 nt, Homo sapiens
  misc_RNA (1)...(19): siRNA sense strand
caaauaaggaaagggguaa

SEQ ID NO: 2468170 - RNA, 19 nt, Homo sapiens
  misc_RNA (1)...(19): siRNA sense strand
gggagaaggaagagucaag

SEQ ID NO: 2468171 - RNA, 19 nt, Homo sapiens
  misc_RNA (1)...(19): siRNA sense strand
cuacagcagccuugcagaa

SEQ ID NO: 2468172 - RNA, 19 nt, Homo sapiens
  misc_RNA (1)...(19): siRNA sense strand
gguaaagcaucaugggcag

SEQ ID NO: 2468173 - RNA, 19 nt, Homo sapiens
  misc_RNA (1)...(19): siRNA sense strand
uugaaaucuugaaguguga

SEQ ID NO: 2468174 - RNA, 19 nt, Homo sapiens
  misc_RNA (1)...(19): siRNA sense strand
agaaauccuaccucagaaa

SEQ ID NO: 2468175 - RNA, 19 nt, Homo sapiens
  misc_RNA (1)...(19): siRNA sense strand
cuggauagacuucgaacau

SEQ ID NO: 2468176 - RNA, 19 nt, Homo sapiens
  misc_RNA (1)...(19): siRNA sense strand
cgagcugaucagaagaaau

SEQ ID NO: 2468177 - RNA, 19 nt, Homo sapiens
  misc_RNA (1)...(19): siRNA sense strand
cugcugaacggauggaaaa

SEQ ID NO: 2468178 - RNA, 19 nt, Homo sapiens
  misc_RNA (1)...(19): siRNA sense strand
cgauagcacgauuggauca

SEQ ID NO: 2468179 - RNA, 19 nt, Homo sapiens
  misc_RNA (1)...(19): siRNA sense strand
aaauccuaccucagaaaua

SEQ ID NO: 2468180 - RNA, 19 nt, Homo sapiens
  misc_RNA (1)...(19): siRNA sense strand
gggaaugagaagaggaucc

SEQ ID NO: 2468181 - RNA, 19 nt, Homo sapiens
  misc_RNA (1)...(19): siRNA sense strand
aaggauguuuugagagaau

SEQ ID NO: 2468182 - RNA, 19 nt, Homo sapiens
  misc_RNA (1)...(19): siRNA sense strand
aguuggaggaugaagccua

SEQ ID NO: 2468183 - RNA, 19 nt, Homo sapiens
  misc_RNA (1)...(19): siRNA sense strand
agcaagacguggacggguu

SEQ ID NO: 2468184 - RNA, 19 nt, Homo sapiens
  misc_RNA (1)...(19): siRNA sense strand
ugguaaagcaucaugggca

SEQ ID NO: 2468185 - RNA, 19 nt, Homo sapiens
  misc_RNA (1)...(19): siRNA sense strand
agagaacacuggauagacu

SEQ ID NO: 2468186 - RNA, 19 nt, Homo sapiens
  misc_RNA (1)...(19): siRNA sense strand
caaguguguuacagguaga

SEQ ID NO: 2468187 - RNA, 19 nt, Homo sapiens
  misc_RNA (1)...(19): siRNA sense strand
agaggugggagaaggaaga

SEQ ID NO: 2468188 - RNA, 19 nt, Homo sapiens
  misc_RNA (1)...(19): siRNA sense strand
gaagaagcucagaaagacu

SEQ ID NO: 2468189 - RNA, 19 nt, Homo sapiens
  misc_RNA (1)...(19): siRNA sense strand
cuacgaagacagcagauca

SEQ ID NO: 2468190 - RNA, 19 nt, Homo sapiens
  misc_RNA (1)...(19): siRNA sense strand
cuaaggaaacuuugcagau

SEQ ID NO: 2468191 - RNA, 19 nt, Homo sapiens
  misc_RNA (1)...(19): siRNA sense strand
ucggauugaagaugaauau

SEQ ID NO: 2468192 - RNA, 19 nt, Homo sapiens
  misc_RNA (1)...(19): siRNA sense strand
ggagaaugauuaucuggga

SEQ ID NO: 2468193 - RNA, 19 nt, Homo sapiens
  misc_RNA (1)...(19): siRNA sense strand
cgaagacagcagaucaaga

SEQ ID NO: 2468194 - RNA, 19 nt, Homo sapiens
  misc_RNA (1)...(19): siRNA sense strand
cuggguuagccaagagaga

SEQ ID NO: 2468195 - RNA, 19 nt, Homo sapiens
  misc_RNA (1)...(19): siRNA sense strand
ucaagauuuccauggagaa

SEQ ID NO: 2468196 - RNA, 19 nt, Homo sapiens
  misc_RNA (1)...(19): siRNA sense strand
gcaagauguuugacgagga

SEQ ID NO: 2468197 - RNA, 19 nt, Homo sapiens
  misc_RNA (1)...(19): siRNA sense strand
aguacaagcagguggagca

SEQ ID NO: 2468198 - RNA, 19 nt, Homo sapiens
  misc_RNA (1)...(19): siRNA sense strand
aggacaacacggagaucau

SEQ ID NO: 2468199 - RNA, 19 nt, Homo sapiens
  misc_RNA (1)...(19): siRNA sense strand
ucaacgaggugcuggagga

SEQ ID NO: 2468200 - RNA, 19 nt, Homo sapiens
  misc_RNA (1)...(19): siRNA sense strand
ugcuguucauggugggaaa

SEQ ID NO: 2468201 - RNA, 19 nt, Homo sapiens
  misc_RNA (1)...(19): siRNA sense strand
gcgaaggcaccaucgggaa

SEQ ID NO: 2468202 - RNA, 19 nt, Homo sapiens
  misc_RNA (1)...(19): siRNA sense strand
acuaagggcaacaaggaga

SEQ ID NO: 2468203 - RNA, 19 nt, Homo sapiens
  misc_RNA (1)...(19): siRNA sense strand
agggcaacaaggagaugaa

SEQ ID NO: 2468204 - RNA, 19 nt, Homo sapiens
  misc_RNA (1)...(19): siRNA sense strand
cgugguucgugguggacuu

SEQ ID NO: 2468205 - RNA, 19 nt, Homo sapiens
  misc_RNA (1)...(19): siRNA sense strand
cccgagagcaugacggaca

SEQ ID NO: 2468206 - RNA, 19 nt, Homo sapiens
  misc_RNA (1)...(19): siRNA sense strand
agcucaaguucgaggucuu

SEQ ID NO: 2468207 - RNA, 19 nt, Homo sapiens
  misc_RNA (1)...(19): siRNA sense strand
uauucaacaaccaggagaa

SEQ ID NO: 2468208 - RNA, 19 nt, Homo sapiens
  misc_RNA (1)...(19): siRNA sense strand
gcaccaucgggaagaagau

SEQ ID NO: 2468209 - RNA, 19 nt, Homo sapiens
  misc_RNA (1)...(19): siRNA sense strand
aggaaauacuacagagugu

SEQ ID NO: 2468210 - RNA, 19 nt, Homo sapiens
  misc_RNA (1)...(19): siRNA sense strand
uggcuaaggaacuggaaaa

SEQ ID NO: 2468211 - RNA, 19 nt, Homo sapiens
  misc_RNA (1)...(19): siRNA sense strand
cugauguauuugaagaaga

SEQ ID NO: 2468212 - RNA, 19 nt, Homo sapiens
  misc_RNA (1)...(19): siRNA sense strand
uugcagauuacuuggcuaa

SEQ ID NO: 2468213 - RNA, 19 nt, Homo sapiens
  misc_RNA (1)...(19): siRNA sense strand
ggaauacacuccagccuca

SEQ ID NO: 2468214 - RNA, 19 nt, Homo sapiens
  misc_RNA (1)...(19): siRNA sense strand
cauuuagugacuugaacaa

SEQ ID NO: 2468215 - RNA, 19 nt, Homo sapiens
  misc_RNA (1)...(19): siRNA sense strand
acccaguaccaaaggcaaa

SEQ ID NO: 2468216 - RNA, 19 nt, Homo sapiens
  misc_RNA (1)...(19): siRNA sense strand
caugaaaggcgcaucguga

SEQ ID NO: 2468217 - RNA, 19 nt, Homo sapiens
  misc_RNA (1)...(19): siRNA sense strand
agagaugcacugagauaca

SEQ ID NO: 2468218 - RNA, 19 nt, Homo sapiens
  misc_RNA (1)...(19): siRNA sense strand
uggcuuuuguggagguaaa

SEQ ID NO: 2468219 - RNA, 19 nt, Homo sapiens
  misc_RNA (1)...(19): siRNA sense strand
gaaucaaguuggacagcac

SEQ ID NO: 2468220 - RNA, 19 nt, Homo sapiens
  misc_RNA (1)...(19): siRNA sense strand
uuucgaauccugugguauu

SEQ ID NO: 2468221 - RNA, 19 nt, Homo sapiens
  misc_RNA (1)...(19): siRNA sense strand
acuuuggagaccaggaaau

SEQ ID NO: 2468222 - RNA, 19 nt, Homo sapiens
  misc_RNA (1)...(19): siRNA sense strand
cuuuggagaccaggaaaua

SEQ ID NO: 2468223 - RNA, 19 nt, Homo sapiens
  misc_RNA (1)...(19): siRNA sense strand
ucgugauuaucucgagcaa

SEQ ID NO: 2468224 - RNA, 19 nt, Homo sapiens
  misc_RNA (1)...(19): siRNA sense strand
cauuggaagauguuguuau

SEQ ID NO: 2468225 - RNA, 19 nt, Homo sapiens
  misc_RNA (1)...(19): siRNA sense strand
aagaggagcaagaaggaga

SEQ ID NO: 2468226 - RNA, 19 nt, Homo sapiens
  misc_RNA (1)...(19): siRNA sense strand
gcccaaagcugagggagga

SEQ ID NO: 2468227 - RNA, 19 nt, Homo sapiens
  misc_RNA (1)...(19): siRNA sense strand
cgagaguuugacagggaca

SEQ ID NO: 2468228 - RNA, 19 nt, Homo sapiens
  misc_RNA (1)...(19): siRNA sense strand
uugacgaguuugugaugau

SEQ ID NO: 2468229 - RNA, 19 nt, Homo sapiens
  misc_RNA (1)...(19): siRNA sense strand
ccagaaaacagcaggcaaa

SEQ ID NO: 2468230 - RNA, 19 nt, Homo sapiens
  misc_RNA (1)...(19): siRNA sense strand
aggaagaaugggaguuauu

SEQ ID NO: 2468231 - RNA, 19 nt, Homo sapiens
  misc_RNA (1)...(19): siRNA sense strand
ccaaagaacucauacagga

SEQ ID NO: 2468232 - RNA, 19 nt, Homo sapiens
  misc_RNA (1)...(19): siRNA sense strand
cagugugauaagagguuua

SEQ ID NO: 2468233 - RNA, 19 nt, Homo sapiens
  misc_RNA (1)...(19): siRNA sense strand
augucaggaaugugggaaa

SEQ ID NO: 2468234 - RNA, 19 nt, Homo sapiens
  misc_RNA (1)...(19): siRNA sense strand
cuuagaaauacaagcauca

SEQ ID NO: 2468235 - RNA, 19 nt, Homo sapiens
  misc_RNA (1)...(19): siRNA sense strand
aaagauugugcaagagaga

SEQ ID NO: 2468236 - RNA, 19 nt, Homo sapiens
  misc_RNA (1)...(19): siRNA sense strand
cuuauuaaacaccggagaa

SEQ ID NO: 2468237 - RNA, 19 nt, Homo sapiens
  misc_RNA (1)...(19): siRNA sense strand
aagaacucauacaggagaa

SEQ ID NO: 2468238 - RNA, 19 nt, Homo sapiens
  misc_RNA (1)...(19): siRNA sense strand
augauguaaugcaggaaaa

SEQ ID NO: 2468239 - RNA, 19 nt, Homo sapiens
  misc_RNA (1)...(19): siRNA sense strand
guuuaaggauagugccgga

SEQ ID NO: 2468240 - RNA, 19 nt, Homo sapiens
  misc_RNA (1)...(19): siRNA sense strand
ccuacaggguuaaagcuca

SEQ ID NO: 2468241 - RNA, 19 nt, Homo sapiens
  misc_RNA (1)...(19): siRNA sense strand
ccagugaagaaaagaaaga

SEQ ID NO: 2468242 - RNA, 19 nt, Homo sapiens
  misc_RNA (1)...(19): siRNA sense strand
auaugcacagagugggaaa

SEQ ID NO: 2468243 - RNA, 19 nt, Homo sapiens
  misc_RNA (1)...(19): siRNA sense strand
auguucauggugugggaaa

SEQ ID NO: 2468244 - RNA, 19 nt, Homo sapiens
  misc_RNA (1)...(19): siRNA sense strand
ggcuaagaaaccagagcaa

SEQ ID NO: 2468245 - RNA, 19 nt, Homo sapiens
  misc_RNA (1)...(19): siRNA sense strand
ccagauagccugugggaug

SEQ ID NO: 2468246 - RNA, 19 nt, Homo sapiens
  misc_RNA (1)...(19): siRNA sense strand
cggguugugaggaggguaa

SEQ ID NO: 2468247 - RNA, 19 nt, Homo sapiens
  misc_RNA (1)...(19): siRNA sense strand
ugaaaugguugcuggacga

SEQ ID NO: 2468248 - RNA, 19 nt, Homo sapiens
  misc_RNA (1)...(19): siRNA sense strand
ccuguaagaaacuggacaa

SEQ ID NO: 2468249 - RNA, 19 nt, Homo sapiens
  misc_RNA (1)...(19): siRNA sense strand
aggucaaauuccagcauga

SEQ ID NO: 2468250 - RNA, 19 nt, Homo sapiens
  misc_RNA (1)...(19): siRNA sense strand
ccacugaggaagagcgagu

SEQ ID NO: 2468251 - RNA, 19 nt, Homo sapiens
  misc_RNA (1)...(19): siRNA sense strand
ccuaugccuuugagagcaa

SEQ ID NO: 2468252 - RNA, 19 nt, Homo sapiens
  misc_RNA (1)...(19): siRNA sense strand
cuucagugguuuaugccaa

SEQ ID NO: 2468253 - RNA, 19 nt, Homo sapiens
  misc_RNA (1)...(19): siRNA sense strand
cugagauccuaauggaaaa

SEQ ID NO: 2468254 - RNA, 19 nt, Homo sapiens
  misc_RNA (1)...(19): siRNA sense strand
agaaagguggcgagaagau

SEQ ID NO: 2468255 - RNA, 19 nt, Homo sapiens
  misc_RNA (1)...(19): siRNA sense strand
aggaaaucuuggagaaggu

SEQ ID NO: 2468256 - RNA, 19 nt, Homo sapiens
  misc_RNA (1)...(19): siRNA sense strand
ugauaacuucacagaggaa

SEQ ID NO: 2468257 - RNA, 19 nt, Homo sapiens
  misc_RNA (1)...(19): siRNA sense strand
cugcagugacgcuggccaa

SEQ ID NO: 2468258 - RNA, 19 nt, Homo sapiens
  misc_RNA (1)...(19): siRNA sense strand
acaaggaaaaggucaguaa

SEQ ID NO: 2468259 - RNA, 19 nt, Homo sapiens
  misc_RNA (1)...(19): siRNA sense strand
cgggacuguuugaggaacu

SEQ ID NO: 2468260 - RNA, 19 nt, Homo sapiens
  misc_RNA (1)...(19): siRNA sense strand
uguuugaggaacugaauga

SEQ ID NO: 2468261 - RNA, 19 nt, Homo sapiens
  misc_RNA (1)...(19): siRNA sense strand
ccucggacugcgacagcaa

SEQ ID NO: 2468262 - RNA, 19 nt, Homo sapiens
  misc_RNA (1)...(19): siRNA sense strand
guucagagugcuggggaaa

SEQ ID NO: 2468263 - RNA, 19 nt, Homo sapiens
  misc_RNA (1)...(19): siRNA sense strand
cgagaugcaaccaguguca

SEQ ID NO: 2468264 - RNA, 19 nt, Homo sapiens
  misc_RNA (1)...(19): siRNA sense strand
agaggaagcaaaagauauu

SEQ ID NO: 2468265 - RNA, 19 nt, Homo sapiens
  misc_RNA (1)...(19): siRNA sense strand
aguccaagauagaggaguu

SEQ ID NO: 2468266 - RNA, 19 nt, Homo sapiens
  misc_RNA (1)...(19): siRNA sense strand
agaguuacguaaugggcaa

SEQ ID NO: 2468267 - RNA, 19 nt, Homo sapiens
  misc_RNA (1)...(19): siRNA sense strand
cuacagagagacagcgcaa

SEQ ID NO: 2468268 - RNA, 19 nt, Homo sapiens
  misc_RNA (1)...(19): siRNA sense strand
cgacaaaagaggaugugua

SEQ ID NO: 2468269 - RNA, 19 nt, Homo sapiens
  misc_RNA (1)...(19): siRNA sense strand
cuguaauucugauggcgaa

SEQ ID NO: 2468270 - RNA, 19 nt, Homo sapiens
  misc_RNA (1)...(19): siRNA sense strand
augggcaaguagagauuaa

SEQ ID NO: 2468271 - RNA, 19 nt, Homo sapiens
  misc_RNA (1)...(19): siRNA sense strand
gugucggaaaccagaauua

SEQ ID NO: 2468272 - RNA, 19 nt, Homo sapiens
  misc_RNA (1)...(19): siRNA sense strand
guguuuauuucuauggaga

SEQ ID NO: 2468273 - RNA, 19 nt, Homo sapiens
  misc_RNA (1)...(19): siRNA sense strand
gcuacauucuggucggaca

SEQ ID NO: 2468274 - RNA, 19 nt, Homo sapiens
  misc_RNA (1)...(19): siRNA sense strand
cagaauuagugaauggaag

SEQ ID NO: 2468275 - RNA, 19 nt, Homo sapiens
  misc_RNA (1)...(19): siRNA sense strand
ggaaagucucugauccaau

SEQ ID NO: 2468276 - RNA, 19 nt, Homo sapiens
  misc_RNA (1)...(19): siRNA sense strand
acaagugcucacaggcaaa

SEQ ID NO: 2468277 - RNA, 19 nt, Homo sapiens
  misc_RNA (1)...(19): siRNA sense strand
acagagagacagcgcaaga

SEQ ID NO: 2468278 - RNA, 19 nt, Homo sapiens
  misc_RNA (1)...(19): siRNA sense strand
cauucaacucagacgcuua

SEQ ID NO: 2468279 - RNA, 19 nt, Homo sapiens
  misc_RNA (1)...(19): siRNA sense strand
aacuggaacuacagagaga

SEQ ID NO: 2468280 - RNA, 19 nt, Homo sapiens
  misc_RNA (1)...(19): siRNA sense strand
ccccgaaggcugugaacaa

SEQ ID NO: 2468281 - RNA, 19 nt, Homo sapiens
  misc_RNA (1)...(19): siRNA sense strand
gaaacauauccuaggccga

SEQ ID NO: 2468282 - RNA, 19 nt, Homo sapiens
  misc_RNA (1)...(19): siRNA sense strand
ucaugagaccaguagguuu

SEQ ID NO: 2468283 - RNA, 19 nt, Homo sapiens
  misc_RNA (1)...(19): siRNA sense strand
gggcauuauaaacaaucua

SEQ ID NO: 2468284 - RNA, 19 nt, Homo sapiens
  misc_RNA (1)...(19): siRNA sense strand
ucucagaggcagcagugua

SEQ ID NO: 2468285 - RNA, 19 nt, Homo sapiens
  misc_RNA (1)...(19): siRNA sense strand
acccagaggaugugaaaau

SEQ ID NO: 2468286 - RNA, 19 nt, Homo sapiens
  misc_RNA (1)...(19): siRNA sense strand
uugugaaguccaagauaga

SEQ ID NO: 2468287 - RNA, 19 nt, Homo sapiens
  misc_RNA (1)...(19): siRNA sense strand
augaaugugauaaaggcua

SEQ ID NO: 2468288 - RNA, 19 nt, Homo sapiens
  misc_RNA (1)...(19): siRNA sense strand
gaacaagugcucacaggca

SEQ ID NO: 2468289 - RNA, 19 nt, Homo sapiens
  misc_RNA (1)...(19): siRNA sense strand
cuguggagaaugaaacaau

SEQ ID NO: 2468290 - RNA, 19 nt, Homo sapiens
  misc_RNA (1)...(19): siRNA sense strand
uuucuauggagaugagauu

SEQ ID NO: 2468291 - RNA, 19 nt, Homo sapiens
  misc_RNA (1)...(19): siRNA sense strand
cucagaggcagcaguguaa

SEQ ID NO: 2468292 - RNA, 19 nt, Homo sapiens
  misc_RNA (1)...(19): siRNA sense strand
ucccaaacccagaggaugu

SEQ ID NO: 2468293 - RNA, 19 nt, Homo sapiens
  misc_RNA (1)...(19): siRNA sense strand
caguagguuuucagcuaua

SEQ ID NO: 2468294 - RNA, 19 nt, Homo sapiens
  misc_RNA (1)...(19): siRNA sense strand
ggagauggcacguggaguc

SEQ ID NO: 2468295 - RNA, 19 nt, Homo sapiens
  misc_RNA (1)...(19): siRNA sense strand
uugaacaacuggaacuaca

SEQ ID NO: 2468296 - RNA, 19 nt, Homo sapiens
  misc_RNA (1)...(19): siRNA sense strand
cuggaacuacagagagaca

SEQ ID NO: 2468297 - RNA, 19 nt, Homo sapiens
  misc_RNA (1)...(19): siRNA sense strand
ccagaauuagugaauggaa

SEQ ID NO: 2468298 - RNA, 19 nt, Homo sapiens
  misc_RNA (1)...(19): siRNA sense strand
uggauaaggaucaguaugu

SEQ ID NO: 2468299 - RNA, 19 nt, Homo sapiens
  misc_RNA (1)...(19): siRNA sense strand
gaauacuacagaagagaaa

SEQ ID NO: 2468300 - RNA, 19 nt, Homo sapiens
  misc_RNA (1)...(19): siRNA sense strand
gcauuaaagaggaagauau

SEQ ID NO: 2468301 - RNA, 19 nt, Homo sapiens
  misc_RNA (1)...(19): siRNA sense strand
uggcaagggaggugaagaa

SEQ ID NO: 2468302 - RNA, 19 nt, Homo sapiens
  misc_RNA (1)...(19): siRNA sense strand
acuagaaggaggacgauua

SEQ ID NO: 2468303 - RNA, 19 nt, Homo sapiens
  misc_RNA (1)...(19): siRNA sense strand
uggcaacaguggaaagaau

SEQ ID NO: 2468304 - RNA, 19 nt, Homo sapiens
  misc_RNA (1)...(19): siRNA sense strand
gaacuauguuauacgggaa

SEQ ID NO: 2468305 - RNA, 19 nt, Homo sapiens
  misc_RNA (1)...(19): siRNA sense strand
ucacaaauggaaugguuaa

SEQ ID NO: 2468306 - RNA, 19 nt, Homo sapiens
  misc_RNA (1)...(19): siRNA sense strand
aggaagagcuaggggaaaa

SEQ ID NO: 2468307 - RNA, 19 nt, Homo sapiens
  misc_RNA (1)...(19): siRNA sense strand
ugauauuguagaaggcaua

SEQ ID NO: 2468308 - RNA, 19 nt, Homo sapiens
  misc_RNA (1)...(19): siRNA sense strand
guggaaagaauaugucaaa

SEQ ID NO: 2468309 - RNA, 19 nt, Homo sapiens
  misc_RNA (1)...(19): siRNA sense strand
ugguaaagucccagauaca

SEQ ID NO: 2468310 - RNA, 19 nt, Homo sapiens
  misc_RNA (1)...(19): siRNA sense strand
acgauuugauuuagagaca

SEQ ID NO: 2468311 - RNA, 19 nt, Homo sapiens
  misc_RNA (1)...(19): siRNA sense strand
uaaaauugauuguggggaa

SEQ ID NO: 2468312 - RNA, 19 nt, Homo sapiens
  misc_RNA (1)...(19): siRNA sense strand
uguaaauggucgguggaua

SEQ ID NO: 2468313 - RNA, 19 nt, Homo sapiens
  misc_RNA (1)...(19): siRNA sense strand
augcagaccaucaaggaaa

SEQ ID NO: 2468314 - RNA, 19 nt, Homo sapiens
  misc_RNA (1)...(19): siRNA sense strand
gaggcaaagaugaagagaa

SEQ ID NO: 2468315 - RNA, 19 nt, Homo sapiens
  misc_RNA (1)...(19): siRNA sense strand
gaggaugguuagaacgaga

SEQ ID NO: 2468316 - RNA, 19 nt, Homo sapiens
  misc_RNA (1)...(19): siRNA sense strand
gcugggagccaaugggaau

SEQ ID NO: 2468317 - RNA, 19 nt, Homo sapiens
  misc_RNA (1)...(19): siRNA sense strand
uggacuuaauucagaacaa

SEQ ID NO: 2468318 - RNA, 19 nt, Homo sapiens
  misc_RNA (1)...(19): siRNA sense strand
acauaacacuucugacaau

SEQ ID NO: 2468319 - RNA, 19 nt, Homo sapiens
  misc_RNA (1)...(19): siRNA sense strand
gggaaaaugagauguacua

SEQ ID NO: 2468320 - RNA, 19 nt, Homo sapiens
  misc_RNA (1)...(19): siRNA sense strand
aauugaaguucgcaacaaa

SEQ ID NO: 2468321 - RNA, 19 nt, Homo sapiens
  misc_RNA (1)...(19): siRNA sense strand
gcaccuuaacccucagaaa

SEQ ID NO: 2468322 - RNA, 19 nt, Homo sapiens
  misc_RNA (1)...(19): siRNA sense strand
gcuuggugcccaugguaua

SEQ ID NO: 2468323 - RNA, 19 nt, Homo sapiens
  misc_RNA (1)...(19): siRNA sense strand
ucacauaguucugggguua

SEQ ID NO: 2468324 - RNA, 19 nt, Homo sapiens
  misc_RNA (1)...(19): siRNA sense strand
aaauaugcucccagguuua

SEQ ID NO: 2468325 - RNA, 19 nt, Homo sapiens
  misc_RNA (1)...(19): siRNA sense strand
ggucuaagcaaucugggaa

SEQ ID NO: 2468326 - RNA, 19 nt, Homo sapiens
  misc_RNA (1)...(19): siRNA sense strand
cgguauggacuaagacuga

SEQ ID NO: 2468327 - RNA, 19 nt, Homo sapiens
  misc_RNA (1)...(19): siRNA sense strand
aagaugaagagaaagcaaa

SEQ ID NO: 2468328 - RNA, 19 nt, Homo sapiens
  misc_RNA (1)...(19): siRNA sense strand
cugcagaggccugggacaa

SEQ ID NO: 2468329 - RNA, 19 nt, Homo sapiens
  misc_RNA (1)...(19): siRNA sense strand
ugaugaaaaucgugacaau

SEQ ID NO: 2468330 - RNA, 19 nt, Homo sapiens
  misc_RNA (1)...(19): siRNA sense strand
gcaacaguggaaagaauau

SEQ ID NO: 2468331 - RNA, 19 nt, Homo sapiens
  misc_RNA (1)...(19): siRNA sense strand
auuaguaacucaagaacca

SEQ ID NO: 2468332 - RNA, 19 nt, Homo sapiens
  misc_RNA (1)...(19): siRNA sense strand
gauucauggaagagacuau

SEQ ID NO: 2468333 - RNA, 19 nt, Homo sapiens
  misc_RNA (1)...(19): siRNA sense strand
guuuaauggguuucagcaa

SEQ ID NO: 2468334 - RNA, 19 nt, Homo sapiens
  misc_RNA (1)...(19): siRNA sense strand
cgccuugagucgagggcau

SEQ ID NO: 2468335 - RNA, 19 nt, Homo sapiens
  misc_RNA (1)...(19): siRNA sense strand
gcaaagaugaagagaaagc

SEQ ID NO: 2468336 - RNA, 19 nt, Homo sapiens
  misc_RNA (1)...(19): siRNA sense strand
gguuagaacgagagagcag

SEQ ID NO: 2468337 - RNA, 19 nt, Homo sapiens
  misc_RNA (1)...(19): siRNA sense strand
ggcaacaguggaaagaaua

SEQ ID NO: 2468338 - RNA, 19 nt, Homo sapiens
  misc_RNA (1)...(19): siRNA sense strand
uauacaacagugagaacua

SEQ ID NO: 2468339 - RNA, 19 nt, Homo sapiens
  misc_RNA (1)...(19): siRNA sense strand
augcacaauuucugccaaa

SEQ ID NO: 2468340 - RNA, 19 nt, Homo sapiens
  misc_RNA (1)...(19): siRNA sense strand
ccagauacacucaggaagu

SEQ ID NO: 2468341 - RNA, 19 nt, Homo sapiens
  misc_RNA (1)...(19): siRNA sense strand
cagucuaacaucuggguga

SEQ ID NO: 2468342 - RNA, 19 nt, Homo sapiens
  misc_RNA (1)...(19): siRNA sense strand
gucuaagcaaucugggaaa

SEQ ID NO: 2468343 - RNA, 19 nt, Homo sapiens
  misc_RNA (1)...(19): siRNA sense strand
guggauaaaaucacagaaa

SEQ ID NO: 2468344 - RNA, 19 nt, Homo sapiens
  misc_RNA (1)...(19): siRNA sense strand
uguagaaggcauacugaau

SEQ ID NO: 2468345 - RNA, 19 nt, Homo sapiens
  misc_RNA (1)...(19): siRNA sense strand
aagaacagcaagacagaca

SEQ ID NO: 2468346 - RNA, 19 nt, Homo sapiens
  misc_RNA (1)...(19): siRNA sense strand
caguaugggcuaucaauau

SEQ ID NO: 2468347 - RNA, 19 nt, Homo sapiens
  misc_RNA (1)...(19): siRNA sense strand
ggguuguagaugagcauga

SEQ ID NO: 2468348 - RNA, 19 nt, Homo sapiens
  misc_RNA (1)...(19): siRNA sense strand
uacaagaggcaaagaugaa

SEQ ID NO: 2468349 - RNA, 19 nt, Homo sapiens
  misc_RNA (1)...(19): siRNA sense strand
ggugaauaugggaaaugua

SEQ ID NO: 2468350 - RNA, 19 nt, Homo sapiens
  misc_RNA (1)...(19): siRNA sense strand
gugauuuagugcaggaacu

SEQ ID NO: 2468351 - RNA, 19 nt, Homo sapiens
  misc_RNA (1)...(19): siRNA sense strand
caggaacuuuggaguggaa

SEQ ID NO: 2468352 - RNA, 19 nt, Homo sapiens
  misc_RNA (1)...(19): siRNA sense strand
ggaccuaccccgaccaaua

SEQ ID NO: 2468353 - RNA, 19 nt, Homo sapiens
  misc_RNA (1)...(19): siRNA sense strand
aaagaugaagagaaagcaa

SEQ ID NO: 2468354 - RNA, 19 nt, Homo sapiens
  misc_RNA (1)...(19): siRNA sense strand
agaugaagagaaagcaaaa

SEQ ID NO: 2468355 - RNA, 19 nt, Homo sapiens
  misc_RNA (1)...(19): siRNA sense strand
ggaucggauuccucagcua

SEQ ID NO: 2468356 - RNA, 19 nt, Homo sapiens
  misc_RNA (1)...(19): siRNA sense strand
cggaugaaauugacaccga

SEQ ID NO: 2468357 - RNA, 19 nt, Homo sapiens
  misc_RNA (1)...(19): siRNA sense strand
uuagaagucuggaaggaca

SEQ ID NO: 2468358 - RNA, 19 nt, Homo sapiens
  misc_RNA (1)...(19): siRNA sense strand
cggaagaagaaggacaaau

SEQ ID NO: 2468359 - RNA, 19 nt, Homo sapiens
  misc_RNA (1)...(19): siRNA sense strand
ccugaaucgagcagagaaa

SEQ ID NO: 2468360 - RNA, 19 nt, Homo sapiens
  misc_RNA (1)...(19): siRNA sense strand
uuuggaaaguggagaggaa

SEQ ID NO: 2468361 - RNA, 19 nt, Homo sapiens
  misc_RNA (1)...(19): siRNA sense strand
uggaaaguggagaggaaaa

SEQ ID NO: 2468362 - RNA, 19 nt, Homo sapiens
  misc_RNA (1)...(19): siRNA sense strand
ccuucauccuaauaagaaa

SEQ ID NO: 2468363 - RNA, 19 nt, Homo sapiens
  misc_RNA (1)...(19): siRNA sense strand
aaaacaaagcagagugcaa

SEQ ID NO: 2468364 - RNA, 19 nt, Homo sapiens
  misc_RNA (1)...(19): siRNA sense strand
agaagaaggaaauaagcau

SEQ ID NO: 2468365 - RNA, 19 nt, Homo sapiens
  misc_RNA (1)...(19): siRNA sense strand
caucaguuaaaguggauuu

SEQ ID NO: 2468366 - RNA, 19 nt, Homo sapiens
  misc_RNA (1)...(19): siRNA sense strand
cugcaaacuuggccugauu

SEQ ID NO: 2468367 - RNA, 19 nt, Homo sapiens
  misc_RNA (1)...(19): siRNA sense strand
cugcaaugauucuuaugaa

SEQ ID NO: 2468368 - RNA, 19 nt, Homo sapiens
  misc_RNA (1)...(19): siRNA sense strand
cggaagaauaagccgugua

SEQ ID NO: 2468369 - RNA, 19 nt, Homo sapiens
  misc_RNA (1)...(19): siRNA sense strand
cuacagaguaugucagguu

SEQ ID NO: 2468370 - RNA, 19 nt, Homo sapiens
  misc_RNA (1)...(19): siRNA sense strand
cguaaugcucaucggaaga

SEQ ID NO: 2468371 - RNA, 19 nt, Homo sapiens
  misc_RNA (1)...(19): siRNA sense strand
ugggcaagcgggagaucaa

SEQ ID NO: 2468372 - RNA, 19 nt, Homo sapiens
  misc_RNA (1)...(19): siRNA sense strand
gaauaguagcaccagaaau

SEQ ID NO: 2468373 - RNA, 19 nt, Homo sapiens
  misc_RNA (1)...(19): siRNA sense strand
acugaaagggaauguauau

SEQ ID NO: 2468374 - RNA, 19 nt, Homo sapiens
  misc_RNA (1)...(19): siRNA sense strand
ucacuaaugagaagauaga

SEQ ID NO: 2468375 - RNA, 19 nt, Homo sapiens
  misc_RNA (1)...(19): siRNA sense strand
cuggaaacccuaugcucaa

SEQ ID NO: 2468376 - RNA, 19 nt, Homo sapiens
  misc_RNA (1)...(19): siRNA sense strand
cuguaugguucauggucau

SEQ ID NO: 2468377 - RNA, 19 nt, Homo sapiens
  misc_RNA (1)...(19): siRNA sense strand
ggccauuguccaaguguuu

SEQ ID NO: 2468378 - RNA, 19 nt, Homo sapiens
  misc_RNA (1)...(19): siRNA sense strand
ugguagugguguuauguau

SEQ ID NO: 2468379 - RNA, 19 nt, Homo sapiens
  misc_RNA (1)...(19): siRNA sense strand
guuaaugguucuaugaaac

SEQ ID NO: 2468380 - RNA, 19 nt, Homo sapiens
  misc_RNA (1)...(19): siRNA sense strand
ccguguacugauuuggaaa

SEQ ID NO: 2468381 - RNA, 19 nt, Homo sapiens
  misc_RNA (1)...(19): siRNA sense strand
uuuggaaucuacagaguau

SEQ ID NO: 2468382 - RNA, 19 nt, Homo sapiens
  misc_RNA (1)...(19): siRNA sense strand
aaucuguucaugaaggaaa

SEQ ID NO: 2468383 - RNA, 19 nt, Homo sapiens
  misc_RNA (1)...(19): siRNA sense strand
aagaaggaaauaagcauga

SEQ ID NO: 2468384 - RNA, 19 nt, Homo sapiens
  misc_RNA (1)...(19): siRNA sense strand
uggaaaggcuggaugcaac

SEQ ID NO: 2468385 - RNA, 19 nt, Homo sapiens
  misc_RNA (1)...(19): siRNA sense strand
aauaggaagaugaucacua

SEQ ID NO: 2468386 - RNA, 19 nt, Homo sapiens
  misc_RNA (1)...(19): siRNA sense strand
guuuugaacugaaagggaa

SEQ ID NO: 2468387 - RNA, 19 nt, Homo sapiens
  misc_RNA (1)...(19): siRNA sense strand
aggaaagggugaaccucuu

SEQ ID NO: 2468388 - RNA, 19 nt, Homo sapiens
  misc_RNA (1)...(19): siRNA sense strand
uggccuacaaccugggcaa

SEQ ID NO: 2468389 - RNA, 19 nt, Homo sapiens
  misc_RNA (1)...(19): siRNA sense strand
ggaaauaagcaugaaaaca

SEQ ID NO: 2468390 - RNA, 19 nt, Homo sapiens
  misc_RNA (1)...(19): siRNA sense strand
guaucaaaguguggacuga

SEQ ID NO: 2468391 - RNA, 19 nt, Homo sapiens
  misc_RNA (1)...(19): siRNA sense strand
ggagagaaaguuuggcaac

SEQ ID NO: 2468392 - RNA, 19 nt, Homo sapiens
  misc_RNA (1)...(19): siRNA sense strand
guucuaugaaacaguguau

SEQ ID NO: 2468393 - RNA, 19 nt, Homo sapiens
  misc_RNA (1)...(19): siRNA sense strand
auacaaaaucagugaagca

SEQ ID NO: 2468394 - RNA, 19 nt, Homo sapiens
  misc_RNA (1)...(19): siRNA sense strand
uagagaacaaacagacgaa

SEQ ID NO: 2468395 - RNA, 19 nt, Homo sapiens
  misc_RNA (1)...(19): siRNA sense strand
uugaauaguagcaccagaa

SEQ ID NO: 2468396 - RNA, 19 nt, Homo sapiens
  misc_RNA (1)...(19): siRNA sense strand
gugcauuugagaagaucuu

SEQ ID NO: 2468397 - RNA, 19 nt, Homo sapiens
  misc_RNA (1)...(19): siRNA sense strand
cauauuuguuuguguggca

SEQ ID NO: 2468398 - RNA, 19 nt, Homo sapiens
  misc_RNA (1)...(19): siRNA sense strand
acaaaaucagugaagcaaa

SEQ ID NO: 2468399 - RNA, 19 nt, Homo sapiens
  misc_RNA (1)...(19): siRNA sense strand
ucuaugaaacaguguauca

SEQ ID NO: 2468400 - RNA, 19 nt, Homo sapiens
  misc_RNA (1)...(19): siRNA sense strand
ccugugucuucauuagaaa

SEQ ID NO: 2468401 - RNA, 19 nt, Homo sapiens
  misc_RNA (1)...(19): siRNA sense strand
agugaaaauaggaagauga

SEQ ID NO: 2468402 - RNA, 19 nt, Homo sapiens
  misc_RNA (1)...(19): siRNA sense strand
cgauauuugcugugcagaa

SEQ ID NO: 2468403 - RNA, 19 nt, Homo sapiens
  misc_RNA (1)...(19): siRNA sense strand
auuuauugguucugagaga

SEQ ID NO: 2468404 - RNA, 19 nt, Homo sapiens
  misc_RNA (1)...(19): siRNA sense strand
agguuuagccguuggaaca

SEQ ID NO: 2468405 - RNA, 19 nt, Homo sapiens
  misc_RNA (1)...(19): siRNA sense strand
gggcauacuuuguugguug

SEQ ID NO: 2468406 - RNA, 19 nt, Homo sapiens
  misc_RNA (1)...(19): siRNA sense strand
acccauuguauaaggauua

SEQ ID NO: 2468407 - RNA, 19 nt, Homo sapiens
  misc_RNA (1)...(19): siRNA sense strand
aagacaacuacuugagaca

SEQ ID NO: 2468408 - RNA, 19 nt, Homo sapiens
  misc_RNA (1)...(19): siRNA sense strand
gguccuagagccagcguga

SEQ ID NO: 2468409 - RNA, 19 nt, Homo sapiens
  misc_RNA (1)...(19): siRNA sense strand
gucuaaagugggugcaaga

SEQ ID NO: 2468410 - RNA, 19 nt, Homo sapiens
  misc_RNA (1)...(19): siRNA sense strand
uucuaauugaggaggauaa

SEQ ID NO: 2468411 - RNA, 19 nt, Homo sapiens
  misc_RNA (1)...(19): siRNA sense strand
cauuauugcccgugucaca

SEQ ID NO: 2468412 - RNA, 19 nt, Homo sapiens
  misc_RNA (1)...(19): siRNA sense strand
gaacaagucuaaagugggu

SEQ ID NO: 2468413 - RNA, 19 nt, Homo sapiens
  misc_RNA (1)...(19): siRNA sense strand
cuucaaauuggcauggauu

SEQ ID NO: 2468414 - RNA, 19 nt, Homo sapiens
  misc_RNA (1)...(19): siRNA sense strand
aggaaggauuugauggauc

SEQ ID NO: 2468415 - RNA, 19 nt, Homo sapiens
  misc_RNA (1)...(19): siRNA sense strand
ucaaguauuuccuggcaga

SEQ ID NO: 2468416 - RNA, 19 nt, Homo sapiens
  misc_RNA (1)...(19): siRNA sense strand
cauuuaugaggaaggauuu

SEQ ID NO: 2468417 - RNA, 19 nt, Homo sapiens
  misc_RNA (1)...(19): siRNA sense strand
cuaaagaggauccugccaa

SEQ ID NO: 2468418 - RNA, 19 nt, Homo sapiens
  misc_RNA (1)...(19): siRNA sense strand
uggcagaaggaauugucaa

SEQ ID NO: 2468419 - RNA, 19 nt, Homo sapiens
  misc_RNA (1)...(19): siRNA sense strand
cuaaagugggugcaagaca

SEQ ID NO: 2468420 - RNA, 19 nt, Homo sapiens
  misc_RNA (1)...(19): siRNA sense strand
agguggagguuuagccguu

SEQ ID NO: 2468421 - RNA, 19 nt, Homo sapiens
  misc_RNA (1)...(19): siRNA sense strand
aguuauuacccaagaugga

SEQ ID NO: 2468422 - RNA, 19 nt, Homo sapiens
  misc_RNA (1)...(19): siRNA sense strand
ucauaaaacaccagaaucu

SEQ ID NO: 2468423 - RNA, 19 nt, Homo sapiens
  misc_RNA (1)...(19): siRNA sense strand
cggccuagggcuuuguauu

SEQ ID NO: 2468424 - RNA, 19 nt, Homo sapiens
  misc_RNA (1)...(19): siRNA sense strand
ggacaagugugcaaggaga

SEQ ID NO: 2468425 - RNA, 19 nt, Homo sapiens
  misc_RNA (1)...(19): siRNA sense strand
gaacaauggcaguggggua

SEQ ID NO: 2468426 - RNA, 19 nt, Homo sapiens
  misc_RNA (1)...(19): siRNA sense strand
cagaggaaggagagaaaga

SEQ ID NO: 2468427 - RNA, 19 nt, Homo sapiens
  misc_RNA (1)...(19): siRNA sense strand
accagaggaaggagagaaa

SEQ ID NO: 2468428 - RNA, 19 nt, Homo sapiens
  misc_RNA (1)...(19): siRNA sense strand
caacaggacuggcuggaca

SEQ ID NO: 2468429 - RNA, 19 nt, Homo sapiens
  misc_RNA (1)...(19): siRNA sense strand
agaagaaaucagaaggguu

SEQ ID NO: 2468430 - RNA, 19 nt, Homo sapiens
  misc_RNA (1)...(19): siRNA sense strand
gcuucagcuugcaggauau

SEQ ID NO: 2468431 - RNA, 19 nt, Homo sapiens
  misc_RNA (1)...(19): siRNA sense strand
gaagaaaucagaaggguug

SEQ ID NO: 2468432 - RNA, 19 nt, Homo sapiens
  misc_RNA (1)...(19): siRNA sense strand
gcgugaugaaugaguguga

SEQ ID NO: 2468433 - RNA, 19 nt, Homo sapiens
  misc_RNA (1)...(19): siRNA sense strand
augcugagaagaagaagaa

SEQ ID NO: 2468434 - RNA, 19 nt, Homo sapiens
  misc_RNA (1)...(19): siRNA sense strand
cagcaagaccucuggccuu

SEQ ID NO: 2468435 - RNA, 19 nt, Homo sapiens
  misc_RNA (1)...(19): siRNA sense strand
cugcaggagcugaggccuu

SEQ ID NO: 2468436 - RNA, 19 nt, Homo sapiens
  misc_RNA (1)...(19): siRNA sense strand
cugaagccauggaggacuu

SEQ ID NO: 2468437 - RNA, 19 nt, Homo sapiens
  misc_RNA (1)...(19): siRNA sense strand
aaucagaaggguugacuca

SEQ ID NO: 2468438 - RNA, 19 nt, Homo sapiens
  misc_RNA (1)...(19): siRNA sense strand
ucagaauaagcaaagcaaa

SEQ ID NO: 2468439 - RNA, 19 nt, Homo sapiens
  misc_RNA (1)...(19): siRNA sense strand
aggaagugcuccagaagcu

SEQ ID NO: 2468440 - RNA, 19 nt, Homo sapiens
  misc_RNA (1)...(19): siRNA sense strand
aaggagagaaagaggaucu

SEQ ID NO: 2468441 - RNA, 19 nt, Homo sapiens
  misc_RNA (1)...(19): siRNA sense strand
ucauaacaaaccaagcaaa

SEQ ID NO: 2468442 - RNA, 19 nt, Homo sapiens
  misc_RNA (1)...(19): siRNA sense strand
gaaugagugugaacggcau

SEQ ID NO: 2468443 - RNA, 19 nt, Homo sapiens
  misc_RNA (1)...(19): siRNA sense strand
gcuguggacaagugugcaa

SEQ ID NO: 2468444 - RNA, 19 nt, Homo sapiens
  misc_RNA (1)...(19): siRNA sense strand
ccaaggagcucacaggacu

SEQ ID NO: 2468445 - RNA, 19 nt, Homo sapiens
  misc_RNA (1)...(19): siRNA sense strand
agcaaagcaaagaagaaau

SEQ ID NO: 2468446 - RNA, 19 nt, Homo sapiens
  misc_RNA (1)...(19): siRNA sense strand
ccuccagucccaagaccaa

SEQ ID NO: 2468447 - RNA, 19 nt, Homo sapiens
  misc_RNA (1)...(19): siRNA sense strand
ggagaagauucgagcugag

SEQ ID NO: 2468448 - RNA, 19 nt, Homo sapiens
  misc_RNA (1)...(19): siRNA sense strand
gugcaaggagagugcggca

SEQ ID NO: 2468449 - RNA, 19 nt, Homo sapiens
  misc_RNA (1)...(19): siRNA sense strand
ccaacguggugacgggaca

SEQ ID NO: 2468450 - RNA, 19 nt, Homo sapiens
  misc_RNA (1)...(19): siRNA sense strand
aggaagcagacaagcagaa

SEQ ID NO: 2468451 - RNA, 19 nt, Homo sapiens
  misc_RNA (1)...(19): siRNA sense strand
cugugggacuugagggcca

SEQ ID NO: 2468452 - RNA, 19 nt, Homo sapiens
  misc_RNA (1)...(19): siRNA sense strand
ugaucugcgcuguggaaau

SEQ ID NO: 2468453 - RNA, 19 nt, Homo sapiens
  misc_RNA (1)...(19): siRNA sense strand
uaacacaguacgaagguca

SEQ ID NO: 2468454 - RNA, 19 nt, Homo sapiens
  misc_RNA (1)...(19): siRNA sense strand
ugaacgaagaagaaggagu

SEQ ID NO: 2468455 - RNA, 19 nt, Homo sapiens
  misc_RNA (1)...(19): siRNA sense strand
gaaccaagucgaagcugga

SEQ ID NO: 2468456 - RNA, 19 nt, Homo sapiens
  misc_RNA (1)...(19): siRNA sense strand
gaacgaagaagaaggaguc

SEQ ID NO: 2468457 - RNA, 19 nt, Homo sapiens
  misc_RNA (1)...(19): siRNA sense strand
gcagugaugucuuggccca

SEQ ID NO: 2468458 - RNA, 19 nt, Homo sapiens
  misc_RNA (1)...(19): siRNA sense strand
agggcaagguggaggacaa

SEQ ID NO: 2468459 - RNA, 19 nt, Homo sapiens
  misc_RNA (1)...(19): siRNA sense strand
gggacgacaaggagggcau

SEQ ID NO: 2468460 - RNA, 19 nt, Homo sapiens
  misc_RNA (1)...(19): siRNA sense strand
agguggaggacaaguggua

SEQ ID NO: 2468461 - RNA, 19 nt, Homo sapiens
  misc_RNA (1)...(19): siRNA sense strand
guggaggacaagugguaca

SEQ ID NO: 2468462 - RNA, 19 nt, Homo sapiens
  misc_RNA (1)...(19): siRNA sense strand
gaggaggaccugaaagcca

SEQ ID NO: 2468463 - RNA, 19 nt, Homo sapiens
  misc_RNA (1)...(19): siRNA sense strand
gacaagugguacagccuga

SEQ ID NO: 2468464 - RNA, 19 nt, Homo sapiens
  misc_RNA (1)...(19): siRNA sense strand
ggaacaaggaugccgccau

SEQ ID NO: 2468465 - RNA, 19 nt, Homo sapiens
  misc_RNA (1)...(19): siRNA sense strand
ccagcagggcguuggcuau

SEQ ID NO: 2468466 - RNA, 19 nt, Homo sapiens
  misc_RNA (1)...(19): siRNA sense strand
ugguacagccugagcggga

SEQ ID NO: 2468467 - RNA, 19 nt, Homo sapiens
  misc_RNA (1)...(19): siRNA sense strand
ccuuaauauggaauggaaa

SEQ ID NO: 2468468 - RNA, 19 nt, Homo sapiens
  misc_RNA (1)...(19): siRNA sense strand
agggagacagagaaggaua

SEQ ID NO: 2468469 - RNA, 19 nt, Homo sapiens
  misc_RNA (1)...(19): siRNA sense strand
ggauaaaagaagacgggca

SEQ ID NO: 2468470 - RNA, 19 nt, Homo sapiens
  misc_RNA (1)...(19): siRNA sense strand
caacauuucuucaaccaga

SEQ ID NO: 2468471 - RNA, 19 nt, Homo sapiens
  misc_RNA (1)...(19): siRNA sense strand
aacaauacuguguggaaga

SEQ ID NO: 2468472 - RNA, 19 nt, Homo sapiens
  misc_RNA (1)...(19): siRNA sense strand
uacuaugagacaauggaua

SEQ ID NO: 2468473 - RNA, 19 nt, Homo sapiens
  misc_RNA (1)...(19): siRNA sense strand
cuaugagacaauggauaaa

SEQ ID NO: 2468474 - RNA, 19 nt, Homo sapiens
  misc_RNA (1)...(19): siRNA sense strand
aaagaaaaggagaaggaaa

SEQ ID NO: 2468475 - RNA, 19 nt, Homo sapiens
  misc_RNA (1)...(19): siRNA sense strand
acaagagagaagaaaggaa

SEQ ID NO: 2468476 - RNA, 19 nt, Homo sapiens
  misc_RNA (1)...(19): siRNA sense strand
aaggaaaagaaaaggagaa

SEQ ID NO: 2468477 - RNA, 19 nt, Homo sapiens
  misc_RNA (1)...(19): siRNA sense strand
cugaagaaugcacaagaga

SEQ ID NO: 2468478 - RNA, 19 nt, Homo sapiens
  misc_RNA (1)...(19): siRNA sense strand
aagagagaagaaaggaaaa

SEQ ID NO: 2468479 - RNA, 19 nt, Homo sapiens
  misc_RNA (1)...(19): siRNA sense strand
aagaaaaggagaaggaaag

SEQ ID NO: 2468480 - RNA, 19 nt, Homo sapiens
  misc_RNA (1)...(19): siRNA sense strand
agagaagaaaggaaaagaa

SEQ ID NO: 2468481 - RNA, 19 nt, Homo sapiens
  misc_RNA (1)...(19): siRNA sense strand
guuauguggguauggaaga

SEQ ID NO: 2468482 - RNA, 19 nt, Homo sapiens
  misc_RNA (1)...(19): siRNA sense strand
gggauuaucaucugggcaa

SEQ ID NO: 2468483 - RNA, 19 nt, Homo sapiens
  misc_RNA (1)...(19): siRNA sense strand
auucauagacacagagaca

SEQ ID NO: 2468484 - RNA, 19 nt, Homo sapiens
  misc_RNA (1)...(19): siRNA sense strand
aggaugggauggugcaaaa

SEQ ID NO: 2468485 - RNA, 19 nt, Homo sapiens
  misc_RNA (1)...(19): siRNA sense strand
gaacugagauugugccugu

SEQ ID NO: 2468486 - RNA, 19 nt, Homo sapiens
  misc_RNA (1)...(19): siRNA sense strand
aaaacaaggaacugagauu

SEQ ID NO: 2468487 - RNA, 19 nt, Homo sapiens
  misc_RNA (1)...(19): siRNA sense strand
cgaucuaauacgggaggua

SEQ ID NO: 2468488 - RNA, 19 nt, Homo sapiens
  misc_RNA (1)...(19): siRNA sense strand
aggagauaugaaugaguau

SEQ ID NO: 2468489 - RNA, 19 nt, Homo sapiens
  misc_RNA (1)...(19): siRNA sense strand
cuggaaaggaucacauuca

SEQ ID NO: 2468490 - RNA, 19 nt, Homo sapiens
  misc_RNA (1)...(19): siRNA sense strand
ggguggcagugaagaaaau

SEQ ID NO: 2468491 - RNA, 19 nt, Homo sapiens
  misc_RNA (1)...(19): siRNA sense strand
acggaggagauaugaauga

SEQ ID NO: 2468492 - RNA, 19 nt, Homo sapiens
  misc_RNA (1)...(19): siRNA sense strand
ggggaguuauguaaaacaa

SEQ ID NO: 2468493 - RNA, 19 nt, Homo sapiens
  misc_RNA (1)...(19): siRNA sense strand
agccaaaguacgaucuaau

SEQ ID NO: 2468494 - RNA, 19 nt, Homo sapiens
  misc_RNA (1)...(19): siRNA sense strand
gcaagaagcucagggacga

SEQ ID NO: 2468495 - RNA, 19 nt, Homo sapiens
  misc_RNA (1)...(19): siRNA sense strand
ggccagaugcugugggagu

SEQ ID NO: 2468496 - RNA, 19 nt, Homo sapiens
  misc_RNA (1)...(19): siRNA sense strand
uggacgaggaggugcucaa

SEQ ID NO: 2468497 - RNA, 19 nt, Homo sapiens
  misc_RNA (1)...(19): siRNA sense strand
gccgagugggugagcacaa

SEQ ID NO: 2468498 - RNA, 19 nt, Homo sapiens
  misc_RNA (1)...(19): siRNA sense strand
ucaucgagguggacgagga

SEQ ID NO: 2468499 - RNA, 19 nt, Homo sapiens
  misc_RNA (1)...(19): siRNA sense strand
gggaaggaggagaagauau

SEQ ID NO: 2468500 - RNA, 19 nt, Homo sapiens
  misc_RNA (1)...(19): siRNA sense strand
gggagaaacuucaggaggu

SEQ ID NO: 2468501 - RNA, 19 nt, Homo sapiens
  misc_RNA (1)...(19): siRNA sense strand
cggacaagagagugauuau

SEQ ID NO: 2468502 - RNA, 19 nt, Homo sapiens
  misc_RNA (1)...(19): siRNA sense strand
aggcauuugaagaggaaaa

SEQ ID NO: 2468503 - RNA, 19 nt, Homo sapiens
  misc_RNA (1)...(19): siRNA sense strand
gagaagauugugaggcuga

SEQ ID NO: 2468504 - RNA, 19 nt, Homo sapiens
  misc_RNA (1)...(19): siRNA sense strand
cagggaaggaggagaagau

SEQ ID NO: 2468505 - RNA, 19 nt, Homo sapiens
  misc_RNA (1)...(19): siRNA sense strand
ccuuacauggugaggagaa

SEQ ID NO: 2468506 - RNA, 19 nt, Homo sapiens
  misc_RNA (1)...(19): siRNA sense strand
gcucagauccccagagaca

SEQ ID NO: 2468507 - RNA, 19 nt, Homo sapiens
  misc_RNA (1)...(19): siRNA sense strand
gcgcuuaccucuuugggau

SEQ ID NO: 2468508 - RNA, 19 nt, Homo sapiens
  misc_RNA (1)...(19): siRNA sense strand
cugaauugugugacaguuu

SEQ ID NO: 2468509 - RNA, 19 nt, Homo sapiens
  misc_RNA (1)...(19): siRNA sense strand
cagcaaacaaagccagaca

SEQ ID NO: 2468510 - RNA, 19 nt, Homo sapiens
  misc_RNA (1)...(19): siRNA sense strand
aagagaagauugugaggcu

SEQ ID NO: 2468511 - RNA, 19 nt, Homo sapiens
  misc_RNA (1)...(19): siRNA sense strand
agaagauaucugacucaaa

SEQ ID NO: 2468512 - RNA, 19 nt, Homo sapiens
  misc_RNA (1)...(19): siRNA sense strand
gguuguagccagaagccau

SEQ ID NO: 2468513 - RNA, 19 nt, Homo sapiens
  misc_RNA (1)...(19): siRNA sense strand
uccagaaagaggagaccaa

SEQ ID NO: 2468514 - RNA, 19 nt, Homo sapiens
  misc_RNA (1)...(19): siRNA sense strand
cugaagcaauggaaggcau

SEQ ID NO: 2468515 - RNA, 19 nt, Homo sapiens
  misc_RNA (1)...(19): siRNA sense strand
aguauggugaggaggagaa

SEQ ID NO: 2468516 - RNA, 19 nt, Homo sapiens
  misc_RNA (1)...(19): siRNA sense strand
acucacaucuggagggauc

SEQ ID NO: 2468517 - RNA, 19 nt, Homo sapiens
  misc_RNA (1)...(19): siRNA sense strand
gugaagauguccaguccca

SEQ ID NO: 2468518 - RNA, 19 nt, Homo sapiens
  misc_RNA (1)...(19): siRNA sense strand
guucaguaaucagggagaa

SEQ ID NO: 2468519 - RNA, 19 nt, Homo sapiens
  misc_RNA (1)...(19): siRNA sense strand
cuggagggcagcaaacaaa

SEQ ID NO: 2468520 - RNA, 19 nt, Homo sapiens
  misc_RNA (1)...(19): siRNA sense strand
cuucaugaucucugcaaga

SEQ ID NO: 2468521 - RNA, 19 nt, Homo sapiens
  misc_RNA (1)...(19): siRNA sense strand
caguaaucagggagaaacu

SEQ ID NO: 2468522 - RNA, 19 nt, Homo sapiens
  misc_RNA (1)...(19): siRNA sense strand
gccaaagagaagauuguga

SEQ ID NO: 2468523 - RNA, 19 nt, Homo sapiens
  misc_RNA (1)...(19): siRNA sense strand
aaacaaagccagacagagc

SEQ ID NO: 2468524 - RNA, 19 nt, Homo sapiens
  misc_RNA (1)...(19): siRNA sense strand
ggaaggcauuugaagagga

SEQ ID NO: 2468525 - RNA, 19 nt, Homo sapiens
  misc_RNA (1)...(19): siRNA sense strand
caaucagacgcauggccaa

SEQ ID NO: 2468526 - RNA, 19 nt, Homo sapiens
  misc_RNA (1)...(19): siRNA sense strand
aaguaaacaacgccaaaga

SEQ ID NO: 2468527 - RNA, 19 nt, Homo sapiens
  misc_RNA (1)...(19): siRNA sense strand
caucagcaaaccuggaaga

SEQ ID NO: 2468528 - RNA, 19 nt, Homo sapiens
  misc_RNA (1)...(19): siRNA sense strand
ucuucugacucuagugaca

SEQ ID NO: 2468529 - RNA, 19 nt, Homo sapiens
  misc_RNA (1)...(19): siRNA sense strand
aaagaugacuugaaaccca

SEQ ID NO: 2468530 - RNA, 19 nt, Homo sapiens
  misc_RNA (1)...(19): siRNA sense strand
ccacccgaggggagagaaa

SEQ ID NO: 2468531 - RNA, 19 nt, Homo sapiens
  misc_RNA (1)...(19): siRNA sense strand
cagaaagaggagaccaagu

SEQ ID NO: 2468532 - RNA, 19 nt, Homo sapiens
  misc_RNA (1)...(19): siRNA sense strand
ucgcggaguuccuggccua

SEQ ID NO: 2468533 - RNA, 19 nt, Homo sapiens
  misc_RNA (1)...(19): siRNA sense strand
gcgcauccgaccugagcuu

SEQ ID NO: 2468534 - RNA, 19 nt, Homo sapiens
  misc_RNA (1)...(19): siRNA sense strand
cuguggagcuggaggcaga

SEQ ID NO: 2468535 - RNA, 19 nt, Homo sapiens
  misc_RNA (1)...(19): siRNA sense strand
gggugugugaaguggaauu

SEQ ID NO: 2468536 - RNA, 19 nt, Homo sapiens
  misc_RNA (1)...(19): siRNA sense strand
ugaacacagugguggccaa

SEQ ID NO: 2468537 - RNA, 19 nt, Homo sapiens
  misc_RNA (1)...(19): siRNA sense strand
cugcagugccacagcaaga

SEQ ID NO: 2468538 - RNA, 19 nt, Homo sapiens
  misc_RNA (1)...(19): siRNA sense strand
gggagaaguucauggccac

SEQ ID NO: 2468539 - RNA, 19 nt, Homo sapiens
  misc_RNA (1)...(19): siRNA sense strand
ugggagaaguucauggcca

SEQ ID NO: 2468540 - RNA, 19 nt, Homo sapiens
  misc_RNA (1)...(19): siRNA sense strand
aacucagccuggagggcaa

SEQ ID NO: 2468541 - RNA, 19 nt, Homo sapiens
  misc_RNA (1)...(19): siRNA sense strand
cgaggcaucuggacggaga

SEQ ID NO: 2468542 - RNA, 19 nt, Homo sapiens
  misc_RNA (1)...(19): siRNA sense strand
ccccaaaagaggagggugu

SEQ ID NO: 2468543 - RNA, 19 nt, Homo sapiens
  misc_RNA (1)...(19): siRNA sense strand
cagagaugcacuagaucau

SEQ ID NO: 2468544 - RNA, 19 nt, Homo sapiens
  misc_RNA (1)...(19): siRNA sense strand
caacauugaucauaggaug

SEQ ID NO: 2468545 - RNA, 19 nt, Homo sapiens
  misc_RNA (1)...(19): siRNA sense strand
gaugaaagacccaggcuca

SEQ ID NO: 2468546 - RNA, 19 nt, Homo sapiens
  misc_RNA (1)...(19): siRNA sense strand
aagcagaagcacagcaaaa

SEQ ID NO: 2468547 - RNA, 19 nt, Homo sapiens
  misc_RNA (1)...(19): siRNA sense strand
aggugaugacuuugaacua

SEQ ID NO: 2468548 - RNA, 19 nt, Homo sapiens
  misc_RNA (1)...(19): siRNA sense strand
cugaagaaggugaugacuu

SEQ ID NO: 2468549 - RNA, 19 nt, Homo sapiens
  misc_RNA (1)...(19): siRNA sense strand
ucaagagaaagaaggaaca

SEQ ID NO: 2468550 - RNA, 19 nt, Homo sapiens
  misc_RNA (1)...(19): siRNA sense strand
ggauuuuggaauuggagaa

SEQ ID NO: 2468551 - RNA, 19 nt, Homo sapiens
  misc_RNA (1)...(19): siRNA sense strand
aggugaagacuuuggacca

SEQ ID NO: 2468552 - RNA, 19 nt, Homo sapiens
  misc_RNA (1)...(19): siRNA sense strand
ccagaagaggacacagaca

SEQ ID NO: 2468553 - RNA, 19 nt, Homo sapiens
  misc_RNA (1)...(19): siRNA sense strand
aaucagaagaaacgugaga

SEQ ID NO: 2468554 - RNA, 19 nt, Homo sapiens
  misc_RNA (1)...(19): siRNA sense strand
cuaucaaagaccaguuaga

SEQ ID NO: 2468555 - RNA, 19 nt, Homo sapiens
  misc_RNA (1)...(19): siRNA sense strand
aagaaggaacaguuggaca

SEQ ID NO: 2468556 - RNA, 19 nt, Homo sapiens
  misc_RNA (1)...(19): siRNA sense strand
cacaaagaugacagugaau

SEQ ID NO: 2468557 - RNA, 19 nt, Homo sapiens
  misc_RNA (1)...(19): siRNA sense strand
gcucaagagaaagaaggaa

SEQ ID NO: 2468558 - RNA, 19 nt, Homo sapiens
  misc_RNA (1)...(19): siRNA sense strand
aguuagagggugugcagca

SEQ ID NO: 2468559 - RNA, 19 nt, Homo sapiens
  misc_RNA (1)...(19): siRNA sense strand
aagaccaguuagagggugu

SEQ ID NO: 2468560 - RNA, 19 nt, Homo sapiens
  misc_RNA (1)...(19): siRNA sense strand
gguaauaauuccagaggca

SEQ ID NO: 2468561 - RNA, 19 nt, Homo sapiens
  misc_RNA (1)...(19): siRNA sense strand
gggaggaagucgagaaacu

SEQ ID NO: 2468562 - RNA, 19 nt, Homo sapiens
  misc_RNA (1)...(19): siRNA sense strand
cauugaugucugagggaaa

SEQ ID NO: 2468563 - RNA, 19 nt, Homo sapiens
  misc_RNA (1)...(19): siRNA sense strand
ugguaaaggacaagauaau

SEQ ID NO: 2468564 - RNA, 19 nt, Homo sapiens
  misc_RNA (1)...(19): siRNA sense strand
ucggagaauuccagugaaa

SEQ ID NO: 2468565 - RNA, 19 nt, Homo sapiens
  misc_RNA (1)...(19): siRNA sense strand
ccacagaaugaaaggauuu

SEQ ID NO: 2468566 - RNA, 19 nt, Homo sapiens
  misc_RNA (1)...(19): siRNA sense strand
ugguguaaccuaugaaaua

SEQ ID NO: 2468567 - RNA, 19 nt, Homo sapiens
  misc_RNA (1)...(19): siRNA sense strand
cuguaaaagaggagcauaa

SEQ ID NO: 2468568 - RNA, 19 nt, Homo sapiens
  misc_RNA (1)...(19): siRNA sense strand
ugggagugucagagggaaa

SEQ ID NO: 2468569 - RNA, 19 nt, Homo sapiens
  misc_RNA (1)...(19): siRNA sense strand
ggguauaaugcguguauuu

SEQ ID NO: 2468570 - RNA, 19 nt, Homo sapiens
  misc_RNA (1)...(19): siRNA sense strand
caaacagggagaaaggaaa

SEQ ID NO: 2468571 - RNA, 19 nt, Homo sapiens
  misc_RNA (1)...(19): siRNA sense strand
cagcaauaaaacagagaaa

SEQ ID NO: 2468572 - RNA, 19 nt, Homo sapiens
  misc_RNA (1)...(19): siRNA sense strand
ccaaacagggagaaaggaa

SEQ ID NO: 2468573 - RNA, 19 nt, Homo sapiens
  misc_RNA (1)...(19): siRNA sense strand
uaccaagaauggaaggaaa

SEQ ID NO: 2468574 - RNA, 19 nt, Homo sapiens
  misc_RNA (1)...(19): siRNA sense strand
ggugaauguaacagaagaa

SEQ ID NO: 2468575 - RNA, 19 nt, Homo sapiens
  misc_RNA (1)...(19): siRNA sense strand
auaacaaacgugagaagaa

SEQ ID NO: 2468576 - RNA, 19 nt, Homo sapiens
  misc_RNA (1)...(19): siRNA sense strand
cuaugaagcucaagaaaau

SEQ ID NO: 2468577 - RNA, 19 nt, Homo sapiens
  misc_RNA (1)...(19): siRNA sense strand
caguagaacacaauaacaa

SEQ ID NO: 2468578 - RNA, 19 nt, Homo sapiens
  misc_RNA (1)...(19): siRNA sense strand
aaacagugccuuagccaaa

SEQ ID NO: 2468579 - RNA, 19 nt, Homo sapiens
  misc_RNA (1)...(19): siRNA sense strand
aguuugaagaggagaauau

SEQ ID NO: 2468580 - RNA, 19 nt, Homo sapiens
  misc_RNA (1)...(19): siRNA sense strand
caaacaaagaguugacaga

SEQ ID NO: 2468581 - RNA, 19 nt, Homo sapiens
  misc_RNA (1)...(19): siRNA sense strand
ucacagaauuuaugggagu

SEQ ID NO: 2468582 - RNA, 19 nt, Homo sapiens
  misc_RNA (1)...(19): siRNA sense strand
cgagauugguugaaagacu

SEQ ID NO: 2468583 - RNA, 19 nt, Homo sapiens
  misc_RNA (1)...(19): siRNA sense strand
uaggaagagaggugcaaua

SEQ ID NO: 2468584 - RNA, 19 nt, Homo sapiens
  misc_RNA (1)...(19): siRNA sense strand
gggaaggaauucuugaaaa

SEQ ID NO: 2468585 - RNA, 19 nt, Homo sapiens
  misc_RNA (1)...(19): siRNA sense strand
gagauagaggaccgggaaa

SEQ ID NO: 2468586 - RNA, 19 nt, Homo sapiens
  misc_RNA (1)...(19): siRNA sense strand
cugaaaagcugauaaaaga

SEQ ID NO: 2468587 - RNA, 19 nt, Homo sapiens
  misc_RNA (1)...(19): siRNA sense strand
gggaugaacucuuccgaca

SEQ ID NO: 2468588 - RNA, 19 nt, Homo sapiens
  misc_RNA (1)...(19): siRNA sense strand
ccagagaaccaguuggaca

SEQ ID NO: 2468589 - RNA, 19 nt, Homo sapiens
  misc_RNA (1)...(19): siRNA sense strand
aaauaagucucgaacggua

SEQ ID NO: 2468590 - RNA, 19 nt, Homo sapiens
  misc_RNA (1)...(19): siRNA sense strand
caucauaaucacacagaca

SEQ ID NO: 2468591 - RNA, 19 nt, Homo sapiens
  misc_RNA (1)...(19): siRNA sense strand
ccaaaaggauugugaacca

SEQ ID NO: 2468592 - RNA, 19 nt, Homo sapiens
  misc_RNA (1)...(19): siRNA sense strand
gaggaugacucuucggaga

SEQ ID NO: 2468593 - RNA, 19 nt, Homo sapiens
  misc_RNA (1)...(19): siRNA sense strand
cauuaaacgacgagaauac

SEQ ID NO: 2468594 - RNA, 19 nt, Homo sapiens
  misc_RNA (1)...(19): siRNA sense strand
ugguggagauggaagggaa

SEQ ID NO: 2468595 - RNA, 19 nt, Homo sapiens
  misc_RNA (1)...(19): siRNA sense strand
ccagagcaucccugagaaa

SEQ ID NO: 2468596 - RNA, 19 nt, Homo sapiens
  misc_RNA (1)...(19): siRNA sense strand
gguauuugccuuugauuau

SEQ ID NO: 2468597 - RNA, 19 nt, Homo sapiens
  misc_RNA (1)...(19): siRNA sense strand
ggacagacagguucgggaa

SEQ ID NO: 2468598 - RNA, 19 nt, Homo sapiens
  misc_RNA (1)...(19): siRNA sense strand
aagcugacaugucggguaa

SEQ ID NO: 2468599 - RNA, 19 nt, Homo sapiens
  misc_RNA (1)...(19): siRNA sense strand
gaaugaguuaggagaguau

SEQ ID NO: 2468600 - RNA, 19 nt, Homo sapiens
  misc_RNA (1)...(19): siRNA sense strand
gcggguagcgaaagaguau

SEQ ID NO: 2468601 - RNA, 19 nt, Homo sapiens
  misc_RNA (1)...(19): siRNA sense strand
uggcugaggaaaugagcaa

SEQ ID NO: 2468602 - RNA, 19 nt, Homo sapiens
  misc_RNA (1)...(19): siRNA sense strand
caagugaggaggaaaggaa

SEQ ID NO: 2468603 - RNA, 19 nt, Homo sapiens
  misc_RNA (1)...(19): siRNA sense strand
uggaguuaguauuacgaaa

SEQ ID NO: 2468604 - RNA, 19 nt, Homo sapiens
  misc_RNA (1)...(19): siRNA sense strand
acgcagaguuugaagagga

SEQ ID NO: 2468605 - RNA, 19 nt, Homo sapiens
  misc_RNA (1)...(19): siRNA sense strand
cuaaaguagaucugucaaa

SEQ ID NO: 2468606 - RNA, 19 nt, Homo sapiens
  misc_RNA (1)...(19): siRNA sense strand
ccauugagaagcuggagaa

SEQ ID NO: 2468607 - RNA, 19 nt, Homo sapiens
  misc_RNA (1)...(19): siRNA sense strand
gcuaauaaguucacagccu

SEQ ID NO: 2468608 - RNA, 19 nt, Homo sapiens
  misc_RNA (1)...(19): siRNA sense strand
aagcaaacuuccuggcuga

SEQ ID NO: 2468609 - RNA, 19 nt, Homo sapiens
  misc_RNA (1)...(19): siRNA sense strand
ggagaauuccagugaaagu

SEQ ID NO: 2468610 - RNA, 19 nt, Homo sapiens
  misc_RNA (1)...(19): siRNA sense strand
gagaaagucaguaagguca

SEQ ID NO: 2468611 - RNA, 19 nt, Homo sapiens
  misc_RNA (1)...(19): siRNA sense strand
gcgggaggaagucgagaaa

SEQ ID NO: 2468612 - RNA, 19 nt, Homo sapiens
  misc_RNA (1)...(19): siRNA sense strand
caggagagcgacugaaaga

SEQ ID NO: 2468613 - RNA, 19 nt, Homo sapiens
  misc_RNA (1)...(19): siRNA sense strand
ggaacuuuacccagggauu

SEQ ID NO: 2468614 - RNA, 19 nt, Homo sapiens
  misc_RNA (1)...(19): siRNA sense strand
acucacgggucuuggagaa

SEQ ID NO: 2468615 - RNA, 19 nt, Homo sapiens
  misc_RNA (1)...(19): siRNA sense strand
ccaagugcgugguggagau

SEQ ID NO: 2468616 - RNA, 19 nt, Homo sapiens
  misc_RNA (1)...(19): siRNA sense strand
gcauauggacagacagguu

SEQ ID NO: 2468617 - RNA, 19 nt, Homo sapiens
  misc_RNA (1)...(19): siRNA sense strand
uggcaaggguaaaagcaaa

SEQ ID NO: 2468618 - RNA, 19 nt, Homo sapiens
  misc_RNA (1)...(19): siRNA sense strand
gcauaggaauucagccuca

SEQ ID NO: 2468619 - RNA, 19 nt, Homo sapiens
  misc_RNA (1)...(19): siRNA sense strand
agaguaugcugcaguggaa

SEQ ID NO: 2468620 - RNA, 19 nt, Homo sapiens
  misc_RNA (1)...(19): siRNA sense strand
cagaguuugaagaggagaa

SEQ ID NO: 2468621 - RNA, 19 nt, Homo sapiens
  misc_RNA (1)...(19): siRNA sense strand
cagagaaccaguuggacau

SEQ ID NO: 2468622 - RNA, 19 nt, Homo sapiens
  misc_RNA (1)...(19): siRNA sense strand
gggcagaagagagggauga

SEQ ID NO: 2468623 - RNA, 19 nt, Homo sapiens
  misc_RNA (1)...(19): siRNA sense strand
aaucauucaccgagucaaa

SEQ ID NO: 2468624 - RNA, 19 nt, Homo sapiens
  misc_RNA (1)...(19): siRNA sense strand
ccgcagacaacuaugaaga

SEQ ID NO: 2468625 - RNA, 19 nt, Homo sapiens
  misc_RNA (1)...(19): siRNA sense strand
guaaggacuauguggugaa

SEQ ID NO: 2468626 - RNA, 19 nt, Homo sapiens
  misc_RNA (1)...(19): siRNA sense strand
agacaagaacacugcauga

SEQ ID NO: 2468627 - RNA, 19 nt, Homo sapiens
  misc_RNA (1)...(19): siRNA sense strand
gcaauaaaacagagaaaac

SEQ ID NO: 2468628 - RNA, 19 nt, Homo sapiens
  misc_RNA (1)...(19): siRNA sense strand
ggaguuaguauuacgaaaa

SEQ ID NO: 2468629 - RNA, 19 nt, Homo sapiens
  misc_RNA (1)...(19): siRNA sense strand
ggucauucccguagaguac

SEQ ID NO: 2468630 - RNA, 19 nt, Homo sapiens
  misc_RNA (1)...(19): siRNA sense strand
gcaacaagcugguggcacu

SEQ ID NO: 2468631 - RNA, 19 nt, Homo sapiens
  misc_RNA (1)...(19): siRNA sense strand
agaaagagaaggaggcgca

SEQ ID NO: 2468632 - RNA, 19 nt, Homo sapiens
  misc_RNA (1)...(19): siRNA sense strand
gagaaugauagccgggaga

SEQ ID NO: 2468633 - RNA, 19 nt, Homo sapiens
  misc_RNA (1)...(19): siRNA sense strand
aagcagaagaaccgggaga

SEQ ID NO: 2468634 - RNA, 19 nt, Homo sapiens
  misc_RNA (1)...(19): siRNA sense strand
ccgagcagccgcaggaaaa

SEQ ID NO: 2468635 - RNA, 19 nt, Homo sapiens
  misc_RNA (1)...(19): siRNA sense strand
cgaguuggaaagugcgauu

SEQ ID NO: 2468636 - RNA, 19 nt, Homo sapiens
  misc_RNA (1)...(19): siRNA sense strand
uggcagugacuacgggcaa

SEQ ID NO: 2468637 - RNA, 19 nt, Homo sapiens
  misc_RNA (1)...(19): siRNA sense strand
aguggaagccagugcuauu

SEQ ID NO: 2468638 - RNA, 19 nt, Homo sapiens
  misc_RNA (1)...(19): siRNA sense strand
uagaggaagcugagaccga

SEQ ID NO: 2468639 - RNA, 19 nt, Homo sapiens
  misc_RNA (1)...(19): siRNA sense strand
ggguguacuuugaggaagc

SEQ ID NO: 2468640 - RNA, 19 nt, Homo sapiens
  misc_RNA (1)...(19): siRNA sense strand
gugugaaccuggugcucca

SEQ ID NO: 2468641 - RNA, 19 nt, Homo sapiens
  misc_RNA (1)...(19): siRNA sense strand
cauccagcgacgugagcuu

SEQ ID NO: 2468642 - RNA, 19 nt, Homo sapiens
  misc_RNA (1)...(19): siRNA sense strand
gauuagaggugguggccuu

SEQ ID NO: 2468643 - RNA, 19 nt, Homo sapiens
  misc_RNA (1)...(19): siRNA sense strand
agaucaacucauagggcaa

SEQ ID NO: 2468644 - RNA, 19 nt, Homo sapiens
  misc_RNA (1)...(19): siRNA sense strand
cugaaagcauguauggaga

SEQ ID NO: 2468645 - RNA, 19 nt, Homo sapiens
  misc_RNA (1)...(19): siRNA sense strand
acgaagaauuucagguugu

SEQ ID NO: 2468646 - RNA, 19 nt, Homo sapiens
  misc_RNA (1)...(19): siRNA sense strand
uuugaaaguacuuggagaa

SEQ ID NO: 2468647 - RNA, 19 nt, Homo sapiens
  misc_RNA (1)...(19): siRNA sense strand
ccguuagcuuccagccaua

SEQ ID NO: 2468648 - RNA, 19 nt, Homo sapiens
  misc_RNA (1)...(19): siRNA sense strand
guuaaagaugccagauuga

SEQ ID NO: 2468649 - RNA, 19 nt, Homo sapiens
  misc_RNA (1)...(19): siRNA sense strand
ggaaucagcuauaaggauc

SEQ ID NO: 2468650 - RNA, 19 nt, Homo sapiens
  misc_RNA (1)...(19): siRNA sense strand
cagaaauuggucaagguuu

SEQ ID NO: 2468651 - RNA, 19 nt, Homo sapiens
  misc_RNA (1)...(19): siRNA sense strand
gggcaugauuguuggaguc

SEQ ID NO: 2468652 - RNA, 19 nt, Homo sapiens
  misc_RNA (1)...(19): siRNA sense strand
aguuauaacacuggaucaa

SEQ ID NO: 2468653 - RNA, 19 nt, Homo sapiens
  misc_RNA (1)...(19): siRNA sense strand
aguuaugaaagaagacaga

SEQ ID NO: 2468654 - RNA, 19 nt, Homo sapiens
  misc_RNA (1)...(19): siRNA sense strand
ccacaauggaaucagcuau

SEQ ID NO: 2468655 - RNA, 19 nt, Homo sapiens
  misc_RNA (1)...(19): siRNA sense strand
acguacagaaauuggucaa

SEQ ID NO: 2468656 - RNA, 19 nt, Homo sapiens
  misc_RNA (1)...(19): siRNA sense strand
agaagaacagcaaaagaaa

SEQ ID NO: 2468657 - RNA, 19 nt, Homo sapiens
  misc_RNA (1)...(19): siRNA sense strand
gcuauaaggaucuggacgu

SEQ ID NO: 2468658 - RNA, 19 nt, Homo sapiens
  misc_RNA (1)...(19): siRNA sense strand
ggaucaaaugguaugaguu

SEQ ID NO: 2468659 - RNA, 19 nt, Homo sapiens
  misc_RNA (1)...(19): siRNA sense strand
agguaaaaccaaaagacau

SEQ ID NO: 2468660 - RNA, 19 nt, Homo sapiens
  misc_RNA (1)...(19): siRNA sense strand
cccaauacacaaaagguaa

SEQ ID NO: 2468661 - RNA, 19 nt, Homo sapiens
  misc_RNA (1)...(19): siRNA sense strand
guguagauuccuuucaaau

SEQ ID NO: 2468662 - RNA, 19 nt, Homo sapiens
  misc_RNA (1)...(19): siRNA sense strand
uagaagaacagcaaaagaa

SEQ ID NO: 2468663 - RNA, 19 nt, Homo sapiens
  misc_RNA (1)...(19): siRNA sense strand
aaggaaugaccaaguauga

SEQ ID NO: 2468664 - RNA, 19 nt, Homo sapiens
  misc_RNA (1)...(19): siRNA sense strand
aggcaagguacccuauuua

SEQ ID NO: 2468665 - RNA, 19 nt, Homo sapiens
  misc_RNA (1)...(19): siRNA sense strand
gguaaaaccaaaagacauc

SEQ ID NO: 2468666 - RNA, 19 nt, Homo sapiens
  misc_RNA (1)...(19): siRNA sense strand
ccuguaugucagaaaucaa

SEQ ID NO: 2468667 - RNA, 19 nt, Homo sapiens
  misc_RNA (1)...(19): siRNA sense strand
cggauaaaauacugggaca

SEQ ID NO: 2468668 - RNA, 19 nt, Homo sapiens
  misc_RNA (1)...(19): siRNA sense strand
cugagaagaagcuggaaga

SEQ ID NO: 2468669 - RNA, 19 nt, Homo sapiens
  misc_RNA (1)...(19): siRNA sense strand
caaaagauuaagaaggcaa

SEQ ID NO: 2468670 - RNA, 19 nt, Homo sapiens
  misc_RNA (1)...(19): siRNA sense strand
ggaagauacaccaagcaca

SEQ ID NO: 2468671 - RNA, 19 nt, Homo sapiens
  misc_RNA (1)...(19): siRNA sense strand
cgaucaagaccaaaagauu

SEQ ID NO: 2468672 - RNA, 19 nt, Homo sapiens
  misc_RNA (1)...(19): siRNA sense strand
gugcaaguuuacaaguaca

SEQ ID NO: 2468673 - RNA, 19 nt, Homo sapiens
  misc_RNA (1)...(19): siRNA sense strand
aggcguucguagaggaagu

SEQ ID NO: 2468674 - RNA, 19 nt, Homo sapiens
  misc_RNA (1)...(19): siRNA sense strand
uugaaaagcuguuugccaa

SEQ ID NO: 2468675 - RNA, 19 nt, Homo sapiens
  misc_RNA (1)...(19): siRNA sense strand
aggauuucauucuaagcaa

SEQ ID NO: 2468676 - RNA, 19 nt, Homo sapiens
  misc_RNA (1)...(19): siRNA sense strand
agcuggaucccgagaggaa

SEQ ID NO: 2468677 - RNA, 19 nt, Homo sapiens
  misc_RNA (1)...(19): siRNA sense strand
ucgaauucuuacggauaaa

SEQ ID NO: 2468678 - RNA, 19 nt, Homo sapiens
  misc_RNA (1)...(19): siRNA sense strand
gcauggacgacuuccgcua

SEQ ID NO: 2468679 - RNA, 19 nt, Homo sapiens
  misc_RNA (1)...(19): siRNA sense strand
ggccaaggucccaaggcau

SEQ ID NO: 2468680 - RNA, 19 nt, Homo sapiens
  misc_RNA (1)...(19): siRNA sense strand
gagugugcuucaaggcuga

SEQ ID NO: 2468681 - RNA, 19 nt, Homo sapiens
  misc_RNA (1)...(19): siRNA sense strand
ggcuggagaccuaggaguu

SEQ ID NO: 2468682 - RNA, 19 nt, Homo sapiens
  misc_RNA (1)...(19): siRNA sense strand
gcgugggaggauaagguau

SEQ ID NO: 2468683 - RNA, 19 nt, Homo sapiens
  misc_RNA (1)...(19): siRNA sense strand
guuuacaaguacaaagaag

SEQ ID NO: 2468684 - RNA, 19 nt, Homo sapiens
  misc_RNA (1)...(19): siRNA sense strand
cgggaaaguuuguggucaa

SEQ ID NO: 2468685 - RNA, 19 nt, Homo sapiens
  misc_RNA (1)...(19): siRNA sense strand
cugagaugcucuugaguau

SEQ ID NO: 2468686 - RNA, 19 nt, Homo sapiens
  misc_RNA (1)...(19): siRNA sense strand
uggcaaaacgcaagaauua

SEQ ID NO: 2468687 - RNA, 19 nt, Homo sapiens
  misc_RNA (1)...(19): siRNA sense strand
aagcaugaguagugacaga

SEQ ID NO: 2468688 - RNA, 19 nt, Homo sapiens
  misc_RNA (1)...(19): siRNA sense strand
uggucaaagacuuggcaaa

SEQ ID NO: 2468689 - RNA, 19 nt, Homo sapiens
  misc_RNA (1)...(19): siRNA sense strand
cauaaacauuucaggccaa

SEQ ID NO: 2468690 - RNA, 19 nt, Homo sapiens
  misc_RNA (1)...(19): siRNA sense strand
agaaacaagcagagaggga

SEQ ID NO: 2468691 - RNA, 19 nt, Homo sapiens
  misc_RNA (1)...(19): siRNA sense strand
gauuauugguuuaguggca

SEQ ID NO: 2468692 - RNA, 19 nt, Homo sapiens
  misc_RNA (1)...(19): siRNA sense strand
uugcaaucuuugucgguaa

SEQ ID NO: 2468693 - RNA, 19 nt, Homo sapiens
  misc_RNA (1)...(19): siRNA sense strand
aggaagagucugugagaag

SEQ ID NO: 2468694 - RNA, 19 nt, Homo sapiens
  misc_RNA (1)...(19): siRNA sense strand
cuucauacagacaggacua

SEQ ID NO: 2468695 - RNA, 19 nt, Homo sapiens
  misc_RNA (1)...(19): siRNA sense strand
cguaggaaguaaagaugga

SEQ ID NO: 2468696 - RNA, 19 nt, Homo sapiens
  misc_RNA (1)...(19): siRNA sense strand
ggucaaagacuuggcaaaa

SEQ ID NO: 2468697 - RNA, 19 nt, Homo sapiens
  misc_RNA (1)...(19): siRNA sense strand
ucucagaagcggaaauaga

SEQ ID NO: 2468698 - RNA, 19 nt, Homo sapiens
  misc_RNA (1)...(19): siRNA sense strand
guuuaguggcagaagaaga

SEQ ID NO: 2468699 - RNA, 19 nt, Homo sapiens
  misc_RNA (1)...(19): siRNA sense strand
aggaaguaaagauggauuu

SEQ ID NO: 2468700 - RNA, 19 nt, Homo sapiens
  misc_RNA (1)...(19): siRNA sense strand
cggaaauagaagaggagcu

SEQ ID NO: 2468701 - RNA, 19 nt, Homo sapiens
  misc_RNA (1)...(19): siRNA sense strand
gcuuaauguugacaccaaa

SEQ ID NO: 2468702 - RNA, 19 nt, Homo sapiens
  misc_RNA (1)...(19): siRNA sense strand
ugauaaagacgaagacacu

SEQ ID NO: 2468703 - RNA, 19 nt, Homo sapiens
  misc_RNA (1)...(19): siRNA sense strand
aagaugaugccgugggaga

SEQ ID NO: 2468704 - RNA, 19 nt, Homo sapiens
  misc_RNA (1)...(19): siRNA sense strand
agcuaauggcuguugguaa

SEQ ID NO: 2468705 - RNA, 19 nt, Homo sapiens
  misc_RNA (1)...(19): siRNA sense strand
ccgucaagccacaguucaa

SEQ ID NO: 2468706 - RNA, 19 nt, Homo sapiens
  misc_RNA (1)...(19): siRNA sense strand
ccauaaauuggguggccau

SEQ ID NO: 2468707 - RNA, 19 nt, Homo sapiens
  misc_RNA (1)...(19): siRNA sense strand
gaagcagaugauagagauu

SEQ ID NO: 2468708 - RNA, 19 nt, Homo sapiens
  misc_RNA (1)...(19): siRNA sense strand
aagcagagagggagcgcau

SEQ ID NO: 2468709 - RNA, 19 nt, Homo sapiens
  misc_RNA (1)...(19): siRNA sense strand
ccugaaaagggcaagauua

SEQ ID NO: 2468710 - RNA, 19 nt, Homo sapiens
  misc_RNA (1)...(19): siRNA sense strand
cagugaaggauaugcuauu

SEQ ID NO: 2468711 - RNA, 19 nt, Homo sapiens
  misc_RNA (1)...(19): siRNA sense strand
aggaucaggucuaaaguca

SEQ ID NO: 2468712 - RNA, 19 nt, Homo sapiens
  misc_RNA (1)...(19): siRNA sense strand
uuguagaugaagaggcaau

SEQ ID NO: 2468713 - RNA, 19 nt, Homo sapiens
  misc_RNA (1)...(19): siRNA sense strand
agcagaugauagagauuau

SEQ ID NO: 2468714 - RNA, 19 nt, Homo sapiens
  misc_RNA (1)...(19): siRNA sense strand
ugguuuaguggcagaagaa

SEQ ID NO: 2468715 - RNA, 19 nt, Homo sapiens
  misc_RNA (1)...(19): siRNA sense strand
aagugaagcagaugauaga

SEQ ID NO: 2468716 - RNA, 19 nt, Homo sapiens
  misc_RNA (1)...(19): siRNA sense strand
gugaagcagaugauagaga

SEQ ID NO: 2468717 - RNA, 19 nt, Homo sapiens
  misc_RNA (1)...(19): siRNA sense strand
agccaagaauuguagauga

SEQ ID NO: 2468718 - RNA, 19 nt, Homo sapiens
  misc_RNA (1)...(19): siRNA sense strand
aauuguagaugaagaggca

SEQ ID NO: 2468719 - RNA, 19 nt, Homo sapiens
  misc_RNA (1)...(19): siRNA sense strand
cagucuggauaaagaacuu

SEQ ID NO: 2468720 - RNA, 19 nt, Homo sapiens
  misc_RNA (1)...(19): siRNA sense strand
gugguaucguggaugcuaa

SEQ ID NO: 2468721 - RNA, 19 nt, Homo sapiens
  misc_RNA (1)...(19): siRNA sense strand
ucagaaauucagugcauca

SEQ ID NO: 2468722 - RNA, 19 nt, Homo sapiens
  misc_RNA (1)...(19): siRNA sense strand
gugcagaccagccaagaau

SEQ ID NO: 2468723 - RNA, 19 nt, Homo sapiens
  misc_RNA (1)...(19): siRNA sense strand
gguacagauauucaacaaa

SEQ ID NO: 2468724 - RNA, 19 nt, Homo sapiens
  misc_RNA (1)...(19): siRNA sense strand
augcacguguauacaauaa

SEQ ID NO: 2468725 - RNA, 19 nt, Homo sapiens
  misc_RNA (1)...(19): siRNA sense strand
gggagaagaauuggguaca

SEQ ID NO: 2468726 - RNA, 19 nt, Homo sapiens
  misc_RNA (1)...(19): siRNA sense strand
caauuagagcgaaucgauu

SEQ ID NO: 2468727 - RNA, 19 nt, Homo sapiens
  misc_RNA (1)...(19): siRNA sense strand
gcugcaacuaucaggucua

SEQ ID NO: 2468728 - RNA, 19 nt, Homo sapiens
  misc_RNA (1)...(19): siRNA sense strand
aagcggaaauagaagagga

SEQ ID NO: 2468729 - RNA, 19 nt, Homo sapiens
  misc_RNA (1)...(19): siRNA sense strand
caggcauauuuaaggcaga

SEQ ID NO: 2468730 - RNA, 19 nt, Homo sapiens
  misc_RNA (1)...(19): siRNA sense strand
aggcauauuuaaggcagaa

SEQ ID NO: 2468731 - RNA, 19 nt, Homo sapiens
  misc_RNA (1)...(19): siRNA sense strand
ucauaaacauuucaggcca

SEQ ID NO: 2468732 - RNA, 19 nt, Homo sapiens
  misc_RNA (1)...(19): siRNA sense strand
gcagaagaagauuugcaau

SEQ ID NO: 2468733 - RNA, 19 nt, Homo sapiens
  misc_RNA (1)...(19): siRNA sense strand
uguaaagcuuccaccaaga

SEQ ID NO: 2468734 - RNA, 19 nt, Homo sapiens
  misc_RNA (1)...(19): siRNA sense strand
uagcaucucaggaggaaga

SEQ ID NO: 2468735 - RNA, 19 nt, Homo sapiens
  misc_RNA (1)...(19): siRNA sense strand
cauccugucaauuggaaau

SEQ ID NO: 2468736 - RNA, 19 nt, Homo sapiens
  misc_RNA (1)...(19): siRNA sense strand
uaucacuaaccauggcaaa

SEQ ID NO: 2468737 - RNA, 19 nt, Homo sapiens
  misc_RNA (1)...(19): siRNA sense strand
ccauaaacguccacagagg

SEQ ID NO: 2468738 - RNA, 19 nt, Homo sapiens
  misc_RNA (1)...(19): siRNA sense strand
ccugagaugcucuugagua

SEQ ID NO: 2468739 - RNA, 19 nt, Homo sapiens
  misc_RNA (1)...(19): siRNA sense strand
cagaaggcuggaaugcaua

SEQ ID NO: 2468740 - RNA, 19 nt, Homo sapiens
  misc_RNA (1)...(19): siRNA sense strand
ugggagaagaauuggguac

SEQ ID NO: 2468741 - RNA, 19 nt, Homo sapiens
  misc_RNA (1)...(19): siRNA sense strand
cgucaagugcagaggagaa

SEQ ID NO: 2468742 - RNA, 19 nt, Homo sapiens
  misc_RNA (1)...(19): siRNA sense strand
aaauaggauuggaagcaaa

SEQ ID NO: 2468743 - RNA, 19 nt, Homo sapiens
  misc_RNA (1)...(19): siRNA sense strand
cuauagagcacauggaaga

SEQ ID NO: 2468744 - RNA, 19 nt, Homo sapiens
  misc_RNA (1)...(19): siRNA sense strand
aaaccuaguucaaggaaaa

SEQ ID NO: 2468745 - RNA, 19 nt, Homo sapiens
  misc_RNA (1)...(19): siRNA sense strand
gguauuugacagaggaaca

SEQ ID NO: 2468746 - RNA, 19 nt, Homo sapiens
  misc_RNA (1)...(19): siRNA sense strand
gugaagugagcaaaggaaa

SEQ ID NO: 2468747 - RNA, 19 nt, Homo sapiens
  misc_RNA (1)...(19): siRNA sense strand
cugcacagaaacugaguaa

SEQ ID NO: 2468748 - RNA, 19 nt, Homo sapiens
  misc_RNA (1)...(19): siRNA sense strand
gaagaaaccuauagagcac

SEQ ID NO: 2468749 - RNA, 19 nt, Homo sapiens
  misc_RNA (1)...(19): siRNA sense strand
uagcuaaacaugaaagcaa

SEQ ID NO: 2468750 - RNA, 19 nt, Homo sapiens
  misc_RNA (1)...(19): siRNA sense strand
cuugaugccaugugaaaua

SEQ ID NO: 2468751 - RNA, 19 nt, Homo sapiens
  misc_RNA (1)...(19): siRNA sense strand
ucuagaaacaggacugaaa

SEQ ID NO: 2468752 - RNA, 19 nt, Homo sapiens
  misc_RNA (1)...(19): siRNA sense strand
aaagaacuucagagagaaa

SEQ ID NO: 2468753 - RNA, 19 nt, Homo sapiens
  misc_RNA (1)...(19): siRNA sense strand
ggauucagguggaggaaac

SEQ ID NO: 2468754 - RNA, 19 nt, Homo sapiens
  misc_RNA (1)...(19): siRNA sense strand
uggaaguggaacugaacaa

SEQ ID NO: 2468755 - RNA, 19 nt, Homo sapiens
  misc_RNA (1)...(19): siRNA sense strand
cuugguuguuggagugaaa

SEQ ID NO: 2468756 - RNA, 19 nt, Homo sapiens
  misc_RNA (1)...(19): siRNA sense strand
gcuacaaauuauggagaga

SEQ ID NO: 2468757 - RNA, 19 nt, Homo sapiens
  misc_RNA (1)...(19): siRNA sense strand
uuaucagacagaagggaaa

SEQ ID NO: 2468758 - RNA, 19 nt, Homo sapiens
  misc_RNA (1)...(19): siRNA sense strand
gggaaguuucuaugggaca

SEQ ID NO: 2468759 - RNA, 19 nt, Homo sapiens
  misc_RNA (1)...(19): siRNA sense strand
cuguauggaaagagagcuu

SEQ ID NO: 2468760 - RNA, 19 nt, Homo sapiens
  misc_RNA (1)...(19): siRNA sense strand
uugaaaugcguuugaguuu

SEQ ID NO: 2468761 - RNA, 19 nt, Homo sapiens
  misc_RNA (1)...(19): siRNA sense strand
gguuccaccucuagaaaca

SEQ ID NO: 2468762 - RNA, 19 nt, Homo sapiens
  misc_RNA (1)...(19): siRNA sense strand
uacaaauuauggagagaga

SEQ ID NO: 2468763 - RNA, 19 nt, Homo sapiens
  misc_RNA (1)...(19): siRNA sense strand
gugcagaggagaaggaaug

SEQ ID NO: 2468764 - RNA, 19 nt, Homo sapiens
  misc_RNA (1)...(19): siRNA sense strand
gaugaaaaguuaucagaca

SEQ ID NO: 2468765 - RNA, 19 nt, Homo sapiens
  misc_RNA (1)...(19): siRNA sense strand
guguaauagaugauagcuu

SEQ ID NO: 2468766 - RNA, 19 nt, Homo sapiens
  misc_RNA (1)...(19): siRNA sense strand
ggagagagaaagugguaac

SEQ ID NO: 2468767 - RNA, 19 nt, Homo sapiens
  misc_RNA (1)...(19): siRNA sense strand
aaauaacggaucuuggaaa

SEQ ID NO: 2468768 - RNA, 19 nt, Homo sapiens
  misc_RNA (1)...(19): siRNA sense strand
ccuuacauugugauagaaa

SEQ ID NO: 2468769 - RNA, 19 nt, Homo sapiens
  misc_RNA (1)...(19): siRNA sense strand
uugcaaugaagaugacuua

SEQ ID NO: 2468770 - RNA, 19 nt, Homo sapiens
  misc_RNA (1)...(19): siRNA sense strand
gcuaaacaugaaagcaauu

SEQ ID NO: 2468771 - RNA, 19 nt, Homo sapiens
  misc_RNA (1)...(19): siRNA sense strand
cagaaaagaacuucagaga

SEQ ID NO: 2468772 - RNA, 19 nt, Homo sapiens
  misc_RNA (1)...(19): siRNA sense strand
cagauaaagagccuacaaa

SEQ ID NO: 2468773 - RNA, 19 nt, Homo sapiens
  misc_RNA (1)...(19): siRNA sense strand
gggcaggggagauugaaaa

SEQ ID NO: 2468774 - RNA, 19 nt, Homo sapiens
  misc_RNA (1)...(19): siRNA sense strand
aauaacggaucuuggaaaa

SEQ ID NO: 2468775 - RNA, 19 nt, Homo sapiens
  misc_RNA (1)...(19): siRNA sense strand
caucuguugcuuaaggaaa

SEQ ID NO: 2468776 - RNA, 19 nt, Homo sapiens
  misc_RNA (1)...(19): siRNA sense strand
uggcauuuacuuuggagaa

SEQ ID NO: 2468777 - RNA, 19 nt, Homo sapiens
  misc_RNA (1)...(19): siRNA sense strand
gauaauacgucaagugcag

SEQ ID NO: 2468778 - RNA, 19 nt, Homo sapiens
  misc_RNA (1)...(19): siRNA sense strand
gcaccauacuugaugccau

SEQ ID NO: 2468779 - RNA, 19 nt, Homo sapiens
  misc_RNA (1)...(19): siRNA sense strand
cagagagaaaagaagaaaa

SEQ ID NO: 2468780 - RNA, 19 nt, Homo sapiens
  misc_RNA (1)...(19): siRNA sense strand
ugaagacaaacaagagaau

SEQ ID NO: 2468781 - RNA, 19 nt, Homo sapiens
  misc_RNA (1)...(19): siRNA sense strand
cuucauaaucucaucagaa

SEQ ID NO: 2468782 - RNA, 19 nt, Homo sapiens
  misc_RNA (1)...(19): siRNA sense strand
aagaaugguauuugacaga

SEQ ID NO: 2468783 - RNA, 19 nt, Homo sapiens
  misc_RNA (1)...(19): siRNA sense strand
agauaaagagccuacaaaa

SEQ ID NO: 2468784 - RNA, 19 nt, Homo sapiens
  misc_RNA (1)...(19): siRNA sense strand
cuuucagguugcugcuaaa

SEQ ID NO: 2468785 - RNA, 19 nt, Homo sapiens
  misc_RNA (1)...(19): siRNA sense strand
uaaaccuaguucaaggaaa

SEQ ID NO: 2468786 - RNA, 19 nt, Homo sapiens
  misc_RNA (1)...(19): siRNA sense strand
caucuaagaaagagugugu

SEQ ID NO: 2468787 - RNA, 19 nt, Homo sapiens
  misc_RNA (1)...(19): siRNA sense strand
aggaaagcuuuguuuguga

SEQ ID NO: 2468788 - RNA, 19 nt, Homo sapiens
  misc_RNA (1)...(19): siRNA sense strand
aagaguguguacagauaau

SEQ ID NO: 2468789 - RNA, 19 nt, Homo sapiens
  misc_RNA (1)...(19): siRNA sense strand
gugaaagaccgggaaguuu

SEQ ID NO: 2468790 - RNA, 19 nt, Homo sapiens
  misc_RNA (1)...(19): siRNA sense strand
agaaaauguugcaaacgaa

SEQ ID NO: 2468791 - RNA, 19 nt, Homo sapiens
  misc_RNA (1)...(19): siRNA sense strand
ugacagaggaacaaaagua

SEQ ID NO: 2468792 - RNA, 19 nt, Homo sapiens
  misc_RNA (1)...(19): siRNA sense strand
guuguuuaucugaggaaga

SEQ ID NO: 2468793 - RNA, 19 nt, Homo sapiens
  misc_RNA (1)...(19): siRNA sense strand
cuuuauuggaaguggaacu

SEQ ID NO: 2468794 - RNA, 19 nt, Homo sapiens
  misc_RNA (1)...(19): siRNA sense strand
ccuucacaguacuaauaaa

SEQ ID NO: 2468795 - RNA, 19 nt, Homo sapiens
  misc_RNA (1)...(19): siRNA sense strand
gggaauuacggcagcaucu

SEQ ID NO: 2468796 - RNA, 19 nt, Homo sapiens
  misc_RNA (1)...(19): siRNA sense strand
agaaagaguguguacagau

SEQ ID NO: 2468797 - RNA, 19 nt, Homo sapiens
  misc_RNA (1)...(19): siRNA sense strand
aagaauuuccagaagugua

SEQ ID NO: 2468798 - RNA, 19 nt, Homo sapiens
  misc_RNA (1)...(19): siRNA sense strand
agcuaaacaugaaagcaau

SEQ ID NO: 2468799 - RNA, 19 nt, Homo sapiens
  misc_RNA (1)...(19): siRNA sense strand
agguguggcucuuagaaca

SEQ ID NO: 2468800 - RNA, 19 nt, Homo sapiens
  misc_RNA (1)...(19): siRNA sense strand
agaggugugaagugagcaa

SEQ ID NO: 2468801 - RNA, 19 nt, Homo sapiens
  misc_RNA (1)...(19): siRNA sense strand
ucaucuaacgaacaagaaa

SEQ ID NO: 2468802 - RNA, 19 nt, Homo sapiens
  misc_RNA (1)...(19): siRNA sense strand
ugauagcaagaaagaggaa

SEQ ID NO: 2468803 - RNA, 19 nt, Homo sapiens
  misc_RNA (1)...(19): siRNA sense strand
agaagaaaccuauagagca

SEQ ID NO: 2468804 - RNA, 19 nt, Homo sapiens
  misc_RNA (1)...(19): siRNA sense strand
gaacaccauucgaagggau

SEQ ID NO: 2468805 - RNA, 19 nt, Homo sapiens
  misc_RNA (1)...(19): siRNA sense strand
ucuucaaguuugugggcaa

SEQ ID NO: 2468806 - RNA, 19 nt, Homo sapiens
  misc_RNA (1)...(19): siRNA sense strand
ugaaaaugaaugugagcaa

SEQ ID NO: 2468807 - RNA, 19 nt, Homo sapiens
  misc_RNA (1)...(19): siRNA sense strand
gcuaagaagugauggcaag

SEQ ID NO: 2468808 - RNA, 19 nt, Homo sapiens
  misc_RNA (1)...(19): siRNA sense strand
gugaagacguugaaggaug

SEQ ID NO: 2468809 - RNA, 19 nt, Homo sapiens
  misc_RNA (1)...(19): siRNA sense strand
uggagaucuucaaggacaa

SEQ ID NO: 2468810 - RNA, 19 nt, Homo sapiens
  misc_RNA (1)...(19): siRNA sense strand
gcaucgacugggaggacua

SEQ ID NO: 2468811 - RNA, 19 nt, Homo sapiens
  misc_RNA (1)...(19): siRNA sense strand
ucucaagacaugugguaca

SEQ ID NO: 2468812 - RNA, 19 nt, Homo sapiens
  misc_RNA (1)...(19): siRNA sense strand
acaccauuucugaaggaua

SEQ ID NO: 2468813 - RNA, 19 nt, Homo sapiens
  misc_RNA (1)...(19): siRNA sense strand
cuggaaaucaugagccgaa

SEQ ID NO: 2468814 - RNA, 19 nt, Homo sapiens
  misc_RNA (1)...(19): siRNA sense strand
cuggagaucuucaaggaca

SEQ ID NO: 2468815 - RNA, 19 nt, Homo sapiens
  misc_RNA (1)...(19): siRNA sense strand
gagccgaaaucaugggauc

SEQ ID NO: 2468816 - RNA, 19 nt, Homo sapiens
  misc_RNA (1)...(19): siRNA sense strand
uuucagaugacucgguaaa

SEQ ID NO: 2468817 - RNA, 19 nt, Homo sapiens
  misc_RNA (1)...(19): siRNA sense strand
uugccuuggaucugagaaa

SEQ ID NO: 2468818 - RNA, 19 nt, Homo sapiens
  misc_RNA (1)...(19): siRNA sense strand
cugaaugagcccuggagga

SEQ ID NO: 2468819 - RNA, 19 nt, Homo sapiens
  misc_RNA (1)...(19): siRNA sense strand
uggugcugucugaggauaa

SEQ ID NO: 2468820 - RNA, 19 nt, Homo sapiens
  misc_RNA (1)...(19): siRNA sense strand
cguugaaggaugccacaau

SEQ ID NO: 2468821 - RNA, 19 nt, Homo sapiens
  misc_RNA (1)...(19): siRNA sense strand
gugccagcuucaaugggaa

SEQ ID NO: 2468822 - RNA, 19 nt, Homo sapiens
  misc_RNA (1)...(19): siRNA sense strand
uugaaggaugccacaauaa

SEQ ID NO: 2468823 - RNA, 19 nt, Homo sapiens
  misc_RNA (1)...(19): siRNA sense strand
acuugauacuccugaaaga

SEQ ID NO: 2468824 - RNA, 19 nt, Homo sapiens
  misc_RNA (1)...(19): siRNA sense strand
gcccuuuggacgugagaau

SEQ ID NO: 2468825 - RNA, 19 nt, Homo sapiens
  misc_RNA (1)...(19): siRNA sense strand
gggaggagaagcaugccaa

SEQ ID NO: 2468826 - RNA, 19 nt, Homo sapiens
  misc_RNA (1)...(19): siRNA sense strand
ucuuauggaucuugggugu

SEQ ID NO: 2468827 - RNA, 19 nt, Homo sapiens
  misc_RNA (1)...(19): siRNA sense strand
cuuucauguugguuggaau

SEQ ID NO: 2468828 - RNA, 19 nt, Homo sapiens
  misc_RNA (1)...(19): siRNA sense strand
aaugaaagcuggagugcag

SEQ ID NO: 2468829 - RNA, 19 nt, Homo sapiens
  misc_RNA (1)...(19): siRNA sense strand
aguaaugguggaugaaguu

SEQ ID NO: 2468830 - RNA, 19 nt, Homo sapiens
  misc_RNA (1)...(19): siRNA sense strand
gcacaaugcccgugaccag

SEQ ID NO: 2468831 - RNA, 19 nt, Homo sapiens
  misc_RNA (1)...(19): siRNA sense strand
uggagaaggcugaggacaa

SEQ ID NO: 2468832 - RNA, 19 nt, Homo sapiens
  misc_RNA (1)...(19): siRNA sense strand
gaacaaacagauugcgcaa

SEQ ID NO: 2468833 - RNA, 19 nt, Homo sapiens
  misc_RNA (1)...(19): siRNA sense strand
aguagaaugaagauggaaa

SEQ ID NO: 2468834 - RNA, 19 nt, Homo sapiens
  misc_RNA (1)...(19): siRNA sense strand
caguaucagaagagauuua

SEQ ID NO: 2468835 - RNA, 19 nt, Homo sapiens
  misc_RNA (1)...(19): siRNA sense strand
cugaagacuuacagugaga

SEQ ID NO: 2468836 - RNA, 19 nt, Homo sapiens
  misc_RNA (1)...(19): siRNA sense strand
acuacaggcucgaagaaau

SEQ ID NO: 2468837 - RNA, 19 nt, Homo sapiens
  misc_RNA (1)...(19): siRNA sense strand
ccuacaagccagauauaau

SEQ ID NO: 2468838 - RNA, 19 nt, Homo sapiens
  misc_RNA (1)...(19): siRNA sense strand
caaaagaagagauggguga

SEQ ID NO: 2468839 - RNA, 19 nt, Homo sapiens
  misc_RNA (1)...(19): siRNA sense strand
cuugaagagcugcgagcaa

SEQ ID NO: 2468840 - RNA, 19 nt, Homo sapiens
  misc_RNA (1)...(19): siRNA sense strand
cuacagaaccugagagcac

SEQ ID NO: 2468841 - RNA, 19 nt, Homo sapiens
  misc_RNA (1)...(19): siRNA sense strand
guggaaggaauuaagcaaa

SEQ ID NO: 2468842 - RNA, 19 nt, Homo sapiens
  misc_RNA (1)...(19): siRNA sense strand
aagcaaaguagaaugaaga

SEQ ID NO: 2468843 - RNA, 19 nt, Homo sapiens
  misc_RNA (1)...(19): siRNA sense strand
guacaagccccgucggaaa

SEQ ID NO: 2468844 - RNA, 19 nt, Homo sapiens
  misc_RNA (1)...(19): siRNA sense strand
guagaaugaagauggaaaa

SEQ ID NO: 2468845 - RNA, 19 nt, Homo sapiens
  misc_RNA (1)...(19): siRNA sense strand
gcugaagaaaguccagaaa

SEQ ID NO: 2468846 - RNA, 19 nt, Homo sapiens
  misc_RNA (1)...(19): siRNA sense strand
agaccuagacagacgguau

SEQ ID NO: 2468847 - RNA, 19 nt, Homo sapiens
  misc_RNA (1)...(19): siRNA sense strand
ccagauauaaugaagccaa

SEQ ID NO: 2468848 - RNA, 19 nt, Homo sapiens
  misc_RNA (1)...(19): siRNA sense strand
uggaauauggcaggagaua

SEQ ID NO: 2468849 - RNA, 19 nt, Homo sapiens
  misc_RNA (1)...(19): siRNA sense strand
uggcaggagauauggauuu

SEQ ID NO: 2468850 - RNA, 19 nt, Homo sapiens
  misc_RNA (1)...(19): siRNA sense strand
gcaaaauggagaaggcuga

SEQ ID NO: 2468851 - RNA, 19 nt, Homo sapiens
  misc_RNA (1)...(19): siRNA sense strand
uguccaaggugaaagcgaa

SEQ ID NO: 2468852 - RNA, 19 nt, Homo sapiens
  misc_RNA (1)...(19): siRNA sense strand
ccgaguaugcagagaagca

SEQ ID NO: 2468853 - RNA, 19 nt, Homo sapiens
  misc_RNA (1)...(19): siRNA sense strand
cgagaagauagaauccaaa

SEQ ID NO: 2468854 - RNA, 19 nt, Homo sapiens
  misc_RNA (1)...(19): siRNA sense strand
gcuggugaaacgagcuaua

SEQ ID NO: 2468855 - RNA, 19 nt, Homo sapiens
  misc_RNA (1)...(19): siRNA sense strand
acagauuguggaaggaauu

SEQ ID NO: 2468856 - RNA, 19 nt, Homo sapiens
  misc_RNA (1)...(19): siRNA sense strand
acuuggagcuguuagaaaa

SEQ ID NO: 2468857 - RNA, 19 nt, Homo sapiens
  misc_RNA (1)...(19): siRNA sense strand
agauagaauccaaagcuga

SEQ ID NO: 2468858 - RNA, 19 nt, Homo sapiens
  misc_RNA (1)...(19): siRNA sense strand
ccacgaggaagaugagcuu

SEQ ID NO: 2468859 - RNA, 19 nt, Homo sapiens
  misc_RNA (1)...(19): siRNA sense strand
uguggaaggaauuaagcaa

SEQ ID NO: 2468860 - RNA, 19 nt, Homo sapiens
  misc_RNA (1)...(19): siRNA sense strand
gcagauuguguccgaguau

SEQ ID NO: 2468861 - RNA, 19 nt, Homo sapiens
  misc_RNA (1)...(19): siRNA sense strand
agagaagcagucugagcua

SEQ ID NO: 2468862 - RNA, 19 nt, Homo sapiens
  misc_RNA (1)...(19): siRNA sense strand
gaacaggaauuuaaagcac

SEQ ID NO: 2468863 - RNA, 19 nt, Homo sapiens
  misc_RNA (1)...(19): siRNA sense strand
agaagagaugggugacuau

SEQ ID NO: 2468864 - RNA, 19 nt, Homo sapiens
  misc_RNA (1)...(19): siRNA sense strand
gauuuagcugccagagcaa

SEQ ID NO: 2468865 - RNA, 19 nt, Homo sapiens
  misc_RNA (1)...(19): siRNA sense strand
acgguauaauauggagaaa

SEQ ID NO: 2468866 - RNA, 19 nt, Homo sapiens
  misc_RNA (1)...(19): siRNA sense strand
uuagaaaagcagaggcuau

SEQ ID NO: 2468867 - RNA, 19 nt, Homo sapiens
  misc_RNA (1)...(19): siRNA sense strand
acgacuacagcaagaaauu

SEQ ID NO: 2468868 - RNA, 19 nt, Homo sapiens
  misc_RNA (1)...(19): siRNA sense strand
ugagaagagaccaguugaa

SEQ ID NO: 2468869 - RNA, 19 nt, Homo sapiens
  misc_RNA (1)...(19): siRNA sense strand
ggauuuagcugccagagca

SEQ ID NO: 2468870 - RNA, 19 nt, Homo sapiens
  misc_RNA (1)...(19): siRNA sense strand
gaugacacgacuacagcaa

SEQ ID NO: 2468871 - RNA, 19 nt, Homo sapiens
  misc_RNA (1)...(19): siRNA sense strand
acgagaugcugcuguccaa

SEQ ID NO: 2468872 - RNA, 19 nt, Homo sapiens
  misc_RNA (1)...(19): siRNA sense strand
agaaaucgagaaauagcaa

SEQ ID NO: 2468873 - RNA, 19 nt, Homo sapiens
  misc_RNA (1)...(19): siRNA sense strand
ccgcaagauugaugaaguc

SEQ ID NO: 2468874 - RNA, 19 nt, Homo sapiens
  misc_RNA (1)...(19): siRNA sense strand
agacuuacagugagaaacu

SEQ ID NO: 2468875 - RNA, 19 nt, Homo sapiens
  misc_RNA (1)...(19): siRNA sense strand
augcuacacuuuuggaaua

SEQ ID NO: 2468876 - RNA, 19 nt, Homo sapiens
  misc_RNA (1)...(19): siRNA sense strand
ccaagaaaacgcugacaga

SEQ ID NO: 2468877 - RNA, 19 nt, Homo sapiens
  misc_RNA (1)...(19): siRNA sense strand
agauuucagcagugcacaa

SEQ ID NO: 2468878 - RNA, 19 nt, Homo sapiens
  misc_RNA (1)...(19): siRNA sense strand
caagagaacaaaaugagaa

SEQ ID NO: 2468879 - RNA, 19 nt, Homo sapiens
  misc_RNA (1)...(19): siRNA sense strand
uggaaggaauuaagcaaag

SEQ ID NO: 2468880 - RNA, 19 nt, Homo sapiens
  misc_RNA (1)...(19): siRNA sense strand
agagaaaagaaaaggccau

SEQ ID NO: 2468881 - RNA, 19 nt, Homo sapiens
  misc_RNA (1)...(19): siRNA sense strand
agaugaccgcuauggcaaa

SEQ ID NO: 2468882 - RNA, 19 nt, Homo sapiens
  misc_RNA (1)...(19): siRNA sense strand
agucaagaacaggaauuua

SEQ ID NO: 2468883 - RNA, 19 nt, Homo sapiens
  misc_RNA (1)...(19): siRNA sense strand
acaggaauuuaaagcacau

SEQ ID NO: 2468884 - RNA, 19 nt, Homo sapiens
  misc_RNA (1)...(19): siRNA sense strand
cugacagagcugaagacuu

SEQ ID NO: 2468885 - RNA, 19 nt, Homo sapiens
  misc_RNA (1)...(19): siRNA sense strand
ucaagaaaacucuacgaua

SEQ ID NO: 2468886 - RNA, 19 nt, Homo sapiens
  misc_RNA (1)...(19): siRNA sense strand
auauggagaaagagaaacu

SEQ ID NO: 2468887 - RNA, 19 nt, Homo sapiens
  misc_RNA (1)...(19): siRNA sense strand
agaccagcgaugugaauaa

SEQ ID NO: 2468888 - RNA, 19 nt, Homo sapiens
  misc_RNA (1)...(19): siRNA sense strand
ggccagaaacgaaggaaca

SEQ ID NO: 2468889 - RNA, 19 nt, Homo sapiens
  misc_RNA (1)...(19): siRNA sense strand
aagcagauuaccauagaaa

SEQ ID NO: 2468890 - RNA, 19 nt, Homo sapiens
  misc_RNA (1)...(19): siRNA sense strand
gcaugaaggaggagggccu

SEQ ID NO: 2468891 - RNA, 19 nt, Homo sapiens
  misc_RNA (1)...(19): siRNA sense strand
uggaaggagacuuggugaa

SEQ ID NO: 2468892 - RNA, 19 nt, Homo sapiens
  misc_RNA (1)...(19): siRNA sense strand
aguccuuagugaagaucua

SEQ ID NO: 2468893 - RNA, 19 nt, Homo sapiens
  misc_RNA (1)...(19): siRNA sense strand
auaaaguagaacagugcaa

SEQ ID NO: 2468894 - RNA, 19 nt, Homo sapiens
  misc_RNA (1)...(19): siRNA sense strand
ugugcaggaucaagacaaa

SEQ ID NO: 2468895 - RNA, 19 nt, Homo sapiens
  misc_RNA (1)...(19): siRNA sense strand
uguacaacuuuauggccaa

SEQ ID NO: 2468896 - RNA, 19 nt, Homo sapiens
  misc_RNA (1)...(19): siRNA sense strand
acgaagucuuuguugagaa

SEQ ID NO: 2468897 - RNA, 19 nt, Homo sapiens
  misc_RNA (1)...(19): siRNA sense strand
agacaggcaugaaggagga

SEQ ID NO: 2468898 - RNA, 19 nt, Homo sapiens
  misc_RNA (1)...(19): siRNA sense strand
uugcaagauugguguuaga

SEQ ID NO: 2468899 - RNA, 19 nt, Homo sapiens
  misc_RNA (1)...(19): siRNA sense strand
cauuagcagucuuagaaaa

SEQ ID NO: 2468900 - RNA, 19 nt, Homo sapiens
  misc_RNA (1)...(19): siRNA sense strand
aagauaagugggcggaaaa

SEQ ID NO: 2468901 - RNA, 19 nt, Homo sapiens
  misc_RNA (1)...(19): siRNA sense strand
ggaagaugcuggagacgug

SEQ ID NO: 2468902 - RNA, 19 nt, Homo sapiens
  misc_RNA (1)...(19): siRNA sense strand
agauggaugaagcuggaaa

SEQ ID NO: 2468903 - RNA, 19 nt, Homo sapiens
  misc_RNA (1)...(19): siRNA sense strand
gaaauaaaguagaacagug

SEQ ID NO: 2468904 - RNA, 19 nt, Homo sapiens
  misc_RNA (1)...(19): siRNA sense strand
uggcggugauggaaggaga

SEQ ID NO: 2468905 - RNA, 19 nt, Homo sapiens
  misc_RNA (1)...(19): siRNA sense strand
ccugcuggauauagacaau

SEQ ID NO: 2468906 - RNA, 19 nt, Homo sapiens
  misc_RNA (1)...(19): siRNA sense strand
cuggaaauaaaguagaaca

SEQ ID NO: 2468907 - RNA, 19 nt, Homo sapiens
  misc_RNA (1)...(19): siRNA sense strand
gauggaugaagcuggaaau

SEQ ID NO: 2468908 - RNA, 19 nt, Homo sapiens
  misc_RNA (1)...(19): siRNA sense strand
ccuccaaguuaaagaagcu

SEQ ID NO: 2468909 - RNA, 19 nt, Homo sapiens
  misc_RNA (1)...(19): siRNA sense strand
ccaaguuaaagaagcugaa

SEQ ID NO: 2468910 - RNA, 19 nt, Homo sapiens
  misc_RNA (1)...(19): siRNA sense strand
cgugggcagagcugagaaa

SEQ ID NO: 2468911 - RNA, 19 nt, Homo sapiens
  misc_RNA (1)...(19): siRNA sense strand
gaagaacaccugaagagga

SEQ ID NO: 2468912 - RNA, 19 nt, Homo sapiens
  misc_RNA (1)...(19): siRNA sense strand
acucagacucagccagcaa

SEQ ID NO: 2468913 - RNA, 19 nt, Homo sapiens
  misc_RNA (1)...(19): siRNA sense strand
auuagaagcccaagcagau

SEQ ID NO: 2468914 - RNA, 19 nt, Homo sapiens
  misc_RNA (1)...(19): siRNA sense strand
gcauagcugagguggagau

SEQ ID NO: 2468915 - RNA, 19 nt, Homo sapiens
  misc_RNA (1)...(19): siRNA sense strand
uauuagaagcccaagcaga

SEQ ID NO: 2468916 - RNA, 19 nt, Homo sapiens
  misc_RNA (1)...(19): siRNA sense strand
gcaccagggagaaacaaca

SEQ ID NO: 2468917 - RNA, 19 nt, Homo sapiens
  misc_RNA (1)...(19): siRNA sense strand
cuggauauagacaaugaua

SEQ ID NO: 2468918 - RNA, 19 nt, Homo sapiens
  misc_RNA (1)...(19): siRNA sense strand
aggaagagauggaugaagc

SEQ ID NO: 2468919 - RNA, 19 nt, Homo sapiens
  misc_RNA (1)...(19): siRNA sense strand
uagaacagugcaaggauca

SEQ ID NO: 2468920 - RNA, 19 nt, Homo sapiens
  misc_RNA (1)...(19): siRNA sense strand
ucuauuacagauugagaga

SEQ ID NO: 2468921 - RNA, 19 nt, Homo sapiens
  misc_RNA (1)...(19): siRNA sense strand
ucccugaagagguggaauu

SEQ ID NO: 2468922 - RNA, 19 nt, Homo sapiens
  misc_RNA (1)...(19): siRNA sense strand
ggauauagacaaugauacc

SEQ ID NO: 2468923 - RNA, 19 nt, Homo sapiens
  misc_RNA (1)...(19): siRNA sense strand
agcuggaaauaaaguagaa

SEQ ID NO: 2468924 - RNA, 19 nt, Homo sapiens
  misc_RNA (1)...(19): siRNA sense strand
acaccaaacccaauagcca

SEQ ID NO: 2468925 - RNA, 19 nt, Homo sapiens
  misc_RNA (1)...(19): siRNA sense strand
aguaugaggugcugcccaa

SEQ ID NO: 2468926 - RNA, 19 nt, Homo sapiens
  misc_RNA (1)...(19): siRNA sense strand
gaacucagcuuuaguggca

SEQ ID NO: 2468927 - RNA, 19 nt, Homo sapiens
  misc_RNA (1)...(19): siRNA sense strand
acacaagaacucugcgcca

SEQ ID NO: 2468928 - RNA, 19 nt, Homo sapiens
  misc_RNA (1)...(19): siRNA sense strand
ggaccuccauccuggccaa

SEQ ID NO: 2468929 - RNA, 19 nt, Homo sapiens
  misc_RNA (1)...(19): siRNA sense strand
aggauaaagcuaaaggaaa

SEQ ID NO: 2468930 - RNA, 19 nt, Homo sapiens
  misc_RNA (1)...(19): siRNA sense strand
ggguagagugggugaaaga

SEQ ID NO: 2468931 - RNA, 19 nt, Homo sapiens
  misc_RNA (1)...(19): siRNA sense strand
ggauuauggagaagagaau

SEQ ID NO: 2468932 - RNA, 19 nt, Homo sapiens
  misc_RNA (1)...(19): siRNA sense strand
ggagaagagaauuggaaga

SEQ ID NO: 2468933 - RNA, 19 nt, Homo sapiens
  misc_RNA (1)...(19): siRNA sense strand
cagaugaagaagaggaaga

SEQ ID NO: 2468934 - RNA, 19 nt, Homo sapiens
  misc_RNA (1)...(19): siRNA sense strand
guaaacacuuugaggccaa

SEQ ID NO: 2468935 - RNA, 19 nt, Homo sapiens
  misc_RNA (1)...(19): siRNA sense strand
uuacauggaaccagagaaa

SEQ ID NO: 2468936 - RNA, 19 nt, Homo sapiens
  misc_RNA (1)...(19): siRNA sense strand
ugaaagaaaugguugccaa

SEQ ID NO: 2468937 - RNA, 19 nt, Homo sapiens
  misc_RNA (1)...(19): siRNA sense strand
ccuccgaagcagaagauaa

SEQ ID NO: 2468938 - RNA, 19 nt, Homo sapiens
  misc_RNA (1)...(19): siRNA sense strand
guagagugggugaaagaaa

SEQ ID NO: 2468939 - RNA, 19 nt, Homo sapiens
  misc_RNA (1)...(19): siRNA sense strand
ggaaaggaguacaccgaga

SEQ ID NO: 2468940 - RNA, 19 nt, Homo sapiens
  misc_RNA (1)...(19): siRNA sense strand
cugaagaaauacaugaaga

SEQ ID NO: 2468941 - RNA, 19 nt, Homo sapiens
  misc_RNA (1)...(19): siRNA sense strand
acauggaaccagagaaaca

SEQ ID NO: 2468942 - RNA, 19 nt, Homo sapiens
  misc_RNA (1)...(19): siRNA sense strand
aguuaaagcaggaguuuga

SEQ ID NO: 2468943 - RNA, 19 nt, Homo sapiens
  misc_RNA (1)...(19): siRNA sense strand
guguuggaccucaggaaua

SEQ ID NO: 2468944 - RNA, 19 nt, Homo sapiens
  misc_RNA (1)...(19): siRNA sense strand
aagcaagccuuacgagcaa

SEQ ID NO: 2468945 - RNA, 19 nt, Homo sapiens
  misc_RNA (1)...(19): siRNA sense strand
cucaagaacuuauggucua

SEQ ID NO: 2468946 - RNA, 19 nt, Homo sapiens
  misc_RNA (1)...(19): siRNA sense strand
gagaauuggaagaaacaga

SEQ ID NO: 2468947 - RNA, 19 nt, Homo sapiens
  misc_RNA (1)...(19): siRNA sense strand
gcaccaucuauguggcaaa

SEQ ID NO: 2468948 - RNA, 19 nt, Homo sapiens
  misc_RNA (1)...(19): siRNA sense strand
ccucagagacuugaagaaa

SEQ ID NO: 2468949 - RNA, 19 nt, Homo sapiens
  misc_RNA (1)...(19): siRNA sense strand
aagaaaaggaacagccaaa

SEQ ID NO: 2468950 - RNA, 19 nt, Homo sapiens
  misc_RNA (1)...(19): siRNA sense strand
gagcaguggcugauugaau

SEQ ID NO: 2468951 - RNA, 19 nt, Homo sapiens
  misc_RNA (1)...(19): siRNA sense strand
agaagagaauuggaagaaa

SEQ ID NO: 2468952 - RNA, 19 nt, Homo sapiens
  misc_RNA (1)...(19): siRNA sense strand
gaagcaaaggagaagauau

SEQ ID NO: 2468953 - RNA, 19 nt, Homo sapiens
  misc_RNA (1)...(19): siRNA sense strand
cuccgaagcagaagauaaa

SEQ ID NO: 2468954 - RNA, 19 nt, Homo sapiens
  misc_RNA (1)...(19): siRNA sense strand
ccuaagacucagauugcaa

SEQ ID NO: 2468955 - RNA, 19 nt, Homo sapiens
  misc_RNA (1)...(19): siRNA sense strand
acucagauugcaaaggaaa

SEQ ID NO: 2468956 - RNA, 19 nt, Homo sapiens
  misc_RNA (1)...(19): siRNA sense strand
caacaaagucauugcuagu

SEQ ID NO: 2468957 - RNA, 19 nt, Homo sapiens
  misc_RNA (1)...(19): siRNA sense strand
aggcugugcuuauggagaa

SEQ ID NO: 2468958 - RNA, 19 nt, Homo sapiens
  misc_RNA (1)...(19): siRNA sense strand
ggaggaaauucuuggugca

SEQ ID NO: 2468959 - RNA, 19 nt, Homo sapiens
  misc_RNA (1)...(19): siRNA sense strand
cuauaugaugccagcuaaa

SEQ ID NO: 2468960 - RNA, 19 nt, Homo sapiens
  misc_RNA (1)...(19): siRNA sense strand
cugaugaagagauaguaaa

SEQ ID NO: 2468961 - RNA, 19 nt, Homo sapiens
  misc_RNA (1)...(19): siRNA sense strand
agacugcuguccugggaaa

SEQ ID NO: 2468962 - RNA, 19 nt, Homo sapiens
  misc_RNA (1)...(19): siRNA sense strand
uggaagggaugcacagaga

SEQ ID NO: 2468963 - RNA, 19 nt, Homo sapiens
  misc_RNA (1)...(19): siRNA sense strand
ccugucugaugaagagaua

SEQ ID NO: 2468964 - RNA, 19 nt, Homo sapiens
  misc_RNA (1)...(19): siRNA sense strand
ucauguugguggauggauu

SEQ ID NO: 2468965 - RNA, 19 nt, Homo sapiens
  misc_RNA (1)...(19): siRNA sense strand
gguucaagauguaaagaag

SEQ ID NO: 2468966 - RNA, 19 nt, Homo sapiens
  misc_RNA (1)...(19): siRNA sense strand
gugaauugaaugcaggaau

SEQ ID NO: 2468967 - RNA, 19 nt, Homo sapiens
  misc_RNA (1)...(19): siRNA sense strand
auguggaccucaugagcaa

SEQ ID NO: 2468968 - RNA, 19 nt, Homo sapiens
  misc_RNA (1)...(19): siRNA sense strand
ccaucuauguggcaaagaa

SEQ ID NO: 2468969 - RNA, 19 nt, Homo sapiens
  misc_RNA (1)...(19): siRNA sense strand
aaggauaaagcuaaaggaa

SEQ ID NO: 2468970 - RNA, 19 nt, Homo sapiens
  misc_RNA (1)...(19): siRNA sense strand
uagacaaacuggagagggu

SEQ ID NO: 2468971 - RNA, 19 nt, Homo sapiens
  misc_RNA (1)...(19): siRNA sense strand
ccuacagcugugagagcaa

SEQ ID NO: 2468972 - RNA, 19 nt, Homo sapiens
  misc_RNA (1)...(19): siRNA sense strand
ggaucaugauagacaaacu

SEQ ID NO: 2468973 - RNA, 19 nt, Homo sapiens
  misc_RNA (1)...(19): siRNA sense strand
ggauacugagagaguguuu

SEQ ID NO: 2468974 - RNA, 19 nt, Homo sapiens
  misc_RNA (1)...(19): siRNA sense strand
cagcagauggaaugcguuu

SEQ ID NO: 2468975 - RNA, 19 nt, Homo sapiens
  misc_RNA (1)...(19): siRNA sense strand
aaauuugggaagcgguaua

SEQ ID NO: 2468976 - RNA, 19 nt, Homo sapiens
  misc_RNA (1)...(19): siRNA sense strand
ucuggacacuccugggaaa

SEQ ID NO: 2468977 - RNA, 19 nt, Homo sapiens
  misc_RNA (1)...(19): siRNA sense strand
aaauagagcuguaugguug

SEQ ID NO: 2468978 - RNA, 19 nt, Homo sapiens
  misc_RNA (1)...(19): siRNA sense strand
cagaaaugggauacugaga

SEQ ID NO: 2468979 - RNA, 19 nt, Homo sapiens
  misc_RNA (1)...(19): siRNA sense strand
cagaagcaaaggagaagau

SEQ ID NO: 2468980 - RNA, 19 nt, Homo sapiens
  misc_RNA (1)...(19): siRNA sense strand
caagauguaaagaagacua

SEQ ID NO: 2468981 - RNA, 19 nt, Homo sapiens
  misc_RNA (1)...(19): siRNA sense strand
gccggaacaaagugauaaa

SEQ ID NO: 2468982 - RNA, 19 nt, Homo sapiens
  misc_RNA (1)...(19): siRNA sense strand
uagaacacauagaagucaa

SEQ ID NO: 2468983 - RNA, 19 nt, Homo sapiens
  misc_RNA (1)...(19): siRNA sense strand
aggaaaauguugucuguuu

SEQ ID NO: 2468984 - RNA, 19 nt, Homo sapiens
  misc_RNA (1)...(19): siRNA sense strand
cugauaaguugaaaagaga

SEQ ID NO: 2468985 - RNA, 19 nt, Homo sapiens
  misc_RNA (1)...(19): siRNA sense strand
agccagaaugaccgggaaa

SEQ ID NO: 2468986 - RNA, 19 nt, Homo sapiens
  misc_RNA (1)...(19): siRNA sense strand
guucaagauguaaagaaga

SEQ ID NO: 2468987 - RNA, 19 nt, Homo sapiens
  misc_RNA (1)...(19): siRNA sense strand
acaccaucauugagaggaa

SEQ ID NO: 2468988 - RNA, 19 nt, Homo sapiens
  misc_RNA (1)...(19): siRNA sense strand
acuuugaguuguugaagaa

SEQ ID NO: 2468989 - RNA, 19 nt, Homo sapiens
  misc_RNA (1)...(19): siRNA sense strand
uguuagauccagacauaaa

SEQ ID NO: 2468990 - RNA, 19 nt, Homo sapiens
  misc_RNA (1)...(19): siRNA sense strand
ugccaauacugguggaaaa

SEQ ID NO: 2468991 - RNA, 19 nt, Homo sapiens
  misc_RNA (1)...(19): siRNA sense strand
gucaaacaguaguggaaga

SEQ ID NO: 2468992 - RNA, 19 nt, Homo sapiens
  misc_RNA (1)...(19): siRNA sense strand
caguaguggaagaguauuu

SEQ ID NO: 2468993 - RNA, 19 nt, Homo sapiens
  misc_RNA (1)...(19): siRNA sense strand
uggaagaguauuuggcuuu

SEQ ID NO: 2468994 - RNA, 19 nt, Homo sapiens
  misc_RNA (1)...(19): siRNA sense strand
ugauaaucuuccugcaaau

SEQ ID NO: 2468995 - RNA, 19 nt, Homo sapiens
  misc_RNA (1)...(19): siRNA sense strand
augaaauucuggagcuuau

SEQ ID NO: 2468996 - RNA, 19 nt, Homo sapiens
  misc_RNA (1)...(19): siRNA sense strand
aggacauaguggaagauga

SEQ ID NO: 2468997 - RNA, 19 nt, Homo sapiens
  misc_RNA (1)...(19): siRNA sense strand
cugaugaugaagaugauaa

SEQ ID NO: 2468998 - RNA, 19 nt, Homo sapiens
  misc_RNA (1)...(19): siRNA sense strand
acauaaaggaugaccagau

SEQ ID NO: 2468999 - RNA, 19 nt, Homo sapiens
  misc_RNA (1)...(19): siRNA sense strand
cuaucauguacuugacaaa

SEQ ID NO: 2469000 - RNA, 19 nt, Homo sapiens
  misc_RNA (1)...(19): siRNA sense strand
aagucaaacaguaguggaa

SEQ ID NO: 2469001 - RNA, 19 nt, Homo sapiens
  misc_RNA (1)...(19): siRNA sense strand
cauuaaggaaggcgaugua

SEQ ID NO: 2469002 - RNA, 19 nt, Homo sapiens
  misc_RNA (1)...(19): siRNA sense strand
ggguauugaagaugcugaa

SEQ ID NO: 2469003 - RNA, 19 nt, Homo sapiens
  misc_RNA (1)...(19): siRNA sense strand
ucaaacuuguggugggaca

SEQ ID NO: 2469004 - RNA, 19 nt, Homo sapiens
  misc_RNA (1)...(19): siRNA sense strand
agaugaagaaacugaacau

SEQ ID NO: 2469005 - RNA, 19 nt, Homo sapiens
  misc_RNA (1)...(19): siRNA sense strand
ucugcuauguagaugguaa

SEQ ID NO: 2469006 - RNA, 19 nt, Homo sapiens
  misc_RNA (1)...(19): siRNA sense strand
gcacaaacccgcuggacac

SEQ ID NO: 2469007 - RNA, 19 nt, Homo sapiens
  misc_RNA (1)...(19): siRNA sense strand
uggaagaugaagaugauga

SEQ ID NO: 2469008 - RNA, 19 nt, Homo sapiens
  misc_RNA (1)...(19): siRNA sense strand
gcgaagugccccagaauga

SEQ ID NO: 2469009 - RNA, 19 nt, Homo sapiens
  misc_RNA (1)...(19): siRNA sense strand
acauaguggaagaugaaga

SEQ ID NO: 2469010 - RNA, 19 nt, Homo sapiens
  misc_RNA (1)...(19): siRNA sense strand
guggaagaguauuuggcuu

SEQ ID NO: 2469011 - RNA, 19 nt, Homo sapiens
  misc_RNA (1)...(19): siRNA sense strand
augaagaaacugaacauga

SEQ ID NO: 2469012 - RNA, 19 nt, Homo sapiens
  misc_RNA (1)...(19): siRNA sense strand
gugcugaagaggucaaaga

SEQ ID NO: 2469013 - RNA, 19 nt, Homo sapiens
  misc_RNA (1)...(19): siRNA sense strand
aagucuugcugaaguacaa

SEQ ID NO: 2469014 - RNA, 19 nt, Homo sapiens
  misc_RNA (1)...(19): siRNA sense strand
aguggaagaugaagaugau

SEQ ID NO: 2469015 - RNA, 19 nt, Homo sapiens
  misc_RNA (1)...(19): siRNA sense strand
ccggcaggguauugaagau

SEQ ID NO: 2469016 - RNA, 19 nt, Homo sapiens
  misc_RNA (1)...(19): siRNA sense strand
ccgagugaucauuaaggaa

SEQ ID NO: 2469017 - RNA, 19 nt, Homo sapiens
  misc_RNA (1)...(19): siRNA sense strand
agaaacugaacaugaaaca

SEQ ID NO: 2469018 - RNA, 19 nt, Homo sapiens
  misc_RNA (1)...(19): siRNA sense strand
aaaaggacauaguggaaga

SEQ ID NO: 2469019 - RNA, 19 nt, Homo sapiens
  misc_RNA (1)...(19): siRNA sense strand
ugggauucgcagaggcauu

SEQ ID NO: 2469020 - RNA, 19 nt, Homo sapiens
  misc_RNA (1)...(19): siRNA sense strand
gaggagacucagugcagau

SEQ ID NO: 2469021 - RNA, 19 nt, Homo sapiens
  misc_RNA (1)...(19): siRNA sense strand
uggaauguuacguucauaa

SEQ ID NO: 2469022 - RNA, 19 nt, Homo sapiens
  misc_RNA (1)...(19): siRNA sense strand
cugcaaucacaaauaagua

SEQ ID NO: 2469023 - RNA, 19 nt, Homo sapiens
  misc_RNA (1)...(19): siRNA sense strand
cugccagucauuaggagua

SEQ ID NO: 2469024 - RNA, 19 nt, Homo sapiens
  misc_RNA (1)...(19): siRNA sense strand
guauugaagaugcugaaga

SEQ ID NO: 2469025 - RNA, 19 nt, Homo sapiens
  misc_RNA (1)...(19): siRNA sense strand
aagaugaagaugaugacuu

SEQ ID NO: 2469026 - RNA, 19 nt, Homo sapiens
  misc_RNA (1)...(19): siRNA sense strand
gaucauuaaggaaggcgau

SEQ ID NO: 2469027 - RNA, 19 nt, Homo sapiens
  misc_RNA (1)...(19): siRNA sense strand
uaguggaagaugaagauga

SEQ ID NO: 2469028 - RNA, 19 nt, Homo sapiens
  misc_RNA (1)...(19): siRNA sense strand
augaagaugaagaaacuga

SEQ ID NO: 2469029 - RNA, 19 nt, Homo sapiens
  misc_RNA (1)...(19): siRNA sense strand
cggcaaaacaaaggaucua

SEQ ID NO: 2469030 - RNA, 19 nt, Homo sapiens
  misc_RNA (1)...(19): siRNA sense strand
caaaggaucuauaucgcga

SEQ ID NO: 2469031 - RNA, 19 nt, Homo sapiens
  misc_RNA (1)...(19): siRNA sense strand
ggaagacaugagugcugaa

SEQ ID NO: 2469032 - RNA, 19 nt, Homo sapiens
  misc_RNA (1)...(19): siRNA sense strand
cugaagaaacagcaacuca

SEQ ID NO: 2469033 - RNA, 19 nt, Homo sapiens
  misc_RNA (1)...(19): siRNA sense strand
cagcugagauggugggcaa

SEQ ID NO: 2469034 - RNA, 19 nt, Homo sapiens
  misc_RNA (1)...(19): siRNA sense strand
ggaccaagcugcuggcaca

SEQ ID NO: 2469035 - RNA, 19 nt, Homo sapiens
  misc_RNA (1)...(19): siRNA sense strand
cagucaaagccaugaugaa

SEQ ID NO: 2469036 - RNA, 19 nt, Homo sapiens
  misc_RNA (1)...(19): siRNA sense strand
agguagaaauugagaagcu

SEQ ID NO: 2469037 - RNA, 19 nt, Homo sapiens
  misc_RNA (1)...(19): siRNA sense strand
cccaauugcccuugagcau

SEQ ID NO: 2469038 - RNA, 19 nt, Homo sapiens
  misc_RNA (1)...(19): siRNA sense strand
gcgcuacggaggagaaaau

SEQ ID NO: 2469039 - RNA, 19 nt, Homo sapiens
  misc_RNA (1)...(19): siRNA sense strand
aggagacacuggaggccuu

SEQ ID NO: 2469040 - RNA, 19 nt, Homo sapiens
  misc_RNA (1)...(19): siRNA sense strand
gaucauggcucguugcaac

SEQ ID NO: 2469041 - RNA, 19 nt, Homo sapiens
  misc_RNA (1)...(19): siRNA sense strand
cagcagaagagggagaaca

SEQ ID NO: 2469042 - RNA, 19 nt, Homo sapiens
  misc_RNA (1)...(19): siRNA sense strand
agcagaagagggagaacau

SEQ ID NO: 2469043 - RNA, 19 nt, Homo sapiens
  misc_RNA (1)...(19): siRNA sense strand
gacaagaugccgaagagga

SEQ ID NO: 2469044 - RNA, 19 nt, Homo sapiens
  misc_RNA (1)...(19): siRNA sense strand
agcaugauucgaaaggaaa

SEQ ID NO: 2469045 - RNA, 19 nt, Homo sapiens
  misc_RNA (1)...(19): siRNA sense strand
ggaacaagauccuaccugu

SEQ ID NO: 2469046 - RNA, 19 nt, Homo sapiens
  misc_RNA (1)...(19): siRNA sense strand
aggaagaagcaaucagaga

SEQ ID NO: 2469047 - RNA, 19 nt, Homo sapiens
  misc_RNA (1)...(19): siRNA sense strand
uguauaucuuggcagcaaa

SEQ ID NO: 2469048 - RNA, 19 nt, Homo sapiens
  misc_RNA (1)...(19): siRNA sense strand
ggaagguucuugagcacgu

SEQ ID NO: 2469049 - RNA, 19 nt, Homo sapiens
  misc_RNA (1)...(19): siRNA sense strand
ccgugaugcucgugggcaa

SEQ ID NO: 2469050 - RNA, 19 nt, Homo sapiens
  misc_RNA (1)...(19): siRNA sense strand
gccucaacaucgacggcaa

SEQ ID NO: 2469051 - RNA, 19 nt, Homo sapiens
  misc_RNA (1)...(19): siRNA sense strand
aagaugaacuacaacguca

SEQ ID NO: 2469052 - RNA, 19 nt, Homo sapiens
  misc_RNA (1)...(19): siRNA sense strand
cagaccgcgucaagggcaa

SEQ ID NO: 2469053 - RNA, 19 nt, Homo sapiens
  misc_RNA (1)...(19): siRNA sense strand
agggcagcguggaggacau

SEQ ID NO: 2469054 - RNA, 19 nt, Homo sapiens
  misc_RNA (1)...(19): siRNA sense strand
caggaguggaagugcgcuu

SEQ ID NO: 2469055 - RNA, 19 nt, Homo sapiens
  misc_RNA (1)...(19): siRNA sense strand
ccggaacagaguaacgauu

SEQ ID NO: 2469056 - RNA, 19 nt, Homo sapiens
  misc_RNA (1)...(19): siRNA sense strand
ugaggaacaucgagcgcau

SEQ ID NO: 2469057 - RNA, 19 nt, Homo sapiens
  misc_RNA (1)...(19): siRNA sense strand
agcagauagcucagaacua

SEQ ID NO: 2469058 - RNA, 19 nt, Homo sapiens
  misc_RNA (1)...(19): siRNA sense strand
acauaauugccuuugauga

SEQ ID NO: 2469059 - RNA, 19 nt, Homo sapiens
  misc_RNA (1)...(19): siRNA sense strand
gcaacagggucaauggcaa

SEQ ID NO: 2469060 - RNA, 19 nt, Homo sapiens
  misc_RNA (1)...(19): siRNA sense strand
acuggaaagcugugaagaa

SEQ ID NO: 2469061 - RNA, 19 nt, Homo sapiens
  misc_RNA (1)...(19): siRNA sense strand
caucagaacuggaaagcug

SEQ ID NO: 2469062 - RNA, 19 nt, Homo sapiens
  misc_RNA (1)...(19): siRNA sense strand
gggucaauggcaaguacua

SEQ ID NO: 2469063 - RNA, 19 nt, Homo sapiens
  misc_RNA (1)...(19): siRNA sense strand
auaagaacagcaugggcaa

SEQ ID NO: 2469064 - RNA, 19 nt, Homo sapiens
  misc_RNA (1)...(19): siRNA sense strand
ucaucaaagagaaggagca

SEQ ID NO: 2469065 - RNA, 19 nt, Homo sapiens
  misc_RNA (1)...(19): siRNA sense strand
uggcagaagccuacgggaa

SEQ ID NO: 2469066 - RNA, 19 nt, Homo sapiens
  misc_RNA (1)...(19): siRNA sense strand
gggaaauaaugaagcugga

SEQ ID NO: 2469067 - RNA, 19 nt, Homo sapiens
  misc_RNA (1)...(19): siRNA sense strand
uguagauaccaaagggauu

SEQ ID NO: 2469068 - RNA, 19 nt, Homo sapiens
  misc_RNA (1)...(19): siRNA sense strand
aagaaaagcuacaggagca

SEQ ID NO: 2469069 - RNA, 19 nt, Homo sapiens
  misc_RNA (1)...(19): siRNA sense strand
ccacacuggaagaagaaga

SEQ ID NO: 2469070 - RNA, 19 nt, Homo sapiens
  misc_RNA (1)...(19): siRNA sense strand
cagaaucaacauuugggua

SEQ ID NO: 2469071 - RNA, 19 nt, Homo sapiens
  misc_RNA (1)...(19): siRNA sense strand
gggaucagcuagagagugc

SEQ ID NO: 2469072 - RNA, 19 nt, Homo sapiens
  misc_RNA (1)...(19): siRNA sense strand
cugaugaaauugcugccaa

SEQ ID NO: 2469073 - RNA, 19 nt, Homo sapiens
  misc_RNA (1)...(19): siRNA sense strand
ccagcaugguggggaaaua

SEQ ID NO: 2469074 - RNA, 19 nt, Homo sapiens
  misc_RNA (1)...(19): siRNA sense strand
caggaaagagagagacaga

SEQ ID NO: 2469075 - RNA, 19 nt, Homo sapiens
  misc_RNA (1)...(19): siRNA sense strand
ggagaucagcguugggaga

SEQ ID NO: 2469076 - RNA, 19 nt, Homo sapiens
  misc_RNA (1)...(19): siRNA sense strand
cuucauuguaguaggguuu

SEQ ID NO: 2469077 - RNA, 19 nt, Homo sapiens
  misc_RNA (1)...(19): siRNA sense strand
agacagaaugcgugcucaa

SEQ ID NO: 2469078 - RNA, 19 nt, Homo sapiens
  misc_RNA (1)...(19): siRNA sense strand
uugagaagauggaagaaaa

SEQ ID NO: 2469079 - RNA, 19 nt, Homo sapiens
  misc_RNA (1)...(19): siRNA sense strand
gcuucaguccacaggauaa

SEQ ID NO: 2469080 - RNA, 19 nt, Homo sapiens
  misc_RNA (1)...(19): siRNA sense strand
agucaauggaaaugugauu

SEQ ID NO: 2469081 - RNA, 19 nt, Homo sapiens
  misc_RNA (1)...(19): siRNA sense strand
cagagaagagucagggcau

SEQ ID NO: 2469082 - RNA, 19 nt, Homo sapiens
  misc_RNA (1)...(19): siRNA sense strand
gcauaauggucaaggaacc

SEQ ID NO: 2469083 - RNA, 19 nt, Homo sapiens
  misc_RNA (1)...(19): siRNA sense strand
cagccuauucaaagggauu

SEQ ID NO: 2469084 - RNA, 19 nt, Homo sapiens
  misc_RNA (1)...(19): siRNA sense strand
cguugggagaccagcauaa

SEQ ID NO: 2469085 - RNA, 19 nt, Homo sapiens
  misc_RNA (1)...(19): siRNA sense strand
cagcauaauggucaaggaa

SEQ ID NO: 2469086 - RNA, 19 nt, Homo sapiens
  misc_RNA (1)...(19): siRNA sense strand
gucuacuggcugugggaaa

SEQ ID NO: 2469087 - RNA, 19 nt, Homo sapiens
  misc_RNA (1)...(19): siRNA sense strand
cuguggacccgcagagcaa

SEQ ID NO: 2469088 - RNA, 19 nt, Homo sapiens
  misc_RNA (1)...(19): siRNA sense strand
aauaccaagaagaggcaua

SEQ ID NO: 2469089 - RNA, 19 nt, Homo sapiens
  misc_RNA (1)...(19): siRNA sense strand
ucucaagccugaaaggaca

SEQ ID NO: 2469090 - RNA, 19 nt, Homo sapiens
  misc_RNA (1)...(19): siRNA sense strand
ccuuuggaauuaugaaaca

SEQ ID NO: 2469091 - RNA, 19 nt, Homo sapiens
  misc_RNA (1)...(19): siRNA sense strand
guggaucagaaauggcaaa

SEQ ID NO: 2469092 - RNA, 19 nt, Homo sapiens
  misc_RNA (1)...(19): siRNA sense strand
cuggaaaugggauguuuaa

SEQ ID NO: 2469093 - RNA, 19 nt, Homo sapiens
  misc_RNA (1)...(19): siRNA sense strand
uggcacugacacaggcaaa

SEQ ID NO: 2469094 - RNA, 19 nt, Homo sapiens
  misc_RNA (1)...(19): siRNA sense strand
gcaugauguuugugggcac

SEQ ID NO: 2469095 - RNA, 19 nt, Homo sapiens
  misc_RNA (1)...(19): siRNA sense strand
ccgugagagcagagaaauc

SEQ ID NO: 2469096 - RNA, 19 nt, Homo sapiens
  misc_RNA (1)...(19): siRNA sense strand
agaaccaacucuacagcau

SEQ ID NO: 2469097 - RNA, 19 nt, Homo sapiens
  misc_RNA (1)...(19): siRNA sense strand
cacaggaaagagagagaca

SEQ ID NO: 2469098 - RNA, 19 nt, Homo sapiens
  misc_RNA (1)...(19): siRNA sense strand
ugaaaggacacacagggaa

SEQ ID NO: 2469099 - RNA, 19 nt, Homo sapiens
  misc_RNA (1)...(19): siRNA sense strand
uguuugagaagauggaaga

SEQ ID NO: 2469100 - RNA, 19 nt, Homo sapiens
  misc_RNA (1)...(19): siRNA sense strand
ggugugugucacuggaaau

SEQ ID NO: 2469101 - RNA, 19 nt, Homo sapiens
  misc_RNA (1)...(19): siRNA sense strand
acugauuucugguggcaca

SEQ ID NO: 2469102 - RNA, 19 nt, Homo sapiens
  misc_RNA (1)...(19): siRNA sense strand
gccaguagccauagccaga

SEQ ID NO: 2469103 - RNA, 19 nt, Homo sapiens
  misc_RNA (1)...(19): siRNA sense strand
uaccgugagagcagagaaa

SEQ ID NO: 2469104 - RNA, 19 nt, Homo sapiens
  misc_RNA (1)...(19): siRNA sense strand
cuggaacuauuuaaggaau

SEQ ID NO: 2469105 - RNA, 19 nt, Homo sapiens
  misc_RNA (1)...(19): siRNA sense strand
uaguaggguuugcugacaa

SEQ ID NO: 2469106 - RNA, 19 nt, Homo sapiens
  misc_RNA (1)...(19): siRNA sense strand
gaaaggacacacagggaag

SEQ ID NO: 2469107 - RNA, 19 nt, Homo sapiens
  misc_RNA (1)...(19): siRNA sense strand
ccucaaggagauugcagau

SEQ ID NO: 2469108 - RNA, 19 nt, Homo sapiens
  misc_RNA (1)...(19): siRNA sense strand
agauggaagaaaaggauuu

SEQ ID NO: 2469109 - RNA, 19 nt, Homo sapiens
  misc_RNA (1)...(19): siRNA sense strand
cugucuaccaggugagcuu

SEQ ID NO: 2469110 - RNA, 19 nt, Homo sapiens
  misc_RNA (1)...(19): siRNA sense strand
agggaagauucgcucaauu

SEQ ID NO: 2469111 - RNA, 19 nt, Homo sapiens
  misc_RNA (1)...(19): siRNA sense strand
ucugagacugugcaagaaa

SEQ ID NO: 2469112 - RNA, 19 nt, Homo sapiens
  misc_RNA (1)...(19): siRNA sense strand
acuggaaaugggauguuua

SEQ ID NO: 2469113 - RNA, 19 nt, Homo sapiens
  misc_RNA (1)...(19): siRNA sense strand
ccuggaacuauuuaaggaa

SEQ ID NO: 2469114 - RNA, 19 nt, Homo sapiens
  misc_RNA (1)...(19): siRNA sense strand
agcuaaaggaacagaagaa

SEQ ID NO: 2469115 - RNA, 19 nt, Homo sapiens
  misc_RNA (1)...(19): siRNA sense strand
gaggaguauuugaggccuu

SEQ ID NO: 2469116 - RNA, 19 nt, Homo sapiens
  misc_RNA (1)...(19): siRNA sense strand
agaagaaggccauggagca

SEQ ID NO: 2469117 - RNA, 19 nt, Homo sapiens
  misc_RNA (1)...(19): siRNA sense strand
ccacccuggcagagcuaaa

SEQ ID NO: 2469118 - RNA, 19 nt, Homo sapiens
  misc_RNA (1)...(19): siRNA sense strand
ugugggagcugguggagga

SEQ ID NO: 2469119 - RNA, 19 nt, Homo sapiens
  misc_RNA (1)...(19): siRNA sense strand
aggaacagaagaaggccau

SEQ ID NO: 2469120 - RNA, 19 nt, Homo sapiens
  misc_RNA (1)...(19): siRNA sense strand
uaaaggaccucuugcgcca

SEQ ID NO: 2469121 - RNA, 19 nt, Homo sapiens
  misc_RNA (1)...(19): siRNA sense strand
ggcaguugcuccagggucu

SEQ ID NO: 2469122 - RNA, 19 nt, Homo sapiens
  misc_RNA (1)...(19): siRNA sense strand
agacacuggcagagaucaa

SEQ ID NO: 2469123 - RNA, 19 nt, Homo sapiens
  misc_RNA (1)...(19): siRNA sense strand
cggcuaucccuacaggaaa

SEQ ID NO: 2469124 - RNA, 19 nt, Homo sapiens
  misc_RNA (1)...(19): siRNA sense strand
acuuuauucuccagugcaa

SEQ ID NO: 2469125 - RNA, 19 nt, Homo sapiens
  misc_RNA (1)...(19): siRNA sense strand
gcuuggaggcagaaaucuu

SEQ ID NO: 2469126 - RNA, 19 nt, Homo sapiens
  misc_RNA (1)...(19): siRNA sense strand
cgggauacaggaaggacca

SEQ ID NO: 2469127 - RNA, 19 nt, Homo sapiens
  misc_RNA (1)...(19): siRNA sense strand
aaaucuuggccuugcaaau

SEQ ID NO: 2469128 - RNA, 19 nt, Homo sapiens
  misc_RNA (1)...(19): siRNA sense strand
agucagaagcauuggaaga

SEQ ID NO: 2469129 - RNA, 19 nt, Homo sapiens
  misc_RNA (1)...(19): siRNA sense strand
aagcauuggaagaggaaaa

SEQ ID NO: 2469130 - RNA, 19 nt, Homo sapiens
  misc_RNA (1)...(19): siRNA sense strand
caacaguaugugcgauaaa

SEQ ID NO: 2469131 - RNA, 19 nt, Homo sapiens
  misc_RNA (1)...(19): siRNA sense strand
gugcgauaaaugagaaauu

SEQ ID NO: 2469132 - RNA, 19 nt, Homo sapiens
  misc_RNA (1)...(19): siRNA sense strand
gguugaaggaacugaugua

SEQ ID NO: 2469133 - RNA, 19 nt, Homo sapiens
  misc_RNA (1)...(19): siRNA sense strand
ggauugaagaaguaguaau

SEQ ID NO: 2469134 - RNA, 19 nt, Homo sapiens
  misc_RNA (1)...(19): siRNA sense strand
gcuuauggacagugcaaaa

SEQ ID NO: 2469135 - RNA, 19 nt, Homo sapiens
  misc_RNA (1)...(19): siRNA sense strand
guuuaaugccugaguacuu

SEQ ID NO: 2469136 - RNA, 19 nt, Homo sapiens
  misc_RNA (1)...(19): siRNA sense strand
ggccucacccagagaguaa

SEQ ID NO: 2469137 - RNA, 19 nt, Homo sapiens
  misc_RNA (1)...(19): siRNA sense strand
aaaacaacgcugagagaau

SEQ ID NO: 2469138 - RNA, 19 nt, Homo sapiens
  misc_RNA (1)...(19): siRNA sense strand
uguaacagggauugaagaa

SEQ ID NO: 2469139 - RNA, 19 nt, Homo sapiens
  misc_RNA (1)...(19): siRNA sense strand
ugaauuaaugggaaagaga

SEQ ID NO: 2469140 - RNA, 19 nt, Homo sapiens
  misc_RNA (1)...(19): siRNA sense strand
cugaaugagcuuauggaca

SEQ ID NO: 2469141 - RNA, 19 nt, Homo sapiens
  misc_RNA (1)...(19): siRNA sense strand
gguuuuacgugaaaugaaa

SEQ ID NO: 2469142 - RNA, 19 nt, Homo sapiens
  misc_RNA (1)...(19): siRNA sense strand
agcaacaguaugugcgaua

SEQ ID NO: 2469143 - RNA, 19 nt, Homo sapiens
  misc_RNA (1)...(19): siRNA sense strand
gcaaagaaauccggggaga

SEQ ID NO: 2469144 - RNA, 19 nt, Homo sapiens
  misc_RNA (1)...(19): siRNA sense strand
gcuagaagugauuccuaaa

SEQ ID NO: 2469145 - RNA, 19 nt, Homo sapiens
  misc_RNA (1)...(19): siRNA sense strand
ggauguggccaaucggcua

SEQ ID NO: 2469146 - RNA, 19 nt, Homo sapiens
  misc_RNA (1)...(19): siRNA sense strand
gagcuuauggacagugcaa

SEQ ID NO: 2469147 - RNA, 19 nt, Homo sapiens
  misc_RNA (1)...(19): siRNA sense strand
cccagagaguaaugaguga

SEQ ID NO: 2469148 - RNA, 19 nt, Homo sapiens
  misc_RNA (1)...(19): siRNA sense strand
ggauaaaguagccguucuu

SEQ ID NO: 2469149 - RNA, 19 nt, Homo sapiens
  misc_RNA (1)...(19): siRNA sense strand
agaucaaagacauaaguga

SEQ ID NO: 2469150 - RNA, 19 nt, Homo sapiens
  misc_RNA (1)...(19): siRNA sense strand
cagagaguaaugagugauu

SEQ ID NO: 2469151 - RNA, 19 nt, Homo sapiens
  misc_RNA (1)...(19): siRNA sense strand
agaggaaaaugaugagaca

SEQ ID NO: 2469152 - RNA, 19 nt, Homo sapiens
  misc_RNA (1)...(19): siRNA sense strand
gcaccgagcuuaugagcag

SEQ ID NO: 2469153 - RNA, 19 nt, Homo sapiens
  misc_RNA (1)...(19): siRNA sense strand
auucauuggaccugaucaa

SEQ ID NO: 2469154 - RNA, 19 nt, Homo sapiens
  misc_RNA (1)...(19): siRNA sense strand
caaucaaccaggaacaaaa

SEQ ID NO: 2469155 - RNA, 19 nt, Homo sapiens
  misc_RNA (1)...(19): siRNA sense strand
gggauaaaguagccguucu

SEQ ID NO: 2469156 - RNA, 19 nt, Homo sapiens
  misc_RNA (1)...(19): siRNA sense strand
gaagagauccugaugcuca

SEQ ID NO: 2469157 - RNA, 19 nt, Homo sapiens
  misc_RNA (1)...(19): siRNA sense strand
aaaaggaagcccuaaguaa

SEQ ID NO: 2469158 - RNA, 19 nt, Homo sapiens
  misc_RNA (1)...(19): siRNA sense strand
auuccaaguucuucgauuu

SEQ ID NO: 2469159 - RNA, 19 nt, Homo sapiens
  misc_RNA (1)...(19): siRNA sense strand
ugauuugucuaauggaaca

SEQ ID NO: 2469160 - RNA, 19 nt, Homo sapiens
  misc_RNA (1)...(19): siRNA sense strand
cagaagcauuggaagagga

SEQ ID NO: 2469161 - RNA, 19 nt, Homo sapiens
  misc_RNA (1)...(19): siRNA sense strand
gcuuaugagcaggcauuaa

SEQ ID NO: 2469162 - RNA, 19 nt, Homo sapiens
  misc_RNA (1)...(19): siRNA sense strand
agggauugaagaaguagua

SEQ ID NO: 2469163 - RNA, 19 nt, Homo sapiens
  misc_RNA (1)...(19): siRNA sense strand
cuccaaaggacccggauga

SEQ ID NO: 2469164 - RNA, 19 nt, Homo sapiens
  misc_RNA (1)...(19): siRNA sense strand
cagucagccaugagcauau

SEQ ID NO: 2469165 - RNA, 19 nt, Homo sapiens
  misc_RNA (1)...(19): siRNA sense strand
cugaaaugucuccgaagau

SEQ ID NO: 2469166 - RNA, 19 nt, Homo sapiens
  misc_RNA (1)...(19): siRNA sense strand
agacagacugcucaggauu

SEQ ID NO: 2469167 - RNA, 19 nt, Homo sapiens
  misc_RNA (1)...(19): siRNA sense strand
ugagacaucuaggaggaaa

SEQ ID NO: 2469168 - RNA, 19 nt, Homo sapiens
  misc_RNA (1)...(19): siRNA sense strand
agaauguggccaaguuuau

SEQ ID NO: 2469169 - RNA, 19 nt, Homo sapiens
  misc_RNA (1)...(19): siRNA sense strand
cuuaugagcaggcauuaaa

SEQ ID NO: 2469170 - RNA, 19 nt, Homo sapiens
  misc_RNA (1)...(19): siRNA sense strand
caacagacuccaugcugau

SEQ ID NO: 2469171 - RNA, 19 nt, Homo sapiens
  misc_RNA (1)...(19): siRNA sense strand
gcauuaaacuuguacacug

SEQ ID NO: 2469172 - RNA, 19 nt, Homo sapiens
  misc_RNA (1)...(19): siRNA sense strand
gagaguaaugagugauuuu

SEQ ID NO: 2469173 - RNA, 19 nt, Homo sapiens
  misc_RNA (1)...(19): siRNA sense strand
ggaacaaaaggaagcccua

SEQ ID NO: 2469174 - RNA, 19 nt, Homo sapiens
  misc_RNA (1)...(19): siRNA sense strand
gaacugauguaacagggau

SEQ ID NO: 2469175 - RNA, 19 nt, Homo sapiens
  misc_RNA (1)...(19): siRNA sense strand
ccagcaucaucuuuggaau

SEQ ID NO: 2469176 - RNA, 19 nt, Homo sapiens
  misc_RNA (1)...(19): siRNA sense strand
cagacagacugcucaggau

SEQ ID NO: 2469177 - RNA, 19 nt, Homo sapiens
  misc_RNA (1)...(19): siRNA sense strand
ugaaugagcuuauggacag

SEQ ID NO: 2469178 - RNA, 19 nt, Homo sapiens
  misc_RNA (1)...(19): siRNA sense strand
uugcaaucaaccaggaaca

SEQ ID NO: 2469179 - RNA, 19 nt, Homo sapiens
  misc_RNA (1)...(19): siRNA sense strand
cgcaggagaugcaagggaa

SEQ ID NO: 2469180 - RNA, 19 nt, Homo sapiens
  misc_RNA (1)...(19): siRNA sense strand
gaucccaggaguuggaaaa

SEQ ID NO: 2469181 - RNA, 19 nt, Homo sapiens
  misc_RNA (1)...(19): siRNA sense strand
uggagcagguggucggaca

SEQ ID NO: 2469182 - RNA, 19 nt, Homo sapiens
  misc_RNA (1)...(19): siRNA sense strand
accaaagagcccaguaaga

SEQ ID NO: 2469183 - RNA, 19 nt, Homo sapiens
  misc_RNA (1)...(19): siRNA sense strand
ggagcagguggucggacaa

SEQ ID NO: 2469184 - RNA, 19 nt, Homo sapiens
  misc_RNA (1)...(19): siRNA sense strand
cagagaaugaagaaagaaa

SEQ ID NO: 2469185 - RNA, 19 nt, Homo sapiens
  misc_RNA (1)...(19): siRNA sense strand
cuaaguuggugguggacaa

SEQ ID NO: 2469186 - RNA, 19 nt, Homo sapiens
  misc_RNA (1)...(19): siRNA sense strand
aguuagagacagagaauga

SEQ ID NO: 2469187 - RNA, 19 nt, Homo sapiens
  misc_RNA (1)...(19): siRNA sense strand
agcuaaagggaaagaguua

SEQ ID NO: 2469188 - RNA, 19 nt, Homo sapiens
  misc_RNA (1)...(19): siRNA sense strand
aggagaaagucgauguaau

SEQ ID NO: 2469189 - RNA, 19 nt, Homo sapiens
  misc_RNA (1)...(19): siRNA sense strand
agggaaagaguuagagaca

SEQ ID NO: 2469190 - RNA, 19 nt, Homo sapiens
  misc_RNA (1)...(19): siRNA sense strand
ccucaguguuggaaugcaa

SEQ ID NO: 2469191 - RNA, 19 nt, Homo sapiens
  misc_RNA (1)...(19): siRNA sense strand
cauggagaaacaagagaaa

SEQ ID NO: 2469192 - RNA, 19 nt, Homo sapiens
  misc_RNA (1)...(19): siRNA sense strand
guaaaggcauuaauggaga

SEQ ID NO: 2469193 - RNA, 19 nt, Homo sapiens
  misc_RNA (1)...(19): siRNA sense strand
aagaagaaaccaaggcuca

SEQ ID NO: 2469194 - RNA, 19 nt, Homo sapiens
  misc_RNA (1)...(19): siRNA sense strand
ggacaaaauugauccccaa

SEQ ID NO: 2469195 - RNA, 19 nt, Homo sapiens
  misc_RNA (1)...(19): siRNA sense strand
guuaaaaggguaagaacau

SEQ ID NO: 2469196 - RNA, 19 nt, Homo sapiens
  misc_RNA (1)...(19): siRNA sense strand
gccuaaaucaggagaaagu

SEQ ID NO: 2469197 - RNA, 19 nt, Homo sapiens
  misc_RNA (1)...(19): siRNA sense strand
gguuaaaaggguaagaaca

SEQ ID NO: 2469198 - RNA, 19 nt, Homo sapiens
  misc_RNA (1)...(19): siRNA sense strand
uauuaagcaaugagagaga

SEQ ID NO: 2469199 - RNA, 19 nt, Homo sapiens
  misc_RNA (1)...(19): siRNA sense strand
gagaaaaguaugucugcaa

SEQ ID NO: 2469200 - RNA, 19 nt, Homo sapiens
  misc_RNA (1)...(19): siRNA sense strand
agaguuagagacagagaau

SEQ ID NO: 2469201 - RNA, 19 nt, Homo sapiens
  misc_RNA (1)...(19): siRNA sense strand
ccagaaaagaacacagaau

SEQ ID NO: 2469202 - RNA, 19 nt, Homo sapiens
  misc_RNA (1)...(19): siRNA sense strand
uaaaagagaacuugccaaa

SEQ ID NO: 2469203 - RNA, 19 nt, Homo sapiens
  misc_RNA (1)...(19): siRNA sense strand
acaggaacuucuaguaaaa

SEQ ID NO: 2469204 - RNA, 19 nt, Homo sapiens
  misc_RNA (1)...(19): siRNA sense strand
gugugggagcaaaggaaau

SEQ ID NO: 2469205 - RNA, 19 nt, Homo sapiens
  misc_RNA (1)...(19): siRNA sense strand
aggcagauaaagacaucaa

SEQ ID NO: 2469206 - RNA, 19 nt, Homo sapiens
  misc_RNA (1)...(19): siRNA sense strand
ucauauaaggaguuuggaa

SEQ ID NO: 2469207 - RNA, 19 nt, Homo sapiens
  misc_RNA (1)...(19): siRNA sense strand
uugccuaaaucaggagaaa

SEQ ID NO: 2469208 - RNA, 19 nt, Homo sapiens
  misc_RNA (1)...(19): siRNA sense strand
agagacagagaaugaagaa

SEQ ID NO: 2469209 - RNA, 19 nt, Homo sapiens
  misc_RNA (1)...(19): siRNA sense strand
gagacagagaaugaagaaa

SEQ ID NO: 2469210 - RNA, 19 nt, Homo sapiens
  misc_RNA (1)...(19): siRNA sense strand
cuccaaagaaugucaguga

SEQ ID NO: 2469211 - RNA, 19 nt, Homo sapiens
  misc_RNA (1)...(19): siRNA sense strand
ggaaaugcagagaaaagua

SEQ ID NO: 2469212 - RNA, 19 nt, Homo sapiens
  misc_RNA (1)...(19): siRNA sense strand
gagagagauuccaaaggca

SEQ ID NO: 2469213 - RNA, 19 nt, Homo sapiens
  misc_RNA (1)...(19): siRNA sense strand
aguuaucucuggagcccaa

SEQ ID NO: 2469214 - RNA, 19 nt, Homo sapiens
  misc_RNA (1)...(19): siRNA sense strand
auucuaaguugguggugga

SEQ ID NO: 2469215 - RNA, 19 nt, Homo sapiens
  misc_RNA (1)...(19): siRNA sense strand
guuacugagacuccagaaa

SEQ ID NO: 2469216 - RNA, 19 nt, Homo sapiens
  misc_RNA (1)...(19): siRNA sense strand
ucgcagucaaguagucaaa

SEQ ID NO: 2469217 - RNA, 19 nt, Homo sapiens
  misc_RNA (1)...(19): siRNA sense strand
cuguaagaugauaggacca

SEQ ID NO: 2469218 - RNA, 19 nt, Homo sapiens
  misc_RNA (1)...(19): siRNA sense strand
uuaagcaaugagagagauu

SEQ ID NO: 2469219 - RNA, 19 nt, Homo sapiens
  misc_RNA (1)...(19): siRNA sense strand
agaaacaagagaaaggacu

SEQ ID NO: 2469220 - RNA, 19 nt, Homo sapiens
  misc_RNA (1)...(19): siRNA sense strand
cgugugggagcaaaggaaa

SEQ ID NO: 2469221 - RNA, 19 nt, Homo sapiens
  misc_RNA (1)...(19): siRNA sense strand
gagcaaaggaaaugcagag

SEQ ID NO: 2469222 - RNA, 19 nt, Homo sapiens
  misc_RNA (1)...(19): siRNA sense strand
guuuuacgcaucagagaaa

SEQ ID NO: 2469223 - RNA, 19 nt, Homo sapiens
  misc_RNA (1)...(19): siRNA sense strand
ggaguagagacguguggga

SEQ ID NO: 2469224 - RNA, 19 nt, Homo sapiens
  misc_RNA (1)...(19): siRNA sense strand
aggcauuaauggagagucc

SEQ ID NO: 2469225 - RNA, 19 nt, Homo sapiens
  misc_RNA (1)...(19): siRNA sense strand
gugauaauccacccagaau

SEQ ID NO: 2469226 - RNA, 19 nt, Homo sapiens
  misc_RNA (1)...(19): siRNA sense strand
ccuaaugauguacaaacua

SEQ ID NO: 2469227 - RNA, 19 nt, Homo sapiens
  misc_RNA (1)...(19): siRNA sense strand
ggaacgaagcucaacucau

SEQ ID NO: 2469228 - RNA, 19 nt, Homo sapiens
  misc_RNA (1)...(19): siRNA sense strand
aaaccagaacagacaguga

SEQ ID NO: 2469229 - RNA, 19 nt, Homo sapiens
  misc_RNA (1)...(19): siRNA sense strand
gcuacuacaaaggcagaua

SEQ ID NO: 2469230 - RNA, 19 nt, Homo sapiens
  misc_RNA (1)...(19): siRNA sense strand
ucauggagaaacaagagaa

SEQ ID NO: 2469231 - RNA, 19 nt, Homo sapiens
  misc_RNA (1)...(19): siRNA sense strand
cauauaaggaguuuggaac

SEQ ID NO: 2469232 - RNA, 19 nt, Homo sapiens
  misc_RNA (1)...(19): siRNA sense strand
agguggucgccgaggaauu

SEQ ID NO: 2469233 - RNA, 19 nt, Homo sapiens
  misc_RNA (1)...(19): siRNA sense strand
uggccauccuggugagguu

SEQ ID NO: 2469234 - RNA, 19 nt, Homo sapiens
  misc_RNA (1)...(19): siRNA sense strand
ccugagacgcagagagccu

SEQ ID NO: 2469235 - RNA, 19 nt, Homo sapiens
  misc_RNA (1)...(19): siRNA sense strand
agguggaaccgguguacuu

SEQ ID NO: 2469236 - RNA, 19 nt, Homo sapiens
  misc_RNA (1)...(19): siRNA sense strand
aguucaagcacauggagga

SEQ ID NO: 2469237 - RNA, 19 nt, Homo sapiens
  misc_RNA (1)...(19): siRNA sense strand
ccauccaggccuugagaga

SEQ ID NO: 2469238 - RNA, 19 nt, Homo sapiens
  misc_RNA (1)...(19): siRNA sense strand
gggcuuucagggagcgaau

SEQ ID NO: 2469239 - RNA, 19 nt, Homo sapiens
  misc_RNA (1)...(19): siRNA sense strand
gcacagugucccaggucca

SEQ ID NO: 2469240 - RNA, 19 nt, Homo sapiens
  misc_RNA (1)...(19): siRNA sense strand
agagauggacagggugaaa

SEQ ID NO: 2469241 - RNA, 19 nt, Homo sapiens
  misc_RNA (1)...(19): siRNA sense strand
acucaaagaccuugccgau

SEQ ID NO: 2469242 - RNA, 19 nt, Homo sapiens
  misc_RNA (1)...(19): siRNA sense strand
agauggacagggugaaaga

SEQ ID NO: 2469243 - RNA, 19 nt, Homo sapiens
  misc_RNA (1)...(19): siRNA sense strand
agaagaauuaagagaugga

SEQ ID NO: 2469244 - RNA, 19 nt, Homo sapiens
  misc_RNA (1)...(19): siRNA sense strand
aagaauuaagagauggaca

SEQ ID NO: 2469245 - RNA, 19 nt, Homo sapiens
  misc_RNA (1)...(19): siRNA sense strand
augacaaggacaagagugu

SEQ ID NO: 2469246 - RNA, 19 nt, Homo sapiens
  misc_RNA (1)...(19): siRNA sense strand
ggacaagaguguucuggcu

SEQ ID NO: 2469247 - RNA, 19 nt, Homo sapiens
  misc_RNA (1)...(19): siRNA sense strand
uaagagauggacaggguga

SEQ ID NO: 2469248 - RNA, 19 nt, Homo sapiens
  misc_RNA (1)...(19): siRNA sense strand
cggaagaccaucucagacu

SEQ ID NO: 2469249 - RNA, 19 nt, Homo sapiens
  misc_RNA (1)...(19): siRNA sense strand
auuaagagauggacagggu

SEQ ID NO: 2469250 - RNA, 19 nt, Homo sapiens
  misc_RNA (1)...(19): siRNA sense strand
ccagagagcccaagguggu

SEQ ID NO: 2469251 - RNA, 19 nt, Homo sapiens
  misc_RNA (1)...(19): siRNA sense strand
ccuuauacacagaguacua

SEQ ID NO: 2469252 - RNA, 19 nt, Homo sapiens
  misc_RNA (1)...(19): siRNA sense strand
aaggcaaaguuguggaaca

SEQ ID NO: 2469253 - RNA, 19 nt, Homo sapiens
  misc_RNA (1)...(19): siRNA sense strand
cgauaaugcguuagcagau

SEQ ID NO: 2469254 - RNA, 19 nt, Homo sapiens
  misc_RNA (1)...(19): siRNA sense strand
cagcagaauaugaccaaga

SEQ ID NO: 2469255 - RNA, 19 nt, Homo sapiens
  misc_RNA (1)...(19): siRNA sense strand
ugaagauagaguugccaaa

SEQ ID NO: 2469256 - RNA, 19 nt, Homo sapiens
  misc_RNA (1)...(19): siRNA sense strand
uugacaagaaguuaggaua

SEQ ID NO: 2469257 - RNA, 19 nt, Homo sapiens
  misc_RNA (1)...(19): siRNA sense strand
acgugaagcaaguuacuaa

SEQ ID NO: 2469258 - RNA, 19 nt, Homo sapiens
  misc_RNA (1)...(19): siRNA sense strand
acgcagugcucugaggaaa

SEQ ID NO: 2469259 - RNA, 19 nt, Homo sapiens
  misc_RNA (1)...(19): siRNA sense strand
cgucaaaagagcccauaaa

SEQ ID NO: 2469260 - RNA, 19 nt, Homo sapiens
  misc_RNA (1)...(19): siRNA sense strand
cagucaaauaccugccuua

SEQ ID NO: 2469261 - RNA, 19 nt, Homo sapiens
  misc_RNA (1)...(19): siRNA sense strand
aggaaagguuaauagaacu

SEQ ID NO: 2469262 - RNA, 19 nt, Homo sapiens
  misc_RNA (1)...(19): siRNA sense strand
ccuuggaucacaugaauau

SEQ ID NO: 2469263 - RNA, 19 nt, Homo sapiens
  misc_RNA (1)...(19): siRNA sense strand
caaucauagcaguggcuga

SEQ ID NO: 2469264 - RNA, 19 nt, Homo sapiens
  misc_RNA (1)...(19): siRNA sense strand
ccucccugguaguguuaaa

SEQ ID NO: 2469265 - RNA, 19 nt, Homo sapiens
  misc_RNA (1)...(19): siRNA sense strand
cguugggauuacuuauaua

SEQ ID NO: 2469266 - RNA, 19 nt, Homo sapiens
  misc_RNA (1)...(19): siRNA sense strand
ucaugggauuguugcaaau

SEQ ID NO: 2469267 - RNA, 19 nt, Homo sapiens
  misc_RNA (1)...(19): siRNA sense strand
cagaaagguggcauuacaa

SEQ ID NO: 2469268 - RNA, 19 nt, Homo sapiens
  misc_RNA (1)...(19): siRNA sense strand
cugaaauagcucaaccauu

SEQ ID NO: 2469269 - RNA, 19 nt, Homo sapiens
  misc_RNA (1)...(19): siRNA sense strand
aggacauacuaguggugca

SEQ ID NO: 2469270 - RNA, 19 nt, Homo sapiens
  misc_RNA (1)...(19): siRNA sense strand
ugaugaagucuaugaagca

SEQ ID NO: 2469271 - RNA, 19 nt, Homo sapiens
  misc_RNA (1)...(19): siRNA sense strand
guuccagaaagguggcauu

SEQ ID NO: 2469272 - RNA, 19 nt, Homo sapiens
  misc_RNA (1)...(19): siRNA sense strand
gcugaugaaggguggcaca

SEQ ID NO: 2469273 - RNA, 19 nt, Homo sapiens
  misc_RNA (1)...(19): siRNA sense strand
cagauauugacaagaaguu

SEQ ID NO: 2469274 - RNA, 19 nt, Homo sapiens
  misc_RNA (1)...(19): siRNA sense strand
uggaacacucugaaccuaa

SEQ ID NO: 2469275 - RNA, 19 nt, Homo sapiens
  misc_RNA (1)...(19): siRNA sense strand
ccuuacaaugagucaguuu

SEQ ID NO: 2469276 - RNA, 19 nt, Homo sapiens
  misc_RNA (1)...(19): siRNA sense strand
gguuaauagaacuugacca

SEQ ID NO: 2469277 - RNA, 19 nt, Homo sapiens
  misc_RNA (1)...(19): siRNA sense strand
ggcacauuuuacagaauaa

SEQ ID NO: 2469278 - RNA, 19 nt, Homo sapiens
  misc_RNA (1)...(19): siRNA sense strand
agguaaauuugaugaaguc

SEQ ID NO: 2469279 - RNA, 19 nt, Homo sapiens
  misc_RNA (1)...(19): siRNA sense strand
cgaaagaggcgacugauaa

SEQ ID NO: 2469280 - RNA, 19 nt, Homo sapiens
  misc_RNA (1)...(19): siRNA sense strand
acgggaagaacaagggaaa

SEQ ID NO: 2469281 - RNA, 19 nt, Homo sapiens
  misc_RNA (1)...(19): siRNA sense strand
cagaagaagaggugcuaga

SEQ ID NO: 2469282 - RNA, 19 nt, Homo sapiens
  misc_RNA (1)...(19): siRNA sense strand
guguuggacucuagaagaa

SEQ ID NO: 2469283 - RNA, 19 nt, Homo sapiens
  misc_RNA (1)...(19): siRNA sense strand
ugauaaagcugaagaggac

SEQ ID NO: 2469284 - RNA, 19 nt, Homo sapiens
  misc_RNA (1)...(19): siRNA sense strand
ucgaaagaggcgacugaua

SEQ ID NO: 2469285 - RNA, 19 nt, Homo sapiens
  misc_RNA (1)...(19): siRNA sense strand
cugagaacgggaagaacaa

SEQ ID NO: 2469286 - RNA, 19 nt, Homo sapiens
  misc_RNA (1)...(19): siRNA sense strand
uuaaaagagaggcgggaaa

SEQ ID NO: 2469287 - RNA, 19 nt, Homo sapiens
  misc_RNA (1)...(19): siRNA sense strand
gugauaaagcugaagagga

SEQ ID NO: 2469288 - RNA, 19 nt, Homo sapiens
  misc_RNA (1)...(19): siRNA sense strand
gccacaaggcagaagaaga

SEQ ID NO: 2469289 - RNA, 19 nt, Homo sapiens
  misc_RNA (1)...(19): siRNA sense strand
caguagcagaguugaagaa

SEQ ID NO: 2469290 - RNA, 19 nt, Homo sapiens
  misc_RNA (1)...(19): siRNA sense strand
uggauuaccuucauggaga

SEQ ID NO: 2469291 - RNA, 19 nt, Homo sapiens
  misc_RNA (1)...(19): siRNA sense strand
aagaagaggugcuagaugu

SEQ ID NO: 2469292 - RNA, 19 nt, Homo sapiens
  misc_RNA (1)...(19): siRNA sense strand
ccucaugagcugauagagu

SEQ ID NO: 2469293 - RNA, 19 nt, Homo sapiens
  misc_RNA (1)...(19): siRNA sense strand
acugagaacgggaagaaca

SEQ ID NO: 2469294 - RNA, 19 nt, Homo sapiens
  misc_RNA (1)...(19): siRNA sense strand
agcugugagaguagaauua

SEQ ID NO: 2469295 - RNA, 19 nt, Homo sapiens
  misc_RNA (1)...(19): siRNA sense strand
ccacaaggcagaagaagag

SEQ ID NO: 2469296 - RNA, 19 nt, Homo sapiens
  misc_RNA (1)...(19): siRNA sense strand
cugugagaguagaauuauu

SEQ ID NO: 2469297 - RNA, 19 nt, Homo sapiens
  misc_RNA (1)...(19): siRNA sense strand
aggcagaagaagaggugcu

SEQ ID NO: 2469298 - RNA, 19 nt, Homo sapiens
  misc_RNA (1)...(19): siRNA sense strand
ucaaagugguagccgcaga

SEQ ID NO: 2469299 - RNA, 19 nt, Homo sapiens
  misc_RNA (1)...(19): siRNA sense strand
cgggaagaacaagggaaau

SEQ ID NO: 2469300 - RNA, 19 nt, Homo sapiens
  misc_RNA (1)...(19): siRNA sense strand
ugucugaccauuuggccaa

SEQ ID NO: 2469301 - RNA, 19 nt, Homo sapiens
  misc_RNA (1)...(19): siRNA sense strand
gcugauagaguguuggacu

SEQ ID NO: 2469302 - RNA, 19 nt, Homo sapiens
  misc_RNA (1)...(19): siRNA sense strand
gcacaaaaccagauggaau

SEQ ID NO: 2469303 - RNA, 19 nt, Homo sapiens
  misc_RNA (1)...(19): siRNA sense strand
gggcagaaacagaaaccaa

SEQ ID NO: 2469304 - RNA, 19 nt, Homo sapiens
  misc_RNA (1)...(19): siRNA sense strand
ccaagauggauccgagaua

SEQ ID NO: 2469305 - RNA, 19 nt, Homo sapiens
  misc_RNA (1)...(19): siRNA sense strand
gagauaaugaagugacaau

SEQ ID NO: 2469306 - RNA, 19 nt, Homo sapiens
  misc_RNA (1)...(19): siRNA sense strand
uggaaugugaggaggagaa

SEQ ID NO: 2469307 - RNA, 19 nt, Homo sapiens
  misc_RNA (1)...(19): siRNA sense strand
aaacagaaaccaagguaca

SEQ ID NO: 2469308 - RNA, 19 nt, Homo sapiens
  misc_RNA (1)...(19): siRNA sense strand
cagaaguggcugaaaguca

SEQ ID NO: 2469309 - RNA, 19 nt, Homo sapiens
  misc_RNA (1)...(19): siRNA sense strand
ugaaauguugggagaagaa

SEQ ID NO: 2469310 - RNA, 19 nt, Homo sapiens
  misc_RNA (1)...(19): siRNA sense strand
guaaauuccucuugccaga

SEQ ID NO: 2469311 - RNA, 19 nt, Homo sapiens
  misc_RNA (1)...(19): siRNA sense strand
agggaaaugaugcagauaa

SEQ ID NO: 2469312 - RNA, 19 nt, Homo sapiens
  misc_RNA (1)...(19): siRNA sense strand
cuuaagauguauggagaau

SEQ ID NO: 2469313 - RNA, 19 nt, Homo sapiens
  misc_RNA (1)...(19): siRNA sense strand
ccauucuaauagugcaaua

SEQ ID NO: 2469314 - RNA, 19 nt, Homo sapiens
  misc_RNA (1)...(19): siRNA sense strand
ccgagauaaugaagugaca

SEQ ID NO: 2469315 - RNA, 19 nt, Homo sapiens
  misc_RNA (1)...(19): siRNA sense strand
cugaaagagcuuaugucaa

SEQ ID NO: 2469316 - RNA, 19 nt, Homo sapiens
  misc_RNA (1)...(19): siRNA sense strand
ccuuaagauguauggagaa

SEQ ID NO: 2469317 - RNA, 19 nt, Homo sapiens
  misc_RNA (1)...(19): siRNA sense strand
ggaaaauggagaaccuaaa

SEQ ID NO: 2469318 - RNA, 19 nt, Homo sapiens
  misc_RNA (1)...(19): siRNA sense strand
uuuaugaaauguugggaga

SEQ ID NO: 2469319 - RNA, 19 nt, Homo sapiens
  misc_RNA (1)...(19): siRNA sense strand
auaugugguuuguuggaaa

SEQ ID NO: 2469320 - RNA, 19 nt, Homo sapiens
  misc_RNA (1)...(19): siRNA sense strand
caguauauggagaagucaa

SEQ ID NO: 2469321 - RNA, 19 nt, Homo sapiens
  misc_RNA (1)...(19): siRNA sense strand
gggaaagcccucuggaacu

SEQ ID NO: 2469322 - RNA, 19 nt, Homo sapiens
  misc_RNA (1)...(19): siRNA sense strand
augagaugaaggagacuaa

SEQ ID NO: 2469323 - RNA, 19 nt, Homo sapiens
  misc_RNA (1)...(19): siRNA sense strand
uggagaaccuaaagaaacu

SEQ ID NO: 2469324 - RNA, 19 nt, Homo sapiens
  misc_RNA (1)...(19): siRNA sense strand
cgaaugcaagaaugggaaa

SEQ ID NO: 2469325 - RNA, 19 nt, Homo sapiens
  misc_RNA (1)...(19): siRNA sense strand
agaaagaggggcagaaaca

SEQ ID NO: 2469326 - RNA, 19 nt, Homo sapiens
  misc_RNA (1)...(19): siRNA sense strand
ggagaauaugugaaaggau

SEQ ID NO: 2469327 - RNA, 19 nt, Homo sapiens
  misc_RNA (1)...(19): siRNA sense strand
aguauauggagaagucaaa

SEQ ID NO: 2469328 - RNA, 19 nt, Homo sapiens
  misc_RNA (1)...(19): siRNA sense strand
auugcaaacuguuggaaga

SEQ ID NO: 2469329 - RNA, 19 nt, Homo sapiens
  misc_RNA (1)...(19): siRNA sense strand
ggguuggcauugauggaau

SEQ ID NO: 2469330 - RNA, 19 nt, Homo sapiens
  misc_RNA (1)...(19): siRNA sense strand
uggaaaugcuucugacagu

SEQ ID NO: 2469331 - RNA, 19 nt, Homo sapiens
  misc_RNA (1)...(19): siRNA sense strand
acaaagaagaauggaucaa

SEQ ID NO: 2469332 - RNA, 19 nt, Homo sapiens
  misc_RNA (1)...(19): siRNA sense strand
gguuucuacugcugagcua

SEQ ID NO: 2469333 - RNA, 19 nt, Homo sapiens
  misc_RNA (1)...(19): siRNA sense strand
agaaagagucugcugugaa

SEQ ID NO: 2469334 - RNA, 19 nt, Homo sapiens
  misc_RNA (1)...(19): siRNA sense strand
aggcauggauugacaacca

SEQ ID NO: 2469335 - RNA, 19 nt, Homo sapiens
  misc_RNA (1)...(19): siRNA sense strand
cgguguaauggcagcacaa

SEQ ID NO: 2469336 - RNA, 19 nt, Homo sapiens
  misc_RNA (1)...(19): siRNA sense strand
agacagugaagaaaagaaa

SEQ ID NO: 2469337 - RNA, 19 nt, Homo sapiens
  misc_RNA (1)...(19): siRNA sense strand
ccaagguacaagagaggga

SEQ ID NO: 2469338 - RNA, 19 nt, Homo sapiens
  misc_RNA (1)...(19): siRNA sense strand
gcaauaaggaaaauggaga

SEQ ID NO: 2469339 - RNA, 19 nt, Homo sapiens
  misc_RNA (1)...(19): siRNA sense strand
caauaaggaaaauggagaa

SEQ ID NO: 2469340 - RNA, 19 nt, Homo sapiens
  misc_RNA (1)...(19): siRNA sense strand
ugaaaauuguagagacuca

SEQ ID NO: 2469341 - RNA, 19 nt, Homo sapiens
  misc_RNA (1)...(19): siRNA sense strand
agacaaagaagaauggauc

SEQ ID NO: 2469342 - RNA, 19 nt, Homo sapiens
  misc_RNA (1)...(19): siRNA sense strand
ggaaugugaggaggagaaa

SEQ ID NO: 2469343 - RNA, 19 nt, Homo sapiens
  misc_RNA (1)...(19): siRNA sense strand
aauggagaaccuaaagaaa

SEQ ID NO: 2469344 - RNA, 19 nt, Homo sapiens
  misc_RNA (1)...(19): siRNA sense strand
ugggagaagaagaagacau

SEQ ID NO: 2469345 - RNA, 19 nt, Homo sapiens
  misc_RNA (1)...(19): siRNA sense strand
aagauggauccgagauaau

SEQ ID NO: 2469346 - RNA, 19 nt, Homo sapiens
  misc_RNA (1)...(19): siRNA sense strand
gcagagauggugaauaaaa

SEQ ID NO: 2469347 - RNA, 19 nt, Homo sapiens
  misc_RNA (1)...(19): siRNA sense strand
uggagaaagagaugaaacu

SEQ ID NO: 2469348 - RNA, 19 nt, Homo sapiens
  misc_RNA (1)...(19): siRNA sense strand
caccaugagaugaaggaga

SEQ ID NO: 2469349 - RNA, 19 nt, Homo sapiens
  misc_RNA (1)...(19): siRNA sense strand
uggagaaacgaaugcaaga

SEQ ID NO: 2469350 - RNA, 19 nt, Homo sapiens
  misc_RNA (1)...(19): siRNA sense strand
ugggcuaugugguggauga

SEQ ID NO: 2469351 - RNA, 19 nt, Homo sapiens
  misc_RNA (1)...(19): siRNA sense strand
uugcaaaggauaaugacau

SEQ ID NO: 2469352 - RNA, 19 nt, Homo sapiens
  misc_RNA (1)...(19): siRNA sense strand
gcaucauugucgagcaugu

SEQ ID NO: 2469353 - RNA, 19 nt, Homo sapiens
  misc_RNA (1)...(19): siRNA sense strand
aagguacaagagagggaaa

SEQ ID NO: 2469354 - RNA, 19 nt, Homo sapiens
  misc_RNA (1)...(19): siRNA sense strand
cugcagacagugaggaacu

SEQ ID NO: 2469355 - RNA, 19 nt, Homo sapiens
  misc_RNA (1)...(19): siRNA sense strand
aggaaggcauggauugaca

SEQ ID NO: 2469356 - RNA, 19 nt, Homo sapiens
  misc_RNA (1)...(19): siRNA sense strand
ggagaaacgaaugcaagaa

SEQ ID NO: 2469357 - RNA, 19 nt, Homo sapiens
  misc_RNA (1)...(19): siRNA sense strand
aauuauaucuacagcagca

SEQ ID NO: 2469358 - RNA, 19 nt, Homo sapiens
  misc_RNA (1)...(19): siRNA sense strand
ugacauucacucagagguu

SEQ ID NO: 2469359 - RNA, 19 nt, Homo sapiens
  misc_RNA (1)...(19): siRNA sense strand
cagagauggugaauaaaau

SEQ ID NO: 2469360 - RNA, 19 nt, Homo sapiens
  misc_RNA (1)...(19): siRNA sense strand
gcuuaacuuugcagcauca

SEQ ID NO: 2469361 - RNA, 19 nt, Homo sapiens
  misc_RNA (1)...(19): siRNA sense strand
ggacaaagccagugcccuu

SEQ ID NO: 2469362 - RNA, 19 nt, Homo sapiens
  misc_RNA (1)...(19): siRNA sense strand
gggauuacuuugaggacca

SEQ ID NO: 2469363 - RNA, 19 nt, Homo sapiens
  misc_RNA (1)...(19): siRNA sense strand
aguacaagcccaagggaga

SEQ ID NO: 2469364 - RNA, 19 nt, Homo sapiens
  misc_RNA (1)...(19): siRNA sense strand
uggacuaacaccaguacaa

SEQ ID NO: 2469365 - RNA, 19 nt, Homo sapiens
  misc_RNA (1)...(19): siRNA sense strand
ggauauugugaucgcguau

SEQ ID NO: 2469366 - RNA, 19 nt, Homo sapiens
  misc_RNA (1)...(19): siRNA sense strand
cagacaagaaugagauuuu

SEQ ID NO: 2469367 - RNA, 19 nt, Homo sapiens
  misc_RNA (1)...(19): siRNA sense strand
guggaugaagugaugacaa

SEQ ID NO: 2469368 - RNA, 19 nt, Homo sapiens
  misc_RNA (1)...(19): siRNA sense strand
caagggagauuacagggaa

SEQ ID NO: 2469369 - RNA, 19 nt, Homo sapiens
  misc_RNA (1)...(19): siRNA sense strand
ccgccgauguauaggaaag

SEQ ID NO: 2469370 - RNA, 19 nt, Homo sapiens
  misc_RNA (1)...(19): siRNA sense strand
ugagggacuucgaggcuga

SEQ ID NO: 2469371 - RNA, 19 nt, Homo sapiens
  misc_RNA (1)...(19): siRNA sense strand
aguacagcuuuguguucaa

SEQ ID NO: 2469372 - RNA, 19 nt, Homo sapiens
  misc_RNA (1)...(19): siRNA sense strand
ugauauggcagaaggugga

SEQ ID NO: 2469373 - RNA, 19 nt, Homo sapiens
  misc_RNA (1)...(19): siRNA sense strand
uccagagauucuagaugaa

SEQ ID NO: 2469374 - RNA, 19 nt, Homo sapiens
  misc_RNA (1)...(19): siRNA sense strand
gaacaaagacuuaaggaac

SEQ ID NO: 2469375 - RNA, 19 nt, Homo sapiens
  misc_RNA (1)...(19): siRNA sense strand
ggaggauguucaugggaga

SEQ ID NO: 2469376 - RNA, 19 nt, Homo sapiens
  misc_RNA (1)...(19): siRNA sense strand
agaacaaagacuuaaggaa

SEQ ID NO: 2469377 - RNA, 19 nt, Homo sapiens
  misc_RNA (1)...(19): siRNA sense strand
agacagagcuucuucgaga

SEQ ID NO: 2469378 - RNA, 19 nt, Homo sapiens
  misc_RNA (1)...(19): siRNA sense strand
ccagaaacugagacaagaa

SEQ ID NO: 2469379 - RNA, 19 nt, Homo sapiens
  misc_RNA (1)...(19): siRNA sense strand
gcacacucugagaaagaaa

SEQ ID NO: 2469380 - RNA, 19 nt, Homo sapiens
  misc_RNA (1)...(19): siRNA sense strand
gggcuaugaaguccagaaa

SEQ ID NO: 2469381 - RNA, 19 nt, Homo sapiens
  misc_RNA (1)...(19): siRNA sense strand
gagagauacaagaugaaga

SEQ ID NO: 2469382 - RNA, 19 nt, Homo sapiens
  misc_RNA (1)...(19): siRNA sense strand
ggcagagauuggugaggau

SEQ ID NO: 2469383 - RNA, 19 nt, Homo sapiens
  misc_RNA (1)...(19): siRNA sense strand
uguucaaggagcagggaca

SEQ ID NO: 2469384 - RNA, 19 nt, Homo sapiens
  misc_RNA (1)...(19): siRNA sense strand
cagagauuggugaggauuu

SEQ ID NO: 2469385 - RNA, 19 nt, Homo sapiens
  misc_RNA (1)...(19): siRNA sense strand
uuggugaggauuuggauaa

SEQ ID NO: 2469386 - RNA, 19 nt, Homo sapiens
  misc_RNA (1)...(19): siRNA sense strand
cuggauauuuuacgggaaa

SEQ ID NO: 2469387 - RNA, 19 nt, Homo sapiens
  misc_RNA (1)...(19): siRNA sense strand
ccaucagguugaagaagca

SEQ ID NO: 2469388 - RNA, 19 nt, Homo sapiens
  misc_RNA (1)...(19): siRNA sense strand
auacagaugagaaggagau

SEQ ID NO: 2469389 - RNA, 19 nt, Homo sapiens
  misc_RNA (1)...(19): siRNA sense strand
ucucaguaugcaugguaua

SEQ ID NO: 2469390 - RNA, 19 nt, Homo sapiens
  misc_RNA (1)...(19): siRNA sense strand
uggcaaugagacagagcuu

SEQ ID NO: 2469391 - RNA, 19 nt, Homo sapiens
  misc_RNA (1)...(19): siRNA sense strand
gggagaaguaaagaacaaa

SEQ ID NO: 2469392 - RNA, 19 nt, Homo sapiens
  misc_RNA (1)...(19): siRNA sense strand
gauacagaugagaaggaga

SEQ ID NO: 2469393 - RNA, 19 nt, Homo sapiens
  misc_RNA (1)...(19): siRNA sense strand
ggauaaaucugaugugucc

SEQ ID NO: 2469394 - RNA, 19 nt, Homo sapiens
  misc_RNA (1)...(19): siRNA sense strand
ggcaagauaagcaaggaga

SEQ ID NO: 2469395 - RNA, 19 nt, Homo sapiens
  misc_RNA (1)...(19): siRNA sense strand
ccaaaagagucucaaggau

SEQ ID NO: 2469396 - RNA, 19 nt, Homo sapiens
  misc_RNA (1)...(19): siRNA sense strand
aagagagauacaagaugaa

SEQ ID NO: 2469397 - RNA, 19 nt, Homo sapiens
  misc_RNA (1)...(19): siRNA sense strand
aacugagacaagaaagaaa

SEQ ID NO: 2469398 - RNA, 19 nt, Homo sapiens
  misc_RNA (1)...(19): siRNA sense strand
auagagugcugauggcaga

SEQ ID NO: 2469399 - RNA, 19 nt, Homo sapiens
  misc_RNA (1)...(19): siRNA sense strand
cugaagagagauacaagau

SEQ ID NO: 2469400 - RNA, 19 nt, Homo sapiens
  misc_RNA (1)...(19): siRNA sense strand
uggugaggauuuggauaaa

SEQ ID NO: 2469401 - RNA, 19 nt, Homo sapiens
  misc_RNA (1)...(19): siRNA sense strand
agggacaaguuacaggaau

SEQ ID NO: 2469402 - RNA, 19 nt, Homo sapiens
  misc_RNA (1)...(19): siRNA sense strand
guguguaugguguggauca

SEQ ID NO: 2469403 - RNA, 19 nt, Homo sapiens
  misc_RNA (1)...(19): siRNA sense strand
gcuacauguaugauuggaa

SEQ ID NO: 2469404 - RNA, 19 nt, Homo sapiens
  misc_RNA (1)...(19): siRNA sense strand
ccugauaaucgauugcauu

SEQ ID NO: 2469405 - RNA, 19 nt, Homo sapiens
  misc_RNA (1)...(19): siRNA sense strand
agauacaagaugaagagca

SEQ ID NO: 2469406 - RNA, 19 nt, Homo sapiens
  misc_RNA (1)...(19): siRNA sense strand
gguuguagcuauaggcaca

SEQ ID NO: 2469407 - RNA, 19 nt, Homo sapiens
  misc_RNA (1)...(19): siRNA sense strand
acuuauuggugaugggaau

SEQ ID NO: 2469408 - RNA, 19 nt, Homo sapiens
  misc_RNA (1)...(19): siRNA sense strand
cagugauaccagaggcuua

SEQ ID NO: 2469409 - RNA, 19 nt, Homo sapiens
  misc_RNA (1)...(19): siRNA sense strand
caaauugaccagaugggaa

SEQ ID NO: 2469410 - RNA, 19 nt, Homo sapiens
  misc_RNA (1)...(19): siRNA sense strand
caguauacuuauuggugau

SEQ ID NO: 2469411 - RNA, 19 nt, Homo sapiens
  misc_RNA (1)...(19): siRNA sense strand
aauugaaagagcuggacaa

SEQ ID NO: 2469412 - RNA, 19 nt, Homo sapiens
  misc_RNA (1)...(19): siRNA sense strand
guacaagacuggacuggga

SEQ ID NO: 2469413 - RNA, 19 nt, Homo sapiens
  misc_RNA (1)...(19): siRNA sense strand
gugcugugguggaugguau

SEQ ID NO: 2469414 - RNA, 19 nt, Homo sapiens
  misc_RNA (1)...(19): siRNA sense strand
cauuaagccagauggaaga

SEQ ID NO: 2469415 - RNA, 19 nt, Homo sapiens
  misc_RNA (1)...(19): siRNA sense strand
ggagauguuucuuuggaga

SEQ ID NO: 2469416 - RNA, 19 nt, Homo sapiens
  misc_RNA (1)...(19): siRNA sense strand
acaaacguggagagauaaa

SEQ ID NO: 2469417 - RNA, 19 nt, Homo sapiens
  misc_RNA (1)...(19): siRNA sense strand
auuugaagccaaugaagaa

SEQ ID NO: 2469418 - RNA, 19 nt, Homo sapiens
  misc_RNA (1)...(19): siRNA sense strand
uccuaaagaugguguuaau

SEQ ID NO: 2469419 - RNA, 19 nt, Homo sapiens
  misc_RNA (1)...(19): siRNA sense strand
agcuauaggcacaggugaa

SEQ ID NO: 2469420 - RNA, 19 nt, Homo sapiens
  misc_RNA (1)...(19): siRNA sense strand
acaugaaccaguugccuaa

SEQ ID NO: 2469421 - RNA, 19 nt, Homo sapiens
  misc_RNA (1)...(19): siRNA sense strand
ccuccuaucaagaagcuaa

SEQ ID NO: 2469422 - RNA, 19 nt, Homo sapiens
  misc_RNA (1)...(19): siRNA sense strand
aguacauuaugaagggaga

SEQ ID NO: 2469423 - RNA, 19 nt, Homo sapiens
  misc_RNA (1)...(19): siRNA sense strand
gcaguauacuuauugguga

SEQ ID NO: 2469424 - RNA, 19 nt, Homo sapiens
  misc_RNA (1)...(19): siRNA sense strand
caguucaaccagcgacaaa

SEQ ID NO: 2469425 - RNA, 19 nt, Homo sapiens
  misc_RNA (1)...(19): siRNA sense strand
auggaagaguauugcauga

SEQ ID NO: 2469426 - RNA, 19 nt, Homo sapiens
  misc_RNA (1)...(19): siRNA sense strand
ccagcgacaaagacgauaa

SEQ ID NO: 2469427 - RNA, 19 nt, Homo sapiens
  misc_RNA (1)...(19): siRNA sense strand
ccuuaaggaaacugugaca

SEQ ID NO: 2469428 - RNA, 19 nt, Homo sapiens
  misc_RNA (1)...(19): siRNA sense strand
ggacauuaagccagaugga

SEQ ID NO: 2469429 - RNA, 19 nt, Homo sapiens
  misc_RNA (1)...(19): siRNA sense strand
aggcuuagaaaucgcuaua

SEQ ID NO: 2469430 - RNA, 19 nt, Homo sapiens
  misc_RNA (1)...(19): siRNA sense strand
ggaugaaccugaaccacga

SEQ ID NO: 2469431 - RNA, 19 nt, Homo sapiens
  misc_RNA (1)...(19): siRNA sense strand
aaggaucagcccagauuaa

SEQ ID NO: 2469432 - RNA, 19 nt, Homo sapiens
  misc_RNA (1)...(19): siRNA sense strand
gugaauacaauuacagcca

SEQ ID NO: 2469433 - RNA, 19 nt, Homo sapiens
  misc_RNA (1)...(19): siRNA sense strand
agugguaugucaauggcaa

SEQ ID NO: 2469434 - RNA, 19 nt, Homo sapiens
  misc_RNA (1)...(19): siRNA sense strand
ugaauugggcacaaggaga

SEQ ID NO: 2469435 - RNA, 19 nt, Homo sapiens
  misc_RNA (1)...(19): siRNA sense strand
cguggcuguugaaggcaaa

SEQ ID NO: 2469436 - RNA, 19 nt, Homo sapiens
  misc_RNA (1)...(19): siRNA sense strand
guggauggccugaguggga

SEQ ID NO: 2469437 - RNA, 19 nt, Homo sapiens
  misc_RNA (1)...(19): siRNA sense strand
ccaguuuacaucagcagua

SEQ ID NO: 2469438 - RNA, 19 nt, Homo sapiens
  misc_RNA (1)...(19): siRNA sense strand
guuuaguacccucugcaua

SEQ ID NO: 2469439 - RNA, 19 nt, Homo sapiens
  misc_RNA (1)...(19): siRNA sense strand
acauuaagccagauggaag

SEQ ID NO: 2469440 - RNA, 19 nt, Homo sapiens
  misc_RNA (1)...(19): siRNA sense strand
acuuacaacaacauggcua

SEQ ID NO: 2469441 - RNA, 19 nt, Homo sapiens
  misc_RNA (1)...(19): siRNA sense strand
acaauuacagccaggacau

SEQ ID NO: 2469442 - RNA, 19 nt, Homo sapiens
  misc_RNA (1)...(19): siRNA sense strand
aagccagauggaagaguau

SEQ ID NO: 2469443 - RNA, 19 nt, Homo sapiens
  misc_RNA (1)...(19): siRNA sense strand
gcaaacaguuccaagguca

SEQ ID NO: 2469444 - RNA, 19 nt, Homo sapiens
  misc_RNA (1)...(19): siRNA sense strand
gucaacaggagaagagaua

SEQ ID NO: 2469445 - RNA, 19 nt, Homo sapiens
  misc_RNA (1)...(19): siRNA sense strand
ggacaagacugacagccua

SEQ ID NO: 2469446 - RNA, 19 nt, Homo sapiens
  misc_RNA (1)...(19): siRNA sense strand
gagaagagauaccauauuu

SEQ ID NO: 2469447 - RNA, 19 nt, Homo sapiens
  misc_RNA (1)...(19): siRNA sense strand
ucccagaagagaaggacaa

SEQ ID NO: 2469448 - RNA, 19 nt, Homo sapiens
  misc_RNA (1)...(19): siRNA sense strand
caggagaagagauaccaua

SEQ ID NO: 2469449 - RNA, 19 nt, Homo sapiens
  misc_RNA (1)...(19): siRNA sense strand
ggagaagagauaccauauu

SEQ ID NO: 2469450 - RNA, 19 nt, Homo sapiens
  misc_RNA (1)...(19): siRNA sense strand
ugugaugucaacaggagaa

SEQ ID NO: 2469451 - RNA, 19 nt, Homo sapiens
  misc_RNA (1)...(19): siRNA sense strand
aggagaagagauaccauau

SEQ ID NO: 2469452 - RNA, 19 nt, Homo sapiens
  misc_RNA (1)...(19): siRNA sense strand
uaaaggagcugcugggaca

SEQ ID NO: 2469453 - RNA, 19 nt, Homo sapiens
  misc_RNA (1)...(19): siRNA sense strand
gcacagugucgauggcgaa

SEQ ID NO: 2469454 - RNA, 19 nt, Homo sapiens
  misc_RNA (1)...(19): siRNA sense strand
gagaagauccugaagcuca

SEQ ID NO: 2469455 - RNA, 19 nt, Homo sapiens
  misc_RNA (1)...(19): siRNA sense strand
uguuaugaggagaagcaaa

SEQ ID NO: 2469456 - RNA, 19 nt, Homo sapiens
  misc_RNA (1)...(19): siRNA sense strand
uggaagagcccauggugca

SEQ ID NO: 2469457 - RNA, 19 nt, Homo sapiens
  misc_RNA (1)...(19): siRNA sense strand
cagaagcacuugcgggucu

SEQ ID NO: 2469458 - RNA, 19 nt, Homo sapiens
  misc_RNA (1)...(19): siRNA sense strand
gcuguuaugaggagaagca

SEQ ID NO: 2469459 - RNA, 19 nt, Homo sapiens
  misc_RNA (1)...(19): siRNA sense strand
cagacaaguuccagguccu

SEQ ID NO: 2469460 - RNA, 19 nt, Homo sapiens
  misc_RNA (1)...(19): siRNA sense strand
gugagaaaguccaggccau

SEQ ID NO: 2469461 - RNA, 19 nt, Homo sapiens
  misc_RNA (1)...(19): siRNA sense strand
gagaccaauuugaggcaca

SEQ ID NO: 2469462 - RNA, 19 nt, Homo sapiens
  misc_RNA (1)...(19): siRNA sense strand
aggccaugcgggaggagaa

SEQ ID NO: 2469463 - RNA, 19 nt, Homo sapiens
  misc_RNA (1)...(19): siRNA sense strand
ccauugagaaacuaagcaa

SEQ ID NO: 2469464 - RNA, 19 nt, Homo sapiens
  misc_RNA (1)...(19): siRNA sense strand
ccaagggaggccuggacaa

SEQ ID NO: 2469465 - RNA, 19 nt, Homo sapiens
  misc_RNA (1)...(19): siRNA sense strand
gagcaggaguauacccuca

SEQ ID NO: 2469466 - RNA, 19 nt, Homo sapiens
  misc_RNA (1)...(19): siRNA sense strand
cuguuggccaggagaagaa

SEQ ID NO: 2469467 - RNA, 19 nt, Homo sapiens
  misc_RNA (1)...(19): siRNA sense strand
cggauaauggacaugguga

SEQ ID NO: 2469468 - RNA, 19 nt, Homo sapiens
  misc_RNA (1)...(19): siRNA sense strand
uguaaacggauaauggaca

SEQ ID NO: 2469469 - RNA, 19 nt, Homo sapiens
  misc_RNA (1)...(19): siRNA sense strand
ggccaggagaagaaggguu

SEQ ID NO: 2469470 - RNA, 19 nt, Homo sapiens
  misc_RNA (1)...(19): siRNA sense strand
ggacuaaaugugaggcuga

SEQ ID NO: 2469471 - RNA, 19 nt, Homo sapiens
  misc_RNA (1)...(19): siRNA sense strand
ggaacuugaaugugaccaa

SEQ ID NO: 2469472 - RNA, 19 nt, Homo sapiens
  misc_RNA (1)...(19): siRNA sense strand
aggaauggcaaguguguca

SEQ ID NO: 2469473 - RNA, 19 nt, Homo sapiens
  misc_RNA (1)...(19): siRNA sense strand
ccauggucuugaaggaauu

SEQ ID NO: 2469474 - RNA, 19 nt, Homo sapiens
  misc_RNA (1)...(19): siRNA sense strand
augacuuaguaaaggguuu

SEQ ID NO: 2469475 - RNA, 19 nt, Homo sapiens
  misc_RNA (1)...(19): siRNA sense strand
guccauggauucaggccaa

SEQ ID NO: 2469476 - RNA, 19 nt, Homo sapiens
  misc_RNA (1)...(19): siRNA sense strand
acacugaugcacugggcua

SEQ ID NO: 2469477 - RNA, 19 nt, Homo sapiens
  misc_RNA (1)...(19): siRNA sense strand
ugagagacaaagcuggaaa

SEQ ID NO: 2469478 - RNA, 19 nt, Homo sapiens
  misc_RNA (1)...(19): siRNA sense strand
ccacagaauccaaaaucaa

SEQ ID NO: 2469479 - RNA, 19 nt, Homo sapiens
  misc_RNA (1)...(19): siRNA sense strand
agacaaagcuggaaacacc

SEQ ID NO: 2469480 - RNA, 19 nt, Homo sapiens
  misc_RNA (1)...(19): siRNA sense strand
aacaauauugggaggauuu

SEQ ID NO: 2469481 - RNA, 19 nt, Homo sapiens
  misc_RNA (1)...(19): siRNA sense strand
ccuccaaugacgaaggcau

SEQ ID NO: 2469482 - RNA, 19 nt, Homo sapiens
  misc_RNA (1)...(19): siRNA sense strand
cugucuucccugagagaga

SEQ ID NO: 2469483 - RNA, 19 nt, Homo sapiens
  misc_RNA (1)...(19): siRNA sense strand
gcugauaauuggaaagacc

SEQ ID NO: 2469484 - RNA, 19 nt, Homo sapiens
  misc_RNA (1)...(19): siRNA sense strand
ugucaagaucagacgcaga

SEQ ID NO: 2469485 - RNA, 19 nt, Homo sapiens
  misc_RNA (1)...(19): siRNA sense strand
ucuaauaggcccaagguac

SEQ ID NO: 2469486 - RNA, 19 nt, Homo sapiens
  misc_RNA (1)...(19): siRNA sense strand
ccuucauuguccauggauu

SEQ ID NO: 2469487 - RNA, 19 nt, Homo sapiens
  misc_RNA (1)...(19): siRNA sense strand
ggcccaagguacaagcuca

SEQ ID NO: 2469488 - RNA, 19 nt, Homo sapiens
  misc_RNA (1)...(19): siRNA sense strand
uaguaagaccagaaaagua

SEQ ID NO: 2469489 - RNA, 19 nt, Homo sapiens
  misc_RNA (1)...(19): siRNA sense strand
uagccauggucuugaagga

SEQ ID NO: 2469490 - RNA, 19 nt, Homo sapiens
  misc_RNA (1)...(19): siRNA sense strand
gguuuguuggagagaugua

SEQ ID NO: 2469491 - RNA, 19 nt, Homo sapiens
  misc_RNA (1)...(19): siRNA sense strand
ggauauuauaacauggaac

SEQ ID NO: 2469492 - RNA, 19 nt, Homo sapiens
  misc_RNA (1)...(19): siRNA sense strand
gauggaaaacguugaaaca

SEQ ID NO: 2469493 - RNA, 19 nt, Homo sapiens
  misc_RNA (1)...(19): siRNA sense strand
uggaaaacguugaaacagu

SEQ ID NO: 2469494 - RNA, 19 nt, Homo sapiens
  misc_RNA (1)...(19): siRNA sense strand
aggaauuuauugaccagau

SEQ ID NO: 2469495 - RNA, 19 nt, Homo sapiens
  misc_RNA (1)...(19): siRNA sense strand
uguuaagaagagagggaaa

SEQ ID NO: 2469496 - RNA, 19 nt, Homo sapiens
  misc_RNA (1)...(19): siRNA sense strand
uagaagagcuauuggagga

SEQ ID NO: 2469497 - RNA, 19 nt, Homo sapiens
  misc_RNA (1)...(19): siRNA sense strand
auaucaaggcauugcauaa

SEQ ID NO: 2469498 - RNA, 19 nt, Homo sapiens
  misc_RNA (1)...(19): siRNA sense strand
cagcauuagaagagcuauu

SEQ ID NO: 2469499 - RNA, 19 nt, Homo sapiens
  misc_RNA (1)...(19): siRNA sense strand
gggaaaacuggcuuagaaa

SEQ ID NO: 2469500 - RNA, 19 nt, Homo sapiens
  misc_RNA (1)...(19): siRNA sense strand
guuaagaagagagggaaaa

SEQ ID NO: 2469501 - RNA, 19 nt, Homo sapiens
  misc_RNA (1)...(19): siRNA sense strand
uggcagcaggaguggcaua

SEQ ID NO: 2469502 - RNA, 19 nt, Homo sapiens
  misc_RNA (1)...(19): siRNA sense strand
ccagaugaagaucgggcua

SEQ ID NO: 2469503 - RNA, 19 nt, Homo sapiens
  misc_RNA (1)...(19): siRNA sense strand
cugacaaggaucaacaauu

SEQ ID NO: 2469504 - RNA, 19 nt, Homo sapiens
  misc_RNA (1)...(19): siRNA sense strand
gcugauaccuucuaccgua

SEQ ID NO: 2469505 - RNA, 19 nt, Homo sapiens
  misc_RNA (1)...(19): siRNA sense strand
uggcauuccugcuggucau

SEQ ID NO: 2469506 - RNA, 19 nt, Homo sapiens
  misc_RNA (1)...(19): siRNA sense strand
cagcagaugcguuacccua

SEQ ID NO: 2469507 - RNA, 19 nt, Homo sapiens
  misc_RNA (1)...(19): siRNA sense strand
cccagagagaggaugcaaa

SEQ ID NO: 2469508 - RNA, 19 nt, Homo sapiens
  misc_RNA (1)...(19): siRNA sense strand
uaaagaagcaguuggguga

SEQ ID NO: 2469509 - RNA, 19 nt, Homo sapiens
  misc_RNA (1)...(19): siRNA sense strand
guucaagagcauacagcau

SEQ ID NO: 2469510 - RNA, 19 nt, Homo sapiens
  misc_RNA (1)...(19): siRNA sense strand
ucauaacaguauuuggaga

SEQ ID NO: 2469511 - RNA, 19 nt, Homo sapiens
  misc_RNA (1)...(19): siRNA sense strand
uguuggaauugaagaagau

SEQ ID NO: 2469512 - RNA, 19 nt, Homo sapiens
  misc_RNA (1)...(19): siRNA sense strand
acuuaugacccaagcaaca

SEQ ID NO: 2469513 - RNA, 19 nt, Homo sapiens
  misc_RNA (1)...(19): siRNA sense strand
aguuaauggaucaguuaga

SEQ ID NO: 2469514 - RNA, 19 nt, Homo sapiens
  misc_RNA (1)...(19): siRNA sense strand
cuguuggaauugaagaaga

SEQ ID NO: 2469515 - RNA, 19 nt, Homo sapiens
  misc_RNA (1)...(19): siRNA sense strand
guaugaagauguaagcacu

SEQ ID NO: 2469516 - RNA, 19 nt, Homo sapiens
  misc_RNA (1)...(19): siRNA sense strand
uggagaacucacugaugaa

SEQ ID NO: 2469517 - RNA, 19 nt, Homo sapiens
  misc_RNA (1)...(19): siRNA sense strand
acuggaaugaagaucgaua

SEQ ID NO: 2469518 - RNA, 19 nt, Homo sapiens
  misc_RNA (1)...(19): siRNA sense strand
cugacgacaggcagagaau

SEQ ID NO: 2469519 - RNA, 19 nt, Homo sapiens
  misc_RNA (1)...(19): siRNA sense strand
acgcaaugcagacuggaau

SEQ ID NO: 2469520 - RNA, 19 nt, Homo sapiens
  misc_RNA (1)...(19): siRNA sense strand
agcuaauacaccagcagaa

SEQ ID NO: 2469521 - RNA, 19 nt, Homo sapiens
  misc_RNA (1)...(19): siRNA sense strand
cuauacuggaauacagauu

SEQ ID NO: 2469522 - RNA, 19 nt, Homo sapiens
  misc_RNA (1)...(19): siRNA sense strand
cugaugaaaaugugaaaca

SEQ ID NO: 2469523 - RNA, 19 nt, Homo sapiens
  misc_RNA (1)...(19): siRNA sense strand
aggcaacauacauccauaa

SEQ ID NO: 2469524 - RNA, 19 nt, Homo sapiens
  misc_RNA (1)...(19): siRNA sense strand
cuauaaugcccuagagaaa

SEQ ID NO: 2469525 - RNA, 19 nt, Homo sapiens
  misc_RNA (1)...(19): siRNA sense strand
ggaaaagaaaugugugaaa

SEQ ID NO: 2469526 - RNA, 19 nt, Homo sapiens
  misc_RNA (1)...(19): siRNA sense strand
ccucaaagaagaagugaau

SEQ ID NO: 2469527 - RNA, 19 nt, Homo sapiens
  misc_RNA (1)...(19): siRNA sense strand
aauaugaaacugagagcua

SEQ ID NO: 2469528 - RNA, 19 nt, Homo sapiens
  misc_RNA (1)...(19): siRNA sense strand
cucuagauauugagcgaaa

SEQ ID NO: 2469529 - RNA, 19 nt, Homo sapiens
  misc_RNA (1)...(19): siRNA sense strand
cagaaguuaaagaaggaaa

SEQ ID NO: 2469530 - RNA, 19 nt, Homo sapiens
  misc_RNA (1)...(19): siRNA sense strand
uggagaaauuggaagaaca

SEQ ID NO: 2469531 - RNA, 19 nt, Homo sapiens
  misc_RNA (1)...(19): siRNA sense strand
gagcagaagaauggugaaa

SEQ ID NO: 2469532 - RNA, 19 nt, Homo sapiens
  misc_RNA (1)...(19): siRNA sense strand
agaagaagugaaugaacua

SEQ ID NO: 2469533 - RNA, 19 nt, Homo sapiens
  misc_RNA (1)...(19): siRNA sense strand
aagcauuauuugagagcca

SEQ ID NO: 2469534 - RNA, 19 nt, Homo sapiens
  misc_RNA (1)...(19): siRNA sense strand
auaugaaccugaagagaca

SEQ ID NO: 2469535 - RNA, 19 nt, Homo sapiens
  misc_RNA (1)...(19): siRNA sense strand
aagaggagcgagagaaaga

SEQ ID NO: 2469536 - RNA, 19 nt, Homo sapiens
  misc_RNA (1)...(19): siRNA sense strand
cagagaaugaaguuacaaa

SEQ ID NO: 2469537 - RNA, 19 nt, Homo sapiens
  misc_RNA (1)...(19): siRNA sense strand
aggaagugaaugaacuaaa

SEQ ID NO: 2469538 - RNA, 19 nt, Homo sapiens
  misc_RNA (1)...(19): siRNA sense strand
ccauguuggagcagaagaa

SEQ ID NO: 2469539 - RNA, 19 nt, Homo sapiens
  misc_RNA (1)...(19): siRNA sense strand
aaaagaggagcgagagaaa

SEQ ID NO: 2469540 - RNA, 19 nt, Homo sapiens
  misc_RNA (1)...(19): siRNA sense strand
gacugagaguuaugaacaa

SEQ ID NO: 2469541 - RNA, 19 nt, Homo sapiens
  misc_RNA (1)...(19): siRNA sense strand
gguggaagaucgaagggca

SEQ ID NO: 2469542 - RNA, 19 nt, Homo sapiens
  misc_RNA (1)...(19): siRNA sense strand
ggaagaacaacuaagcaga

SEQ ID NO: 2469543 - RNA, 19 nt, Homo sapiens
  misc_RNA (1)...(19): siRNA sense strand
acaaagaaauugaaagcac

SEQ ID NO: 2469544 - RNA, 19 nt, Homo sapiens
  misc_RNA (1)...(19): siRNA sense strand
acuucaagcaaauuggaaa

SEQ ID NO: 2469545 - RNA, 19 nt, Homo sapiens
  misc_RNA (1)...(19): siRNA sense strand
ggggagaaguuuaucgauu

SEQ ID NO: 2469546 - RNA, 19 nt, Homo sapiens
  misc_RNA (1)...(19): siRNA sense strand
cugcgaaugugaagcuauu

SEQ ID NO: 2469547 - RNA, 19 nt, Homo sapiens
  misc_RNA (1)...(19): siRNA sense strand
uaugaaacugagagcuaaa

SEQ ID NO: 2469548 - RNA, 19 nt, Homo sapiens
  misc_RNA (1)...(19): siRNA sense strand
acagaaauggagaguauga

SEQ ID NO: 2469549 - RNA, 19 nt, Homo sapiens
  misc_RNA (1)...(19): siRNA sense strand
gggcagcaauggaacguca

SEQ ID NO: 2469550 - RNA, 19 nt, Homo sapiens
  misc_RNA (1)...(19): siRNA sense strand
gcuaaagaugcauguguca

SEQ ID NO: 2469551 - RNA, 19 nt, Homo sapiens
  misc_RNA (1)...(19): siRNA sense strand
uggauaugcagcugaagaa

SEQ ID NO: 2469552 - RNA, 19 nt, Homo sapiens
  misc_RNA (1)...(19): siRNA sense strand
agaccggcuuaaagaggaa

SEQ ID NO: 2469553 - RNA, 19 nt, Homo sapiens
  misc_RNA (1)...(19): siRNA sense strand
gucgaauguuagaaaguuu

SEQ ID NO: 2469554 - RNA, 19 nt, Homo sapiens
  misc_RNA (1)...(19): siRNA sense strand
aaacugaauuugagcagca

SEQ ID NO: 2469555 - RNA, 19 nt, Homo sapiens
  misc_RNA (1)...(19): siRNA sense strand
gcuggauaacuuaaacaaa

SEQ ID NO: 2469556 - RNA, 19 nt, Homo sapiens
  misc_RNA (1)...(19): siRNA sense strand
cuucaagcaaauuggaaaa

SEQ ID NO: 2469557 - RNA, 19 nt, Homo sapiens
  misc_RNA (1)...(19): siRNA sense strand
gaaauuagaaaucuggaga

SEQ ID NO: 2469558 - RNA, 19 nt, Homo sapiens
  misc_RNA (1)...(19): siRNA sense strand
guccauacagcgaaugaaa

SEQ ID NO: 2469559 - RNA, 19 nt, Homo sapiens
  misc_RNA (1)...(19): siRNA sense strand
acaggaagugaaugaacua

SEQ ID NO: 2469560 - RNA, 19 nt, Homo sapiens
  misc_RNA (1)...(19): siRNA sense strand
ugaaaguggaauuagauga

SEQ ID NO: 2469561 - RNA, 19 nt, Homo sapiens
  misc_RNA (1)...(19): siRNA sense strand
caaagaaauugaaagcacu

SEQ ID NO: 2469562 - RNA, 19 nt, Homo sapiens
  misc_RNA (1)...(19): siRNA sense strand
ucagaggaacugcgcguaa

SEQ ID NO: 2469563 - RNA, 19 nt, Homo sapiens
  misc_RNA (1)...(19): siRNA sense strand
acaagaacagcuagaacuu

SEQ ID NO: 2469564 - RNA, 19 nt, Homo sapiens
  misc_RNA (1)...(19): siRNA sense strand
ggaccaggcacuccagcaa

SEQ ID NO: 2469565 - RNA, 19 nt, Homo sapiens
  misc_RNA (1)...(19): siRNA sense strand
auacagacaagaacagcua

SEQ ID NO: 2469566 - RNA, 19 nt, Homo sapiens
  misc_RNA (1)...(19): siRNA sense strand
cguaaugaaaugaugacca

SEQ ID NO: 2469567 - RNA, 19 nt, Homo sapiens
  misc_RNA (1)...(19): siRNA sense strand
gcugaagaaggaaaagaaa

SEQ ID NO: 2469568 - RNA, 19 nt, Homo sapiens
  misc_RNA (1)...(19): siRNA sense strand
uugccauguuggagcagaa

SEQ ID NO: 2469569 - RNA, 19 nt, Homo sapiens
  misc_RNA (1)...(19): siRNA sense strand
cugaagagacaguugaagu

SEQ ID NO: 2469570 - RNA, 19 nt, Homo sapiens
  misc_RNA (1)...(19): siRNA sense strand
gaaaguuugagcugcgaau

SEQ ID NO: 2469571 - RNA, 19 nt, Homo sapiens
  misc_RNA (1)...(19): siRNA sense strand
gugaaaagcagcugaagca

SEQ ID NO: 2469572 - RNA, 19 nt, Homo sapiens
  misc_RNA (1)...(19): siRNA sense strand
acuacaauacagacaagaa

SEQ ID NO: 2469573 - RNA, 19 nt, Homo sapiens
  misc_RNA (1)...(19): siRNA sense strand
cucagaaagaggagacaca

SEQ ID NO: 2469574 - RNA, 19 nt, Homo sapiens
  misc_RNA (1)...(19): siRNA sense strand
gcguaaugucugaacgugu

SEQ ID NO: 2469575 - RNA, 19 nt, Homo sapiens
  misc_RNA (1)...(19): siRNA sense strand
ucgauuaccgccucagaaa

SEQ ID NO: 2469576 - RNA, 19 nt, Homo sapiens
  misc_RNA (1)...(19): siRNA sense strand
acgcugaggccuuaaguga

SEQ ID NO: 2469577 - RNA, 19 nt, Homo sapiens
  misc_RNA (1)...(19): siRNA sense strand
cagccgaaggagaaaugaa

SEQ ID NO: 2469578 - RNA, 19 nt, Homo sapiens
  misc_RNA (1)...(19): siRNA sense strand
aaagaagccuccaugguca

SEQ ID NO: 2469579 - RNA, 19 nt, Homo sapiens
  misc_RNA (1)...(19): siRNA sense strand
gcaaggaaucauaggggca

SEQ ID NO: 2469580 - RNA, 19 nt, Homo sapiens
  misc_RNA (1)...(19): siRNA sense strand
cagccgaaggagaaaugaa

SEQ ID NO: 2469581 - RNA, 19 nt, Homo sapiens
  misc_RNA (1)...(19): siRNA sense strand
aaagaagccuccaugguca

SEQ ID NO: 2469582 - RNA, 19 nt, Homo sapiens
  misc_RNA (1)...(19): siRNA sense strand
gcaaggaaucauaggggca

SEQ ID NO: 2469583 - RNA, 19 nt, Homo sapiens
  misc_RNA (1)...(19): siRNA sense strand
cggcauaugcugcggcuga

SEQ ID NO: 2469584 - RNA, 19 nt, Homo sapiens
  misc_RNA (1)...(19): siRNA sense strand
acaugaaggcccacgggaa

SEQ ID NO: 2469585 - RNA, 19 nt, Homo sapiens
  misc_RNA (1)...(19): siRNA sense strand
ccagagacuucgagggccu

SEQ ID NO: 2469586 - RNA, 19 nt, Homo sapiens
  misc_RNA (1)...(19): siRNA sense strand
acaccagccaggagaucaa

SEQ ID NO: 2469587 - RNA, 19 nt, Homo sapiens
  misc_RNA (1)...(19): siRNA sense strand
gcugcaaaugggugcuaau

SEQ ID NO: 2469588 - RNA, 19 nt, Homo sapiens
  misc_RNA (1)...(19): siRNA sense strand
cggcauaugcugcggcuga

SEQ ID NO: 2469589 - RNA, 19 nt, Homo sapiens
  misc_RNA (1)...(19): siRNA sense strand
acaugaaggcccacgggaa

SEQ ID NO: 2469590 - RNA, 19 nt, Homo sapiens
  misc_RNA (1)...(19): siRNA sense strand
ccagagacuucgagggccu

SEQ ID NO: 2469591 - RNA, 19 nt, Homo sapiens
  misc_RNA (1)...(19): siRNA sense strand
acaccagccaggagaucaa

SEQ ID NO: 2469592 - RNA, 19 nt, Homo sapiens
  misc_RNA (1)...(19): siRNA sense strand
gcugcaaaugggugcuaau

SEQ ID NO: 2469593 - RNA, 19 nt, Homo sapiens
  misc_RNA (1)...(19): siRNA sense strand
ccaacaaggaggcggaaaa

SEQ ID NO: 2469594 - RNA, 19 nt, Homo sapiens
  misc_RNA (1)...(19): siRNA sense strand
cagcagguggacaggauca

SEQ ID NO: 2469595 - RNA, 19 nt, Homo sapiens
  misc_RNA (1)...(19): siRNA sense strand
ugggcaagcuggaagagaa

SEQ ID NO: 2469596 - RNA, 19 nt, Homo sapiens
  misc_RNA (1)...(19): siRNA sense strand
aggagaaggaggaggagga

SEQ ID NO: 2469597 - RNA, 19 nt, Homo sapiens
  misc_RNA (1)...(19): siRNA sense strand
caugaagagaucagugcaa

SEQ ID NO: 2469598 - RNA, 19 nt, Homo sapiens
  misc_RNA (1)...(19): siRNA sense strand
agaaggaggaggaggagga

SEQ ID NO: 2469599 - RNA, 19 nt, Homo sapiens
  misc_RNA (1)...(19): siRNA sense strand
gagaggagaaggaggagga

SEQ ID NO: 2469600 - RNA, 19 nt, Homo sapiens
  misc_RNA (1)...(19): siRNA sense strand
caggaguggugcaggcaga

SEQ ID NO: 2469601 - RNA, 19 nt, Homo sapiens
  misc_RNA (1)...(19): siRNA sense strand
aggaggaggaggaggagga

SEQ ID NO: 2469602 - RNA, 19 nt, Homo sapiens
  misc_RNA (1)...(19): siRNA sense strand
acagagaggagaaggagga

SEQ ID NO: 2469603 - RNA, 19 nt, Homo sapiens
  misc_RNA (1)...(19): siRNA sense strand
agaugaaggcgcugaugau

SEQ ID NO: 2469604 - RNA, 19 nt, Homo sapiens
  misc_RNA (1)...(19): siRNA sense strand
gcaagcuggaagagaagau

SEQ ID NO: 2469605 - RNA, 19 nt, Homo sapiens
  misc_RNA (1)...(19): siRNA sense strand
accagcagaucgugggcaa

SEQ ID NO: 2469606 - RNA, 19 nt, Homo sapiens
  misc_RNA (1)...(19): siRNA sense strand
gggcaagcuggaagagaag

SEQ ID NO: 2469607 - RNA, 19 nt, Homo sapiens
  misc_RNA (1)...(19): siRNA sense strand
gagcagucccugacggagu

SEQ ID NO: 2469608 - RNA, 19 nt, Homo sapiens
  misc_RNA (1)...(19): siRNA sense strand
cgcugaugauggagaagga

SEQ ID NO: 2469609 - RNA, 19 nt, Homo sapiens
  misc_RNA (1)...(19): siRNA sense strand
aggaccugcuauugaguga

SEQ ID NO: 2469610 - RNA, 19 nt, Homo sapiens
  misc_RNA (1)...(19): siRNA sense strand
acacacacgcugccugaua

SEQ ID NO: 2469611 - RNA, 19 nt, Homo sapiens
  misc_RNA (1)...(19): siRNA sense strand
gugucaucguuguguguua

SEQ ID NO: 2469612 - RNA, 19 nt, Homo sapiens
  misc_RNA (1)...(19): siRNA sense strand
agaagaaaugguacugaaa

SEQ ID NO: 2469613 - RNA, 19 nt, Homo sapiens
  misc_RNA (1)...(19): siRNA sense strand
aagaaaugguacugaaagu

SEQ ID NO: 2469614 - RNA, 19 nt, Homo sapiens
  misc_RNA (1)...(19): siRNA sense strand
caugaaagaaagagaugau

SEQ ID NO: 2469615 - RNA, 19 nt, Homo sapiens
  misc_RNA (1)...(19): siRNA sense strand
ugaggaaaauggagaaaau

SEQ ID NO: 2469616 - RNA, 19 nt, Homo sapiens
  misc_RNA (1)...(19): siRNA sense strand
agaugaaaucacagaugaa

SEQ ID NO: 2469617 - RNA, 19 nt, Homo sapiens
  misc_RNA (1)...(19): siRNA sense strand
caacaggucugaaugggaa

SEQ ID NO: 2469618 - RNA, 19 nt, Homo sapiens
  misc_RNA (1)...(19): siRNA sense strand
cagaugauaauguggaaau

SEQ ID NO: 2469619 - RNA, 19 nt, Homo sapiens
  misc_RNA (1)...(19): siRNA sense strand
cccauuacccagaggcaua

SEQ ID NO: 2469620 - RNA, 19 nt, Homo sapiens
  misc_RNA (1)...(19): siRNA sense strand
gugauuucuuagagaugaa

SEQ ID NO: 2469621 - RNA, 19 nt, Homo sapiens
  misc_RNA (1)...(19): siRNA sense strand
ggaaaauggagaaaaucaa

SEQ ID NO: 2469622 - RNA, 19 nt, Homo sapiens
  misc_RNA (1)...(19): siRNA sense strand
cuacagaauuuuagagaac

SEQ ID NO: 2469623 - RNA, 19 nt, Homo sapiens
  misc_RNA (1)...(19): siRNA sense strand
acauaaucauggaugcaau

SEQ ID NO: 2469624 - RNA, 19 nt, Homo sapiens
  misc_RNA (1)...(19): siRNA sense strand
aggugguugcaaagggaaa

SEQ ID NO: 2469625 - RNA, 19 nt, Homo sapiens
  misc_RNA (1)...(19): siRNA sense strand
aucagaagaucauggacaa

SEQ ID NO: 2469626 - RNA, 19 nt, Homo sapiens
  misc_RNA (1)...(19): siRNA sense strand
uaacuuagaaucaaggcaa

SEQ ID NO: 2469627 - RNA, 19 nt, Homo sapiens
  misc_RNA (1)...(19): siRNA sense strand
agagaugaauuuuggagua

SEQ ID NO: 2469628 - RNA, 19 nt, Homo sapiens
  misc_RNA (1)...(19): siRNA sense strand
ugauuaugcaccagaugaa

SEQ ID NO: 2469629 - RNA, 19 nt, Homo sapiens
  misc_RNA (1)...(19): siRNA sense strand
uaauaaauacagagaccca

SEQ ID NO: 2469630 - RNA, 19 nt, Homo sapiens
  misc_RNA (1)...(19): siRNA sense strand
uaucagaagaucauggaca

SEQ ID NO: 2469631 - RNA, 19 nt, Homo sapiens
  misc_RNA (1)...(19): siRNA sense strand
cugaagaagaaaugguacu

SEQ ID NO: 2469632 - RNA, 19 nt, Homo sapiens
  misc_RNA (1)...(19): siRNA sense strand
aacuuagaaucaaggcaaa

SEQ ID NO: 2469633 - RNA, 19 nt, Homo sapiens
  misc_RNA (1)...(19): siRNA sense strand
gaugaauuuuggaguacua

SEQ ID NO: 2469634 - RNA, 19 nt, Homo sapiens
  misc_RNA (1)...(19): siRNA sense strand
agugagauuacaucaguua

SEQ ID NO: 2469635 - RNA, 19 nt, Homo sapiens
  misc_RNA (1)...(19): siRNA sense strand
cgaguuacggagagaaaau

SEQ ID NO: 2469636 - RNA, 19 nt, Homo sapiens
  misc_RNA (1)...(19): siRNA sense strand
uggaucagagguagagauu

SEQ ID NO: 2469637 - RNA, 19 nt, Homo sapiens
  misc_RNA (1)...(19): siRNA sense strand
acuagaggaucccgggaca

SEQ ID NO: 2469638 - RNA, 19 nt, Homo sapiens
  misc_RNA (1)...(19): siRNA sense strand
uuggaaaggcgaaggaucu

SEQ ID NO: 2469639 - RNA, 19 nt, Homo sapiens
  misc_RNA (1)...(19): siRNA sense strand
gaaauguugucgaacgguu

SEQ ID NO: 2469640 - RNA, 19 nt, Homo sapiens
  misc_RNA (1)...(19): siRNA sense strand
aguagcagaguuugggcaa

SEQ ID NO: 2469641 - RNA, 19 nt, Homo sapiens
  misc_RNA (1)...(19): siRNA sense strand
augaaauaaucccguguca

SEQ ID NO: 2469642 - RNA, 19 nt, Homo sapiens
  misc_RNA (1)...(19): siRNA sense strand
cugccucauuugauugaaa

SEQ ID NO: 2469643 - RNA, 19 nt, Homo sapiens
  misc_RNA (1)...(19): siRNA sense strand
aggaaaauggagaaaauca

SEQ ID NO: 2469644 - RNA, 19 nt, Homo sapiens
  misc_RNA (1)...(19): siRNA sense strand
ggucugaaugggaagaagu

SEQ ID NO: 2469645 - RNA, 19 nt, Homo sapiens
  misc_RNA (1)...(19): siRNA sense strand
aagaaagagaugauggaag

SEQ ID NO: 2469646 - RNA, 19 nt, Homo sapiens
  misc_RNA (1)...(19): siRNA sense strand
aggcauauacuauccagaa

SEQ ID NO: 2469647 - RNA, 19 nt, Homo sapiens
  misc_RNA (1)...(19): siRNA sense strand
uguucuuggaucagaggua

SEQ ID NO: 2469648 - RNA, 19 nt, Homo sapiens
  misc_RNA (1)...(19): siRNA sense strand
uucacaaaacugaggaaaa

SEQ ID NO: 2469649 - RNA, 19 nt, Homo sapiens
  misc_RNA (1)...(19): siRNA sense strand
ucagaagaucauggacaaa

SEQ ID NO: 2469650 - RNA, 19 nt, Homo sapiens
  misc_RNA (1)...(19): siRNA sense strand
ggacauuaaaagucucuua

SEQ ID NO: 2469651 - RNA, 19 nt, Homo sapiens
  misc_RNA (1)...(19): siRNA sense strand
gugucaucguuguguguua

SEQ ID NO: 2469652 - RNA, 19 nt, Homo sapiens
  misc_RNA (1)...(19): siRNA sense strand
agaagaaaugguacugaaa

SEQ ID NO: 2469653 - RNA, 19 nt, Homo sapiens
  misc_RNA (1)...(19): siRNA sense strand
aagaaaugguacugaaagu

SEQ ID NO: 2469654 - RNA, 19 nt, Homo sapiens
  misc_RNA (1)...(19): siRNA sense strand
caugaaagaaagagaugau

SEQ ID NO: 2469655 - RNA, 19 nt, Homo sapiens
  misc_RNA (1)...(19): siRNA sense strand
ugaggaaaauggagaaaau

SEQ ID NO: 2469656 - RNA, 19 nt, Homo sapiens
  misc_RNA (1)...(19): siRNA sense strand
agaugaaaucacagaugaa

SEQ ID NO: 2469657 - RNA, 19 nt, Homo sapiens
  misc_RNA (1)...(19): siRNA sense strand
caacaggucugaaugggaa

SEQ ID NO: 2469658 - RNA, 19 nt, Homo sapiens
  misc_RNA (1)...(19): siRNA sense strand
cagaugauaauguggaaau

SEQ ID NO: 2469659 - RNA, 19 nt, Homo sapiens
  misc_RNA (1)...(19): siRNA sense strand
cccauuacccagaggcaua

SEQ ID NO: 2469660 - RNA, 19 nt, Homo sapiens
  misc_RNA (1)...(19): siRNA sense strand
gugauuucuuagagaugaa

SEQ ID NO: 2469661 - RNA, 19 nt, Homo sapiens
  misc_RNA (1)...(19): siRNA sense strand
ggaaaauggagaaaaucaa

SEQ ID NO: 2469662 - RNA, 19 nt, Homo sapiens
  misc_RNA (1)...(19): siRNA sense strand
cuacagaauuuuagagaac

SEQ ID NO: 2469663 - RNA, 19 nt, Homo sapiens
  misc_RNA (1)...(19): siRNA sense strand
acauaaucauggaugcaau

SEQ ID NO: 2469664 - RNA, 19 nt, Homo sapiens
  misc_RNA (1)...(19): siRNA sense strand
aggugguugcaaagggaaa

SEQ ID NO: 2469665 - RNA, 19 nt, Homo sapiens
  misc_RNA (1)...(19): siRNA sense strand
aucagaagaucauggacaa

SEQ ID NO: 2469666 - RNA, 19 nt, Homo sapiens
  misc_RNA (1)...(19): siRNA sense strand
uaacuuagaaucaaggcaa

SEQ ID NO: 2469667 - RNA, 19 nt, Homo sapiens
  misc_RNA (1)...(19): siRNA sense strand
agagaugaauuuuggagua

SEQ ID NO: 2469668 - RNA, 19 nt, Homo sapiens
  misc_RNA (1)...(19): siRNA sense strand
ugauuaugcaccagaugaa

SEQ ID NO: 2469669 - RNA, 19 nt, Homo sapiens
  misc_RNA (1)...(19): siRNA sense strand
uaauaaauacagagaccca

SEQ ID NO: 2469670 - RNA, 19 nt, Homo sapiens
  misc_RNA (1)...(19): siRNA sense strand
uaucagaagaucauggaca

SEQ ID NO: 2469671 - RNA, 19 nt, Homo sapiens
  misc_RNA (1)...(19): siRNA sense strand
cugaagaagaaaugguacu

SEQ ID NO: 2469672 - RNA, 19 nt, Homo sapiens
  misc_RNA (1)...(19): siRNA sense strand
aacuuagaaucaaggcaaa

SEQ ID NO: 2469673 - RNA, 19 nt, Homo sapiens
  misc_RNA (1)...(19): siRNA sense strand
gaugaauuuuggaguacua

SEQ ID NO: 2469674 - RNA, 19 nt, Homo sapiens
  misc_RNA (1)...(19): siRNA sense strand
agugagauuacaucaguua

SEQ ID NO: 2469675 - RNA, 19 nt, Homo sapiens
  misc_RNA (1)...(19): siRNA sense strand
cgaguuacggagagaaaau

SEQ ID NO: 2469676 - RNA, 19 nt, Homo sapiens
  misc_RNA (1)...(19): siRNA sense strand
uggaucagagguagagauu

SEQ ID NO: 2469677 - RNA, 19 nt, Homo sapiens
  misc_RNA (1)...(19): siRNA sense strand
acuagaggaucccgggaca

SEQ ID NO: 2469678 - RNA, 19 nt, Homo sapiens
  misc_RNA (1)...(19): siRNA sense strand
uuggaaaggcgaaggaucu

SEQ ID NO: 2469679 - RNA, 19 nt, Homo sapiens
  misc_RNA (1)...(19): siRNA sense strand
gaaauguugucgaacgguu

SEQ ID NO: 2469680 - RNA, 19 nt, Homo sapiens
  misc_RNA (1)...(19): siRNA sense strand
aguagcagaguuugggcaa

SEQ ID NO: 2469681 - RNA, 19 nt, Homo sapiens
  misc_RNA (1)...(19): siRNA sense strand
augaaauaaucccguguca

SEQ ID NO: 2469682 - RNA, 19 nt, Homo sapiens
  misc_RNA (1)...(19): siRNA sense strand
cugccucauuugauugaaa

SEQ ID NO: 2469683 - RNA, 19 nt, Homo sapiens
  misc_RNA (1)...(19): siRNA sense strand
aggaaaauggagaaaauca

SEQ ID NO: 2469684 - RNA, 19 nt, Homo sapiens
  misc_RNA (1)...(19): siRNA sense strand
ggucugaaugggaagaagu

SEQ ID NO: 2469685 - RNA, 19 nt, Homo sapiens
  misc_RNA (1)...(19): siRNA sense strand
aagaaagagaugauggaag

SEQ ID NO: 2469686 - RNA, 19 nt, Homo sapiens
  misc_RNA (1)...(19): siRNA sense strand
aggcauauacuauccagaa

SEQ ID NO: 2469687 - RNA, 19 nt, Homo sapiens
  misc_RNA (1)...(19): siRNA sense strand
uguucuuggaucagaggua

SEQ ID NO: 2469688 - RNA, 19 nt, Homo sapiens
  misc_RNA (1)...(19): siRNA sense strand
uucacaaaacugaggaaaa

SEQ ID NO: 2469689 - RNA, 19 nt, Homo sapiens
  misc_RNA (1)...(19): siRNA sense strand
ucagaagaucauggacaaa

SEQ ID NO: 2469690 - RNA, 19 nt, Homo sapiens
  misc_RNA (1)...(19): siRNA sense strand
ggacauuaaaagucucuua

SEQ ID NO: 2469691 - RNA, 19 nt, Homo sapiens
  misc_RNA (1)...(19): siRNA sense strand
aggaagaugaggaggacaa

SEQ ID NO: 2469692 - RNA, 19 nt, Homo sapiens
  misc_RNA (1)...(19): siRNA sense strand
cgauaaagauagcggguuc

SEQ ID NO: 2469693 - RNA, 19 nt, Homo sapiens
  misc_RNA (1)...(19): siRNA sense strand
gagagaaaagcaagagaaa

SEQ ID NO: 2469694 - RNA, 19 nt, Homo sapiens
  misc_RNA (1)...(19): siRNA sense strand
aagaagaugaagaggaaga

SEQ ID NO: 2469695 - RNA, 19 nt, Homo sapiens
  misc_RNA (1)...(19): siRNA sense strand
cuggaaaccaacagguaua

SEQ ID NO: 2469696 - RNA, 19 nt, Homo sapiens
  misc_RNA (1)...(19): siRNA sense strand
gagaaaucuacguggaaaa

SEQ ID NO: 2469697 - RNA, 19 nt, Homo sapiens
  misc_RNA (1)...(19): siRNA sense strand
gcaugaaacuagugcagca

SEQ ID NO: 2469698 - RNA, 19 nt, Homo sapiens
  misc_RNA (1)...(19): siRNA sense strand
uggaacggauaaagagcaa

SEQ ID NO: 2469699 - RNA, 19 nt, Homo sapiens
  misc_RNA (1)...(19): siRNA sense strand
caaccagaucuuugaggaa

SEQ ID NO: 2469700 - RNA, 19 nt, Homo sapiens
  misc_RNA (1)...(19): siRNA sense strand
ggauaaagagcaagaaccu

SEQ ID NO: 2469701 - RNA, 19 nt, Homo sapiens
  misc_RNA (1)...(19): siRNA sense strand
ggguggaagaagaugaaga

SEQ ID NO: 2469702 - RNA, 19 nt, Homo sapiens
  misc_RNA (1)...(19): siRNA sense strand
cugugaacauccagcggaa

SEQ ID NO: 2469703 - RNA, 19 nt, Homo sapiens
  misc_RNA (1)...(19): siRNA sense strand
aggguaugauggaaagauu

SEQ ID NO: 2469704 - RNA, 19 nt, Homo sapiens
  misc_RNA (1)...(19): siRNA sense strand
ccacugaauuggaacggau

SEQ ID NO: 2469705 - RNA, 19 nt, Homo sapiens
  misc_RNA (1)...(19): siRNA sense strand
ucucggaagaggagcacaa

SEQ ID NO: 2469706 - RNA, 19 nt, Homo sapiens
  misc_RNA (1)...(19): siRNA sense strand
uggaagaagaugaagagga

SEQ ID NO: 2469707 - RNA, 19 nt, Homo sapiens
  misc_RNA (1)...(19): siRNA sense strand
aagaugaggaggacaagaa

SEQ ID NO: 2469708 - RNA, 19 nt, Homo sapiens
  misc_RNA (1)...(19): siRNA sense strand
ccauaaacuccaugugguu

SEQ ID NO: 2469709 - RNA, 19 nt, Homo sapiens
  misc_RNA (1)...(19): siRNA sense strand
aggauuuaagcgaggguau

SEQ ID NO: 2469710 - RNA, 19 nt, Homo sapiens
  misc_RNA (1)...(19): siRNA sense strand
ugaaaagguggcaguaaaa

SEQ ID NO: 2469711 - RNA, 19 nt, Homo sapiens
  misc_RNA (1)...(19): siRNA sense strand
agacuuaaaaccagagaau

SEQ ID NO: 2469712 - RNA, 19 nt, Homo sapiens
  misc_RNA (1)...(19): siRNA sense strand
gggacauagcggaucgaga

SEQ ID NO: 2469713 - RNA, 19 nt, Homo sapiens
  misc_RNA (1)...(19): siRNA sense strand
agccaaugacagugaaaca

SEQ ID NO: 2469714 - RNA, 19 nt, Homo sapiens
  misc_RNA (1)...(19): siRNA sense strand
guguaaagaccuaaucaca

SEQ ID NO: 2469715 - RNA, 19 nt, Homo sapiens
  misc_RNA (1)...(19): siRNA sense strand
uguucaggguggaagaaga

SEQ ID NO: 2469716 - RNA, 19 nt, Homo sapiens
  misc_RNA (1)...(19): siRNA sense strand
aagaugaagaggaagauga

SEQ ID NO: 2469717 - RNA, 19 nt, Homo sapiens
  misc_RNA (1)...(19): siRNA sense strand
ggauuauaugaucuggaua

SEQ ID NO: 2469718 - RNA, 19 nt, Homo sapiens
  misc_RNA (1)...(19): siRNA sense strand
aguuugacauggaugagaa

SEQ ID NO: 2469719 - RNA, 19 nt, Homo sapiens
  misc_RNA (1)...(19): siRNA sense strand
acuuaaaaccagagaaugu

SEQ ID NO: 2469720 - RNA, 19 nt, Homo sapiens
  misc_RNA (1)...(19): siRNA sense strand
aagaggaagaugaggagga

SEQ ID NO: 2469721 - RNA, 19 nt, Homo sapiens
  misc_RNA (1)...(19): siRNA sense strand
cagcuaccucugugcgaaa

SEQ ID NO: 2469722 - RNA, 19 nt, Homo sapiens
  misc_RNA (1)...(19): siRNA sense strand
cagagagaucccaagagaa

SEQ ID NO: 2469723 - RNA, 19 nt, Homo sapiens
  misc_RNA (1)...(19): siRNA sense strand
caagagaaaucuacgugga

SEQ ID NO: 2469724 - RNA, 19 nt, Homo sapiens
  misc_RNA (1)...(19): siRNA sense strand
cugaauuggaacggauaaa

SEQ ID NO: 2469725 - RNA, 19 nt, Homo sapiens
  misc_RNA (1)...(19): siRNA sense strand
cuuguaaaguugacagacu

SEQ ID NO: 2469726 - RNA, 19 nt, Homo sapiens
  misc_RNA (1)...(19): siRNA sense strand
agaaagaaauacagaccag

SEQ ID NO: 2469727 - RNA, 19 nt, Homo sapiens
  misc_RNA (1)...(19): siRNA sense strand
ugagcagguuaaagaugaa

SEQ ID NO: 2469728 - RNA, 19 nt, Homo sapiens
  misc_RNA (1)...(19): siRNA sense strand
auaaagagcaagaaccuga

SEQ ID NO: 2469729 - RNA, 19 nt, Homo sapiens
  misc_RNA (1)...(19): siRNA sense strand
cccaaguugagcagguuaa

SEQ ID NO: 2469730 - RNA, 19 nt, Homo sapiens
  misc_RNA (1)...(19): siRNA sense strand
ugaaaguccaagagaaauc

SEQ ID NO: 2469731 - RNA, 19 nt, Homo sapiens
  misc_RNA (1)...(19): siRNA sense strand
agacaaaacuggacacucu

SEQ ID NO: 2469732 - RNA, 19 nt, Homo sapiens
  misc_RNA (1)...(19): siRNA sense strand
ugaaacaugaggagggucu

SEQ ID NO: 2469733 - RNA, 19 nt, Homo sapiens
  misc_RNA (1)...(19): siRNA sense strand
guacaguucacaaacgcua

SEQ ID NO: 2469734 - RNA, 19 nt, Homo sapiens
  misc_RNA (1)...(19): siRNA sense strand
cauuagcuccacagggaau

SEQ ID NO: 2469735 - RNA, 19 nt, Homo sapiens
  misc_RNA (1)...(19): siRNA sense strand
augaagaggaagaugagga

SEQ ID NO: 2469736 - RNA, 19 nt, Homo sapiens
  misc_RNA (1)...(19): siRNA sense strand
aagagaaaucuacguggaa

SEQ ID NO: 2469737 - RNA, 19 nt, Homo sapiens
  misc_RNA (1)...(19): siRNA sense strand
gaauauagcuucuccaggu

SEQ ID NO: 2469738 - RNA, 19 nt, Homo sapiens
  misc_RNA (1)...(19): siRNA sense strand
gggaugaaggagauauguu

SEQ ID NO: 2469739 - RNA, 19 nt, Homo sapiens
  misc_RNA (1)...(19): siRNA sense strand
gaagccaaugacagugaaa

SEQ ID NO: 2469740 - RNA, 19 nt, Homo sapiens
  misc_RNA (1)...(19): siRNA sense strand
cugacaaugaucauggauu

SEQ ID NO: 2469741 - RNA, 19 nt, Homo sapiens
  misc_RNA (1)...(19): siRNA sense strand
cacggaugcuacagagaga

SEQ ID NO: 2469742 - RNA, 19 nt, Homo sapiens
  misc_RNA (1)...(19): siRNA sense strand
agcaagagaaagaaauaca

SEQ ID NO: 2469743 - RNA, 19 nt, Homo sapiens
  misc_RNA (1)...(19): siRNA sense strand
gugacucagcuaagaaaga

SEQ ID NO: 2469744 - RNA, 19 nt, Homo sapiens
  misc_RNA (1)...(19): siRNA sense strand
guucaggguggaagaagau

SEQ ID NO: 2469745 - RNA, 19 nt, Homo sapiens
  misc_RNA (1)...(19): siRNA sense strand
uugcaaauauacaguacca

SEQ ID NO: 2469746 - RNA, 19 nt, Homo sapiens
  misc_RNA (1)...(19): siRNA sense strand
uuaaugaagacuugcccaa

SEQ ID NO: 2469747 - RNA, 19 nt, Homo sapiens
  misc_RNA (1)...(19): siRNA sense strand
aaguugagcagguuaaaga

SEQ ID NO: 2469748 - RNA, 19 nt, Homo sapiens
  misc_RNA (1)...(19): siRNA sense strand
ucugcuuggugaugaguau

SEQ ID NO: 2469749 - RNA, 19 nt, Homo sapiens
  misc_RNA (1)...(19): siRNA sense strand
cguauaugggagaagagaa

SEQ ID NO: 2469750 - RNA, 19 nt, Homo sapiens
  misc_RNA (1)...(19): siRNA sense strand
gggacgaaucacagagguu

SEQ ID NO: 2469751 - RNA, 19 nt, Homo sapiens
  misc_RNA (1)...(19): siRNA sense strand
aaauaauggaggagauugu

SEQ ID NO: 2469752 - RNA, 19 nt, Homo sapiens
  misc_RNA (1)...(19): siRNA sense strand
gauacaaucacuacggaca

SEQ ID NO: 2469753 - RNA, 19 nt, Homo sapiens
  misc_RNA (1)...(19): siRNA sense strand
gugcugagguccaggcagu

SEQ ID NO: 2469754 - RNA, 19 nt, Homo sapiens
  misc_RNA (1)...(19): siRNA sense strand
cagaagagguggaaggugg

SEQ ID NO: 2469755 - RNA, 19 nt, Homo sapiens
  misc_RNA (1)...(19): siRNA sense strand
cugguaacucagaggauga

SEQ ID NO: 2469756 - RNA, 19 nt, Homo sapiens
  misc_RNA (1)...(19): siRNA sense strand
uuuuggaacaggagggaua

SEQ ID NO: 2469757 - RNA, 19 nt, Homo sapiens
  misc_RNA (1)...(19): siRNA sense strand
caacagaagagguggaagg

SEQ ID NO: 2469758 - RNA, 19 nt, Homo sapiens
  misc_RNA (1)...(19): siRNA sense strand
gagccugaaauauggaaaa

SEQ ID NO: 2469759 - RNA, 19 nt, Homo sapiens
  misc_RNA (1)...(19): siRNA sense strand
uugcaaaccuggagccugu

SEQ ID NO: 2469760 - RNA, 19 nt, Homo sapiens
  misc_RNA (1)...(19): siRNA sense strand
agccagaaauaauggagga

SEQ ID NO: 2469761 - RNA, 19 nt, Homo sapiens
  misc_RNA (1)...(19): siRNA sense strand
acccaacaccugagcacaa

SEQ ID NO: 2469762 - RNA, 19 nt, Homo sapiens
  misc_RNA (1)...(19): siRNA sense strand
cuguggagagaguaaacaa

SEQ ID NO: 2469763 - RNA, 19 nt, Homo sapiens
  misc_RNA (1)...(19): siRNA sense strand
guucaacagaagaggugga

SEQ ID NO: 2469764 - RNA, 19 nt, Homo sapiens
  misc_RNA (1)...(19): siRNA sense strand
gcuaagaaauuuaaggaca

SEQ ID NO: 2469765 - RNA, 19 nt, Homo sapiens
  misc_RNA (1)...(19): siRNA sense strand
acauaaaggaagagaccua

SEQ ID NO: 2469766 - RNA, 19 nt, Homo sapiens
  misc_RNA (1)...(19): siRNA sense strand
agaauuggguugugagcaa

SEQ ID NO: 2469767 - RNA, 19 nt, Homo sapiens
  misc_RNA (1)...(19): siRNA sense strand
aggaacaggaagagguaaa

SEQ ID NO: 2469768 - RNA, 19 nt, Homo sapiens
  misc_RNA (1)...(19): siRNA sense strand
aagagaaaccugaggaaau

SEQ ID NO: 2469769 - RNA, 19 nt, Homo sapiens
  misc_RNA (1)...(19): siRNA sense strand
gugaaagagucuaugggua

SEQ ID NO: 2469770 - RNA, 19 nt, Homo sapiens
  misc_RNA (1)...(19): siRNA sense strand
gugaagaggaacaggaaga

SEQ ID NO: 2469771 - RNA, 19 nt, Homo sapiens
  misc_RNA (1)...(19): siRNA sense strand
gagaaugaugauugcgaaa

SEQ ID NO: 2469772 - RNA, 19 nt, Homo sapiens
  misc_RNA (1)...(19): siRNA sense strand
aggaagagguaaaugaaaa

SEQ ID NO: 2469773 - RNA, 19 nt, Homo sapiens
  misc_RNA (1)...(19): siRNA sense strand
cugaagaugaauugagaau

SEQ ID NO: 2469774 - RNA, 19 nt, Homo sapiens
  misc_RNA (1)...(19): siRNA sense strand
uguuagaaggagaggagaa

SEQ ID NO: 2469775 - RNA, 19 nt, Homo sapiens
  misc_RNA (1)...(19): siRNA sense strand
gcuauggaucugaaagaaa

SEQ ID NO: 2469776 - RNA, 19 nt, Homo sapiens
  misc_RNA (1)...(19): siRNA sense strand
cagcaaaagcuaagaaaga

SEQ ID NO: 2469777 - RNA, 19 nt, Homo sapiens
  misc_RNA (1)...(19): siRNA sense strand
ccugaggugucuaaagaaa

SEQ ID NO: 2469778 - RNA, 19 nt, Homo sapiens
  misc_RNA (1)...(19): siRNA sense strand
gggaggaagcugagaaacu

SEQ ID NO: 2469779 - RNA, 19 nt, Homo sapiens
  misc_RNA (1)...(19): siRNA sense strand
gaugauaagccaaaagaaa

SEQ ID NO: 2469780 - RNA, 19 nt, Homo sapiens
  misc_RNA (1)...(19): siRNA sense strand
acuucaagguucugacuua

SEQ ID NO: 2469781 - RNA, 19 nt, Homo sapiens
  misc_RNA (1)...(19): siRNA sense strand
aaagaaaacugcugaggaa

SEQ ID NO: 2469782 - RNA, 19 nt, Homo sapiens
  misc_RNA (1)...(19): siRNA sense strand
cugaaggaggugaggagua

SEQ ID NO: 2469783 - RNA, 19 nt, Homo sapiens
  misc_RNA (1)...(19): siRNA sense strand
gggcauaagaauuggguug

SEQ ID NO: 2469784 - RNA, 19 nt, Homo sapiens
  misc_RNA (1)...(19): siRNA sense strand
uggcaaauuuggaugguca

SEQ ID NO: 2469785 - RNA, 19 nt, Homo sapiens
  misc_RNA (1)...(19): siRNA sense strand
ggaagaagagcuugcugaa

SEQ ID NO: 2469786 - RNA, 19 nt, Homo sapiens
  misc_RNA (1)...(19): siRNA sense strand
aagaagagcuugcugaaga

SEQ ID NO: 2469787 - RNA, 19 nt, Homo sapiens
  misc_RNA (1)...(19): siRNA sense strand
agacaggaggaguggauuu

SEQ ID NO: 2469788 - RNA, 19 nt, Homo sapiens
  misc_RNA (1)...(19): siRNA sense strand
gagaggaaugggugaaaga

SEQ ID NO: 2469789 - RNA, 19 nt, Homo sapiens
  misc_RNA (1)...(19): siRNA sense strand
gaugauugcgaaagaggaa

SEQ ID NO: 2469790 - RNA, 19 nt, Homo sapiens
  misc_RNA (1)...(19): siRNA sense strand
gagccauccaggagaggaa

SEQ ID NO: 2469791 - RNA, 19 nt, Homo sapiens
  misc_RNA (1)...(19): siRNA sense strand
ggaaguaauaugagcagga

SEQ ID NO: 2469792 - RNA, 19 nt, Homo sapiens
  misc_RNA (1)...(19): siRNA sense strand
ugacagugaaugugaaaca

SEQ ID NO: 2469793 - RNA, 19 nt, Homo sapiens
  misc_RNA (1)...(19): siRNA sense strand
cacuaaagacauaaaggaa

SEQ ID NO: 2469794 - RNA, 19 nt, Homo sapiens
  misc_RNA (1)...(19): siRNA sense strand
aagaaacagaucacagaaa

SEQ ID NO: 2469795 - RNA, 19 nt, Homo sapiens
  misc_RNA (1)...(19): siRNA sense strand
ggagaucaucacacggaaa

SEQ ID NO: 2469796 - RNA, 19 nt, Homo sapiens
  misc_RNA (1)...(19): siRNA sense strand
aagaagagaaacagcauuu

SEQ ID NO: 2469797 - RNA, 19 nt, Homo sapiens
  misc_RNA (1)...(19): siRNA sense strand
gugcaaagacucacaacau

SEQ ID NO: 2469798 - RNA, 19 nt, Homo sapiens
  misc_RNA (1)...(19): siRNA sense strand
cagaguugaaacagugaaa

SEQ ID NO: 2469799 - RNA, 19 nt, Homo sapiens
  misc_RNA (1)...(19): siRNA sense strand
cagcaguucagaagaggaa

SEQ ID NO: 2469800 - RNA, 19 nt, Homo sapiens
  misc_RNA (1)...(19): siRNA sense strand
auucugaagaugacaguaa

SEQ ID NO: 2469801 - RNA, 19 nt, Homo sapiens
  misc_RNA (1)...(19): siRNA sense strand
agaagagcuugcugaagaa

SEQ ID NO: 2469802 - RNA, 19 nt, Homo sapiens
  misc_RNA (1)...(19): siRNA sense strand
ccaaaagaaaguaaagcaa

SEQ ID NO: 2469803 - RNA, 19 nt, Homo sapiens
  misc_RNA (1)...(19): siRNA sense strand
gagaggaguaggaaguaau

SEQ ID NO: 2469804 - RNA, 19 nt, Homo sapiens
  misc_RNA (1)...(19): siRNA sense strand
aggagauacagaugaaauu

SEQ ID NO: 2469805 - RNA, 19 nt, Homo sapiens
  misc_RNA (1)...(19): siRNA sense strand
ccauaguaccacaaagaca

SEQ ID NO: 2469806 - RNA, 19 nt, Homo sapiens
  misc_RNA (1)...(19): siRNA sense strand
aagcaaaagaagugcagaa

SEQ ID NO: 2469807 - RNA, 19 nt, Homo sapiens
  misc_RNA (1)...(19): siRNA sense strand
caggaagagguaaaugaaa

SEQ ID NO: 2469808 - RNA, 19 nt, Homo sapiens
  misc_RNA (1)...(19): siRNA sense strand
caggaggguaauagagaga

SEQ ID NO: 2469809 - RNA, 19 nt, Homo sapiens
  misc_RNA (1)...(19): siRNA sense strand
aaagagaugauaagccaaa

SEQ ID NO: 2469810 - RNA, 19 nt, Homo sapiens
  misc_RNA (1)...(19): siRNA sense strand
uaauaaaagugcagaagga

SEQ ID NO: 2469811 - RNA, 19 nt, Homo sapiens
  misc_RNA (1)...(19): siRNA sense strand
augaagauacuaagaguga

SEQ ID NO: 2469812 - RNA, 19 nt, Homo sapiens
  misc_RNA (1)...(19): siRNA sense strand
agagagagaagcagcaaaa

SEQ ID NO: 2469813 - RNA, 19 nt, Homo sapiens
  misc_RNA (1)...(19): siRNA sense strand
uauggauugucgaaagaaa

SEQ ID NO: 2469814 - RNA, 19 nt, Homo sapiens
  misc_RNA (1)...(19): siRNA sense strand
aguauaaugccaugaugaa

SEQ ID NO: 2469815 - RNA, 19 nt, Homo sapiens
  misc_RNA (1)...(19): siRNA sense strand
cagaagaagcuggugcaua

SEQ ID NO: 2469816 - RNA, 19 nt, Homo sapiens
  misc_RNA (1)...(19): siRNA sense strand
guucagaagaggaagaugu

SEQ ID NO: 2469817 - RNA, 19 nt, Homo sapiens
  misc_RNA (1)...(19): siRNA sense strand
agaaacauaaagacgcaaa

SEQ ID NO: 2469818 - RNA, 19 nt, Homo sapiens
  misc_RNA (1)...(19): siRNA sense strand
ggugggacuugaugggcaa

SEQ ID NO: 2469819 - RNA, 19 nt, Homo sapiens
  misc_RNA (1)...(19): siRNA sense strand
ggacaaaucugaugaccug

SEQ ID NO: 2469820 - RNA, 19 nt, Homo sapiens
  misc_RNA (1)...(19): siRNA sense strand
uaccaaugucuguggcaaa

SEQ ID NO: 2469821 - RNA, 19 nt, Homo sapiens
  misc_RNA (1)...(19): siRNA sense strand
gaguuuuacaugaaggaua

SEQ ID NO: 2469822 - RNA, 19 nt, Homo sapiens
  misc_RNA (1)...(19): siRNA sense strand
ugauagaccaggagaugca

SEQ ID NO: 2469823 - RNA, 19 nt, Homo sapiens
  misc_RNA (1)...(19): siRNA sense strand
gagugauagaccaggagau

SEQ ID NO: 2469824 - RNA, 19 nt, Homo sapiens
  misc_RNA (1)...(19): siRNA sense strand
gacuaaaaccaaaggcauu

SEQ ID NO: 2469825 - RNA, 19 nt, Homo sapiens
  misc_RNA (1)...(19): siRNA sense strand
acaaggaaguuucgggaug

SEQ ID NO: 2469826 - RNA, 19 nt, Homo sapiens
  misc_RNA (1)...(19): siRNA sense strand
ggaauacugcuuaggacca

SEQ ID NO: 2469827 - RNA, 19 nt, Homo sapiens
  misc_RNA (1)...(19): siRNA sense strand
ucggaaacagacugaaaga

SEQ ID NO: 2469828 - RNA, 19 nt, Homo sapiens
  misc_RNA (1)...(19): siRNA sense strand
guucuaagauugccgaaua

SEQ ID NO: 2469829 - RNA, 19 nt, Homo sapiens
  misc_RNA (1)...(19): siRNA sense strand
ggauuucaaugaugguaaa

SEQ ID NO: 2469830 - RNA, 19 nt, Homo sapiens
  misc_RNA (1)...(19): siRNA sense strand
gggauuucaaugaugguaa

SEQ ID NO: 2469831 - RNA, 19 nt, Homo sapiens
  misc_RNA (1)...(19): siRNA sense strand
ugacaaucaacgaggacau

SEQ ID NO: 2469832 - RNA, 19 nt, Homo sapiens
  misc_RNA (1)...(19): siRNA sense strand
cuggagacauaaaggcaau

SEQ ID NO: 2469833 - RNA, 19 nt, Homo sapiens
  misc_RNA (1)...(19): siRNA sense strand
cuggaaaugaagaugaauu

SEQ ID NO: 2469834 - RNA, 19 nt, Homo sapiens
  misc_RNA (1)...(19): siRNA sense strand
gggagaggaaacagaggau

SEQ ID NO: 2469835 - RNA, 19 nt, Homo sapiens
  misc_RNA (1)...(19): siRNA sense strand
gcaauguaguggauggcca

SEQ ID NO: 2469836 - RNA, 19 nt, Homo sapiens
  misc_RNA (1)...(19): siRNA sense strand
gaauuuagaaacaugguga

SEQ ID NO: 2469837 - RNA, 19 nt, Homo sapiens
  misc_RNA (1)...(19): siRNA sense strand
gcagugacuacuuugguaa

SEQ ID NO: 2469838 - RNA, 19 nt, Homo sapiens
  misc_RNA (1)...(19): siRNA sense strand
cgcuugucuuuguggauaa

SEQ ID NO: 2469839 - RNA, 19 nt, Homo sapiens
  misc_RNA (1)...(19): siRNA sense strand
auucaaguauggugcaaaa

SEQ ID NO: 2469840 - RNA, 19 nt, Homo sapiens
  misc_RNA (1)...(19): siRNA sense strand
augcacaagaucuggaaau

SEQ ID NO: 2469841 - RNA, 19 nt, Homo sapiens
  misc_RNA (1)...(19): siRNA sense strand
acaaaauggcaguuggauu

SEQ ID NO: 2469842 - RNA, 19 nt, Homo sapiens
  misc_RNA (1)...(19): siRNA sense strand
uggcaauugcacaggcauu

SEQ ID NO: 2469843 - RNA, 19 nt, Homo sapiens
  misc_RNA (1)...(19): siRNA sense strand
aagcaguaccuguggaagu

SEQ ID NO: 2469844 - RNA, 19 nt, Homo sapiens
  misc_RNA (1)...(19): siRNA sense strand
cguuucugaugauggcaaa

SEQ ID NO: 2469845 - RNA, 19 nt, Homo sapiens
  misc_RNA (1)...(19): siRNA sense strand
uugcacuggagaaggauua

SEQ ID NO: 2469846 - RNA, 19 nt, Homo sapiens
  misc_RNA (1)...(19): siRNA sense strand
ugaucuggguggugagcca

SEQ ID NO: 2469847 - RNA, 19 nt, Homo sapiens
  misc_RNA (1)...(19): siRNA sense strand
gguaugauaaugggagcaa

SEQ ID NO: 2469848 - RNA, 19 nt, Homo sapiens
  misc_RNA (1)...(19): siRNA sense strand
gaaccaucucauugacauu

SEQ ID NO: 2469849 - RNA, 19 nt, Homo sapiens
  misc_RNA (1)...(19): siRNA sense strand
cucuugaaugugagcgaua

SEQ ID NO: 2469850 - RNA, 19 nt, Homo sapiens
  misc_RNA (1)...(19): siRNA sense strand
cgcugugagugcaggaaca

SEQ ID NO: 2469851 - RNA, 19 nt, Homo sapiens
  misc_RNA (1)...(19): siRNA sense strand
uggccaagacaguuucaaa

SEQ ID NO: 2469852 - RNA, 19 nt, Homo sapiens
  misc_RNA (1)...(19): siRNA sense strand
ccuggagacauaaaggcaa

SEQ ID NO: 2469853 - RNA, 19 nt, Homo sapiens
  misc_RNA (1)...(19): siRNA sense strand
ccgaauauaugaaccaucu

SEQ ID NO: 2469854 - RNA, 19 nt, Homo sapiens
  misc_RNA (1)...(19): siRNA sense strand
gaagauccauuuauugcaa

SEQ ID NO: 2469855 - RNA, 19 nt, Homo sapiens
  misc_RNA (1)...(19): siRNA sense strand
gaugcuaggcuguacaaaa

SEQ ID NO: 2469856 - RNA, 19 nt, Homo sapiens
  misc_RNA (1)...(19): siRNA sense strand
ggaaguggagauaucgaga

SEQ ID NO: 2469857 - RNA, 19 nt, Homo sapiens
  misc_RNA (1)...(19): siRNA sense strand
gcgcuugucuuuguggaua

SEQ ID NO: 2469858 - RNA, 19 nt, Homo sapiens
  misc_RNA (1)...(19): siRNA sense strand
ugauaaugggagcaaccaa

SEQ ID NO: 2469859 - RNA, 19 nt, Homo sapiens
  misc_RNA (1)...(19): siRNA sense strand
ggcaauugcacaggcauua

SEQ ID NO: 2469860 - RNA, 19 nt, Homo sapiens
  misc_RNA (1)...(19): siRNA sense strand
uggaaaagaggguggaaaa

SEQ ID NO: 2469861 - RNA, 19 nt, Homo sapiens
  misc_RNA (1)...(19): siRNA sense strand
aagcaagacaacaggagaa

SEQ ID NO: 2469862 - RNA, 19 nt, Homo sapiens
  misc_RNA (1)...(19): siRNA sense strand
ugccgaaggaacagggaaa

SEQ ID NO: 2469863 - RNA, 19 nt, Homo sapiens
  misc_RNA (1)...(19): siRNA sense strand
auuuagaagaggcuggaaa

SEQ ID NO: 2469864 - RNA, 19 nt, Homo sapiens
  misc_RNA (1)...(19): siRNA sense strand
gcaacaagaaggaagagca

SEQ ID NO: 2469865 - RNA, 19 nt, Homo sapiens
  misc_RNA (1)...(19): siRNA sense strand
cggaggcguuucugggcaa

SEQ ID NO: 2469866 - RNA, 19 nt, Homo sapiens
  misc_RNA (1)...(19): siRNA sense strand
agggagguuaugaggcuua

SEQ ID NO: 2469867 - RNA, 19 nt, Homo sapiens
  misc_RNA (1)...(19): siRNA sense strand
caggagaaaugaaggcauc

SEQ ID NO: 2469868 - RNA, 19 nt, Homo sapiens
  misc_RNA (1)...(19): siRNA sense strand
aggaagagcaauggcgaca

SEQ ID NO: 2469869 - RNA, 19 nt, Homo sapiens
  misc_RNA (1)...(19): siRNA sense strand
gcagggagguuaugaggcu

SEQ ID NO: 2469870 - RNA, 19 nt, Homo sapiens
  misc_RNA (1)...(19): siRNA sense strand
gcgggagaaagcaagacaa

SEQ ID NO: 2469871 - RNA, 19 nt, Homo sapiens
  misc_RNA (1)...(19): siRNA sense strand
agcaagacaacaggagaaa

SEQ ID NO: 2469872 - RNA, 19 nt, Homo sapiens
  misc_RNA (1)...(19): siRNA sense strand
ggcaauaaauauacgguga

SEQ ID NO: 2469873 - RNA, 19 nt, Homo sapiens
  misc_RNA (1)...(19): siRNA sense strand
ggaagaaagcggaggcucu

SEQ ID NO: 2469874 - RNA, 19 nt, Homo sapiens
  misc_RNA (1)...(19): siRNA sense strand
aggcaauguggcagagaau

SEQ ID NO: 2469875 - RNA, 19 nt, Homo sapiens
  misc_RNA (1)...(19): siRNA sense strand
ggugcgagccacugauaaa

SEQ ID NO: 2469876 - RNA, 19 nt, Homo sapiens
  misc_RNA (1)...(19): siRNA sense strand
ccauauugcuucugggucu

SEQ ID NO: 2469877 - RNA, 19 nt, Homo sapiens
  misc_RNA (1)...(19): siRNA sense strand
cgaagacugcagagagaga

SEQ ID NO: 2469878 - RNA, 19 nt, Homo sapiens
  misc_RNA (1)...(19): siRNA sense strand
cugacaaagaaaggagaaa

SEQ ID NO: 2469879 - RNA, 19 nt, Homo sapiens
  misc_RNA (1)...(19): siRNA sense strand
ccacaacagaauuggacuu

SEQ ID NO: 2469880 - RNA, 19 nt, Homo sapiens
  misc_RNA (1)...(19): siRNA sense strand
ccagaagacacaagccgaa

SEQ ID NO: 2469881 - RNA, 19 nt, Homo sapiens
  misc_RNA (1)...(19): siRNA sense strand
ccuaacaagcccagaaaau

SEQ ID NO: 2469882 - RNA, 19 nt, Homo sapiens
  misc_RNA (1)...(19): siRNA sense strand
ugaacauccuugaagaaaa

SEQ ID NO: 2469883 - RNA, 19 nt, Homo sapiens
  misc_RNA (1)...(19): siRNA sense strand
gaacagaaauccagccuuc

SEQ ID NO: 2469884 - RNA, 19 nt, Homo sapiens
  misc_RNA (1)...(19): siRNA sense strand
guauuugaugugucagaaa

SEQ ID NO: 2469885 - RNA, 19 nt, Homo sapiens
  misc_RNA (1)...(19): siRNA sense strand
agagagacgucguggugga

SEQ ID NO: 2469886 - RNA, 19 nt, Homo sapiens
  misc_RNA (1)...(19): siRNA sense strand
ccaaaugccaaaauggaaa

SEQ ID NO: 2469887 - RNA, 19 nt, Homo sapiens
  misc_RNA (1)...(19): siRNA sense strand
cccaaaggauagaccgaga

SEQ ID NO: 2469888 - RNA, 19 nt, Homo sapiens
  misc_RNA (1)...(19): siRNA sense strand
gggaaacauaugaauucaa

SEQ ID NO: 2469889 - RNA, 19 nt, Homo sapiens
  misc_RNA (1)...(19): siRNA sense strand
gaagaugagcugaguggca

SEQ ID NO: 2469890 - RNA, 19 nt, Homo sapiens
  misc_RNA (1)...(19): siRNA sense strand
uggaaguucuagugaagga

SEQ ID NO: 2469891 - RNA, 19 nt, Homo sapiens
  misc_RNA (1)...(19): siRNA sense strand
cugaaaguuggcacaaaua

SEQ ID NO: 2469892 - RNA, 19 nt, Homo sapiens
  misc_RNA (1)...(19): siRNA sense strand
aacgaagacugcagagaga

SEQ ID NO: 2469893 - RNA, 19 nt, Homo sapiens
  misc_RNA (1)...(19): siRNA sense strand
ccacuaacccaaaugccaa

SEQ ID NO: 2469894 - RNA, 19 nt, Homo sapiens
  misc_RNA (1)...(19): siRNA sense strand
ccaacugggaagaagauga

SEQ ID NO: 2469895 - RNA, 19 nt, Homo sapiens
  misc_RNA (1)...(19): siRNA sense strand
caggaaccaucguggccaa

SEQ ID NO: 2469896 - RNA, 19 nt, Homo sapiens
  misc_RNA (1)...(19): siRNA sense strand
gcaauaaauauacggugau

SEQ ID NO: 2469897 - RNA, 19 nt, Homo sapiens
  misc_RNA (1)...(19): siRNA sense strand
gagaagugccaacugggaa

SEQ ID NO: 2469898 - RNA, 19 nt, Homo sapiens
  misc_RNA (1)...(19): siRNA sense strand
uugauaagaucugggacua

SEQ ID NO: 2469899 - RNA, 19 nt, Homo sapiens
  misc_RNA (1)...(19): siRNA sense strand
agaugagcugaguggcaaa

SEQ ID NO: 2469900 - RNA, 19 nt, Homo sapiens
  misc_RNA (1)...(19): siRNA sense strand
aaggauagaccgagaugca

SEQ ID NO: 2469901 - RNA, 19 nt, Homo sapiens
  misc_RNA (1)...(19): siRNA sense strand
acacugaguauuaaaguca

SEQ ID NO: 2469902 - RNA, 19 nt, Homo sapiens
  misc_RNA (1)...(19): siRNA sense strand
agguaacagaugugaacga

SEQ ID NO: 2469903 - RNA, 19 nt, Homo sapiens
  misc_RNA (1)...(19): siRNA sense strand
gcuuugaugaugacaguga

SEQ ID NO: 2469904 - RNA, 19 nt, Homo sapiens
  misc_RNA (1)...(19): siRNA sense strand
gugaauuggcugucaggca

SEQ ID NO: 2469905 - RNA, 19 nt, Homo sapiens
  misc_RNA (1)...(19): siRNA sense strand
guacaauccaaguggccca

SEQ ID NO: 2469906 - RNA, 19 nt, Homo sapiens
  misc_RNA (1)...(19): siRNA sense strand
gggaagaagaugagcugag

SEQ ID NO: 2469907 - RNA, 19 nt, Homo sapiens
  misc_RNA (1)...(19): siRNA sense strand
cauaguagaaagagcaaac

SEQ ID NO: 2469908 - RNA, 19 nt, Homo sapiens
  misc_RNA (1)...(19): siRNA sense strand
ggaaagauccacuaaccca

SEQ ID NO: 2469909 - RNA, 19 nt, Homo sapiens
  misc_RNA (1)...(19): siRNA sense strand
cuacaggcaauguggcaga

SEQ ID NO: 2469910 - RNA, 19 nt, Homo sapiens
  misc_RNA (1)...(19): siRNA sense strand
ccagaacccgagugggaca

SEQ ID NO: 2469911 - RNA, 19 nt, Homo sapiens
  misc_RNA (1)...(19): siRNA sense strand
ugugaacauccuugaagaa

SEQ ID NO: 2469912 - RNA, 19 nt, Homo sapiens
  misc_RNA (1)...(19): siRNA sense strand
caggcaauguggcagagaa

SEQ ID NO: 2469913 - RNA, 19 nt, Homo sapiens
  misc_RNA (1)...(19): siRNA sense strand
cuuugaagcaggacacaga

SEQ ID NO: 2469914 - RNA, 19 nt, Homo sapiens
  misc_RNA (1)...(19): siRNA sense strand
ccuggaaguucuagugaag

SEQ ID NO: 2469915 - RNA, 19 nt, Homo sapiens
  misc_RNA (1)...(19): siRNA sense strand
cgaaaauccaaguaaccua

SEQ ID NO: 2469916 - RNA, 19 nt, Homo sapiens
  misc_RNA (1)...(19): siRNA sense strand
agaaaaugaugaaaagcca

SEQ ID NO: 2469917 - RNA, 19 nt, Homo sapiens
  misc_RNA (1)...(19): siRNA sense strand
aagaaaggagaaacgaaga

SEQ ID NO: 2469918 - RNA, 19 nt, Homo sapiens
  misc_RNA (1)...(19): siRNA sense strand
gcaacuuggcagaaggucu

SEQ ID NO: 2469919 - RNA, 19 nt, Homo sapiens
  misc_RNA (1)...(19): siRNA sense strand
cuauguauuugauguguca

SEQ ID NO: 2469920 - RNA, 19 nt, Homo sapiens
  misc_RNA (1)...(19): siRNA sense strand
ggaucugaaaguuggcaca

SEQ ID NO: 2469921 - RNA, 19 nt, Homo sapiens
  misc_RNA (1)...(19): siRNA sense strand
ccagaaaugaggguggcaa

SEQ ID NO: 2469922 - RNA, 19 nt, Homo sapiens
  misc_RNA (1)...(19): siRNA sense strand
ccagauagucaacucaaau

SEQ ID NO: 2469923 - RNA, 19 nt, Homo sapiens
  misc_RNA (1)...(19): siRNA sense strand
gugccaacugggaagaaga

SEQ ID NO: 2469924 - RNA, 19 nt, Homo sapiens
  misc_RNA (1)...(19): siRNA sense strand
agugaaggacagaccauau

SEQ ID NO: 2469925 - RNA, 19 nt, Homo sapiens
  misc_RNA (1)...(19): siRNA sense strand
gcauuauggugccggaaag

SEQ ID NO: 2469926 - RNA, 19 nt, Homo sapiens
  misc_RNA (1)...(19): siRNA sense strand
gagacgucgugguggaaac

SEQ ID NO: 2469927 - RNA, 19 nt, Homo sapiens
  misc_RNA (1)...(19): siRNA sense strand
cugggaagauugugcugau

SEQ ID NO: 2469928 - RNA, 19 nt, Homo sapiens
  misc_RNA (1)...(19): siRNA sense strand
ccggaaaggacuagaccaa

SEQ ID NO: 2469929 - RNA, 19 nt, Homo sapiens
  misc_RNA (1)...(19): siRNA sense strand
augaaagacuggacggcau

SEQ ID NO: 2469930 - RNA, 19 nt, Homo sapiens
  misc_RNA (1)...(19): siRNA sense strand
augacaagacuuuggcuaa

SEQ ID NO: 2469931 - RNA, 19 nt, Homo sapiens
  misc_RNA (1)...(19): siRNA sense strand
agacagagcugaaacagga

SEQ ID NO: 2469932 - RNA, 19 nt, Homo sapiens
  misc_RNA (1)...(19): siRNA sense strand
ccucagauccagaaguaca

SEQ ID NO: 2469933 - RNA, 19 nt, Homo sapiens
  misc_RNA (1)...(19): siRNA sense strand
acucaaugacaaccggaaa

SEQ ID NO: 2469934 - RNA, 19 nt, Homo sapiens
  misc_RNA (1)...(19): siRNA sense strand
aagaaggagagaaacuaaa

SEQ ID NO: 2469935 - RNA, 19 nt, Homo sapiens
  misc_RNA (1)...(19): siRNA sense strand
cggcauugcucuaccacca

SEQ ID NO: 2469936 - RNA, 19 nt, Homo sapiens
  misc_RNA (1)...(19): siRNA sense strand
cuaucagcgaguuggcaaa

SEQ ID NO: 2469937 - RNA, 19 nt, Homo sapiens
  misc_RNA (1)...(19): siRNA sense strand
gcgaguuggcaaagaagga

SEQ ID NO: 2469938 - RNA, 19 nt, Homo sapiens
  misc_RNA (1)...(19): siRNA sense strand
ugacaaccggaaaggacua

SEQ ID NO: 2469939 - RNA, 19 nt, Homo sapiens
  misc_RNA (1)...(19): siRNA sense strand
gagaacuuccaguggugaa

SEQ ID NO: 2469940 - RNA, 19 nt, Homo sapiens
  misc_RNA (1)...(19): siRNA sense strand
gaugacaagacuuuggcua

SEQ ID NO: 2469941 - RNA, 19 nt, Homo sapiens
  misc_RNA (1)...(19): siRNA sense strand
cagcagagaucgcggacag

SEQ ID NO: 2469942 - RNA, 19 nt, Homo sapiens
  misc_RNA (1)...(19): siRNA sense strand
cguucuaggauucggcauu

SEQ ID NO: 2469943 - RNA, 19 nt, Homo sapiens
  misc_RNA (1)...(19): siRNA sense strand
gccaagacuucaagcacca

SEQ ID NO: 2469944 - RNA, 19 nt, Homo sapiens
  misc_RNA (1)...(19): siRNA sense strand
ggaugagaagauugcugaa

SEQ ID NO: 2469945 - RNA, 19 nt, Homo sapiens
  misc_RNA (1)...(19): siRNA sense strand
agucaacguugcaggccau

SEQ ID NO: 2469946 - RNA, 19 nt, Homo sapiens
  misc_RNA (1)...(19): siRNA sense strand
cagagaucgcggacaguga

SEQ ID NO: 2469947 - RNA, 19 nt, Homo sapiens
  misc_RNA (1)...(19): siRNA sense strand
cuacaagaacucaagacca

SEQ ID NO: 2469948 - RNA, 19 nt, Homo sapiens
  misc_RNA (1)...(19): siRNA sense strand
uaccagagacagagcugaa

SEQ ID NO: 2469949 - RNA, 19 nt, Homo sapiens
  misc_RNA (1)...(19): siRNA sense strand
auuacagggaugagaagau

SEQ ID NO: 2469950 - RNA, 19 nt, Homo sapiens
  misc_RNA (1)...(19): siRNA sense strand
aaagcaaauuacagggaug

SEQ ID NO: 2469951 - RNA, 19 nt, Homo sapiens
  misc_RNA (1)...(19): siRNA sense strand
cagagacagagcugaaaca

SEQ ID NO: 2469952 - RNA, 19 nt, Homo sapiens
  misc_RNA (1)...(19): siRNA sense strand
cuucaucaucagagaggga

SEQ ID NO: 2469953 - RNA, 19 nt, Homo sapiens
  misc_RNA (1)...(19): siRNA sense strand
agaagauugcugaacgaca

SEQ ID NO: 2469954 - RNA, 19 nt, Homo sapiens
  misc_RNA (1)...(19): siRNA sense strand
ccacaagagaugaaagaaa

SEQ ID NO: 2469955 - RNA, 19 nt, Homo sapiens
  misc_RNA (1)...(19): siRNA sense strand
uggaagaguuuguaagaau

SEQ ID NO: 2469956 - RNA, 19 nt, Homo sapiens
  misc_RNA (1)...(19): siRNA sense strand
ugaaagaaauccuguagua

SEQ ID NO: 2469957 - RNA, 19 nt, Homo sapiens
  misc_RNA (1)...(19): siRNA sense strand
gaaugauguaggaggacaa

SEQ ID NO: 2469958 - RNA, 19 nt, Homo sapiens
  misc_RNA (1)...(19): siRNA sense strand
caaaggaacggguggaauu

SEQ ID NO: 2469959 - RNA, 19 nt, Homo sapiens
  misc_RNA (1)...(19): siRNA sense strand
guguggaacuggagcauuu

SEQ ID NO: 2469960 - RNA, 19 nt, Homo sapiens
  misc_RNA (1)...(19): siRNA sense strand
auguaaauuagcugggaaa

SEQ ID NO: 2469961 - RNA, 19 nt, Homo sapiens
  misc_RNA (1)...(19): siRNA sense strand
acuuaaagccagaagccaa

SEQ ID NO: 2469962 - RNA, 19 nt, Homo sapiens
  misc_RNA (1)...(19): siRNA sense strand
agguagugcuggaggaguu

SEQ ID NO: 2469963 - RNA, 19 nt, Homo sapiens
  misc_RNA (1)...(19): siRNA sense strand
cacaagagaugaaagaaau

SEQ ID NO: 2469964 - RNA, 19 nt, Homo sapiens
  misc_RNA (1)...(19): siRNA sense strand
caucagaaggacuggauuu

SEQ ID NO: 2469965 - RNA, 19 nt, Homo sapiens
  misc_RNA (1)...(19): siRNA sense strand
agggagaagcggagacaga

SEQ ID NO: 2469966 - RNA, 19 nt, Homo sapiens
  misc_RNA (1)...(19): siRNA sense strand
caauccagaugaugauaaa

SEQ ID NO: 2469967 - RNA, 19 nt, Homo sapiens
  misc_RNA (1)...(19): siRNA sense strand
ggaaagaugccaauacaga

SEQ ID NO: 2469968 - RNA, 19 nt, Homo sapiens
  misc_RNA (1)...(19): siRNA sense strand
caauacagaaugugcaaau

SEQ ID NO: 2469969 - RNA, 19 nt, Homo sapiens
  misc_RNA (1)...(19): siRNA sense strand
agaaugaacagauggaaaa

SEQ ID NO: 2469970 - RNA, 19 nt, Homo sapiens
  misc_RNA (1)...(19): siRNA sense strand
caguaaugacagaugagua

SEQ ID NO: 2469971 - RNA, 19 nt, Homo sapiens
  misc_RNA (1)...(19): siRNA sense strand
gagucuacaaggaggauau

SEQ ID NO: 2469972 - RNA, 19 nt, Homo sapiens
  misc_RNA (1)...(19): siRNA sense strand
ggaauauggaagagguagu

SEQ ID NO: 2469973 - RNA, 19 nt, Homo sapiens
  misc_RNA (1)...(19): siRNA sense strand
aaggagagcuagacgccaa

SEQ ID NO: 2469974 - RNA, 19 nt, Homo sapiens
  misc_RNA (1)...(19): siRNA sense strand
ugaaagacuuaaagccaga

SEQ ID NO: 2469975 - RNA, 19 nt, Homo sapiens
  misc_RNA (1)...(19): siRNA sense strand
augcgacacuuaugggaaa

SEQ ID NO: 2469976 - RNA, 19 nt, Homo sapiens
  misc_RNA (1)...(19): siRNA sense strand
ucaaaggaaaaguggaaua

SEQ ID NO: 2469977 - RNA, 19 nt, Homo sapiens
  misc_RNA (1)...(19): siRNA sense strand
aggcaguaccuccgauaaa

SEQ ID NO: 2469978 - RNA, 19 nt, Homo sapiens
  misc_RNA (1)...(19): siRNA sense strand
cugauaaacaaguggacga

SEQ ID NO: 2469979 - RNA, 19 nt, Homo sapiens
  misc_RNA (1)...(19): siRNA sense strand
aagcggagacagagaaaca

SEQ ID NO: 2469980 - RNA, 19 nt, Homo sapiens
  misc_RNA (1)...(19): siRNA sense strand
guaaauuagcugggaaaga

SEQ ID NO: 2469981 - RNA, 19 nt, Homo sapiens
  misc_RNA (1)...(19): siRNA sense strand
gaugaaagacuuaaagcca

SEQ ID NO: 2469982 - RNA, 19 nt, Homo sapiens
  misc_RNA (1)...(19): siRNA sense strand
uggaagagguagugcugga

SEQ ID NO: 2469983 - RNA, 19 nt, Homo sapiens
  misc_RNA (1)...(19): siRNA sense strand
ggacaacgcagccugauaa

SEQ ID NO: 2469984 - RNA, 19 nt, Homo sapiens
  misc_RNA (1)...(19): siRNA sense strand
guggaauauggaagaggua

SEQ ID NO: 2469985 - RNA, 19 nt, Homo sapiens
  misc_RNA (1)...(19): siRNA sense strand
ggaucaugucauugcagaa

SEQ ID NO: 2469986 - RNA, 19 nt, Homo sapiens
  misc_RNA (1)...(19): siRNA sense strand
uaagaaugauguaggagga

SEQ ID NO: 2469987 - RNA, 19 nt, Homo sapiens
  misc_RNA (1)...(19): siRNA sense strand
ggcccaaaguggaagcaca

SEQ ID NO: 2469988 - RNA, 19 nt, Homo sapiens
  misc_RNA (1)...(19): siRNA sense strand
gugcaaauuucaucagagu

SEQ ID NO: 2469989 - RNA, 19 nt, Homo sapiens
  misc_RNA (1)...(19): siRNA sense strand
gguacauguccaagcaaaa

SEQ ID NO: 2469990 - RNA, 19 nt, Homo sapiens
  misc_RNA (1)...(19): siRNA sense strand
ugguacauguccaagcaaa

SEQ ID NO: 2469991 - RNA, 19 nt, Homo sapiens
  misc_RNA (1)...(19): siRNA sense strand
cacagauagugguggauca

SEQ ID NO: 2469992 - RNA, 19 nt, Homo sapiens
  misc_RNA (1)...(19): siRNA sense strand
gcaaauuucaucagaguac

SEQ ID NO: 2469993 - RNA, 19 nt, Homo sapiens
  misc_RNA (1)...(19): siRNA sense strand
uggcaaagauacugcauuc

SEQ ID NO: 2469994 - RNA, 19 nt, Homo sapiens
  misc_RNA (1)...(19): siRNA sense strand
gaaagaugccaauacagaa

SEQ ID NO: 2469995 - RNA, 19 nt, Homo sapiens
  misc_RNA (1)...(19): siRNA sense strand
caaacuagacacacauaau

SEQ ID NO: 2469996 - RNA, 19 nt, Homo sapiens
  misc_RNA (1)...(19): siRNA sense strand
ugacacagauaguggugga

SEQ ID NO: 2469997 - RNA, 19 nt, Homo sapiens
  misc_RNA (1)...(19): siRNA sense strand
ccuaaaucccaacaagcaa

SEQ ID NO: 2469998 - RNA, 19 nt, Homo sapiens
  misc_RNA (1)...(19): siRNA sense strand
cugagucacgguugagaua

SEQ ID NO: 2469999 - RNA, 19 nt, Homo sapiens
  misc_RNA (1)...(19): siRNA sense strand
gguugagauacaaagacua

SEQ ID NO: 2470000 - RNA, 19 nt, Homo sapiens
  misc_RNA (1)...(19): siRNA sense strand
ccuacaauccagaugauga

SEQ ID NO: 2470001 - RNA, 19 nt, Homo sapiens
  misc_RNA (1)...(19): siRNA sense strand
ugaugagcuucaagauauu

SEQ ID NO: 2470002 - RNA, 19 nt, Homo sapiens
  misc_RNA (1)...(19): siRNA sense strand
uggaagcacaugcaggaaa

SEQ ID NO: 2470003 - RNA, 19 nt, Homo sapiens
  misc_RNA (1)...(19): siRNA sense strand
cauccaauauguggguaua

SEQ ID NO: 2470004 - RNA, 19 nt, Homo sapiens
  misc_RNA (1)...(19): siRNA sense strand
agaagcggagacagagaaa

SEQ ID NO: 2470005 - RNA, 19 nt, Homo sapiens
  misc_RNA (1)...(19): siRNA sense strand
ucuuaaggccagacugauu

SEQ ID NO: 2470006 - RNA, 19 nt, Homo sapiens
  misc_RNA (1)...(19): siRNA sense strand
cuucaaaggcucugcuguu

SEQ ID NO: 2470007 - RNA, 19 nt, Homo sapiens
  misc_RNA (1)...(19): siRNA sense strand
ucaaggaucuauuggcuga

SEQ ID NO: 2470008 - RNA, 19 nt, Homo sapiens
  misc_RNA (1)...(19): siRNA sense strand
ucagaguacuucagcccua

SEQ ID NO: 2470009 - RNA, 19 nt, Homo sapiens
  misc_RNA (1)...(19): siRNA sense strand
uguaguauauggagucuuu

SEQ ID NO: 2470010 - RNA, 19 nt, Homo sapiens
  misc_RNA (1)...(19): siRNA sense strand
ccaacguucaagagaauca

SEQ ID NO: 2470011 - RNA, 19 nt, Homo sapiens
  misc_RNA (1)...(19): siRNA sense strand
cgguugagauacaaagacu

SEQ ID NO: 2470012 - RNA, 19 nt, Homo sapiens
  misc_RNA (1)...(19): siRNA sense strand
gcccaaaguggaagcacau

SEQ ID NO: 2470013 - RNA, 19 nt, Homo sapiens
  misc_RNA (1)...(19): siRNA sense strand
gccaauacagaaugugcaa

SEQ ID NO: 2470014 - RNA, 19 nt, Homo sapiens
  misc_RNA (1)...(19): siRNA sense strand
cuacaaggaggauauuaua

SEQ ID NO: 2470015 - RNA, 19 nt, Homo sapiens
  misc_RNA (1)...(19): siRNA sense strand
caacgcagccugauaaaca

SEQ ID NO: 2470016 - RNA, 19 nt, Homo sapiens
  misc_RNA (1)...(19): siRNA sense strand
ggugcaguaugaugggaga

SEQ ID NO: 2470017 - RNA, 19 nt, Homo sapiens
  misc_RNA (1)...(19): siRNA sense strand
gagaggaguugaagcccga

SEQ ID NO: 2470018 - RNA, 19 nt, Homo sapiens
  misc_RNA (1)...(19): siRNA sense strand
gcaaaggaacggguggaau

SEQ ID NO: 2470019 - RNA, 19 nt, Homo sapiens
  misc_RNA (1)...(19): siRNA sense strand
ucuacaaggaggauauuau

SEQ ID NO: 2470020 - RNA, 19 nt, Homo sapiens
  misc_RNA (1)...(19): siRNA sense strand
uauucaaacuagacacaca

SEQ ID NO: 2470021 - RNA, 19 nt, Homo sapiens
  misc_RNA (1)...(19): siRNA sense strand
aggacaacgcagccugaua

SEQ ID NO: 2470022 - RNA, 19 nt, Homo sapiens
  misc_RNA (1)...(19): siRNA sense strand
gaaagaaauccuguaguau

SEQ ID NO: 2470023 - RNA, 19 nt, Homo sapiens
  misc_RNA (1)...(19): siRNA sense strand
cggguggaauuauguaaau

SEQ ID NO: 2470024 - RNA, 19 nt, Homo sapiens
  misc_RNA (1)...(19): siRNA sense strand
caaaauauuccaagacuca

SEQ ID NO: 2470025 - RNA, 19 nt, Homo sapiens
  misc_RNA (1)...(19): siRNA sense strand
acgccaagauguaaaauau

SEQ ID NO: 2470026 - RNA, 19 nt, Homo sapiens
  misc_RNA (1)...(19): siRNA sense strand
gcacagagcuacaggcgga

SEQ ID NO: 2470027 - RNA, 19 nt, Homo sapiens
  misc_RNA (1)...(19): siRNA sense strand
uugaagacauugugggaga

SEQ ID NO: 2470028 - RNA, 19 nt, Homo sapiens
  misc_RNA (1)...(19): siRNA sense strand
aggaagagcaggaggagga

SEQ ID NO: 2470029 - RNA, 19 nt, Homo sapiens
  misc_RNA (1)...(19): siRNA sense strand
aggaggaggaggaggaaga

SEQ ID NO: 2470030 - RNA, 19 nt, Homo sapiens
  misc_RNA (1)...(19): siRNA sense strand
aggaggaagaggaggaaga

SEQ ID NO: 2470031 - RNA, 19 nt, Homo sapiens
  misc_RNA (1)...(19): siRNA sense strand
ugagauaugccaaggguca

SEQ ID NO: 2470032 - RNA, 19 nt, Homo sapiens
  misc_RNA (1)...(19): siRNA sense strand
aaacagaaggggaggaaga

SEQ ID NO: 2470033 - RNA, 19 nt, Homo sapiens
  misc_RNA (1)...(19): siRNA sense strand
aggaagaggaggaagagga

SEQ ID NO: 2470034 - RNA, 19 nt, Homo sapiens
  misc_RNA (1)...(19): siRNA sense strand
gggaggaagagcaggagga

SEQ ID NO: 2470035 - RNA, 19 nt, Homo sapiens
  misc_RNA (1)...(19): siRNA sense strand
uguugaaggaggaggacga

SEQ ID NO: 2470036 - RNA, 19 nt, Homo sapiens
  misc_RNA (1)...(19): siRNA sense strand
aggaggaggaagaggagga

SEQ ID NO: 2470037 - RNA, 19 nt, Homo sapiens
  misc_RNA (1)...(19): siRNA sense strand
ggauguugaaggaggagga

SEQ ID NO: 2470038 - RNA, 19 nt, Homo sapiens
  misc_RNA (1)...(19): siRNA sense strand
caggcaagaggaagagaca

SEQ ID NO: 2470039 - RNA, 19 nt, Homo sapiens
  misc_RNA (1)...(19): siRNA sense strand
ggaccugugcgguugggaa

SEQ ID NO: 2470040 - RNA, 19 nt, Homo sapiens
  misc_RNA (1)...(19): siRNA sense strand
cugcaugucuacaggaaac

SEQ ID NO: 2470041 - RNA, 19 nt, Homo sapiens
  misc_RNA (1)...(19): siRNA sense strand
augccaagggucagaguca

SEQ ID NO: 2470042 - RNA, 19 nt, Homo sapiens
  misc_RNA (1)...(19): siRNA sense strand
uggauacaggcaagaggaa

SEQ ID NO: 2470043 - RNA, 19 nt, Homo sapiens
  misc_RNA (1)...(19): siRNA sense strand
ccauguuggaggaguuuga

SEQ ID NO: 2470044 - RNA, 19 nt, Homo sapiens
  misc_RNA (1)...(19): siRNA sense strand
cuggaaaggagaucacaga

SEQ ID NO: 2470045 - RNA, 19 nt, Homo sapiens
  misc_RNA (1)...(19): siRNA sense strand
aggaggaggaggaagagga

SEQ ID NO: 2470046 - RNA, 19 nt, Homo sapiens
  misc_RNA (1)...(19): siRNA sense strand
ggagaucacagauggggaa

SEQ ID NO: 2470047 - RNA, 19 nt, Homo sapiens
  misc_RNA (1)...(19): siRNA sense strand
acagagaaucacagagaaa

SEQ ID NO: 2470048 - RNA, 19 nt, Homo sapiens
  misc_RNA (1)...(19): siRNA sense strand
ccuuaaggauacagaggaa

SEQ ID NO: 2470049 - RNA, 19 nt, Homo sapiens
  misc_RNA (1)...(19): siRNA sense strand
gaguuaaaaugcuggaaaa

SEQ ID NO: 2470050 - RNA, 19 nt, Homo sapiens
  misc_RNA (1)...(19): siRNA sense strand
ggauaagugggaagaaauu

SEQ ID NO: 2470051 - RNA, 19 nt, Homo sapiens
  misc_RNA (1)...(19): siRNA sense strand
ccuucaacauaaagagaau

SEQ ID NO: 2470052 - RNA, 19 nt, Homo sapiens
  misc_RNA (1)...(19): siRNA sense strand
caaugaagauacagagcca

SEQ ID NO: 2470053 - RNA, 19 nt, Homo sapiens
  misc_RNA (1)...(19): siRNA sense strand
uguuggaaguacagaauau

SEQ ID NO: 2470054 - RNA, 19 nt, Homo sapiens
  misc_RNA (1)...(19): siRNA sense strand
gaaaaguggcacagggaau

SEQ ID NO: 2470055 - RNA, 19 nt, Homo sapiens
  misc_RNA (1)...(19): siRNA sense strand
caaccaacugagugcaaua

SEQ ID NO: 2470056 - RNA, 19 nt, Homo sapiens
  misc_RNA (1)...(19): siRNA sense strand
gcaguaaauuauaugccaa

SEQ ID NO: 2470057 - RNA, 19 nt, Homo sapiens
  misc_RNA (1)...(19): siRNA sense strand
ccaugaaggccaacaguuu

SEQ ID NO: 2470058 - RNA, 19 nt, Homo sapiens
  misc_RNA (1)...(19): siRNA sense strand
ggaacaacucuguaaugaa

SEQ ID NO: 2470059 - RNA, 19 nt, Homo sapiens
  misc_RNA (1)...(19): siRNA sense strand
aagcaugaguacuguggua

SEQ ID NO: 2470060 - RNA, 19 nt, Homo sapiens
  misc_RNA (1)...(19): siRNA sense strand
ccguauacuccuucgcaaa

SEQ ID NO: 2470061 - RNA, 19 nt, Homo sapiens
  misc_RNA (1)...(19): siRNA sense strand
ucagaaagcaauugcaaca

SEQ ID NO: 2470062 - RNA, 19 nt, Homo sapiens
  misc_RNA (1)...(19): siRNA sense strand
gaauuuugguacagagaau

SEQ ID NO: 2470063 - RNA, 19 nt, Homo sapiens
  misc_RNA (1)...(19): siRNA sense strand
cuuaaguggccaaauguaa

SEQ ID NO: 2470064 - RNA, 19 nt, Homo sapiens
  misc_RNA (1)...(19): siRNA sense strand
ggacuauagcagagaugga

SEQ ID NO: 2470065 - RNA, 19 nt, Homo sapiens
  misc_RNA (1)...(19): siRNA sense strand
augaagauacguagccaaa

SEQ ID NO: 2470066 - RNA, 19 nt, Homo sapiens
  misc_RNA (1)...(19): siRNA sense strand
aggguauuauugagagcua

SEQ ID NO: 2470067 - RNA, 19 nt, Homo sapiens
  misc_RNA (1)...(19): siRNA sense strand
uggauaagugggaagaaau

SEQ ID NO: 2470068 - RNA, 19 nt, Homo sapiens
  misc_RNA (1)...(19): siRNA sense strand
aggaacauacagaugauaa

SEQ ID NO: 2470069 - RNA, 19 nt, Homo sapiens
  misc_RNA (1)...(19): siRNA sense strand
gguuaguaguagaaaguuc

SEQ ID NO: 2470070 - RNA, 19 nt, Homo sapiens
  misc_RNA (1)...(19): siRNA sense strand
guacaccagauuuggauaa

SEQ ID NO: 2470071 - RNA, 19 nt, Homo sapiens
  misc_RNA (1)...(19): siRNA sense strand
uuggauaagugggaagaaa

SEQ ID NO: 2470072 - RNA, 19 nt, Homo sapiens
  misc_RNA (1)...(19): siRNA sense strand
uggcuaugcuacacugaaa

SEQ ID NO: 2470073 - RNA, 19 nt, Homo sapiens
  misc_RNA (1)...(19): siRNA sense strand
acacuggacuacaggaaca

SEQ ID NO: 2470074 - RNA, 19 nt, Homo sapiens
  misc_RNA (1)...(19): siRNA sense strand
gagagagguuaguaguaga

SEQ ID NO: 2470075 - RNA, 19 nt, Homo sapiens
  misc_RNA (1)...(19): siRNA sense strand
agaccacauuauucagaaa

SEQ ID NO: 2470076 - RNA, 19 nt, Homo sapiens
  misc_RNA (1)...(19): siRNA sense strand
ucagaugaaaccagcguua

SEQ ID NO: 2470077 - RNA, 19 nt, Homo sapiens
  misc_RNA (1)...(19): siRNA sense strand
ugaaaagacuacagcaaca

SEQ ID NO: 2470078 - RNA, 19 nt, Homo sapiens
  misc_RNA (1)...(19): siRNA sense strand
agagaaucuugaauggaau

SEQ ID NO: 2470079 - RNA, 19 nt, Homo sapiens
  misc_RNA (1)...(19): siRNA sense strand
ccaugaugcaggagaaagu

SEQ ID NO: 2470080 - RNA, 19 nt, Homo sapiens
  misc_RNA (1)...(19): siRNA sense strand
aagacaagcaacaggcgaa

SEQ ID NO: 2470081 - RNA, 19 nt, Homo sapiens
  misc_RNA (1)...(19): siRNA sense strand
acaaaugcaugaagaagca

SEQ ID NO: 2470082 - RNA, 19 nt, Homo sapiens
  misc_RNA (1)...(19): siRNA sense strand
ccagaaacgggaucaguau

SEQ ID NO: 2470083 - RNA, 19 nt, Homo sapiens
  misc_RNA (1)...(19): siRNA sense strand
cuauacaccuuuauggaca

SEQ ID NO: 2470084 - RNA, 19 nt, Homo sapiens
  misc_RNA (1)...(19): siRNA sense strand
ggaacaacucaaugaagca

SEQ ID NO: 2470085 - RNA, 19 nt, Homo sapiens
  misc_RNA (1)...(19): siRNA sense strand
ccgagagagguuaguagua

SEQ ID NO: 2470086 - RNA, 19 nt, Homo sapiens
  misc_RNA (1)...(19): siRNA sense strand
ucacauaugaagauacgua

SEQ ID NO: 2470087 - RNA, 19 nt, Homo sapiens
  misc_RNA (1)...(19): siRNA sense strand
gaaaagagacugcgagcca

SEQ ID NO: 2470088 - RNA, 19 nt, Homo sapiens
  misc_RNA (1)...(19): siRNA sense strand
uugacuugauugaggaaca

SEQ ID NO: 2470089 - RNA, 19 nt, Homo sapiens
  misc_RNA (1)...(19): siRNA sense strand
acgagagacaguaggugua

SEQ ID NO: 2470090 - RNA, 19 nt, Homo sapiens
  misc_RNA (1)...(19): siRNA sense strand
augaagaagcagaggcugu

SEQ ID NO: 2470091 - RNA, 19 nt, Homo sapiens
  misc_RNA (1)...(19): siRNA sense strand
ucugaaugaaagagguuau

SEQ ID NO: 2470092 - RNA, 19 nt, Homo sapiens
  misc_RNA (1)...(19): siRNA sense strand
cagagggaccuguguauau

SEQ ID NO: 2470093 - RNA, 19 nt, Homo sapiens
  misc_RNA (1)...(19): siRNA sense strand
gggaauaagcacauugaag

SEQ ID NO: 2470094 - RNA, 19 nt, Homo sapiens
  misc_RNA (1)...(19): siRNA sense strand
ucuacaaaugcaugaagaa

SEQ ID NO: 2470095 - RNA, 19 nt, Homo sapiens
  misc_RNA (1)...(19): siRNA sense strand
ccgaguucagaaagauaua

SEQ ID NO: 2470096 - RNA, 19 nt, Homo sapiens
  misc_RNA (1)...(19): siRNA sense strand
acacagguuuguacgaaga

SEQ ID NO: 2470097 - RNA, 19 nt, Homo sapiens
  misc_RNA (1)...(19): siRNA sense strand
caugugaagacaaggccaa

SEQ ID NO: 2470098 - RNA, 19 nt, Homo sapiens
  misc_RNA (1)...(19): siRNA sense strand
cucuuugggccuugggaaa

SEQ ID NO: 2470099 - RNA, 19 nt, Homo sapiens
  misc_RNA (1)...(19): siRNA sense strand
gaaaauacaagccgagaga

SEQ ID NO: 2470100 - RNA, 19 nt, Homo sapiens
  misc_RNA (1)...(19): siRNA sense strand
gagguuaguaguagaaagu

SEQ ID NO: 2470101 - RNA, 19 nt, Homo sapiens
  misc_RNA (1)...(19): siRNA sense strand
aggagaaaguacagaagac

SEQ ID NO: 2470102 - RNA, 19 nt, Homo sapiens
  misc_RNA (1)...(19): siRNA sense strand
ggguauuauugagagcuaa

SEQ ID NO: 2470103 - RNA, 19 nt, Homo sapiens
  misc_RNA (1)...(19): siRNA sense strand
auugagagcuaauguugaa

SEQ ID NO: 2470104 - RNA, 19 nt, Homo sapiens
  misc_RNA (1)...(19): siRNA sense strand
cgaugaagcaugugaagac

SEQ ID NO: 2470105 - RNA, 19 nt, Homo sapiens
  misc_RNA (1)...(19): siRNA sense strand
agagaaucacagagaaaau

SEQ ID NO: 2470106 - RNA, 19 nt, Homo sapiens
  misc_RNA (1)...(19): siRNA sense strand
auacaagccgagagagguu

SEQ ID NO: 2470107 - RNA, 19 nt, Homo sapiens
  misc_RNA (1)...(19): siRNA sense strand
ccauaauccuuuagaagug

SEQ ID NO: 2470108 - RNA, 19 nt, Homo sapiens
  misc_RNA (1)...(19): siRNA sense strand
gccuuauagucuucauuua

SEQ ID NO: 2470109 - RNA, 19 nt, Homo sapiens
  misc_RNA (1)...(19): siRNA sense strand
aguuuugaguccagauuaa

SEQ ID NO: 2470110 - RNA, 19 nt, Homo sapiens
  misc_RNA (1)...(19): siRNA sense strand
ggagaaaguacagaagaca

SEQ ID NO: 2470111 - RNA, 19 nt, Homo sapiens
  misc_RNA (1)...(19): siRNA sense strand
gcucuagacauaauaguga

SEQ ID NO: 2470112 - RNA, 19 nt, Homo sapiens
  misc_RNA (1)...(19): siRNA sense strand
uaaagaaacaugugcgcaa

SEQ ID NO: 2470113 - RNA, 19 nt, Homo sapiens
  misc_RNA (1)...(19): siRNA sense strand
gcgucaagggccacagcaa

SEQ ID NO: 2470114 - RNA, 19 nt, Homo sapiens
  misc_RNA (1)...(19): siRNA sense strand
ccacauaaaugcaaccagu

SEQ ID NO: 2470115 - RNA, 19 nt, Homo sapiens
  misc_RNA (1)...(19): siRNA sense strand
ccgcagauggcaagcccaa

SEQ ID NO: 2470116 - RNA, 19 nt, Homo sapiens
  misc_RNA (1)...(19): siRNA sense strand
ucaucaagccgcaggucau

SEQ ID NO: 2470117 - RNA, 19 nt, Homo sapiens
  misc_RNA (1)...(19): siRNA sense strand
gcaacaaggccuuccacca

SEQ ID NO: 2470118 - RNA, 19 nt, Homo sapiens
  misc_RNA (1)...(19): siRNA sense strand
agcagguacugaaggaaaa

SEQ ID NO: 2470119 - RNA, 19 nt, Homo sapiens
  misc_RNA (1)...(19): siRNA sense strand
gcaagguguuuaacgcuca

SEQ ID NO: 2470120 - RNA, 19 nt, Homo sapiens
  misc_RNA (1)...(19): siRNA sense strand
cugaaauugcagugugaaa

SEQ ID NO: 2470121 - RNA, 19 nt, Homo sapiens
  misc_RNA (1)...(19): siRNA sense strand
ccgaaguucuuaaggaaaa

SEQ ID NO: 2470122 - RNA, 19 nt, Homo sapiens
  misc_RNA (1)...(19): siRNA sense strand
cagucuaaguauaagagaa

SEQ ID NO: 2470123 - RNA, 19 nt, Homo sapiens
  misc_RNA (1)...(19): siRNA sense strand
augaaaaugccuugaguaa

SEQ ID NO: 2470124 - RNA, 19 nt, Homo sapiens
  misc_RNA (1)...(19): siRNA sense strand
ugaagacagaagaaggaaa

SEQ ID NO: 2470125 - RNA, 19 nt, Homo sapiens
  misc_RNA (1)...(19): siRNA sense strand
ggaucaucaucuuagcaaa

SEQ ID NO: 2470126 - RNA, 19 nt, Homo sapiens
  misc_RNA (1)...(19): siRNA sense strand
ggagaauaaaccaaagaca

SEQ ID NO: 2470127 - RNA, 19 nt, Homo sapiens
  misc_RNA (1)...(19): siRNA sense strand
acuaaaggaauucaggaua

SEQ ID NO: 2470128 - RNA, 19 nt, Homo sapiens
  misc_RNA (1)...(19): siRNA sense strand
auucaggagaaguguguaa

SEQ ID NO: 2470129 - RNA, 19 nt, Homo sapiens
  misc_RNA (1)...(19): siRNA sense strand
auaaagaaaccaagagacu

SEQ ID NO: 2470130 - RNA, 19 nt, Homo sapiens
  misc_RNA (1)...(19): siRNA sense strand
gauuugaagaaacaggaaa

SEQ ID NO: 2470131 - RNA, 19 nt, Homo sapiens
  misc_RNA (1)...(19): siRNA sense strand
aguacgaguuuaugacaau

SEQ ID NO: 2470132 - RNA, 19 nt, Homo sapiens
  misc_RNA (1)...(19): siRNA sense strand
gguaccacuuaaugggcaa

SEQ ID NO: 2470133 - RNA, 19 nt, Homo sapiens
  misc_RNA (1)...(19): siRNA sense strand
gauaauuuacagaggaagu

SEQ ID NO: 2470134 - RNA, 19 nt, Homo sapiens
  misc_RNA (1)...(19): siRNA sense strand
aagcaagcauuguagaaca

SEQ ID NO: 2470135 - RNA, 19 nt, Homo sapiens
  misc_RNA (1)...(19): siRNA sense strand
ggagauugggugaagacau

SEQ ID NO: 2470136 - RNA, 19 nt, Homo sapiens
  misc_RNA (1)...(19): siRNA sense strand
agugaaacaugaagaaucu

SEQ ID NO: 2470137 - RNA, 19 nt, Homo sapiens
  misc_RNA (1)...(19): siRNA sense strand
acaucagaucagucagaua

SEQ ID NO: 2470138 - RNA, 19 nt, Homo sapiens
  misc_RNA (1)...(19): siRNA sense strand
guuuaugacaauacagaga

SEQ ID NO: 2470139 - RNA, 19 nt, Homo sapiens
  misc_RNA (1)...(19): siRNA sense strand
ucaucuuagcaaagugaaa

SEQ ID NO: 2470140 - RNA, 19 nt, Homo sapiens
  misc_RNA (1)...(19): siRNA sense strand
ucaagaaauacaaaggaca

SEQ ID NO: 2470141 - RNA, 19 nt, Homo sapiens
  misc_RNA (1)...(19): siRNA sense strand
guuaaaugaagcaagugaa

SEQ ID NO: 2470142 - RNA, 19 nt, Homo sapiens
  misc_RNA (1)...(19): siRNA sense strand
auuuaguaguggagagucu

SEQ ID NO: 2470143 - RNA, 19 nt, Homo sapiens
  misc_RNA (1)...(19): siRNA sense strand
aaacaggaagauagacauu

SEQ ID NO: 2470144 - RNA, 19 nt, Homo sapiens
  misc_RNA (1)...(19): siRNA sense strand
cugcagcacaacagaaauu

SEQ ID NO: 2470145 - RNA, 19 nt, Homo sapiens
  misc_RNA (1)...(19): siRNA sense strand
gaaaacaggaagauagaca

SEQ ID NO: 2470146 - RNA, 19 nt, Homo sapiens
  misc_RNA (1)...(19): siRNA sense strand
agaggaaguacgaguuuau

SEQ ID NO: 2470147 - RNA, 19 nt, Homo sapiens
  misc_RNA (1)...(19): siRNA sense strand
aguuaaaugaagcaaguga

SEQ ID NO: 2470148 - RNA, 19 nt, Homo sapiens
  misc_RNA (1)...(19): siRNA sense strand
caaucuggguuuaacaaaa

SEQ ID NO: 2470149 - RNA, 19 nt, Homo sapiens
  misc_RNA (1)...(19): siRNA sense strand
aaucuaaagcaucagacaa

SEQ ID NO: 2470150 - RNA, 19 nt, Homo sapiens
  misc_RNA (1)...(19): siRNA sense strand
aaguacgaguuuaugacaa

SEQ ID NO: 2470151 - RNA, 19 nt, Homo sapiens
  misc_RNA (1)...(19): siRNA sense strand
cuuacaagguaccacuuaa

SEQ ID NO: 2470152 - RNA, 19 nt, Homo sapiens
  misc_RNA (1)...(19): siRNA sense strand
agaaaugauauucaggaga

SEQ ID NO: 2470153 - RNA, 19 nt, Homo sapiens
  misc_RNA (1)...(19): siRNA sense strand
guuuggacuugaagacaga

SEQ ID NO: 2470154 - RNA, 19 nt, Homo sapiens
  misc_RNA (1)...(19): siRNA sense strand
uagcaaagugaaacaugaa

SEQ ID NO: 2470155 - RNA, 19 nt, Homo sapiens
  misc_RNA (1)...(19): siRNA sense strand
agaaauuugcugaagaacu

SEQ ID NO: 2470156 - RNA, 19 nt, Homo sapiens
  misc_RNA (1)...(19): siRNA sense strand
gacaacaaacccagagcau

SEQ ID NO: 2470157 - RNA, 19 nt, Homo sapiens
  misc_RNA (1)...(19): siRNA sense strand
guggaugccauuugugaau

SEQ ID NO: 2470158 - RNA, 19 nt, Homo sapiens
  misc_RNA (1)...(19): siRNA sense strand
agucuaaguauaagagaag

SEQ ID NO: 2470159 - RNA, 19 nt, Homo sapiens
  misc_RNA (1)...(19): siRNA sense strand
aggaaacagaagaagaguu

SEQ ID NO: 2470160 - RNA, 19 nt, Homo sapiens
  misc_RNA (1)...(19): siRNA sense strand
gagugguaacuaaaggaau

SEQ ID NO: 2470161 - RNA, 19 nt, Homo sapiens
  misc_RNA (1)...(19): siRNA sense strand
gagaauaaaccaaagacag

SEQ ID NO: 2470162 - RNA, 19 nt, Homo sapiens
  misc_RNA (1)...(19): siRNA sense strand
caacaaacccagagcaugc

SEQ ID NO: 2470163 - RNA, 19 nt, Homo sapiens
  misc_RNA (1)...(19): siRNA sense strand
cguaaaugugaauugccua

SEQ ID NO: 2470164 - RNA, 19 nt, Homo sapiens
  misc_RNA (1)...(19): siRNA sense strand
agaaacaggaaacagaaga

SEQ ID NO: 2470165 - RNA, 19 nt, Homo sapiens
  misc_RNA (1)...(19): siRNA sense strand
gcaucagacaagcggaguu

SEQ ID NO: 2470166 - RNA, 19 nt, Homo sapiens
  misc_RNA (1)...(19): siRNA sense strand
ggaaaagaauaaagaaacc

SEQ ID NO: 2470167 - RNA, 19 nt, Homo sapiens
  misc_RNA (1)...(19): siRNA sense strand
cuugaagacagaagaagga

SEQ ID NO: 2470168 - RNA, 19 nt, Homo sapiens
  misc_RNA (1)...(19): siRNA sense strand
aaguauaagagaagaacuc

SEQ ID NO: 2470169 - RNA, 19 nt, Homo sapiens
  misc_RNA (1)...(19): siRNA sense strand
cuacaugagcagagagaaa

SEQ ID NO: 2470170 - RNA, 19 nt, Homo sapiens
  misc_RNA (1)...(19): siRNA sense strand
gggaguacacacagggaaa

SEQ ID NO: 2470171 - RNA, 19 nt, Homo sapiens
  misc_RNA (1)...(19): siRNA sense strand
uggauaaagcccagauaaa

SEQ ID NO: 2470172 - RNA, 19 nt, Homo sapiens
  misc_RNA (1)...(19): siRNA sense strand
cagggaagauauaagggaa

SEQ ID NO: 2470173 - RNA, 19 nt, Homo sapiens
  misc_RNA (1)...(19): siRNA sense strand
agaucacaucagagagaaa

SEQ ID NO: 2470174 - RNA, 19 nt, Homo sapiens
  misc_RNA (1)...(19): siRNA sense strand
gggauuuaacugugaguca

SEQ ID NO: 2470175 - RNA, 19 nt, Homo sapiens
  misc_RNA (1)...(19): siRNA sense strand
ugggaaaggguuuggauuu

SEQ ID NO: 2470176 - RNA, 19 nt, Homo sapiens
  misc_RNA (1)...(19): siRNA sense strand
augcgaugaaugugggaaa

SEQ ID NO: 2470177 - RNA, 19 nt, Homo sapiens
  misc_RNA (1)...(19): siRNA sense strand
agggaagauauaagggaau

SEQ ID NO: 2470178 - RNA, 19 nt, Homo sapiens
  misc_RNA (1)...(19): siRNA sense strand
aggcaaagggguuaaguua

SEQ ID NO: 2470179 - RNA, 19 nt, Homo sapiens
  misc_RNA (1)...(19): siRNA sense strand
cccuauaaguguaaggcau

SEQ ID NO: 2470180 - RNA, 19 nt, Homo sapiens
  misc_RNA (1)...(19): siRNA sense strand
ccagaaucguggaggaaag

SEQ ID NO: 2470181 - RNA, 19 nt, Homo sapiens
  misc_RNA (1)...(19): siRNA sense strand
uggaaaggauuuugcguau

SEQ ID NO: 2470182 - RNA, 19 nt, Homo sapiens
  misc_RNA (1)...(19): siRNA sense strand
caggaaagggugacauuca

SEQ ID NO: 2470183 - RNA, 19 nt, Homo sapiens
  misc_RNA (1)...(19): siRNA sense strand
cagagagaaaccauauaaa

SEQ ID NO: 2470184 - RNA, 19 nt, Homo sapiens
  misc_RNA (1)...(19): siRNA sense strand
ggagaaaccauauaggugu

SEQ ID NO: 2470185 - RNA, 19 nt, Homo sapiens
  misc_RNA (1)...(19): siRNA sense strand
ggaagauauaagggaauuu

SEQ ID NO: 2470186 - RNA, 19 nt, Homo sapiens
  misc_RNA (1)...(19): siRNA sense strand
agagaucacaucagagaga

SEQ ID NO: 2470187 - RNA, 19 nt, Homo sapiens
  misc_RNA (1)...(19): siRNA sense strand
aagaugugaugcuggaaaa

SEQ ID NO: 2470188 - RNA, 19 nt, Homo sapiens
  misc_RNA (1)...(19): siRNA sense strand
ugaaugugggaaaggguuu

SEQ ID NO: 2470189 - RNA, 19 nt, Homo sapiens
  misc_RNA (1)...(19): siRNA sense strand
aggaaagggugacauucaa

SEQ ID NO: 2470190 - RNA, 19 nt, Homo sapiens
  misc_RNA (1)...(19): siRNA sense strand
cagcacucaccuaggagaa

SEQ ID NO: 2470191 - RNA, 19 nt, Homo sapiens
  misc_RNA (1)...(19): siRNA sense strand
ccaagaauguaaaggagag

SEQ ID NO: 2470192 - RNA, 19 nt, Homo sapiens
  misc_RNA (1)...(19): siRNA sense strand
agucaggauuauaucguga

SEQ ID NO: 2470193 - RNA, 19 nt, Homo sapiens
  misc_RNA (1)...(19): siRNA sense strand
augugaugagugugguaaa

SEQ ID NO: 2470194 - RNA, 19 nt, Homo sapiens
  misc_RNA (1)...(19): siRNA sense strand
agauaucacagcauggcaa

SEQ ID NO: 2470195 - RNA, 19 nt, Homo sapiens
  misc_RNA (1)...(19): siRNA sense strand
caaacagagcucagaccuu

SEQ ID NO: 2470196 - RNA, 19 nt, Homo sapiens
  misc_RNA (1)...(19): siRNA sense strand
auauagguguggugagugu

SEQ ID NO: 2470197 - RNA, 19 nt, Homo sapiens
  misc_RNA (1)...(19): siRNA sense strand
gugaagagugggcaggcau

SEQ ID NO: 2470198 - RNA, 19 nt, Homo sapiens
  misc_RNA (1)...(19): siRNA sense strand
aggaaagccaacauaauga

SEQ ID NO: 2470199 - RNA, 19 nt, Homo sapiens
  misc_RNA (1)...(19): siRNA sense strand
cccaagaauguaaaggaga

SEQ ID NO: 2470200 - RNA, 19 nt, Homo sapiens
  misc_RNA (1)...(19): siRNA sense strand
guguaaggcaugugguaag

SEQ ID NO: 2470201 - RNA, 19 nt, Homo sapiens
  misc_RNA (1)...(19): siRNA sense strand
guuagugagagacgggauu

SEQ ID NO: 2470202 - RNA, 19 nt, Homo sapiens
  misc_RNA (1)...(19): siRNA sense strand
cuuauaaaugugaccagua

SEQ ID NO: 2470203 - RNA, 19 nt, Homo sapiens
  misc_RNA (1)...(19): siRNA sense strand
aaugugaccaguauggaaa

SEQ ID NO: 2470204 - RNA, 19 nt, Homo sapiens
  misc_RNA (1)...(19): siRNA sense strand
uggaggaaagccaacauaa

SEQ ID NO: 2470205 - RNA, 19 nt, Homo sapiens
  misc_RNA (1)...(19): siRNA sense strand
gugggaaaggguuuggauu

SEQ ID NO: 2470206 - RNA, 19 nt, Homo sapiens
  misc_RNA (1)...(19): siRNA sense strand
aggauuauaucgugaaccu

SEQ ID NO: 2470207 - RNA, 19 nt, Homo sapiens
  misc_RNA (1)...(19): siRNA sense strand
gauaucacagcauggcaaa

SEQ ID NO: 2470208 - RNA, 19 nt, Homo sapiens
  misc_RNA (1)...(19): siRNA sense strand
aggcaugugguaagggcuu

SEQ ID NO: 2470209 - RNA, 19 nt, Homo sapiens
  misc_RNA (1)...(19): siRNA sense strand
agggaauuuacauggaaga

SEQ ID NO: 2470210 - RNA, 19 nt, Homo sapiens
  misc_RNA (1)...(19): siRNA sense strand
ggaauuuacauggaagaga

SEQ ID NO: 2470211 - RNA, 19 nt, Homo sapiens
  misc_RNA (1)...(19): siRNA sense strand
aggagaggacccugguaga

SEQ ID NO: 2470212 - RNA, 19 nt, Homo sapiens
  misc_RNA (1)...(19): siRNA sense strand
aagaauguggcaagggcuu

SEQ ID NO: 2470213 - RNA, 19 nt, Homo sapiens
  misc_RNA (1)...(19): siRNA sense strand
ccucagaguccacacaaga

SEQ ID NO: 2470214 - RNA, 19 nt, Homo sapiens
  misc_RNA (1)...(19): siRNA sense strand
ccuucugacucaucaaaga

SEQ ID NO: 2470215 - RNA, 19 nt, Homo sapiens
  misc_RNA (1)...(19): siRNA sense strand
gaucagagcuccaaccuuc

SEQ ID NO: 2470216 - RNA, 19 nt, Homo sapiens
  misc_RNA (1)...(19): siRNA sense strand
auacaaaugcaaugugugu

SEQ ID NO: 2470217 - RNA, 19 nt, Homo sapiens
  misc_RNA (1)...(19): siRNA sense strand
acaugagcagagagaaaca

SEQ ID NO: 2470218 - RNA, 19 nt, Homo sapiens
  misc_RNA (1)...(19): siRNA sense strand
augcagaauuugaggagau

SEQ ID NO: 2470219 - RNA, 19 nt, Homo sapiens
  misc_RNA (1)...(19): siRNA sense strand
caagcagagaagaaagaaa

SEQ ID NO: 2470220 - RNA, 19 nt, Homo sapiens
  misc_RNA (1)...(19): siRNA sense strand
gagaagaaagaaaaggaaa

SEQ ID NO: 2470221 - RNA, 19 nt, Homo sapiens
  misc_RNA (1)...(19): siRNA sense strand
agaaaugacugcagccaga

SEQ ID NO: 2470222 - RNA, 19 nt, Homo sapiens
  misc_RNA (1)...(19): siRNA sense strand
acaagcaagcagagaagaa

SEQ ID NO: 2470223 - RNA, 19 nt, Homo sapiens
  misc_RNA (1)...(19): siRNA sense strand
gauaagugguuuuggucaa

SEQ ID NO: 2470224 - RNA, 19 nt, Homo sapiens
  misc_RNA (1)...(19): siRNA sense strand
ggagaaaacucaaggugga

SEQ ID NO: 2470225 - RNA, 19 nt, Homo sapiens
  misc_RNA (1)...(19): siRNA sense strand
gaugauggcucaagaggca

SEQ ID NO: 2470226 - RNA, 19 nt, Homo sapiens
  misc_RNA (1)...(19): siRNA sense strand
agaagaauguggaaaggga

SEQ ID NO: 2470227 - RNA, 19 nt, Homo sapiens
  misc_RNA (1)...(19): siRNA sense strand
uggaaaaggaggaaggaga

SEQ ID NO: 2470228 - RNA, 19 nt, Homo sapiens
  misc_RNA (1)...(19): siRNA sense strand
uggaaagggaccaaagaga

SEQ ID NO: 2470229 - RNA, 19 nt, Homo sapiens
  misc_RNA (1)...(19): siRNA sense strand
aagaggaagaguuggaaaa

SEQ ID NO: 2470230 - RNA, 19 nt, Homo sapiens
  misc_RNA (1)...(19): siRNA sense strand
aagcagagaagaaagaaaa

SEQ ID NO: 2470231 - RNA, 19 nt, Homo sapiens
  misc_RNA (1)...(19): siRNA sense strand
aggagaaagaggaagaguu

SEQ ID NO: 2470232 - RNA, 19 nt, Homo sapiens
  misc_RNA (1)...(19): siRNA sense strand
ucaucugggccaagcaaua

SEQ ID NO: 2470233 - RNA, 19 nt, Homo sapiens
  misc_RNA (1)...(19): siRNA sense strand
cugccaaaggccaguuuaa

SEQ ID NO: 2470234 - RNA, 19 nt, Homo sapiens
  misc_RNA (1)...(19): siRNA sense strand
aggccaguuuaaagaagaa

SEQ ID NO: 2470235 - RNA, 19 nt, Homo sapiens
  misc_RNA (1)...(19): siRNA sense strand
agaaaacaguucaggauca

SEQ ID NO: 2470236 - RNA, 19 nt, Homo sapiens
  misc_RNA (1)...(19): siRNA sense strand
caguaauggggaaagaaaa

SEQ ID NO: 2470237 - RNA, 19 nt, Homo sapiens
  misc_RNA (1)...(19): siRNA sense strand
accacauacucaagagauu

SEQ ID NO: 2470238 - RNA, 19 nt, Homo sapiens
  misc_RNA (1)...(19): siRNA sense strand
gaauaaagaagaaugugga

SEQ ID NO: 2470239 - RNA, 19 nt, Homo sapiens
  misc_RNA (1)...(19): siRNA sense strand
guuuaaagaagaaagagga

SEQ ID NO: 2470240 - RNA, 19 nt, Homo sapiens
  misc_RNA (1)...(19): siRNA sense strand
caagcagggaacaggagaa

SEQ ID NO: 2470241 - RNA, 19 nt, Homo sapiens
  misc_RNA (1)...(19): siRNA sense strand
aaagaaagaaggaagcuca

SEQ ID NO: 2470242 - RNA, 19 nt, Homo sapiens
  misc_RNA (1)...(19): siRNA sense strand
gggaaauggaggcggcugu

SEQ ID NO: 2470243 - RNA, 19 nt, Homo sapiens
  misc_RNA (1)...(19): siRNA sense strand
aaagaggaagaguuggaaa

SEQ ID NO: 2470244 - RNA, 19 nt, Homo sapiens
  misc_RNA (1)...(19): siRNA sense strand
aggaagaccgacuaaagaa

SEQ ID NO: 2470245 - RNA, 19 nt, Homo sapiens
  misc_RNA (1)...(19): siRNA sense strand
aggcagaacagaucagcau

SEQ ID NO: 2470246 - RNA, 19 nt, Homo sapiens
  misc_RNA (1)...(19): siRNA sense strand
cagacaaggagccaggaau

SEQ ID NO: 2470247 - RNA, 19 nt, Homo sapiens
  misc_RNA (1)...(19): siRNA sense strand
aagaaauccaauagacuca

SEQ ID NO: 2470248 - RNA, 19 nt, Homo sapiens
  misc_RNA (1)...(19): siRNA sense strand
gcacagacaggaagaccga

SEQ ID NO: 2470249 - RNA, 19 nt, Homo sapiens
  misc_RNA (1)...(19): siRNA sense strand
aggaagaguuggaaaagga

SEQ ID NO: 2470250 - RNA, 19 nt, Homo sapiens
  misc_RNA (1)...(19): siRNA sense strand
ccaguuuaaagaagaaaga

SEQ ID NO: 2470251 - RNA, 19 nt, Homo sapiens
  misc_RNA (1)...(19): siRNA sense strand
cugauaaugcuaauggaga

SEQ ID NO: 2470252 - RNA, 19 nt, Homo sapiens
  misc_RNA (1)...(19): siRNA sense strand
aagcagggaacaggagaaa

SEQ ID NO: 2470253 - RNA, 19 nt, Homo sapiens
  misc_RNA (1)...(19): siRNA sense strand
uggccaggcaugauagaau

SEQ ID NO: 2470254 - RNA, 19 nt, Homo sapiens
  misc_RNA (1)...(19): siRNA sense strand
aaaaggagaaagaggaaga

SEQ ID NO: 2470255 - RNA, 19 nt, Homo sapiens
  misc_RNA (1)...(19): siRNA sense strand
agacaggaagaccgacuaa

SEQ ID NO: 2470256 - RNA, 19 nt, Homo sapiens
  misc_RNA (1)...(19): siRNA sense strand
cagaauuugaggagauugu

SEQ ID NO: 2470257 - RNA, 19 nt, Homo sapiens
  misc_RNA (1)...(19): siRNA sense strand
agaagaaauccaauagacu

SEQ ID NO: 2470258 - RNA, 19 nt, Homo sapiens
  misc_RNA (1)...(19): siRNA sense strand
cucaugagaagguggagaa

SEQ ID NO: 2470259 - RNA, 19 nt, Homo sapiens
  misc_RNA (1)...(19): siRNA sense strand
augagaagguggagaaaac

SEQ ID NO: 2470260 - RNA, 19 nt, Homo sapiens
  misc_RNA (1)...(19): siRNA sense strand
gcacaaaucaacaagcaag

SEQ ID NO: 2470261 - RNA, 19 nt, Homo sapiens
  misc_RNA (1)...(19): siRNA sense strand
agaucagggaccagcaaaa

SEQ ID NO: 2470262 - RNA, 19 nt, Homo sapiens
  misc_RNA (1)...(19): siRNA sense strand
ccucuaagaagaaauccaa

SEQ ID NO: 2470263 - RNA, 19 nt, Homo sapiens
  misc_RNA (1)...(19): siRNA sense strand
ugauagaaucugauccuga

SEQ ID NO: 2470264 - RNA, 19 nt, Homo sapiens
  misc_RNA (1)...(19): siRNA sense strand
acaguaauggggaaagaaa

SEQ ID NO: 2470265 - RNA, 19 nt, Homo sapiens
  misc_RNA (1)...(19): siRNA sense strand
ugauaaugcuaauggagag

SEQ ID NO: 2470266 - RNA, 19 nt, Homo sapiens
  misc_RNA (1)...(19): siRNA sense strand
ggcacaaaucaacaagcaa

SEQ ID NO: 2470267 - RNA, 19 nt, Homo sapiens
  misc_RNA (1)...(19): siRNA sense strand
uuguaaucguugaggaaau

SEQ ID NO: 2470268 - RNA, 19 nt, Homo sapiens
  misc_RNA (1)...(19): siRNA sense strand
gagauuagugcgaggguca

SEQ ID NO: 2470269 - RNA, 19 nt, Homo sapiens
  misc_RNA (1)...(19): siRNA sense strand
gguguuaacugcaaggagu

SEQ ID NO: 2470270 - RNA, 19 nt, Homo sapiens
  misc_RNA (1)...(19): siRNA sense strand
guguuaacugcaaggagua

SEQ ID NO: 2470271 - RNA, 19 nt, Homo sapiens
  misc_RNA (1)...(19): siRNA sense strand
ggucagucugugcuggaaa

SEQ ID NO: 2470272 - RNA, 19 nt, Homo sapiens
  misc_RNA (1)...(19): siRNA sense strand
gggccauagcgguuguaau

SEQ ID NO: 2470273 - RNA, 19 nt, Homo sapiens
  misc_RNA (1)...(19): siRNA sense strand
cuuccagaucagaaagcaa

SEQ ID NO: 2470274 - RNA, 19 nt, Homo sapiens
  misc_RNA (1)...(19): siRNA sense strand
gaagguacaacuuggccaa

SEQ ID NO: 2470275 - RNA, 19 nt, Homo sapiens
  misc_RNA (1)...(19): siRNA sense strand
ccucauaagugguagaacc

SEQ ID NO: 2470276 - RNA, 19 nt, Homo sapiens
  misc_RNA (1)...(19): siRNA sense strand
accgauguggugagagaua

SEQ ID NO: 2470277 - RNA, 19 nt, Homo sapiens
  misc_RNA (1)...(19): siRNA sense strand
ccaaagugcaagauccaca

SEQ ID NO: 2470278 - RNA, 19 nt, Homo sapiens
  misc_RNA (1)...(19): siRNA sense strand
cguauugauuccagcacca

SEQ ID NO: 2470279 - RNA, 19 nt, Homo sapiens
  misc_RNA (1)...(19): siRNA sense strand
uggccaaguagaaaucaaa

SEQ ID NO: 2470280 - RNA, 19 nt, Homo sapiens
  misc_RNA (1)...(19): siRNA sense strand
ggagauuagcaaugaagcu

SEQ ID NO: 2470281 - RNA, 19 nt, Homo sapiens
  misc_RNA (1)...(19): siRNA sense strand
gcagauaaucauugggcaa

SEQ ID NO: 2470282 - RNA, 19 nt, Homo sapiens
  misc_RNA (1)...(19): siRNA sense strand
ccgagaagugggagauuuu

SEQ ID NO: 2470283 - RNA, 19 nt, Homo sapiens
  misc_RNA (1)...(19): siRNA sense strand
caaaauggugggaagagaa

SEQ ID NO: 2470284 - RNA, 19 nt, Homo sapiens
  misc_RNA (1)...(19): siRNA sense strand
ccaaaauggugggaagaga

SEQ ID NO: 2470285 - RNA, 19 nt, Homo sapiens
  misc_RNA (1)...(19): siRNA sense strand
cugugaggaugaagaaacu

SEQ ID NO: 2470286 - RNA, 19 nt, Homo sapiens
  misc_RNA (1)...(19): siRNA sense strand
agauauuguaccugcugua

SEQ ID NO: 2470287 - RNA, 19 nt, Homo sapiens
  misc_RNA (1)...(19): siRNA sense strand
agauaaucauugggcaaaa

SEQ ID NO: 2470288 - RNA, 19 nt, Homo sapiens
  misc_RNA (1)...(19): siRNA sense strand
agagaaaagcacuugagaa

SEQ ID NO: 2470289 - RNA, 19 nt, Homo sapiens
  misc_RNA (1)...(19): siRNA sense strand
cgauuugagcggagugaga

SEQ ID NO: 2470290 - RNA, 19 nt, Homo sapiens
  misc_RNA (1)...(19): siRNA sense strand
gguacuucaucgaccgaga

SEQ ID NO: 2470291 - RNA, 19 nt, Homo sapiens
  misc_RNA (1)...(19): siRNA sense strand
gcucugacgccgaagacga

SEQ ID NO: 2470292 - RNA, 19 nt, Homo sapiens
  misc_RNA (1)...(19): siRNA sense strand
ggaaccagcuggagggcaa

SEQ ID NO: 2470293 - RNA, 19 nt, Homo sapiens
  misc_RNA (1)...(19): siRNA sense strand
agaucaagcaggaggguga

SEQ ID NO: 2470294 - RNA, 19 nt, Homo sapiens
  misc_RNA (1)...(19): siRNA sense strand
uggagaaccugcugcgcaa

SEQ ID NO: 2470295 - RNA, 19 nt, Homo sapiens
  misc_RNA (1)...(19): siRNA sense strand
ccgggauggccgagaagaa

SEQ ID NO: 2470296 - RNA, 19 nt, Homo sapiens
  misc_RNA (1)...(19): siRNA sense strand
cuacugaccuagaggcuca

SEQ ID NO: 2470297 - RNA, 19 nt, Homo sapiens
  misc_RNA (1)...(19): siRNA sense strand
ggcuggagaacguggagaa

SEQ ID NO: 2470298 - RNA, 19 nt, Homo sapiens
  misc_RNA (1)...(19): siRNA sense strand
agaaggagcucuacaagca

SEQ ID NO: 2470299 - RNA, 19 nt, Homo sapiens
  misc_RNA (1)...(19): siRNA sense strand
ccgagaagaagcuggcuga

SEQ ID NO: 2470300 - RNA, 19 nt, Homo sapiens
  misc_RNA (1)...(19): siRNA sense strand
uggagaacguggagaaccu

SEQ ID NO: 2470301 - RNA, 19 nt, Homo sapiens
  misc_RNA (1)...(19): siRNA sense strand
gcuccaagcucaucgacca

SEQ ID NO: 2470302 - RNA, 19 nt, Homo sapiens
  misc_RNA (1)...(19): siRNA sense strand
gggaaggagcccugcaacu

SEQ ID NO: 2470303 - RNA, 19 nt, Homo sapiens
  misc_RNA (1)...(19): siRNA sense strand
cugagagggacauggguga

SEQ ID NO: 2470304 - RNA, 19 nt, Homo sapiens
  misc_RNA (1)...(19): siRNA sense strand
cggacaacggagaggccau

SEQ ID NO: 2470305 - RNA, 19 nt, Homo sapiens
  misc_RNA (1)...(19): siRNA sense strand
gcaaaagcuucauccgcaa

SEQ ID NO: 2470306 - RNA, 19 nt, Homo sapiens
  misc_RNA (1)...(19): siRNA sense strand
gaaccgggauggccgagaa

SEQ ID NO: 2470307 - RNA, 19 nt, Homo sapiens
  misc_RNA (1)...(19): siRNA sense strand
gcaaggaccaccuccgcaa

SEQ ID NO: 2470308 - RNA, 19 nt, Homo sapiens
  misc_RNA (1)...(19): siRNA sense strand
auggagaggaagauugaau

SEQ ID NO: 2470309 - RNA, 19 nt, Homo sapiens
  misc_RNA (1)...(19): siRNA sense strand
ccuccacggaagauguaaa

SEQ ID NO: 2470310 - RNA, 19 nt, Homo sapiens
  misc_RNA (1)...(19): siRNA sense strand
ccagauugaacaagggaag

SEQ ID NO: 2470311 - RNA, 19 nt, Homo sapiens
  misc_RNA (1)...(19): siRNA sense strand
ggacaaagcucuuagcaag

SEQ ID NO: 2470312 - RNA, 19 nt, Homo sapiens
  misc_RNA (1)...(19): siRNA sense strand
gaagagaaccagagccuga

SEQ ID NO: 2470313 - RNA, 19 nt, Homo sapiens
  misc_RNA (1)...(19): siRNA sense strand
cggacaaagcucuuagcaa

SEQ ID NO: 2470314 - RNA, 19 nt, Homo sapiens
  misc_RNA (1)...(19): siRNA sense strand
gaacagcagugcaaggaga

SEQ ID NO: 2470315 - RNA, 19 nt, Homo sapiens
  misc_RNA (1)...(19): siRNA sense strand
aagcaaagcacauggcuca

SEQ ID NO: 2470316 - RNA, 19 nt, Homo sapiens
  misc_RNA (1)...(19): siRNA sense strand
agaaagaagagaaagagga

SEQ ID NO: 2470317 - RNA, 19 nt, Homo sapiens
  misc_RNA (1)...(19): siRNA sense strand
gccaaaaggcagaagaaga

SEQ ID NO: 2470318 - RNA, 19 nt, Homo sapiens
  misc_RNA (1)...(19): siRNA sense strand
cggaagagaaccagagccu

SEQ ID NO: 2470319 - RNA, 19 nt, Homo sapiens
  misc_RNA (1)...(19): siRNA sense strand
ggagagagcgagaggaggu

SEQ ID NO: 2470320 - RNA, 19 nt, Homo sapiens
  misc_RNA (1)...(19): siRNA sense strand
aaacuaagugugauggaga

SEQ ID NO: 2470321 - RNA, 19 nt, Homo sapiens
  misc_RNA (1)...(19): siRNA sense strand
gaaagaggauugcccggaa

SEQ ID NO: 2470322 - RNA, 19 nt, Homo sapiens
  misc_RNA (1)...(19): siRNA sense strand
ggaggagaggagagagcga

SEQ ID NO: 2470323 - RNA, 19 nt, Homo sapiens
  misc_RNA (1)...(19): siRNA sense strand
gcuucuaccaggaggagau

SEQ ID NO: 2470324 - RNA, 19 nt, Homo sapiens
  misc_RNA (1)...(19): siRNA sense strand
aggcagaagaagaugggca

SEQ ID NO: 2470325 - RNA, 19 nt, Homo sapiens
  misc_RNA (1)...(19): siRNA sense strand
agacauacuacgaggaggu

SEQ ID NO: 2470326 - RNA, 19 nt, Homo sapiens
  misc_RNA (1)...(19): siRNA sense strand
guguacaagcacaagaaaa

SEQ ID NO: 2470327 - RNA, 19 nt, Homo sapiens
  misc_RNA (1)...(19): siRNA sense strand
aagaagauauguaugacga

SEQ ID NO: 2470328 - RNA, 19 nt, Homo sapiens
  misc_RNA (1)...(19): siRNA sense strand
aggagaggagagagcgaga

SEQ ID NO: 2470329 - RNA, 19 nt, Homo sapiens
  misc_RNA (1)...(19): siRNA sense strand
gcgccaaaaggcagaagaa

SEQ ID NO: 2470330 - RNA, 19 nt, Homo sapiens
  misc_RNA (1)...(19): siRNA sense strand
ucagcaaacuccagaccga

SEQ ID NO: 2470331 - RNA, 19 nt, Homo sapiens
  misc_RNA (1)...(19): siRNA sense strand
gguuauguggaguggagca

SEQ ID NO: 2470332 - RNA, 19 nt, Homo sapiens
  misc_RNA (1)...(19): siRNA sense strand
gaagauauguaugacgaga

SEQ ID NO: 2470333 - RNA, 19 nt, Homo sapiens
  misc_RNA (1)...(19): siRNA sense strand
ccgcaaagccaggaagucu

SEQ ID NO: 2470334 - RNA, 19 nt, Homo sapiens
  misc_RNA (1)...(19): siRNA sense strand
uggcagagagaguggcuca

SEQ ID NO: 2470335 - RNA, 19 nt, Homo sapiens
  misc_RNA (1)...(19): siRNA sense strand
gguggaaggaggaggacgu

SEQ ID NO: 2470336 - RNA, 19 nt, Homo sapiens
  misc_RNA (1)...(19): siRNA sense strand
uggaaagccuugaggggca

SEQ ID NO: 2470337 - RNA, 19 nt, Homo sapiens
  misc_RNA (1)...(19): siRNA sense strand
ggagguggaaggaggagga

SEQ ID NO: 2470338 - RNA, 19 nt, Homo sapiens
  misc_RNA (1)...(19): siRNA sense strand
gugcgagagcagguggaaa

SEQ ID NO: 2470339 - RNA, 19 nt, Homo sapiens
  misc_RNA (1)...(19): siRNA sense strand
gcuaugaggcccuggcuga

SEQ ID NO: 2470340 - RNA, 19 nt, Homo sapiens
  misc_RNA (1)...(19): siRNA sense strand
ccuaugagcagcaggagga

SEQ ID NO: 2470341 - RNA, 19 nt, Homo sapiens
  misc_RNA (1)...(19): siRNA sense strand
ccacaagguuaccagggca

SEQ ID NO: 2470342 - RNA, 19 nt, Homo sapiens
  misc_RNA (1)...(19): siRNA sense strand
gcaagcacgucaaggccca

SEQ ID NO: 2470343 - RNA, 19 nt, Homo sapiens
  misc_RNA (1)...(19): siRNA sense strand
aagaauaggcugugggaaa

SEQ ID NO: 2470344 - RNA, 19 nt, Homo sapiens
  misc_RNA (1)...(19): siRNA sense strand
ccaaauacggagacagaaa

SEQ ID NO: 2470345 - RNA, 19 nt, Homo sapiens
  misc_RNA (1)...(19): siRNA sense strand
aaagaaaugaggugggaaa

SEQ ID NO: 2470346 - RNA, 19 nt, Homo sapiens
  misc_RNA (1)...(19): siRNA sense strand
cugauaaggauuuggaaua

SEQ ID NO: 2470347 - RNA, 19 nt, Homo sapiens
  misc_RNA (1)...(19): siRNA sense strand
uggacaaguugauaggaua

SEQ ID NO: 2470348 - RNA, 19 nt, Homo sapiens
  misc_RNA (1)...(19): siRNA sense strand
ggacaaguugauaggauau

SEQ ID NO: 2470349 - RNA, 19 nt, Homo sapiens
  misc_RNA (1)...(19): siRNA sense strand
acaagaaugaggaggaaga

SEQ ID NO: 2470350 - RNA, 19 nt, Homo sapiens
  misc_RNA (1)...(19): siRNA sense strand
cggcagaagaauacaauga

SEQ ID NO: 2470351 - RNA, 19 nt, Homo sapiens
  misc_RNA (1)...(19): siRNA sense strand
gguuggaauuccuggguga

SEQ ID NO: 2470352 - RNA, 19 nt, Homo sapiens
  misc_RNA (1)...(19): siRNA sense strand
ggcaagacgcacaggaauu

SEQ ID NO: 2470353 - RNA, 19 nt, Homo sapiens
  misc_RNA (1)...(19): siRNA sense strand
agaugaugccggagaauuu

SEQ ID NO: 2470354 - RNA, 19 nt, Homo sapiens
  misc_RNA (1)...(19): siRNA sense strand
ucuggaagaaggaggauua

SEQ ID NO: 2470355 - RNA, 19 nt, Homo sapiens
  misc_RNA (1)...(19): siRNA sense strand
ccaaguagggagaagaaga

SEQ ID NO: 2470356 - RNA, 19 nt, Homo sapiens
  misc_RNA (1)...(19): siRNA sense strand
cagcauuuauccuggagaa

SEQ ID NO: 2470357 - RNA, 19 nt, Homo sapiens
  misc_RNA (1)...(19): siRNA sense strand
ggcaaagacaagaacuaua

SEQ ID NO: 2470358 - RNA, 19 nt, Homo sapiens
  misc_RNA (1)...(19): siRNA sense strand
agaaugaggaggaagaaga

SEQ ID NO: 2470359 - RNA, 19 nt, Homo sapiens
  misc_RNA (1)...(19): siRNA sense strand
gccuaaugcauuuggacaa

SEQ ID NO: 2470360 - RNA, 19 nt, Homo sapiens
  misc_RNA (1)...(19): siRNA sense strand
gccaaauacugaucgacaa

SEQ ID NO: 2470361 - RNA, 19 nt, Homo sapiens
  misc_RNA (1)...(19): siRNA sense strand
ugauuaugaccgagggaga

SEQ ID NO: 2470362 - RNA, 19 nt, Homo sapiens
  misc_RNA (1)...(19): siRNA sense strand
gggugaugcuguuguugaa

SEQ ID NO: 2470363 - RNA, 19 nt, Homo sapiens
  misc_RNA (1)...(19): siRNA sense strand
aguacagacaagaguuaaa

SEQ ID NO: 2470364 - RNA, 19 nt, Homo sapiens
  misc_RNA (1)...(19): siRNA sense strand
gcaucaagagagagagcca

SEQ ID NO: 2470365 - RNA, 19 nt, Homo sapiens
  misc_RNA (1)...(19): siRNA sense strand
ccaauauuccacuguguaa

SEQ ID NO: 2470366 - RNA, 19 nt, Homo sapiens
  misc_RNA (1)...(19): siRNA sense strand
gcccaaauacggagacaga

SEQ ID NO: 2470367 - RNA, 19 nt, Homo sapiens
  misc_RNA (1)...(19): siRNA sense strand
cauugagaacugugggauu

SEQ ID NO: 2470368 - RNA, 19 nt, Homo sapiens
  misc_RNA (1)...(19): siRNA sense strand
gaguauaagagaucuggaa

SEQ ID NO: 2470369 - RNA, 19 nt, Homo sapiens
  misc_RNA (1)...(19): siRNA sense strand
ccauggaucaggugggaga

SEQ ID NO: 2470370 - RNA, 19 nt, Homo sapiens
  misc_RNA (1)...(19): siRNA sense strand
cuguuuauuucaagggaga

SEQ ID NO: 2470371 - RNA, 19 nt, Homo sapiens
  misc_RNA (1)...(19): siRNA sense strand
gggaaagagagcaucaaga

SEQ ID NO: 2470372 - RNA, 19 nt, Homo sapiens
  misc_RNA (1)...(19): siRNA sense strand
cuggcaaagacaagaacua

SEQ ID NO: 2470373 - RNA, 19 nt, Homo sapiens
  misc_RNA (1)...(19): siRNA sense strand
gggagaaagaauaggcugu

SEQ ID NO: 2470374 - RNA, 19 nt, Homo sapiens
  misc_RNA (1)...(19): siRNA sense strand
cuggaaagguccuacaaaa

SEQ ID NO: 2470375 - RNA, 19 nt, Homo sapiens
  misc_RNA (1)...(19): siRNA sense strand
ugacaagaaugaggaggaa

SEQ ID NO: 2470376 - RNA, 19 nt, Homo sapiens
  misc_RNA (1)...(19): siRNA sense strand
augacaaauuugaggagga

SEQ ID NO: 2470377 - RNA, 19 nt, Homo sapiens
  misc_RNA (1)...(19): siRNA sense strand
ccagaaaggcugaaacacu

SEQ ID NO: 2470378 - RNA, 19 nt, Homo sapiens
  misc_RNA (1)...(19): siRNA sense strand
cgaacggagcagagagcga

SEQ ID NO: 2470379 - RNA, 19 nt, Homo sapiens
  misc_RNA (1)...(19): siRNA sense strand
agacacaggcaucgagaca

SEQ ID NO: 2470380 - RNA, 19 nt, Homo sapiens
  misc_RNA (1)...(19): siRNA sense strand
ccgaggacgaggaggacau

SEQ ID NO: 2470381 - RNA, 19 nt, Homo sapiens
  misc_RNA (1)...(19): siRNA sense strand
caaagaaacuugaacugga

SEQ ID NO: 2470382 - RNA, 19 nt, Homo sapiens
  misc_RNA (1)...(19): siRNA sense strand
cguuauugcagaaaucaaa

SEQ ID NO: 2470383 - RNA, 19 nt, Homo sapiens
  misc_RNA (1)...(19): siRNA sense strand
gaauacaaugagacgagaa

SEQ ID NO: 2470384 - RNA, 19 nt, Homo sapiens
  misc_RNA (1)...(19): siRNA sense strand
cggaagaaagggauuaaca

SEQ ID NO: 2470385 - RNA, 19 nt, Homo sapiens
  misc_RNA (1)...(19): siRNA sense strand
aagagagcaucaagagaga

SEQ ID NO: 2470386 - RNA, 19 nt, Homo sapiens
  misc_RNA (1)...(19): siRNA sense strand
acaaauuugaggaggaguu

SEQ ID NO: 2470387 - RNA, 19 nt, Homo sapiens
  misc_RNA (1)...(19): siRNA sense strand
ccaauaugcuucaguggga

SEQ ID NO: 2470388 - RNA, 19 nt, Homo sapiens
  misc_RNA (1)...(19): siRNA sense strand
gagagcaucaagagagaga

SEQ ID NO: 2470389 - RNA, 19 nt, Homo sapiens
  misc_RNA (1)...(19): siRNA sense strand
ccagaugaaugauggacca

SEQ ID NO: 2470390 - RNA, 19 nt, Homo sapiens
  misc_RNA (1)...(19): siRNA sense strand
gcagaagaaugcaaaggca

SEQ ID NO: 2470391 - RNA, 19 nt, Homo sapiens
  misc_RNA (1)...(19): siRNA sense strand
agaccaugccugacaagaa

SEQ ID NO: 2470392 - RNA, 19 nt, Homo sapiens
  misc_RNA (1)...(19): siRNA sense strand
uacaaugagacgagaagua

SEQ ID NO: 2470393 - RNA, 19 nt, Homo sapiens
  misc_RNA (1)...(19): siRNA sense strand
agccaaggauucuggaaaa

SEQ ID NO: 2470394 - RNA, 19 nt, Homo sapiens
  misc_RNA (1)...(19): siRNA sense strand
cugacaagaaugaggagga

SEQ ID NO: 2470395 - RNA, 19 nt, Homo sapiens
  misc_RNA (1)...(19): siRNA sense strand
augaagauuuagagaguuc

SEQ ID NO: 2470396 - RNA, 19 nt, Homo sapiens
  misc_RNA (1)...(19): siRNA sense strand
ccagugaauccgaguguga

SEQ ID NO: 2470397 - RNA, 19 nt, Homo sapiens
  misc_RNA (1)...(19): siRNA sense strand
gcagaaaucaaacgcaaaa

SEQ ID NO: 2470398 - RNA, 19 nt, Homo sapiens
  misc_RNA (1)...(19): siRNA sense strand
aggccaagguagcggagga

SEQ ID NO: 2470399 - RNA, 19 nt, Homo sapiens
  misc_RNA (1)...(19): siRNA sense strand
acuuaggacagaaggaaaa

SEQ ID NO: 2470400 - RNA, 19 nt, Homo sapiens
  misc_RNA (1)...(19): siRNA sense strand
ugggaaaggaccaaguauu

SEQ ID NO: 2470401 - RNA, 19 nt, Homo sapiens
  misc_RNA (1)...(19): siRNA sense strand
cagaugagacugaagacau

SEQ ID NO: 2470402 - RNA, 19 nt, Homo sapiens
  misc_RNA (1)...(19): siRNA sense strand
ccaaaggcucccagugaga

SEQ ID NO: 2470403 - RNA, 19 nt, Homo sapiens
  misc_RNA (1)...(19): siRNA sense strand
guuccuauucagagauauu

SEQ ID NO: 2470404 - RNA, 19 nt, Homo sapiens
  misc_RNA (1)...(19): siRNA sense strand
agaaauaugcagaagaaug

SEQ ID NO: 2470405 - RNA, 19 nt, Homo sapiens
  misc_RNA (1)...(19): siRNA sense strand
ucaaacaaacugacaaaca

SEQ ID NO: 2470406 - RNA, 19 nt, Homo sapiens
  misc_RNA (1)...(19): siRNA sense strand
aaauagucccaaagucaaa

SEQ ID NO: 2470407 - RNA, 19 nt, Homo sapiens
  misc_RNA (1)...(19): siRNA sense strand
ggaaaauggacaaaggaaa

SEQ ID NO: 2470408 - RNA, 19 nt, Homo sapiens
  misc_RNA (1)...(19): siRNA sense strand
agaaagagguggaugagga

SEQ ID NO: 2470409 - RNA, 19 nt, Homo sapiens
  misc_RNA (1)...(19): siRNA sense strand
ggguaaagaaacuuagaga

SEQ ID NO: 2470410 - RNA, 19 nt, Homo sapiens
  misc_RNA (1)...(19): siRNA sense strand
acaacaugguucaggaaaa

SEQ ID NO: 2470411 - RNA, 19 nt, Homo sapiens
  misc_RNA (1)...(19): siRNA sense strand
cuaacaaagaagagagcca

SEQ ID NO: 2470412 - RNA, 19 nt, Homo sapiens
  misc_RNA (1)...(19): siRNA sense strand
caacaagucaagaugggaa

SEQ ID NO: 2470413 - RNA, 19 nt, Homo sapiens
  misc_RNA (1)...(19): siRNA sense strand
aguugaacggguaaagaaa

SEQ ID NO: 2470414 - RNA, 19 nt, Homo sapiens
  misc_RNA (1)...(19): siRNA sense strand
gguaaagaaacuuagagau

SEQ ID NO: 2470415 - RNA, 19 nt, Homo sapiens
  misc_RNA (1)...(19): siRNA sense strand
uggugaaaaucgagguuau

SEQ ID NO: 2470416 - RNA, 19 nt, Homo sapiens
  misc_RNA (1)...(19): siRNA sense strand
cuacguuagaagaugcaaa

SEQ ID NO: 2470417 - RNA, 19 nt, Homo sapiens
  misc_RNA (1)...(19): siRNA sense strand
aggaaaagaagaaagaaga

SEQ ID NO: 2470418 - RNA, 19 nt, Homo sapiens
  misc_RNA (1)...(19): siRNA sense strand
caguugaacggguaaagaa

SEQ ID NO: 2470419 - RNA, 19 nt, Homo sapiens
  misc_RNA (1)...(19): siRNA sense strand
ccaaggaaaagaagaaaga

SEQ ID NO: 2470420 - RNA, 19 nt, Homo sapiens
  misc_RNA (1)...(19): siRNA sense strand
augcauugauggagcaagu

SEQ ID NO: 2470421 - RNA, 19 nt, Homo sapiens
  misc_RNA (1)...(19): siRNA sense strand
gugauauguaugaagauga

SEQ ID NO: 2470422 - RNA, 19 nt, Homo sapiens
  misc_RNA (1)...(19): siRNA sense strand
aggaaacaauuaaagcaga

SEQ ID NO: 2470423 - RNA, 19 nt, Homo sapiens
  misc_RNA (1)...(19): siRNA sense strand
aaguacucuugguguauaa

SEQ ID NO: 2470424 - RNA, 19 nt, Homo sapiens
  misc_RNA (1)...(19): siRNA sense strand
aggaaaccaugcagagagu

SEQ ID NO: 2470425 - RNA, 19 nt, Homo sapiens
  misc_RNA (1)...(19): siRNA sense strand
ggagcaaguauugagguaa

SEQ ID NO: 2470426 - RNA, 19 nt, Homo sapiens
  misc_RNA (1)...(19): siRNA sense strand
gugcaacugauaagaccaa

SEQ ID NO: 2470427 - RNA, 19 nt, Homo sapiens
  misc_RNA (1)...(19): siRNA sense strand
uagaagaugcaaaggaacu

SEQ ID NO: 2470428 - RNA, 19 nt, Homo sapiens
  misc_RNA (1)...(19): siRNA sense strand
auggcaaggaggaaacuaa

SEQ ID NO: 2470429 - RNA, 19 nt, Homo sapiens
  misc_RNA (1)...(19): siRNA sense strand
accuagaggcugugaaguu

SEQ ID NO: 2470430 - RNA, 19 nt, Homo sapiens
  misc_RNA (1)...(19): siRNA sense strand
cguuagaagaugcaaagga

SEQ ID NO: 2470431 - RNA, 19 nt, Homo sapiens
  misc_RNA (1)...(19): siRNA sense strand
cccaauuagccaucagaau

SEQ ID NO: 2470432 - RNA, 19 nt, Homo sapiens
  misc_RNA (1)...(19): siRNA sense strand
ugucuguuaugaauggaaa

SEQ ID NO: 2470433 - RNA, 19 nt, Homo sapiens
  misc_RNA (1)...(19): siRNA sense strand
aacaagucaagaugggaaa

SEQ ID NO: 2470434 - RNA, 19 nt, Homo sapiens
  misc_RNA (1)...(19): siRNA sense strand
acuacagaggaaacaauua

SEQ ID NO: 2470435 - RNA, 19 nt, Homo sapiens
  misc_RNA (1)...(19): siRNA sense strand
aacaaauggaugcaguaaa

SEQ ID NO: 2470436 - RNA, 19 nt, Homo sapiens
  misc_RNA (1)...(19): siRNA sense strand
aggaaaauggacaaaggaa

SEQ ID NO: 2470437 - RNA, 19 nt, Homo sapiens
  misc_RNA (1)...(19): siRNA sense strand
guuuugcauuuguggaaua

SEQ ID NO: 2470438 - RNA, 19 nt, Homo sapiens
  misc_RNA (1)...(19): siRNA sense strand
auuuaagccuggugcaguu

SEQ ID NO: 2470439 - RNA, 19 nt, Homo sapiens
  misc_RNA (1)...(19): siRNA sense strand
ccgagaagaugcaguggcu

SEQ ID NO: 2470440 - RNA, 19 nt, Homo sapiens
  misc_RNA (1)...(19): siRNA sense strand
gcaacugauaagaccaaaa

SEQ ID NO: 2470441 - RNA, 19 nt, Homo sapiens
  misc_RNA (1)...(19): siRNA sense strand
ugaaauucgaccagggaag

SEQ ID NO: 2470442 - RNA, 19 nt, Homo sapiens
  misc_RNA (1)...(19): siRNA sense strand
agaaaguuacagaaggagu

SEQ ID NO: 2470443 - RNA, 19 nt, Homo sapiens
  misc_RNA (1)...(19): siRNA sense strand
gcauugauggagcaaguau

SEQ ID NO: 2470444 - RNA, 19 nt, Homo sapiens
  misc_RNA (1)...(19): siRNA sense strand
cauuacuucauuuggacua

SEQ ID NO: 2470445 - RNA, 19 nt, Homo sapiens
  misc_RNA (1)...(19): siRNA sense strand
cugcaaacccagggagaga

SEQ ID NO: 2470446 - RNA, 19 nt, Homo sapiens
  misc_RNA (1)...(19): siRNA sense strand
gaacggagacugcugguga

SEQ ID NO: 2470447 - RNA, 19 nt, Homo sapiens
  misc_RNA (1)...(19): siRNA sense strand
gggacuauguugagcggca

SEQ ID NO: 2470448 - RNA, 19 nt, Homo sapiens
  misc_RNA (1)...(19): siRNA sense strand
cgauggugguggacagcca

SEQ ID NO: 2470449 - RNA, 19 nt, Homo sapiens
  misc_RNA (1)...(19): siRNA sense strand
gcaccauccugaaguggga

SEQ ID NO: 2470450 - RNA, 19 nt, Homo sapiens
  misc_RNA (1)...(19): siRNA sense strand
uuguggacggcgagggcaa

SEQ ID NO: 2470451 - RNA, 19 nt, Homo sapiens
  misc_RNA (1)...(19): siRNA sense strand
ggaugagggacgacagaag

SEQ ID NO: 2470452 - RNA, 19 nt, Homo sapiens
  misc_RNA (1)...(19): siRNA sense strand
cuaacgaccuagaagccuu

SEQ ID NO: 2470453 - RNA, 19 nt, Homo sapiens
  misc_RNA (1)...(19): siRNA sense strand
gacagaaguuuguacgguu

SEQ ID NO: 2470454 - RNA, 19 nt, Homo sapiens
  misc_RNA (1)...(19): siRNA sense strand
gguacuuugccguggcuga

SEQ ID NO: 2470455 - RNA, 19 nt, Homo sapiens
  misc_RNA (1)...(19): siRNA sense strand
aguuuguggcccaggguga

SEQ ID NO: 2470456 - RNA, 19 nt, Homo sapiens
  misc_RNA (1)...(19): siRNA sense strand
ccuucugcguggacucaaa

SEQ ID NO: 2470457 - RNA, 19 nt, Homo sapiens
  misc_RNA (1)...(19): siRNA sense strand
auggaaaggaggugaggca

SEQ ID NO: 2470458 - RNA, 19 nt, Homo sapiens
  misc_RNA (1)...(19): siRNA sense strand
agacagagccggugcaggu

SEQ ID NO: 2470459 - RNA, 19 nt, Homo sapiens
  misc_RNA (1)...(19): siRNA sense strand
gcacauggaaaggagguga

SEQ ID NO: 2470460 - RNA, 19 nt, Homo sapiens
  misc_RNA (1)...(19): siRNA sense strand
agauauugucuuugcagaa

SEQ ID NO: 2470461 - RNA, 19 nt, Homo sapiens
  misc_RNA (1)...(19): siRNA sense strand
acuaauaagaggacgaauc

SEQ ID NO: 2470462 - RNA, 19 nt, Homo sapiens
  misc_RNA (1)...(19): siRNA sense strand
uggacuaauaagaggacga

SEQ ID NO: 2470463 - RNA, 19 nt, Homo sapiens
  misc_RNA (1)...(19): siRNA sense strand
ugacauugugauugcaaaa

SEQ ID NO: 2470464 - RNA, 19 nt, Homo sapiens
  misc_RNA (1)...(19): siRNA sense strand
guuaugugccaauggguca

SEQ ID NO: 2470465 - RNA, 19 nt, Homo sapiens
  misc_RNA (1)...(19): siRNA sense strand
aggugacaaucuacagaau

SEQ ID NO: 2470466 - RNA, 19 nt, Homo sapiens
  misc_RNA (1)...(19): siRNA sense strand
caauauggcuguauagcuc

SEQ ID NO: 2470467 - RNA, 19 nt, Homo sapiens
  misc_RNA (1)...(19): siRNA sense strand
ugucauguguucuggacca

SEQ ID NO: 2470468 - RNA, 19 nt, Homo sapiens
  misc_RNA (1)...(19): siRNA sense strand
cggagugaccauuacggaa

SEQ ID NO: 2470469 - RNA, 19 nt, Homo sapiens
  misc_RNA (1)...(19): siRNA sense strand
ccacuauggaggaggaggu

SEQ ID NO: 2470470 - RNA, 19 nt, Homo sapiens
  misc_RNA (1)...(19): siRNA sense strand
cgaccacuauggaggagga

SEQ ID NO: 2470471 - RNA, 19 nt, Homo sapiens
  misc_RNA (1)...(19): siRNA sense strand
gaggcugcuacgaggagua

SEQ ID NO: 2470472 - RNA, 19 nt, Homo sapiens
  misc_RNA (1)...(19): siRNA sense strand
aguuaaacguaaaggacuu

SEQ ID NO: 2470473 - RNA, 19 nt, Homo sapiens
  misc_RNA (1)...(19): siRNA sense strand
uggcauacaucgaggaagu

SEQ ID NO: 2470474 - RNA, 19 nt, Homo sapiens
  misc_RNA (1)...(19): siRNA sense strand
auggaaaguuggagugaca

SEQ ID NO: 2470475 - RNA, 19 nt, Homo sapiens
  misc_RNA (1)...(19): siRNA sense strand
acguaaaggacuucagaau

SEQ ID NO: 2470476 - RNA, 19 nt, Homo sapiens
  misc_RNA (1)...(19): siRNA sense strand
agaagaaacaguagaacca

SEQ ID NO: 2470477 - RNA, 19 nt, Homo sapiens
  misc_RNA (1)...(19): siRNA sense strand
cugcaguuguggaauguaa

SEQ ID NO: 2470478 - RNA, 19 nt, Homo sapiens
  misc_RNA (1)...(19): siRNA sense strand
uguagaaguaucagaagaa

SEQ ID NO: 2470479 - RNA, 19 nt, Homo sapiens
  misc_RNA (1)...(19): siRNA sense strand
cagcagauucuaagugcaa

SEQ ID NO: 2470480 - RNA, 19 nt, Homo sapiens
  misc_RNA (1)...(19): siRNA sense strand
uugaagaaggacugguaaa

SEQ ID NO: 2470481 - RNA, 19 nt, Homo sapiens
  misc_RNA (1)...(19): siRNA sense strand
ccugauggucguugguuaa

SEQ ID NO: 2470482 - RNA, 19 nt, Homo sapiens
  misc_RNA (1)...(19): siRNA sense strand
ggauauaacuucuugugga

SEQ ID NO: 2470483 - RNA, 19 nt, Homo sapiens
  misc_RNA (1)...(19): siRNA sense strand
gauucuaagugcaagucaa

SEQ ID NO: 2470484 - RNA, 19 nt, Homo sapiens
  misc_RNA (1)...(19): siRNA sense strand
guugaagaaagaugacaua

SEQ ID NO: 2470485 - RNA, 19 nt, Homo sapiens
  misc_RNA (1)...(19): siRNA sense strand
cgccagaacaguugaauga

SEQ ID NO: 2470486 - RNA, 19 nt, Homo sapiens
  misc_RNA (1)...(19): siRNA sense strand
guuaauaagugcugcgaug

SEQ ID NO: 2470487 - RNA, 19 nt, Homo sapiens
  misc_RNA (1)...(19): siRNA sense strand
cagauauuauggacagaau

SEQ ID NO: 2470488 - RNA, 19 nt, Homo sapiens
  misc_RNA (1)...(19): siRNA sense strand
agaaguaucagaagaaaca

SEQ ID NO: 2470489 - RNA, 19 nt, Homo sapiens
  misc_RNA (1)...(19): siRNA sense strand
ucaauaagagcuugggaca

SEQ ID NO: 2470490 - RNA, 19 nt, Homo sapiens
  misc_RNA (1)...(19): siRNA sense strand
aguagaaccaagugaugaa

SEQ ID NO: 2470491 - RNA, 19 nt, Homo sapiens
  misc_RNA (1)...(19): siRNA sense strand
augcagagcuucuugaaaa

SEQ ID NO: 2470492 - RNA, 19 nt, Homo sapiens
  misc_RNA (1)...(19): siRNA sense strand
cuugaaacuugaagaagga

SEQ ID NO: 2470493 - RNA, 19 nt, Homo sapiens
  misc_RNA (1)...(19): siRNA sense strand
ccuaugacguucagaaacu

SEQ ID NO: 2470494 - RNA, 19 nt, Homo sapiens
  misc_RNA (1)...(19): siRNA sense strand
gauuaaaccaguugacagu

SEQ ID NO: 2470495 - RNA, 19 nt, Homo sapiens
  misc_RNA (1)...(19): siRNA sense strand
acauagggacaguggcauu

SEQ ID NO: 2470496 - RNA, 19 nt, Homo sapiens
  misc_RNA (1)...(19): siRNA sense strand
ggacauagaaacuaggaag

SEQ ID NO: 2470497 - RNA, 19 nt, Homo sapiens
  misc_RNA (1)...(19): siRNA sense strand
ugacauaacugcaacagca

SEQ ID NO: 2470498 - RNA, 19 nt, Homo sapiens
  misc_RNA (1)...(19): siRNA sense strand
gggacauggauuaauaaau

SEQ ID NO: 2470499 - RNA, 19 nt, Homo sapiens
  misc_RNA (1)...(19): siRNA sense strand
cauuaguguucuggacaua

SEQ ID NO: 2470500 - RNA, 19 nt, Homo sapiens
  misc_RNA (1)...(19): siRNA sense strand
agucuaaagugguaaaucu

SEQ ID NO: 2470501 - RNA, 19 nt, Homo sapiens
  misc_RNA (1)...(19): siRNA sense strand
gccaguacuccuagaagaa

SEQ ID NO: 2470502 - RNA, 19 nt, Homo sapiens
  misc_RNA (1)...(19): siRNA sense strand
gacaaugcucuuaggauau

SEQ ID NO: 2470503 - RNA, 19 nt, Homo sapiens
  misc_RNA (1)...(19): siRNA sense strand
ggaucaagcucacaaggga

SEQ ID NO: 2470504 - RNA, 19 nt, Homo sapiens
  misc_RNA (1)...(19): siRNA sense strand
caguacuccuagaagaaau

SEQ ID NO: 2470505 - RNA, 19 nt, Homo sapiens
  misc_RNA (1)...(19): siRNA sense strand
acaccaaggccaaauaaau

SEQ ID NO: 2470506 - RNA, 19 nt, Homo sapiens
  misc_RNA (1)...(19): siRNA sense strand
auguagaaguaucagaaga

SEQ ID NO: 2470507 - RNA, 19 nt, Homo sapiens
  misc_RNA (1)...(19): siRNA sense strand
cguaauaaagagauaguac

SEQ ID NO: 2470508 - RNA, 19 nt, Homo sapiens
  misc_RNA (1)...(19): siRNA sense strand
ccaaaagaguugaagaaag

SEQ ID NO: 2470509 - RNA, 19 nt, Homo sapiens
  misc_RNA (1)...(19): siRNA sense strand
caucccagguggaagaaaa

SEQ ID NO: 2470510 - RNA, 19 nt, Homo sapiens
  misc_RNA (1)...(19): siRNA sense strand
ccauuaguguucuggacau

SEQ ID NO: 2470511 - RNA, 19 nt, Homo sapiens
  misc_RNA (1)...(19): siRNA sense strand
acuucugggcagugaacaa

SEQ ID NO: 2470512 - RNA, 19 nt, Homo sapiens
  misc_RNA (1)...(19): siRNA sense strand
cacaaauggcgcugacaau

SEQ ID NO: 2470513 - RNA, 19 nt, Homo sapiens
  misc_RNA (1)...(19): siRNA sense strand
guggaaacuuugcuguaau

SEQ ID NO: 2470514 - RNA, 19 nt, Homo sapiens
  misc_RNA (1)...(19): siRNA sense strand
ucacaaauggcgcugacaa

SEQ ID NO: 2470515 - RNA, 19 nt, Homo sapiens
  misc_RNA (1)...(19): siRNA sense strand
cuuacuuucucaagccaaa

SEQ ID NO: 2470516 - RNA, 19 nt, Homo sapiens
  misc_RNA (1)...(19): siRNA sense strand
agccaaaagaguugaagaa

SEQ ID NO: 2470517 - RNA, 19 nt, Homo sapiens
  misc_RNA (1)...(19): siRNA sense strand
uguugauacugauggcauu

SEQ ID NO: 2470518 - RNA, 19 nt, Homo sapiens
  misc_RNA (1)...(19): siRNA sense strand
gcugagaggagcugggauc

SEQ ID NO: 2470519 - RNA, 19 nt, Homo sapiens
  misc_RNA (1)...(19): siRNA sense strand
cuacauagggacaguggca

SEQ ID NO: 2470520 - RNA, 19 nt, Homo sapiens
  misc_RNA (1)...(19): siRNA sense strand
gacauagaaacuaggaaga

SEQ ID NO: 2470521 - RNA, 19 nt, Homo sapiens
  misc_RNA (1)...(19): siRNA sense strand
aagaauaaaccaaaggaac

SEQ ID NO: 2470522 - RNA, 19 nt, Homo sapiens
  misc_RNA (1)...(19): siRNA sense strand
agugguaaaucuuggaguu

SEQ ID NO: 2470523 - RNA, 19 nt, Homo sapiens
  misc_RNA (1)...(19): siRNA sense strand
cugcuugaaacuugaagaa

SEQ ID NO: 2470524 - RNA, 19 nt, Homo sapiens
  misc_RNA (1)...(19): siRNA sense strand
aacugguagugaaggauua

SEQ ID NO: 2470525 - RNA, 19 nt, Homo sapiens
  misc_RNA (1)...(19): siRNA sense strand
uagaaguuaugcagagcuu

SEQ ID NO: 2470526 - RNA, 19 nt, Homo sapiens
  misc_RNA (1)...(19): siRNA sense strand
ccaagauguagaaguauca

SEQ ID NO: 2470527 - RNA, 19 nt, Homo sapiens
  misc_RNA (1)...(19): siRNA sense strand
ccugaaucacgauggaaaa

SEQ ID NO: 2470528 - RNA, 19 nt, Homo sapiens
  misc_RNA (1)...(19): siRNA sense strand
uugaguuagcccaggcaua

SEQ ID NO: 2470529 - RNA, 19 nt, Homo sapiens
  misc_RNA (1)...(19): siRNA sense strand
uaacaaccugcgugggcaa

SEQ ID NO: 2470530 - RNA, 19 nt, Homo sapiens
  misc_RNA (1)...(19): siRNA sense strand
cuuuaagggucauaaggca

SEQ ID NO: 2470531 - RNA, 19 nt, Homo sapiens
  misc_RNA (1)...(19): siRNA sense strand
uugucaaacccaagaugua

SEQ ID NO: 2470532 - RNA, 19 nt, Homo sapiens
  misc_RNA (1)...(19): siRNA sense strand
gagaauuaaugcucgccaa

SEQ ID NO: 2470533 - RNA, 19 nt, Homo sapiens
  misc_RNA (1)...(19): siRNA sense strand
ucuacaucgucguggacua

SEQ ID NO: 2470534 - RNA, 19 nt, Homo sapiens
  misc_RNA (1)...(19): siRNA sense strand
aggcgacaucagagagaau

SEQ ID NO: 2470535 - RNA, 19 nt, Homo sapiens
  misc_RNA (1)...(19): siRNA sense strand
aauaaaagggccagaugua

SEQ ID NO: 2470536 - RNA, 19 nt, Homo sapiens
  misc_RNA (1)...(19): siRNA sense strand
caucaagcgcagaaggcca

SEQ ID NO: 2470537 - RNA, 19 nt, Homo sapiens
  misc_RNA (1)...(19): siRNA sense strand
gcuccaggccucaugggua

SEQ ID NO: 2470538 - RNA, 19 nt, Homo sapiens
  misc_RNA (1)...(19): siRNA sense strand
aagaagggaacuugccgaa

SEQ ID NO: 2470539 - RNA, 19 nt, Homo sapiens
  misc_RNA (1)...(19): siRNA sense strand
uggaggagcuggaggggaa

SEQ ID NO: 2470540 - RNA, 19 nt, Homo sapiens
  misc_RNA (1)...(19): siRNA sense strand
ccggggacuccaagagaaa

SEQ ID NO: 2470541 - RNA, 19 nt, Homo sapiens
  misc_RNA (1)...(19): siRNA sense strand
aguucaagguggugagagc

SEQ ID NO: 2470542 - RNA, 19 nt, Homo sapiens
  misc_RNA (1)...(19): siRNA sense strand
ggugagagcugguguccac

SEQ ID NO: 2470543 - RNA, 19 nt, Homo sapiens
  misc_RNA (1)...(19): siRNA sense strand
aagagaaacucaagcagcu

SEQ ID NO: 2470544 - RNA, 19 nt, Homo sapiens
  misc_RNA (1)...(19): siRNA sense strand
ccuugggauacuaggaaua

SEQ ID NO: 2470545 - RNA, 19 nt, Homo sapiens
  misc_RNA (1)...(19): siRNA sense strand
guguaacggaccaggaaca

SEQ ID NO: 2470546 - RNA, 19 nt, Homo sapiens
  misc_RNA (1)...(19): siRNA sense strand
cgguguaccuugggcgaau

SEQ ID NO: 2470547 - RNA, 19 nt, Homo sapiens
  misc_RNA (1)...(19): siRNA sense strand
ugaugaaaugagugccaau

SEQ ID NO: 2470548 - RNA, 19 nt, Homo sapiens
  misc_RNA (1)...(19): siRNA sense strand
ccacugagauccugaggcu

SEQ ID NO: 2470549 - RNA, 19 nt, Homo sapiens
  misc_RNA (1)...(19): siRNA sense strand
ggauacuaggaauaaagaa

SEQ ID NO: 2470550 - RNA, 19 nt, Homo sapiens
  misc_RNA (1)...(19): siRNA sense strand
aggaauaaagaaagugauc

SEQ ID NO: 2470551 - RNA, 19 nt, Homo sapiens
  misc_RNA (1)...(19): siRNA sense strand
cugauagagacccuaguaa

SEQ ID NO: 2470552 - RNA, 19 nt, Homo sapiens
  misc_RNA (1)...(19): siRNA sense strand
uguuagagcuauacagcaa

SEQ ID NO: 2470553 - RNA, 19 nt, Homo sapiens
  misc_RNA (1)...(19): siRNA sense strand
cauggaaagaggugugaaa

SEQ ID NO: 2470554 - RNA, 19 nt, Homo sapiens
  misc_RNA (1)...(19): siRNA sense strand
cgguauugaugucuguaaa

SEQ ID NO: 2470555 - RNA, 19 nt, Homo sapiens
  misc_RNA (1)...(19): siRNA sense strand
cuguuaaagaagaagagaa

SEQ ID NO: 2470556 - RNA, 19 nt, Homo sapiens
  misc_RNA (1)...(19): siRNA sense strand
caguggaauaccugugaaa

SEQ ID NO: 2470557 - RNA, 19 nt, Homo sapiens
  misc_RNA (1)...(19): siRNA sense strand
ggcacaaagcauucauaaa

SEQ ID NO: 2470558 - RNA, 19 nt, Homo sapiens
  misc_RNA (1)...(19): siRNA sense strand
ugaugaaggcuguggcuga

SEQ ID NO: 2470559 - RNA, 19 nt, Homo sapiens
  misc_RNA (1)...(19): siRNA sense strand
cggauugugccuucagaaa

SEQ ID NO: 2470560 - RNA, 19 nt, Homo sapiens
  misc_RNA (1)...(19): siRNA sense strand
guuacaaaguccuccggaa

SEQ ID NO: 2470561 - RNA, 19 nt, Homo sapiens
  misc_RNA (1)...(19): siRNA sense strand
agaagaagagaaaugacaa

SEQ ID NO: 2470562 - RNA, 19 nt, Homo sapiens
  misc_RNA (1)...(19): siRNA sense strand
ggaaauaccuuuaaagucc

SEQ ID NO: 2470563 - RNA, 19 nt, Homo sapiens
  misc_RNA (1)...(19): siRNA sense strand
gggcauagucaguguccca

SEQ ID NO: 2470564 - RNA, 19 nt, Homo sapiens
  misc_RNA (1)...(19): siRNA sense strand
uggaagagcccgagugaag

SEQ ID NO: 2470565 - RNA, 19 nt, Homo sapiens
  misc_RNA (1)...(19): siRNA sense strand
cggugauuguggucaggaa

SEQ ID NO: 2470566 - RNA, 19 nt, Homo sapiens
  misc_RNA (1)...(19): siRNA sense strand
guggaauaccugugaaacu

SEQ ID NO: 2470567 - RNA, 19 nt, Homo sapiens
  misc_RNA (1)...(19): siRNA sense strand
gagacuauaaagaugacua

SEQ ID NO: 2470568 - RNA, 19 nt, Homo sapiens
  misc_RNA (1)...(19): siRNA sense strand
uuacaaaguccuccggaau

SEQ ID NO: 2470569 - RNA, 19 nt, Homo sapiens
  misc_RNA (1)...(19): siRNA sense strand
agagaaaugacaacaguga

SEQ ID NO: 2470570 - RNA, 19 nt, Homo sapiens
  misc_RNA (1)...(19): siRNA sense strand
aagaagaagagaaaugaca

SEQ ID NO: 2470571 - RNA, 19 nt, Homo sapiens
  misc_RNA (1)...(19): siRNA sense strand
aauuggcacaugugagaaa

SEQ ID NO: 2470572 - RNA, 19 nt, Homo sapiens
  misc_RNA (1)...(19): siRNA sense strand
agggcaugaugaugaguau

SEQ ID NO: 2470573 - RNA, 19 nt, Homo sapiens
  misc_RNA (1)...(19): siRNA sense strand
caucuagaaggcugagaau

SEQ ID NO: 2470574 - RNA, 19 nt, Homo sapiens
  misc_RNA (1)...(19): siRNA sense strand
ugcauuuguuagagcuaua

SEQ ID NO: 2470575 - RNA, 19 nt, Homo sapiens
  misc_RNA (1)...(19): siRNA sense strand
ggugagacuauaaagauga

SEQ ID NO: 2470576 - RNA, 19 nt, Homo sapiens
  misc_RNA (1)...(19): siRNA sense strand
acuacaagcagcaguauga

SEQ ID NO: 2470577 - RNA, 19 nt, Homo sapiens
  misc_RNA (1)...(19): siRNA sense strand
auucagaagcaacacguaa

SEQ ID NO: 2470578 - RNA, 19 nt, Homo sapiens
  misc_RNA (1)...(19): siRNA sense strand
ggaucucaaccaacgauaa

SEQ ID NO: 2470579 - RNA, 19 nt, Homo sapiens
  misc_RNA (1)...(19): siRNA sense strand
gcaucuagaaggcugagaa

SEQ ID NO: 2470580 - RNA, 19 nt, Homo sapiens
  misc_RNA (1)...(19): siRNA sense strand
cuuuauagucauagugaac

SEQ ID NO: 2470581 - RNA, 19 nt, Homo sapiens
  misc_RNA (1)...(19): siRNA sense strand
cugacugguccaaggauau

SEQ ID NO: 2470582 - RNA, 19 nt, Homo sapiens
  misc_RNA (1)...(19): siRNA sense strand
agcaauggcuucuugggaa

SEQ ID NO: 2470583 - RNA, 19 nt, Homo sapiens
  misc_RNA (1)...(19): siRNA sense strand
guuuagugcugaugugagu

SEQ ID NO: 2470584 - RNA, 19 nt, Homo sapiens
  misc_RNA (1)...(19): siRNA sense strand
ucaacaaaugguacaagua

SEQ ID NO: 2470585 - RNA, 19 nt, Homo sapiens
  misc_RNA (1)...(19): siRNA sense strand
gcaauggcuucuugggaac

SEQ ID NO: 2470586 - RNA, 19 nt, Homo sapiens
  misc_RNA (1)...(19): siRNA sense strand
augagacgguucuggaauu

SEQ ID NO: 2470587 - RNA, 19 nt, Homo sapiens
  misc_RNA (1)...(19): siRNA sense strand
ugggauuuaauguggacua

SEQ ID NO: 2470588 - RNA, 19 nt, Homo sapiens
  misc_RNA (1)...(19): siRNA sense strand
gcacucaacaaaugguaca

SEQ ID NO: 2470589 - RNA, 19 nt, Homo sapiens
  misc_RNA (1)...(19): siRNA sense strand
cuggaaacacuuauugaau

SEQ ID NO: 2470590 - RNA, 19 nt, Homo sapiens
  misc_RNA (1)...(19): siRNA sense strand
ccuugaauaaacagggcau

SEQ ID NO: 2470591 - RNA, 19 nt, Homo sapiens
  misc_RNA (1)...(19): siRNA sense strand
ugggauaucuucuggugau

SEQ ID NO: 2470592 - RNA, 19 nt, Homo sapiens
  misc_RNA (1)...(19): siRNA sense strand
cccaagacuggcagcuaua

SEQ ID NO: 2470593 - RNA, 19 nt, Homo sapiens
  misc_RNA (1)...(19): siRNA sense strand
agaucaccuauguggauua

SEQ ID NO: 2470594 - RNA, 19 nt, Homo sapiens
  misc_RNA (1)...(19): siRNA sense strand
gagaagaguugcagguucc

SEQ ID NO: 2470595 - RNA, 19 nt, Homo sapiens
  misc_RNA (1)...(19): siRNA sense strand
auucgaacuugcaagauuu

SEQ ID NO: 2470596 - RNA, 19 nt, Homo sapiens
  misc_RNA (1)...(19): siRNA sense strand
ccccaaaaucauaaaagua

SEQ ID NO: 2470597 - RNA, 19 nt, Homo sapiens
  misc_RNA (1)...(19): siRNA sense strand
ggggauggucagcuggaaa

SEQ ID NO: 2470598 - RNA, 19 nt, Homo sapiens
  misc_RNA (1)...(19): siRNA sense strand
gaagaagagaaaugacaac

SEQ ID NO: 2470599 - RNA, 19 nt, Homo sapiens
  misc_RNA (1)...(19): siRNA sense strand
ugauuugccagcacggaua

SEQ ID NO: 2470600 - RNA, 19 nt, Homo sapiens
  misc_RNA (1)...(19): siRNA sense strand
gcuuugaacuagagaccug

SEQ ID NO: 2470601 - RNA, 19 nt, Homo sapiens
  misc_RNA (1)...(19): siRNA sense strand
cgagugaaggccagaggca

SEQ ID NO: 2470602 - RNA, 19 nt, Homo sapiens
  misc_RNA (1)...(19): siRNA sense strand
cccugaugguggucgguau

SEQ ID NO: 2470603 - RNA, 19 nt, Homo sapiens
  misc_RNA (1)...(19): siRNA sense strand
ugaccuuucugguggcaca

SEQ ID NO: 2470604 - RNA, 19 nt, Homo sapiens
  misc_RNA (1)...(19): siRNA sense strand
ugugagagguggaaagcca

SEQ ID NO: 2470605 - RNA, 19 nt, Homo sapiens
  misc_RNA (1)...(19): siRNA sense strand
uaguaaucccauuggaauu

SEQ ID NO: 2470606 - RNA, 19 nt, Homo sapiens
  misc_RNA (1)...(19): siRNA sense strand
gacauuauccugacggcaa

SEQ ID NO: 2470607 - RNA, 19 nt, Homo sapiens
  misc_RNA (1)...(19): siRNA sense strand
agggagucgucuugagcga

SEQ ID NO: 2470608 - RNA, 19 nt, Homo sapiens
  misc_RNA (1)...(19): siRNA sense strand
gaucagaugagcagcagca

SEQ ID NO: 2470609 - RNA, 19 nt, Homo sapiens
  misc_RNA (1)...(19): siRNA sense strand
ccaaauuauaugucaccuu

SEQ ID NO: 2470610 - RNA, 19 nt, Homo sapiens
  misc_RNA (1)...(19): siRNA sense strand
acaguuugcaugugacaau

SEQ ID NO: 2470611 - RNA, 19 nt, Homo sapiens
  misc_RNA (1)...(19): siRNA sense strand
uuucaagugcagagccaua

SEQ ID NO: 2470612 - RNA, 19 nt, Homo sapiens
  misc_RNA (1)...(19): siRNA sense strand
gugcagagccauagagcug

SEQ ID NO: 2470613 - RNA, 19 nt, Homo sapiens
  misc_RNA (1)...(19): siRNA sense strand
gccaauaaccaucuggaga

SEQ ID NO: 2470614 - RNA, 19 nt, Homo sapiens
  misc_RNA (1)...(19): siRNA sense strand
ccggcagcuuccugagaau

SEQ ID NO: 2470615 - RNA, 19 nt, Homo sapiens
  misc_RNA (1)...(19): siRNA sense strand
ccacacagaucuaccagca

SEQ ID NO: 2470616 - RNA, 19 nt, Homo sapiens
  misc_RNA (1)...(19): siRNA sense strand
gggagauugaagagaugaa

SEQ ID NO: 2470617 - RNA, 19 nt, Homo sapiens
  misc_RNA (1)...(19): siRNA sense strand
ggagggaggaggauggaga

SEQ ID NO: 2470618 - RNA, 19 nt, Homo sapiens
  misc_RNA (1)...(19): siRNA sense strand
acugagaaggacaagguua

SEQ ID NO: 2470619 - RNA, 19 nt, Homo sapiens
  misc_RNA (1)...(19): siRNA sense strand
gagaugaaugugugcgaca

SEQ ID NO: 2470620 - RNA, 19 nt, Homo sapiens
  misc_RNA (1)...(19): siRNA sense strand
agauugaagagaugaaugu

SEQ ID NO: 2470621 - RNA, 19 nt, Homo sapiens
  misc_RNA (1)...(19): siRNA sense strand
ugggcaacgucuaugucaa

SEQ ID NO: 2470622 - RNA, 19 nt, Homo sapiens
  misc_RNA (1)...(19): siRNA sense strand
ccacagugcugcuggccau

SEQ ID NO: 2470623 - RNA, 19 nt, Homo sapiens
  misc_RNA (1)...(19): siRNA sense strand
agacaaaggagauucgaca

SEQ ID NO: 2470624 - RNA, 19 nt, Homo sapiens
  misc_RNA (1)...(19): siRNA sense strand
ggagugaagacaaaggaga

SEQ ID NO: 2470625 - RNA, 19 nt, Homo sapiens
  misc_RNA (1)...(19): siRNA sense strand
gcgccaugccacaguacuu

SEQ ID NO: 2470626 - RNA, 19 nt, Homo sapiens
  misc_RNA (1)...(19): siRNA sense strand
aggaggaggaggaaggaaa

SEQ ID NO: 2470627 - RNA, 19 nt, Homo sapiens
  misc_RNA (1)...(19): siRNA sense strand
aggaaggaaaggaggagaa

SEQ ID NO: 2470628 - RNA, 19 nt, Homo sapiens
  misc_RNA (1)...(19): siRNA sense strand
ggaaguaccguguggguga

SEQ ID NO: 2470629 - RNA, 19 nt, Homo sapiens
  misc_RNA (1)...(19): siRNA sense strand
cgggaagccucaaagggaa

SEQ ID NO: 2470630 - RNA, 19 nt, Homo sapiens
  misc_RNA (1)...(19): siRNA sense strand
aggaggagaucgaggagga

SEQ ID NO: 2470631 - RNA, 19 nt, Homo sapiens
  misc_RNA (1)...(19): siRNA sense strand
ccacaaagacuccgagcca

SEQ ID NO: 2470632 - RNA, 19 nt, Homo sapiens
  misc_RNA (1)...(19): siRNA sense strand
aggacuuggugcugcgcaa

SEQ ID NO: 2470633 - RNA, 19 nt, Homo sapiens
  misc_RNA (1)...(19): siRNA sense strand
aagaggagauuuugggcaa

SEQ ID NO: 2470634 - RNA, 19 nt, Homo sapiens
  misc_RNA (1)...(19): siRNA sense strand
ucaaagugucugaggggaa

SEQ ID NO: 2470635 - RNA, 19 nt, Homo sapiens
  misc_RNA (1)...(19): siRNA sense strand
ggaacaaggagcaagccau

SEQ ID NO: 2470636 - RNA, 19 nt, Homo sapiens
  misc_RNA (1)...(19): siRNA sense strand
caggacagaacuugggaga

SEQ ID NO: 2470637 - RNA, 19 nt, Homo sapiens
  misc_RNA (1)...(19): siRNA sense strand
gggcccaggacaaaggcaa

SEQ ID NO: 2470638 - RNA, 19 nt, Homo sapiens
  misc_RNA (1)...(19): siRNA sense strand
gauaucagcaagaggacca

SEQ ID NO: 2470639 - RNA, 19 nt, Homo sapiens
  misc_RNA (1)...(19): siRNA sense strand
gucgaaaggagaugggcau

SEQ ID NO: 2470640 - RNA, 19 nt, Homo sapiens
  misc_RNA (1)...(19): siRNA sense strand
gugcaguucuccaugguca

SEQ ID NO: 2470641 - RNA, 19 nt, Homo sapiens
  misc_RNA (1)...(19): siRNA sense strand
gcagcaugaaguaagggua

SEQ ID NO: 2470642 - RNA, 19 nt, Homo sapiens
  misc_RNA (1)...(19): siRNA sense strand
gaaacagacagcuggggaa

SEQ ID NO: 2470643 - RNA, 19 nt, Homo sapiens
  misc_RNA (1)...(19): siRNA sense strand
ugaaggaagaccuggcuga

SEQ ID NO: 2470644 - RNA, 19 nt, Homo sapiens
  misc_RNA (1)...(19): siRNA sense strand
uguucgagacggaggacuu

SEQ ID NO: 2470645 - RNA, 19 nt, Homo sapiens
  misc_RNA (1)...(19): siRNA sense strand
cuucaguaggugaggagga

SEQ ID NO: 2470646 - RNA, 19 nt, Homo sapiens
  misc_RNA (1)...(19): siRNA sense strand
caguaggugaggaggagga

SEQ ID NO: 2470647 - RNA, 19 nt, Homo sapiens
  misc_RNA (1)...(19): siRNA sense strand
cuguggacuggaagacaua

SEQ ID NO: 2470648 - RNA, 19 nt, Homo sapiens
  misc_RNA (1)...(19): siRNA sense strand
guggacuggaagacauaua

SEQ ID NO: 2470649 - RNA, 19 nt, Homo sapiens
  misc_RNA (1)...(19): siRNA sense strand
guucaugaagaaacagaca

SEQ ID NO: 2470650 - RNA, 19 nt, Homo sapiens
  misc_RNA (1)...(19): siRNA sense strand
gcucuguggaagugaggca

SEQ ID NO: 2470651 - RNA, 19 nt, Homo sapiens
  misc_RNA (1)...(19): siRNA sense strand
gguacaggauggacccuca

SEQ ID NO: 2470652 - RNA, 19 nt, Homo sapiens
  misc_RNA (1)...(19): siRNA sense strand
aggaaagagggaggagaga

SEQ ID NO: 2470653 - RNA, 19 nt, Homo sapiens
  misc_RNA (1)...(19): siRNA sense strand
ggaaguugggagccagaca

SEQ ID NO: 2470654 - RNA, 19 nt, Homo sapiens
  misc_RNA (1)...(19): siRNA sense strand
cugagcaagggcaggagaa

SEQ ID NO: 2470655 - RNA, 19 nt, Homo sapiens
  misc_RNA (1)...(19): siRNA sense strand
cugcaaccucacuggcuua

SEQ ID NO: 2470656 - RNA, 19 nt, Homo sapiens
  misc_RNA (1)...(19): siRNA sense strand
agcaguaccuggaggccau

SEQ ID NO: 2470657 - RNA, 19 nt, Homo sapiens
  misc_RNA (1)...(19): siRNA sense strand
accaaagggauaucagcaa

SEQ ID NO: 2470658 - RNA, 19 nt, Homo sapiens
  misc_RNA (1)...(19): siRNA sense strand
aggaggaaggaaaggagga

SEQ ID NO: 2470659 - RNA, 19 nt, Homo sapiens
  misc_RNA (1)...(19): siRNA sense strand
cugagaaagaugaguuaau

SEQ ID NO: 2470660 - RNA, 19 nt, Homo sapiens
  misc_RNA (1)...(19): siRNA sense strand
agggcaagaaggagaagaa

SEQ ID NO: 2470661 - RNA, 19 nt, Homo sapiens
  misc_RNA (1)...(19): siRNA sense strand
ccaugaaaguacacgggau

SEQ ID NO: 2470662 - RNA, 19 nt, Homo sapiens
  misc_RNA (1)...(19): siRNA sense strand
aggaagaggaggagagccu

SEQ ID NO: 2470663 - RNA, 19 nt, Homo sapiens
  misc_RNA (1)...(19): siRNA sense strand
aagaagggcaagaaggaga

SEQ ID NO: 2470664 - RNA, 19 nt, Homo sapiens
  misc_RNA (1)...(19): siRNA sense strand
cgcggaaggaggaggaaga

SEQ ID NO: 2470665 - RNA, 19 nt, Homo sapiens
  misc_RNA (1)...(19): siRNA sense strand
gugacgaggaagaggagga

SEQ ID NO: 2470666 - RNA, 19 nt, Homo sapiens
  misc_RNA (1)...(19): siRNA sense strand
ucaaggaggugguggccga

SEQ ID NO: 2470667 - RNA, 19 nt, Homo sapiens
  misc_RNA (1)...(19): siRNA sense strand
cgguucauccugagaaaga

SEQ ID NO: 2470668 - RNA, 19 nt, Homo sapiens
  misc_RNA (1)...(19): siRNA sense strand
agaaaggacaccuggacca

SEQ ID NO: 2470669 - RNA, 19 nt, Homo sapiens
  misc_RNA (1)...(19): siRNA sense strand
gguuugagggacagcugaa

SEQ ID NO: 2470670 - RNA, 19 nt, Homo sapiens
  misc_RNA (1)...(19): siRNA sense strand
cagacauguuccugcugaa

SEQ ID NO: 2470671 - RNA, 19 nt, Homo sapiens
  misc_RNA (1)...(19): siRNA sense strand
ggaaggaggaggaagaccu

SEQ ID NO: 2470672 - RNA, 19 nt, Homo sapiens
  misc_RNA (1)...(19): siRNA sense strand
ccaccaagaccugggaaca

SEQ ID NO: 2470673 - RNA, 19 nt, Homo sapiens
  misc_RNA (1)...(19): siRNA sense strand
acucggaagaggacaguga

SEQ ID NO: 2470674 - RNA, 19 nt, Homo sapiens
  misc_RNA (1)...(19): siRNA sense strand
agaagggcaagaaggagaa

SEQ ID NO: 2470675 - RNA, 19 nt, Homo sapiens
  misc_RNA (1)...(19): siRNA sense strand
caccaagaccugggaacaa

SEQ ID NO: 2470676 - RNA, 19 nt, Homo sapiens
  misc_RNA (1)...(19): siRNA sense strand
gcagaaaagaggagcccga

SEQ ID NO: 2470677 - RNA, 19 nt, Homo sapiens
  misc_RNA (1)...(19): siRNA sense strand
aggccuugguggagaugga

SEQ ID NO: 2470678 - RNA, 19 nt, Homo sapiens
  misc_RNA (1)...(19): siRNA sense strand
gugucugugacgaggaaga

SEQ ID NO: 2470679 - RNA, 19 nt, Homo sapiens
  misc_RNA (1)...(19): siRNA sense strand
ugucuaagcgcucgcggaa

SEQ ID NO: 2470680 - RNA, 19 nt, Homo sapiens
  misc_RNA (1)...(19): siRNA sense strand
gaagagaagacaagugggu

SEQ ID NO: 2470681 - RNA, 19 nt, Homo sapiens
  misc_RNA (1)...(19): siRNA sense strand
cguggaaggccuuggugga

SEQ ID NO: 2470682 - RNA, 19 nt, Homo sapiens
  misc_RNA (1)...(19): siRNA sense strand
ggaagaggacagugaggag

SEQ ID NO: 2470683 - RNA, 19 nt, Homo sapiens
  misc_RNA (1)...(19): siRNA sense strand
guggagauggacccagaaa

SEQ ID NO: 2470684 - RNA, 19 nt, Homo sapiens
  misc_RNA (1)...(19): siRNA sense strand
gcggauuauuggagcuaca

SEQ ID NO: 2470685 - RNA, 19 nt, Homo sapiens
  misc_RNA (1)...(19): siRNA sense strand
auaagggagaggagagcaa

SEQ ID NO: 2470686 - RNA, 19 nt, Homo sapiens
  misc_RNA (1)...(19): siRNA sense strand
agaaagaagagucagaaaa

SEQ ID NO: 2470687 - RNA, 19 nt, Homo sapiens
  misc_RNA (1)...(19): siRNA sense strand
ugcuagaagaggaggaaga

SEQ ID NO: 2470688 - RNA, 19 nt, Homo sapiens
  misc_RNA (1)...(19): siRNA sense strand
gucgagugguaaagggcaa

SEQ ID NO: 2470689 - RNA, 19 nt, Homo sapiens
  misc_RNA (1)...(19): siRNA sense strand
uccuaaaguggaagggauu

SEQ ID NO: 2470690 - RNA, 19 nt, Homo sapiens
  misc_RNA (1)...(19): siRNA sense strand
auucugaagauaagggaga

SEQ ID NO: 2470691 - RNA, 19 nt, Homo sapiens
  misc_RNA (1)...(19): siRNA sense strand
uagaagaggaggaagagga

SEQ ID NO: 2470692 - RNA, 19 nt, Homo sapiens
  misc_RNA (1)...(19): siRNA sense strand
guuuggagccggagcggau

SEQ ID NO: 2470693 - RNA, 19 nt, Homo sapiens
  misc_RNA (1)...(19): siRNA sense strand
cuccuaaaguggaagggau

SEQ ID NO: 2470694 - RNA, 19 nt, Homo sapiens
  misc_RNA (1)...(19): siRNA sense strand
cagagggaggcaagcgcaa

SEQ ID NO: 2470695 - RNA, 19 nt, Homo sapiens
  misc_RNA (1)...(19): siRNA sense strand
aggaaaggcugacguggca

SEQ ID NO: 2470696 - RNA, 19 nt, Homo sapiens
  misc_RNA (1)...(19): siRNA sense strand
ggacaacacaugggagcca

SEQ ID NO: 2470697 - RNA, 19 nt, Homo sapiens
  misc_RNA (1)...(19): siRNA sense strand
cagauaaaucagagggagg

SEQ ID NO: 2470698 - RNA, 19 nt, Homo sapiens
  misc_RNA (1)...(19): siRNA sense strand
gaggaauaugugguggaaa

SEQ ID NO: 2470699 - RNA, 19 nt, Homo sapiens
  misc_RNA (1)...(19): siRNA sense strand
gguaaagggcaaaguggag

SEQ ID NO: 2470700 - RNA, 19 nt, Homo sapiens
  misc_RNA (1)...(19): siRNA sense strand
aggaggugcuagaagagga

SEQ ID NO: 2470701 - RNA, 19 nt, Homo sapiens
  misc_RNA (1)...(19): siRNA sense strand
ggaaauagcugcagggaag

SEQ ID NO: 2470702 - RNA, 19 nt, Homo sapiens
  misc_RNA (1)...(19): siRNA sense strand
guggcaagauccugggcua

SEQ ID NO: 2470703 - RNA, 19 nt, Homo sapiens
  misc_RNA (1)...(19): siRNA sense strand
ccugaaaucucuuggcuga

SEQ ID NO: 2470704 - RNA, 19 nt, Homo sapiens
  misc_RNA (1)...(19): siRNA sense strand
cggaagagcuggacuggca

SEQ ID NO: 2470705 - RNA, 19 nt, Homo sapiens
  misc_RNA (1)...(19): siRNA sense strand
ccgaggaagagcuggagaa

SEQ ID NO: 2470706 - RNA, 19 nt, Homo sapiens
  misc_RNA (1)...(19): siRNA sense strand
ggucaagaucgaggauaaa

SEQ ID NO: 2470707 - RNA, 19 nt, Homo sapiens
  misc_RNA (1)...(19): siRNA sense strand
guuaacaaguccaagguca

SEQ ID NO: 2470708 - RNA, 19 nt, Homo sapiens
  misc_RNA (1)...(19): siRNA sense strand
gggaagaaugaaaugguca

SEQ ID NO: 2470709 - RNA, 19 nt, Homo sapiens
  misc_RNA (1)...(19): siRNA sense strand
ggcaaauacacucuggaaa

SEQ ID NO: 2470710 - RNA, 19 nt, Homo sapiens
  misc_RNA (1)...(19): siRNA sense strand
cggaaagcccugugagauc

SEQ ID NO: 2470711 - RNA, 19 nt, Homo sapiens
  misc_RNA (1)...(19): siRNA sense strand
uggccaucaucgagaagaa

SEQ ID NO: 2470712 - RNA, 19 nt, Homo sapiens
  misc_RNA (1)...(19): siRNA sense strand
ccucagaguugguugucau

SEQ ID NO: 2470713 - RNA, 19 nt, Homo sapiens
  misc_RNA (1)...(19): siRNA sense strand
gggacaucugaguggcaaa

SEQ ID NO: 2470714 - RNA, 19 nt, Homo sapiens
  misc_RNA (1)...(19): siRNA sense strand
uggaaauagcugcagggaa

SEQ ID NO: 2470715 - RNA, 19 nt, Homo sapiens
  misc_RNA (1)...(19): siRNA sense strand
gcauugaagaguuguccaa

SEQ ID NO: 2470716 - RNA, 19 nt, Homo sapiens
  misc_RNA (1)...(19): siRNA sense strand
acuacaacguggaguacau

SEQ ID NO: 2470717 - RNA, 19 nt, Homo sapiens
  misc_RNA (1)...(19): siRNA sense strand
gcaccuacaaggaggacga

SEQ ID NO: 2470718 - RNA, 19 nt, Homo sapiens
  misc_RNA (1)...(19): siRNA sense strand
agaucgaggauaaaguuaa

SEQ ID NO: 2470719 - RNA, 19 nt, Homo sapiens
  misc_RNA (1)...(19): siRNA sense strand
ggacaagccaggugcccau

SEQ ID NO: 2470720 - RNA, 19 nt, Homo sapiens
  misc_RNA (1)...(19): siRNA sense strand
aagagaagggacuggaaga

SEQ ID NO: 2470721 - RNA, 19 nt, Homo sapiens
  misc_RNA (1)...(19): siRNA sense strand
gcgagauccgagaggccua

SEQ ID NO: 2470722 - RNA, 19 nt, Homo sapiens
  misc_RNA (1)...(19): siRNA sense strand
cagcugacgugcaagguga

SEQ ID NO: 2470723 - RNA, 19 nt, Homo sapiens
  misc_RNA (1)...(19): siRNA sense strand
cagagaugccagaugguca

SEQ ID NO: 2470724 - RNA, 19 nt, Homo sapiens
  misc_RNA (1)...(19): siRNA sense strand
caguauggccugagcgauc

SEQ ID NO: 2470725 - RNA, 19 nt, Homo sapiens
  misc_RNA (1)...(19): siRNA sense strand
gagugcaaagaguggacaa

SEQ ID NO: 2470726 - RNA, 19 nt, Homo sapiens
  misc_RNA (1)...(19): siRNA sense strand
aggcagaugcuaagagaag

SEQ ID NO: 2470727 - RNA, 19 nt, Homo sapiens
  misc_RNA (1)...(19): siRNA sense strand
gggacuugucggugcccaa

SEQ ID NO: 2470728 - RNA, 19 nt, Homo sapiens
  misc_RNA (1)...(19): siRNA sense strand
gaugcagcccggaggaaga

SEQ ID NO: 2470729 - RNA, 19 nt, Homo sapiens
  misc_RNA (1)...(19): siRNA sense strand
guguggaugaagagggcuu

SEQ ID NO: 2470730 - RNA, 19 nt, Homo sapiens
  misc_RNA (1)...(19): siRNA sense strand
caacagaucucucagggca

SEQ ID NO: 2470731 - RNA, 19 nt, Homo sapiens
  misc_RNA (1)...(19): siRNA sense strand
ucugaguggcaaacaguua

SEQ ID NO: 2470732 - RNA, 19 nt, Homo sapiens
  misc_RNA (1)...(19): siRNA sense strand
auccaaggcaccagguuua

SEQ ID NO: 2470733 - RNA, 19 nt, Homo sapiens
  misc_RNA (1)...(19): siRNA sense strand
agucuuugcucgugagaag

SEQ ID NO: 2470734 - RNA, 19 nt, Homo sapiens
  misc_RNA (1)...(19): siRNA sense strand
ucgucgaaggucagagcua

SEQ ID NO: 2470735 - RNA, 19 nt, Homo sapiens
  misc_RNA (1)...(19): siRNA sense strand
gcuggaaguagaaaaguua

SEQ ID NO: 2470736 - RNA, 19 nt, Homo sapiens
  misc_RNA (1)...(19): siRNA sense strand
gggaauuuacagagcgaug

SEQ ID NO: 2470737 - RNA, 19 nt, Homo sapiens
  misc_RNA (1)...(19): siRNA sense strand
gcagccuguuugagugcaa

SEQ ID NO: 2470738 - RNA, 19 nt, Homo sapiens
  misc_RNA (1)...(19): siRNA sense strand
ccgacuugcagccaggaaa

SEQ ID NO: 2470739 - RNA, 19 nt, Homo sapiens
  misc_RNA (1)...(19): siRNA sense strand
gugccaaaguggugagagg

SEQ ID NO: 2470740 - RNA, 19 nt, Homo sapiens
  misc_RNA (1)...(19): siRNA sense strand
augaagagggcuuuaucua

SEQ ID NO: 2470741 - RNA, 19 nt, Homo sapiens
  misc_RNA (1)...(19): siRNA sense strand
ucaacaacaaggagaucuu

SEQ ID NO: 2470742 - RNA, 19 nt, Homo sapiens
  misc_RNA (1)...(19): siRNA sense strand
gggaauggaucgccugcca

SEQ ID NO: 2470743 - RNA, 19 nt, Homo sapiens
  misc_RNA (1)...(19): siRNA sense strand
gcccggaggaagacagaga

SEQ ID NO: 2470744 - RNA, 19 nt, Homo sapiens
  misc_RNA (1)...(19): siRNA sense strand
agucauagguaguggcacc

SEQ ID NO: 2470745 - RNA, 19 nt, Homo sapiens
  misc_RNA (1)...(19): siRNA sense strand
guuacguguuccagguaca

SEQ ID NO: 2470746 - RNA, 19 nt, Homo sapiens
  misc_RNA (1)...(19): siRNA sense strand
cugaagaagcugagucaug

SEQ ID NO: 2470747 - RNA, 19 nt, Homo sapiens
  misc_RNA (1)...(19): siRNA sense strand
gagagaagggccuggugga

SEQ ID NO: 2470748 - RNA, 19 nt, Homo sapiens
  misc_RNA (1)...(19): siRNA sense strand
agaacuugucugaggagga

SEQ ID NO: 2470749 - RNA, 19 nt, Homo sapiens
  misc_RNA (1)...(19): siRNA sense strand
ugagagaugccgaggccga

SEQ ID NO: 2470750 - RNA, 19 nt, Homo sapiens
  misc_RNA (1)...(19): siRNA sense strand
uggcaaacaguuaacaaca

SEQ ID NO: 2470751 - RNA, 19 nt, Homo sapiens
  misc_RNA (1)...(19): siRNA sense strand
aguccaaggucauccugaa

SEQ ID NO: 2470752 - RNA, 19 nt, Homo sapiens
  misc_RNA (1)...(19): siRNA sense strand
gagcaguggaagccgguca

SEQ ID NO: 2470753 - RNA, 19 nt, Homo sapiens
  misc_RNA (1)...(19): siRNA sense strand
gaugcuaagagaagggacu

SEQ ID NO: 2470754 - RNA, 19 nt, Homo sapiens
  misc_RNA (1)...(19): siRNA sense strand
uggcugaacaccagagacu

SEQ ID NO: 2470755 - RNA, 19 nt, Homo sapiens
  misc_RNA (1)...(19): siRNA sense strand
aagauaagacccugugcuu

SEQ ID NO: 2470756 - RNA, 19 nt, Homo sapiens
  misc_RNA (1)...(19): siRNA sense strand
cauccaaggcaccagguuu

SEQ ID NO: 2470757 - RNA, 19 nt, Homo sapiens
  misc_RNA (1)...(19): siRNA sense strand
ccucagaguuucagugguc

SEQ ID NO: 2470758 - RNA, 19 nt, Homo sapiens
  misc_RNA (1)...(19): siRNA sense strand
uuaacaaguccaaggucau

SEQ ID NO: 2470759 - RNA, 19 nt, Homo sapiens
  misc_RNA (1)...(19): siRNA sense strand
ccgagauggaaaagccaaa

SEQ ID NO: 2470760 - RNA, 19 nt, Homo sapiens
  misc_RNA (1)...(19): siRNA sense strand
gaggaaagcugguguggca

SEQ ID NO: 2470761 - RNA, 19 nt, Homo sapiens
  misc_RNA (1)...(19): siRNA sense strand
gcaaggauauggagagcca

SEQ ID NO: 2470762 - RNA, 19 nt, Homo sapiens
  misc_RNA (1)...(19): siRNA sense strand
ccagugugcuccaggguga

SEQ ID NO: 2470763 - RNA, 19 nt, Homo sapiens
  misc_RNA (1)...(19): siRNA sense strand
agauacagcagcagcaaca

SEQ ID NO: 2470764 - RNA, 19 nt, Homo sapiens
  misc_RNA (1)...(19): siRNA sense strand
gugagaucgcccuggagaa

SEQ ID NO: 2470765 - RNA, 19 nt, Homo sapiens
  misc_RNA (1)...(19): siRNA sense strand
ggauagaccggcaguggca

SEQ ID NO: 2470766 - RNA, 19 nt, Homo sapiens
  misc_RNA (1)...(19): siRNA sense strand
ccacagaacuucagugucc

SEQ ID NO: 2470767 - RNA, 19 nt, Homo sapiens
  misc_RNA (1)...(19): siRNA sense strand
ugaguaagaugaagagccu

SEQ ID NO: 2470768 - RNA, 19 nt, Homo sapiens
  misc_RNA (1)...(19): siRNA sense strand
aagcaguagugcagcagca

SEQ ID NO: 2470769 - RNA, 19 nt, Homo sapiens
  misc_RNA (1)...(19): siRNA sense strand
cgaggaugccaugaggaaa

SEQ ID NO: 2470770 - RNA, 19 nt, Homo sapiens
  misc_RNA (1)...(19): siRNA sense strand
augaugagcggcagagcau

SEQ ID NO: 2470771 - RNA, 19 nt, Homo sapiens
  misc_RNA (1)...(19): siRNA sense strand
ccuaauaccacuugggcau

SEQ ID NO: 2470772 - RNA, 19 nt, Homo sapiens
  misc_RNA (1)...(19): siRNA sense strand
cgguauaucuucagccaca

SEQ ID NO: 2470773 - RNA, 19 nt, Homo sapiens
  misc_RNA (1)...(19): siRNA sense strand
aggaagaccuacuggagca

SEQ ID NO: 2470774 - RNA, 19 nt, Homo sapiens
  misc_RNA (1)...(19): siRNA sense strand
gggaauaugaggaagaccu

SEQ ID NO: 2470775 - RNA, 19 nt, Homo sapiens
  misc_RNA (1)...(19): siRNA sense strand
cagacugugagguggaauu

SEQ ID NO: 2470776 - RNA, 19 nt, Homo sapiens
  misc_RNA (1)...(19): siRNA sense strand
aagccagauuauagaagau

SEQ ID NO: 2470777 - RNA, 19 nt, Homo sapiens
  misc_RNA (1)...(19): siRNA sense strand
ccuaacuagcucagauaca

SEQ ID NO: 2470778 - RNA, 19 nt, Homo sapiens
  misc_RNA (1)...(19): siRNA sense strand
ccgaagauuaagaaggucu

SEQ ID NO: 2470779 - RNA, 19 nt, Homo sapiens
  misc_RNA (1)...(19): siRNA sense strand
agauuauagaagaugguca

SEQ ID NO: 2470780 - RNA, 19 nt, Homo sapiens
  misc_RNA (1)...(19): siRNA sense strand
gaccacaugaagaggauca

SEQ ID NO: 2470781 - RNA, 19 nt, Homo sapiens
  misc_RNA (1)...(19): siRNA sense strand
cuuccguggguguggacaa

SEQ ID NO: 2470782 - RNA, 19 nt, Homo sapiens
  misc_RNA (1)...(19): siRNA sense strand
caaguaugucagcagcaaa

SEQ ID NO: 2470783 - RNA, 19 nt, Homo sapiens
  misc_RNA (1)...(19): siRNA sense strand
ccacaaugcuguuugcuga

SEQ ID NO: 2470784 - RNA, 19 nt, Homo sapiens
  misc_RNA (1)...(19): siRNA sense strand
ccguggaagagaagauuau

SEQ ID NO: 2470785 - RNA, 19 nt, Homo sapiens
  misc_RNA (1)...(19): siRNA sense strand
aguugaacccuaugaccaa

SEQ ID NO: 2470786 - RNA, 19 nt, Homo sapiens
  misc_RNA (1)...(19): siRNA sense strand
cagaggaagcggaacgcau

SEQ ID NO: 2470787 - RNA, 19 nt, Homo sapiens
  misc_RNA (1)...(19): siRNA sense strand
acaccguggaagagaagau

SEQ ID NO: 2470788 - RNA, 19 nt, Homo sapiens
  misc_RNA (1)...(19): siRNA sense strand
ggccacagaggaagcggaa

SEQ ID NO: 2470789 - RNA, 19 nt, Homo sapiens
  misc_RNA (1)...(19): siRNA sense strand
uuucugaaguugaacccua

SEQ ID NO: 2470790 - RNA, 19 nt, Homo sapiens
  misc_RNA (1)...(19): siRNA sense strand
gggaagaccuagacaggga

SEQ ID NO: 2470791 - RNA, 19 nt, Homo sapiens
  misc_RNA (1)...(19): siRNA sense strand
ugaacaaccaggugggaga

SEQ ID NO: 2470792 - RNA, 19 nt, Homo sapiens
  misc_RNA (1)...(19): siRNA sense strand
uagagaaggaagaggcaga

SEQ ID NO: 2470793 - RNA, 19 nt, Homo sapiens
  misc_RNA (1)...(19): siRNA sense strand
gguacaacuuggaaaggca

SEQ ID NO: 2470794 - RNA, 19 nt, Homo sapiens
  misc_RNA (1)...(19): siRNA sense strand
gaauuuagucuuugggauc

SEQ ID NO: 2470795 - RNA, 19 nt, Homo sapiens
  misc_RNA (1)...(19): siRNA sense strand
agauguuagagaaggaaga

SEQ ID NO: 2470796 - RNA, 19 nt, Homo sapiens
  misc_RNA (1)...(19): siRNA sense strand
ggcuagaagaaaucgagaa

SEQ ID NO: 2470797 - RNA, 19 nt, Homo sapiens
  misc_RNA (1)...(19): siRNA sense strand
gggacacacggcugagaau

SEQ ID NO: 2470798 - RNA, 19 nt, Homo sapiens
  misc_RNA (1)...(19): siRNA sense strand
aggaagaggcagaucgaac

SEQ ID NO: 2470799 - RNA, 19 nt, Homo sapiens
  misc_RNA (1)...(19): siRNA sense strand
gggaagcagcagaaagaag

SEQ ID NO: 2470800 - RNA, 19 nt, Homo sapiens
  misc_RNA (1)...(19): siRNA sense strand
uggaaaggcaacagcagga

SEQ ID NO: 2470801 - RNA, 19 nt, Homo sapiens
  misc_RNA (1)...(19): siRNA sense strand
ugaauuuagucuuugggau

SEQ ID NO: 2470802 - RNA, 19 nt, Homo sapiens
  misc_RNA (1)...(19): siRNA sense strand
agaaagaagcaaggaggca

SEQ ID NO: 2470803 - RNA, 19 nt, Homo sapiens
  misc_RNA (1)...(19): siRNA sense strand
cucaagaacgggcgugaau

SEQ ID NO: 2470804 - RNA, 19 nt, Homo sapiens
  misc_RNA (1)...(19): siRNA sense strand
gaguaaagaugcuggggaa

SEQ ID NO: 2470805 - RNA, 19 nt, Homo sapiens
  misc_RNA (1)...(19): siRNA sense strand
aagaauugcagcagggaga

SEQ ID NO: 2470806 - RNA, 19 nt, Homo sapiens
  misc_RNA (1)...(19): siRNA sense strand
gggagauacuauagcacga

SEQ ID NO: 2470807 - RNA, 19 nt, Homo sapiens
  misc_RNA (1)...(19): siRNA sense strand
guaaauagaucuugcccug

SEQ ID NO: 2470808 - RNA, 19 nt, Homo sapiens
  misc_RNA (1)...(19): siRNA sense strand
gugcaauaugccuugaaga

SEQ ID NO: 2470809 - RNA, 19 nt, Homo sapiens
  misc_RNA (1)...(19): siRNA sense strand
ccacaagugacgagggcua

SEQ ID NO: 2470810 - RNA, 19 nt, Homo sapiens
  misc_RNA (1)...(19): siRNA sense strand
ccuucaaaccggugcgaaa

SEQ ID NO: 2470811 - RNA, 19 nt, Homo sapiens
  misc_RNA (1)...(19): siRNA sense strand
cgccaggacuugaggagga

SEQ ID NO: 2470812 - RNA, 19 nt, Homo sapiens
  misc_RNA (1)...(19): siRNA sense strand
cugcugaagcugugugaca

SEQ ID NO: 2470813 - RNA, 19 nt, Homo sapiens
  misc_RNA (1)...(19): siRNA sense strand
ccaagaagugcuuucggaa

SEQ ID NO: 2470814 - RNA, 19 nt, Homo sapiens
  misc_RNA (1)...(19): siRNA sense strand
cagcuguggccaagagcau

SEQ ID NO: 2470815 - RNA, 19 nt, Homo sapiens
  misc_RNA (1)...(19): siRNA sense strand
cuacagagcuccuggaagg

SEQ ID NO: 2470816 - RNA, 19 nt, Homo sapiens
  misc_RNA (1)...(19): siRNA sense strand
guucugggacagugugaau

SEQ ID NO: 2470817 - RNA, 19 nt, Homo sapiens
  misc_RNA (1)...(19): siRNA sense strand
aggacaagaaggaagcuga

SEQ ID NO: 2470818 - RNA, 19 nt, Homo sapiens
  misc_RNA (1)...(19): siRNA sense strand
caggacuugaggaggacaa

SEQ ID NO: 2470819 - RNA, 19 nt, Homo sapiens
  misc_RNA (1)...(19): siRNA sense strand
gaugaugaccugugcgugu

SEQ ID NO: 2470820 - RNA, 19 nt, Homo sapiens
  misc_RNA (1)...(19): siRNA sense strand
agacaugggcagugggcuc

SEQ ID NO: 2470821 - RNA, 19 nt, Homo sapiens
  misc_RNA (1)...(19): siRNA sense strand
ggaagagacacgaggucac

SEQ ID NO: 2470822 - RNA, 19 nt, Homo sapiens
  misc_RNA (1)...(19): siRNA sense strand
gagcagaaacaguccagca

SEQ ID NO: 2470823 - RNA, 19 nt, Homo sapiens
  misc_RNA (1)...(19): siRNA sense strand
ccauuuaucaauagggaaa

SEQ ID NO: 2470824 - RNA, 19 nt, Homo sapiens
  misc_RNA (1)...(19): siRNA sense strand
uggaaagaacagucagaaa

SEQ ID NO: 2470825 - RNA, 19 nt, Homo sapiens
  misc_RNA (1)...(19): siRNA sense strand
caagagacccguagggaga

SEQ ID NO: 2470826 - RNA, 19 nt, Homo sapiens
  misc_RNA (1)...(19): siRNA sense strand
guguauuccacaacagaaa

SEQ ID NO: 2470827 - RNA, 19 nt, Homo sapiens
  misc_RNA (1)...(19): siRNA sense strand
cugacugaagccagagaaa

SEQ ID NO: 2470828 - RNA, 19 nt, Homo sapiens
  misc_RNA (1)...(19): siRNA sense strand
ccaaaguccaggugagagu

SEQ ID NO: 2470829 - RNA, 19 nt, Homo sapiens
  misc_RNA (1)...(19): siRNA sense strand
uuucauagacagcugguaa

SEQ ID NO: 2470830 - RNA, 19 nt, Homo sapiens
  misc_RNA (1)...(19): siRNA sense strand
ggaaaauucuauggaggaa

SEQ ID NO: 2470831 - RNA, 19 nt, Homo sapiens
  misc_RNA (1)...(19): siRNA sense strand
cccaaaaggcuguucaaaa

SEQ ID NO: 2470832 - RNA, 19 nt, Homo sapiens
  misc_RNA (1)...(19): siRNA sense strand
aguaggagguggaaagaac

SEQ ID NO: 2470833 - RNA, 19 nt, Homo sapiens
  misc_RNA (1)...(19): siRNA sense strand
aggccaguuacuuggaaua

SEQ ID NO: 2470834 - RNA, 19 nt, Homo sapiens
  misc_RNA (1)...(19): siRNA sense strand
auaacaaacuaucgggcca

SEQ ID NO: 2470835 - RNA, 19 nt, Homo sapiens
  misc_RNA (1)...(19): siRNA sense strand
cagugaugacagaguaaaa

SEQ ID NO: 2470836 - RNA, 19 nt, Homo sapiens
  misc_RNA (1)...(19): siRNA sense strand
aaaagaaguccuuggaaga

SEQ ID NO: 2470837 - RNA, 19 nt, Homo sapiens
  misc_RNA (1)...(19): siRNA sense strand
ugaaaagaaaggacgcuaa

SEQ ID NO: 2470838 - RNA, 19 nt, Homo sapiens
  misc_RNA (1)...(19): siRNA sense strand
guucugaguugcuggacca

SEQ ID NO: 2470839 - RNA, 19 nt, Homo sapiens
  misc_RNA (1)...(19): siRNA sense strand
uugaacaaccauaagagaa

SEQ ID NO: 2470840 - RNA, 19 nt, Homo sapiens
  misc_RNA (1)...(19): siRNA sense strand
cauaccagauggaggagga

SEQ ID NO: 2470841 - RNA, 19 nt, Homo sapiens
  misc_RNA (1)...(19): siRNA sense strand
gauaauggaugcaguccca

SEQ ID NO: 2470842 - RNA, 19 nt, Homo sapiens
  misc_RNA (1)...(19): siRNA sense strand
gugcaguggacucaaacua

SEQ ID NO: 2470843 - RNA, 19 nt, Homo sapiens
  misc_RNA (1)...(19): siRNA sense strand
aaccaacauagaaggauaa

SEQ ID NO: 2470844 - RNA, 19 nt, Homo sapiens
  misc_RNA (1)...(19): siRNA sense strand
ccacaaacgccugggacca

SEQ ID NO: 2470845 - RNA, 19 nt, Homo sapiens
  misc_RNA (1)...(19): siRNA sense strand
ucaaguaggagguggaaag

SEQ ID NO: 2470846 - RNA, 19 nt, Homo sapiens
  misc_RNA (1)...(19): siRNA sense strand
gguggaaagaacagucaga

SEQ ID NO: 2470847 - RNA, 19 nt, Homo sapiens
  misc_RNA (1)...(19): siRNA sense strand
augauuagauuucgguaca

SEQ ID NO: 2470848 - RNA, 19 nt, Homo sapiens
  misc_RNA (1)...(19): siRNA sense strand
acucauaccagauggagga

SEQ ID NO: 2470849 - RNA, 19 nt, Homo sapiens
  misc_RNA (1)...(19): siRNA sense strand
auucuauggaggaaaggaa

SEQ ID NO: 2470850 - RNA, 19 nt, Homo sapiens
  misc_RNA (1)...(19): siRNA sense strand
cgagugcggaagaggauuu

SEQ ID NO: 2470851 - RNA, 19 nt, Homo sapiens
  misc_RNA (1)...(19): siRNA sense strand
cugcaagugccucgccuua

SEQ ID NO: 2470852 - RNA, 19 nt, Homo sapiens
  misc_RNA (1)...(19): siRNA sense strand
caaauagugcuuuagguca

SEQ ID NO: 2470853 - RNA, 19 nt, Homo sapiens
  misc_RNA (1)...(19): siRNA sense strand
ccaaaggauauaauggagu

SEQ ID NO: 2470854 - RNA, 19 nt, Homo sapiens
  misc_RNA (1)...(19): siRNA sense strand
cagcaaagaauucugacca

SEQ ID NO: 2470855 - RNA, 19 nt, Homo sapiens
  misc_RNA (1)...(19): siRNA sense strand
gaagcucuuucuugggcaa

SEQ ID NO: 2470856 - RNA, 19 nt, Homo sapiens
  misc_RNA (1)...(19): siRNA sense strand
aaaucaaguaggaggugga

SEQ ID NO: 2470857 - RNA, 19 nt, Homo sapiens
  misc_RNA (1)...(19): siRNA sense strand
agcaaagaauucugaccau

SEQ ID NO: 2470858 - RNA, 19 nt, Homo sapiens
  misc_RNA (1)...(19): siRNA sense strand
gugcuuuaggucaggccaa

SEQ ID NO: 2470859 - RNA, 19 nt, Homo sapiens
  misc_RNA (1)...(19): siRNA sense strand
aggugagaguggcacgauu

SEQ ID NO: 2470860 - RNA, 19 nt, Homo sapiens
  misc_RNA (1)...(19): siRNA sense strand
cuagaugagguuaugaaga

SEQ ID NO: 2470861 - RNA, 19 nt, Homo sapiens
  misc_RNA (1)...(19): siRNA sense strand
augagguuaugaagaagua

SEQ ID NO: 2470862 - RNA, 19 nt, Homo sapiens
  misc_RNA (1)...(19): siRNA sense strand
guaccaaaccagagcguga

SEQ ID NO: 2470863 - RNA, 19 nt, Homo sapiens
  misc_RNA (1)...(19): siRNA sense strand
ugauaaaggugcaagugga

SEQ ID NO: 2470864 - RNA, 19 nt, Homo sapiens
  misc_RNA (1)...(19): siRNA sense strand
acgcaguauuuaagaagau

SEQ ID NO: 2470865 - RNA, 19 nt, Homo sapiens
  misc_RNA (1)...(19): siRNA sense strand
ucagaauaguaaaggggaa

SEQ ID NO: 2470866 - RNA, 19 nt, Homo sapiens
  misc_RNA (1)...(19): siRNA sense strand
cagaauaguaaaggggaaa

SEQ ID NO: 2470867 - RNA, 19 nt, Homo sapiens
  misc_RNA (1)...(19): siRNA sense strand
uggcaagaacauucggauu

SEQ ID NO: 2470868 - RNA, 19 nt, Homo sapiens
  misc_RNA (1)...(19): siRNA sense strand
aggagagacaacauauaaa

SEQ ID NO: 2470869 - RNA, 19 nt, Homo sapiens
  misc_RNA (1)...(19): siRNA sense strand
cuuggaaagccgugguaca

SEQ ID NO: 2470870 - RNA, 19 nt, Homo sapiens
  misc_RNA (1)...(19): siRNA sense strand
ggauacuacuugaaccuca

SEQ ID NO: 2470871 - RNA, 19 nt, Homo sapiens
  misc_RNA (1)...(19): siRNA sense strand
cgucguuggcggucgguuu

SEQ ID NO: 2470872 - RNA, 19 nt, Homo sapiens
  misc_RNA (1)...(19): siRNA sense strand
ccauggaggccgaugacca

SEQ ID NO: 2470873 - RNA, 19 nt, Homo sapiens
  misc_RNA (1)...(19): siRNA sense strand
agacagguggcaagaacau

SEQ ID NO: 2470874 - RNA, 19 nt, Homo sapiens
  misc_RNA (1)...(19): siRNA sense strand
guaagacccugcagcguga

SEQ ID NO: 2470875 - RNA, 19 nt, Homo sapiens
  misc_RNA (1)...(19): siRNA sense strand
cgucaaaaugcauaucaaa

SEQ ID NO: 2470876 - RNA, 19 nt, Homo sapiens
  misc_RNA (1)...(19): siRNA sense strand
cggccaaucuucauggaga

SEQ ID NO: 2470877 - RNA, 19 nt, Homo sapiens
  misc_RNA (1)...(19): siRNA sense strand
ugaacagcacggaggucaa

SEQ ID NO: 2470878 - RNA, 19 nt, Homo sapiens
  misc_RNA (1)...(19): siRNA sense strand
gcgugcaaccggagagacu

SEQ ID NO: 2470879 - RNA, 19 nt, Homo sapiens
  misc_RNA (1)...(19): siRNA sense strand
ccuucaaguugcaaaccuu

SEQ ID NO: 2470880 - RNA, 19 nt, Homo sapiens
  misc_RNA (1)...(19): siRNA sense strand
agauauuauugcagaccaa

SEQ ID NO: 2470881 - RNA, 19 nt, Homo sapiens
  misc_RNA (1)...(19): siRNA sense strand
cuacaggaguucugggaca

SEQ ID NO: 2470882 - RNA, 19 nt, Homo sapiens
  misc_RNA (1)...(19): siRNA sense strand
ccaacagcgacgagggcua

SEQ ID NO: 2470883 - RNA, 19 nt, Homo sapiens
  misc_RNA (1)...(19): siRNA sense strand
cggaaaacggcaagggaga

SEQ ID NO: 2470884 - RNA, 19 nt, Homo sapiens
  misc_RNA (1)...(19): siRNA sense strand
agugagaugcccagaacaa

SEQ ID NO: 2470885 - RNA, 19 nt, Homo sapiens
  misc_RNA (1)...(19): siRNA sense strand
uugcagaccaagaggaaga

SEQ ID NO: 2470886 - RNA, 19 nt, Homo sapiens
  misc_RNA (1)...(19): siRNA sense strand
gggaccaccaucagagcaa

SEQ ID NO: 2470887 - RNA, 19 nt, Homo sapiens
  misc_RNA (1)...(19): siRNA sense strand
cggagaaggagcagcagga

SEQ ID NO: 2470888 - RNA, 19 nt, Homo sapiens
  misc_RNA (1)...(19): siRNA sense strand
agaccaagaggaagaggca

SEQ ID NO: 2470889 - RNA, 19 nt, Homo sapiens
  misc_RNA (1)...(19): siRNA sense strand
ggaaggacaacgaggagac

SEQ ID NO: 2470890 - RNA, 19 nt, Homo sapiens
  misc_RNA (1)...(19): siRNA sense strand
agauauuauugcagaccaa

SEQ ID NO: 2470891 - RNA, 19 nt, Homo sapiens
  misc_RNA (1)...(19): siRNA sense strand
cuacaggaguucugggaca

SEQ ID NO: 2470892 - RNA, 19 nt, Homo sapiens
  misc_RNA (1)...(19): siRNA sense strand
ccaacagcgacgagggcua

SEQ ID NO: 2470893 - RNA, 19 nt, Homo sapiens
  misc_RNA (1)...(19): siRNA sense strand
cggaaaacggcaagggaga

SEQ ID NO: 2470894 - RNA, 19 nt, Homo sapiens
  misc_RNA (1)...(19): siRNA sense strand
agugagaugcccagaacaa

SEQ ID NO: 2470895 - RNA, 19 nt, Homo sapiens
  misc_RNA (1)...(19): siRNA sense strand
uugcagaccaagaggaaga

SEQ ID NO: 2470896 - RNA, 19 nt, Homo sapiens
  misc_RNA (1)...(19): siRNA sense strand
gggaccaccaucagagcaa

SEQ ID NO: 2470897 - RNA, 19 nt, Homo sapiens
  misc_RNA (1)...(19): siRNA sense strand
cggagaaggagcagcagga

SEQ ID NO: 2470898 - RNA, 19 nt, Homo sapiens
  misc_RNA (1)...(19): siRNA sense strand
agaccaagaggaagaggca

SEQ ID NO: 2470899 - RNA, 19 nt, Homo sapiens
  misc_RNA (1)...(19): siRNA sense strand
ggaaggacaacgaggagac

SEQ ID NO: 2470900 - RNA, 19 nt, Homo sapiens
  misc_RNA (1)...(19): siRNA sense strand
cugaggacgagcagcgcaa

SEQ ID NO: 2470901 - RNA, 19 nt, Homo sapiens
  misc_RNA (1)...(19): siRNA sense strand
gcgacauggacguguuuga

SEQ ID NO: 2470902 - RNA, 19 nt, Homo sapiens
  misc_RNA (1)...(19): siRNA sense strand
cuguguacucugaggacga

SEQ ID NO: 2470903 - RNA, 19 nt, Homo sapiens
  misc_RNA (1)...(19): siRNA sense strand
ggacggaagaggagggaga

SEQ ID NO: 2470904 - RNA, 19 nt, Homo sapiens
  misc_RNA (1)...(19): siRNA sense strand
caaacagaucauagcgaau

SEQ ID NO: 2470905 - RNA, 19 nt, Homo sapiens
  misc_RNA (1)...(19): siRNA sense strand
ccaaacagaucauagcgaa

SEQ ID NO: 2470906 - RNA, 19 nt, Homo sapiens
  misc_RNA (1)...(19): siRNA sense strand
ucuugauacuagacugaaa

SEQ ID NO: 2470907 - RNA, 19 nt, Homo sapiens
  misc_RNA (1)...(19): siRNA sense strand
cuucaguacaagaacacaa

SEQ ID NO: 2470908 - RNA, 19 nt, Homo sapiens
  misc_RNA (1)...(19): siRNA sense strand
caguacaagaacacaaauu

SEQ ID NO: 2470909 - RNA, 19 nt, Homo sapiens
  misc_RNA (1)...(19): siRNA sense strand
acacaaauuaccagggaag

SEQ ID NO: 2470910 - RNA, 19 nt, Homo sapiens
  misc_RNA (1)...(19): siRNA sense strand
gggaagacacuuaggagac

SEQ ID NO: 2470911 - RNA, 19 nt, Homo sapiens
  misc_RNA (1)...(19): siRNA sense strand
agggaagacacuuaggaga

SEQ ID NO: 2470912 - RNA, 19 nt, Homo sapiens
  misc_RNA (1)...(19): siRNA sense strand
ccuguuaaucgcagagcuu

SEQ ID NO: 2470913 - RNA, 19 nt, Homo sapiens
  misc_RNA (1)...(19): siRNA sense strand
cggacaagccuuugagcuc

SEQ ID NO: 2470914 - RNA, 19 nt, Homo sapiens
  misc_RNA (1)...(19): siRNA sense strand
ccagaaggcacgauccaga

SEQ ID NO: 2470915 - RNA, 19 nt, Homo sapiens
  misc_RNA (1)...(19): siRNA sense strand
gcaccaaguauaaccgcuu

SEQ ID NO: 2470916 - RNA, 19 nt, Homo sapiens
  misc_RNA (1)...(19): siRNA sense strand
augccaagaugcuggagga

SEQ ID NO: 2470917 - RNA, 19 nt, Homo sapiens
  misc_RNA (1)...(19): siRNA sense strand
gaacacaaauuaccaggga

SEQ ID NO: 2470918 - RNA, 19 nt, Homo sapiens
  misc_RNA (1)...(19): siRNA sense strand
gagaagaggagaugcguga

SEQ ID NO: 2470919 - RNA, 19 nt, Homo sapiens
  misc_RNA (1)...(19): siRNA sense strand
agaagagagaagaggagau

SEQ ID NO: 2470920 - RNA, 19 nt, Homo sapiens
  misc_RNA (1)...(19): siRNA sense strand
ccuacaugaagaagagaga

SEQ ID NO: 2470921 - RNA, 19 nt, Homo sapiens
  misc_RNA (1)...(19): siRNA sense strand
aggccaagaaauugauuga

SEQ ID NO: 2470922 - RNA, 19 nt, Homo sapiens
  misc_RNA (1)...(19): siRNA sense strand
agcauggaguggaggcgaa

SEQ ID NO: 2470923 - RNA, 19 nt, Homo sapiens
  misc_RNA (1)...(19): siRNA sense strand
gcgugauaccaacgaguca

SEQ ID NO: 2470924 - RNA, 19 nt, Homo sapiens
  misc_RNA (1)...(19): siRNA sense strand
gcauggaguggaggcgaaa

SEQ ID NO: 2470925 - RNA, 19 nt, Homo sapiens
  misc_RNA (1)...(19): siRNA sense strand
ugaagaagagagaagagga

SEQ ID NO: 2470926 - RNA, 19 nt, Homo sapiens
  misc_RNA (1)...(19): siRNA sense strand
uugcaaaaguugagaagcu

SEQ ID NO: 2470927 - RNA, 19 nt, Homo sapiens
  misc_RNA (1)...(19): siRNA sense strand
gcauaaagauggaagagga

SEQ ID NO: 2470928 - RNA, 19 nt, Homo sapiens
  misc_RNA (1)...(19): siRNA sense strand
ccgugaagaauuugaucaa

SEQ ID NO: 2470929 - RNA, 19 nt, Homo sapiens
  misc_RNA (1)...(19): siRNA sense strand
aagagagaguccaggaaaa

SEQ ID NO: 2470930 - RNA, 19 nt, Homo sapiens
  misc_RNA (1)...(19): siRNA sense strand
auguagugcuggaugacaa

SEQ ID NO: 2470931 - RNA, 19 nt, Homo sapiens
  misc_RNA (1)...(19): siRNA sense strand
cauaaagauggaagaggau

SEQ ID NO: 2470932 - RNA, 19 nt, Homo sapiens
  misc_RNA (1)...(19): siRNA sense strand
augaggaaggagcggguaa

SEQ ID NO: 2470933 - RNA, 19 nt, Homo sapiens
  misc_RNA (1)...(19): siRNA sense strand
cuuuaaagccccaggauca

SEQ ID NO: 2470934 - RNA, 19 nt, Homo sapiens
  misc_RNA (1)...(19): siRNA sense strand
gcgucagcuccgugaagaa

SEQ ID NO: 2470935 - RNA, 19 nt, Homo sapiens
  misc_RNA (1)...(19): siRNA sense strand
gcauaaaaucacugagaac

SEQ ID NO: 2470936 - RNA, 19 nt, Homo sapiens
  misc_RNA (1)...(19): siRNA sense strand
ucucugagcuggagcgucu

SEQ ID NO: 2470937 - RNA, 19 nt, Homo sapiens
  misc_RNA (1)...(19): siRNA sense strand
ugcugaaggcccugcauaa

SEQ ID NO: 2470938 - RNA, 19 nt, Homo sapiens
  misc_RNA (1)...(19): siRNA sense strand
ggggaaacguggugcgaag

SEQ ID NO: 2470939 - RNA, 19 nt, Homo sapiens
  misc_RNA (1)...(19): siRNA sense strand
cuguaucacacaagacauu

SEQ ID NO: 2470940 - RNA, 19 nt, Homo sapiens
  misc_RNA (1)...(19): siRNA sense strand
gcuuaagcgcaguggggau

SEQ ID NO: 2470941 - RNA, 19 nt, Homo sapiens
  misc_RNA (1)...(19): siRNA sense strand
caugauagauaacugggau

SEQ ID NO: 2470942 - RNA, 19 nt, Homo sapiens
  misc_RNA (1)...(19): siRNA sense strand
gugcagugucuguggauag

SEQ ID NO: 2470943 - RNA, 19 nt, Homo sapiens
  misc_RNA (1)...(19): siRNA sense strand
cagggaggucggaggaaau

SEQ ID NO: 2470944 - RNA, 19 nt, Homo sapiens
  misc_RNA (1)...(19): siRNA sense strand
acaagauccuggagagcca

SEQ ID NO: 2470945 - RNA, 19 nt, Homo sapiens
  misc_RNA (1)...(19): siRNA sense strand
gcuacugcuucaaggaaaa

SEQ ID NO: 2470946 - RNA, 19 nt, Homo sapiens
  misc_RNA (1)...(19): siRNA sense strand
agaaugaaagcgugcucaa

SEQ ID NO: 2470947 - RNA, 19 nt, Homo sapiens
  misc_RNA (1)...(19): siRNA sense strand
gcgagugguacgcgcacaa

SEQ ID NO: 2470948 - RNA, 19 nt, Homo sapiens
  misc_RNA (1)...(19): siRNA sense strand
agcuacugcuucaaggaaa

SEQ ID NO: 2470949 - RNA, 19 nt, Homo sapiens
  misc_RNA (1)...(19): siRNA sense strand
gggagaacaacgagaacuc

SEQ ID NO: 2470950 - RNA, 19 nt, Homo sapiens
  misc_RNA (1)...(19): siRNA sense strand
cagccaaccucguggaccu

SEQ ID NO: 2470951 - RNA, 19 nt, Homo sapiens
  misc_RNA (1)...(19): siRNA sense strand
aggaaagggagaacaacga

SEQ ID NO: 2470952 - RNA, 19 nt, Homo sapiens
  misc_RNA (1)...(19): siRNA sense strand
ccaccacacaggucagcaa

SEQ ID NO: 2470953 - RNA, 19 nt, Homo sapiens
  misc_RNA (1)...(19): siRNA sense strand
aaagcgugcucaaggccaa

SEQ ID NO: 2470954 - RNA, 19 nt, Homo sapiens
  misc_RNA (1)...(19): siRNA sense strand
gagcaaguggcgugcgugu

SEQ ID NO: 2470955 - RNA, 19 nt, Homo sapiens
  misc_RNA (1)...(19): siRNA sense strand
gaaagggagaacaacgaga

SEQ ID NO: 2470956 - RNA, 19 nt, Homo sapiens
  misc_RNA (1)...(19): siRNA sense strand
aggaggaggugguggccaa

SEQ ID NO: 2470957 - RNA, 19 nt, Homo sapiens
  misc_RNA (1)...(19): siRNA sense strand
gcgacaacuggaugaacau

SEQ ID NO: 2470958 - RNA, 19 nt, Homo sapiens
  misc_RNA (1)...(19): siRNA sense strand
gggacaaguucuggcggau

SEQ ID NO: 2470959 - RNA, 19 nt, Homo sapiens
  misc_RNA (1)...(19): siRNA sense strand
ccaucaaguaccugcgcau

SEQ ID NO: 2470960 - RNA, 19 nt, Homo sapiens
  misc_RNA (1)...(19): siRNA sense strand
ucgacauggucaaggagga

SEQ ID NO: 2470961 - RNA, 19 nt, Homo sapiens
  misc_RNA (1)...(19): siRNA sense strand
caguagaccaauuggacaa

SEQ ID NO: 2470962 - RNA, 19 nt, Homo sapiens
  misc_RNA (1)...(19): siRNA sense strand
auaugaagucugugagaau

SEQ ID NO: 2470963 - RNA, 19 nt, Homo sapiens
  misc_RNA (1)...(19): siRNA sense strand
cgugaacacaguagaccaa

SEQ ID NO: 2470964 - RNA, 19 nt, Homo sapiens
  misc_RNA (1)...(19): siRNA sense strand
guuuguugcccuuggaaau

SEQ ID NO: 2470965 - RNA, 19 nt, Homo sapiens
  misc_RNA (1)...(19): siRNA sense strand
augauaaugcacugggaga

SEQ ID NO: 2470966 - RNA, 19 nt, Homo sapiens
  misc_RNA (1)...(19): siRNA sense strand
ugauaaugcacugggagaa

SEQ ID NO: 2470967 - RNA, 19 nt, Homo sapiens
  misc_RNA (1)...(19): siRNA sense strand
gguuuguugcccuuggaaa

SEQ ID NO: 2470968 - RNA, 19 nt, Homo sapiens
  misc_RNA (1)...(19): siRNA sense strand
ggaaauuaucagaagggga

SEQ ID NO: 2470969 - RNA, 19 nt, Homo sapiens
  misc_RNA (1)...(19): siRNA sense strand
ugucagcugcaguuggaaa

SEQ ID NO: 2470970 - RNA, 19 nt, Homo sapiens
  misc_RNA (1)...(19): siRNA sense strand
ugggagaagaaagaagaua

SEQ ID NO: 2470971 - RNA, 19 nt, Homo sapiens
  misc_RNA (1)...(19): siRNA sense strand
gaaauuaucagaaggggau

SEQ ID NO: 2470972 - RNA, 19 nt, Homo sapiens
  misc_RNA (1)...(19): siRNA sense strand
gcuaaguacuggaggagca

SEQ ID NO: 2470973 - RNA, 19 nt, Homo sapiens
  misc_RNA (1)...(19): siRNA sense strand
ugagcaaagaggagggcaa

SEQ ID NO: 2470974 - RNA, 19 nt, Homo sapiens
  misc_RNA (1)...(19): siRNA sense strand
gugaaugggcuuuggcaga

SEQ ID NO: 2470975 - RNA, 19 nt, Homo sapiens
  misc_RNA (1)...(19): siRNA sense strand
ggauccuggcggugaacaa

SEQ ID NO: 2470976 - RNA, 19 nt, Homo sapiens
  misc_RNA (1)...(19): siRNA sense strand
ggugcuaaguacuggagga

SEQ ID NO: 2470977 - RNA, 19 nt, Homo sapiens
  misc_RNA (1)...(19): siRNA sense strand
gcuucuguuuacugagcaa

SEQ ID NO: 2470978 - RNA, 19 nt, Homo sapiens
  misc_RNA (1)...(19): siRNA sense strand
ggacagaaugaccuggaga

SEQ ID NO: 2470979 - RNA, 19 nt, Homo sapiens
  misc_RNA (1)...(19): siRNA sense strand
agaaugaccuggagaggcu

SEQ ID NO: 2470980 - RNA, 19 nt, Homo sapiens
  misc_RNA (1)...(19): siRNA sense strand
uuguggaacacgaagacua

SEQ ID NO: 2470981 - RNA, 19 nt, Homo sapiens
  misc_RNA (1)...(19): siRNA sense strand
gcuggaagugaaugggcuu

SEQ ID NO: 2470982 - RNA, 19 nt, Homo sapiens
  misc_RNA (1)...(19): siRNA sense strand
gggcaagaguuuuggcuuc

SEQ ID NO: 2470983 - RNA, 19 nt, Homo sapiens
  misc_RNA (1)...(19): siRNA sense strand
acgugauucuggaagugaa

SEQ ID NO: 2470984 - RNA, 19 nt, Homo sapiens
  misc_RNA (1)...(19): siRNA sense strand
ugagaaacgugaagagcga

SEQ ID NO: 2470985 - RNA, 19 nt, Homo sapiens
  misc_RNA (1)...(19): siRNA sense strand
guguaaguguaaaggauga

SEQ ID NO: 2470986 - RNA, 19 nt, Homo sapiens
  misc_RNA (1)...(19): siRNA sense strand
uggaagaaagcauggacaa

SEQ ID NO: 2470987 - RNA, 19 nt, Homo sapiens
  misc_RNA (1)...(19): siRNA sense strand
uuaaggaaguugcgggaau

SEQ ID NO: 2470988 - RNA, 19 nt, Homo sapiens
  misc_RNA (1)...(19): siRNA sense strand
aagacaaguuucaaaggaa

SEQ ID NO: 2470989 - RNA, 19 nt, Homo sapiens
  misc_RNA (1)...(19): siRNA sense strand
uggcaguguaccagacaua

SEQ ID NO: 2470990 - RNA, 19 nt, Homo sapiens
  misc_RNA (1)...(19): siRNA sense strand
gugucauuauagcgggaua

SEQ ID NO: 2470991 - RNA, 19 nt, Homo sapiens
  misc_RNA (1)...(19): siRNA sense strand
gagaauaugaagauaacga

SEQ ID NO: 2470992 - RNA, 19 nt, Homo sapiens
  misc_RNA (1)...(19): siRNA sense strand
gaacaaggccagcgggucu

SEQ ID NO: 2470993 - RNA, 19 nt, Homo sapiens
  misc_RNA (1)...(19): siRNA sense strand
gagacagauuuggaagaaa

SEQ ID NO: 2470994 - RNA, 19 nt, Homo sapiens
  misc_RNA (1)...(19): siRNA sense strand
guauuauucucgaguucaa

SEQ ID NO: 2470995 - RNA, 19 nt, Homo sapiens
  misc_RNA (1)...(19): siRNA sense strand
ugucugaaccugaagaaau

SEQ ID NO: 2470996 - RNA, 19 nt, Homo sapiens
  misc_RNA (1)...(19): siRNA sense strand
guguaaaggaugacucuau

SEQ ID NO: 2470997 - RNA, 19 nt, Homo sapiens
  misc_RNA (1)...(19): siRNA sense strand
auguaaaugccaugaauga

SEQ ID NO: 2470998 - RNA, 19 nt, Homo sapiens
  misc_RNA (1)...(19): siRNA sense strand
auacagaagcagugaccuu

SEQ ID NO: 2470999 - RNA, 19 nt, Homo sapiens
  misc_RNA (1)...(19): siRNA sense strand
agaucaugcuccaggacau

SEQ ID NO: 2471000 - RNA, 19 nt, Homo sapiens
  misc_RNA (1)...(19): siRNA sense strand
cuacagaagacaaguuuca

SEQ ID NO: 2471001 - RNA, 19 nt, Homo sapiens
  misc_RNA (1)...(19): siRNA sense strand
ccuaauauuaagccugaua

SEQ ID NO: 2471002 - RNA, 19 nt, Homo sapiens
  misc_RNA (1)...(19): siRNA sense strand
ugacaggugauguggaaga

SEQ ID NO: 2471003 - RNA, 19 nt, Homo sapiens
  misc_RNA (1)...(19): siRNA sense strand
aggugauguggaagaauua

SEQ ID NO: 2471004 - RNA, 19 nt, Homo sapiens
  misc_RNA (1)...(19): siRNA sense strand
gacccauauccaugagaaa

SEQ ID NO: 2471005 - RNA, 19 nt, Homo sapiens
  misc_RNA (1)...(19): siRNA sense strand
ccagcgggucucaggaaua

SEQ ID NO: 2471006 - RNA, 19 nt, Homo sapiens
  misc_RNA (1)...(19): siRNA sense strand
uauuagaauggcuggcaaa

SEQ ID NO: 2471007 - RNA, 19 nt, Homo sapiens
  misc_RNA (1)...(19): siRNA sense strand
uguagaaugugaagaggga

SEQ ID NO: 2471008 - RNA, 19 nt, Homo sapiens
  misc_RNA (1)...(19): siRNA sense strand
cuagaugaguacuggcaga

SEQ ID NO: 2471009 - RNA, 19 nt, Homo sapiens
  misc_RNA (1)...(19): siRNA sense strand
cuuaaacuucagaggagaa

SEQ ID NO: 2471010 - RNA, 19 nt, Homo sapiens
  misc_RNA (1)...(19): siRNA sense strand
cuguguaaguguaaaggau

SEQ ID NO: 2471011 - RNA, 19 nt, Homo sapiens
  misc_RNA (1)...(19): siRNA sense strand
gggaagugaagacgaugaa

SEQ ID NO: 2471012 - RNA, 19 nt, Homo sapiens
  misc_RNA (1)...(19): siRNA sense strand
ccacgauauuguaaacaga

SEQ ID NO: 2471013 - RNA, 19 nt, Homo sapiens
  misc_RNA (1)...(19): siRNA sense strand
gcacuuaauggcagcugaa

SEQ ID NO: 2471014 - RNA, 19 nt, Homo sapiens
  misc_RNA (1)...(19): siRNA sense strand
agacauauguaaaugccau

SEQ ID NO: 2471015 - RNA, 19 nt, Homo sapiens
  misc_RNA (1)...(19): siRNA sense strand
gguucauaauccucggaau

SEQ ID NO: 2471016 - RNA, 19 nt, Homo sapiens
  misc_RNA (1)...(19): siRNA sense strand
guauuagaauggcuggcaa

SEQ ID NO: 2471017 - RNA, 19 nt, Homo sapiens
  misc_RNA (1)...(19): siRNA sense strand
caugaugcaaaguggcuua

SEQ ID NO: 2471018 - RNA, 19 nt, Homo sapiens
  misc_RNA (1)...(19): siRNA sense strand
uuaguaaccucaagagcau

SEQ ID NO: 2471019 - RNA, 19 nt, Homo sapiens
  misc_RNA (1)...(19): siRNA sense strand
gcaaaguggcuuauccaga

SEQ ID NO: 2471020 - RNA, 19 nt, Homo sapiens
  misc_RNA (1)...(19): siRNA sense strand
cauggagaacagaaugaaa

SEQ ID NO: 2471021 - RNA, 19 nt, Homo sapiens
  misc_RNA (1)...(19): siRNA sense strand
ugggcaagaaguaggaaga

SEQ ID NO: 2471022 - RNA, 19 nt, Homo sapiens
  misc_RNA (1)...(19): siRNA sense strand
guaccagacauauguaaau

SEQ ID NO: 2471023 - RNA, 19 nt, Homo sapiens
  misc_RNA (1)...(19): siRNA sense strand
gagaauuauuugaaagcug

SEQ ID NO: 2471024 - RNA, 19 nt, Homo sapiens
  misc_RNA (1)...(19): siRNA sense strand
gaacagaaugaaauggcca

SEQ ID NO: 2471025 - RNA, 19 nt, Homo sapiens
  misc_RNA (1)...(19): siRNA sense strand
ccgagacagauuuggaaga

SEQ ID NO: 2471026 - RNA, 19 nt, Homo sapiens
  misc_RNA (1)...(19): siRNA sense strand
acagaagacaaguuucaaa

SEQ ID NO: 2471027 - RNA, 19 nt, Homo sapiens
  misc_RNA (1)...(19): siRNA sense strand
cagauuuggaagaaagcau

SEQ ID NO: 2471028 - RNA, 19 nt, Homo sapiens
  misc_RNA (1)...(19): siRNA sense strand
aagaaagcauggacaaaau

SEQ ID NO: 2471029 - RNA, 19 nt, Homo sapiens
  misc_RNA (1)...(19): siRNA sense strand
agagggaagugaagacgau

SEQ ID NO: 2471030 - RNA, 19 nt, Homo sapiens
  misc_RNA (1)...(19): siRNA sense strand
gcagaaauugacaggugau

SEQ ID NO: 2471031 - RNA, 19 nt, Homo sapiens
  misc_RNA (1)...(19): siRNA sense strand
cagucaaaucccaaaauaa

SEQ ID NO: 2471032 - RNA, 19 nt, Homo sapiens
  misc_RNA (1)...(19): siRNA sense strand
acuuaauggcagcugaaau

SEQ ID NO: 2471033 - RNA, 19 nt, Homo sapiens
  misc_RNA (1)...(19): siRNA sense strand
gauaagaggaaugguguca

SEQ ID NO: 2471034 - RNA, 19 nt, Homo sapiens
  misc_RNA (1)...(19): siRNA sense strand
caaaauaagaaaaggugca

SEQ ID NO: 2471035 - RNA, 19 nt, Homo sapiens
  misc_RNA (1)...(19): siRNA sense strand
gauuuuaguccauggagaa

SEQ ID NO: 2471036 - RNA, 19 nt, Homo sapiens
  misc_RNA (1)...(19): siRNA sense strand
aauaagaaaaggugcagua

SEQ ID NO: 2471037 - RNA, 19 nt, Homo sapiens
  misc_RNA (1)...(19): siRNA sense strand
cgaugaaucccuccgagaa

SEQ ID NO: 2471038 - RNA, 19 nt, Homo sapiens
  misc_RNA (1)...(19): siRNA sense strand
agaaacgugaagagcgaga

SEQ ID NO: 2471039 - RNA, 19 nt, Homo sapiens
  misc_RNA (1)...(19): siRNA sense strand
auggagaacagaaugaaau

SEQ ID NO: 2471040 - RNA, 19 nt, Homo sapiens
  misc_RNA (1)...(19): siRNA sense strand
ccuuaaacuucagaggaga

SEQ ID NO: 2471041 - RNA, 19 nt, Homo sapiens
  misc_RNA (1)...(19): siRNA sense strand
uggagaagacuguguaagu

SEQ ID NO: 2471042 - RNA, 19 nt, Homo sapiens
  misc_RNA (1)...(19): siRNA sense strand
caagaagauaggcacuuaa

SEQ ID NO: 2471043 - RNA, 19 nt, Homo sapiens
  misc_RNA (1)...(19): siRNA sense strand
cugaggaagacucgggaau

SEQ ID NO: 2471044 - RNA, 19 nt, Homo sapiens
  misc_RNA (1)...(19): siRNA sense strand
agaacauugcuuacagaaa

SEQ ID NO: 2471045 - RNA, 19 nt, Homo sapiens
  misc_RNA (1)...(19): siRNA sense strand
caauaaacuuacagagacc

SEQ ID NO: 2471046 - RNA, 19 nt, Homo sapiens
  misc_RNA (1)...(19): siRNA sense strand
ggaccaagcagaaggcuaa

SEQ ID NO: 2471047 - RNA, 19 nt, Homo sapiens
  misc_RNA (1)...(19): siRNA sense strand
acaaggaacaggagggaga

SEQ ID NO: 2471048 - RNA, 19 nt, Homo sapiens
  misc_RNA (1)...(19): siRNA sense strand
ggucaacauaacagaacua

SEQ ID NO: 2471049 - RNA, 19 nt, Homo sapiens
  misc_RNA (1)...(19): siRNA sense strand
gcagaaggcuaacaaggaa

SEQ ID NO: 2471050 - RNA, 19 nt, Homo sapiens
  misc_RNA (1)...(19): siRNA sense strand
cggaaaccaugcaaugaaa

SEQ ID NO: 2471051 - RNA, 19 nt, Homo sapiens
  misc_RNA (1)...(19): siRNA sense strand
acaaugacgaugucggaaa

SEQ ID NO: 2471052 - RNA, 19 nt, Homo sapiens
  misc_RNA (1)...(19): siRNA sense strand
ugugaacaacaaagagaaa

SEQ ID NO: 2471053 - RNA, 19 nt, Homo sapiens
  misc_RNA (1)...(19): siRNA sense strand
ucauaauucagaaggacaa

SEQ ID NO: 2471054 - RNA, 19 nt, Homo sapiens
  misc_RNA (1)...(19): siRNA sense strand
ccagauagucguaugugaa

SEQ ID NO: 2471055 - RNA, 19 nt, Homo sapiens
  misc_RNA (1)...(19): siRNA sense strand
gaucuaugacucagggaca

SEQ ID NO: 2471056 - RNA, 19 nt, Homo sapiens
  misc_RNA (1)...(19): siRNA sense strand
aaagaaggacacagagaca

SEQ ID NO: 2471057 - RNA, 19 nt, Homo sapiens
  misc_RNA (1)...(19): siRNA sense strand
ugaggaaagccaaggccaa

SEQ ID NO: 2471058 - RNA, 19 nt, Homo sapiens
  misc_RNA (1)...(19): siRNA sense strand
cugaaaagagagaagaauu

SEQ ID NO: 2471059 - RNA, 19 nt, Homo sapiens
  misc_RNA (1)...(19): siRNA sense strand
ccuauaaguuuuacagaga

SEQ ID NO: 2471060 - RNA, 19 nt, Homo sapiens
  misc_RNA (1)...(19): siRNA sense strand
agaccagaauuuugugaua

SEQ ID NO: 2471061 - RNA, 19 nt, Homo sapiens
  misc_RNA (1)...(19): siRNA sense strand
gaucuaggaaagaaggaca

SEQ ID NO: 2471062 - RNA, 19 nt, Homo sapiens
  misc_RNA (1)...(19): siRNA sense strand
cagauagucguaugugaaa

SEQ ID NO: 2471063 - RNA, 19 nt, Homo sapiens
  misc_RNA (1)...(19): siRNA sense strand
caugaagagcacagagagu

SEQ ID NO: 2471064 - RNA, 19 nt, Homo sapiens
  misc_RNA (1)...(19): siRNA sense strand
cugaagacgucgaauacca

SEQ ID NO: 2471065 - RNA, 19 nt, Homo sapiens
  misc_RNA (1)...(19): siRNA sense strand
ugacacuggacaagaaaga

SEQ ID NO: 2471066 - RNA, 19 nt, Homo sapiens
  misc_RNA (1)...(19): siRNA sense strand
cucaaaugauccugcggua

SEQ ID NO: 2471067 - RNA, 19 nt, Homo sapiens
  misc_RNA (1)...(19): siRNA sense strand
guucugagggugaagguga

SEQ ID NO: 2471068 - RNA, 19 nt, Homo sapiens
  misc_RNA (1)...(19): siRNA sense strand
cucacaaagaucuaggaaa

SEQ ID NO: 2471069 - RNA, 19 nt, Homo sapiens
  misc_RNA (1)...(19): siRNA sense strand
uggacaagaaagaggccau

SEQ ID NO: 2471070 - RNA, 19 nt, Homo sapiens
  misc_RNA (1)...(19): siRNA sense strand
cacugcagguauugacaaa

SEQ ID NO: 2471071 - RNA, 19 nt, Homo sapiens
  misc_RNA (1)...(19): siRNA sense strand
cggacuggacggugcaaaa

SEQ ID NO: 2471072 - RNA, 19 nt, Homo sapiens
  misc_RNA (1)...(19): siRNA sense strand
acucaagauuucaccaaga

SEQ ID NO: 2471073 - RNA, 19 nt, Homo sapiens
  misc_RNA (1)...(19): siRNA sense strand
caaguaaggugguggaguc

SEQ ID NO: 2471074 - RNA, 19 nt, Homo sapiens
  misc_RNA (1)...(19): siRNA sense strand
agcagaugccaguggaaau

SEQ ID NO: 2471075 - RNA, 19 nt, Homo sapiens
  misc_RNA (1)...(19): siRNA sense strand
cugcagaguaccagguguu

SEQ ID NO: 2471076 - RNA, 19 nt, Homo sapiens
  misc_RNA (1)...(19): siRNA sense strand
ggugggaucgugaggguca

SEQ ID NO: 2471077 - RNA, 19 nt, Homo sapiens
  misc_RNA (1)...(19): siRNA sense strand
ggaccaaggugaaagacug

SEQ ID NO: 2471078 - RNA, 19 nt, Homo sapiens
  misc_RNA (1)...(19): siRNA sense strand
caucgaaguccguugcgaa

SEQ ID NO: 2471079 - RNA, 19 nt, Homo sapiens
  misc_RNA (1)...(19): siRNA sense strand
cugcgguauucaaagacaa

SEQ ID NO: 2471080 - RNA, 19 nt, Homo sapiens
  misc_RNA (1)...(19): siRNA sense strand
uggaccaagcagaaggcua

SEQ ID NO: 2471081 - RNA, 19 nt, Homo sapiens
  misc_RNA (1)...(19): siRNA sense strand
aagccaaggccaagcagau

SEQ ID NO: 2471082 - RNA, 19 nt, Homo sapiens
  misc_RNA (1)...(19): siRNA sense strand
cagauacucuagaacggaa

SEQ ID NO: 2471083 - RNA, 19 nt, Homo sapiens
  misc_RNA (1)...(19): siRNA sense strand
ggugaaagacugaaccugu

SEQ ID NO: 2471084 - RNA, 19 nt, Homo sapiens
  misc_RNA (1)...(19): siRNA sense strand
agugagguucugaggguga

SEQ ID NO: 2471085 - RNA, 19 nt, Homo sapiens
  misc_RNA (1)...(19): siRNA sense strand
agguguugguggaaggagu

SEQ ID NO: 2471086 - RNA, 19 nt, Homo sapiens
  misc_RNA (1)...(19): siRNA sense strand
uggucaagcugaaaagaga

SEQ ID NO: 2471087 - RNA, 19 nt, Homo sapiens
  misc_RNA (1)...(19): siRNA sense strand
gcaccauucaagugacuca

SEQ ID NO: 2471088 - RNA, 19 nt, Homo sapiens
  misc_RNA (1)...(19): siRNA sense strand
ccauggaagaaaggacuua

SEQ ID NO: 2471089 - RNA, 19 nt, Homo sapiens
  misc_RNA (1)...(19): siRNA sense strand
gaaucuaccaagagugaac

SEQ ID NO: 2471090 - RNA, 19 nt, Homo sapiens
  misc_RNA (1)...(19): siRNA sense strand
caaaugaccucaaaugcca

SEQ ID NO: 2471091 - RNA, 19 nt, Homo sapiens
  misc_RNA (1)...(19): siRNA sense strand
gaagaauucucgagaccag

SEQ ID NO: 2471092 - RNA, 19 nt, Homo sapiens
  misc_RNA (1)...(19): siRNA sense strand
acaaaguggucaagaaaag

SEQ ID NO: 2471093 - RNA, 19 nt, Homo sapiens
  misc_RNA (1)...(19): siRNA sense strand
acuccaacaacgagaaaau

SEQ ID NO: 2471094 - RNA, 19 nt, Homo sapiens
  misc_RNA (1)...(19): siRNA sense strand
ucagcagcaucguggucaa

SEQ ID NO: 2471095 - RNA, 19 nt, Homo sapiens
  misc_RNA (1)...(19): siRNA sense strand
agaaggacacagagacagu

SEQ ID NO: 2471096 - RNA, 19 nt, Homo sapiens
  misc_RNA (1)...(19): siRNA sense strand
ggagaaugauugugggaac

SEQ ID NO: 2471097 - RNA, 19 nt, Homo sapiens
  misc_RNA (1)...(19): siRNA sense strand
ggguagaacaagugguacu

SEQ ID NO: 2471098 - RNA, 19 nt, Homo sapiens
  misc_RNA (1)...(19): siRNA sense strand
ggggaauauucgagcagaa

SEQ ID NO: 2471099 - RNA, 19 nt, Homo sapiens
  misc_RNA (1)...(19): siRNA sense strand
gagaaaucgaugaagaaac

SEQ ID NO: 2471100 - RNA, 19 nt, Homo sapiens
  misc_RNA (1)...(19): siRNA sense strand
cguugcagucauuggagaa

SEQ ID NO: 2471101 - RNA, 19 nt, Homo sapiens
  misc_RNA (1)...(19): siRNA sense strand
gcgcuugauuuggggaaua

SEQ ID NO: 2471102 - RNA, 19 nt, Homo sapiens
  misc_RNA (1)...(19): siRNA sense strand
cuuuaaauucuguagcaca

SEQ ID NO: 2471103 - RNA, 19 nt, Homo sapiens
  misc_RNA (1)...(19): siRNA sense strand
cugaaagggaagagaguug

SEQ ID NO: 2471104 - RNA, 19 nt, Homo sapiens
  misc_RNA (1)...(19): siRNA sense strand
uggacaagaucgagggcgu

SEQ ID NO: 2471105 - RNA, 19 nt, Homo sapiens
  misc_RNA (1)...(19): siRNA sense strand
ggauggagguugugcagcu

SEQ ID NO: 2471106 - RNA, 19 nt, Homo sapiens
  misc_RNA (1)...(19): siRNA sense strand
uggcugagcgagaagaaaa

SEQ ID NO: 2471107 - RNA, 19 nt, Homo sapiens
  misc_RNA (1)...(19): siRNA sense strand
uccggaagauugaggccua

SEQ ID NO: 2471108 - RNA, 19 nt, Homo sapiens
  misc_RNA (1)...(19): siRNA sense strand
acauggaagacgacaggau

SEQ ID NO: 2471109 - RNA, 19 nt, Homo sapiens
  misc_RNA (1)...(19): siRNA sense strand
aggccuacauggaagacga

SEQ ID NO: 2471110 - RNA, 19 nt, Homo sapiens
  misc_RNA (1)...(19): siRNA sense strand
ggcuacuggcugagcgaga

SEQ ID NO: 2471111 - RNA, 19 nt, Homo sapiens
  misc_RNA (1)...(19): siRNA sense strand
gugcaggaagcgagggaug

SEQ ID NO: 2471112 - RNA, 19 nt, Homo sapiens
  misc_RNA (1)...(19): siRNA sense strand
ugcacagguuccaggagua

SEQ ID NO: 2471113 - RNA, 19 nt, Homo sapiens
  misc_RNA (1)...(19): siRNA sense strand
gcgagaagaaaaucaagaa

SEQ ID NO: 2471114 - RNA, 19 nt, Homo sapiens
  misc_RNA (1)...(19): siRNA sense strand
aggcagagcuccagcgaga

SEQ ID NO: 2471115 - RNA, 19 nt, Homo sapiens
  misc_RNA (1)...(19): siRNA sense strand
aagaaaaggagaaggagaa

SEQ ID NO: 2471116 - RNA, 19 nt, Homo sapiens
  misc_RNA (1)...(19): siRNA sense strand
acucauuacagcaggacaa

SEQ ID NO: 2471117 - RNA, 19 nt, Homo sapiens
  misc_RNA (1)...(19): siRNA sense strand
cgggaagcucagagggaga

SEQ ID NO: 2471118 - RNA, 19 nt, Homo sapiens
  misc_RNA (1)...(19): siRNA sense strand
accaaaggucacaggguua

SEQ ID NO: 2471119 - RNA, 19 nt, Homo sapiens
  misc_RNA (1)...(19): siRNA sense strand
cggcuaucugccaggaaua

SEQ ID NO: 2471120 - RNA, 19 nt, Homo sapiens
  misc_RNA (1)...(19): siRNA sense strand
gaagaaaaggagaaggaga

SEQ ID NO: 2471121 - RNA, 19 nt, Homo sapiens
  misc_RNA (1)...(19): siRNA sense strand
ccaacgagcugaagcagga

SEQ ID NO: 2471122 - RNA, 19 nt, Homo sapiens
  misc_RNA (1)...(19): siRNA sense strand
cugagauuccgcagguaaa

SEQ ID NO: 2471123 - RNA, 19 nt, Homo sapiens
  misc_RNA (1)...(19): siRNA sense strand
acucagggccagaggcaga

SEQ ID NO: 2471124 - RNA, 19 nt, Homo sapiens
  misc_RNA (1)...(19): siRNA sense strand
cugaggaggaggaagaaaa

SEQ ID NO: 2471125 - RNA, 19 nt, Homo sapiens
  misc_RNA (1)...(19): siRNA sense strand
aggcaggagcccagcaaga

SEQ ID NO: 2471126 - RNA, 19 nt, Homo sapiens
  misc_RNA (1)...(19): siRNA sense strand
ccaaagggauccugcagca

SEQ ID NO: 2471127 - RNA, 19 nt, Homo sapiens
  misc_RNA (1)...(19): siRNA sense strand
ccuuacgggcugaggccua

SEQ ID NO: 2471128 - RNA, 19 nt, Homo sapiens
  misc_RNA (1)...(19): siRNA sense strand
gagacugagaugucggcua

SEQ ID NO: 2471129 - RNA, 19 nt, Homo sapiens
  misc_RNA (1)...(19): siRNA sense strand
gagcagaggcgcaagcagu

SEQ ID NO: 2471130 - RNA, 19 nt, Homo sapiens
  misc_RNA (1)...(19): siRNA sense strand
aggaagaaaaggagaagga

SEQ ID NO: 2471131 - RNA, 19 nt, Homo sapiens
  misc_RNA (1)...(19): siRNA sense strand
gacucaaacuggagccuca

SEQ ID NO: 2471132 - RNA, 19 nt, Homo sapiens
  misc_RNA (1)...(19): siRNA sense strand
ggaacaacagggaggcacu

SEQ ID NO: 2471133 - RNA, 19 nt, Homo sapiens
  misc_RNA (1)...(19): siRNA sense strand
ccagaaaggucaaggcugc

SEQ ID NO: 2471134 - RNA, 19 nt, Homo sapiens
  misc_RNA (1)...(19): siRNA sense strand
gagcaggcagacugggaga

SEQ ID NO: 2471135 - RNA, 19 nt, Homo sapiens
  misc_RNA (1)...(19): siRNA sense strand
aggaggaagaaaaggagaa

SEQ ID NO: 2471136 - RNA, 19 nt, Homo sapiens
  misc_RNA (1)...(19): siRNA sense strand
acccaaagccagaggcgga

SEQ ID NO: 2471137 - RNA, 19 nt, Homo sapiens
  misc_RNA (1)...(19): siRNA sense strand
gaaaaggagaaggagaaaa

SEQ ID NO: 2471138 - RNA, 19 nt, Homo sapiens
  misc_RNA (1)...(19): siRNA sense strand
gguaaaaccgggaagcuca

SEQ ID NO: 2471139 - RNA, 19 nt, Homo sapiens
  misc_RNA (1)...(19): siRNA sense strand
ccucaaagucagggaauac

SEQ ID NO: 2471140 - RNA, 19 nt, Homo sapiens
  misc_RNA (1)...(19): siRNA sense strand
gcuucuuccagcugggcaa

SEQ ID NO: 2471141 - RNA, 19 nt, Homo sapiens
  misc_RNA (1)...(19): siRNA sense strand
agaaaaggagaaggagaaa

SEQ ID NO: 2471142 - RNA, 19 nt, Homo sapiens
  misc_RNA (1)...(19): siRNA sense strand
agcaugagcuucaggacca

SEQ ID NO: 2471143 - RNA, 19 nt, Homo sapiens
  misc_RNA (1)...(19): siRNA sense strand
cuacaucaaccgaggcgau

SEQ ID NO: 2471144 - RNA, 19 nt, Homo sapiens
  misc_RNA (1)...(19): siRNA sense strand
uccagaaggcagagaacca

SEQ ID NO: 2471145 - RNA, 19 nt, Homo sapiens
  misc_RNA (1)...(19): siRNA sense strand
agccagggcaugagcucaa

SEQ ID NO: 2471146 - RNA, 19 nt, Homo sapiens
  misc_RNA (1)...(19): siRNA sense strand
acucaugguuagaggaaau

SEQ ID NO: 2471147 - RNA, 19 nt, Homo sapiens
  misc_RNA (1)...(19): siRNA sense strand
agaccagauuuuagagaaa

SEQ ID NO: 2471148 - RNA, 19 nt, Homo sapiens
  misc_RNA (1)...(19): siRNA sense strand
cguuauuagcuuuagcaaa

SEQ ID NO: 2471149 - RNA, 19 nt, Homo sapiens
  misc_RNA (1)...(19): siRNA sense strand
acgaauucccagaaguaua

SEQ ID NO: 2471150 - RNA, 19 nt, Homo sapiens
  misc_RNA (1)...(19): siRNA sense strand
ggaagaagggguagugaau

SEQ ID NO: 2471151 - RNA, 19 nt, Homo sapiens
  misc_RNA (1)...(19): siRNA sense strand
caagaaggcuggaagacca

SEQ ID NO: 2471152 - RNA, 19 nt, Homo sapiens
  misc_RNA (1)...(19): siRNA sense strand
uauaauagcaucuuggcaa

SEQ ID NO: 2471153 - RNA, 19 nt, Homo sapiens
  misc_RNA (1)...(19): siRNA sense strand
uggcaaugaaggaacuuaa

SEQ ID NO: 2471154 - RNA, 19 nt, Homo sapiens
  misc_RNA (1)...(19): siRNA sense strand
uggaacugaaagagagauu

SEQ ID NO: 2471155 - RNA, 19 nt, Homo sapiens
  misc_RNA (1)...(19): siRNA sense strand
cggucaaccagaaaggaau

SEQ ID NO: 2471156 - RNA, 19 nt, Homo sapiens
  misc_RNA (1)...(19): siRNA sense strand
aagaagggguagugaauga

SEQ ID NO: 2471157 - RNA, 19 nt, Homo sapiens
  misc_RNA (1)...(19): siRNA sense strand
gggaggaggaacaggaucu

SEQ ID NO: 2471158 - RNA, 19 nt, Homo sapiens
  misc_RNA (1)...(19): siRNA sense strand
guguauugcccauugacaa

SEQ ID NO: 2471159 - RNA, 19 nt, Homo sapiens
  misc_RNA (1)...(19): siRNA sense strand
uggugaugguggaaguauu

SEQ ID NO: 2471160 - RNA, 19 nt, Homo sapiens
  misc_RNA (1)...(19): siRNA sense strand
gguuggugaugguggaagu

SEQ ID NO: 2471161 - RNA, 19 nt, Homo sapiens
  misc_RNA (1)...(19): siRNA sense strand
auaauugggccguggguca

SEQ ID NO: 2471162 - RNA, 19 nt, Homo sapiens
  misc_RNA (1)...(19): siRNA sense strand
gguacaacugugaagccaa

SEQ ID NO: 2471163 - RNA, 19 nt, Homo sapiens
  misc_RNA (1)...(19): siRNA sense strand
guugaagggauggaagaaa

SEQ ID NO: 2471164 - RNA, 19 nt, Homo sapiens
  misc_RNA (1)...(19): siRNA sense strand
aggaacaggaucuggacuu

SEQ ID NO: 2471165 - RNA, 19 nt, Homo sapiens
  misc_RNA (1)...(19): siRNA sense strand
gcggucaaccagaaaggaa

SEQ ID NO: 2471166 - RNA, 19 nt, Homo sapiens
  misc_RNA (1)...(19): siRNA sense strand
cugugaagccaaagagucu

SEQ ID NO: 2471167 - RNA, 19 nt, Homo sapiens
  misc_RNA (1)...(19): siRNA sense strand
aagccaaagagucugguua

SEQ ID NO: 2471168 - RNA, 19 nt, Homo sapiens
  misc_RNA (1)...(19): siRNA sense strand
cuuaaugaaaucagcauga

SEQ ID NO: 2471169 - RNA, 19 nt, Homo sapiens
  misc_RNA (1)...(19): siRNA sense strand
aaucaagaaggcuggaaga

SEQ ID NO: 2471170 - RNA, 19 nt, Homo sapiens
  misc_RNA (1)...(19): siRNA sense strand
aggaauuuaugaugaggca

SEQ ID NO: 2471171 - RNA, 19 nt, Homo sapiens
  misc_RNA (1)...(19): siRNA sense strand
ucuacaaguugaagggaug

SEQ ID NO: 2471172 - RNA, 19 nt, Homo sapiens
  misc_RNA (1)...(19): siRNA sense strand
ugauauggaagaaggggua

SEQ ID NO: 2471173 - RNA, 19 nt, Homo sapiens
  misc_RNA (1)...(19): siRNA sense strand
ugaaggaacuuaaugagca

SEQ ID NO: 2471174 - RNA, 19 nt, Homo sapiens
  misc_RNA (1)...(19): siRNA sense strand
cauggaacugaaagagaga

SEQ ID NO: 2471175 - RNA, 19 nt, Homo sapiens
  misc_RNA (1)...(19): siRNA sense strand
aaguugaagggauggaaga

SEQ ID NO: 2471176 - RNA, 19 nt, Homo sapiens
  misc_RNA (1)...(19): siRNA sense strand
uaaaggugcuugaagacga

SEQ ID NO: 2471177 - RNA, 19 nt, Homo sapiens
  misc_RNA (1)...(19): siRNA sense strand
ccuaacgagcucugcaaga

SEQ ID NO: 2471178 - RNA, 19 nt, Homo sapiens
  misc_RNA (1)...(19): siRNA sense strand
cuugauugauauggaagaa

SEQ ID NO: 2471179 - RNA, 19 nt, Homo sapiens
  misc_RNA (1)...(19): siRNA sense strand
gcaucuuggcaaugaagga

SEQ ID NO: 2471180 - RNA, 19 nt, Homo sapiens
  misc_RNA (1)...(19): siRNA sense strand
gaacagauccuaugagcga

SEQ ID NO: 2471181 - RNA, 19 nt, Homo sapiens
  misc_RNA (1)...(19): siRNA sense strand
gggcaaagaccuacccaga

SEQ ID NO: 2471182 - RNA, 19 nt, Homo sapiens
  misc_RNA (1)...(19): siRNA sense strand
gguccugagccauggagaa

SEQ ID NO: 2471183 - RNA, 19 nt, Homo sapiens
  misc_RNA (1)...(19): siRNA sense strand
gagccauggagaagggaca

SEQ ID NO: 2471184 - RNA, 19 nt, Homo sapiens
  misc_RNA (1)...(19): siRNA sense strand
aggcauuacagcagaaguu

SEQ ID NO: 2471185 - RNA, 19 nt, Homo sapiens
  misc_RNA (1)...(19): siRNA sense strand
agggaagauuguuguuuau

SEQ ID NO: 2471186 - RNA, 19 nt, Homo sapiens
  misc_RNA (1)...(19): siRNA sense strand
cgguggaagaugcagaaau

SEQ ID NO: 2471187 - RNA, 19 nt, Homo sapiens
  misc_RNA (1)...(19): siRNA sense strand
gcuccaagaaccuagaaaa

SEQ ID NO: 2471188 - RNA, 19 nt, Homo sapiens
  misc_RNA (1)...(19): siRNA sense strand
uauuaaagaucuugggcug

SEQ ID NO: 2471189 - RNA, 19 nt, Homo sapiens
  misc_RNA (1)...(19): siRNA sense strand
ggagaggggagaagaauca

SEQ ID NO: 2471190 - RNA, 19 nt, Homo sapiens
  misc_RNA (1)...(19): siRNA sense strand
caaaauugucauucagcua

SEQ ID NO: 2471191 - RNA, 19 nt, Homo sapiens
  misc_RNA (1)...(19): siRNA sense strand
gcaaauauccagaacaggu

SEQ ID NO: 2471192 - RNA, 19 nt, Homo sapiens
  misc_RNA (1)...(19): siRNA sense strand
uggaagaugcagaaaugau

SEQ ID NO: 2471193 - RNA, 19 nt, Homo sapiens
  misc_RNA (1)...(19): siRNA sense strand
agaaauagccagcugugga

SEQ ID NO: 2471194 - RNA, 19 nt, Homo sapiens
  misc_RNA (1)...(19): siRNA sense strand
cuggacugcagaagaacaa

SEQ ID NO: 2471195 - RNA, 19 nt, Homo sapiens
  misc_RNA (1)...(19): siRNA sense strand
gagaucacugggagcaaau

SEQ ID NO: 2471196 - RNA, 19 nt, Homo sapiens
  misc_RNA (1)...(19): siRNA sense strand
uggaggagguuaugagccu

SEQ ID NO: 2471197 - RNA, 19 nt, Homo sapiens
  misc_RNA (1)...(19): siRNA sense strand
agauacugaagcagagaaa

SEQ ID NO: 2471198 - RNA, 19 nt, Homo sapiens
  misc_RNA (1)...(19): siRNA sense strand
aggaaaaucuacugccaua

SEQ ID NO: 2471199 - RNA, 19 nt, Homo sapiens
  misc_RNA (1)...(19): siRNA sense strand
uuucaugauuggagaacuu

SEQ ID NO: 2471200 - RNA, 19 nt, Homo sapiens
  misc_RNA (1)...(19): siRNA sense strand
cuaaaugggaggaaguaca

SEQ ID NO: 2471201 - RNA, 19 nt, Homo sapiens
  misc_RNA (1)...(19): siRNA sense strand
caucuaaaugggaggaagu

SEQ ID NO: 2471202 - RNA, 19 nt, Homo sapiens
  misc_RNA (1)...(19): siRNA sense strand
cagagaaaggugaaagcca

SEQ ID NO: 2471203 - RNA, 19 nt, Homo sapiens
  misc_RNA (1)...(19): siRNA sense strand
gcuucagaguuacaggcaa

SEQ ID NO: 2471204 - RNA, 19 nt, Homo sapiens
  misc_RNA (1)...(19): siRNA sense strand
aaguacaguccaaagcaaa

SEQ ID NO: 2471205 - RNA, 19 nt, Homo sapiens
  misc_RNA (1)...(19): siRNA sense strand
cuucagaguuacaggcaag

SEQ ID NO: 2471206 - RNA, 19 nt, Homo sapiens
  misc_RNA (1)...(19): siRNA sense strand
uggagaacuuguaggugga

SEQ ID NO: 2471207 - RNA, 19 nt, Homo sapiens
  misc_RNA (1)...(19): siRNA sense strand
guggacagaacuugugcaa

SEQ ID NO: 2471208 - RNA, 19 nt, Homo sapiens
  misc_RNA (1)...(19): siRNA sense strand
ccuuugacuucucggauga

SEQ ID NO: 2471209 - RNA, 19 nt, Homo sapiens
  misc_RNA (1)...(19): siRNA sense strand
guguauauacuuaugggau

SEQ ID NO: 2471210 - RNA, 19 nt, Homo sapiens
  misc_RNA (1)...(19): siRNA sense strand
uguuggaguugcaguuaau

SEQ ID NO: 2471211 - RNA, 19 nt, Homo sapiens
  misc_RNA (1)...(19): siRNA sense strand
agagagauacugaagcaga

SEQ ID NO: 2471212 - RNA, 19 nt, Homo sapiens
  misc_RNA (1)...(19): siRNA sense strand
cuguuggaguugcaguuaa

SEQ ID NO: 2471213 - RNA, 19 nt, Homo sapiens
  misc_RNA (1)...(19): siRNA sense strand
gugcaaauugucagaguuc

SEQ ID NO: 2471214 - RNA, 19 nt, Homo sapiens
  misc_RNA (1)...(19): siRNA sense strand
aagacuuaccuuugaccaa

SEQ ID NO: 2471215 - RNA, 19 nt, Homo sapiens
  misc_RNA (1)...(19): siRNA sense strand
cugcuugcuuuguggcuau

SEQ ID NO: 2471216 - RNA, 19 nt, Homo sapiens
  misc_RNA (1)...(19): siRNA sense strand
cuuauaugaagcugugcaa

SEQ ID NO: 2471217 - RNA, 19 nt, Homo sapiens
  misc_RNA (1)...(19): siRNA sense strand
aguccaaagcaaaccauuu

SEQ ID NO: 2471218 - RNA, 19 nt, Homo sapiens
  misc_RNA (1)...(19): siRNA sense strand
auguauauucagucgaaga

SEQ ID NO: 2471219 - RNA, 19 nt, Homo sapiens
  misc_RNA (1)...(19): siRNA sense strand
gcagcaaagaagagcaaaa

SEQ ID NO: 2471220 - RNA, 19 nt, Homo sapiens
  misc_RNA (1)...(19): siRNA sense strand
augaagagugugugaggau

SEQ ID NO: 2471221 - RNA, 19 nt, Homo sapiens
  misc_RNA (1)...(19): siRNA sense strand
ucagaaaccagaaugggaa

SEQ ID NO: 2471222 - RNA, 19 nt, Homo sapiens
  misc_RNA (1)...(19): siRNA sense strand
agcucuaaccaaagacaaa

SEQ ID NO: 2471223 - RNA, 19 nt, Homo sapiens
  misc_RNA (1)...(19): siRNA sense strand
ggaauuaaguagacuggcu

SEQ ID NO: 2471224 - RNA, 19 nt, Homo sapiens
  misc_RNA (1)...(19): siRNA sense strand
auucagagauacuggccau

SEQ ID NO: 2471225 - RNA, 19 nt, Homo sapiens
  misc_RNA (1)...(19): siRNA sense strand
agcaaaagaaagcaagaaa

SEQ ID NO: 2471226 - RNA, 19 nt, Homo sapiens
  misc_RNA (1)...(19): siRNA sense strand
ggaaauuggaagggaguac

SEQ ID NO: 2471227 - RNA, 19 nt, Homo sapiens
  misc_RNA (1)...(19): siRNA sense strand
ccuagaggagacaggugaa

SEQ ID NO: 2471228 - RNA, 19 nt, Homo sapiens
  misc_RNA (1)...(19): siRNA sense strand
agaggagacaggugaagau

SEQ ID NO: 2471229 - RNA, 19 nt, Homo sapiens
  misc_RNA (1)...(19): siRNA sense strand
agccaaucgugcagaaaau

SEQ ID NO: 2471230 - RNA, 19 nt, Homo sapiens
  misc_RNA (1)...(19): siRNA sense strand
cuuuaugaagaguguguga

SEQ ID NO: 2471231 - RNA, 19 nt, Homo sapiens
  misc_RNA (1)...(19): siRNA sense strand
gcuaaaucacaaagaggaa

SEQ ID NO: 2471232 - RNA, 19 nt, Homo sapiens
  misc_RNA (1)...(19): siRNA sense strand
acaggaaagcagugagcaa

SEQ ID NO: 2471233 - RNA, 19 nt, Homo sapiens
  misc_RNA (1)...(19): siRNA sense strand
augagaaaggagaaagaaa

SEQ ID NO: 2471234 - RNA, 19 nt, Homo sapiens
  misc_RNA (1)...(19): siRNA sense strand
cagaugaugaagagaagaa

SEQ ID NO: 2471235 - RNA, 19 nt, Homo sapiens
  misc_RNA (1)...(19): siRNA sense strand
cagcaaugagaaaggagaa

SEQ ID NO: 2471236 - RNA, 19 nt, Homo sapiens
  misc_RNA (1)...(19): siRNA sense strand
aggaaaagacugaaaagaa

SEQ ID NO: 2471237 - RNA, 19 nt, Homo sapiens
  misc_RNA (1)...(19): siRNA sense strand
caaugagaaaggagaaaga

SEQ ID NO: 2471238 - RNA, 19 nt, Homo sapiens
  misc_RNA (1)...(19): siRNA sense strand
agaaagaacuucagaggac

SEQ ID NO: 2471239 - RNA, 19 nt, Homo sapiens
  misc_RNA (1)...(19): siRNA sense strand
ugauacuaguacugacaaa

SEQ ID NO: 2471240 - RNA, 19 nt, Homo sapiens
  misc_RNA (1)...(19): siRNA sense strand
augaugaagagaagaacaa

SEQ ID NO: 2471241 - RNA, 19 nt, Homo sapiens
  misc_RNA (1)...(19): siRNA sense strand
ugccaagaccagugagaga

SEQ ID NO: 2471242 - RNA, 19 nt, Homo sapiens
  misc_RNA (1)...(19): siRNA sense strand
agagaagaacaaacagaau

SEQ ID NO: 2471243 - RNA, 19 nt, Homo sapiens
  misc_RNA (1)...(19): siRNA sense strand
gcuaaauaaggauguucaa

SEQ ID NO: 2471244 - RNA, 19 nt, Homo sapiens
  misc_RNA (1)...(19): siRNA sense strand
aaaagaagccagacagcaa

SEQ ID NO: 2471245 - RNA, 19 nt, Homo sapiens
  misc_RNA (1)...(19): siRNA sense strand
gccagacagcaaugagaaa

SEQ ID NO: 2471246 - RNA, 19 nt, Homo sapiens
  misc_RNA (1)...(19): siRNA sense strand
aagaagauacugaggagga

SEQ ID NO: 2471247 - RNA, 19 nt, Homo sapiens
  misc_RNA (1)...(19): siRNA sense strand
aggaaagcagugagcaaaa

SEQ ID NO: 2471248 - RNA, 19 nt, Homo sapiens
  misc_RNA (1)...(19): siRNA sense strand
aaggagaaagaaagaaaga

SEQ ID NO: 2471249 - RNA, 19 nt, Homo sapiens
  misc_RNA (1)...(19): siRNA sense strand
agaagauacugaggaggaa

SEQ ID NO: 2471250 - RNA, 19 nt, Homo sapiens
  misc_RNA (1)...(19): siRNA sense strand
ccgaauuauuucucagguu

SEQ ID NO: 2471251 - RNA, 19 nt, Homo sapiens
  misc_RNA (1)...(19): siRNA sense strand
cuucagaaaagaacaguaa

SEQ ID NO: 2471252 - RNA, 19 nt, Homo sapiens
  misc_RNA (1)...(19): siRNA sense strand
gaaagaaagaaaagaagga

SEQ ID NO: 2471253 - RNA, 19 nt, Homo sapiens
  misc_RNA (1)...(19): siRNA sense strand
cuuacagacaucacaguua

SEQ ID NO: 2471254 - RNA, 19 nt, Homo sapiens
  misc_RNA (1)...(19): siRNA sense strand
acuaguacugacaaagaaa

SEQ ID NO: 2471255 - RNA, 19 nt, Homo sapiens
  misc_RNA (1)...(19): siRNA sense strand
aggacauggcugauaaaga

SEQ ID NO: 2471256 - RNA, 19 nt, Homo sapiens
  misc_RNA (1)...(19): siRNA sense strand
ggaggaaguuguaacgucu

SEQ ID NO: 2471257 - RNA, 19 nt, Homo sapiens
  misc_RNA (1)...(19): siRNA sense strand
uggaagaaggagagauuac

SEQ ID NO: 2471258 - RNA, 19 nt, Homo sapiens
  misc_RNA (1)...(19): siRNA sense strand
augaagagaagaacaaaca

SEQ ID NO: 2471259 - RNA, 19 nt, Homo sapiens
  misc_RNA (1)...(19): siRNA sense strand
cuauagugauucugaugau

SEQ ID NO: 2471260 - RNA, 19 nt, Homo sapiens
  misc_RNA (1)...(19): siRNA sense strand
cagacaaaggugaaaagaa

SEQ ID NO: 2471261 - RNA, 19 nt, Homo sapiens
  misc_RNA (1)...(19): siRNA sense strand
gaugaugaagagaagaaca

SEQ ID NO: 2471262 - RNA, 19 nt, Homo sapiens
  misc_RNA (1)...(19): siRNA sense strand
agaaacaacauuagacaac

SEQ ID NO: 2471263 - RNA, 19 nt, Homo sapiens
  misc_RNA (1)...(19): siRNA sense strand
uggccaugaucgugaacca

SEQ ID NO: 2471264 - RNA, 19 nt, Homo sapiens
  misc_RNA (1)...(19): siRNA sense strand
guggauggacuuacagaca

SEQ ID NO: 2471265 - RNA, 19 nt, Homo sapiens
  misc_RNA (1)...(19): siRNA sense strand
uggccgacguggacaccaa

SEQ ID NO: 2471266 - RNA, 19 nt, Homo sapiens
  misc_RNA (1)...(19): siRNA sense strand
ugauucuagugaaggaaaa

SEQ ID NO: 2471267 - RNA, 19 nt, Homo sapiens
  misc_RNA (1)...(19): siRNA sense strand
gaaagaacuucagaggaca

SEQ ID NO: 2471268 - RNA, 19 nt, Homo sapiens
  misc_RNA (1)...(19): siRNA sense strand
agcaaugagaaaggagaaa

SEQ ID NO: 2471269 - RNA, 19 nt, Homo sapiens
  misc_RNA (1)...(19): siRNA sense strand
ggugaaaagaagccagaca

SEQ ID NO: 2471270 - RNA, 19 nt, Homo sapiens
  misc_RNA (1)...(19): siRNA sense strand
cgucugauagcauggaaga

SEQ ID NO: 2471271 - RNA, 19 nt, Homo sapiens
  misc_RNA (1)...(19): siRNA sense strand
cagaaacaucaaaugccaa

SEQ ID NO: 2471272 - RNA, 19 nt, Homo sapiens
  misc_RNA (1)...(19): siRNA sense strand
gguagagaaagcugugcau

SEQ ID NO: 2471273 - RNA, 19 nt, Homo sapiens
  misc_RNA (1)...(19): siRNA sense strand
acagaaacaucaaaugcca

SEQ ID NO: 2471274 - RNA, 19 nt, Homo sapiens
  misc_RNA (1)...(19): siRNA sense strand
guccagucgaagaaauuaa

SEQ ID NO: 2471275 - RNA, 19 nt, Homo sapiens
  misc_RNA (1)...(19): siRNA sense strand
ugaagaagauacugaggag

SEQ ID NO: 2471276 - RNA, 19 nt, Homo sapiens
  misc_RNA (1)...(19): siRNA sense strand
agaaaguggugcugggcaa

SEQ ID NO: 2471277 - RNA, 19 nt, Homo sapiens
  misc_RNA (1)...(19): siRNA sense strand
uggagaacaaggaggcaaa

SEQ ID NO: 2471278 - RNA, 19 nt, Homo sapiens
  misc_RNA (1)...(19): siRNA sense strand
gugcaauguaggaguccaa

SEQ ID NO: 2471279 - RNA, 19 nt, Homo sapiens
  misc_RNA (1)...(19): siRNA sense strand
gugaaguggaggaccagaa

SEQ ID NO: 2471280 - RNA, 19 nt, Homo sapiens
  misc_RNA (1)...(19): siRNA sense strand
cuucuuaacuaaaggucca

SEQ ID NO: 2471281 - RNA, 19 nt, Homo sapiens
  misc_RNA (1)...(19): siRNA sense strand
gcaagaagcucccgcucca

SEQ ID NO: 2471282 - RNA, 19 nt, Homo sapiens
  misc_RNA (1)...(19): siRNA sense strand
aagugaaccugguggugau

SEQ ID NO: 2471283 - RNA, 19 nt, Homo sapiens
  misc_RNA (1)...(19): siRNA sense strand
gagaagaagaccugccagu

SEQ ID NO: 2471284 - RNA, 19 nt, Homo sapiens
  misc_RNA (1)...(19): siRNA sense strand
ucugugaaguggaggacca

SEQ ID NO: 2471285 - RNA, 19 nt, Homo sapiens
  misc_RNA (1)...(19): siRNA sense strand
ggauaguggcaccuggaca

SEQ ID NO: 2471286 - RNA, 19 nt, Homo sapiens
  misc_RNA (1)...(19): siRNA sense strand
caggaaaguugcaucagga

SEQ ID NO: 2471287 - RNA, 19 nt, Homo sapiens
  misc_RNA (1)...(19): siRNA sense strand
ucuuauacauauugggcua

SEQ ID NO: 2471288 - RNA, 19 nt, Homo sapiens
  misc_RNA (1)...(19): siRNA sense strand
cugaagaagaacuuaagaa

SEQ ID NO: 2471289 - RNA, 19 nt, Homo sapiens
  misc_RNA (1)...(19): siRNA sense strand
uuguugagagugugggaaa

SEQ ID NO: 2471290 - RNA, 19 nt, Homo sapiens
  misc_RNA (1)...(19): siRNA sense strand
guuccaagaauuagaagau

SEQ ID NO: 2471291 - RNA, 19 nt, Homo sapiens
  misc_RNA (1)...(19): siRNA sense strand
ggaaaggaucuaacgggau

SEQ ID NO: 2471292 - RNA, 19 nt, Homo sapiens
  misc_RNA (1)...(19): siRNA sense strand
gaccaaaaguggaaaggau

SEQ ID NO: 2471293 - RNA, 19 nt, Homo sapiens
  misc_RNA (1)...(19): siRNA sense strand
acucaugauacgaggcuuu

SEQ ID NO: 2471294 - RNA, 19 nt, Homo sapiens
  misc_RNA (1)...(19): siRNA sense strand
gcuugaucgucuucagauu

SEQ ID NO: 2471295 - RNA, 19 nt, Homo sapiens
  misc_RNA (1)...(19): siRNA sense strand
gggauuaaaaggcagguua

SEQ ID NO: 2471296 - RNA, 19 nt, Homo sapiens
  misc_RNA (1)...(19): siRNA sense strand
ccauaguuuuacagcauaa

SEQ ID NO: 2471297 - RNA, 19 nt, Homo sapiens
  misc_RNA (1)...(19): siRNA sense strand
gagccaagugacagauaca

SEQ ID NO: 2471298 - RNA, 19 nt, Homo sapiens
  misc_RNA (1)...(19): siRNA sense strand
acagaaagugccaguuaau

SEQ ID NO: 2471299 - RNA, 19 nt, Homo sapiens
  misc_RNA (1)...(19): siRNA sense strand
ggaauggcaaacagggaca

SEQ ID NO: 2471300 - RNA, 19 nt, Homo sapiens
  misc_RNA (1)...(19): siRNA sense strand
ccaagagccaagugacaga

SEQ ID NO: 2471301 - RNA, 19 nt, Homo sapiens
  misc_RNA (1)...(19): siRNA sense strand
uggagaagccaauuggaga

SEQ ID NO: 2471302 - RNA, 19 nt, Homo sapiens
  misc_RNA (1)...(19): siRNA sense strand
uggcaaacagggacauauu

SEQ ID NO: 2471303 - RNA, 19 nt, Homo sapiens
  misc_RNA (1)...(19): siRNA sense strand
ggaucuaacgggauuaaaa

SEQ ID NO: 2471304 - RNA, 19 nt, Homo sapiens
  misc_RNA (1)...(19): siRNA sense strand
ccuuuagagcagaaacaau

SEQ ID NO: 2471305 - RNA, 19 nt, Homo sapiens
  misc_RNA (1)...(19): siRNA sense strand
aggcagguuaauugaagua

SEQ ID NO: 2471306 - RNA, 19 nt, Homo sapiens
  misc_RNA (1)...(19): siRNA sense strand
uggaaaggaucuaacggga

SEQ ID NO: 2471307 - RNA, 19 nt, Homo sapiens
  misc_RNA (1)...(19): siRNA sense strand
agaaagucuuaaauggcau

SEQ ID NO: 2471308 - RNA, 19 nt, Homo sapiens
  misc_RNA (1)...(19): siRNA sense strand
uggauaugcauaagagguu

SEQ ID NO: 2471309 - RNA, 19 nt, Homo sapiens
  misc_RNA (1)...(19): siRNA sense strand
gacagauacacuugccaaa

SEQ ID NO: 2471310 - RNA, 19 nt, Homo sapiens
  misc_RNA (1)...(19): siRNA sense strand
uugaaguaacugaagaaga

SEQ ID NO: 2471311 - RNA, 19 nt, Homo sapiens
  misc_RNA (1)...(19): siRNA sense strand
auuuacagaacaaggagua

SEQ ID NO: 2471312 - RNA, 19 nt, Homo sapiens
  misc_RNA (1)...(19): siRNA sense strand
uaagcaguccugagggcaa

SEQ ID NO: 2471313 - RNA, 19 nt, Homo sapiens
  misc_RNA (1)...(19): siRNA sense strand
auccaaguuccaagaauua

SEQ ID NO: 2471314 - RNA, 19 nt, Homo sapiens
  misc_RNA (1)...(19): siRNA sense strand
auaaaagacuggauguuga

SEQ ID NO: 2471315 - RNA, 19 nt, Homo sapiens
  misc_RNA (1)...(19): siRNA sense strand
agcugauguucuucaauaa

SEQ ID NO: 2471316 - RNA, 19 nt, Homo sapiens
  misc_RNA (1)...(19): siRNA sense strand
agacuaucgugaggaggaa

SEQ ID NO: 2471317 - RNA, 19 nt, Homo sapiens
  misc_RNA (1)...(19): siRNA sense strand
ccaaggaaagauacagguu

SEQ ID NO: 2471318 - RNA, 19 nt, Homo sapiens
  misc_RNA (1)...(19): siRNA sense strand
ggugaaugcuauugaguuu

SEQ ID NO: 2471319 - RNA, 19 nt, Homo sapiens
  misc_RNA (1)...(19): siRNA sense strand
aggaagaaucagagaaaga

SEQ ID NO: 2471320 - RNA, 19 nt, Homo sapiens
  misc_RNA (1)...(19): siRNA sense strand
caaggaagaaucagagaaa

SEQ ID NO: 2471321 - RNA, 19 nt, Homo sapiens
  misc_RNA (1)...(19): siRNA sense strand
cuaagcaauuugagagcaa

SEQ ID NO: 2471322 - RNA, 19 nt, Homo sapiens
  misc_RNA (1)...(19): siRNA sense strand
ugaaauacaaggaggcaau

SEQ ID NO: 2471323 - RNA, 19 nt, Homo sapiens
  misc_RNA (1)...(19): siRNA sense strand
ugaaaugaauacaggcgaa

SEQ ID NO: 2471324 - RNA, 19 nt, Homo sapiens
  misc_RNA (1)...(19): siRNA sense strand
aggaaagagagaacagcaa

SEQ ID NO: 2471325 - RNA, 19 nt, Homo sapiens
  misc_RNA (1)...(19): siRNA sense strand
gcccagagaucgcagcaua

SEQ ID NO: 2471326 - RNA, 19 nt, Homo sapiens
  misc_RNA (1)...(19): siRNA sense strand
aggagaaagaagagaagca

SEQ ID NO: 2471327 - RNA, 19 nt, Homo sapiens
  misc_RNA (1)...(19): siRNA sense strand
gcauugaggcccaugagaa

SEQ ID NO: 2471328 - RNA, 19 nt, Homo sapiens
  misc_RNA (1)...(19): siRNA sense strand
ggacauggugugugggauc

SEQ ID NO: 2471329 - RNA, 19 nt, Homo sapiens
  misc_RNA (1)...(19): siRNA sense strand
cgcaaguggaggagugcua

SEQ ID NO: 2471330 - RNA, 19 nt, Homo sapiens
  misc_RNA (1)...(19): siRNA sense strand
caacaaggcgugcagguau

SEQ ID NO: 2471331 - RNA, 19 nt, Homo sapiens
  misc_RNA (1)...(19): siRNA sense strand
gagaaagaagagaagcaga

SEQ ID NO: 2471332 - RNA, 19 nt, Homo sapiens
  misc_RNA (1)...(19): siRNA sense strand
uggaggagaaagaagagaa

SEQ ID NO: 2471333 - RNA, 19 nt, Homo sapiens
  misc_RNA (1)...(19): siRNA sense strand
agaaucagagaaagagcaa

SEQ ID NO: 2471334 - RNA, 19 nt, Homo sapiens
  misc_RNA (1)...(19): siRNA sense strand
ugaguuuguuccugggcaa

SEQ ID NO: 2471335 - RNA, 19 nt, Homo sapiens
  misc_RNA (1)...(19): siRNA sense strand
ccaaggaagaaucagagaa

SEQ ID NO: 2471336 - RNA, 19 nt, Homo sapiens
  misc_RNA (1)...(19): siRNA sense strand
aaaccgccguggagacaaa

SEQ ID NO: 2471337 - RNA, 19 nt, Homo sapiens
  misc_RNA (1)...(19): siRNA sense strand
auagcaaaccauugaaaca

SEQ ID NO: 2471338 - RNA, 19 nt, Homo sapiens
  misc_RNA (1)...(19): siRNA sense strand
uuugagagcaagaucauaa

SEQ ID NO: 2471339 - RNA, 19 nt, Homo sapiens
  misc_RNA (1)...(19): siRNA sense strand
gguacuguauuuauggaga

SEQ ID NO: 2471340 - RNA, 19 nt, Homo sapiens
  misc_RNA (1)...(19): siRNA sense strand
ccagaaugccggaucacau

SEQ ID NO: 2471341 - RNA, 19 nt, Homo sapiens
  misc_RNA (1)...(19): siRNA sense strand
gcaacaaggcgugcaggua

SEQ ID NO: 2471342 - RNA, 19 nt, Homo sapiens
  misc_RNA (1)...(19): siRNA sense strand
aaucagagaaagagcaaac

SEQ ID NO: 2471343 - RNA, 19 nt, Homo sapiens
  misc_RNA (1)...(19): siRNA sense strand
cugaaauacaaggaggcaa

SEQ ID NO: 2471344 - RNA, 19 nt, Homo sapiens
  misc_RNA (1)...(19): siRNA sense strand
gguucagaggacuggguga

SEQ ID NO: 2471345 - RNA, 19 nt, Homo sapiens
  misc_RNA (1)...(19): siRNA sense strand
aagcaauuugagagcaaga

SEQ ID NO: 2471346 - RNA, 19 nt, Homo sapiens
  misc_RNA (1)...(19): siRNA sense strand
ggguuuguaaggaaggaga

SEQ ID NO: 2471347 - RNA, 19 nt, Homo sapiens
  misc_RNA (1)...(19): siRNA sense strand
guguagugugcaaguauuu

SEQ ID NO: 2471348 - RNA, 19 nt, Homo sapiens
  misc_RNA (1)...(19): siRNA sense strand
ccguggagacaaagaagca

SEQ ID NO: 2471349 - RNA, 19 nt, Homo sapiens
  misc_RNA (1)...(19): siRNA sense strand
gugggaacaucaagcagau

SEQ ID NO: 2471350 - RNA, 19 nt, Homo sapiens
  misc_RNA (1)...(19): siRNA sense strand
gaggaaagagagaacagca

SEQ ID NO: 2471351 - RNA, 19 nt, Homo sapiens
  misc_RNA (1)...(19): siRNA sense strand
cauugaggaaagagagaac

SEQ ID NO: 2471352 - RNA, 19 nt, Homo sapiens
  misc_RNA (1)...(19): siRNA sense strand
uugacaacgaugaagaaga

SEQ ID NO: 2471353 - RNA, 19 nt, Homo sapiens
  misc_RNA (1)...(19): siRNA sense strand
aacaaggcgugcagguauu

SEQ ID NO: 2471354 - RNA, 19 nt, Homo sapiens
  misc_RNA (1)...(19): siRNA sense strand
ccggaaaguuuguaggaaa

SEQ ID NO: 2471355 - RNA, 19 nt, Homo sapiens
  misc_RNA (1)...(19): siRNA sense strand
cggaaaguuuguaggaaaa

SEQ ID NO: 2471356 - RNA, 19 nt, Homo sapiens
  misc_RNA (1)...(19): siRNA sense strand
aaacagaacuacaaggaga

SEQ ID NO: 2471357 - RNA, 19 nt, Homo sapiens
  misc_RNA (1)...(19): siRNA sense strand
ccuucuuaaugaugggaaa

SEQ ID NO: 2471358 - RNA, 19 nt, Homo sapiens
  misc_RNA (1)...(19): siRNA sense strand
gggucaugauccuggagua

SEQ ID NO: 2471359 - RNA, 19 nt, Homo sapiens
  misc_RNA (1)...(19): siRNA sense strand
cacaaauguugcagagcuu

SEQ ID NO: 2471360 - RNA, 19 nt, Homo sapiens
  misc_RNA (1)...(19): siRNA sense strand
cagccaacuugcagauaga

SEQ ID NO: 2471361 - RNA, 19 nt, Homo sapiens
  misc_RNA (1)...(19): siRNA sense strand
guccaaagguacaagacuu

SEQ ID NO: 2471362 - RNA, 19 nt, Homo sapiens
  misc_RNA (1)...(19): siRNA sense strand
cugcaugggauaggagaaa

SEQ ID NO: 2471363 - RNA, 19 nt, Homo sapiens
  misc_RNA (1)...(19): siRNA sense strand
ccuuagauccacagaagau

SEQ ID NO: 2471364 - RNA, 19 nt, Homo sapiens
  misc_RNA (1)...(19): siRNA sense strand
caagaagcuucaucggcaa

SEQ ID NO: 2471365 - RNA, 19 nt, Homo sapiens
  misc_RNA (1)...(19): siRNA sense strand
aguacagagucauuugaaa

SEQ ID NO: 2471366 - RNA, 19 nt, Homo sapiens
  misc_RNA (1)...(19): siRNA sense strand
agaauggaguggacgguca

SEQ ID NO: 2471367 - RNA, 19 nt, Homo sapiens
  misc_RNA (1)...(19): siRNA sense strand
ugcaaauguccuugagauu

SEQ ID NO: 2471368 - RNA, 19 nt, Homo sapiens
  misc_RNA (1)...(19): siRNA sense strand
gcgucauaacaaagaucua

SEQ ID NO: 2471369 - RNA, 19 nt, Homo sapiens
  misc_RNA (1)...(19): siRNA sense strand
aaaugggaguacagaguca

SEQ ID NO: 2471370 - RNA, 19 nt, Homo sapiens
  misc_RNA (1)...(19): siRNA sense strand
agucacaauguuugaagua

SEQ ID NO: 2471371 - RNA, 19 nt, Homo sapiens
  misc_RNA (1)...(19): siRNA sense strand
ucgaaaacugccagauaua

SEQ ID NO: 2471372 - RNA, 19 nt, Homo sapiens
  misc_RNA (1)...(19): siRNA sense strand
caaagaucuaguugcgcaa

SEQ ID NO: 2471373 - RNA, 19 nt, Homo sapiens
  misc_RNA (1)...(19): siRNA sense strand
gaagaauguuccauccgua

SEQ ID NO: 2471374 - RNA, 19 nt, Homo sapiens
  misc_RNA (1)...(19): siRNA sense strand
cguaaacagauuaaagagu

SEQ ID NO: 2471375 - RNA, 19 nt, Homo sapiens
  misc_RNA (1)...(19): siRNA sense strand
uugcagauacuaaggaaca

SEQ ID NO: 2471376 - RNA, 19 nt, Homo sapiens
  misc_RNA (1)...(19): siRNA sense strand
gccaacuugcagauagaaa

SEQ ID NO: 2471377 - RNA, 19 nt, Homo sapiens
  misc_RNA (1)...(19): siRNA sense strand
gcaugggauaggagaaacu

SEQ ID NO: 2471378 - RNA, 19 nt, Homo sapiens
  misc_RNA (1)...(19): siRNA sense strand
auaagaagggacaaguaau

SEQ ID NO: 2471379 - RNA, 19 nt, Homo sapiens
  misc_RNA (1)...(19): siRNA sense strand
acaagaagcuucaucggca

SEQ ID NO: 2471380 - RNA, 19 nt, Homo sapiens
  misc_RNA (1)...(19): siRNA sense strand
caauacuguuucugcguca

SEQ ID NO: 2471381 - RNA, 19 nt, Homo sapiens
  misc_RNA (1)...(19): siRNA sense strand
aguuaugaucgauugcuaa

SEQ ID NO: 2471382 - RNA, 19 nt, Homo sapiens
  misc_RNA (1)...(19): siRNA sense strand
cgagcugugcuuuggaauu

SEQ ID NO: 2471383 - RNA, 19 nt, Homo sapiens
  misc_RNA (1)...(19): siRNA sense strand
caauguuugaaguaggcaa

SEQ ID NO: 2471384 - RNA, 19 nt, Homo sapiens
  misc_RNA (1)...(19): siRNA sense strand
uagaaaagguucagagcac

SEQ ID NO: 2471385 - RNA, 19 nt, Homo sapiens
  misc_RNA (1)...(19): siRNA sense strand
agauucagcaacaaagcaa

SEQ ID NO: 2471386 - RNA, 19 nt, Homo sapiens
  misc_RNA (1)...(19): siRNA sense strand
guuucugcgucauaacaaa

SEQ ID NO: 2471387 - RNA, 19 nt, Homo sapiens
  misc_RNA (1)...(19): siRNA sense strand
ggucauugaggaagcaacu

SEQ ID NO: 2471388 - RNA, 19 nt, Homo sapiens
  misc_RNA (1)...(19): siRNA sense strand
acaaagaucuaguugcgca

SEQ ID NO: 2471389 - RNA, 19 nt, Homo sapiens
  misc_RNA (1)...(19): siRNA sense strand
guugaaugcuuccagccaa

SEQ ID NO: 2471390 - RNA, 19 nt, Homo sapiens
  misc_RNA (1)...(19): siRNA sense strand
ccaacuugcagauagaaaa

SEQ ID NO: 2471391 - RNA, 19 nt, Homo sapiens
  misc_RNA (1)...(19): siRNA sense strand
agguacaagacuucgaaaa

SEQ ID NO: 2471392 - RNA, 19 nt, Homo sapiens
  misc_RNA (1)...(19): siRNA sense strand
ugauuuggcuucuggcuca

SEQ ID NO: 2471393 - RNA, 19 nt, Homo sapiens
  misc_RNA (1)...(19): siRNA sense strand
aagaauguuccauccguaa

SEQ ID NO: 2471394 - RNA, 19 nt, Homo sapiens
  misc_RNA (1)...(19): siRNA sense strand
augcacuuacucugagaaa

SEQ ID NO: 2471395 - RNA, 19 nt, Homo sapiens
  misc_RNA (1)...(19): siRNA sense strand
guucauaaagcauugcaga

SEQ ID NO: 2471396 - RNA, 19 nt, Homo sapiens
  misc_RNA (1)...(19): siRNA sense strand
guguaaggauuguggaaaa

SEQ ID NO: 2471397 - RNA, 19 nt, Homo sapiens
  misc_RNA (1)...(19): siRNA sense strand
ucauuaagcaccagagaau

SEQ ID NO: 2471398 - RNA, 19 nt, Homo sapiens
  misc_RNA (1)...(19): siRNA sense strand
caguaaugaauguggucaa

SEQ ID NO: 2471399 - RNA, 19 nt, Homo sapiens
  misc_RNA (1)...(19): siRNA sense strand
aggaaaacccagagagaca

SEQ ID NO: 2471400 - RNA, 19 nt, Homo sapiens
  misc_RNA (1)...(19): siRNA sense strand
augugaugcuggagaacua

SEQ ID NO: 2471401 - RNA, 19 nt, Homo sapiens
  misc_RNA (1)...(19): siRNA sense strand
gcuuauucauacuggagaa

SEQ ID NO: 2471402 - RNA, 19 nt, Homo sapiens
  misc_RNA (1)...(19): siRNA sense strand
ggaaggaauggcaaggaau

SEQ ID NO: 2471403 - RNA, 19 nt, Homo sapiens
  misc_RNA (1)...(19): siRNA sense strand
guguaaagaauguggaaag

SEQ ID NO: 2471404 - RNA, 19 nt, Homo sapiens
  misc_RNA (1)...(19): siRNA sense strand
gacccauacuggugaggaa

SEQ ID NO: 2471405 - RNA, 19 nt, Homo sapiens
  misc_RNA (1)...(19): siRNA sense strand
auguaaucagugugggaaa

SEQ ID NO: 2471406 - RNA, 19 nt, Homo sapiens
  misc_RNA (1)...(19): siRNA sense strand
gugucaugauuguggaaaa

SEQ ID NO: 2471407 - RNA, 19 nt, Homo sapiens
  misc_RNA (1)...(19): siRNA sense strand
cccuaugaguguaaagaau

SEQ ID NO: 2471408 - RNA, 19 nt, Homo sapiens
  misc_RNA (1)...(19): siRNA sense strand
ggaaagucuuacagccaga

SEQ ID NO: 2471409 - RNA, 19 nt, Homo sapiens
  misc_RNA (1)...(19): siRNA sense strand
caucaggacaguugugcaa

SEQ ID NO: 2471410 - RNA, 19 nt, Homo sapiens
  misc_RNA (1)...(19): siRNA sense strand
cccuaugaauguaaagaau

SEQ ID NO: 2471411 - RNA, 19 nt, Homo sapiens
  misc_RNA (1)...(19): siRNA sense strand
uggaaggaauggcaaggaa

SEQ ID NO: 2471412 - RNA, 19 nt, Homo sapiens
  misc_RNA (1)...(19): siRNA sense strand
cauuagaagaagucuggaa

SEQ ID NO: 2471413 - RNA, 19 nt, Homo sapiens
  misc_RNA (1)...(19): siRNA sense strand
aggaaugaucucugguauu

SEQ ID NO: 2471414 - RNA, 19 nt, Homo sapiens
  misc_RNA (1)...(19): siRNA sense strand
cccuaugaauguaaggaau

SEQ ID NO: 2471415 - RNA, 19 nt, Homo sapiens
  misc_RNA (1)...(19): siRNA sense strand
auguaaggaauguggaaaa

SEQ ID NO: 2471416 - RNA, 19 nt, Homo sapiens
  misc_RNA (1)...(19): siRNA sense strand
gaguguaaggauuguggaa

SEQ ID NO: 2471417 - RNA, 19 nt, Homo sapiens
  misc_RNA (1)...(19): siRNA sense strand
uggcugguggagagagaaa

SEQ ID NO: 2471418 - RNA, 19 nt, Homo sapiens
  misc_RNA (1)...(19): siRNA sense strand
aggauguauuuguggacuu

SEQ ID NO: 2471419 - RNA, 19 nt, Homo sapiens
  misc_RNA (1)...(19): siRNA sense strand
agcagaucguguacagaaa

SEQ ID NO: 2471420 - RNA, 19 nt, Homo sapiens
  misc_RNA (1)...(19): siRNA sense strand
cucugaaagugguaaauau

SEQ ID NO: 2471421 - RNA, 19 nt, Homo sapiens
  misc_RNA (1)...(19): siRNA sense strand
ugguucaucucuugguaua

SEQ ID NO: 2471422 - RNA, 19 nt, Homo sapiens
  misc_RNA (1)...(19): siRNA sense strand
ucaccagggaggaguggaa

SEQ ID NO: 2471423 - RNA, 19 nt, Homo sapiens
  misc_RNA (1)...(19): siRNA sense strand
gcugguggagagagaaauu

SEQ ID NO: 2471424 - RNA, 19 nt, Homo sapiens
  misc_RNA (1)...(19): siRNA sense strand
cugagagaguauuuccaua

SEQ ID NO: 2471425 - RNA, 19 nt, Homo sapiens
  misc_RNA (1)...(19): siRNA sense strand
aguaaugaauguggucaaa

SEQ ID NO: 2471426 - RNA, 19 nt, Homo sapiens
  misc_RNA (1)...(19): siRNA sense strand
guggaaagucuuacagcca

SEQ ID NO: 2471427 - RNA, 19 nt, Homo sapiens
  misc_RNA (1)...(19): siRNA sense strand
augcaaucaaugugggaca

SEQ ID NO: 2471428 - RNA, 19 nt, Homo sapiens
  misc_RNA (1)...(19): siRNA sense strand
gguauuugucauuagaaga

SEQ ID NO: 2471429 - RNA, 19 nt, Homo sapiens
  misc_RNA (1)...(19): siRNA sense strand
gaguguaaagaauguggaa

SEQ ID NO: 2471430 - RNA, 19 nt, Homo sapiens
  misc_RNA (1)...(19): siRNA sense strand
auuagaagaagucuggaaa

SEQ ID NO: 2471431 - RNA, 19 nt, Homo sapiens
  misc_RNA (1)...(19): siRNA sense strand
uagaauucacacuggacua

SEQ ID NO: 2471432 - RNA, 19 nt, Homo sapiens
  misc_RNA (1)...(19): siRNA sense strand
ccuggcugguggagagaga

SEQ ID NO: 2471433 - RNA, 19 nt, Homo sapiens
  misc_RNA (1)...(19): siRNA sense strand
ccuuguuacucaucagaga

SEQ ID NO: 2471434 - RNA, 19 nt, Homo sapiens
  misc_RNA (1)...(19): siRNA sense strand
ggaaagccuucauccggaa

SEQ ID NO: 2471435 - RNA, 19 nt, Homo sapiens
  misc_RNA (1)...(19): siRNA sense strand
guucuuaacaugcaaucaa

SEQ ID NO: 2471436 - RNA, 19 nt, Homo sapiens
  misc_RNA (1)...(19): siRNA sense strand
cagagagacauuugaggca

SEQ ID NO: 2471437 - RNA, 19 nt, Homo sapiens
  misc_RNA (1)...(19): siRNA sense strand
uguaaucagugugggaaau

SEQ ID NO: 2471438 - RNA, 19 nt, Homo sapiens
  misc_RNA (1)...(19): siRNA sense strand
ccuacaaaugcccugauaa

SEQ ID NO: 2471439 - RNA, 19 nt, Homo sapiens
  misc_RNA (1)...(19): siRNA sense strand
agagaauucauguuggaga

SEQ ID NO: 2471440 - RNA, 19 nt, Homo sapiens
  misc_RNA (1)...(19): siRNA sense strand
ggcauuaucuucagccaga

SEQ ID NO: 2471441 - RNA, 19 nt, Homo sapiens
  misc_RNA (1)...(19): siRNA sense strand
cagcuaguacugagagagu

SEQ ID NO: 2471442 - RNA, 19 nt, Homo sapiens
  misc_RNA (1)...(19): siRNA sense strand
gaguggaagcugcuggaca

SEQ ID NO: 2471443 - RNA, 19 nt, Homo sapiens
  misc_RNA (1)...(19): siRNA sense strand
uggucaaacuuucugucaa

SEQ ID NO: 2471444 - RNA, 19 nt, Homo sapiens
  misc_RNA (1)...(19): siRNA sense strand
aacucauacaggagacaaa

SEQ ID NO: 2471445 - RNA, 19 nt, Homo sapiens
  misc_RNA (1)...(19): siRNA sense strand
aaggaaugaucucugguau

SEQ ID NO: 2471446 - RNA, 19 nt, Homo sapiens
  misc_RNA (1)...(19): siRNA sense strand
uuagaagaagucuggaaau

SEQ ID NO: 2471447 - RNA, 19 nt, Homo sapiens
  misc_RNA (1)...(19): siRNA sense strand
cuuugagacuccugaccaa

SEQ ID NO: 2471448 - RNA, 19 nt, Homo sapiens
  misc_RNA (1)...(19): siRNA sense strand
ugguaggauugcugcauau

SEQ ID NO: 2471449 - RNA, 19 nt, Homo sapiens
  misc_RNA (1)...(19): siRNA sense strand
ugacacacugggagcaaau

SEQ ID NO: 2471450 - RNA, 19 nt, Homo sapiens
  misc_RNA (1)...(19): siRNA sense strand
uggcacacagcgaaguaaa

SEQ ID NO: 2471451 - RNA, 19 nt, Homo sapiens
  misc_RNA (1)...(19): siRNA sense strand
gcaaauggacuaugggcuc

SEQ ID NO: 2471452 - RNA, 19 nt, Homo sapiens
  misc_RNA (1)...(19): siRNA sense strand
acaucaucuugguaggauu

SEQ ID NO: 2471453 - RNA, 19 nt, Homo sapiens
  misc_RNA (1)...(19): siRNA sense strand
acugggagcaaauggacua

SEQ ID NO: 2471454 - RNA, 19 nt, Homo sapiens
  misc_RNA (1)...(19): siRNA sense strand
ccggagaugcgcuggaaca

SEQ ID NO: 2471455 - RNA, 19 nt, Homo sapiens
  misc_RNA (1)...(19): siRNA sense strand
gggaggugcucaaggugca

SEQ ID NO: 2471456 - RNA, 19 nt, Homo sapiens
  misc_RNA (1)...(19): siRNA sense strand
ccaaagaccuggagagccg

SEQ ID NO: 2471457 - RNA, 19 nt, Homo sapiens
  misc_RNA (1)...(19): siRNA sense strand
acgacaggaucaaggaacu

SEQ ID NO: 2471458 - RNA, 19 nt, Homo sapiens
  misc_RNA (1)...(19): siRNA sense strand
uggagaacccaacgcgcua

SEQ ID NO: 2471459 - RNA, 19 nt, Homo sapiens
  misc_RNA (1)...(19): siRNA sense strand
gguccagcucagagaagga

SEQ ID NO: 2471460 - RNA, 19 nt, Homo sapiens
  misc_RNA (1)...(19): siRNA sense strand
ggaucaaggaacugggcac

SEQ ID NO: 2471461 - RNA, 19 nt, Homo sapiens
  misc_RNA (1)...(19): siRNA sense strand
cggagaugcgcuggaacaa

SEQ ID NO: 2471462 - RNA, 19 nt, Homo sapiens
  misc_RNA (1)...(19): siRNA sense strand
uguugcugacauagaauua

SEQ ID NO: 2471463 - RNA, 19 nt, Homo sapiens
  misc_RNA (1)...(19): siRNA sense strand
aaacaaaacucgaggcucu

SEQ ID NO: 2471464 - RNA, 19 nt, Homo sapiens
  misc_RNA (1)...(19): siRNA sense strand
cuggagacgaggaugagaa

SEQ ID NO: 2471465 - RNA, 19 nt, Homo sapiens
  misc_RNA (1)...(19): siRNA sense strand
aagggaagauucagggcca

SEQ ID NO: 2471466 - RNA, 19 nt, Homo sapiens
  misc_RNA (1)...(19): siRNA sense strand
gcacaaaaccaggcggaga

SEQ ID NO: 2471467 - RNA, 19 nt, Homo sapiens
  misc_RNA (1)...(19): siRNA sense strand
cuuggaaaauggacagauu

SEQ ID NO: 2471468 - RNA, 19 nt, Homo sapiens
  misc_RNA (1)...(19): siRNA sense strand
gcugcaagguuguuccuga

SEQ ID NO: 2471469 - RNA, 19 nt, Homo sapiens
  misc_RNA (1)...(19): siRNA sense strand
gaguauagcucuugccuca

SEQ ID NO: 2471470 - RNA, 19 nt, Homo sapiens
  misc_RNA (1)...(19): siRNA sense strand
agauauaguucaagccaga

SEQ ID NO: 2471471 - RNA, 19 nt, Homo sapiens
  misc_RNA (1)...(19): siRNA sense strand
ggucacagauucaugggaa

SEQ ID NO: 2471472 - RNA, 19 nt, Homo sapiens
  misc_RNA (1)...(19): siRNA sense strand
gucacagauucaugggaaa

SEQ ID NO: 2471473 - RNA, 19 nt, Homo sapiens
  misc_RNA (1)...(19): siRNA sense strand
cuacuuugucauagggauu

SEQ ID NO: 2471474 - RNA, 19 nt, Homo sapiens
  misc_RNA (1)...(19): siRNA sense strand
cuauauugucugucaggaa

SEQ ID NO: 2471475 - RNA, 19 nt, Homo sapiens
  misc_RNA (1)...(19): siRNA sense strand
aagccagaguaauggaaga

SEQ ID NO: 2471476 - RNA, 19 nt, Homo sapiens
  misc_RNA (1)...(19): siRNA sense strand
gauucaugggaaauggaaa

SEQ ID NO: 2471477 - RNA, 19 nt, Homo sapiens
  misc_RNA (1)...(19): siRNA sense strand
gggaaauggaaagaaccaa

SEQ ID NO: 2471478 - RNA, 19 nt, Homo sapiens
  misc_RNA (1)...(19): siRNA sense strand
ucucacaacaucuggccua

SEQ ID NO: 2471479 - RNA, 19 nt, Homo sapiens
  misc_RNA (1)...(19): siRNA sense strand
ucacagauucaugggaaau

SEQ ID NO: 2471480 - RNA, 19 nt, Homo sapiens
  misc_RNA (1)...(19): siRNA sense strand
ugggaaauggaaagaacca

SEQ ID NO: 2471481 - RNA, 19 nt, Homo sapiens
  misc_RNA (1)...(19): siRNA sense strand
gcacauuggcuguugcuca

SEQ ID NO: 2471482 - RNA, 19 nt, Homo sapiens
  misc_RNA (1)...(19): siRNA sense strand
cucacaaacacgaggcauu

SEQ ID NO: 2471483 - RNA, 19 nt, Homo sapiens
  misc_RNA (1)...(19): siRNA sense strand
gcacuugugucuugccuga

SEQ ID NO: 2471484 - RNA, 19 nt, Homo sapiens
  misc_RNA (1)...(19): siRNA sense strand
ccuuaauaguguugacaaa

SEQ ID NO: 2471485 - RNA, 19 nt, Homo sapiens
  misc_RNA (1)...(19): siRNA sense strand
cguuaugcuaagagggaaa

SEQ ID NO: 2471486 - RNA, 19 nt, Homo sapiens
  misc_RNA (1)...(19): siRNA sense strand
gggugaaguaucauguaaa

SEQ ID NO: 2471487 - RNA, 19 nt, Homo sapiens
  misc_RNA (1)...(19): siRNA sense strand
guuaugacaaagaagguaa

SEQ ID NO: 2471488 - RNA, 19 nt, Homo sapiens
  misc_RNA (1)...(19): siRNA sense strand
acauagaaagugauggcaa

SEQ ID NO: 2471489 - RNA, 19 nt, Homo sapiens
  misc_RNA (1)...(19): siRNA sense strand
ggcaaagaaacauuggaaa

SEQ ID NO: 2471490 - RNA, 19 nt, Homo sapiens
  misc_RNA (1)...(19): siRNA sense strand
agauaaaaccagugaagau

SEQ ID NO: 2471491 - RNA, 19 nt, Homo sapiens
  misc_RNA (1)...(19): siRNA sense strand
gcugaguaugugacagaua

SEQ ID NO: 2471492 - RNA, 19 nt, Homo sapiens
  misc_RNA (1)...(19): siRNA sense strand
ucuccaugguuaugacaaa

SEQ ID NO: 2471493 - RNA, 19 nt, Homo sapiens
  misc_RNA (1)...(19): siRNA sense strand
gugauggaacauagguuaa

SEQ ID NO: 2471494 - RNA, 19 nt, Homo sapiens
  misc_RNA (1)...(19): siRNA sense strand
ggcuacaacaagaugauaa

SEQ ID NO: 2471495 - RNA, 19 nt, Homo sapiens
  misc_RNA (1)...(19): siRNA sense strand
ugauaauggcugcagaaau

SEQ ID NO: 2471496 - RNA, 19 nt, Homo sapiens
  misc_RNA (1)...(19): siRNA sense strand
cccagaugguuauuggaaa

SEQ ID NO: 2471497 - RNA, 19 nt, Homo sapiens
  misc_RNA (1)...(19): siRNA sense strand
cauucugguuggaacguua

SEQ ID NO: 2471498 - RNA, 19 nt, Homo sapiens
  misc_RNA (1)...(19): siRNA sense strand
cagaauccggagagaagaa

SEQ ID NO: 2471499 - RNA, 19 nt, Homo sapiens
  misc_RNA (1)...(19): siRNA sense strand
agaauaaagccaagcucau

SEQ ID NO: 2471500 - RNA, 19 nt, Homo sapiens
  misc_RNA (1)...(19): siRNA sense strand
agaaguucccagaaacaaa

SEQ ID NO: 2471501 - RNA, 19 nt, Homo sapiens
  misc_RNA (1)...(19): siRNA sense strand
guugaaguuuacaagcaaa

SEQ ID NO: 2471502 - RNA, 19 nt, Homo sapiens
  misc_RNA (1)...(19): siRNA sense strand
gcuuucaauaugucagaua

SEQ ID NO: 2471503 - RNA, 19 nt, Homo sapiens
  misc_RNA (1)...(19): siRNA sense strand
uuugauaugccuugguuaa

SEQ ID NO: 2471504 - RNA, 19 nt, Homo sapiens
  misc_RNA (1)...(19): siRNA sense strand
uggcaaagaaacauuggaa

SEQ ID NO: 2471505 - RNA, 19 nt, Homo sapiens
  misc_RNA (1)...(19): siRNA sense strand
cagcagaagaacuguacuu

SEQ ID NO: 2471506 - RNA, 19 nt, Homo sapiens
  misc_RNA (1)...(19): siRNA sense strand
caaguaaagaagacauaga

SEQ ID NO: 2471507 - RNA, 19 nt, Homo sapiens
  misc_RNA (1)...(19): siRNA sense strand
agagucaagccaagcaaua

SEQ ID NO: 2471508 - RNA, 19 nt, Homo sapiens
  misc_RNA (1)...(19): siRNA sense strand
uggcacaggcccagcagaa

SEQ ID NO: 2471509 - RNA, 19 nt, Homo sapiens
  misc_RNA (1)...(19): siRNA sense strand
ggaggagguucgaagcuga

SEQ ID NO: 2471510 - RNA, 19 nt, Homo sapiens
  misc_RNA (1)...(19): siRNA sense strand
agaaaaccauauuggacaa

SEQ ID NO: 2471511 - RNA, 19 nt, Homo sapiens
  misc_RNA (1)...(19): siRNA sense strand
uguugaaguuuacaagcaa

SEQ ID NO: 2471512 - RNA, 19 nt, Homo sapiens
  misc_RNA (1)...(19): siRNA sense strand
guacagaauccggagagaa

SEQ ID NO: 2471513 - RNA, 19 nt, Homo sapiens
  misc_RNA (1)...(19): siRNA sense strand
ccagaaacaaagugaugga

SEQ ID NO: 2471514 - RNA, 19 nt, Homo sapiens
  misc_RNA (1)...(19): siRNA sense strand
acgugauguugaaaggcua

SEQ ID NO: 2471515 - RNA, 19 nt, Homo sapiens
  misc_RNA (1)...(19): siRNA sense strand
gccuauuaccagugaggau

SEQ ID NO: 2471516 - RNA, 19 nt, Homo sapiens
  misc_RNA (1)...(19): siRNA sense strand
acacaucagcccagcagaa

SEQ ID NO: 2471517 - RNA, 19 nt, Homo sapiens
  misc_RNA (1)...(19): siRNA sense strand
agugauggaacauagguua

SEQ ID NO: 2471518 - RNA, 19 nt, Homo sapiens
  misc_RNA (1)...(19): siRNA sense strand
uaggaagcuugaagaccaa

SEQ ID NO: 2471519 - RNA, 19 nt, Homo sapiens
  misc_RNA (1)...(19): siRNA sense strand
ugucagaaacuggaauaaa

SEQ ID NO: 2471520 - RNA, 19 nt, Homo sapiens
  misc_RNA (1)...(19): siRNA sense strand
aagugauggcaaagaaaca

SEQ ID NO: 2471521 - RNA, 19 nt, Homo sapiens
  misc_RNA (1)...(19): siRNA sense strand
aagauuaacccaaccgaau

SEQ ID NO: 2471522 - RNA, 19 nt, Homo sapiens
  misc_RNA (1)...(19): siRNA sense strand
agaacaacagcuccagaaa

SEQ ID NO: 2471523 - RNA, 19 nt, Homo sapiens
  misc_RNA (1)...(19): siRNA sense strand
gacagauaagucagauaaa

SEQ ID NO: 2471524 - RNA, 19 nt, Homo sapiens
  misc_RNA (1)...(19): siRNA sense strand
cagaauaaagccaagcuca

SEQ ID NO: 2471525 - RNA, 19 nt, Homo sapiens
  misc_RNA (1)...(19): siRNA sense strand
agggugaaguaucauguaa

SEQ ID NO: 2471526 - RNA, 19 nt, Homo sapiens
  misc_RNA (1)...(19): siRNA sense strand
gguucgaagcugaguaugu

SEQ ID NO: 2471527 - RNA, 19 nt, Homo sapiens
  misc_RNA (1)...(19): siRNA sense strand
ggagagaagaaaaccuuaa

SEQ ID NO: 2471528 - RNA, 19 nt, Homo sapiens
  misc_RNA (1)...(19): siRNA sense strand
auaggaagcuugaagacca

SEQ ID NO: 2471529 - RNA, 19 nt, Homo sapiens
  misc_RNA (1)...(19): siRNA sense strand
ccugucagaaacuggaaua

SEQ ID NO: 2471530 - RNA, 19 nt, Homo sapiens
  misc_RNA (1)...(19): siRNA sense strand
aaagaaguucccagaaaca

SEQ ID NO: 2471531 - RNA, 19 nt, Homo sapiens
  misc_RNA (1)...(19): siRNA sense strand
aagcugaguaugugacaga

SEQ ID NO: 2471532 - RNA, 19 nt, Homo sapiens
  misc_RNA (1)...(19): siRNA sense strand
guaaaagaccagaaaacca

SEQ ID NO: 2471533 - RNA, 19 nt, Homo sapiens
  misc_RNA (1)...(19): siRNA sense strand
agauaaauaugaugcacgu

SEQ ID NO: 2471534 - RNA, 19 nt, Homo sapiens
  misc_RNA (1)...(19): siRNA sense strand
gaacauagguuaagaugcc

SEQ ID NO: 2471535 - RNA, 19 nt, Homo sapiens
  misc_RNA (1)...(19): siRNA sense strand
ggugagaacaacagcucca

SEQ ID NO: 2471536 - RNA, 19 nt, Homo sapiens
  misc_RNA (1)...(19): siRNA sense strand
cuagaaagcaauaggaagc

SEQ ID NO: 2471537 - RNA, 19 nt, Homo sapiens
  misc_RNA (1)...(19): siRNA sense strand
cagugagcuuguugaaguu

SEQ ID NO: 2471538 - RNA, 19 nt, Homo sapiens
  misc_RNA (1)...(19): siRNA sense strand
ggaacagucaucuggcaca

SEQ ID NO: 2471539 - RNA, 19 nt, Homo sapiens
  misc_RNA (1)...(19): siRNA sense strand
aaacaaagugauggaacau

SEQ ID NO: 2471540 - RNA, 19 nt, Homo sapiens
  misc_RNA (1)...(19): siRNA sense strand
acucagucguuuacuagaa

SEQ ID NO: 2471541 - RNA, 19 nt, Homo sapiens
  misc_RNA (1)...(19): siRNA sense strand
gacaaagaagguaacaaau

SEQ ID NO: 2471542 - RNA, 19 nt, Homo sapiens
  misc_RNA (1)...(19): siRNA sense strand
agucgagauuggagcagaa

SEQ ID NO: 2471543 - RNA, 19 nt, Homo sapiens
  misc_RNA (1)...(19): siRNA sense strand
ugaaagaagcagugaccca

SEQ ID NO: 2471544 - RNA, 19 nt, Homo sapiens
  misc_RNA (1)...(19): siRNA sense strand
aagcaaugacccagaccaa

SEQ ID NO: 2471545 - RNA, 19 nt, Homo sapiens
  misc_RNA (1)...(19): siRNA sense strand
gcaaagaaacaaagaggag

SEQ ID NO: 2471546 - RNA, 19 nt, Homo sapiens
  misc_RNA (1)...(19): siRNA sense strand
gagccaacucucaggccaa

SEQ ID NO: 2471547 - RNA, 19 nt, Homo sapiens
  misc_RNA (1)...(19): siRNA sense strand
cgagauuggagcagaaacu

SEQ ID NO: 2471548 - RNA, 19 nt, Homo sapiens
  misc_RNA (1)...(19): siRNA sense strand
uugccaagacagaggccaa

SEQ ID NO: 2471549 - RNA, 19 nt, Homo sapiens
  misc_RNA (1)...(19): siRNA sense strand
caagaggagaggagggaac

SEQ ID NO: 2471550 - RNA, 19 nt, Homo sapiens
  misc_RNA (1)...(19): siRNA sense strand
ccauaaaugaagcagagau

SEQ ID NO: 2471551 - RNA, 19 nt, Homo sapiens
  misc_RNA (1)...(19): siRNA sense strand
aagcagugacacagaccaa

SEQ ID NO: 2471552 - RNA, 19 nt, Homo sapiens
  misc_RNA (1)...(19): siRNA sense strand
cuggaagcaaagaaacaaa

SEQ ID NO: 2471553 - RNA, 19 nt, Homo sapiens
  misc_RNA (1)...(19): siRNA sense strand
ccaaagugguggcuggaac

SEQ ID NO: 2471554 - RNA, 19 nt, Homo sapiens
  misc_RNA (1)...(19): siRNA sense strand
guggaugaaaccaagacaa

SEQ ID NO: 2471555 - RNA, 19 nt, Homo sapiens
  misc_RNA (1)...(19): siRNA sense strand
guguugaucccaagagcau

SEQ ID NO: 2471556 - RNA, 19 nt, Homo sapiens
  misc_RNA (1)...(19): siRNA sense strand
agggaagagcccagagugu

SEQ ID NO: 2471557 - RNA, 19 nt, Homo sapiens
  misc_RNA (1)...(19): siRNA sense strand
aggccaagagagaagcaau

SEQ ID NO: 2471558 - RNA, 19 nt, Homo sapiens
  misc_RNA (1)...(19): siRNA sense strand
agagagaagcaaugaccca

SEQ ID NO: 2471559 - RNA, 19 nt, Homo sapiens
  misc_RNA (1)...(19): siRNA sense strand
cacuggaagcaaagaaaca

SEQ ID NO: 2471560 - RNA, 19 nt, Homo sapiens
  misc_RNA (1)...(19): siRNA sense strand
ggguacagagccagaccuu

SEQ ID NO: 2471561 - RNA, 19 nt, Homo sapiens
  misc_RNA (1)...(19): siRNA sense strand
ugugaggacucuugccaga

SEQ ID NO: 2471562 - RNA, 19 nt, Homo sapiens
  misc_RNA (1)...(19): siRNA sense strand
caaagaaacaaagaggaga

SEQ ID NO: 2471563 - RNA, 19 nt, Homo sapiens
  misc_RNA (1)...(19): siRNA sense strand
auguaaggguuaugggaaa

SEQ ID NO: 2471564 - RNA, 19 nt, Homo sapiens
  misc_RNA (1)...(19): siRNA sense strand
guguaaauuuugugggaaa

SEQ ID NO: 2471565 - RNA, 19 nt, Homo sapiens
  misc_RNA (1)...(19): siRNA sense strand
guguaagcaaugugggaaa

SEQ ID NO: 2471566 - RNA, 19 nt, Homo sapiens
  misc_RNA (1)...(19): siRNA sense strand
auguaaugaaugugggaaa

SEQ ID NO: 2471567 - RNA, 19 nt, Homo sapiens
  misc_RNA (1)...(19): siRNA sense strand
auguaagauaugugggaaa

SEQ ID NO: 2471568 - RNA, 19 nt, Homo sapiens
  misc_RNA (1)...(19): siRNA sense strand
ccguauaaauguaagcaau

SEQ ID NO: 2471569 - RNA, 19 nt, Homo sapiens
  misc_RNA (1)...(19): siRNA sense strand
auguaaacagugugggaaa

SEQ ID NO: 2471570 - RNA, 19 nt, Homo sapiens
  misc_RNA (1)...(19): siRNA sense strand
cguaugaauguaaggguua

SEQ ID NO: 2471571 - RNA, 19 nt, Homo sapiens
  misc_RNA (1)...(19): siRNA sense strand
ggcucauaguggaaggaaa

SEQ ID NO: 2471572 - RNA, 19 nt, Homo sapiens
  misc_RNA (1)...(19): siRNA sense strand
acucuauguuugugaggaa

SEQ ID NO: 2471573 - RNA, 19 nt, Homo sapiens
  misc_RNA (1)...(19): siRNA sense strand
auguaagcaaugugggaaa

SEQ ID NO: 2471574 - RNA, 19 nt, Homo sapiens
  misc_RNA (1)...(19): siRNA sense strand
auguaaacagugugguaaa

SEQ ID NO: 2471575 - RNA, 19 nt, Homo sapiens
  misc_RNA (1)...(19): siRNA sense strand
aagaauugugggagagaga

SEQ ID NO: 2471576 - RNA, 19 nt, Homo sapiens
  misc_RNA (1)...(19): siRNA sense strand
ggucaucagcauggagaaa

SEQ ID NO: 2471577 - RNA, 19 nt, Homo sapiens
  misc_RNA (1)...(19): siRNA sense strand
auguaagcagugugggaaa

SEQ ID NO: 2471578 - RNA, 19 nt, Homo sapiens
  misc_RNA (1)...(19): siRNA sense strand
guggaaaaccauuuaguaa

SEQ ID NO: 2471579 - RNA, 19 nt, Homo sapiens
  misc_RNA (1)...(19): siRNA sense strand
acgaaaaucuaaggagaaa

SEQ ID NO: 2471580 - RNA, 19 nt, Homo sapiens
  misc_RNA (1)...(19): siRNA sense strand
accuaagaauugugggaga

SEQ ID NO: 2471581 - RNA, 19 nt, Homo sapiens
  misc_RNA (1)...(19): siRNA sense strand
gcauguaaggaauguggaa

SEQ ID NO: 2471582 - RNA, 19 nt, Homo sapiens
  misc_RNA (1)...(19): siRNA sense strand
guacgaaaaucuaaggaga

SEQ ID NO: 2471583 - RNA, 19 nt, Homo sapiens
  misc_RNA (1)...(19): siRNA sense strand
gcucauaguggaaggaaac

SEQ ID NO: 2471584 - RNA, 19 nt, Homo sapiens
  misc_RNA (1)...(19): siRNA sense strand
ccuucaaagacacaggaua

SEQ ID NO: 2471585 - RNA, 19 nt, Homo sapiens
  misc_RNA (1)...(19): siRNA sense strand
gauaaugcaccguggagau

SEQ ID NO: 2471586 - RNA, 19 nt, Homo sapiens
  misc_RNA (1)...(19): siRNA sense strand
augaaaggaugcacagaga

SEQ ID NO: 2471587 - RNA, 19 nt, Homo sapiens
  misc_RNA (1)...(19): siRNA sense strand
ccguaugaauguaaggguu

SEQ ID NO: 2471588 - RNA, 19 nt, Homo sapiens
  misc_RNA (1)...(19): siRNA sense strand
ggaccuuauaaguguaaau

SEQ ID NO: 2471589 - RNA, 19 nt, Homo sapiens
  misc_RNA (1)...(19): siRNA sense strand
acacuggacacaaggcaua

SEQ ID NO: 2471590 - RNA, 19 nt, Homo sapiens
  misc_RNA (1)...(19): siRNA sense strand
auguaaggaauguggaaaa

SEQ ID NO: 2471591 - RNA, 19 nt, Homo sapiens
  misc_RNA (1)...(19): siRNA sense strand
aaacauugugggaaaguau

SEQ ID NO: 2471592 - RNA, 19 nt, Homo sapiens
  misc_RNA (1)...(19): siRNA sense strand
auguaaggaauguggaaaa

SEQ ID NO: 2471593 - RNA, 19 nt, Homo sapiens
  misc_RNA (1)...(19): siRNA sense strand
aaggagaaaccuaagaauu

SEQ ID NO: 2471594 - RNA, 19 nt, Homo sapiens
  misc_RNA (1)...(19): siRNA sense strand
augcgaaagcaguguguau

SEQ ID NO: 2471595 - RNA, 19 nt, Homo sapiens
  misc_RNA (1)...(19): siRNA sense strand
aacucacacuggagagaaa

SEQ ID NO: 2471596 - RNA, 19 nt, Homo sapiens
  misc_RNA (1)...(19): siRNA sense strand
aacucacacuggagagaaa

SEQ ID NO: 2471597 - RNA, 19 nt, Homo sapiens
  misc_RNA (1)...(19): siRNA sense strand
aacucacacuggagagaaa

SEQ ID NO: 2471598 - RNA, 19 nt, Homo sapiens
  misc_RNA (1)...(19): siRNA sense strand
gaauguaagcaguguggga

SEQ ID NO: 2471599 - RNA, 19 nt, Homo sapiens
  misc_RNA (1)...(19): siRNA sense strand
gaauguaagcaguguggga

SEQ ID NO: 2471600 - RNA, 19 nt, Homo sapiens
  misc_RNA (1)...(19): siRNA sense strand
agagaugugaugcaagaaa

SEQ ID NO: 2471601 - RNA, 19 nt, Homo sapiens
  misc_RNA (1)...(19): siRNA sense strand
agaaguaggcagugcucau

SEQ ID NO: 2471602 - RNA, 19 nt, Homo sapiens
  misc_RNA (1)...(19): siRNA sense strand
gaauguaaacaguguggga

SEQ ID NO: 2471603 - RNA, 19 nt, Homo sapiens
  misc_RNA (1)...(19): siRNA sense strand
acagagaagagaagccgua

SEQ ID NO: 2471604 - RNA, 19 nt, Homo sapiens
  misc_RNA (1)...(19): siRNA sense strand
augcaagcaauguggaaaa

SEQ ID NO: 2471605 - RNA, 19 nt, Homo sapiens
  misc_RNA (1)...(19): siRNA sense strand
cccuauaaauguaaccaau

SEQ ID NO: 2471606 - RNA, 19 nt, Homo sapiens
  misc_RNA (1)...(19): siRNA sense strand
ccuucgaauacaugaaaga

SEQ ID NO: 2471607 - RNA, 19 nt, Homo sapiens
  misc_RNA (1)...(19): siRNA sense strand
aaucuaaggagaaaccuaa

SEQ ID NO: 2471608 - RNA, 19 nt, Homo sapiens
  misc_RNA (1)...(19): siRNA sense strand
gaaagggcucauaguggaa

SEQ ID NO: 2471609 - RNA, 19 nt, Homo sapiens
  misc_RNA (1)...(19): siRNA sense strand
cuuccgauaucaugaaaga

SEQ ID NO: 2471610 - RNA, 19 nt, Homo sapiens
  misc_RNA (1)...(19): siRNA sense strand
gacucacacgggagagaaa

SEQ ID NO: 2471611 - RNA, 19 nt, Homo sapiens
  misc_RNA (1)...(19): siRNA sense strand
ucaaauacaugaaaggaug

SEQ ID NO: 2471612 - RNA, 19 nt, Homo sapiens
  misc_RNA (1)...(19): siRNA sense strand
ggagaagaugagagggcaa

SEQ ID NO: 2471613 - RNA, 19 nt, Homo sapiens
  misc_RNA (1)...(19): siRNA sense strand
acuaagaugcugaaggcaa

SEQ ID NO: 2471614 - RNA, 19 nt, Homo sapiens
  misc_RNA (1)...(19): siRNA sense strand
ugaaagugucagugaaaca

SEQ ID NO: 2471615 - RNA, 19 nt, Homo sapiens
  misc_RNA (1)...(19): siRNA sense strand
ggaggaagaagaaaggcua

SEQ ID NO: 2471616 - RNA, 19 nt, Homo sapiens
  misc_RNA (1)...(19): siRNA sense strand
ucuaaagagccgaugacaa

SEQ ID NO: 2471617 - RNA, 19 nt, Homo sapiens
  misc_RNA (1)...(19): siRNA sense strand
agauagaugcagaugaaga

SEQ ID NO: 2471618 - RNA, 19 nt, Homo sapiens
  misc_RNA (1)...(19): siRNA sense strand
cagaauuagacgaggcgau

SEQ ID NO: 2471619 - RNA, 19 nt, Homo sapiens
  misc_RNA (1)...(19): siRNA sense strand
augcagaugaagaggugaa

SEQ ID NO: 2471620 - RNA, 19 nt, Homo sapiens
  misc_RNA (1)...(19): siRNA sense strand
aaggauucaugaaggaaau

SEQ ID NO: 2471621 - RNA, 19 nt, Homo sapiens
  misc_RNA (1)...(19): siRNA sense strand
guucuaacuucauuggcua

SEQ ID NO: 2471622 - RNA, 19 nt, Homo sapiens
  misc_RNA (1)...(19): siRNA sense strand
cugcugugguugaaagaca

SEQ ID NO: 2471623 - RNA, 19 nt, Homo sapiens
  misc_RNA (1)...(19): siRNA sense strand
aaagaaaagagaaggaaca

SEQ ID NO: 2471624 - RNA, 19 nt, Homo sapiens
  misc_RNA (1)...(19): siRNA sense strand
uuggcuacguaguggcaaa

SEQ ID NO: 2471625 - RNA, 19 nt, Homo sapiens
  misc_RNA (1)...(19): siRNA sense strand
aagaaaugcagagaagaaa

SEQ ID NO: 2471626 - RNA, 19 nt, Homo sapiens
  misc_RNA (1)...(19): siRNA sense strand
gaggaagaagaaaggcuau

SEQ ID NO: 2471627 - RNA, 19 nt, Homo sapiens
  misc_RNA (1)...(19): siRNA sense strand
gcacccacuuggaaggaca

SEQ ID NO: 2471628 - RNA, 19 nt, Homo sapiens
  misc_RNA (1)...(19): siRNA sense strand
agaaaugcagagaagaaaa

SEQ ID NO: 2471629 - RNA, 19 nt, Homo sapiens
  misc_RNA (1)...(19): siRNA sense strand
aagaaagugcugagaguuc

SEQ ID NO: 2471630 - RNA, 19 nt, Homo sapiens
  misc_RNA (1)...(19): siRNA sense strand
gggagauagaugcagauga

SEQ ID NO: 2471631 - RNA, 19 nt, Homo sapiens
  misc_RNA (1)...(19): siRNA sense strand
aaaagcagaucuugagcaa

SEQ ID NO: 2471632 - RNA, 19 nt, Homo sapiens
  misc_RNA (1)...(19): siRNA sense strand
aagagaaggaacacaccaa

SEQ ID NO: 2471633 - RNA, 19 nt, Homo sapiens
  misc_RNA (1)...(19): siRNA sense strand
ccugaagaaaugcagagaa

SEQ ID NO: 2471634 - RNA, 19 nt, Homo sapiens
  misc_RNA (1)...(19): siRNA sense strand
cuugagcaauguugggaca

SEQ ID NO: 2471635 - RNA, 19 nt, Homo sapiens
  misc_RNA (1)...(19): siRNA sense strand
gaagaggugaagaaggcuu

SEQ ID NO: 2471636 - RNA, 19 nt, Homo sapiens
  misc_RNA (1)...(19): siRNA sense strand
cauugaggaagaugcacaa

SEQ ID NO: 2471637 - RNA, 19 nt, Homo sapiens
  misc_RNA (1)...(19): siRNA sense strand
gagaagaugagagggcaau

SEQ ID NO: 2471638 - RNA, 19 nt, Homo sapiens
  misc_RNA (1)...(19): siRNA sense strand
ggaaaauaacugcaugaga

SEQ ID NO: 2471639 - RNA, 19 nt, Homo sapiens
  misc_RNA (1)...(19): siRNA sense strand
agacagaugcagcaagagu

SEQ ID NO: 2471640 - RNA, 19 nt, Homo sapiens
  misc_RNA (1)...(19): siRNA sense strand
ggaagcacuuggaggacac

SEQ ID NO: 2471641 - RNA, 19 nt, Homo sapiens
  misc_RNA (1)...(19): siRNA sense strand
ggagaagaugagagggcaa

SEQ ID NO: 2471642 - RNA, 19 nt, Homo sapiens
  misc_RNA (1)...(19): siRNA sense strand
acuaagaugcugaaggcaa

SEQ ID NO: 2471643 - RNA, 19 nt, Homo sapiens
  misc_RNA (1)...(19): siRNA sense strand
ugaaagugucagugaaaca

SEQ ID NO: 2471644 - RNA, 19 nt, Homo sapiens
  misc_RNA (1)...(19): siRNA sense strand
ggaggaagaagaaaggcua

SEQ ID NO: 2471645 - RNA, 19 nt, Homo sapiens
  misc_RNA (1)...(19): siRNA sense strand
ucuaaagagccgaugacaa

SEQ ID NO: 2471646 - RNA, 19 nt, Homo sapiens
  misc_RNA (1)...(19): siRNA sense strand
agauagaugcagaugaaga

SEQ ID NO: 2471647 - RNA, 19 nt, Homo sapiens
  misc_RNA (1)...(19): siRNA sense strand
cagaauuagacgaggcgau

SEQ ID NO: 2471648 - RNA, 19 nt, Homo sapiens
  misc_RNA (1)...(19): siRNA sense strand
augcagaugaagaggugaa

SEQ ID NO: 2471649 - RNA, 19 nt, Homo sapiens
  misc_RNA (1)...(19): siRNA sense strand
aaggauucaugaaggaaau

SEQ ID NO: 2471650 - RNA, 19 nt, Homo sapiens
  misc_RNA (1)...(19): siRNA sense strand
guucuaacuucauuggcua

SEQ ID NO: 2471651 - RNA, 19 nt, Homo sapiens
  misc_RNA (1)...(19): siRNA sense strand
cugcugugguugaaagaca

SEQ ID NO: 2471652 - RNA, 19 nt, Homo sapiens
  misc_RNA (1)...(19): siRNA sense strand
aaagaaaagagaaggaaca

SEQ ID NO: 2471653 - RNA, 19 nt, Homo sapiens
  misc_RNA (1)...(19): siRNA sense strand
uuggcuacguaguggcaaa

SEQ ID NO: 2471654 - RNA, 19 nt, Homo sapiens
  misc_RNA (1)...(19): siRNA sense strand
aagaaaugcagagaagaaa

SEQ ID NO: 2471655 - RNA, 19 nt, Homo sapiens
  misc_RNA (1)...(19): siRNA sense strand
gaggaagaagaaaggcuau

SEQ ID NO: 2471656 - RNA, 19 nt, Homo sapiens
  misc_RNA (1)...(19): siRNA sense strand
gcacccacuuggaaggaca

SEQ ID NO: 2471657 - RNA, 19 nt, Homo sapiens
  misc_RNA (1)...(19): siRNA sense strand
agaaaugcagagaagaaaa

SEQ ID NO: 2471658 - RNA, 19 nt, Homo sapiens
  misc_RNA (1)...(19): siRNA sense strand
aagaaagugcugagaguuc

SEQ ID NO: 2471659 - RNA, 19 nt, Homo sapiens
  misc_RNA (1)...(19): siRNA sense strand
gggagauagaugcagauga

SEQ ID NO: 2471660 - RNA, 19 nt, Homo sapiens
  misc_RNA (1)...(19): siRNA sense strand
aaaagcagaucuugagcaa

SEQ ID NO: 2471661 - RNA, 19 nt, Homo sapiens
  misc_RNA (1)...(19): siRNA sense strand
aagagaaggaacacaccaa

SEQ ID NO: 2471662 - RNA, 19 nt, Homo sapiens
  misc_RNA (1)...(19): siRNA sense strand
ccugaagaaaugcagagaa

SEQ ID NO: 2471663 - RNA, 19 nt, Homo sapiens
  misc_RNA (1)...(19): siRNA sense strand
cuugagcaauguugggaca

SEQ ID NO: 2471664 - RNA, 19 nt, Homo sapiens
  misc_RNA (1)...(19): siRNA sense strand
gaagaggugaagaaggcuu

SEQ ID NO: 2471665 - RNA, 19 nt, Homo sapiens
  misc_RNA (1)...(19): siRNA sense strand
cauugaggaagaugcacaa

SEQ ID NO: 2471666 - RNA, 19 nt, Homo sapiens
  misc_RNA (1)...(19): siRNA sense strand
gagaagaugagagggcaau

SEQ ID NO: 2471667 - RNA, 19 nt, Homo sapiens
  misc_RNA (1)...(19): siRNA sense strand
ggaaaauaacugcaugaga

SEQ ID NO: 2471668 - RNA, 19 nt, Homo sapiens
  misc_RNA (1)...(19): siRNA sense strand
agacagaugcagcaagagu

SEQ ID NO: 2471669 - RNA, 19 nt, Homo sapiens
  misc_RNA (1)...(19): siRNA sense strand
ggaagcacuuggaggacac

SEQ ID NO: 2471670 - RNA, 19 nt, Homo sapiens
  misc_RNA (1)...(19): siRNA sense strand
guuuggagacagaggaaca

SEQ ID NO: 2471671 - RNA, 19 nt, Homo sapiens
  misc_RNA (1)...(19): siRNA sense strand
agacagaggaacagagggu

SEQ ID NO: 2471672 - RNA, 19 nt, Homo sapiens
  misc_RNA (1)...(19): siRNA sense strand
ucaagaaggaaaaggccaa

SEQ ID NO: 2471673 - RNA, 19 nt, Homo sapiens
  misc_RNA (1)...(19): siRNA sense strand
cucaagaaguggaggacag

SEQ ID NO: 2471674 - RNA, 19 nt, Homo sapiens
  misc_RNA (1)...(19): siRNA sense strand
gugcagaaaucuaccugga

SEQ ID NO: 2471675 - RNA, 19 nt, Homo sapiens
  misc_RNA (1)...(19): siRNA sense strand
gaaggaaagucgagaggcu

SEQ ID NO: 2471676 - RNA, 19 nt, Homo sapiens
  misc_RNA (1)...(19): siRNA sense strand
aagagaaagaagaaggcau

SEQ ID NO: 2471677 - RNA, 19 nt, Homo sapiens
  misc_RNA (1)...(19): siRNA sense strand
agggagaaacagaaguauu

SEQ ID NO: 2471678 - RNA, 19 nt, Homo sapiens
  misc_RNA (1)...(19): siRNA sense strand
gaaagauucaucaggccaa

SEQ ID NO: 2471679 - RNA, 19 nt, Homo sapiens
  misc_RNA (1)...(19): siRNA sense strand
gaacguucaaagaaggcaa

SEQ ID NO: 2471680 - RNA, 19 nt, Homo sapiens
  misc_RNA (1)...(19): siRNA sense strand
aggaaagucgagaggcuca

SEQ ID NO: 2471681 - RNA, 19 nt, Homo sapiens
  misc_RNA (1)...(19): siRNA sense strand
ggaaagagaaagaagaagg

SEQ ID NO: 2471682 - RNA, 19 nt, Homo sapiens
  misc_RNA (1)...(19): siRNA sense strand
acaccaaacaaaagaauga

SEQ ID NO: 2471683 - RNA, 19 nt, Homo sapiens
  misc_RNA (1)...(19): siRNA sense strand
augauuggucugaaggcua

SEQ ID NO: 2471684 - RNA, 19 nt, Homo sapiens
  misc_RNA (1)...(19): siRNA sense strand
uauucgaacaggaaagaga

SEQ ID NO: 2471685 - RNA, 19 nt, Homo sapiens
  misc_RNA (1)...(19): siRNA sense strand
agagaaagaagaaggcaug

SEQ ID NO: 2471686 - RNA, 19 nt, Homo sapiens
  misc_RNA (1)...(19): siRNA sense strand
uugaaguaaaugugagcga

SEQ ID NO: 2471687 - RNA, 19 nt, Homo sapiens
  misc_RNA (1)...(19): siRNA sense strand
aggaaugcacggagaacau

SEQ ID NO: 2471688 - RNA, 19 nt, Homo sapiens
  misc_RNA (1)...(19): siRNA sense strand
ggagcagcauggagcccua

SEQ ID NO: 2471689 - RNA, 19 nt, Homo sapiens
  misc_RNA (1)...(19): siRNA sense strand
cuguaggaaugcacggaga

SEQ ID NO: 2471690 - RNA, 19 nt, Homo sapiens
  misc_RNA (1)...(19): siRNA sense strand
uagaaaucuucgaggguug

SEQ ID NO: 2471691 - RNA, 19 nt, Homo sapiens
  misc_RNA (1)...(19): siRNA sense strand
gcuucggagcugaggacuu

SEQ ID NO: 2471692 - RNA, 19 nt, Homo sapiens
  misc_RNA (1)...(19): siRNA sense strand
aagucaggcuaaagaacaa

SEQ ID NO: 2471693 - RNA, 19 nt, Homo sapiens
  misc_RNA (1)...(19): siRNA sense strand
gggccaggagauagaagua

SEQ ID NO: 2471694 - RNA, 19 nt, Homo sapiens
  misc_RNA (1)...(19): siRNA sense strand
uguuauagaucuuguggga

SEQ ID NO: 2471695 - RNA, 19 nt, Homo sapiens
  misc_RNA (1)...(19): siRNA sense strand
gaguauuaaaggugggcca

SEQ ID NO: 2471696 - RNA, 19 nt, Homo sapiens
  misc_RNA (1)...(19): siRNA sense strand
cgucaaagcuauuucugga

SEQ ID NO: 2471697 - RNA, 19 nt, Homo sapiens
  misc_RNA (1)...(19): siRNA sense strand
agguguagcuggugguagu

SEQ ID NO: 2471698 - RNA, 19 nt, Homo sapiens
  misc_RNA (1)...(19): siRNA sense strand
cuaaagaacaauacgagca

SEQ ID NO: 2471699 - RNA, 19 nt, Homo sapiens
  misc_RNA (1)...(19): siRNA sense strand
ucuuauuggaguuggaaca

SEQ ID NO: 2471700 - RNA, 19 nt, Homo sapiens
  misc_RNA (1)...(19): siRNA sense strand
uaagaagaggagugacaau

SEQ ID NO: 2471701 - RNA, 19 nt, Homo sapiens
  misc_RNA (1)...(19): siRNA sense strand
cugugaaguugaugaccuu

SEQ ID NO: 2471702 - RNA, 19 nt, Homo sapiens
  misc_RNA (1)...(19): siRNA sense strand
gugaaguugaugaccuuaa

SEQ ID NO: 2471703 - RNA, 19 nt, Homo sapiens
  misc_RNA (1)...(19): siRNA sense strand
guucauacugucagguuca

SEQ ID NO: 2471704 - RNA, 19 nt, Homo sapiens
  misc_RNA (1)...(19): siRNA sense strand
agcauaaugaucugcaaua

SEQ ID NO: 2471705 - RNA, 19 nt, Homo sapiens
  misc_RNA (1)...(19): siRNA sense strand
agaaagcagcaaagguuca

SEQ ID NO: 2471706 - RNA, 19 nt, Homo sapiens
  misc_RNA (1)...(19): siRNA sense strand
cacaauuaacauagguaca

SEQ ID NO: 2471707 - RNA, 19 nt, Homo sapiens
  misc_RNA (1)...(19): siRNA sense strand
uuacaaucaagcuuggaua

SEQ ID NO: 2471708 - RNA, 19 nt, Homo sapiens
  misc_RNA (1)...(19): siRNA sense strand
ggagauagaaguaagaccu

SEQ ID NO: 2471709 - RNA, 19 nt, Homo sapiens
  misc_RNA (1)...(19): siRNA sense strand
cacugaaggagacaagaaa

SEQ ID NO: 2471710 - RNA, 19 nt, Homo sapiens
  misc_RNA (1)...(19): siRNA sense strand
guucaaaagcugucuaaga

SEQ ID NO: 2471711 - RNA, 19 nt, Homo sapiens
  misc_RNA (1)...(19): siRNA sense strand
aagaacaauacgagcagau

SEQ ID NO: 2471712 - RNA, 19 nt, Homo sapiens
  misc_RNA (1)...(19): siRNA sense strand
gagcauaaugaucugcaau

SEQ ID NO: 2471713 - RNA, 19 nt, Homo sapiens
  misc_RNA (1)...(19): siRNA sense strand
uguccaagguacaguagca

SEQ ID NO: 2471714 - RNA, 19 nt, Homo sapiens
  misc_RNA (1)...(19): siRNA sense strand
cgagcagauccuugcauuu

SEQ ID NO: 2471715 - RNA, 19 nt, Homo sapiens
  misc_RNA (1)...(19): siRNA sense strand
guacaguagcagagggagc

SEQ ID NO: 2471716 - RNA, 19 nt, Homo sapiens
  misc_RNA (1)...(19): siRNA sense strand
uauuggaguuggaacaaaa

SEQ ID NO: 2471717 - RNA, 19 nt, Homo sapiens
  misc_RNA (1)...(19): siRNA sense strand
ucaaggccgauuuggguaa

SEQ ID NO: 2471718 - RNA, 19 nt, Homo sapiens
  misc_RNA (1)...(19): siRNA sense strand
uggugcagucggagcuuua

SEQ ID NO: 2471719 - RNA, 19 nt, Homo sapiens
  misc_RNA (1)...(19): siRNA sense strand
cggagcuuuaccugagaua

SEQ ID NO: 2471720 - RNA, 19 nt, Homo sapiens
  misc_RNA (1)...(19): siRNA sense strand
agccaacaguagaugauga

SEQ ID NO: 2471721 - RNA, 19 nt, Homo sapiens
  misc_RNA (1)...(19): siRNA sense strand
ucacagagcugcuggagga

SEQ ID NO: 2471722 - RNA, 19 nt, Homo sapiens
  misc_RNA (1)...(19): siRNA sense strand
uggaggaauacgaggauga

SEQ ID NO: 2471723 - RNA, 19 nt, Homo sapiens
  misc_RNA (1)...(19): siRNA sense strand
ggaugaacuagaaugggaa

SEQ ID NO: 2471724 - RNA, 19 nt, Homo sapiens
  misc_RNA (1)...(19): siRNA sense strand
gggaaauugcccaggugga

SEQ ID NO: 2471725 - RNA, 19 nt, Homo sapiens
  misc_RNA (1)...(19): siRNA sense strand
aggaauacgaggaugaacu

SEQ ID NO: 2471726 - RNA, 19 nt, Homo sapiens
  misc_RNA (1)...(19): siRNA sense strand
gugagagcauuguggagga

SEQ ID NO: 2471727 - RNA, 19 nt, Homo sapiens
  misc_RNA (1)...(19): siRNA sense strand
uggaugaacuagaauggga

SEQ ID NO: 2471728 - RNA, 19 nt, Homo sapiens
  misc_RNA (1)...(19): siRNA sense strand
cagugguggaggugccuua

SEQ ID NO: 2471729 - RNA, 19 nt, Homo sapiens
  misc_RNA (1)...(19): siRNA sense strand
caguaagcgaacagaucuu

SEQ ID NO: 2471730 - RNA, 19 nt, Homo sapiens
  misc_RNA (1)...(19): siRNA sense strand
gcugacaauguuaaagaca

SEQ ID NO: 2471731 - RNA, 19 nt, Homo sapiens
  misc_RNA (1)...(19): siRNA sense strand
aguuggaggaagagaacaa

SEQ ID NO: 2471732 - RNA, 19 nt, Homo sapiens
  misc_RNA (1)...(19): siRNA sense strand
gggaauacguucaguccga

SEQ ID NO: 2471733 - RNA, 19 nt, Homo sapiens
  misc_RNA (1)...(19): siRNA sense strand
cuggaugaacugaggauca

SEQ ID NO: 2471734 - RNA, 19 nt, Homo sapiens
  misc_RNA (1)...(19): siRNA sense strand
acuuaauggagaaggaacu

SEQ ID NO: 2471735 - RNA, 19 nt, Homo sapiens
  misc_RNA (1)...(19): siRNA sense strand
ggaaccagcaguuggagga

SEQ ID NO: 2471736 - RNA, 19 nt, Homo sapiens
  misc_RNA (1)...(19): siRNA sense strand
uggagcugggcuuggaaua

SEQ ID NO: 2471737 - RNA, 19 nt, Homo sapiens
  misc_RNA (1)...(19): siRNA sense strand
accagcaguuggaggaaga

SEQ ID NO: 2471738 - RNA, 19 nt, Homo sapiens
  misc_RNA (1)...(19): siRNA sense strand
ccaguggauagcagagaca

SEQ ID NO: 2471739 - RNA, 19 nt, Homo sapiens
  misc_RNA (1)...(19): siRNA sense strand
gggcaugacagaaggagua

SEQ ID NO: 2471740 - RNA, 19 nt, Homo sapiens
  misc_RNA (1)...(19): siRNA sense strand
caucaaauuuccagggacu

SEQ ID NO: 2471741 - RNA, 19 nt, Homo sapiens
  misc_RNA (1)...(19): siRNA sense strand
ugguugaggaauucagaaa

SEQ ID NO: 2471742 - RNA, 19 nt, Homo sapiens
  misc_RNA (1)...(19): siRNA sense strand
gggacaauaaugaguacau

SEQ ID NO: 2471743 - RNA, 19 nt, Homo sapiens
  misc_RNA (1)...(19): siRNA sense strand
cagaaaagagccaguggaa

SEQ ID NO: 2471744 - RNA, 19 nt, Homo sapiens
  misc_RNA (1)...(19): siRNA sense strand
aguuuuacuugcaggguua

SEQ ID NO: 2471745 - RNA, 19 nt, Homo sapiens
  misc_RNA (1)...(19): siRNA sense strand
caucuagagacaagagcuu

SEQ ID NO: 2471746 - RNA, 19 nt, Homo sapiens
  misc_RNA (1)...(19): siRNA sense strand
agaaauggcuguaugucca

SEQ ID NO: 2471747 - RNA, 19 nt, Homo sapiens
  misc_RNA (1)...(19): siRNA sense strand
guacauugccagacgacca

SEQ ID NO: 2471748 - RNA, 19 nt, Homo sapiens
  misc_RNA (1)...(19): siRNA sense strand
ucugacaaguauugcggaa

SEQ ID NO: 2471749 - RNA, 19 nt, Homo sapiens
  misc_RNA (1)...(19): siRNA sense strand
auccaaagaaguagccuua

SEQ ID NO: 2471750 - RNA, 19 nt, Homo sapiens
  misc_RNA (1)...(19): siRNA sense strand
cuacgaaagagcagcuuga

SEQ ID NO: 2471751 - RNA, 19 nt, Homo sapiens
  misc_RNA (1)...(19): siRNA sense strand
aggauuaggaacugagcca

SEQ ID NO: 2471752 - RNA, 19 nt, Homo sapiens
  misc_RNA (1)...(19): siRNA sense strand
aagaaguagccuuaguaau

SEQ ID NO: 2471753 - RNA, 19 nt, Homo sapiens
  misc_RNA (1)...(19): siRNA sense strand
uucagguaguggagguaua

SEQ ID NO: 2471754 - RNA, 19 nt, Homo sapiens
  misc_RNA (1)...(19): siRNA sense strand
cugggagcaucuagagaca

SEQ ID NO: 2471755 - RNA, 19 nt, Homo sapiens
  misc_RNA (1)...(19): siRNA sense strand
caguauaaguauuuggcuc

SEQ ID NO: 2471756 - RNA, 19 nt, Homo sapiens
  misc_RNA (1)...(19): siRNA sense strand
ugcgaaagaugaagcacau

SEQ ID NO: 2471757 - RNA, 19 nt, Homo sapiens
  misc_RNA (1)...(19): siRNA sense strand
cuuauuuaugguugaggaa

SEQ ID NO: 2471758 - RNA, 19 nt, Homo sapiens
  misc_RNA (1)...(19): siRNA sense strand
ggaguuugccuaugaggga

SEQ ID NO: 2471759 - RNA, 19 nt, Homo sapiens
  misc_RNA (1)...(19): siRNA sense strand
guuagaaauugcagauccu

SEQ ID NO: 2471760 - RNA, 19 nt, Homo sapiens
  misc_RNA (1)...(19): siRNA sense strand
gauccaaagaaguagccuu

SEQ ID NO: 2471761 - RNA, 19 nt, Homo sapiens
  misc_RNA (1)...(19): siRNA sense strand
cucccagcuuccaggauua

SEQ ID NO: 2471762 - RNA, 19 nt, Homo sapiens
  misc_RNA (1)...(19): siRNA sense strand
cauacagagaauugguuca

SEQ ID NO: 2471763 - RNA, 19 nt, Homo sapiens
  misc_RNA (1)...(19): siRNA sense strand
acuuuaugcuccuguguca

SEQ ID NO: 2471764 - RNA, 19 nt, Homo sapiens
  misc_RNA (1)...(19): siRNA sense strand
gcuuauaugauuugccagu

SEQ ID NO: 2471765 - RNA, 19 nt, Homo sapiens
  misc_RNA (1)...(19): siRNA sense strand
gcagcaucuacaaggacua

SEQ ID NO: 2471766 - RNA, 19 nt, Homo sapiens
  misc_RNA (1)...(19): siRNA sense strand
cggcugucacugcggacua

SEQ ID NO: 2471767 - RNA, 19 nt, Homo sapiens
  misc_RNA (1)...(19): siRNA sense strand
gcugacaauuuaagggcaa

SEQ ID NO: 2471768 - RNA, 19 nt, Homo sapiens
  misc_RNA (1)...(19): siRNA sense strand
caucauaaucaaacgggua

SEQ ID NO: 2471769 - RNA, 19 nt, Homo sapiens
  misc_RNA (1)...(19): siRNA sense strand
cuucauuggcugugauuau

SEQ ID NO: 2471770 - RNA, 19 nt, Homo sapiens
  misc_RNA (1)...(19): siRNA sense strand
cauuguacucagagcacua

SEQ ID NO: 2471771 - RNA, 19 nt, Homo sapiens
  misc_RNA (1)...(19): siRNA sense strand
cguuaguggauaugguaga

SEQ ID NO: 2471772 - RNA, 19 nt, Homo sapiens
  misc_RNA (1)...(19): siRNA sense strand
cugguuaguuagugacaca

SEQ ID NO: 2471773 - RNA, 19 nt, Homo sapiens
  misc_RNA (1)...(19): siRNA sense strand
agauuuaggaguuggacca

SEQ ID NO: 2471774 - RNA, 19 nt, Homo sapiens
  misc_RNA (1)...(19): siRNA sense strand
guguugcguuaguggauau

SEQ ID NO: 2471775 - RNA, 19 nt, Homo sapiens
  misc_RNA (1)...(19): siRNA sense strand
gggcuaucguaguugcaca

SEQ ID NO: 2471776 - RNA, 19 nt, Homo sapiens
  misc_RNA (1)...(19): siRNA sense strand
ccaaaggugaaguacaaaa

SEQ ID NO: 2471777 - RNA, 19 nt, Homo sapiens
  misc_RNA (1)...(19): siRNA sense strand
ccuacuuauaugaaggaga

SEQ ID NO: 2471778 - RNA, 19 nt, Homo sapiens
  misc_RNA (1)...(19): siRNA sense strand
uguucaagagaauggguuu

SEQ ID NO: 2471779 - RNA, 19 nt, Homo sapiens
  misc_RNA (1)...(19): siRNA sense strand
cugacaauuuaagggcaaa

SEQ ID NO: 2471780 - RNA, 19 nt, Homo sapiens
  misc_RNA (1)...(19): siRNA sense strand
cagagcacuagaaggacua

SEQ ID NO: 2471781 - RNA, 19 nt, Homo sapiens
  misc_RNA (1)...(19): siRNA sense strand
aaucaaacggguaagaagu

SEQ ID NO: 2471782 - RNA, 19 nt, Homo sapiens
  misc_RNA (1)...(19): siRNA sense strand
cccauuaugaaaaggaaua

SEQ ID NO: 2471783 - RNA, 19 nt, Homo sapiens
  misc_RNA (1)...(19): siRNA sense strand
gggaaaaugcugcuaggau

SEQ ID NO: 2471784 - RNA, 19 nt, Homo sapiens
  misc_RNA (1)...(19): siRNA sense strand
guaccagagcgaaggaaau

SEQ ID NO: 2471785 - RNA, 19 nt, Homo sapiens
  misc_RNA (1)...(19): siRNA sense strand
ggaucaaacaggaaaucau

SEQ ID NO: 2471786 - RNA, 19 nt, Homo sapiens
  misc_RNA (1)...(19): siRNA sense strand
cguaccagagcgaaggaaa

SEQ ID NO: 2471787 - RNA, 19 nt, Homo sapiens
  misc_RNA (1)...(19): siRNA sense strand
cgagaauaugccuggaaaa

SEQ ID NO: 2471788 - RNA, 19 nt, Homo sapiens
  misc_RNA (1)...(19): siRNA sense strand
ggaaaauccucucuggcaa

SEQ ID NO: 2471789 - RNA, 19 nt, Homo sapiens
  misc_RNA (1)...(19): siRNA sense strand
caacuaacuuugagggguu

SEQ ID NO: 2471790 - RNA, 19 nt, Homo sapiens
  misc_RNA (1)...(19): siRNA sense strand
ggugcauggcugagaggau

SEQ ID NO: 2471791 - RNA, 19 nt, Homo sapiens
  misc_RNA (1)...(19): siRNA sense strand
uagcauggugggagcagaa

SEQ ID NO: 2471792 - RNA, 19 nt, Homo sapiens
  misc_RNA (1)...(19): siRNA sense strand
aaauaaggagacuggauga

SEQ ID NO: 2471793 - RNA, 19 nt, Homo sapiens
  misc_RNA (1)...(19): siRNA sense strand
gccuaaagccccagacaau

SEQ ID NO: 2471794 - RNA, 19 nt, Homo sapiens
  misc_RNA (1)...(19): siRNA sense strand
gaaucaaucugacuggaga

SEQ ID NO: 2471795 - RNA, 19 nt, Homo sapiens
  misc_RNA (1)...(19): siRNA sense strand
aagacaauacggagaaguu

SEQ ID NO: 2471796 - RNA, 19 nt, Homo sapiens
  misc_RNA (1)...(19): siRNA sense strand
agaggauugcgguggaauu

SEQ ID NO: 2471797 - RNA, 19 nt, Homo sapiens
  misc_RNA (1)...(19): siRNA sense strand
gugcaaugcucucagcuca

SEQ ID NO: 2471798 - RNA, 19 nt, Homo sapiens
  misc_RNA (1)...(19): siRNA sense strand
cggagaaaggagauuuaga

SEQ ID NO: 2471799 - RNA, 19 nt, Homo sapiens
  misc_RNA (1)...(19): siRNA sense strand
ugaugaauguccuggagca

SEQ ID NO: 2471800 - RNA, 19 nt, Homo sapiens
  misc_RNA (1)...(19): siRNA sense strand
gagaauaugccuggaaaau

SEQ ID NO: 2471801 - RNA, 19 nt, Homo sapiens
  misc_RNA (1)...(19): siRNA sense strand
ccaggaucaaacaggaaau

SEQ ID NO: 2471802 - RNA, 19 nt, Homo sapiens
  misc_RNA (1)...(19): siRNA sense strand
uggcaacggagaaaggaga

SEQ ID NO: 2471803 - RNA, 19 nt, Homo sapiens
  misc_RNA (1)...(19): siRNA sense strand
agcaagaugcaguggcaga

SEQ ID NO: 2471804 - RNA, 19 nt, Homo sapiens
  misc_RNA (1)...(19): siRNA sense strand
gaaaauaaggagacuggau

SEQ ID NO: 2471805 - RNA, 19 nt, Homo sapiens
  misc_RNA (1)...(19): siRNA sense strand
ggcgaagacaauacggaga

SEQ ID NO: 2471806 - RNA, 19 nt, Homo sapiens
  misc_RNA (1)...(19): siRNA sense strand
uggcgaacauagacgaagu

SEQ ID NO: 2471807 - RNA, 19 nt, Homo sapiens
  misc_RNA (1)...(19): siRNA sense strand
ccagcaauguucuacgaga

SEQ ID NO: 2471808 - RNA, 19 nt, Homo sapiens
  misc_RNA (1)...(19): siRNA sense strand
cccagcagcuagaagaaaa

SEQ ID NO: 2471809 - RNA, 19 nt, Homo sapiens
  misc_RNA (1)...(19): siRNA sense strand
uuguaagaggucagacgaa

SEQ ID NO: 2471810 - RNA, 19 nt, Homo sapiens
  misc_RNA (1)...(19): siRNA sense strand
agugaaggcugcacagacu

SEQ ID NO: 2471811 - RNA, 19 nt, Homo sapiens
  misc_RNA (1)...(19): siRNA sense strand
cccucuagaucgagcagau

SEQ ID NO: 2471812 - RNA, 19 nt, Homo sapiens
  misc_RNA (1)...(19): siRNA sense strand
gaucaaccaaagaagccua

SEQ ID NO: 2471813 - RNA, 19 nt, Homo sapiens
  misc_RNA (1)...(19): siRNA sense strand
caauauucgaacuguugua

SEQ ID NO: 2471814 - RNA, 19 nt, Homo sapiens
  misc_RNA (1)...(19): siRNA sense strand
uuguggacuaugaggagaa

SEQ ID NO: 2471815 - RNA, 19 nt, Homo sapiens
  misc_RNA (1)...(19): siRNA sense strand
aggaacuggcaacggagaa

SEQ ID NO: 2471816 - RNA, 19 nt, Homo sapiens
  misc_RNA (1)...(19): siRNA sense strand
ccaccauuuuccagaagua

SEQ ID NO: 2471817 - RNA, 19 nt, Homo sapiens
  misc_RNA (1)...(19): siRNA sense strand
aggcuuaaucacagagcua

SEQ ID NO: 2471818 - RNA, 19 nt, Homo sapiens
  misc_RNA (1)...(19): siRNA sense strand
cagaggaagcuguaagaga

SEQ ID NO: 2471819 - RNA, 19 nt, Homo sapiens
  misc_RNA (1)...(19): siRNA sense strand
agaccagaagagagacuua

SEQ ID NO: 2471820 - RNA, 19 nt, Homo sapiens
  misc_RNA (1)...(19): siRNA sense strand
acagcuaacauuuggaauu

SEQ ID NO: 2471821 - RNA, 19 nt, Homo sapiens
  misc_RNA (1)...(19): siRNA sense strand
aguagaaacaugugccuuu

SEQ ID NO: 2471822 - RNA, 19 nt, Homo sapiens
  misc_RNA (1)...(19): siRNA sense strand
ugaugauguucaaagagaa

SEQ ID NO: 2471823 - RNA, 19 nt, Homo sapiens
  misc_RNA (1)...(19): siRNA sense strand
gcugaaucugacagggaau

SEQ ID NO: 2471824 - RNA, 19 nt, Homo sapiens
  misc_RNA (1)...(19): siRNA sense strand
auaauuagugggugcgauu

SEQ ID NO: 2471825 - RNA, 19 nt, Homo sapiens
  misc_RNA (1)...(19): siRNA sense strand
cguucaacaggcaguauua

SEQ ID NO: 2471826 - RNA, 19 nt, Homo sapiens
  misc_RNA (1)...(19): siRNA sense strand
ccauuacacaucagagaga

SEQ ID NO: 2471827 - RNA, 19 nt, Homo sapiens
  misc_RNA (1)...(19): siRNA sense strand
acuuaucguucuacagcua

SEQ ID NO: 2471828 - RNA, 19 nt, Homo sapiens
  misc_RNA (1)...(19): siRNA sense strand
aaagaaauggagugauuca

SEQ ID NO: 2471829 - RNA, 19 nt, Homo sapiens
  misc_RNA (1)...(19): siRNA sense strand
agagaaagaaauggaguga

SEQ ID NO: 2471830 - RNA, 19 nt, Homo sapiens
  misc_RNA (1)...(19): siRNA sense strand
aguuauugauggaggacac

SEQ ID NO: 2471831 - RNA, 19 nt, Homo sapiens
  misc_RNA (1)...(19): siRNA sense strand
agcucaggcuacaguguua

SEQ ID NO: 2471832 - RNA, 19 nt, Homo sapiens
  misc_RNA (1)...(19): siRNA sense strand
uauucaugauugauggcua

SEQ ID NO: 2471833 - RNA, 19 nt, Homo sapiens
  misc_RNA (1)...(19): siRNA sense strand
cuauaauguccucugggaa

SEQ ID NO: 2471834 - RNA, 19 nt, Homo sapiens
  misc_RNA (1)...(19): siRNA sense strand
agaaaguauacaucgaaga

SEQ ID NO: 2471835 - RNA, 19 nt, Homo sapiens
  misc_RNA (1)...(19): siRNA sense strand
augaugauguucaaagaga

SEQ ID NO: 2471836 - RNA, 19 nt, Homo sapiens
  misc_RNA (1)...(19): siRNA sense strand
cuacgagucuuuuggcuaa

SEQ ID NO: 2471837 - RNA, 19 nt, Homo sapiens
  misc_RNA (1)...(19): siRNA sense strand
ggaaauggggcuuacacua

SEQ ID NO: 2471838 - RNA, 19 nt, Homo sapiens
  misc_RNA (1)...(19): siRNA sense strand
gggugcgauucuacacuaa

SEQ ID NO: 2471839 - RNA, 19 nt, Homo sapiens
  misc_RNA (1)...(19): siRNA sense strand
ugauguucaaagagaaaga

SEQ ID NO: 2471840 - RNA, 19 nt, Homo sapiens
  misc_RNA (1)...(19): siRNA sense strand
guuugagucgggaaguaaa

SEQ ID NO: 2471841 - RNA, 19 nt, Homo sapiens
  misc_RNA (1)...(19): siRNA sense strand
cuggaagacauuuaugaau

SEQ ID NO: 2471842 - RNA, 19 nt, Homo sapiens
  misc_RNA (1)...(19): siRNA sense strand
gggcuaagaccagaagaga

SEQ ID NO: 2471843 - RNA, 19 nt, Homo sapiens
  misc_RNA (1)...(19): siRNA sense strand
caguuauguucuuuggcau

SEQ ID NO: 2471844 - RNA, 19 nt, Homo sapiens
  misc_RNA (1)...(19): siRNA sense strand
guuugcaguuacagcauuu

SEQ ID NO: 2471845 - RNA, 19 nt, Homo sapiens
  misc_RNA (1)...(19): siRNA sense strand
ggaaguaaaauucgggcuu

SEQ ID NO: 2471846 - RNA, 19 nt, Homo sapiens
  misc_RNA (1)...(19): siRNA sense strand
gauucguuucccagacaua

SEQ ID NO: 2471847 - RNA, 19 nt, Homo sapiens
  misc_RNA (1)...(19): siRNA sense strand
ucuuauaauuagugggugc

SEQ ID NO: 2471848 - RNA, 19 nt, Homo sapiens
  misc_RNA (1)...(19): siRNA sense strand
ccucaguagcccauuauuu

SEQ ID NO: 2471849 - RNA, 19 nt, Homo sapiens
  misc_RNA (1)...(19): siRNA sense strand
uggcuguacauucaagaua

SEQ ID NO: 2471850 - RNA, 19 nt, Homo sapiens
  misc_RNA (1)...(19): siRNA sense strand
gggacaaugagaaggugaa

SEQ ID NO: 2471851 - RNA, 19 nt, Homo sapiens
  misc_RNA (1)...(19): siRNA sense strand
ggaugaauugcgugaggca

SEQ ID NO: 2471852 - RNA, 19 nt, Homo sapiens
  misc_RNA (1)...(19): siRNA sense strand
gcugauuguuggaggagcu

SEQ ID NO: 2471853 - RNA, 19 nt, Homo sapiens
  misc_RNA (1)...(19): siRNA sense strand
aauagugaauguugcccaa

SEQ ID NO: 2471854 - RNA, 19 nt, Homo sapiens
  misc_RNA (1)...(19): siRNA sense strand
gaaagaagucaccgagcgu

SEQ ID NO: 2471855 - RNA, 19 nt, Homo sapiens
  misc_RNA (1)...(19): siRNA sense strand
gggacaaugagaaggugaa

SEQ ID NO: 2471856 - RNA, 19 nt, Homo sapiens
  misc_RNA (1)...(19): siRNA sense strand
ggaugaauugcgugaggca

SEQ ID NO: 2471857 - RNA, 19 nt, Homo sapiens
  misc_RNA (1)...(19): siRNA sense strand
gcugauuguuggaggagcu

SEQ ID NO: 2471858 - RNA, 19 nt, Homo sapiens
  misc_RNA (1)...(19): siRNA sense strand
aauagugaauguugcccaa

SEQ ID NO: 2471859 - RNA, 19 nt, Homo sapiens
  misc_RNA (1)...(19): siRNA sense strand
gaaagaagucaccgagcgu

SEQ ID NO: 2471860 - RNA, 19 nt, Homo sapiens
  misc_RNA (1)...(19): siRNA sense strand
cggaugacgugaugcgcaa

SEQ ID NO: 2471861 - RNA, 19 nt, Homo sapiens
  misc_RNA (1)...(19): siRNA sense strand
ggaagguacugaagaggcu

SEQ ID NO: 2471862 - RNA, 19 nt, Homo sapiens
  misc_RNA (1)...(19): siRNA sense strand
agaugguggagaugcacaa

SEQ ID NO: 2471863 - RNA, 19 nt, Homo sapiens
  misc_RNA (1)...(19): siRNA sense strand
ugcagaaggcagagagaaa

SEQ ID NO: 2471864 - RNA, 19 nt, Homo sapiens
  misc_RNA (1)...(19): siRNA sense strand
auaaggagaaagaggaaau

SEQ ID NO: 2471865 - RNA, 19 nt, Homo sapiens
  misc_RNA (1)...(19): siRNA sense strand
aaauaaggagaaagaggaa

SEQ ID NO: 2471866 - RNA, 19 nt, Homo sapiens
  misc_RNA (1)...(19): siRNA sense strand
cuguugaccuggaaggcaa

SEQ ID NO: 2471867 - RNA, 19 nt, Homo sapiens
  misc_RNA (1)...(19): siRNA sense strand
augaaggagcugaaagaau

SEQ ID NO: 2471868 - RNA, 19 nt, Homo sapiens
  misc_RNA (1)...(19): siRNA sense strand
cagaaggcagagagaaaca

SEQ ID NO: 2471869 - RNA, 19 nt, Homo sapiens
  misc_RNA (1)...(19): siRNA sense strand
caaauaaggagaaagagga

SEQ ID NO: 2471870 - RNA, 19 nt, Homo sapiens
  misc_RNA (1)...(19): siRNA sense strand
caaagagaaauuagcccaa

SEQ ID NO: 2471871 - RNA, 19 nt, Homo sapiens
  misc_RNA (1)...(19): siRNA sense strand
cguggaaaugcaaaugaaa

SEQ ID NO: 2471872 - RNA, 19 nt, Homo sapiens
  misc_RNA (1)...(19): siRNA sense strand
guggaaaugcaaaugaaaa

SEQ ID NO: 2471873 - RNA, 19 nt, Homo sapiens
  misc_RNA (1)...(19): siRNA sense strand
caguucaggccaagaaaca

SEQ ID NO: 2471874 - RNA, 19 nt, Homo sapiens
  misc_RNA (1)...(19): siRNA sense strand
aagagaaggagaaggccau

SEQ ID NO: 2471875 - RNA, 19 nt, Homo sapiens
  misc_RNA (1)...(19): siRNA sense strand
ugcagaaaugagugcguua

SEQ ID NO: 2471876 - RNA, 19 nt, Homo sapiens
  misc_RNA (1)...(19): siRNA sense strand
agagaaacaugaaggagcu

SEQ ID NO: 2471877 - RNA, 19 nt, Homo sapiens
  misc_RNA (1)...(19): siRNA sense strand
ccauaaaagacaugaaaag

SEQ ID NO: 2471878 - RNA, 19 nt, Homo sapiens
  misc_RNA (1)...(19): siRNA sense strand
aagcaaacaaggagcugau

SEQ ID NO: 2471879 - RNA, 19 nt, Homo sapiens
  misc_RNA (1)...(19): siRNA sense strand
gcuacaucagccaagaaua

SEQ ID NO: 2471880 - RNA, 19 nt, Homo sapiens
  misc_RNA (1)...(19): siRNA sense strand
cgaccucaaauaaggagaa

SEQ ID NO: 2471881 - RNA, 19 nt, Homo sapiens
  misc_RNA (1)...(19): siRNA sense strand
aggcagagagaaacaugaa

SEQ ID NO: 2471882 - RNA, 19 nt, Homo sapiens
  misc_RNA (1)...(19): siRNA sense strand
ccaaagagaaauuagccca

SEQ ID NO: 2471883 - RNA, 19 nt, Homo sapiens
  misc_RNA (1)...(19): siRNA sense strand
cguuacuggccaaagcuua

SEQ ID NO: 2471884 - RNA, 19 nt, Homo sapiens
  misc_RNA (1)...(19): siRNA sense strand
ggccaaagcuuaugccaug

SEQ ID NO: 2471885 - RNA, 19 nt, Homo sapiens
  misc_RNA (1)...(19): siRNA sense strand
auauaaaggagguguuugu

SEQ ID NO: 2471886 - RNA, 19 nt, Homo sapiens
  misc_RNA (1)...(19): siRNA sense strand
gagagagugaagaggaaac

SEQ ID NO: 2471887 - RNA, 19 nt, Homo sapiens
  misc_RNA (1)...(19): siRNA sense strand
aaagagaaggagaaggcca

SEQ ID NO: 2471888 - RNA, 19 nt, Homo sapiens
  misc_RNA (1)...(19): siRNA sense strand
aaugaauacucaagcaaac

SEQ ID NO: 2471889 - RNA, 19 nt, Homo sapiens
  misc_RNA (1)...(19): siRNA sense strand
gagauauaaacaugaccau

SEQ ID NO: 2471890 - RNA, 19 nt, Homo sapiens
  misc_RNA (1)...(19): siRNA sense strand
gugcacgagcucuggccaa

SEQ ID NO: 2471891 - RNA, 19 nt, Homo sapiens
  misc_RNA (1)...(19): siRNA sense strand
cauugggcucagaggauuu

SEQ ID NO: 2471892 - RNA, 19 nt, Homo sapiens
  misc_RNA (1)...(19): siRNA sense strand
augacagagcugagaauaa

SEQ ID NO: 2471893 - RNA, 19 nt, Homo sapiens
  misc_RNA (1)...(19): siRNA sense strand
gcauggacaaagagcgcua

SEQ ID NO: 2471894 - RNA, 19 nt, Homo sapiens
  misc_RNA (1)...(19): siRNA sense strand
gcuaugagcuccaggguag

SEQ ID NO: 2471895 - RNA, 19 nt, Homo sapiens
  misc_RNA (1)...(19): siRNA sense strand
gauuaugccuccagcccua

SEQ ID NO: 2471896 - RNA, 19 nt, Homo sapiens
  misc_RNA (1)...(19): siRNA sense strand
aggaagagacacagcagau

SEQ ID NO: 2471897 - RNA, 19 nt, Homo sapiens
  misc_RNA (1)...(19): siRNA sense strand
acucaaugccccagagaau

SEQ ID NO: 2471898 - RNA, 19 nt, Homo sapiens
  misc_RNA (1)...(19): siRNA sense strand
ccuagaaucaagugcccaa

SEQ ID NO: 2471899 - RNA, 19 nt, Homo sapiens
  misc_RNA (1)...(19): siRNA sense strand
ugguggagcuggugggugu

SEQ ID NO: 2471900 - RNA, 19 nt, Homo sapiens
  misc_RNA (1)...(19): siRNA sense strand
ggugauaauuauggagcca

SEQ ID NO: 2471901 - RNA, 19 nt, Homo sapiens
  misc_RNA (1)...(19): siRNA sense strand
gagacacagcagauggaau

SEQ ID NO: 2471902 - RNA, 19 nt, Homo sapiens
  misc_RNA (1)...(19): siRNA sense strand
cgucaaugugggugucaga

SEQ ID NO: 2471903 - RNA, 19 nt, Homo sapiens
  misc_RNA (1)...(19): siRNA sense strand
ccaacuuuccagaaggaga

SEQ ID NO: 2471904 - RNA, 19 nt, Homo sapiens
  misc_RNA (1)...(19): siRNA sense strand
agacgaugaagucggguau

SEQ ID NO: 2471905 - RNA, 19 nt, Homo sapiens
  misc_RNA (1)...(19): siRNA sense strand
cuaugacagagcugagaau

SEQ ID NO: 2471906 - RNA, 19 nt, Homo sapiens
  misc_RNA (1)...(19): siRNA sense strand
cagaaggagaccacaagau

SEQ ID NO: 2471907 - RNA, 19 nt, Homo sapiens
  misc_RNA (1)...(19): siRNA sense strand
acccgaaggaagagacaca

SEQ ID NO: 2471908 - RNA, 19 nt, Homo sapiens
  misc_RNA (1)...(19): siRNA sense strand
caguauggugcuaguggau

SEQ ID NO: 2471909 - RNA, 19 nt, Homo sapiens
  misc_RNA (1)...(19): siRNA sense strand
uggaaguccgggagagaau

SEQ ID NO: 2471910 - RNA, 19 nt, Homo sapiens
  misc_RNA (1)...(19): siRNA sense strand
ggaccagauaacaaaggaa

SEQ ID NO: 2471911 - RNA, 19 nt, Homo sapiens
  misc_RNA (1)...(19): siRNA sense strand
ggacagaucuacuaccuga

SEQ ID NO: 2471912 - RNA, 19 nt, Homo sapiens
  misc_RNA (1)...(19): siRNA sense strand
gagagaauacacagagcca

SEQ ID NO: 2471913 - RNA, 19 nt, Homo sapiens
  misc_RNA (1)...(19): siRNA sense strand
aggacaagauauggaaaca

SEQ ID NO: 2471914 - RNA, 19 nt, Homo sapiens
  misc_RNA (1)...(19): siRNA sense strand
agcuagaagaaaugaucaa

SEQ ID NO: 2471915 - RNA, 19 nt, Homo sapiens
  misc_RNA (1)...(19): siRNA sense strand
gagaauacacagagccauc

SEQ ID NO: 2471916 - RNA, 19 nt, Homo sapiens
  misc_RNA (1)...(19): siRNA sense strand
gaacaggaauacauggaag

SEQ ID NO: 2471917 - RNA, 19 nt, Homo sapiens
  misc_RNA (1)...(19): siRNA sense strand
uacaaaggagacagagaau

SEQ ID NO: 2471918 - RNA, 19 nt, Homo sapiens
  misc_RNA (1)...(19): siRNA sense strand
ggaauuuacaaaggagaca

SEQ ID NO: 2471919 - RNA, 19 nt, Homo sapiens
  misc_RNA (1)...(19): siRNA sense strand
cguggagauuacaggacca

SEQ ID NO: 2471920 - RNA, 19 nt, Homo sapiens
  misc_RNA (1)...(19): siRNA sense strand
uuuacaaaggagacagaga

SEQ ID NO: 2471921 - RNA, 19 nt, Homo sapiens
  misc_RNA (1)...(19): siRNA sense strand
gagccaaguucaaacgcaa

SEQ ID NO: 2471922 - RNA, 19 nt, Homo sapiens
  misc_RNA (1)...(19): siRNA sense strand
ccaagaagcucaggcggaa

SEQ ID NO: 2471923 - RNA, 19 nt, Homo sapiens
  misc_RNA (1)...(19): siRNA sense strand
cugacaaagaagagaacca

SEQ ID NO: 2471924 - RNA, 19 nt, Homo sapiens
  misc_RNA (1)...(19): siRNA sense strand
ccacagagaagaagacgga

SEQ ID NO: 2471925 - RNA, 19 nt, Homo sapiens
  misc_RNA (1)...(19): siRNA sense strand
agaagaagacggagcagca

SEQ ID NO: 2471926 - RNA, 19 nt, Homo sapiens
  misc_RNA (1)...(19): siRNA sense strand
aguucaaacgcaaguacaa

SEQ ID NO: 2471927 - RNA, 19 nt, Homo sapiens
  misc_RNA (1)...(19): siRNA sense strand
agaaggaggcggagaagcu

SEQ ID NO: 2471928 - RNA, 19 nt, Homo sapiens
  misc_RNA (1)...(19): siRNA sense strand
uggaggagucggaugguga

SEQ ID NO: 2471929 - RNA, 19 nt, Homo sapiens
  misc_RNA (1)...(19): siRNA sense strand
ccaaagacguccucgccca

SEQ ID NO: 2471930 - RNA, 19 nt, Homo sapiens
  misc_RNA (1)...(19): siRNA sense strand
gccaagaagcucaggcgga

SEQ ID NO: 2471931 - RNA, 19 nt, Homo sapiens
  misc_RNA (1)...(19): siRNA sense strand
aaacgcaaguacaagguga

SEQ ID NO: 2471932 - RNA, 19 nt, Homo sapiens
  misc_RNA (1)...(19): siRNA sense strand
agaccaagaagaaaggagu

SEQ ID NO: 2471933 - RNA, 19 nt, Homo sapiens
  misc_RNA (1)...(19): siRNA sense strand
ggaaagaggcugacgcagu

SEQ ID NO: 2471934 - RNA, 19 nt, Homo sapiens
  misc_RNA (1)...(19): siRNA sense strand
ggaacugagaacagcaaaa

SEQ ID NO: 2471935 - RNA, 19 nt, Homo sapiens
  misc_RNA (1)...(19): siRNA sense strand
ggugacagacaaagagacu

SEQ ID NO: 2471936 - RNA, 19 nt, Homo sapiens
  misc_RNA (1)...(19): siRNA sense strand
cgaaaaggaaaauguguga

SEQ ID NO: 2471937 - RNA, 19 nt, Homo sapiens
  misc_RNA (1)...(19): siRNA sense strand
gaaguuaauuucaaggaac

SEQ ID NO: 2471938 - RNA, 19 nt, Homo sapiens
  misc_RNA (1)...(19): siRNA sense strand
cucaagugacacagaagaa

SEQ ID NO: 2471939 - RNA, 19 nt, Homo sapiens
  misc_RNA (1)...(19): siRNA sense strand
gcaugaggcagcucggaga

SEQ ID NO: 2471940 - RNA, 19 nt, Homo sapiens
  misc_RNA (1)...(19): siRNA sense strand
agaaccagcuauagcgcca

SEQ ID NO: 2471941 - RNA, 19 nt, Homo sapiens
  misc_RNA (1)...(19): siRNA sense strand
cuauggaucucuagaccga

SEQ ID NO: 2471942 - RNA, 19 nt, Homo sapiens
  misc_RNA (1)...(19): siRNA sense strand
cuaaaguuauggaggcaug

SEQ ID NO: 2471943 - RNA, 19 nt, Homo sapiens
  misc_RNA (1)...(19): siRNA sense strand
cagccgaagaggaugggaa

SEQ ID NO: 2471944 - RNA, 19 nt, Homo sapiens
  misc_RNA (1)...(19): siRNA sense strand
agccgaagaggaugggaaa

SEQ ID NO: 2471945 - RNA, 19 nt, Homo sapiens
  misc_RNA (1)...(19): siRNA sense strand
ccgaagaggaugggaaaau

SEQ ID NO: 2471946 - RNA, 19 nt, Homo sapiens
  misc_RNA (1)...(19): siRNA sense strand
gccuacagccgaagaggau

SEQ ID NO: 2471947 - RNA, 19 nt, Homo sapiens
  misc_RNA (1)...(19): siRNA sense strand
aggaaggaacugagaacac

SEQ ID NO: 2471948 - RNA, 19 nt, Homo sapiens
  misc_RNA (1)...(19): siRNA sense strand
gggaaacaguggaugccaa

SEQ ID NO: 2471949 - RNA, 19 nt, Homo sapiens
  misc_RNA (1)...(19): siRNA sense strand
ccgucgaauuauaggauau

SEQ ID NO: 2471950 - RNA, 19 nt, Homo sapiens
  misc_RNA (1)...(19): siRNA sense strand
ccuacaagucauaaagcua

SEQ ID NO: 2471951 - RNA, 19 nt, Homo sapiens
  misc_RNA (1)...(19): siRNA sense strand
ggguaaauggucagagucu

SEQ ID NO: 2471952 - RNA, 19 nt, Homo sapiens
  misc_RNA (1)...(19): siRNA sense strand
acccuaugaaugugaaaua

SEQ ID NO: 2471953 - RNA, 19 nt, Homo sapiens
  misc_RNA (1)...(19): siRNA sense strand
gugaagaaguaacuggcca

SEQ ID NO: 2471954 - RNA, 19 nt, Homo sapiens
  misc_RNA (1)...(19): siRNA sense strand
ggucagagucucccgguca

SEQ ID NO: 2471955 - RNA, 19 nt, Homo sapiens
  misc_RNA (1)...(19): siRNA sense strand
acucagugucacaaggaau

SEQ ID NO: 2471956 - RNA, 19 nt, Homo sapiens
  misc_RNA (1)...(19): siRNA sense strand
ccuaugaaugugaaauaca

SEQ ID NO: 2471957 - RNA, 19 nt, Homo sapiens
  misc_RNA (1)...(19): siRNA sense strand
cucugaugcuuuaguacaa

SEQ ID NO: 2471958 - RNA, 19 nt, Homo sapiens
  misc_RNA (1)...(19): siRNA sense strand
acagcaaucgagagacaau

SEQ ID NO: 2471959 - RNA, 19 nt, Homo sapiens
  misc_RNA (1)...(19): siRNA sense strand
acuacaaagaacagcggau

SEQ ID NO: 2471960 - RNA, 19 nt, Homo sapiens
  misc_RNA (1)...(19): siRNA sense strand
ggacccuaugaaugugaaa

SEQ ID NO: 2471961 - RNA, 19 nt, Homo sapiens
  misc_RNA (1)...(19): siRNA sense strand
aggcaaaaguagaagaaaa

SEQ ID NO: 2471962 - RNA, 19 nt, Homo sapiens
  misc_RNA (1)...(19): siRNA sense strand
cguccauagaacaggcaaa

SEQ ID NO: 2471963 - RNA, 19 nt, Homo sapiens
  misc_RNA (1)...(19): siRNA sense strand
ccuugaacuugaagagcuu

SEQ ID NO: 2471964 - RNA, 19 nt, Homo sapiens
  misc_RNA (1)...(19): siRNA sense strand
caucauuaacagagagaag

SEQ ID NO: 2471965 - RNA, 19 nt, Homo sapiens
  misc_RNA (1)...(19): siRNA sense strand
gcaacaagcugguggaugg

SEQ ID NO: 2471966 - RNA, 19 nt, Homo sapiens
  misc_RNA (1)...(19): siRNA sense strand
ccgaggaggccuaugacau

SEQ ID NO: 2471967 - RNA, 19 nt, Homo sapiens
  misc_RNA (1)...(19): siRNA sense strand
cuugaagagcuuauuacaa

SEQ ID NO: 2471968 - RNA, 19 nt, Homo sapiens
  misc_RNA (1)...(19): siRNA sense strand
ggauaaaccuggcaagucg

SEQ ID NO: 2471969 - RNA, 19 nt, Homo sapiens
  misc_RNA (1)...(19): siRNA sense strand
gggugaugucuguggaaau

SEQ ID NO: 2471970 - RNA, 19 nt, Homo sapiens
  misc_RNA (1)...(19): siRNA sense strand
cagcaaaauaggaaaccaa

SEQ ID NO: 2471971 - RNA, 19 nt, Homo sapiens
  misc_RNA (1)...(19): siRNA sense strand
aguaaaggccacagccaga

SEQ ID NO: 2471972 - RNA, 19 nt, Homo sapiens
  misc_RNA (1)...(19): siRNA sense strand
cagaaggaguauuuggcga

SEQ ID NO: 2471973 - RNA, 19 nt, Homo sapiens
  misc_RNA (1)...(19): siRNA sense strand
gagaaaggcugggacgaca

SEQ ID NO: 2471974 - RNA, 19 nt, Homo sapiens
  misc_RNA (1)...(19): siRNA sense strand
uggaagacuuuguugcaga

SEQ ID NO: 2471975 - RNA, 19 nt, Homo sapiens
  misc_RNA (1)...(19): siRNA sense strand
guacaggaagcaauggcaa

SEQ ID NO: 2471976 - RNA, 19 nt, Homo sapiens
  misc_RNA (1)...(19): siRNA sense strand
aggaggacuaggagugauu

SEQ ID NO: 2471977 - RNA, 19 nt, Homo sapiens
  misc_RNA (1)...(19): siRNA sense strand
aaugagcaaaguugggaaa

SEQ ID NO: 2471978 - RNA, 19 nt, Homo sapiens
  misc_RNA (1)...(19): siRNA sense strand
ccuugaugaucuugccauu

SEQ ID NO: 2471979 - RNA, 19 nt, Homo sapiens
  misc_RNA (1)...(19): siRNA sense strand
guaccuggguucuggcuga

SEQ ID NO: 2471980 - RNA, 19 nt, Homo sapiens
  misc_RNA (1)...(19): siRNA sense strand
cagccagaugccagaguau

SEQ ID NO: 2471981 - RNA, 19 nt, Homo sapiens
  misc_RNA (1)...(19): siRNA sense strand
agucaaguuaacaggauca

SEQ ID NO: 2471982 - RNA, 19 nt, Homo sapiens
  misc_RNA (1)...(19): siRNA sense strand
agagaacuugagagagauu

SEQ ID NO: 2471983 - RNA, 19 nt, Homo sapiens
  misc_RNA (1)...(19): siRNA sense strand
cuucuguggcugaaagaga

SEQ ID NO: 2471984 - RNA, 19 nt, Homo sapiens
  misc_RNA (1)...(19): siRNA sense strand
gaaugaagguggucagagc

SEQ ID NO: 2471985 - RNA, 19 nt, Homo sapiens
  misc_RNA (1)...(19): siRNA sense strand
acacuaaagggcaugguca

SEQ ID NO: 2471986 - RNA, 19 nt, Homo sapiens
  misc_RNA (1)...(19): siRNA sense strand
uacaggaagcaauggcaaa

SEQ ID NO: 2471987 - RNA, 19 nt, Homo sapiens
  misc_RNA (1)...(19): siRNA sense strand
ccgaaacuucuguggcuga

SEQ ID NO: 2471988 - RNA, 19 nt, Homo sapiens
  misc_RNA (1)...(19): siRNA sense strand
gagagagauuugcugggau

SEQ ID NO: 2471989 - RNA, 19 nt, Homo sapiens
  misc_RNA (1)...(19): siRNA sense strand
aggaguauuuggcgaucau

SEQ ID NO: 2471990 - RNA, 19 nt, Homo sapiens
  misc_RNA (1)...(19): siRNA sense strand
cgcaagagguggaguccgu

SEQ ID NO: 2471991 - RNA, 19 nt, Homo sapiens
  misc_RNA (1)...(19): siRNA sense strand
agaaggaguauuuggcgau

SEQ ID NO: 2471992 - RNA, 19 nt, Homo sapiens
  misc_RNA (1)...(19): siRNA sense strand
ugcccaugcaggaggacua

SEQ ID NO: 2471993 - RNA, 19 nt, Homo sapiens
  misc_RNA (1)...(19): siRNA sense strand
gugaaauacaggaccgaua

SEQ ID NO: 2471994 - RNA, 19 nt, Homo sapiens
  misc_RNA (1)...(19): siRNA sense strand
auacaguggaagagaaaca

SEQ ID NO: 2471995 - RNA, 19 nt, Homo sapiens
  misc_RNA (1)...(19): siRNA sense strand
ccugugaaccuaagaguga

SEQ ID NO: 2471996 - RNA, 19 nt, Homo sapiens
  misc_RNA (1)...(19): siRNA sense strand
ccaaaguuucugaggggaa

SEQ ID NO: 2471997 - RNA, 19 nt, Homo sapiens
  misc_RNA (1)...(19): siRNA sense strand
ggugaugagacuagagaag

SEQ ID NO: 2471998 - RNA, 19 nt, Homo sapiens
  misc_RNA (1)...(19): siRNA sense strand
acccuaugaaugugaaaua

SEQ ID NO: 2471999 - RNA, 19 nt, Homo sapiens
  misc_RNA (1)...(19): siRNA sense strand
guaaagcgacccauugaaa

SEQ ID NO: 2472000 - RNA, 19 nt, Homo sapiens
  misc_RNA (1)...(19): siRNA sense strand
aaccuaagagugagaacua

SEQ ID NO: 2472001 - RNA, 19 nt, Homo sapiens
  misc_RNA (1)...(19): siRNA sense strand
ccuaagagugagaacuaca

SEQ ID NO: 2472002 - RNA, 19 nt, Homo sapiens
  misc_RNA (1)...(19): siRNA sense strand
ggacccuaucaaugugaaa

SEQ ID NO: 2472003 - RNA, 19 nt, Homo sapiens
  misc_RNA (1)...(19): siRNA sense strand
guauauugcaggacccuau

SEQ ID NO: 2472004 - RNA, 19 nt, Homo sapiens
  misc_RNA (1)...(19): siRNA sense strand
cugccgaagucacgauuga

SEQ ID NO: 2472005 - RNA, 19 nt, Homo sapiens
  misc_RNA (1)...(19): siRNA sense strand
accuacauuugguggcuaa

SEQ ID NO: 2472006 - RNA, 19 nt, Homo sapiens
  misc_RNA (1)...(19): siRNA sense strand
acccuaucaaugugaaaua

SEQ ID NO: 2472007 - RNA, 19 nt, Homo sapiens
  misc_RNA (1)...(19): siRNA sense strand
agugagaacuacaccuaca

SEQ ID NO: 2472008 - RNA, 19 nt, Homo sapiens
  misc_RNA (1)...(19): siRNA sense strand
acaccuuacacaucauaaa

SEQ ID NO: 2472009 - RNA, 19 nt, Homo sapiens
  misc_RNA (1)...(19): siRNA sense strand
ggacccuaugaaugugaaa

SEQ ID NO: 2472010 - RNA, 19 nt, Homo sapiens
  misc_RNA (1)...(19): siRNA sense strand
guuucagcaaucaggacaa

SEQ ID NO: 2472011 - RNA, 19 nt, Homo sapiens
  misc_RNA (1)...(19): siRNA sense strand
agggaacuuuggugggaau

SEQ ID NO: 2472012 - RNA, 19 nt, Homo sapiens
  misc_RNA (1)...(19): siRNA sense strand
gggaauagcuucaugccag

SEQ ID NO: 2472013 - RNA, 19 nt, Homo sapiens
  misc_RNA (1)...(19): siRNA sense strand
uggaagugaucaaugcaca

SEQ ID NO: 2472014 - RNA, 19 nt, Homo sapiens
  misc_RNA (1)...(19): siRNA sense strand
cacacaugguacuaagcaa

SEQ ID NO: 2472015 - RNA, 19 nt, Homo sapiens
  misc_RNA (1)...(19): siRNA sense strand
uggaacaguggauucgaaa

SEQ ID NO: 2472016 - RNA, 19 nt, Homo sapiens
  misc_RNA (1)...(19): siRNA sense strand
guccaagaccugaaggguu

SEQ ID NO: 2472017 - RNA, 19 nt, Homo sapiens
  misc_RNA (1)...(19): siRNA sense strand
ccaagaaacuggcggagca

SEQ ID NO: 2472018 - RNA, 19 nt, Homo sapiens
  misc_RNA (1)...(19): siRNA sense strand
cagucuaccuugugggaca

SEQ ID NO: 2472019 - RNA, 19 nt, Homo sapiens
  misc_RNA (1)...(19): siRNA sense strand
gggaaauuugugaggccuu

SEQ ID NO: 2472020 - RNA, 19 nt, Homo sapiens
  misc_RNA (1)...(19): siRNA sense strand
uggccaggcuuguagaaaa

SEQ ID NO: 2472021 - RNA, 19 nt, Homo sapiens
  misc_RNA (1)...(19): siRNA sense strand
acauagaggacuuucgaca

SEQ ID NO: 2472022 - RNA, 19 nt, Homo sapiens
  misc_RNA (1)...(19): siRNA sense strand
ggagggagaaguuggcaca

SEQ ID NO: 2472023 - RNA, 19 nt, Homo sapiens
  misc_RNA (1)...(19): siRNA sense strand
aaguuugaccggagagcau

SEQ ID NO: 2472024 - RNA, 19 nt, Homo sapiens
  misc_RNA (1)...(19): siRNA sense strand
ccugugaaagagagcagaa

SEQ ID NO: 2472025 - RNA, 19 nt, Homo sapiens
  misc_RNA (1)...(19): siRNA sense strand
ugucauagccaacggagga

SEQ ID NO: 2472026 - RNA, 19 nt, Homo sapiens
  misc_RNA (1)...(19): siRNA sense strand
auucggacauagaggacuu

SEQ ID NO: 2472027 - RNA, 19 nt, Homo sapiens
  misc_RNA (1)...(19): siRNA sense strand
ggccaggcuuguagaaaau

SEQ ID NO: 2472028 - RNA, 19 nt, Homo sapiens
  misc_RNA (1)...(19): siRNA sense strand
cuugugaagcggauagaga

SEQ ID NO: 2472029 - RNA, 19 nt, Homo sapiens
  misc_RNA (1)...(19): siRNA sense strand
ggauagagaggacuggcau

SEQ ID NO: 2472030 - RNA, 19 nt, Homo sapiens
  misc_RNA (1)...(19): siRNA sense strand
uguuaaagggacacgcaga

SEQ ID NO: 2472031 - RNA, 19 nt, Homo sapiens
  misc_RNA (1)...(19): siRNA sense strand
ggccuugggaaguggugaa

SEQ ID NO: 2472032 - RNA, 19 nt, Homo sapiens
  misc_RNA (1)...(19): siRNA sense strand
gugaaagagagcagaacag

SEQ ID NO: 2472033 - RNA, 19 nt, Homo sapiens
  misc_RNA (1)...(19): siRNA sense strand
aagaugauucagugcaaga

SEQ ID NO: 2472034 - RNA, 19 nt, Homo sapiens
  misc_RNA (1)...(19): siRNA sense strand
cgaaaguaaagaagaagaa

SEQ ID NO: 2472035 - RNA, 19 nt, Homo sapiens
  misc_RNA (1)...(19): siRNA sense strand
acguaaagaaguagagaca

SEQ ID NO: 2472036 - RNA, 19 nt, Homo sapiens
  misc_RNA (1)...(19): siRNA sense strand
ggucacaacagaugagcaa

SEQ ID NO: 2472037 - RNA, 19 nt, Homo sapiens
  misc_RNA (1)...(19): siRNA sense strand
acaacuaacagaagagaau

SEQ ID NO: 2472038 - RNA, 19 nt, Homo sapiens
  misc_RNA (1)...(19): siRNA sense strand
uggaaauaauugagaagga

SEQ ID NO: 2472039 - RNA, 19 nt, Homo sapiens
  misc_RNA (1)...(19): siRNA sense strand
cgggauaaauacaagaaga

SEQ ID NO: 2472040 - RNA, 19 nt, Homo sapiens
  misc_RNA (1)...(19): siRNA sense strand
gggauaaauacaagaagau

SEQ ID NO: 2472041 - RNA, 19 nt, Homo sapiens
  misc_RNA (1)...(19): siRNA sense strand
uguagauggugaagaagaa

SEQ ID NO: 2472042 - RNA, 19 nt, Homo sapiens
  misc_RNA (1)...(19): siRNA sense strand
ggacaggucgcgaggucaa

SEQ ID NO: 2472043 - RNA, 19 nt, Homo sapiens
  misc_RNA (1)...(19): siRNA sense strand
gugaaacaagaaugggaua

SEQ ID NO: 2472044 - RNA, 19 nt, Homo sapiens
  misc_RNA (1)...(19): siRNA sense strand
ggaacaaguauuaggugau

SEQ ID NO: 2472045 - RNA, 19 nt, Homo sapiens
  misc_RNA (1)...(19): siRNA sense strand
gcugagaacaaaugaguca

SEQ ID NO: 2472046 - RNA, 19 nt, Homo sapiens
  misc_RNA (1)...(19): siRNA sense strand
caggagaaagugagaauga

SEQ ID NO: 2472047 - RNA, 19 nt, Homo sapiens
  misc_RNA (1)...(19): siRNA sense strand
caagcuacguugugggaca

SEQ ID NO: 2472048 - RNA, 19 nt, Homo sapiens
  misc_RNA (1)...(19): siRNA sense strand
augagaaugaguuggauaa

SEQ ID NO: 2472049 - RNA, 19 nt, Homo sapiens
  misc_RNA (1)...(19): siRNA sense strand
ugggagaagauuuggagaa

SEQ ID NO: 2472050 - RNA, 19 nt, Homo sapiens
  misc_RNA (1)...(19): siRNA sense strand
agaaagugagaaugagaau

SEQ ID NO: 2472051 - RNA, 19 nt, Homo sapiens
  misc_RNA (1)...(19): siRNA sense strand
caagaaagugcaagugaca

SEQ ID NO: 2472052 - RNA, 19 nt, Homo sapiens
  misc_RNA (1)...(19): siRNA sense strand
gcagaauugaaucgacaaa

SEQ ID NO: 2472053 - RNA, 19 nt, Homo sapiens
  misc_RNA (1)...(19): siRNA sense strand
ugcaagauguguuggagaa

SEQ ID NO: 2472054 - RNA, 19 nt, Homo sapiens
  misc_RNA (1)...(19): siRNA sense strand
agaacuguccugugauaaa

SEQ ID NO: 2472055 - RNA, 19 nt, Homo sapiens
  misc_RNA (1)...(19): siRNA sense strand
aggcagaagagcaacuuaa

SEQ ID NO: 2472056 - RNA, 19 nt, Homo sapiens
  misc_RNA (1)...(19): siRNA sense strand
gaguugaacaaacaagaaa

SEQ ID NO: 2472057 - RNA, 19 nt, Homo sapiens
  misc_RNA (1)...(19): siRNA sense strand
ccuuaaagagagugagauc

SEQ ID NO: 2472058 - RNA, 19 nt, Homo sapiens
  misc_RNA (1)...(19): siRNA sense strand
gguagaagaguuauggaca

SEQ ID NO: 2472059 - RNA, 19 nt, Homo sapiens
  misc_RNA (1)...(19): siRNA sense strand
uggaacaaguauuagguga

SEQ ID NO: 2472060 - RNA, 19 nt, Homo sapiens
  misc_RNA (1)...(19): siRNA sense strand
ccgaaaguaaagaagaaga

SEQ ID NO: 2472061 - RNA, 19 nt, Homo sapiens
  misc_RNA (1)...(19): siRNA sense strand
uguaagaaagacaccgaaa

SEQ ID NO: 2472062 - RNA, 19 nt, Homo sapiens
  misc_RNA (1)...(19): siRNA sense strand
ugauagagcagcagaaacu

SEQ ID NO: 2472063 - RNA, 19 nt, Homo sapiens
  misc_RNA (1)...(19): siRNA sense strand
gcaagauguguuggagaaa

SEQ ID NO: 2472064 - RNA, 19 nt, Homo sapiens
  misc_RNA (1)...(19): siRNA sense strand
gaaggagcaaagaggacaa

SEQ ID NO: 2472065 - RNA, 19 nt, Homo sapiens
  misc_RNA (1)...(19): siRNA sense strand
agaagaaggaacuguuaau

SEQ ID NO: 2472066 - RNA, 19 nt, Homo sapiens
  misc_RNA (1)...(19): siRNA sense strand
gccacagguagaagaguua

SEQ ID NO: 2472067 - RNA, 19 nt, Homo sapiens
  misc_RNA (1)...(19): siRNA sense strand
ugagaaacagaaugaagaa

SEQ ID NO: 2472068 - RNA, 19 nt, Homo sapiens
  misc_RNA (1)...(19): siRNA sense strand
ugaaacaagaaugggauaa

SEQ ID NO: 2472069 - RNA, 19 nt, Homo sapiens
  misc_RNA (1)...(19): siRNA sense strand
aaagaggacaauugaggua

SEQ ID NO: 2472070 - RNA, 19 nt, Homo sapiens
  misc_RNA (1)...(19): siRNA sense strand
aaugagaaugaguuggaua

SEQ ID NO: 2472071 - RNA, 19 nt, Homo sapiens
  misc_RNA (1)...(19): siRNA sense strand
ugaagaaucuacugagacu

SEQ ID NO: 2472072 - RNA, 19 nt, Homo sapiens
  misc_RNA (1)...(19): siRNA sense strand
agaaguagagacaaggcaa

SEQ ID NO: 2472073 - RNA, 19 nt, Homo sapiens
  misc_RNA (1)...(19): siRNA sense strand
agauugagaaacagaauga

SEQ ID NO: 2472074 - RNA, 19 nt, Homo sapiens
  misc_RNA (1)...(19): siRNA sense strand
aucgaagaauagagcauua

SEQ ID NO: 2472075 - RNA, 19 nt, Homo sapiens
  misc_RNA (1)...(19): siRNA sense strand
aagagcaaagauugagaaa

SEQ ID NO: 2472076 - RNA, 19 nt, Homo sapiens
  misc_RNA (1)...(19): siRNA sense strand
ggaggaacggauugcagaa

SEQ ID NO: 2472077 - RNA, 19 nt, Homo sapiens
  misc_RNA (1)...(19): siRNA sense strand
gucaggagaaagugagaau

SEQ ID NO: 2472078 - RNA, 19 nt, Homo sapiens
  misc_RNA (1)...(19): siRNA sense strand
caaacaagaaagugcaagu

SEQ ID NO: 2472079 - RNA, 19 nt, Homo sapiens
  misc_RNA (1)...(19): siRNA sense strand
aaaucgaagaauagagcau

SEQ ID NO: 2472080 - RNA, 19 nt, Homo sapiens
  misc_RNA (1)...(19): siRNA sense strand
ccugaagaaucuacugaga

SEQ ID NO: 2472081 - RNA, 19 nt, Homo sapiens
  misc_RNA (1)...(19): siRNA sense strand
ccaaauaggacuaauucca

SEQ ID NO: 2472082 - RNA, 19 nt, Homo sapiens
  misc_RNA (1)...(19): siRNA sense strand
gggagaagauuuggagaac

SEQ ID NO: 2472083 - RNA, 19 nt, Homo sapiens
  misc_RNA (1)...(19): siRNA sense strand
ggagaagauuuggagaaca

SEQ ID NO: 2472084 - RNA, 19 nt, Homo sapiens
  misc_RNA (1)...(19): siRNA sense strand
uauggaggcucguggaaaa

SEQ ID NO: 2472085 - RNA, 19 nt, Homo sapiens
  misc_RNA (1)...(19): siRNA sense strand
ugauacaugaaguggaaca

SEQ ID NO: 2472086 - RNA, 19 nt, Homo sapiens
  misc_RNA (1)...(19): siRNA sense strand
ggaagaguugccuguuaaa

SEQ ID NO: 2472087 - RNA, 19 nt, Homo sapiens
  misc_RNA (1)...(19): siRNA sense strand
gagaaaagaagauugucua

SEQ ID NO: 2472088 - RNA, 19 nt, Homo sapiens
  misc_RNA (1)...(19): siRNA sense strand
gugccagacccuccagaua

SEQ ID NO: 2472089 - RNA, 19 nt, Homo sapiens
  misc_RNA (1)...(19): siRNA sense strand
aagaaaggacauaaugaca

SEQ ID NO: 2472090 - RNA, 19 nt, Homo sapiens
  misc_RNA (1)...(19): siRNA sense strand
uggaaacagacgugaacaa

SEQ ID NO: 2472091 - RNA, 19 nt, Homo sapiens
  misc_RNA (1)...(19): siRNA sense strand
ccaaagcuccugugggcaa

SEQ ID NO: 2472092 - RNA, 19 nt, Homo sapiens
  misc_RNA (1)...(19): siRNA sense strand
ucuaauuccacuaggacua

SEQ ID NO: 2472093 - RNA, 19 nt, Homo sapiens
  misc_RNA (1)...(19): siRNA sense strand
ugggcaagaaagagaauau

SEQ ID NO: 2472094 - RNA, 19 nt, Homo sapiens
  misc_RNA (1)...(19): siRNA sense strand
gaggauauucggaggcuca

SEQ ID NO: 2472095 - RNA, 19 nt, Homo sapiens
  misc_RNA (1)...(19): siRNA sense strand
gaucaggauauuugaggau

SEQ ID NO: 2472096 - RNA, 19 nt, Homo sapiens
  misc_RNA (1)...(19): siRNA sense strand
ggacuagagaaguugccaa

SEQ ID NO: 2472097 - RNA, 19 nt, Homo sapiens
  misc_RNA (1)...(19): siRNA sense strand
acuucaagaugauggcauu

SEQ ID NO: 2472098 - RNA, 19 nt, Homo sapiens
  misc_RNA (1)...(19): siRNA sense strand
agagcaguuccgugaguaa

SEQ ID NO: 2472099 - RNA, 19 nt, Homo sapiens
  misc_RNA (1)...(19): siRNA sense strand
cggccaugccugaguccaa

SEQ ID NO: 2472100 - RNA, 19 nt, Homo sapiens
  misc_RNA (1)...(19): siRNA sense strand
ccuauagcuuugaggaacu

SEQ ID NO: 2472101 - RNA, 19 nt, Homo sapiens
  misc_RNA (1)...(19): siRNA sense strand
agccuauguuggaacgaaa

SEQ ID NO: 2472102 - RNA, 19 nt, Homo sapiens
  misc_RNA (1)...(19): siRNA sense strand
aguccaaaggaucaggaua

SEQ ID NO: 2472103 - RNA, 19 nt, Homo sapiens
  misc_RNA (1)...(19): siRNA sense strand
gaggaugaugacuuggaaa

SEQ ID NO: 2472104 - RNA, 19 nt, Homo sapiens
  misc_RNA (1)...(19): siRNA sense strand
aggaggaucuucuuggcaa

SEQ ID NO: 2472105 - RNA, 19 nt, Homo sapiens
  misc_RNA (1)...(19): siRNA sense strand
gugagaagcccaacagcca

SEQ ID NO: 2472106 - RNA, 19 nt, Homo sapiens
  misc_RNA (1)...(19): siRNA sense strand
cugaagaggaacugaugca

SEQ ID NO: 2472107 - RNA, 19 nt, Homo sapiens
  misc_RNA (1)...(19): siRNA sense strand
gggaagguccacugugcau

SEQ ID NO: 2472108 - RNA, 19 nt, Homo sapiens
  misc_RNA (1)...(19): siRNA sense strand
guccaacagugaugagcau

SEQ ID NO: 2472109 - RNA, 19 nt, Homo sapiens
  misc_RNA (1)...(19): siRNA sense strand
gugaagacgggaaggucca

SEQ ID NO: 2472110 - RNA, 19 nt, Homo sapiens
  misc_RNA (1)...(19): siRNA sense strand
ccugggacguagaugcaau

SEQ ID NO: 2472111 - RNA, 19 nt, Homo sapiens
  misc_RNA (1)...(19): siRNA sense strand
ggaucaggauauuugagga

SEQ ID NO: 2472112 - RNA, 19 nt, Homo sapiens
  misc_RNA (1)...(19): siRNA sense strand
gugcaauccaauagucuca

SEQ ID NO: 2472113 - RNA, 19 nt, Homo sapiens
  misc_RNA (1)...(19): siRNA sense strand
gccaaagccagaagaacca

SEQ ID NO: 2472114 - RNA, 19 nt, Homo sapiens
  misc_RNA (1)...(19): siRNA sense strand
cuggauaaggacaggccau

SEQ ID NO: 2472115 - RNA, 19 nt, Homo sapiens
  misc_RNA (1)...(19): siRNA sense strand
ggaugaugacuuggaaaca

SEQ ID NO: 2472116 - RNA, 19 nt, Homo sapiens
  misc_RNA (1)...(19): siRNA sense strand
gaugauuugaacucugaaa

SEQ ID NO: 2472117 - RNA, 19 nt, Homo sapiens
  misc_RNA (1)...(19): siRNA sense strand
gcacugagauagaagggau

SEQ ID NO: 2472118 - RNA, 19 nt, Homo sapiens
  misc_RNA (1)...(19): siRNA sense strand
agaacaaugguguggacaa

SEQ ID NO: 2472119 - RNA, 19 nt, Homo sapiens
  misc_RNA (1)...(19): siRNA sense strand
gcaacgagaccaacggcua

SEQ ID NO: 2472120 - RNA, 19 nt, Homo sapiens
  misc_RNA (1)...(19): siRNA sense strand
ccccauaggcacugagaua

SEQ ID NO: 2472121 - RNA, 19 nt, Homo sapiens
  misc_RNA (1)...(19): siRNA sense strand
agauagaagggaugaacau

SEQ ID NO: 2472122 - RNA, 19 nt, Homo sapiens
  misc_RNA (1)...(19): siRNA sense strand
caaagaaaggcgagcagga

SEQ ID NO: 2472123 - RNA, 19 nt, Homo sapiens
  misc_RNA (1)...(19): siRNA sense strand
ccaaagagacgguggacuc

SEQ ID NO: 2472124 - RNA, 19 nt, Homo sapiens
  misc_RNA (1)...(19): siRNA sense strand
ccauuauccuggaggccau

SEQ ID NO: 2472125 - RNA, 19 nt, Homo sapiens
  misc_RNA (1)...(19): siRNA sense strand
aggugaaaguggaagccau

SEQ ID NO: 2472126 - RNA, 19 nt, Homo sapiens
  misc_RNA (1)...(19): siRNA sense strand
agaagagcaacgagaccaa

SEQ ID NO: 2472127 - RNA, 19 nt, Homo sapiens
  misc_RNA (1)...(19): siRNA sense strand
ggaaauacaucuucgcauc

SEQ ID NO: 2472128 - RNA, 19 nt, Homo sapiens
  misc_RNA (1)...(19): siRNA sense strand
auuauaaagucgugaccca

SEQ ID NO: 2472129 - RNA, 19 nt, Homo sapiens
  misc_RNA (1)...(19): siRNA sense strand
gguguggacaagaggauca

SEQ ID NO: 2472130 - RNA, 19 nt, Homo sapiens
  misc_RNA (1)...(19): siRNA sense strand
gggaaauacaucuucgcau

SEQ ID NO: 2472131 - RNA, 19 nt, Homo sapiens
  misc_RNA (1)...(19): siRNA sense strand
aggaacuugcugaggugaa

SEQ ID NO: 2472132 - RNA, 19 nt, Homo sapiens
  misc_RNA (1)...(19): siRNA sense strand
agugcauugaagagaacaa

SEQ ID NO: 2472133 - RNA, 19 nt, Homo sapiens
  misc_RNA (1)...(19): siRNA sense strand
agaaaggcgagcaggaacu

SEQ ID NO: 2472134 - RNA, 19 nt, Homo sapiens
  misc_RNA (1)...(19): siRNA sense strand
agaucguggaaaugaaaga

SEQ ID NO: 2472135 - RNA, 19 nt, Homo sapiens
  misc_RNA (1)...(19): siRNA sense strand
ccaggaaaguagaagguca

SEQ ID NO: 2472136 - RNA, 19 nt, Homo sapiens
  misc_RNA (1)...(19): siRNA sense strand
ggacaugaagcuucgggaa

SEQ ID NO: 2472137 - RNA, 19 nt, Homo sapiens
  misc_RNA (1)...(19): siRNA sense strand
ucacuuugcucguggccaa

SEQ ID NO: 2472138 - RNA, 19 nt, Homo sapiens
  misc_RNA (1)...(19): siRNA sense strand
aggagagcccucaggaaau

SEQ ID NO: 2472139 - RNA, 19 nt, Homo sapiens
  misc_RNA (1)...(19): siRNA sense strand
gggacuugcgccuggagaa

SEQ ID NO: 2472140 - RNA, 19 nt, Homo sapiens
  misc_RNA (1)...(19): siRNA sense strand
uguccaaagccaaggagau

SEQ ID NO: 2472141 - RNA, 19 nt, Homo sapiens
  misc_RNA (1)...(19): siRNA sense strand
gggccaaucgggaugguca

SEQ ID NO: 2472142 - RNA, 19 nt, Homo sapiens
  misc_RNA (1)...(19): siRNA sense strand
agaaagcucuggaggccuu

SEQ ID NO: 2472143 - RNA, 19 nt, Homo sapiens
  misc_RNA (1)...(19): siRNA sense strand
guauggucgaauugggaau

SEQ ID NO: 2472144 - RNA, 19 nt, Homo sapiens
  misc_RNA (1)...(19): siRNA sense strand
gauccaugccugcaggaga

SEQ ID NO: 2472145 - RNA, 19 nt, Homo sapiens
  misc_RNA (1)...(19): siRNA sense strand
gcggaguuacccugggaca

SEQ ID NO: 2472146 - RNA, 19 nt, Homo sapiens
  misc_RNA (1)...(19): siRNA sense strand
acuugcgccuggagaacua

SEQ ID NO: 2472147 - RNA, 19 nt, Homo sapiens
  misc_RNA (1)...(19): siRNA sense strand
ccgaagaugcugaaggagu

SEQ ID NO: 2472148 - RNA, 19 nt, Homo sapiens
  misc_RNA (1)...(19): siRNA sense strand
gggcagagcuaacaccuga

SEQ ID NO: 2472149 - RNA, 19 nt, Homo sapiens
  misc_RNA (1)...(19): siRNA sense strand
acauggaacaggaaguaau

SEQ ID NO: 2472150 - RNA, 19 nt, Homo sapiens
  misc_RNA (1)...(19): siRNA sense strand
gcucagacagauaagccaa

SEQ ID NO: 2472151 - RNA, 19 nt, Homo sapiens
  misc_RNA (1)...(19): siRNA sense strand
guguaaccgggcagagcua

SEQ ID NO: 2472152 - RNA, 19 nt, Homo sapiens
  misc_RNA (1)...(19): siRNA sense strand
cggaggagaucgaguggcu

SEQ ID NO: 2472153 - RNA, 19 nt, Homo sapiens
  misc_RNA (1)...(19): siRNA sense strand
gaggagaucgaguggcuga

SEQ ID NO: 2472154 - RNA, 19 nt, Homo sapiens
  misc_RNA (1)...(19): siRNA sense strand
agauguggaaaguggugaa

SEQ ID NO: 2472155 - RNA, 19 nt, Homo sapiens
  misc_RNA (1)...(19): siRNA sense strand
agauagugugugaggucuu

SEQ ID NO: 2472156 - RNA, 19 nt, Homo sapiens
  misc_RNA (1)...(19): siRNA sense strand
cucucaagauaguguguga

SEQ ID NO: 2472157 - RNA, 19 nt, Homo sapiens
  misc_RNA (1)...(19): siRNA sense strand
ggaauaaaggaguggguga

SEQ ID NO: 2472158 - RNA, 19 nt, Homo sapiens
  misc_RNA (1)...(19): siRNA sense strand
gggugaagcagcugaccaa

SEQ ID NO: 2472159 - RNA, 19 nt, Homo sapiens
  misc_RNA (1)...(19): siRNA sense strand
ggggaaaggaggaggacuu

SEQ ID NO: 2472160 - RNA, 19 nt, Homo sapiens
  misc_RNA (1)...(19): siRNA sense strand
uuacagaagcagauggaga

SEQ ID NO: 2472161 - RNA, 19 nt, Homo sapiens
  misc_RNA (1)...(19): siRNA sense strand
aaaagaaguucgagggcau

SEQ ID NO: 2472162 - RNA, 19 nt, Homo sapiens
  misc_RNA (1)...(19): siRNA sense strand
agaggaagcugcaggagga

SEQ ID NO: 2472163 - RNA, 19 nt, Homo sapiens
  misc_RNA (1)...(19): siRNA sense strand
aggagaaugaaaugcuaaa

SEQ ID NO: 2472164 - RNA, 19 nt, Homo sapiens
  misc_RNA (1)...(19): siRNA sense strand
aggaaggcuuggagaaacu

SEQ ID NO: 2472165 - RNA, 19 nt, Homo sapiens
  misc_RNA (1)...(19): siRNA sense strand
caaggaagcugucggcaca

SEQ ID NO: 2472166 - RNA, 19 nt, Homo sapiens
  misc_RNA (1)...(19): siRNA sense strand
cacaagugucagagaucaa

SEQ ID NO: 2472167 - RNA, 19 nt, Homo sapiens
  misc_RNA (1)...(19): siRNA sense strand
gugcacuaucuucggaaua

SEQ ID NO: 2472168 - RNA, 19 nt, Homo sapiens
  misc_RNA (1)...(19): siRNA sense strand
agauugaacaccuucgaaa

SEQ ID NO: 2472169 - RNA, 19 nt, Homo sapiens
  misc_RNA (1)...(19): siRNA sense strand
cucaagagucagaugggaa

SEQ ID NO: 2472170 - RNA, 19 nt, Homo sapiens
  misc_RNA (1)...(19): siRNA sense strand
uagcugagcgggaggccaa

SEQ ID NO: 2472171 - RNA, 19 nt, Homo sapiens
  misc_RNA (1)...(19): siRNA sense strand
cggaacaagcugcugucaa

SEQ ID NO: 2472172 - RNA, 19 nt, Homo sapiens
  misc_RNA (1)...(19): siRNA sense strand
agguggaggagaaugaaau

SEQ ID NO: 2472173 - RNA, 19 nt, Homo sapiens
  misc_RNA (1)...(19): siRNA sense strand
ggugcuugaagaugagauu

SEQ ID NO: 2472174 - RNA, 19 nt, Homo sapiens
  misc_RNA (1)...(19): siRNA sense strand
cggauggcacagaagguuu

SEQ ID NO: 2472175 - RNA, 19 nt, Homo sapiens
  misc_RNA (1)...(19): siRNA sense strand
ggccagagagguuggggaa

SEQ ID NO: 2472176 - RNA, 19 nt, Homo sapiens
  misc_RNA (1)...(19): siRNA sense strand
acaaacgguuacagaagca

SEQ ID NO: 2472177 - RNA, 19 nt, Homo sapiens
  misc_RNA (1)...(19): siRNA sense strand
uugagaagcaauugggcca

SEQ ID NO: 2472178 - RNA, 19 nt, Homo sapiens
  misc_RNA (1)...(19): siRNA sense strand
uggaggagagcaacagcaa

SEQ ID NO: 2472179 - RNA, 19 nt, Homo sapiens
  misc_RNA (1)...(19): siRNA sense strand
cgaucauguuggcaggcuu

SEQ ID NO: 2472180 - RNA, 19 nt, Homo sapiens
  misc_RNA (1)...(19): siRNA sense strand
uggagcaacaucuggagaa

SEQ ID NO: 2472181 - RNA, 19 nt, Homo sapiens
  misc_RNA (1)...(19): siRNA sense strand
ugucagagaucaaggcccu

SEQ ID NO: 2472182 - RNA, 19 nt, Homo sapiens
  misc_RNA (1)...(19): siRNA sense strand
gguuacagaagcagaugga

SEQ ID NO: 2472183 - RNA, 19 nt, Homo sapiens
  misc_RNA (1)...(19): siRNA sense strand
gugaaggcccugcaggaca

SEQ ID NO: 2472184 - RNA, 19 nt, Homo sapiens
  misc_RNA (1)...(19): siRNA sense strand
cugucaagugagaugaaga

SEQ ID NO: 2472185 - RNA, 19 nt, Homo sapiens
  misc_RNA (1)...(19): siRNA sense strand
cagguggaggagaaugaaa

SEQ ID NO: 2472186 - RNA, 19 nt, Homo sapiens
  misc_RNA (1)...(19): siRNA sense strand
uggaaagaucucagaacaa

SEQ ID NO: 2472187 - RNA, 19 nt, Homo sapiens
  misc_RNA (1)...(19): siRNA sense strand
cagaacaaucagaugcaaa

SEQ ID NO: 2472188 - RNA, 19 nt, Homo sapiens
  misc_RNA (1)...(19): siRNA sense strand
gggaaaaccucaauugcua

SEQ ID NO: 2472189 - RNA, 19 nt, Homo sapiens
  misc_RNA (1)...(19): siRNA sense strand
aaguauuggugaugguauu

SEQ ID NO: 2472190 - RNA, 19 nt, Homo sapiens
  misc_RNA (1)...(19): siRNA sense strand
ggagaguauuuuagagaca

SEQ ID NO: 2472191 - RNA, 19 nt, Homo sapiens
  misc_RNA (1)...(19): siRNA sense strand
cuucaggcuuaaaggguau

SEQ ID NO: 2472192 - RNA, 19 nt, Homo sapiens
  misc_RNA (1)...(19): siRNA sense strand
aagcagaagaaaugguaga

SEQ ID NO: 2472193 - RNA, 19 nt, Homo sapiens
  misc_RNA (1)...(19): siRNA sense strand
ugguaaugcuauugaugga

SEQ ID NO: 2472194 - RNA, 19 nt, Homo sapiens
  misc_RNA (1)...(19): siRNA sense strand
ugucuuaaguauuggugau

SEQ ID NO: 2472195 - RNA, 19 nt, Homo sapiens
  misc_RNA (1)...(19): siRNA sense strand
ccagaaaugcuuuggguuc

SEQ ID NO: 2472196 - RNA, 19 nt, Homo sapiens
  misc_RNA (1)...(19): siRNA sense strand
ugaccgacagacugggaaa

SEQ ID NO: 2472197 - RNA, 19 nt, Homo sapiens
  misc_RNA (1)...(19): siRNA sense strand
guaccaugaagcuggaauu

SEQ ID NO: 2472198 - RNA, 19 nt, Homo sapiens
  misc_RNA (1)...(19): siRNA sense strand
caaugauggaucugaugaa

SEQ ID NO: 2472199 - RNA, 19 nt, Homo sapiens
  misc_RNA (1)...(19): siRNA sense strand
gcugaagcaaggacaguau

SEQ ID NO: 2472200 - RNA, 19 nt, Homo sapiens
  misc_RNA (1)...(19): siRNA sense strand
gcguacaugggcugaggaa

SEQ ID NO: 2472201 - RNA, 19 nt, Homo sapiens
  misc_RNA (1)...(19): siRNA sense strand
caguuggugaagagacuua

SEQ ID NO: 2472202 - RNA, 19 nt, Homo sapiens
  misc_RNA (1)...(19): siRNA sense strand
gagauauagugaagaggac

SEQ ID NO: 2472203 - RNA, 19 nt, Homo sapiens
  misc_RNA (1)...(19): siRNA sense strand
aguugaugcccuugguaau

SEQ ID NO: 2472204 - RNA, 19 nt, Homo sapiens
  misc_RNA (1)...(19): siRNA sense strand
uuauguugcuauuggucaa

SEQ ID NO: 2472205 - RNA, 19 nt, Homo sapiens
  misc_RNA (1)...(19): siRNA sense strand
ggagauauagugaagagga

SEQ ID NO: 2472206 - RNA, 19 nt, Homo sapiens
  misc_RNA (1)...(19): siRNA sense strand
ucuucaggcuuaaagggua

SEQ ID NO: 2472207 - RNA, 19 nt, Homo sapiens
  misc_RNA (1)...(19): siRNA sense strand
aggaaggagauauagugaa

SEQ ID NO: 2472208 - RNA, 19 nt, Homo sapiens
  misc_RNA (1)...(19): siRNA sense strand
guuccaugggagaguauuu

SEQ ID NO: 2472209 - RNA, 19 nt, Homo sapiens
  misc_RNA (1)...(19): siRNA sense strand
caguauucucccauggcua

SEQ ID NO: 2472210 - RNA, 19 nt, Homo sapiens
  misc_RNA (1)...(19): siRNA sense strand
ccaaaaugaacgaugcuuu

SEQ ID NO: 2472211 - RNA, 19 nt, Homo sapiens
  misc_RNA (1)...(19): siRNA sense strand
ccuugaacuuggaaccuga

SEQ ID NO: 2472212 - RNA, 19 nt, Homo sapiens
  misc_RNA (1)...(19): siRNA sense strand
gugaagaggacaggagcca

SEQ ID NO: 2472213 - RNA, 19 nt, Homo sapiens
  misc_RNA (1)...(19): siRNA sense strand
gugaacugauuauugguga

SEQ ID NO: 2472214 - RNA, 19 nt, Homo sapiens
  misc_RNA (1)...(19): siRNA sense strand
uuuuagagacaauggcaaa

SEQ ID NO: 2472215 - RNA, 19 nt, Homo sapiens
  misc_RNA (1)...(19): siRNA sense strand
uugaagaacaaguggcugu

SEQ ID NO: 2472216 - RNA, 19 nt, Homo sapiens
  misc_RNA (1)...(19): siRNA sense strand
gguaauggaguguggaaau

SEQ ID NO: 2472217 - RNA, 19 nt, Homo sapiens
  misc_RNA (1)...(19): siRNA sense strand
agagaaagucagaguguau

SEQ ID NO: 2472218 - RNA, 19 nt, Homo sapiens
  misc_RNA (1)...(19): siRNA sense strand
gcuaauugauuuugggauu

SEQ ID NO: 2472219 - RNA, 19 nt, Homo sapiens
  misc_RNA (1)...(19): siRNA sense strand
acgcaagaguuacuggaaa

SEQ ID NO: 2472220 - RNA, 19 nt, Homo sapiens
  misc_RNA (1)...(19): siRNA sense strand
cagagguuccagagaguaa

SEQ ID NO: 2472221 - RNA, 19 nt, Homo sapiens
  misc_RNA (1)...(19): siRNA sense strand
cgcaagaguuacuggaaaa

SEQ ID NO: 2472222 - RNA, 19 nt, Homo sapiens
  misc_RNA (1)...(19): siRNA sense strand
gauuuaaguggcagagaau

SEQ ID NO: 2472223 - RNA, 19 nt, Homo sapiens
  misc_RNA (1)...(19): siRNA sense strand
ggaucuaaaccaaguggaa

SEQ ID NO: 2472224 - RNA, 19 nt, Homo sapiens
  misc_RNA (1)...(19): siRNA sense strand
ugaaauauguucugggcca

SEQ ID NO: 2472225 - RNA, 19 nt, Homo sapiens
  misc_RNA (1)...(19): siRNA sense strand
cacuagaaaugcuggaaau

SEQ ID NO: 2472226 - RNA, 19 nt, Homo sapiens
  misc_RNA (1)...(19): siRNA sense strand
caaauuaugaugauggcaa

SEQ ID NO: 2472227 - RNA, 19 nt, Homo sapiens
  misc_RNA (1)...(19): siRNA sense strand
cuauagugguggugaaagu

SEQ ID NO: 2472228 - RNA, 19 nt, Homo sapiens
  misc_RNA (1)...(19): siRNA sense strand
acuuagaagaagcagauaa

SEQ ID NO: 2472229 - RNA, 19 nt, Homo sapiens
  misc_RNA (1)...(19): siRNA sense strand
ccgauauuccagagaaaga

SEQ ID NO: 2472230 - RNA, 19 nt, Homo sapiens
  misc_RNA (1)...(19): siRNA sense strand
cuagaauucaagugagauu

SEQ ID NO: 2472231 - RNA, 19 nt, Homo sapiens
  misc_RNA (1)...(19): siRNA sense strand
cauaaugaacaaagugaga

SEQ ID NO: 2472232 - RNA, 19 nt, Homo sapiens
  misc_RNA (1)...(19): siRNA sense strand
cuccagagagaaugggaaa

SEQ ID NO: 2472233 - RNA, 19 nt, Homo sapiens
  misc_RNA (1)...(19): siRNA sense strand
uuucaaauggccagagcaa

SEQ ID NO: 2472234 - RNA, 19 nt, Homo sapiens
  misc_RNA (1)...(19): siRNA sense strand
gggaaaucuaagucaaaga

SEQ ID NO: 2472235 - RNA, 19 nt, Homo sapiens
  misc_RNA (1)...(19): siRNA sense strand
gucacaagguaaugucaaa

SEQ ID NO: 2472236 - RNA, 19 nt, Homo sapiens
  misc_RNA (1)...(19): siRNA sense strand
gagcaguaccacuagaaau

SEQ ID NO: 2472237 - RNA, 19 nt, Homo sapiens
  misc_RNA (1)...(19): siRNA sense strand
ggacagacuacuaaagcca

SEQ ID NO: 2472238 - RNA, 19 nt, Homo sapiens
  misc_RNA (1)...(19): siRNA sense strand
ccacuagaaaugcuggaaa

SEQ ID NO: 2472239 - RNA, 19 nt, Homo sapiens
  misc_RNA (1)...(19): siRNA sense strand
agaaagucagaguguauua

SEQ ID NO: 2472240 - RNA, 19 nt, Homo sapiens
  misc_RNA (1)...(19): siRNA sense strand
acaaagugagagacauuaa

SEQ ID NO: 2472241 - RNA, 19 nt, Homo sapiens
  misc_RNA (1)...(19): siRNA sense strand
ucccgauauuccagagaaa

SEQ ID NO: 2472242 - RNA, 19 nt, Homo sapiens
  misc_RNA (1)...(19): siRNA sense strand
gcagauaggaaguggaggu

SEQ ID NO: 2472243 - RNA, 19 nt, Homo sapiens
  misc_RNA (1)...(19): siRNA sense strand
agguauuucagguguuaaa

SEQ ID NO: 2472244 - RNA, 19 nt, Homo sapiens
  misc_RNA (1)...(19): siRNA sense strand
cagaaauagguuaccggaa

SEQ ID NO: 2472245 - RNA, 19 nt, Homo sapiens
  misc_RNA (1)...(19): siRNA sense strand
ccaccaauaucaacaucua

SEQ ID NO: 2472246 - RNA, 19 nt, Homo sapiens
  misc_RNA (1)...(19): siRNA sense strand
augaaugcauuucgguuaa

SEQ ID NO: 2472247 - RNA, 19 nt, Homo sapiens
  misc_RNA (1)...(19): siRNA sense strand
ccaaaugcaaccagauaca

SEQ ID NO: 2472248 - RNA, 19 nt, Homo sapiens
  misc_RNA (1)...(19): siRNA sense strand
uaaugaacaaagugagaga

SEQ ID NO: 2472249 - RNA, 19 nt, Homo sapiens
  misc_RNA (1)...(19): siRNA sense strand
ggaaauugcccugcggaau

SEQ ID NO: 2472250 - RNA, 19 nt, Homo sapiens
  misc_RNA (1)...(19): siRNA sense strand
aauacagagcagaaacaua

SEQ ID NO: 2472251 - RNA, 19 nt, Homo sapiens
  misc_RNA (1)...(19): siRNA sense strand
agagagaaugggaaaucua

SEQ ID NO: 2472252 - RNA, 19 nt, Homo sapiens
  misc_RNA (1)...(19): siRNA sense strand
augaacaaagugagagaca

SEQ ID NO: 2472253 - RNA, 19 nt, Homo sapiens
  misc_RNA (1)...(19): siRNA sense strand
aguggcaaucuaagagaaa

SEQ ID NO: 2472254 - RNA, 19 nt, Homo sapiens
  misc_RNA (1)...(19): siRNA sense strand
cagagcaaacugcaagaaa

SEQ ID NO: 2472255 - RNA, 19 nt, Homo sapiens
  misc_RNA (1)...(19): siRNA sense strand
cagaauaggaacaacaguu

SEQ ID NO: 2472256 - RNA, 19 nt, Homo sapiens
  misc_RNA (1)...(19): siRNA sense strand
auggaaugcuaaagcuaau

SEQ ID NO: 2472257 - RNA, 19 nt, Homo sapiens
  misc_RNA (1)...(19): siRNA sense strand
ugcuagaauucaagugaga

SEQ ID NO: 2472258 - RNA, 19 nt, Homo sapiens
  misc_RNA (1)...(19): siRNA sense strand
uggaaauugcccugcggaa

SEQ ID NO: 2472259 - RNA, 19 nt, Homo sapiens
  misc_RNA (1)...(19): siRNA sense strand
agaucagaaugccgagauu

SEQ ID NO: 2472260 - RNA, 19 nt, Homo sapiens
  misc_RNA (1)...(19): siRNA sense strand
aucuaaaccaaguggaaau

SEQ ID NO: 2472261 - RNA, 19 nt, Homo sapiens
  misc_RNA (1)...(19): siRNA sense strand
aaguuaauacagagcagaa

SEQ ID NO: 2472262 - RNA, 19 nt, Homo sapiens
  misc_RNA (1)...(19): siRNA sense strand
caguuaaccaaauggccaa

SEQ ID NO: 2472263 - RNA, 19 nt, Homo sapiens
  misc_RNA (1)...(19): siRNA sense strand
cagaggaggaaaagaagaa

SEQ ID NO: 2472264 - RNA, 19 nt, Homo sapiens
  misc_RNA (1)...(19): siRNA sense strand
uagaagaagcagauaacca

SEQ ID NO: 2472265 - RNA, 19 nt, Homo sapiens
  misc_RNA (1)...(19): siRNA sense strand
guguggaaauauugaucuu

SEQ ID NO: 2472266 - RNA, 19 nt, Homo sapiens
  misc_RNA (1)...(19): siRNA sense strand
gaaauauguucugggccaa

SEQ ID NO: 2472267 - RNA, 19 nt, Homo sapiens
  misc_RNA (1)...(19): siRNA sense strand
ucaaauggccagagcaaac

SEQ ID NO: 2472268 - RNA, 19 nt, Homo sapiens
  misc_RNA (1)...(19): siRNA sense strand
aggcuaaacuagaagugaa

SEQ ID NO: 2472269 - RNA, 19 nt, Homo sapiens
  misc_RNA (1)...(19): siRNA sense strand
augaagaagcacuggcaaa

SEQ ID NO: 2472270 - RNA, 19 nt, Homo sapiens
  misc_RNA (1)...(19): siRNA sense strand
ggcuaaacuagaagugaaa

SEQ ID NO: 2472271 - RNA, 19 nt, Homo sapiens
  misc_RNA (1)...(19): siRNA sense strand
agaagauagaagagaauga

SEQ ID NO: 2472272 - RNA, 19 nt, Homo sapiens
  misc_RNA (1)...(19): siRNA sense strand
aggaucagucauugagaaa

SEQ ID NO: 2472273 - RNA, 19 nt, Homo sapiens
  misc_RNA (1)...(19): siRNA sense strand
gcugaagaugcgagauauu

SEQ ID NO: 2472274 - RNA, 19 nt, Homo sapiens
  misc_RNA (1)...(19): siRNA sense strand
uggcaaggauaguggaacu

SEQ ID NO: 2472275 - RNA, 19 nt, Homo sapiens
  misc_RNA (1)...(19): siRNA sense strand
guacagagccagauggacu

SEQ ID NO: 2472276 - RNA, 19 nt, Homo sapiens
  misc_RNA (1)...(19): siRNA sense strand
guucaacagaguuuggaaa

SEQ ID NO: 2472277 - RNA, 19 nt, Homo sapiens
  misc_RNA (1)...(19): siRNA sense strand
caguaguggcauuaacaaa

SEQ ID NO: 2472278 - RNA, 19 nt, Homo sapiens
  misc_RNA (1)...(19): siRNA sense strand
caaaaucaagcuagagaaa

SEQ ID NO: 2472279 - RNA, 19 nt, Homo sapiens
  misc_RNA (1)...(19): siRNA sense strand
aagcauugacagaagaaau

SEQ ID NO: 2472280 - RNA, 19 nt, Homo sapiens
  misc_RNA (1)...(19): siRNA sense strand
cugcagaacgacaaggcua

SEQ ID NO: 2472281 - RNA, 19 nt, Homo sapiens
  misc_RNA (1)...(19): siRNA sense strand
cggcugaguugcaggggaa

SEQ ID NO: 2472282 - RNA, 19 nt, Homo sapiens
  misc_RNA (1)...(19): siRNA sense strand
caggaugagcugacaacua

SEQ ID NO: 2472283 - RNA, 19 nt, Homo sapiens
  misc_RNA (1)...(19): siRNA sense strand
aguuaaguaugaugaguga

SEQ ID NO: 2472284 - RNA, 19 nt, Homo sapiens
  misc_RNA (1)...(19): siRNA sense strand
ugacagaagaaaugaaacu

SEQ ID NO: 2472285 - RNA, 19 nt, Homo sapiens
  misc_RNA (1)...(19): siRNA sense strand
uaaacagagagaagagauu

SEQ ID NO: 2472286 - RNA, 19 nt, Homo sapiens
  misc_RNA (1)...(19): siRNA sense strand
guuuagaagaagaauguga

SEQ ID NO: 2472287 - RNA, 19 nt, Homo sapiens
  misc_RNA (1)...(19): siRNA sense strand
ugucaucaguaguggcauu

SEQ ID NO: 2472288 - RNA, 19 nt, Homo sapiens
  misc_RNA (1)...(19): siRNA sense strand
agaaagaaaaccagcgaau

SEQ ID NO: 2472289 - RNA, 19 nt, Homo sapiens
  misc_RNA (1)...(19): siRNA sense strand
cuaaggaagcauugacaga

SEQ ID NO: 2472290 - RNA, 19 nt, Homo sapiens
  misc_RNA (1)...(19): siRNA sense strand
gagagaagagauugacaca

SEQ ID NO: 2472291 - RNA, 19 nt, Homo sapiens
  misc_RNA (1)...(19): siRNA sense strand
aaacaagaaaaguggagaa

SEQ ID NO: 2472292 - RNA, 19 nt, Homo sapiens
  misc_RNA (1)...(19): siRNA sense strand
gcugaagaauacagguagu

SEQ ID NO: 2472293 - RNA, 19 nt, Homo sapiens
  misc_RNA (1)...(19): siRNA sense strand
gagaaaacuacaacaggaa

SEQ ID NO: 2472294 - RNA, 19 nt, Homo sapiens
  misc_RNA (1)...(19): siRNA sense strand
acccggaaguacauggaaa

SEQ ID NO: 2472295 - RNA, 19 nt, Homo sapiens
  misc_RNA (1)...(19): siRNA sense strand
acaguaagucagugcauuu

SEQ ID NO: 2472296 - RNA, 19 nt, Homo sapiens
  misc_RNA (1)...(19): siRNA sense strand
ugccaagaggguagaacua

SEQ ID NO: 2472297 - RNA, 19 nt, Homo sapiens
  misc_RNA (1)...(19): siRNA sense strand
ccauugagaagcugcagaa

SEQ ID NO: 2472298 - RNA, 19 nt, Homo sapiens
  misc_RNA (1)...(19): siRNA sense strand
cuuuaaaggagcaacugaa

SEQ ID NO: 2472299 - RNA, 19 nt, Homo sapiens
  misc_RNA (1)...(19): siRNA sense strand
cuaaacuggagcaggaaaa

SEQ ID NO: 2472300 - RNA, 19 nt, Homo sapiens
  misc_RNA (1)...(19): siRNA sense strand
uuucuaaacuggagcagga

SEQ ID NO: 2472301 - RNA, 19 nt, Homo sapiens
  misc_RNA (1)...(19): siRNA sense strand
ugaaaguaucacugaggau

SEQ ID NO: 2472302 - RNA, 19 nt, Homo sapiens
  misc_RNA (1)...(19): siRNA sense strand
gucaagagcagaagagugu

SEQ ID NO: 2472303 - RNA, 19 nt, Homo sapiens
  misc_RNA (1)...(19): siRNA sense strand
aagcugaagaauacaggua

SEQ ID NO: 2472304 - RNA, 19 nt, Homo sapiens
  misc_RNA (1)...(19): siRNA sense strand
gaaaacuacaacaggaaau

SEQ ID NO: 2472305 - RNA, 19 nt, Homo sapiens
  misc_RNA (1)...(19): siRNA sense strand
uggagacaacugugaaauu

SEQ ID NO: 2472306 - RNA, 19 nt, Homo sapiens
  misc_RNA (1)...(19): siRNA sense strand
gcaacacagaagcugauaa

SEQ ID NO: 2472307 - RNA, 19 nt, Homo sapiens
  misc_RNA (1)...(19): siRNA sense strand
gcugaaaagucuaaggaag

SEQ ID NO: 2472308 - RNA, 19 nt, Homo sapiens
  misc_RNA (1)...(19): siRNA sense strand
ggaagcauugacagaagaa

SEQ ID NO: 2472309 - RNA, 19 nt, Homo sapiens
  misc_RNA (1)...(19): siRNA sense strand
ugcagaacgacaaggcuaa

SEQ ID NO: 2472310 - RNA, 19 nt, Homo sapiens
  misc_RNA (1)...(19): siRNA sense strand
uugcagauaagcugaagaa

SEQ ID NO: 2472311 - RNA, 19 nt, Homo sapiens
  misc_RNA (1)...(19): siRNA sense strand
auuaacaaauggagcagga

SEQ ID NO: 2472312 - RNA, 19 nt, Homo sapiens
  misc_RNA (1)...(19): siRNA sense strand
ggaugaagccacagcuaag

SEQ ID NO: 2472313 - RNA, 19 nt, Homo sapiens
  misc_RNA (1)...(19): siRNA sense strand
uagaagagaaugaacgguu

SEQ ID NO: 2472314 - RNA, 19 nt, Homo sapiens
  misc_RNA (1)...(19): siRNA sense strand
cuuggagacaacugugaaa

SEQ ID NO: 2472315 - RNA, 19 nt, Homo sapiens
  misc_RNA (1)...(19): siRNA sense strand
gcguuaagagccaggaauc

SEQ ID NO: 2472316 - RNA, 19 nt, Homo sapiens
  misc_RNA (1)...(19): siRNA sense strand
ucuuggagucugugccuua

SEQ ID NO: 2472317 - RNA, 19 nt, Homo sapiens
  misc_RNA (1)...(19): siRNA sense strand
uuuaaaggagcaacugaaa

SEQ ID NO: 2472318 - RNA, 19 nt, Homo sapiens
  misc_RNA (1)...(19): siRNA sense strand
aggaugaagccacagcuaa

SEQ ID NO: 2472319 - RNA, 19 nt, Homo sapiens
  misc_RNA (1)...(19): siRNA sense strand
ucaagaugaacuagcucua

SEQ ID NO: 2472320 - RNA, 19 nt, Homo sapiens
  misc_RNA (1)...(19): siRNA sense strand
ucagcaacaauuuggacua

SEQ ID NO: 2472321 - RNA, 19 nt, Homo sapiens
  misc_RNA (1)...(19): siRNA sense strand
cggaagaaugucaauuaca

SEQ ID NO: 2472322 - RNA, 19 nt, Homo sapiens
  misc_RNA (1)...(19): siRNA sense strand
augaagaucugcaaaagaa

SEQ ID NO: 2472323 - RNA, 19 nt, Homo sapiens
  misc_RNA (1)...(19): siRNA sense strand
gaaaaggaagccaaggaau

SEQ ID NO: 2472324 - RNA, 19 nt, Homo sapiens
  misc_RNA (1)...(19): siRNA sense strand
gucagguagauuagaggaa

SEQ ID NO: 2472325 - RNA, 19 nt, Homo sapiens
  misc_RNA (1)...(19): siRNA sense strand
gagacaacugugaaauuga

SEQ ID NO: 2472326 - RNA, 19 nt, Homo sapiens
  misc_RNA (1)...(19): siRNA sense strand
ucgccaagucucagagcaa

SEQ ID NO: 2472327 - RNA, 19 nt, Homo sapiens
  misc_RNA (1)...(19): siRNA sense strand
gauuuuaggaagaaagcaa

SEQ ID NO: 2472328 - RNA, 19 nt, Homo sapiens
  misc_RNA (1)...(19): siRNA sense strand
ccauaauagauguggcuac

SEQ ID NO: 2472329 - RNA, 19 nt, Homo sapiens
  misc_RNA (1)...(19): siRNA sense strand
aggaagaaagcaaggcagu

SEQ ID NO: 2472330 - RNA, 19 nt, Homo sapiens
  misc_RNA (1)...(19): siRNA sense strand
cauuuaaagcuguucccua

SEQ ID NO: 2472331 - RNA, 19 nt, Homo sapiens
  misc_RNA (1)...(19): siRNA sense strand
ggggaaagauuuuaggaag

SEQ ID NO: 2472332 - RNA, 19 nt, Homo sapiens
  misc_RNA (1)...(19): siRNA sense strand
gcucauuagauuauccaga

SEQ ID NO: 2472333 - RNA, 19 nt, Homo sapiens
  misc_RNA (1)...(19): siRNA sense strand
gccaagucucagagcaaaa

SEQ ID NO: 2472334 - RNA, 19 nt, Homo sapiens
  misc_RNA (1)...(19): siRNA sense strand
aaauaguacaacuguguga

SEQ ID NO: 2472335 - RNA, 19 nt, Homo sapiens
  misc_RNA (1)...(19): siRNA sense strand
ccaggaaagcuguggagca

SEQ ID NO: 2472336 - RNA, 19 nt, Homo sapiens
  misc_RNA (1)...(19): siRNA sense strand
auggaagccuguauggaca

SEQ ID NO: 2472337 - RNA, 19 nt, Homo sapiens
  misc_RNA (1)...(19): siRNA sense strand
gcaggaagaaagugggacu

SEQ ID NO: 2472338 - RNA, 19 nt, Homo sapiens
  misc_RNA (1)...(19): siRNA sense strand
uuugaaugccgguguggaa

SEQ ID NO: 2472339 - RNA, 19 nt, Homo sapiens
  misc_RNA (1)...(19): siRNA sense strand
ccagaagcccagucagcau

SEQ ID NO: 2472340 - RNA, 19 nt, Homo sapiens
  misc_RNA (1)...(19): siRNA sense strand
agugggacuuacuggguuu

SEQ ID NO: 2472341 - RNA, 19 nt, Homo sapiens
  misc_RNA (1)...(19): siRNA sense strand
gcuguggauuuuauggaaa

SEQ ID NO: 2472342 - RNA, 19 nt, Homo sapiens
  misc_RNA (1)...(19): siRNA sense strand
guucaguaugcuauaaaga

SEQ ID NO: 2472343 - RNA, 19 nt, Homo sapiens
  misc_RNA (1)...(19): siRNA sense strand
ggaugagaucaaagggaaa

SEQ ID NO: 2472344 - RNA, 19 nt, Homo sapiens
  misc_RNA (1)...(19): siRNA sense strand
ccgaagaagacuuggacga

SEQ ID NO: 2472345 - RNA, 19 nt, Homo sapiens
  misc_RNA (1)...(19): siRNA sense strand
uggaaauggaagagaacca

SEQ ID NO: 2472346 - RNA, 19 nt, Homo sapiens
  misc_RNA (1)...(19): siRNA sense strand
uggaugagaucaaagggaa

SEQ ID NO: 2472347 - RNA, 19 nt, Homo sapiens
  misc_RNA (1)...(19): siRNA sense strand
gggacaugguggagcucau

SEQ ID NO: 2472348 - RNA, 19 nt, Homo sapiens
  misc_RNA (1)...(19): siRNA sense strand
gaaauacgcuguuggcaga

SEQ ID NO: 2472349 - RNA, 19 nt, Homo sapiens
  misc_RNA (1)...(19): siRNA sense strand
uggaagagaaccagcugaa

SEQ ID NO: 2472350 - RNA, 19 nt, Homo sapiens
  misc_RNA (1)...(19): siRNA sense strand
gcaucaagcgcgagugcga

SEQ ID NO: 2472351 - RNA, 19 nt, Homo sapiens
  misc_RNA (1)...(19): siRNA sense strand
cgaagaaaggccggagcaa

SEQ ID NO: 2472352 - RNA, 19 nt, Homo sapiens
  misc_RNA (1)...(19): siRNA sense strand
ccaagcugcaugaggagaa

SEQ ID NO: 2472353 - RNA, 19 nt, Homo sapiens
  misc_RNA (1)...(19): siRNA sense strand
uuucggagcucaaggccaa

SEQ ID NO: 2472354 - RNA, 19 nt, Homo sapiens
  misc_RNA (1)...(19): siRNA sense strand
aagaacaagcggaugaaca

SEQ ID NO: 2472355 - RNA, 19 nt, Homo sapiens
  misc_RNA (1)...(19): siRNA sense strand
augaaaugcaagacgccaa

SEQ ID NO: 2472356 - RNA, 19 nt, Homo sapiens
  misc_RNA (1)...(19): siRNA sense strand
acguggaaaugaaagaaaa

SEQ ID NO: 2472357 - RNA, 19 nt, Homo sapiens
  misc_RNA (1)...(19): siRNA sense strand
ccaagaucaaggagggcga

SEQ ID NO: 2472358 - RNA, 19 nt, Homo sapiens
  misc_RNA (1)...(19): siRNA sense strand
gaucaaagggaaagaccgu

SEQ ID NO: 2472359 - RNA, 19 nt, Homo sapiens
  misc_RNA (1)...(19): siRNA sense strand
uggaaaagauuuacagacu

SEQ ID NO: 2472360 - RNA, 19 nt, Homo sapiens
  misc_RNA (1)...(19): siRNA sense strand
acgccaaggaucagaacga

SEQ ID NO: 2472361 - RNA, 19 nt, Homo sapiens
  misc_RNA (1)...(19): siRNA sense strand
uggagaagaacaagcggau

SEQ ID NO: 2472362 - RNA, 19 nt, Homo sapiens
  misc_RNA (1)...(19): siRNA sense strand
ugcaagacgccaaggauca

SEQ ID NO: 2472363 - RNA, 19 nt, Homo sapiens
  misc_RNA (1)...(19): siRNA sense strand
cggaugaacaagaagaaug

SEQ ID NO: 2472364 - RNA, 19 nt, Homo sapiens
  misc_RNA (1)...(19): siRNA sense strand
ccaagaagcauguugugga

SEQ ID NO: 2472365 - RNA, 19 nt, Homo sapiens
  misc_RNA (1)...(19): siRNA sense strand
aggccaagcugcaugagga

SEQ ID NO: 2472366 - RNA, 19 nt, Homo sapiens
  misc_RNA (1)...(19): siRNA sense strand
cacgagagaccgagguuca

SEQ ID NO: 2472367 - RNA, 19 nt, Homo sapiens
  misc_RNA (1)...(19): siRNA sense strand
ccagaggauggaggagaaa

SEQ ID NO: 2472368 - RNA, 19 nt, Homo sapiens
  misc_RNA (1)...(19): siRNA sense strand
gcucaucagaacaaaccaa

SEQ ID NO: 2472369 - RNA, 19 nt, Homo sapiens
  misc_RNA (1)...(19): siRNA sense strand
agaggauggaggagaaaau

SEQ ID NO: 2472370 - RNA, 19 nt, Homo sapiens
  misc_RNA (1)...(19): siRNA sense strand
ggauggaggagaaaaucaa

SEQ ID NO: 2472371 - RNA, 19 nt, Homo sapiens
  misc_RNA (1)...(19): siRNA sense strand
acaguaguccaaagagaga

SEQ ID NO: 2472372 - RNA, 19 nt, Homo sapiens
  misc_RNA (1)...(19): siRNA sense strand
agaucgaguuccagcagga

SEQ ID NO: 2472373 - RNA, 19 nt, Homo sapiens
  misc_RNA (1)...(19): siRNA sense strand
uggaugagcagcugguuca

SEQ ID NO: 2472374 - RNA, 19 nt, Homo sapiens
  misc_RNA (1)...(19): siRNA sense strand
agacggacgcggugcagau

SEQ ID NO: 2472375 - RNA, 19 nt, Homo sapiens
  misc_RNA (1)...(19): siRNA sense strand
ccuacauuucggagcucaa

SEQ ID NO: 2472376 - RNA, 19 nt, Homo sapiens
  misc_RNA (1)...(19): siRNA sense strand
ugggaaaacuagagcugaa

SEQ ID NO: 2472377 - RNA, 19 nt, Homo sapiens
  misc_RNA (1)...(19): siRNA sense strand
aagaaaacccgaagaaaca

SEQ ID NO: 2472378 - RNA, 19 nt, Homo sapiens
  misc_RNA (1)...(19): siRNA sense strand
gaagaaacacagaagccau

SEQ ID NO: 2472379 - RNA, 19 nt, Homo sapiens
  misc_RNA (1)...(19): siRNA sense strand
ggaggcaaaacgugggaaa

SEQ ID NO: 2472380 - RNA, 19 nt, Homo sapiens
  misc_RNA (1)...(19): siRNA sense strand
agccaggacaaguacgaaa

SEQ ID NO: 2472381 - RNA, 19 nt, Homo sapiens
  misc_RNA (1)...(19): siRNA sense strand
gcuucaagaauguggaaau

SEQ ID NO: 2472382 - RNA, 19 nt, Homo sapiens
  misc_RNA (1)...(19): siRNA sense strand
ggauguuucuaguggccaa

SEQ ID NO: 2472383 - RNA, 19 nt, Homo sapiens
  misc_RNA (1)...(19): siRNA sense strand
acgacuacaccuaaagaaa

SEQ ID NO: 2472384 - RNA, 19 nt, Homo sapiens
  misc_RNA (1)...(19): siRNA sense strand
ggccaagauacaagcaaau

SEQ ID NO: 2472385 - RNA, 19 nt, Homo sapiens
  misc_RNA (1)...(19): siRNA sense strand
ccuaggagaagcagugaca

SEQ ID NO: 2472386 - RNA, 19 nt, Homo sapiens
  misc_RNA (1)...(19): siRNA sense strand
acuaaaggaccaggcgaua

SEQ ID NO: 2472387 - RNA, 19 nt, Homo sapiens
  misc_RNA (1)...(19): siRNA sense strand
auggcauguuucagugaua

SEQ ID NO: 2472388 - RNA, 19 nt, Homo sapiens
  misc_RNA (1)...(19): siRNA sense strand
ggcauguuucagugauaaa

SEQ ID NO: 2472389 - RNA, 19 nt, Homo sapiens
  misc_RNA (1)...(19): siRNA sense strand
guccauaaccagaagggca

SEQ ID NO: 2472390 - RNA, 19 nt, Homo sapiens
  misc_RNA (1)...(19): siRNA sense strand
cacuaaaggaccaggcgau

SEQ ID NO: 2472391 - RNA, 19 nt, Homo sapiens
  misc_RNA (1)...(19): siRNA sense strand
uggccaugucaaagaugaa

SEQ ID NO: 2472392 - RNA, 19 nt, Homo sapiens
  misc_RNA (1)...(19): siRNA sense strand
ccugaagucuugaggaaaa

SEQ ID NO: 2472393 - RNA, 19 nt, Homo sapiens
  misc_RNA (1)...(19): siRNA sense strand
cauuauaucuagaggagga

SEQ ID NO: 2472394 - RNA, 19 nt, Homo sapiens
  misc_RNA (1)...(19): siRNA sense strand
agaaucaggaaaugagaaa

SEQ ID NO: 2472395 - RNA, 19 nt, Homo sapiens
  misc_RNA (1)...(19): siRNA sense strand
caaaugaaaugguagguca

SEQ ID NO: 2472396 - RNA, 19 nt, Homo sapiens
  misc_RNA (1)...(19): siRNA sense strand
cuuguagauuaguggauaa

SEQ ID NO: 2472397 - RNA, 19 nt, Homo sapiens
  misc_RNA (1)...(19): siRNA sense strand
ugguaaagccaaagagcca

SEQ ID NO: 2472398 - RNA, 19 nt, Homo sapiens
  misc_RNA (1)...(19): siRNA sense strand
ggccauucucgaagggaua

SEQ ID NO: 2472399 - RNA, 19 nt, Homo sapiens
  misc_RNA (1)...(19): siRNA sense strand
ccaaagagccauaugcuga

SEQ ID NO: 2472400 - RNA, 19 nt, Homo sapiens
  misc_RNA (1)...(19): siRNA sense strand
cugcaagacaagacaaaga

SEQ ID NO: 2472401 - RNA, 19 nt, Homo sapiens
  misc_RNA (1)...(19): siRNA sense strand
cagacuggaccaaaggaaa

SEQ ID NO: 2472402 - RNA, 19 nt, Homo sapiens
  misc_RNA (1)...(19): siRNA sense strand
aagcauuagacuggagaaa

SEQ ID NO: 2472403 - RNA, 19 nt, Homo sapiens
  misc_RNA (1)...(19): siRNA sense strand
uuugauuacuauagcgcaa

SEQ ID NO: 2472404 - RNA, 19 nt, Homo sapiens
  misc_RNA (1)...(19): siRNA sense strand
cagcauggcaggagauagu

SEQ ID NO: 2472405 - RNA, 19 nt, Homo sapiens
  misc_RNA (1)...(19): siRNA sense strand
gagucagaguccucagaau

SEQ ID NO: 2472406 - RNA, 19 nt, Homo sapiens
  misc_RNA (1)...(19): siRNA sense strand
gcgugaacccuuuaagaca

SEQ ID NO: 2472407 - RNA, 19 nt, Homo sapiens
  misc_RNA (1)...(19): siRNA sense strand
gcacaauauccaaagggca

SEQ ID NO: 2472408 - RNA, 19 nt, Homo sapiens
  misc_RNA (1)...(19): siRNA sense strand
ugcugaaaguuguggccua

SEQ ID NO: 2472409 - RNA, 19 nt, Homo sapiens
  misc_RNA (1)...(19): siRNA sense strand
agacuggaccaaaggaaaa

SEQ ID NO: 2472410 - RNA, 19 nt, Homo sapiens
  misc_RNA (1)...(19): siRNA sense strand
gcaaaaugucgaaggcaca

SEQ ID NO: 2472411 - RNA, 19 nt, Homo sapiens
  misc_RNA (1)...(19): siRNA sense strand
gggccauucucgaagggau

SEQ ID NO: 2472412 - RNA, 19 nt, Homo sapiens
  misc_RNA (1)...(19): siRNA sense strand
agacacuauuggugacaca

SEQ ID NO: 2472413 - RNA, 19 nt, Homo sapiens
  misc_RNA (1)...(19): siRNA sense strand
ugagauuacaacagugcua

SEQ ID NO: 2472414 - RNA, 19 nt, Homo sapiens
  misc_RNA (1)...(19): siRNA sense strand
guugcaaaaugaugguaaa

SEQ ID NO: 2472415 - RNA, 19 nt, Homo sapiens
  misc_RNA (1)...(19): siRNA sense strand
ggaucuaauaauucaguca

SEQ ID NO: 2472416 - RNA, 19 nt, Homo sapiens
  misc_RNA (1)...(19): siRNA sense strand
guggagaaaaugagguaau

SEQ ID NO: 2472417 - RNA, 19 nt, Homo sapiens
  misc_RNA (1)...(19): siRNA sense strand
cagguggaagccagggaaa

SEQ ID NO: 2472418 - RNA, 19 nt, Homo sapiens
  misc_RNA (1)...(19): siRNA sense strand
acaaauuaggggagaccaa

SEQ ID NO: 2472419 - RNA, 19 nt, Homo sapiens
  misc_RNA (1)...(19): siRNA sense strand
ugauaaaauggaagcagaa

SEQ ID NO: 2472420 - RNA, 19 nt, Homo sapiens
  misc_RNA (1)...(19): siRNA sense strand
acacaauacaccaguuuca

SEQ ID NO: 2472421 - RNA, 19 nt, Homo sapiens
  misc_RNA (1)...(19): siRNA sense strand
gauuaguggauaacacaau

SEQ ID NO: 2472422 - RNA, 19 nt, Homo sapiens
  misc_RNA (1)...(19): siRNA sense strand
aagacaagacaaagacuca

SEQ ID NO: 2472423 - RNA, 19 nt, Homo sapiens
  misc_RNA (1)...(19): siRNA sense strand
ggacagaaaaucacagcau

SEQ ID NO: 2472424 - RNA, 19 nt, Homo sapiens
  misc_RNA (1)...(19): siRNA sense strand
ucucgaagggauagacaca

SEQ ID NO: 2472425 - RNA, 19 nt, Homo sapiens
  misc_RNA (1)...(19): siRNA sense strand
aggagauaguggaauagau

SEQ ID NO: 2472426 - RNA, 19 nt, Homo sapiens
  misc_RNA (1)...(19): siRNA sense strand
gcacaauggagaggguuga

SEQ ID NO: 2472427 - RNA, 19 nt, Homo sapiens
  misc_RNA (1)...(19): siRNA sense strand
augaaguggaagaugauga

SEQ ID NO: 2472428 - RNA, 19 nt, Homo sapiens
  misc_RNA (1)...(19): siRNA sense strand
acaggaaagaagccagcua

SEQ ID NO: 2472429 - RNA, 19 nt, Homo sapiens
  misc_RNA (1)...(19): siRNA sense strand
cagaaucaggaaaugagaa

SEQ ID NO: 2472430 - RNA, 19 nt, Homo sapiens
  misc_RNA (1)...(19): siRNA sense strand
agggauagacacaaagcca

SEQ ID NO: 2472431 - RNA, 19 nt, Homo sapiens
  misc_RNA (1)...(19): siRNA sense strand
auggaaagcauguugagau

SEQ ID NO: 2472432 - RNA, 19 nt, Homo sapiens
  misc_RNA (1)...(19): siRNA sense strand
gacuacaagccuagaaaau

SEQ ID NO: 2472433 - RNA, 19 nt, Homo sapiens
  misc_RNA (1)...(19): siRNA sense strand
ccuagaaaaugaacagcuu

SEQ ID NO: 2472434 - RNA, 19 nt, Homo sapiens
  misc_RNA (1)...(19): siRNA sense strand
gaucucugaccgaguacaa

SEQ ID NO: 2472435 - RNA, 19 nt, Homo sapiens
  misc_RNA (1)...(19): siRNA sense strand
uuuugaagcugaagucaua

SEQ ID NO: 2472436 - RNA, 19 nt, Homo sapiens
  misc_RNA (1)...(19): siRNA sense strand
aagacaaagacucagaaga

SEQ ID NO: 2472437 - RNA, 19 nt, Homo sapiens
  misc_RNA (1)...(19): siRNA sense strand
ccucagaaucaggaaauga

SEQ ID NO: 2472438 - RNA, 19 nt, Homo sapiens
  misc_RNA (1)...(19): siRNA sense strand
agaagaaagagaaggagca

SEQ ID NO: 2472439 - RNA, 19 nt, Homo sapiens
  misc_RNA (1)...(19): siRNA sense strand
gggcaaaguacucagcaga

SEQ ID NO: 2472440 - RNA, 19 nt, Homo sapiens
  misc_RNA (1)...(19): siRNA sense strand
ccgaagaaaacgaagauau

SEQ ID NO: 2472441 - RNA, 19 nt, Homo sapiens
  misc_RNA (1)...(19): siRNA sense strand
agucaauccccgaagaaaa

SEQ ID NO: 2472442 - RNA, 19 nt, Homo sapiens
  misc_RNA (1)...(19): siRNA sense strand
cagaaaagcuccuaagcca

SEQ ID NO: 2472443 - RNA, 19 nt, Homo sapiens
  misc_RNA (1)...(19): siRNA sense strand
agaaggagcagaaggagga

SEQ ID NO: 2472444 - RNA, 19 nt, Homo sapiens
  misc_RNA (1)...(19): siRNA sense strand
gcagagacugggaggcuca

SEQ ID NO: 2472445 - RNA, 19 nt, Homo sapiens
  misc_RNA (1)...(19): siRNA sense strand
agaagaagucagggcgcaa

SEQ ID NO: 2472446 - RNA, 19 nt, Homo sapiens
  misc_RNA (1)...(19): siRNA sense strand
aggaggaugaacugaagaa

SEQ ID NO: 2472447 - RNA, 19 nt, Homo sapiens
  misc_RNA (1)...(19): siRNA sense strand
aagaagacaucgaagccga

SEQ ID NO: 2472448 - RNA, 19 nt, Homo sapiens
  misc_RNA (1)...(19): siRNA sense strand
agaaggaguugaaggagcu

SEQ ID NO: 2472449 - RNA, 19 nt, Homo sapiens
  misc_RNA (1)...(19): siRNA sense strand
gagaagaagucagggcgca

SEQ ID NO: 2472450 - RNA, 19 nt, Homo sapiens
  misc_RNA (1)...(19): siRNA sense strand
ggaugaacugaagaagaaa

SEQ ID NO: 2472451 - RNA, 19 nt, Homo sapiens
  misc_RNA (1)...(19): siRNA sense strand
cagcagacaugaaggaguc

SEQ ID NO: 2472452 - RNA, 19 nt, Homo sapiens
  misc_RNA (1)...(19): siRNA sense strand
ccacagaaagaacugguga

SEQ ID NO: 2472453 - RNA, 19 nt, Homo sapiens
  misc_RNA (1)...(19): siRNA sense strand
agaaagaacuggugauccc

SEQ ID NO: 2472454 - RNA, 19 nt, Homo sapiens
  misc_RNA (1)...(19): siRNA sense strand
cuaugauaaugaagggauu

SEQ ID NO: 2472455 - RNA, 19 nt, Homo sapiens
  misc_RNA (1)...(19): siRNA sense strand
acgaaucauuggaggaaca

SEQ ID NO: 2472456 - RNA, 19 nt, Homo sapiens
  misc_RNA (1)...(19): siRNA sense strand
ccaaagagcucaaggaugc

SEQ ID NO: 2472457 - RNA, 19 nt, Homo sapiens
  misc_RNA (1)...(19): siRNA sense strand
ccagacaagaagagcaaga

SEQ ID NO: 2472458 - RNA, 19 nt, Homo sapiens
  misc_RNA (1)...(19): siRNA sense strand
guuauguguuccugaucaa

SEQ ID NO: 2472459 - RNA, 19 nt, Homo sapiens
  misc_RNA (1)...(19): siRNA sense strand
gggacgaaucauuggagga

SEQ ID NO: 2472460 - RNA, 19 nt, Homo sapiens
  misc_RNA (1)...(19): siRNA sense strand
agauuacagcuauggcaaa

SEQ ID NO: 2472461 - RNA, 19 nt, Homo sapiens
  misc_RNA (1)...(19): siRNA sense strand
gcuuugaccguguccgaaa

SEQ ID NO: 2472462 - RNA, 19 nt, Homo sapiens
  misc_RNA (1)...(19): siRNA sense strand
ucaggauauacaagguaaa

SEQ ID NO: 2472463 - RNA, 19 nt, Homo sapiens
  misc_RNA (1)...(19): siRNA sense strand
acaugaagaaucuggacau

SEQ ID NO: 2472464 - RNA, 19 nt, Homo sapiens
  misc_RNA (1)...(19): siRNA sense strand
cagauuacagcuauggcaa

SEQ ID NO: 2472465 - RNA, 19 nt, Homo sapiens
  misc_RNA (1)...(19): siRNA sense strand
acaagaagagcaagaagca

SEQ ID NO: 2472466 - RNA, 19 nt, Homo sapiens
  misc_RNA (1)...(19): siRNA sense strand
ccaccuacccuauuaagaa

SEQ ID NO: 2472467 - RNA, 19 nt, Homo sapiens
  misc_RNA (1)...(19): siRNA sense strand
ccucaugcugacaggaaaa

SEQ ID NO: 2472468 - RNA, 19 nt, Homo sapiens
  misc_RNA (1)...(19): siRNA sense strand
ggggauggcaguaggauca

SEQ ID NO: 2472469 - RNA, 19 nt, Homo sapiens
  misc_RNA (1)...(19): siRNA sense strand
gagcaagaagcaacaggau

SEQ ID NO: 2472470 - RNA, 19 nt, Homo sapiens
  misc_RNA (1)...(19): siRNA sense strand
gucauguccuggugggauu

SEQ ID NO: 2472471 - RNA, 19 nt, Homo sapiens
  misc_RNA (1)...(19): siRNA sense strand
auaucaaggagaaugacua

SEQ ID NO: 2472472 - RNA, 19 nt, Homo sapiens
  misc_RNA (1)...(19): siRNA sense strand
gugcauucucucuggcauu

SEQ ID NO: 2472473 - RNA, 19 nt, Homo sapiens
  misc_RNA (1)...(19): siRNA sense strand
ugcuguaguuccuggauau

SEQ ID NO: 2472474 - RNA, 19 nt, Homo sapiens
  misc_RNA (1)...(19): siRNA sense strand
ccagaggaugcgaagguca

SEQ ID NO: 2472475 - RNA, 19 nt, Homo sapiens
  misc_RNA (1)...(19): siRNA sense strand
uauuauuggcuucgucaua

SEQ ID NO: 2472476 - RNA, 19 nt, Homo sapiens
  misc_RNA (1)...(19): siRNA sense strand
uauuaagaaugaaguggca

SEQ ID NO: 2472477 - RNA, 19 nt, Homo sapiens
  misc_RNA (1)...(19): siRNA sense strand
cagaggaugcgaaggucau

SEQ ID NO: 2472478 - RNA, 19 nt, Homo sapiens
  misc_RNA (1)...(19): siRNA sense strand
aagaagagcaagaagcaac

SEQ ID NO: 2472479 - RNA, 19 nt, Homo sapiens
  misc_RNA (1)...(19): siRNA sense strand
agguuuacacagaagccaa

SEQ ID NO: 2472480 - RNA, 19 nt, Homo sapiens
  misc_RNA (1)...(19): siRNA sense strand
ugucaauggcugcuguauu

SEQ ID NO: 2472481 - RNA, 19 nt, Homo sapiens
  misc_RNA (1)...(19): siRNA sense strand
agaucuccuuuguggguuu

SEQ ID NO: 2472482 - RNA, 19 nt, Homo sapiens
  misc_RNA (1)...(19): siRNA sense strand
gcagcaaguugaauccaca

SEQ ID NO: 2472483 - RNA, 19 nt, Homo sapiens
  misc_RNA (1)...(19): siRNA sense strand
augaagaaucuggacauaa

SEQ ID NO: 2472484 - RNA, 19 nt, Homo sapiens
  misc_RNA (1)...(19): siRNA sense strand
agcaagaagcaacaggauu

SEQ ID NO: 2472485 - RNA, 19 nt, Homo sapiens
  misc_RNA (1)...(19): siRNA sense strand
gagauugggaauaaagacu

SEQ ID NO: 2472486 - RNA, 19 nt, Homo sapiens
  misc_RNA (1)...(19): siRNA sense strand
agucgaaggaagagcaaga

SEQ ID NO: 2472487 - RNA, 19 nt, Homo sapiens
  misc_RNA (1)...(19): siRNA sense strand
caacugggccuaugugaaa

SEQ ID NO: 2472488 - RNA, 19 nt, Homo sapiens
  misc_RNA (1)...(19): siRNA sense strand
ugacaauuggagaggaaaa

SEQ ID NO: 2472489 - RNA, 19 nt, Homo sapiens
  misc_RNA (1)...(19): siRNA sense strand
acaucaagucgaaggaaga

SEQ ID NO: 2472490 - RNA, 19 nt, Homo sapiens
  misc_RNA (1)...(19): siRNA sense strand
agaaguaugaagacaucaa

SEQ ID NO: 2472491 - RNA, 19 nt, Homo sapiens
  misc_RNA (1)...(19): siRNA sense strand
ggcaagaacugcuggagac

SEQ ID NO: 2472492 - RNA, 19 nt, Homo sapiens
  misc_RNA (1)...(19): siRNA sense strand
ccaacugggccuaugugaa

SEQ ID NO: 2472493 - RNA, 19 nt, Homo sapiens
  misc_RNA (1)...(19): siRNA sense strand
uggcaagaacugcuggaga

SEQ ID NO: 2472494 - RNA, 19 nt, Homo sapiens
  misc_RNA (1)...(19): siRNA sense strand
ggcucaaugcauacacaua

SEQ ID NO: 2472495 - RNA, 19 nt, Homo sapiens
  misc_RNA (1)...(19): siRNA sense strand
augcagaaguaugaagaca

SEQ ID NO: 2472496 - RNA, 19 nt, Homo sapiens
  misc_RNA (1)...(19): siRNA sense strand
agucgaaggaagagcaaga

SEQ ID NO: 2472497 - RNA, 19 nt, Homo sapiens
  misc_RNA (1)...(19): siRNA sense strand
caacugggccuaugugaaa

SEQ ID NO: 2472498 - RNA, 19 nt, Homo sapiens
  misc_RNA (1)...(19): siRNA sense strand
ugacaauuggagaggaaaa

SEQ ID NO: 2472499 - RNA, 19 nt, Homo sapiens
  misc_RNA (1)...(19): siRNA sense strand
acaucaagucgaaggaaga

SEQ ID NO: 2472500 - RNA, 19 nt, Homo sapiens
  misc_RNA (1)...(19): siRNA sense strand
agaaguaugaagacaucaa

SEQ ID NO: 2472501 - RNA, 19 nt, Homo sapiens
  misc_RNA (1)...(19): siRNA sense strand
ggcaagaacugcuggagac

SEQ ID NO: 2472502 - RNA, 19 nt, Homo sapiens
  misc_RNA (1)...(19): siRNA sense strand
ccaacugggccuaugugaa

SEQ ID NO: 2472503 - RNA, 19 nt, Homo sapiens
  misc_RNA (1)...(19): siRNA sense strand
uggcaagaacugcuggaga

SEQ ID NO: 2472504 - RNA, 19 nt, Homo sapiens
  misc_RNA (1)...(19): siRNA sense strand
ggcucaaugcauacacaua

SEQ ID NO: 2472505 - RNA, 19 nt, Homo sapiens
  misc_RNA (1)...(19): siRNA sense strand
augcagaaguaugaagaca

SEQ ID NO: 2472506 - RNA, 19 nt, Homo sapiens
  misc_RNA (1)...(19): siRNA sense strand
agucgaaggaagagcaaga

SEQ ID NO: 2472507 - RNA, 19 nt, Homo sapiens
  misc_RNA (1)...(19): siRNA sense strand
caacugggccuaugugaaa

SEQ ID NO: 2472508 - RNA, 19 nt, Homo sapiens
  misc_RNA (1)...(19): siRNA sense strand
ugacaauuggagaggaaaa

SEQ ID NO: 2472509 - RNA, 19 nt, Homo sapiens
  misc_RNA (1)...(19): siRNA sense strand
acaucaagucgaaggaaga

SEQ ID NO: 2472510 - RNA, 19 nt, Homo sapiens
  misc_RNA (1)...(19): siRNA sense strand
agaaguaugaagacaucaa

SEQ ID NO: 2472511 - RNA, 19 nt, Homo sapiens
  misc_RNA (1)...(19): siRNA sense strand
ggcaagaacugcuggagac

SEQ ID NO: 2472512 - RNA, 19 nt, Homo sapiens
  misc_RNA (1)...(19): siRNA sense strand
ccaacugggccuaugugaa

SEQ ID NO: 2472513 - RNA, 19 nt, Homo sapiens
  misc_RNA (1)...(19): siRNA sense strand
uggcaagaacugcuggaga

SEQ ID NO: 2472514 - RNA, 19 nt, Homo sapiens
  misc_RNA (1)...(19): siRNA sense strand
ggcucaaugcauacacaua

SEQ ID NO: 2472515 - RNA, 19 nt, Homo sapiens
  misc_RNA (1)...(19): siRNA sense strand
augcagaaguaugaagaca

SEQ ID NO: 2472516 - RNA, 19 nt, Homo sapiens
  misc_RNA (1)...(19): siRNA sense strand
cuccaaugcaacagggcaa

SEQ ID NO: 2472517 - RNA, 19 nt, Homo sapiens
  misc_RNA (1)...(19): siRNA sense strand
cuguacacuuagauaguau

SEQ ID NO: 2472518 - RNA, 19 nt, Homo sapiens
  misc_RNA (1)...(19): siRNA sense strand
caacaugacugacugcaga

SEQ ID NO: 2472519 - RNA, 19 nt, Homo sapiens
  misc_RNA (1)...(19): siRNA sense strand
cugcaugacucuuuccaga

SEQ ID NO: 2472520 - RNA, 19 nt, Homo sapiens
  misc_RNA (1)...(19): siRNA sense strand
cccaaggaagacagggaaa

SEQ ID NO: 2472521 - RNA, 19 nt, Homo sapiens
  misc_RNA (1)...(19): siRNA sense strand
ugggagagagacugaggaa

SEQ ID NO: 2472522 - RNA, 19 nt, Homo sapiens
  misc_RNA (1)...(19): siRNA sense strand
acauacugcccaaggaaga

SEQ ID NO: 2472523 - RNA, 19 nt, Homo sapiens
  misc_RNA (1)...(19): siRNA sense strand
gggcauugacaguagugau

SEQ ID NO: 2472524 - RNA, 19 nt, Homo sapiens
  misc_RNA (1)...(19): siRNA sense strand
uccacauccuagagagcaa

SEQ ID NO: 2472525 - RNA, 19 nt, Homo sapiens
  misc_RNA (1)...(19): siRNA sense strand
ucuucauccuccuggacaa

SEQ ID NO: 2472526 - RNA, 19 nt, Homo sapiens
  misc_RNA (1)...(19): siRNA sense strand
ccuuguacauacugcccaa

SEQ ID NO: 2472527 - RNA, 19 nt, Homo sapiens
  misc_RNA (1)...(19): siRNA sense strand
cgacaagaucagaaagcug

SEQ ID NO: 2472528 - RNA, 19 nt, Homo sapiens
  misc_RNA (1)...(19): siRNA sense strand
cagaagucuuguaucccaa

SEQ ID NO: 2472529 - RNA, 19 nt, Homo sapiens
  misc_RNA (1)...(19): siRNA sense strand
gugaaggacaggaugggca

SEQ ID NO: 2472530 - RNA, 19 nt, Homo sapiens
  misc_RNA (1)...(19): siRNA sense strand
caaagcugcuggagccuga

SEQ ID NO: 2472531 - RNA, 19 nt, Homo sapiens
  misc_RNA (1)...(19): siRNA sense strand
gccaggaaucucagaggau

SEQ ID NO: 2472532 - RNA, 19 nt, Homo sapiens
  misc_RNA (1)...(19): siRNA sense strand
gccccaugcugaagagauu

SEQ ID NO: 2472533 - RNA, 19 nt, Homo sapiens
  misc_RNA (1)...(19): siRNA sense strand
ccauggaacuuuaccagca

SEQ ID NO: 2472534 - RNA, 19 nt, Homo sapiens
  misc_RNA (1)...(19): siRNA sense strand
aggaauagacuuucgggaa

SEQ ID NO: 2472535 - RNA, 19 nt, Homo sapiens
  misc_RNA (1)...(19): siRNA sense strand
acuuaaucaugaagcgaau

SEQ ID NO: 2472536 - RNA, 19 nt, Homo sapiens
  misc_RNA (1)...(19): siRNA sense strand
ggaagucaaugaacggcaa

SEQ ID NO: 2472537 - RNA, 19 nt, Homo sapiens
  misc_RNA (1)...(19): siRNA sense strand
uggaacaguguguggagaa

SEQ ID NO: 2472538 - RNA, 19 nt, Homo sapiens
  misc_RNA (1)...(19): siRNA sense strand
uggacagaauguggagaaa

SEQ ID NO: 2472539 - RNA, 19 nt, Homo sapiens
  misc_RNA (1)...(19): siRNA sense strand
ccgaauggaucuucaggga

SEQ ID NO: 2472540 - RNA, 19 nt, Homo sapiens
  misc_RNA (1)...(19): siRNA sense strand
cuggacagaauguggagaa

SEQ ID NO: 2472541 - RNA, 19 nt, Homo sapiens
  misc_RNA (1)...(19): siRNA sense strand
ucaugaagcgaauggaaca

SEQ ID NO: 2472542 - RNA, 19 nt, Homo sapiens
  misc_RNA (1)...(19): siRNA sense strand
uggagaaagcuguagaaac

SEQ ID NO: 2472543 - RNA, 19 nt, Homo sapiens
  misc_RNA (1)...(19): siRNA sense strand
ggaaaagccaccagagaag

SEQ ID NO: 2472544 - RNA, 19 nt, Homo sapiens
  misc_RNA (1)...(19): siRNA sense strand
cgaauggaucuucagggaa

SEQ ID NO: 2472545 - RNA, 19 nt, Homo sapiens
  misc_RNA (1)...(19): siRNA sense strand
ggaaagcauuuaaagugca

SEQ ID NO: 2472546 - RNA, 19 nt, Homo sapiens
  misc_RNA (1)...(19): siRNA sense strand
ggacaagagcgguuccgga

SEQ ID NO: 2472547 - RNA, 19 nt, Homo sapiens
  misc_RNA (1)...(19): siRNA sense strand
caucuucagcuuugggaca

SEQ ID NO: 2472548 - RNA, 19 nt, Homo sapiens
  misc_RNA (1)...(19): siRNA sense strand
gaaacuuggauggggaaaa

SEQ ID NO: 2472549 - RNA, 19 nt, Homo sapiens
  misc_RNA (1)...(19): siRNA sense strand
ggggaaaagccaccagaga

SEQ ID NO: 2472550 - RNA, 19 nt, Homo sapiens
  misc_RNA (1)...(19): siRNA sense strand
gggucauggaugugaucaa

SEQ ID NO: 2472551 - RNA, 19 nt, Homo sapiens
  misc_RNA (1)...(19): siRNA sense strand
caggugaagcuguggguga

SEQ ID NO: 2472552 - RNA, 19 nt, Homo sapiens
  misc_RNA (1)...(19): siRNA sense strand
ggugcaaaccugagugacu

SEQ ID NO: 2472553 - RNA, 19 nt, Homo sapiens
  misc_RNA (1)...(19): siRNA sense strand
aggugaagcugugggugaa

SEQ ID NO: 2472554 - RNA, 19 nt, Homo sapiens
  misc_RNA (1)...(19): siRNA sense strand
gcagauaagaguagccaag

SEQ ID NO: 2472555 - RNA, 19 nt, Homo sapiens
  misc_RNA (1)...(19): siRNA sense strand
gcagccaauaagaggguca

SEQ ID NO: 2472556 - RNA, 19 nt, Homo sapiens
  misc_RNA (1)...(19): siRNA sense strand
cgaucgugacggagaacca

SEQ ID NO: 2472557 - RNA, 19 nt, Homo sapiens
  misc_RNA (1)...(19): siRNA sense strand
cuucaaaucucaaggucuc

SEQ ID NO: 2472558 - RNA, 19 nt, Homo sapiens
  misc_RNA (1)...(19): siRNA sense strand
gcacaaugcugcucccacu

SEQ ID NO: 2472559 - RNA, 19 nt, Homo sapiens
  misc_RNA (1)...(19): siRNA sense strand
gccagaagguguaccgaga

SEQ ID NO: 2472560 - RNA, 19 nt, Homo sapiens
  misc_RNA (1)...(19): siRNA sense strand
cuucaacuugucagagaaa

SEQ ID NO: 2472561 - RNA, 19 nt, Homo sapiens
  misc_RNA (1)...(19): siRNA sense strand
agacgaauguggacggcca

SEQ ID NO: 2472562 - RNA, 19 nt, Homo sapiens
  misc_RNA (1)...(19): siRNA sense strand
ggacccaugaggugcggua

SEQ ID NO: 2472563 - RNA, 19 nt, Homo sapiens
  misc_RNA (1)...(19): siRNA sense strand
gauccuuugcccugggaau

SEQ ID NO: 2472564 - RNA, 19 nt, Homo sapiens
  misc_RNA (1)...(19): siRNA sense strand
ccaacucagccauggaaaa

SEQ ID NO: 2472565 - RNA, 19 nt, Homo sapiens
  misc_RNA (1)...(19): siRNA sense strand
uguacaaggugcugggcgu

SEQ ID NO: 2472566 - RNA, 19 nt, Homo sapiens
  misc_RNA (1)...(19): siRNA sense strand
ccgcauuccugcaggggau

SEQ ID NO: 2472567 - RNA, 19 nt, Homo sapiens
  misc_RNA (1)...(19): siRNA sense strand
agagauaagcauaacgcaa

SEQ ID NO: 2472568 - RNA, 19 nt, Homo sapiens
  misc_RNA (1)...(19): siRNA sense strand
acuuaagaaaggagggcau

SEQ ID NO: 2472569 - RNA, 19 nt, Homo sapiens
  misc_RNA (1)...(19): siRNA sense strand
gcauaacgcaaaaggagaa

SEQ ID NO: 2472570 - RNA, 19 nt, Homo sapiens
  misc_RNA (1)...(19): siRNA sense strand
gggaagaaucuauugagga

SEQ ID NO: 2472571 - RNA, 19 nt, Homo sapiens
  misc_RNA (1)...(19): siRNA sense strand
ucuaaaaggaggucaaaau

SEQ ID NO: 2472572 - RNA, 19 nt, Homo sapiens
  misc_RNA (1)...(19): siRNA sense strand
ugugcaagguugugggaac

SEQ ID NO: 2472573 - RNA, 19 nt, Homo sapiens
  misc_RNA (1)...(19): siRNA sense strand
ggucuauacagcaacggaa

SEQ ID NO: 2472574 - RNA, 19 nt, Homo sapiens
  misc_RNA (1)...(19): siRNA sense strand
agauaagcauaacgcaaaa

SEQ ID NO: 2472575 - RNA, 19 nt, Homo sapiens
  misc_RNA (1)...(19): siRNA sense strand
ucuauguauuucuggguau

SEQ ID NO: 2472576 - RNA, 19 nt, Homo sapiens
  misc_RNA (1)...(19): siRNA sense strand
acuucauucuugugguaau

SEQ ID NO: 2472577 - RNA, 19 nt, Homo sapiens
  misc_RNA (1)...(19): siRNA sense strand
auacagcaacggaaggcaa

SEQ ID NO: 2472578 - RNA, 19 nt, Homo sapiens
  misc_RNA (1)...(19): siRNA sense strand
cuuaagaaaggagggcaua

SEQ ID NO: 2472579 - RNA, 19 nt, Homo sapiens
  misc_RNA (1)...(19): siRNA sense strand
ucacaaaaccaaugagauc

SEQ ID NO: 2472580 - RNA, 19 nt, Homo sapiens
  misc_RNA (1)...(19): siRNA sense strand
uuaagaaaggagggcauaa

SEQ ID NO: 2472581 - RNA, 19 nt, Homo sapiens
  misc_RNA (1)...(19): siRNA sense strand
cgcaaaaggagaagccauu

SEQ ID NO: 2472582 - RNA, 19 nt, Homo sapiens
  misc_RNA (1)...(19): siRNA sense strand
caauaguugcuuagaucca

SEQ ID NO: 2472583 - RNA, 19 nt, Homo sapiens
  misc_RNA (1)...(19): siRNA sense strand
ucgugggacugguugggaa

SEQ ID NO: 2472584 - RNA, 19 nt, Homo sapiens
  misc_RNA (1)...(19): siRNA sense strand
caucuguggcagugaaaau

SEQ ID NO: 2472585 - RNA, 19 nt, Homo sapiens
  misc_RNA (1)...(19): siRNA sense strand
gggcaagucuuuugggaca

SEQ ID NO: 2472586 - RNA, 19 nt, Homo sapiens
  misc_RNA (1)...(19): siRNA sense strand
gggacaacaaugaugguca

SEQ ID NO: 2472587 - RNA, 19 nt, Homo sapiens
  misc_RNA (1)...(19): siRNA sense strand
aagccaaaucacagaauga

SEQ ID NO: 2472588 - RNA, 19 nt, Homo sapiens
  misc_RNA (1)...(19): siRNA sense strand
cagaagaaccagcguggga

SEQ ID NO: 2472589 - RNA, 19 nt, Homo sapiens
  misc_RNA (1)...(19): siRNA sense strand
gcgaacagugacagggacu

SEQ ID NO: 2472590 - RNA, 19 nt, Homo sapiens
  misc_RNA (1)...(19): siRNA sense strand
cggucaugcccguggaugu

SEQ ID NO: 2472591 - RNA, 19 nt, Homo sapiens
  misc_RNA (1)...(19): siRNA sense strand
ucacagaaugacuggaagu

SEQ ID NO: 2472592 - RNA, 19 nt, Homo sapiens
  misc_RNA (1)...(19): siRNA sense strand
uugcaagagcgaacaguga

SEQ ID NO: 2472593 - RNA, 19 nt, Homo sapiens
  misc_RNA (1)...(19): siRNA sense strand
cagaaugacuggaagugcu

SEQ ID NO: 2472594 - RNA, 19 nt, Homo sapiens
  misc_RNA (1)...(19): siRNA sense strand
cgugauaacuucuggagca

SEQ ID NO: 2472595 - RNA, 19 nt, Homo sapiens
  misc_RNA (1)...(19): siRNA sense strand
aggaagaggaggaggcgga

SEQ ID NO: 2472596 - RNA, 19 nt, Homo sapiens
  misc_RNA (1)...(19): siRNA sense strand
cagaagacccagaagagga

SEQ ID NO: 2472597 - RNA, 19 nt, Homo sapiens
  misc_RNA (1)...(19): siRNA sense strand
ggacagcaggcgaagguca

SEQ ID NO: 2472598 - RNA, 19 nt, Homo sapiens
  misc_RNA (1)...(19): siRNA sense strand
ccaagaaggugguggccag

SEQ ID NO: 2472599 - RNA, 19 nt, Homo sapiens
  misc_RNA (1)...(19): siRNA sense strand
aggacuuggaagaggacau

SEQ ID NO: 2472600 - RNA, 19 nt, Homo sapiens
  misc_RNA (1)...(19): siRNA sense strand
aaagcaaggaagaggagga

SEQ ID NO: 2472601 - RNA, 19 nt, Homo sapiens
  misc_RNA (1)...(19): siRNA sense strand
gugauaacuucuggagcau

SEQ ID NO: 2472602 - RNA, 19 nt, Homo sapiens
  misc_RNA (1)...(19): siRNA sense strand
ggucggaaagggagcagga

SEQ ID NO: 2472603 - RNA, 19 nt, Homo sapiens
  misc_RNA (1)...(19): siRNA sense strand
cuggcagagcccaagauaa

SEQ ID NO: 2472604 - RNA, 19 nt, Homo sapiens
  misc_RNA (1)...(19): siRNA sense strand
ggaucaucucccuggccaa

SEQ ID NO: 2472605 - RNA, 19 nt, Homo sapiens
  misc_RNA (1)...(19): siRNA sense strand
cuggaauauuacaacaaca

SEQ ID NO: 2472606 - RNA, 19 nt, Homo sapiens
  misc_RNA (1)...(19): siRNA sense strand
ccaaagugcgcaagggccu

SEQ ID NO: 2472607 - RNA, 19 nt, Homo sapiens
  misc_RNA (1)...(19): siRNA sense strand
cgugauaacuucuggagca

SEQ ID NO: 2472608 - RNA, 19 nt, Homo sapiens
  misc_RNA (1)...(19): siRNA sense strand
aggaagaggaggaggcgga

SEQ ID NO: 2472609 - RNA, 19 nt, Homo sapiens
  misc_RNA (1)...(19): siRNA sense strand
cagaagacccagaagagga

SEQ ID NO: 2472610 - RNA, 19 nt, Homo sapiens
  misc_RNA (1)...(19): siRNA sense strand
ggacagcaggcgaagguca

SEQ ID NO: 2472611 - RNA, 19 nt, Homo sapiens
  misc_RNA (1)...(19): siRNA sense strand
ccaagaaggugguggccag

SEQ ID NO: 2472612 - RNA, 19 nt, Homo sapiens
  misc_RNA (1)...(19): siRNA sense strand
aggacuuggaagaggacau

SEQ ID NO: 2472613 - RNA, 19 nt, Homo sapiens
  misc_RNA (1)...(19): siRNA sense strand
aaagcaaggaagaggagga

SEQ ID NO: 2472614 - RNA, 19 nt, Homo sapiens
  misc_RNA (1)...(19): siRNA sense strand
gugauaacuucuggagcau

SEQ ID NO: 2472615 - RNA, 19 nt, Homo sapiens
  misc_RNA (1)...(19): siRNA sense strand
ggucggaaagggagcagga

SEQ ID NO: 2472616 - RNA, 19 nt, Homo sapiens
  misc_RNA (1)...(19): siRNA sense strand
cuggcagagcccaagauaa

SEQ ID NO: 2472617 - RNA, 19 nt, Homo sapiens
  misc_RNA (1)...(19): siRNA sense strand
ggaucaucucccuggccaa

SEQ ID NO: 2472618 - RNA, 19 nt, Homo sapiens
  misc_RNA (1)...(19): siRNA sense strand
cuggaauauuacaacaaca

SEQ ID NO: 2472619 - RNA, 19 nt, Homo sapiens
  misc_RNA (1)...(19): siRNA sense strand
ccaaagugcgcaagggccu

SEQ ID NO: 2472620 - RNA, 19 nt, Homo sapiens
  misc_RNA (1)...(19): siRNA sense strand
ucagagaccuaaagggcaa

SEQ ID NO: 2472621 - RNA, 19 nt, Homo sapiens
  misc_RNA (1)...(19): siRNA sense strand
augcguagggagagaaaua

SEQ ID NO: 2472622 - RNA, 19 nt, Homo sapiens
  misc_RNA (1)...(19): siRNA sense strand
cauuagcaguauugagcaa

SEQ ID NO: 2472623 - RNA, 19 nt, Homo sapiens
  misc_RNA (1)...(19): siRNA sense strand
aggauaaguggaagggcaa

SEQ ID NO: 2472624 - RNA, 19 nt, Homo sapiens
  misc_RNA (1)...(19): siRNA sense strand
ccuauggacaaaugaguaa

SEQ ID NO: 2472625 - RNA, 19 nt, Homo sapiens
  misc_RNA (1)...(19): siRNA sense strand
agggcaaauuugaaguuaa

SEQ ID NO: 2472626 - RNA, 19 nt, Homo sapiens
  misc_RNA (1)...(19): siRNA sense strand
caggauaaguggaagggca

SEQ ID NO: 2472627 - RNA, 19 nt, Homo sapiens
  misc_RNA (1)...(19): siRNA sense strand
cagacaaaucagaguaaca

SEQ ID NO: 2472628 - RNA, 19 nt, Homo sapiens
  misc_RNA (1)...(19): siRNA sense strand
agggagagaaauagaaaca

SEQ ID NO: 2472629 - RNA, 19 nt, Homo sapiens
  misc_RNA (1)...(19): siRNA sense strand
gcauauucgcuuagaaaau

SEQ ID NO: 2472630 - RNA, 19 nt, Homo sapiens
  misc_RNA (1)...(19): siRNA sense strand
accuaaagggcaaggaaau

SEQ ID NO: 2472631 - RNA, 19 nt, Homo sapiens
  misc_RNA (1)...(19): siRNA sense strand
uggaaaagcuaaaggccau

SEQ ID NO: 2472632 - RNA, 19 nt, Homo sapiens
  misc_RNA (1)...(19): siRNA sense strand
gguaauaagcguuuggaug

SEQ ID NO: 2472633 - RNA, 19 nt, Homo sapiens
  misc_RNA (1)...(19): siRNA sense strand
gugucuggucucaggauaa

SEQ ID NO: 2472634 - RNA, 19 nt, Homo sapiens
  misc_RNA (1)...(19): siRNA sense strand
aaugaguaauggagaacau

SEQ ID NO: 2472635 - RNA, 19 nt, Homo sapiens
  misc_RNA (1)...(19): siRNA sense strand
agcuaaaggccauaaacaa

SEQ ID NO: 2472636 - RNA, 19 nt, Homo sapiens
  misc_RNA (1)...(19): siRNA sense strand
ccaagggcaaugugggaau

SEQ ID NO: 2472637 - RNA, 19 nt, Homo sapiens
  misc_RNA (1)...(19): siRNA sense strand
acaacaaaccgguuaccaa

SEQ ID NO: 2472638 - RNA, 19 nt, Homo sapiens
  misc_RNA (1)...(19): siRNA sense strand
guuaccaauucaagggaca

SEQ ID NO: 2472639 - RNA, 19 nt, Homo sapiens
  misc_RNA (1)...(19): siRNA sense strand
cugacaaccuauggacaaa

SEQ ID NO: 2472640 - RNA, 19 nt, Homo sapiens
  misc_RNA (1)...(19): siRNA sense strand
aacuuaaacccaagggcaa

SEQ ID NO: 2472641 - RNA, 19 nt, Homo sapiens
  misc_RNA (1)...(19): siRNA sense strand
ugugaauggcaguggacau

SEQ ID NO: 2472642 - RNA, 19 nt, Homo sapiens
  misc_RNA (1)...(19): siRNA sense strand
aagaagaggaggaagccau

SEQ ID NO: 2472643 - RNA, 19 nt, Homo sapiens
  misc_RNA (1)...(19): siRNA sense strand
acuuaaguagccagacaaa

SEQ ID NO: 2472644 - RNA, 19 nt, Homo sapiens
  misc_RNA (1)...(19): siRNA sense strand
guggaguggcugaaaugaa

SEQ ID NO: 2472645 - RNA, 19 nt, Homo sapiens
  misc_RNA (1)...(19): siRNA sense strand
gccagacaaaucagaguaa

SEQ ID NO: 2472646 - RNA, 19 nt, Homo sapiens
  misc_RNA (1)...(19): siRNA sense strand
ggauaaguggaagggcaaa

SEQ ID NO: 2472647 - RNA, 19 nt, Homo sapiens
  misc_RNA (1)...(19): siRNA sense strand
gcaacaaggaccucagcca

SEQ ID NO: 2472648 - RNA, 19 nt, Homo sapiens
  misc_RNA (1)...(19): siRNA sense strand
ucugacaaccuauggacaa

SEQ ID NO: 2472649 - RNA, 19 nt, Homo sapiens
  misc_RNA (1)...(19): siRNA sense strand
gauaaguggaagggcaaau

SEQ ID NO: 2472650 - RNA, 19 nt, Homo sapiens
  misc_RNA (1)...(19): siRNA sense strand
gcguagggagagaaauaga

SEQ ID NO: 2472651 - RNA, 19 nt, Homo sapiens
  misc_RNA (1)...(19): siRNA sense strand
ccaugcguagggagagaaa

SEQ ID NO: 2472652 - RNA, 19 nt, Homo sapiens
  misc_RNA (1)...(19): siRNA sense strand
gguacagcuuugagcagca

SEQ ID NO: 2472653 - RNA, 19 nt, Homo sapiens
  misc_RNA (1)...(19): siRNA sense strand
gaauauuggaacuugggau

SEQ ID NO: 2472654 - RNA, 19 nt, Homo sapiens
  misc_RNA (1)...(19): siRNA sense strand
aaagcuacucugaggauga

SEQ ID NO: 2472655 - RNA, 19 nt, Homo sapiens
  misc_RNA (1)...(19): siRNA sense strand
gcgucaagaagaggaggaa

SEQ ID NO: 2472656 - RNA, 19 nt, Homo sapiens
  misc_RNA (1)...(19): siRNA sense strand
caccaaugucagauccaua

SEQ ID NO: 2472657 - RNA, 19 nt, Homo sapiens
  misc_RNA (1)...(19): siRNA sense strand
aguuauggcuauccaccua

SEQ ID NO: 2472658 - RNA, 19 nt, Homo sapiens
  misc_RNA (1)...(19): siRNA sense strand
gagcuauuacugauggaca

SEQ ID NO: 2472659 - RNA, 19 nt, Homo sapiens
  misc_RNA (1)...(19): siRNA sense strand
caaguggaucucagggaca

SEQ ID NO: 2472660 - RNA, 19 nt, Homo sapiens
  misc_RNA (1)...(19): siRNA sense strand
cugcagaaucgcuggguag

SEQ ID NO: 2472661 - RNA, 19 nt, Homo sapiens
  misc_RNA (1)...(19): siRNA sense strand
aagcuaaaggccauaaaca

SEQ ID NO: 2472662 - RNA, 19 nt, Homo sapiens
  misc_RNA (1)...(19): siRNA sense strand
agaccuaaagggcaaggaa

SEQ ID NO: 2472663 - RNA, 19 nt, Homo sapiens
  misc_RNA (1)...(19): siRNA sense strand
gaagccaugcguagggaga

SEQ ID NO: 2472664 - RNA, 19 nt, Homo sapiens
  misc_RNA (1)...(19): siRNA sense strand
gguaugacuagcauugcaa

SEQ ID NO: 2472665 - RNA, 19 nt, Homo sapiens
  misc_RNA (1)...(19): siRNA sense strand
ccguagaggugcagaucca

SEQ ID NO: 2472666 - RNA, 19 nt, Homo sapiens
  misc_RNA (1)...(19): siRNA sense strand
gagaaagacaagaaaggga

SEQ ID NO: 2472667 - RNA, 19 nt, Homo sapiens
  misc_RNA (1)...(19): siRNA sense strand
agaaagacaagaaagggaa

SEQ ID NO: 2472668 - RNA, 19 nt, Homo sapiens
  misc_RNA (1)...(19): siRNA sense strand
cugcagaagagcuggccaa

SEQ ID NO: 2472669 - RNA, 19 nt, Homo sapiens
  misc_RNA (1)...(19): siRNA sense strand
gaaagaugaagaaggcgaa

SEQ ID NO: 2472670 - RNA, 19 nt, Homo sapiens
  misc_RNA (1)...(19): siRNA sense strand
augaagaaggcgaaaugaa

SEQ ID NO: 2472671 - RNA, 19 nt, Homo sapiens
  misc_RNA (1)...(19): siRNA sense strand
gacaagaaagggaaggaga

SEQ ID NO: 2472672 - RNA, 19 nt, Homo sapiens
  misc_RNA (1)...(19): siRNA sense strand
ugaaagaugaagaaggcga

SEQ ID NO: 2472673 - RNA, 19 nt, Homo sapiens
  misc_RNA (1)...(19): siRNA sense strand
agggauucaaagaagauua

SEQ ID NO: 2472674 - RNA, 19 nt, Homo sapiens
  misc_RNA (1)...(19): siRNA sense strand
cugaagaggucgaaggguc

SEQ ID NO: 2472675 - RNA, 19 nt, Homo sapiens
  misc_RNA (1)...(19): siRNA sense strand
uccuggugcugaagggaaa

SEQ ID NO: 2472676 - RNA, 19 nt, Homo sapiens
  misc_RNA (1)...(19): siRNA sense strand
agauuaagaaaguugccaa

SEQ ID NO: 2472677 - RNA, 19 nt, Homo sapiens
  misc_RNA (1)...(19): siRNA sense strand
acaacuauuacgugaccua

SEQ ID NO: 2472678 - RNA, 19 nt, Homo sapiens
  misc_RNA (1)...(19): siRNA sense strand
cggggaaaggagagaaaga

SEQ ID NO: 2472679 - RNA, 19 nt, Homo sapiens
  misc_RNA (1)...(19): siRNA sense strand
ccaucguggaggagaagau

SEQ ID NO: 2472680 - RNA, 19 nt, Homo sapiens
  misc_RNA (1)...(19): siRNA sense strand
gcuucaacgaccugacaga

SEQ ID NO: 2472681 - RNA, 19 nt, Homo sapiens
  misc_RNA (1)...(19): siRNA sense strand
agucugagguggaggaguc

SEQ ID NO: 2472682 - RNA, 19 nt, Homo sapiens
  misc_RNA (1)...(19): siRNA sense strand
acuuacaacuauuacguga

SEQ ID NO: 2472683 - RNA, 19 nt, Homo sapiens
  misc_RNA (1)...(19): siRNA sense strand
agggaaacccacuggccuu

SEQ ID NO: 2472684 - RNA, 19 nt, Homo sapiens
  misc_RNA (1)...(19): siRNA sense strand
aaagggaaggagaaagaca

SEQ ID NO: 2472685 - RNA, 19 nt, Homo sapiens
  misc_RNA (1)...(19): siRNA sense strand
ugcugaagaagaagaaaga

SEQ ID NO: 2472686 - RNA, 19 nt, Homo sapiens
  misc_RNA (1)...(19): siRNA sense strand
cgguggaucugcagggaga

SEQ ID NO: 2472687 - RNA, 19 nt, Homo sapiens
  misc_RNA (1)...(19): siRNA sense strand
uuugaggcuucgagggaaa

SEQ ID NO: 2472688 - RNA, 19 nt, Homo sapiens
  misc_RNA (1)...(19): siRNA sense strand
acguggagaaugaggagua

SEQ ID NO: 2472689 - RNA, 19 nt, Homo sapiens
  misc_RNA (1)...(19): siRNA sense strand
ggcucaaggagguggauga

SEQ ID NO: 2472690 - RNA, 19 nt, Homo sapiens
  misc_RNA (1)...(19): siRNA sense strand
gggaagaacaggaaggagc

SEQ ID NO: 2472691 - RNA, 19 nt, Homo sapiens
  misc_RNA (1)...(19): siRNA sense strand
gagggaaaagcuacagaaa

SEQ ID NO: 2472692 - RNA, 19 nt, Homo sapiens
  misc_RNA (1)...(19): siRNA sense strand
gcagugagugagcgggaca

SEQ ID NO: 2472693 - RNA, 19 nt, Homo sapiens
  misc_RNA (1)...(19): siRNA sense strand
agguuggcaaggagggcaa

SEQ ID NO: 2472694 - RNA, 19 nt, Homo sapiens
  misc_RNA (1)...(19): siRNA sense strand
agaugaagcaggagcugga

SEQ ID NO: 2472695 - RNA, 19 nt, Homo sapiens
  misc_RNA (1)...(19): siRNA sense strand
ggccagacuuugaggcuuc

SEQ ID NO: 2472696 - RNA, 19 nt, Homo sapiens
  misc_RNA (1)...(19): siRNA sense strand
uggaauauggacaggaucu

SEQ ID NO: 2472697 - RNA, 19 nt, Homo sapiens
  misc_RNA (1)...(19): siRNA sense strand
ugucagggcucaaggaggu

SEQ ID NO: 2472698 - RNA, 19 nt, Homo sapiens
  misc_RNA (1)...(19): siRNA sense strand
uuucugacgcagugaguga

SEQ ID NO: 2472699 - RNA, 19 nt, Homo sapiens
  misc_RNA (1)...(19): siRNA sense strand
caaauaauacagagggcuu

SEQ ID NO: 2472700 - RNA, 19 nt, Homo sapiens
  misc_RNA (1)...(19): siRNA sense strand
ccaucagguacaaaggaua

SEQ ID NO: 2472701 - RNA, 19 nt, Homo sapiens
  misc_RNA (1)...(19): siRNA sense strand
cgcaauuugugcagcggaa

SEQ ID NO: 2472702 - RNA, 19 nt, Homo sapiens
  misc_RNA (1)...(19): siRNA sense strand
ccguauaauuauggaagau

SEQ ID NO: 2472703 - RNA, 19 nt, Homo sapiens
  misc_RNA (1)...(19): siRNA sense strand
agaaauaacagcuggcgca

SEQ ID NO: 2472704 - RNA, 19 nt, Homo sapiens
  misc_RNA (1)...(19): siRNA sense strand
ccuacuaugcaguguaaaa

SEQ ID NO: 2472705 - RNA, 19 nt, Homo sapiens
  misc_RNA (1)...(19): siRNA sense strand
cuaucaaugcuuaaagaca

SEQ ID NO: 2472706 - RNA, 19 nt, Homo sapiens
  misc_RNA (1)...(19): siRNA sense strand
aggaaauuucaccguauaa

SEQ ID NO: 2472707 - RNA, 19 nt, Homo sapiens
  misc_RNA (1)...(19): siRNA sense strand
acagagaccaguaacgcaa

SEQ ID NO: 2472708 - RNA, 19 nt, Homo sapiens
  misc_RNA (1)...(19): siRNA sense strand
caguaacgcaagagaucca

SEQ ID NO: 2472709 - RNA, 19 nt, Homo sapiens
  misc_RNA (1)...(19): siRNA sense strand
cggaauucuauguaacaca

SEQ ID NO: 2472710 - RNA, 19 nt, Homo sapiens
  misc_RNA (1)...(19): siRNA sense strand
cucaaauguaccacguaaa

SEQ ID NO: 2472711 - RNA, 19 nt, Homo sapiens
  misc_RNA (1)...(19): siRNA sense strand
gaaauaacagcuggcgcaa

SEQ ID NO: 2472712 - RNA, 19 nt, Homo sapiens
  misc_RNA (1)...(19): siRNA sense strand
cugaggugacugaaccaaa

SEQ ID NO: 2472713 - RNA, 19 nt, Homo sapiens
  misc_RNA (1)...(19): siRNA sense strand
ccucagagcucaaggcaga

SEQ ID NO: 2472714 - RNA, 19 nt, Homo sapiens
  misc_RNA (1)...(19): siRNA sense strand
cagcaaagaaggaccgcaa

SEQ ID NO: 2472715 - RNA, 19 nt, Homo sapiens
  misc_RNA (1)...(19): siRNA sense strand
agggagaagugcagggcca

SEQ ID NO: 2472716 - RNA, 19 nt, Homo sapiens
  misc_RNA (1)...(19): siRNA sense strand
gcgcaaaaccugaaggcga

SEQ ID NO: 2472717 - RNA, 19 nt, Homo sapiens
  misc_RNA (1)...(19): siRNA sense strand
aggcggagcugcaaggcau

SEQ ID NO: 2472718 - RNA, 19 nt, Homo sapiens
  misc_RNA (1)...(19): siRNA sense strand
uggaagacuuugagggcug

SEQ ID NO: 2472719 - RNA, 19 nt, Homo sapiens
  misc_RNA (1)...(19): siRNA sense strand
cgaccgucucucaggacaa

SEQ ID NO: 2472720 - RNA, 19 nt, Homo sapiens
  misc_RNA (1)...(19): siRNA sense strand
uggagaagcugcacaggca

SEQ ID NO: 2472721 - RNA, 19 nt, Homo sapiens
  misc_RNA (1)...(19): siRNA sense strand
agacaagggccaaggagcu

SEQ ID NO: 2472722 - RNA, 19 nt, Homo sapiens
  misc_RNA (1)...(19): siRNA sense strand
cccaggagccacaggucaa

SEQ ID NO: 2472723 - RNA, 19 nt, Homo sapiens
  misc_RNA (1)...(19): siRNA sense strand
ccacagaggaggcugagga

SEQ ID NO: 2472724 - RNA, 19 nt, Homo sapiens
  misc_RNA (1)...(19): siRNA sense strand
uggaggaagacaagggcca

SEQ ID NO: 2472725 - RNA, 19 nt, Homo sapiens
  misc_RNA (1)...(19): siRNA sense strand
agcucaaggcagacagcaa

SEQ ID NO: 2472726 - RNA, 19 nt, Homo sapiens
  misc_RNA (1)...(19): siRNA sense strand
ggaagacagaggcgcaaaa

SEQ ID NO: 2472727 - RNA, 19 nt, Homo sapiens
  misc_RNA (1)...(19): siRNA sense strand
ggucgaucucagaggagga

SEQ ID NO: 2472728 - RNA, 19 nt, Homo sapiens
  misc_RNA (1)...(19): siRNA sense strand
gcuggaagacagaggcgca

SEQ ID NO: 2472729 - RNA, 19 nt, Homo sapiens
  misc_RNA (1)...(19): siRNA sense strand
caucauagccaaagaggga

SEQ ID NO: 2472730 - RNA, 19 nt, Homo sapiens
  misc_RNA (1)...(19): siRNA sense strand
uggcagaagcagaggugga

SEQ ID NO: 2472731 - RNA, 19 nt, Homo sapiens
  misc_RNA (1)...(19): siRNA sense strand
augaacaaggccaggaaau

SEQ ID NO: 2472732 - RNA, 19 nt, Homo sapiens
  misc_RNA (1)...(19): siRNA sense strand
ccugaugaccugggugaaa

SEQ ID NO: 2472733 - RNA, 19 nt, Homo sapiens
  misc_RNA (1)...(19): siRNA sense strand
gaguaauucaccaggagga

SEQ ID NO: 2472734 - RNA, 19 nt, Homo sapiens
  misc_RNA (1)...(19): siRNA sense strand
gaagauguccauuggcaca

SEQ ID NO: 2472735 - RNA, 19 nt, Homo sapiens
  misc_RNA (1)...(19): siRNA sense strand
aggagauguuugaggcugu

SEQ ID NO: 2472736 - RNA, 19 nt, Homo sapiens
  misc_RNA (1)...(19): siRNA sense strand
agucagaaaccaaaaguau

SEQ ID NO: 2472737 - RNA, 19 nt, Homo sapiens
  misc_RNA (1)...(19): siRNA sense strand
cugauaacuuccuaaacau

SEQ ID NO: 2472738 - RNA, 19 nt, Homo sapiens
  misc_RNA (1)...(19): siRNA sense strand
aauuuaagaccauggaguu

SEQ ID NO: 2472739 - RNA, 19 nt, Homo sapiens
  misc_RNA (1)...(19): siRNA sense strand
cagagaugggacggaguaa

SEQ ID NO: 2472740 - RNA, 19 nt, Homo sapiens
  misc_RNA (1)...(19): siRNA sense strand
caauuuaagaccauggagu

SEQ ID NO: 2472741 - RNA, 19 nt, Homo sapiens
  misc_RNA (1)...(19): siRNA sense strand
ccacguuggccgaggucaa

SEQ ID NO: 2472742 - RNA, 19 nt, Homo sapiens
  misc_RNA (1)...(19): siRNA sense strand
ccauguacgaggagcucaa

SEQ ID NO: 2472743 - RNA, 19 nt, Homo sapiens
  misc_RNA (1)...(19): siRNA sense strand
aggaggaggaagaggagga

SEQ ID NO: 2472744 - RNA, 19 nt, Homo sapiens
  misc_RNA (1)...(19): siRNA sense strand
aggaggaagaggaggagga

SEQ ID NO: 2472745 - RNA, 19 nt, Homo sapiens
  misc_RNA (1)...(19): siRNA sense strand
aggaagaaggacuggacga

SEQ ID NO: 2472746 - RNA, 19 nt, Homo sapiens
  misc_RNA (1)...(19): siRNA sense strand
uggccgaggucaaggagga

SEQ ID NO: 2472747 - RNA, 19 nt, Homo sapiens
  misc_RNA (1)...(19): siRNA sense strand
aggucaaggaggaaggcga

SEQ ID NO: 2472748 - RNA, 19 nt, Homo sapiens
  misc_RNA (1)...(19): siRNA sense strand
aggaggaggaagaaggacu

SEQ ID NO: 2472749 - RNA, 19 nt, Homo sapiens
  misc_RNA (1)...(19): siRNA sense strand
aggaggaggaggaagagga

SEQ ID NO: 2472750 - RNA, 19 nt, Homo sapiens
  misc_RNA (1)...(19): siRNA sense strand
ccuuauuaaauguggagaa

SEQ ID NO: 2472751 - RNA, 19 nt, Homo sapiens
  misc_RNA (1)...(19): siRNA sense strand
agacagaauuggaugcuca

SEQ ID NO: 2472752 - RNA, 19 nt, Homo sapiens
  misc_RNA (1)...(19): siRNA sense strand
ggggaaaccagaagggcaa

SEQ ID NO: 2472753 - RNA, 19 nt, Homo sapiens
  misc_RNA (1)...(19): siRNA sense strand
gaaacuuuauagaaggaga

SEQ ID NO: 2472754 - RNA, 19 nt, Homo sapiens
  misc_RNA (1)...(19): siRNA sense strand
accaaaauauggacagaaa

SEQ ID NO: 2472755 - RNA, 19 nt, Homo sapiens
  misc_RNA (1)...(19): siRNA sense strand
cugaacaggaauuaagaau

SEQ ID NO: 2472756 - RNA, 19 nt, Homo sapiens
  misc_RNA (1)...(19): siRNA sense strand
gcugcagaaacuagaaauu

SEQ ID NO: 2472757 - RNA, 19 nt, Homo sapiens
  misc_RNA (1)...(19): siRNA sense strand
agaaaggaaacuauugcaa

SEQ ID NO: 2472758 - RNA, 19 nt, Homo sapiens
  misc_RNA (1)...(19): siRNA sense strand
cuuaaggaguguaguggca

SEQ ID NO: 2472759 - RNA, 19 nt, Homo sapiens
  misc_RNA (1)...(19): siRNA sense strand
gaguguaguggcagcagaa

SEQ ID NO: 2472760 - RNA, 19 nt, Homo sapiens
  misc_RNA (1)...(19): siRNA sense strand
aaguguuauugcagccaaa

SEQ ID NO: 2472761 - RNA, 19 nt, Homo sapiens
  misc_RNA (1)...(19): siRNA sense strand
augccaggauagaagaauu

SEQ ID NO: 2472762 - RNA, 19 nt, Homo sapiens
  misc_RNA (1)...(19): siRNA sense strand
cuuuauagaaggagauuac

SEQ ID NO: 2472763 - RNA, 19 nt, Homo sapiens
  misc_RNA (1)...(19): siRNA sense strand
gacuucugcuagagggaau

SEQ ID NO: 2472764 - RNA, 19 nt, Homo sapiens
  misc_RNA (1)...(19): siRNA sense strand
ccaaaauauggacagaaaa

SEQ ID NO: 2472765 - RNA, 19 nt, Homo sapiens
  misc_RNA (1)...(19): siRNA sense strand
gggaaucagcaguacacau

SEQ ID NO: 2472766 - RNA, 19 nt, Homo sapiens
  misc_RNA (1)...(19): siRNA sense strand
uauuaaauguggagaaacc

SEQ ID NO: 2472767 - RNA, 19 nt, Homo sapiens
  misc_RNA (1)...(19): siRNA sense strand
ucugaaugacuuuguagaa

SEQ ID NO: 2472768 - RNA, 19 nt, Homo sapiens
  misc_RNA (1)...(19): siRNA sense strand
ugaguuuggcccaggaaca

SEQ ID NO: 2472769 - RNA, 19 nt, Homo sapiens
  misc_RNA (1)...(19): siRNA sense strand
gcaaaguggaagagcagca

SEQ ID NO: 2472770 - RNA, 19 nt, Homo sapiens
  misc_RNA (1)...(19): siRNA sense strand
agaccaaccuggacgccua

SEQ ID NO: 2472771 - RNA, 19 nt, Homo sapiens
  misc_RNA (1)...(19): siRNA sense strand
ccggcaaaguggaagagca

SEQ ID NO: 2472772 - RNA, 19 nt, Homo sapiens
  misc_RNA (1)...(19): siRNA sense strand
cggcaaaguggaagagcag

SEQ ID NO: 2472773 - RNA, 19 nt, Homo sapiens
  misc_RNA (1)...(19): siRNA sense strand
cauaaguucuuuugcgaga

SEQ ID NO: 2472774 - RNA, 19 nt, Homo sapiens
  misc_RNA (1)...(19): siRNA sense strand
ccaaagggucagcagggaa

SEQ ID NO: 2472775 - RNA, 19 nt, Homo sapiens
  misc_RNA (1)...(19): siRNA sense strand
ggcccaagggugagaacca

SEQ ID NO: 2472776 - RNA, 19 nt, Homo sapiens
  misc_RNA (1)...(19): siRNA sense strand
cggaacaaguuuaagguca

SEQ ID NO: 2472777 - RNA, 19 nt, Homo sapiens
  misc_RNA (1)...(19): siRNA sense strand
gcaacuuggaagagaucaa

SEQ ID NO: 2472778 - RNA, 19 nt, Homo sapiens
  misc_RNA (1)...(19): siRNA sense strand
ccauaauaaucuagaucca

SEQ ID NO: 2472779 - RNA, 19 nt, Homo sapiens
  misc_RNA (1)...(19): siRNA sense strand
uaguggaaguggagcaaau

SEQ ID NO: 2472780 - RNA, 19 nt, Homo sapiens
  misc_RNA (1)...(19): siRNA sense strand
cgugauagacaucgagaga

SEQ ID NO: 2472781 - RNA, 19 nt, Homo sapiens
  misc_RNA (1)...(19): siRNA sense strand
agaucaaguuaguggaagu

SEQ ID NO: 2472782 - RNA, 19 nt, Homo sapiens
  misc_RNA (1)...(19): siRNA sense strand
agccaguuguagaaagaaa

SEQ ID NO: 2472783 - RNA, 19 nt, Homo sapiens
  misc_RNA (1)...(19): siRNA sense strand
ugaaaguggucgaaggugu

SEQ ID NO: 2472784 - RNA, 19 nt, Homo sapiens
  misc_RNA (1)...(19): siRNA sense strand
agaacuuaccuaauggaua

SEQ ID NO: 2472785 - RNA, 19 nt, Homo sapiens
  misc_RNA (1)...(19): siRNA sense strand
ugaugaugggaaugaguua

SEQ ID NO: 2472786 - RNA, 19 nt, Homo sapiens
  misc_RNA (1)...(19): siRNA sense strand
ggagcaaauaacacagaau

SEQ ID NO: 2472787 - RNA, 19 nt, Homo sapiens
  misc_RNA (1)...(19): siRNA sense strand
aggaacaaguacauaccua

SEQ ID NO: 2472788 - RNA, 19 nt, Homo sapiens
  misc_RNA (1)...(19): siRNA sense strand
gugcaagaagagcggaaaa

SEQ ID NO: 2472789 - RNA, 19 nt, Homo sapiens
  misc_RNA (1)...(19): siRNA sense strand
gcuaaguagggaugaagau

SEQ ID NO: 2472790 - RNA, 19 nt, Homo sapiens
  misc_RNA (1)...(19): siRNA sense strand
acauguugcaagagauuau

SEQ ID NO: 2472791 - RNA, 19 nt, Homo sapiens
  misc_RNA (1)...(19): siRNA sense strand
gcauaauggaacuuacaga

SEQ ID NO: 2472792 - RNA, 19 nt, Homo sapiens
  misc_RNA (1)...(19): siRNA sense strand
ccauuggaggcaaggguuu

SEQ ID NO: 2472793 - RNA, 19 nt, Homo sapiens
  misc_RNA (1)...(19): siRNA sense strand
uguggaugaugaugggaau

SEQ ID NO: 2472794 - RNA, 19 nt, Homo sapiens
  misc_RNA (1)...(19): siRNA sense strand
accuacaacuccaggauuu

SEQ ID NO: 2472795 - RNA, 19 nt, Homo sapiens
  misc_RNA (1)...(19): siRNA sense strand
uggcuaugacagugaugaa

SEQ ID NO: 2472796 - RNA, 19 nt, Homo sapiens
  misc_RNA (1)...(19): siRNA sense strand
cagaaugggacacuggcua

SEQ ID NO: 2472797 - RNA, 19 nt, Homo sapiens
  misc_RNA (1)...(19): siRNA sense strand
gugugcaagaagagcggaa

SEQ ID NO: 2472798 - RNA, 19 nt, Homo sapiens
  misc_RNA (1)...(19): siRNA sense strand
uaggaaaacuagacacaau

SEQ ID NO: 2472799 - RNA, 19 nt, Homo sapiens
  misc_RNA (1)...(19): siRNA sense strand
uuguagcuguccagauaaa

SEQ ID NO: 2472800 - RNA, 19 nt, Homo sapiens
  misc_RNA (1)...(19): siRNA sense strand
guggaaguggagcaaauaa

SEQ ID NO: 2472801 - RNA, 19 nt, Homo sapiens
  misc_RNA (1)...(19): siRNA sense strand
cagauaaccaucggaacaa

SEQ ID NO: 2472802 - RNA, 19 nt, Homo sapiens
  misc_RNA (1)...(19): siRNA sense strand
guagggaugaagaugacaa

SEQ ID NO: 2472803 - RNA, 19 nt, Homo sapiens
  misc_RNA (1)...(19): siRNA sense strand
aguuaguggaaguggagca

SEQ ID NO: 2472804 - RNA, 19 nt, Homo sapiens
  misc_RNA (1)...(19): siRNA sense strand
ccgcaagcuaaguagggau

SEQ ID NO: 2472805 - RNA, 19 nt, Homo sapiens
  misc_RNA (1)...(19): siRNA sense strand
ggaagguggcagugacucu

SEQ ID NO: 2472806 - RNA, 19 nt, Homo sapiens
  misc_RNA (1)...(19): siRNA sense strand
caaauuuguuuuagggcca

SEQ ID NO: 2472807 - RNA, 19 nt, Homo sapiens
  misc_RNA (1)...(19): siRNA sense strand
agaugacaauuuaggacca

SEQ ID NO: 2472808 - RNA, 19 nt, Homo sapiens
  misc_RNA (1)...(19): siRNA sense strand
caaauaacacagaauggga

SEQ ID NO: 2472809 - RNA, 19 nt, Homo sapiens
  misc_RNA (1)...(19): siRNA sense strand
ugggaagcccgcaagcuaa

SEQ ID NO: 2472810 - RNA, 19 nt, Homo sapiens
  misc_RNA (1)...(19): siRNA sense strand
gcuuaauuacauacagguu

SEQ ID NO: 2472811 - RNA, 19 nt, Homo sapiens
  misc_RNA (1)...(19): siRNA sense strand
caaacgugacucaguaaaa

SEQ ID NO: 2472812 - RNA, 19 nt, Homo sapiens
  misc_RNA (1)...(19): siRNA sense strand
cagcacaccaaaagaagaa

SEQ ID NO: 2472813 - RNA, 19 nt, Homo sapiens
  misc_RNA (1)...(19): siRNA sense strand
ugaugaacgaagagaugca

SEQ ID NO: 2472814 - RNA, 19 nt, Homo sapiens
  misc_RNA (1)...(19): siRNA sense strand
ccaccaaccugaagaccca

SEQ ID NO: 2472815 - RNA, 19 nt, Homo sapiens
  misc_RNA (1)...(19): siRNA sense strand
cggacuuggaugagauuca

SEQ ID NO: 2472816 - RNA, 19 nt, Homo sapiens
  misc_RNA (1)...(19): siRNA sense strand
cguacaagaaagagaaaca

SEQ ID NO: 2472817 - RNA, 19 nt, Homo sapiens
  misc_RNA (1)...(19): siRNA sense strand
ucagagaagaggaggaaaa

SEQ ID NO: 2472818 - RNA, 19 nt, Homo sapiens
  misc_RNA (1)...(19): siRNA sense strand
aaacagaaggagaagaaaa

SEQ ID NO: 2472819 - RNA, 19 nt, Homo sapiens
  misc_RNA (1)...(19): siRNA sense strand
aaagagaaacagaaggaga

SEQ ID NO: 2472820 - RNA, 19 nt, Homo sapiens
  misc_RNA (1)...(19): siRNA sense strand
aggccaaagcguacaagaa

SEQ ID NO: 2472821 - RNA, 19 nt, Homo sapiens
  misc_RNA (1)...(19): siRNA sense strand
cggaagagagagaaaagaa

SEQ ID NO: 2472822 - RNA, 19 nt, Homo sapiens
  misc_RNA (1)...(19): siRNA sense strand
agauggaagagaagcagaa

SEQ ID NO: 2472823 - RNA, 19 nt, Homo sapiens
  misc_RNA (1)...(19): siRNA sense strand
gggacuacaagguggacuu

SEQ ID NO: 2472824 - RNA, 19 nt, Homo sapiens
  misc_RNA (1)...(19): siRNA sense strand
agaagauggaagagaagca

SEQ ID NO: 2472825 - RNA, 19 nt, Homo sapiens
  misc_RNA (1)...(19): siRNA sense strand
gagaagaggcucacggaag

SEQ ID NO: 2472826 - RNA, 19 nt, Homo sapiens
  misc_RNA (1)...(19): siRNA sense strand
aggaaaggaugaaggagcu

SEQ ID NO: 2472827 - RNA, 19 nt, Homo sapiens
  misc_RNA (1)...(19): siRNA sense strand
ugacauuugaggaggacga

SEQ ID NO: 2472828 - RNA, 19 nt, Homo sapiens
  misc_RNA (1)...(19): siRNA sense strand
aggaaaaggccaaagcgua

SEQ ID NO: 2472829 - RNA, 19 nt, Homo sapiens
  misc_RNA (1)...(19): siRNA sense strand
uggaaagaaacaucagaga

SEQ ID NO: 2472830 - RNA, 19 nt, Homo sapiens
  misc_RNA (1)...(19): siRNA sense strand
aagaagaagauggaagaga

SEQ ID NO: 2472831 - RNA, 19 nt, Homo sapiens
  misc_RNA (1)...(19): siRNA sense strand
ggaaaaggccaaagcguac

SEQ ID NO: 2472832 - RNA, 19 nt, Homo sapiens
  misc_RNA (1)...(19): siRNA sense strand
cucacggaagagagagaaa

SEQ ID NO: 2472833 - RNA, 19 nt, Homo sapiens
  misc_RNA (1)...(19): siRNA sense strand
agugggacaaagaugaaua

SEQ ID NO: 2472834 - RNA, 19 nt, Homo sapiens
  misc_RNA (1)...(19): siRNA sense strand
cugcaaugucugugacugu

SEQ ID NO: 2472835 - RNA, 19 nt, Homo sapiens
  misc_RNA (1)...(19): siRNA sense strand
gaggaaaggaugaaggagc

SEQ ID NO: 2472836 - RNA, 19 nt, Homo sapiens
  misc_RNA (1)...(19): siRNA sense strand
cgagaagaggcucacggaa

SEQ ID NO: 2472837 - RNA, 19 nt, Homo sapiens
  misc_RNA (1)...(19): siRNA sense strand
ccucaugccuacaggguca

SEQ ID NO: 2472838 - RNA, 19 nt, Homo sapiens
  misc_RNA (1)...(19): siRNA sense strand
ccgucuggauaaagaggaa

SEQ ID NO: 2472839 - RNA, 19 nt, Homo sapiens
  misc_RNA (1)...(19): siRNA sense strand
cauccaugacagaggacua

SEQ ID NO: 2472840 - RNA, 19 nt, Homo sapiens
  misc_RNA (1)...(19): siRNA sense strand
cugcugacguccagggaga

SEQ ID NO: 2472841 - RNA, 19 nt, Homo sapiens
  misc_RNA (1)...(19): siRNA sense strand
aggacuaugcagggagaua

SEQ ID NO: 2472842 - RNA, 19 nt, Homo sapiens
  misc_RNA (1)...(19): siRNA sense strand
ggauaaagaggaaagccca

SEQ ID NO: 2472843 - RNA, 19 nt, Homo sapiens
  misc_RNA (1)...(19): siRNA sense strand
ucacggagcccaauggaca

SEQ ID NO: 2472844 - RNA, 19 nt, Homo sapiens
  misc_RNA (1)...(19): siRNA sense strand
gaaauggacacucggcaga

SEQ ID NO: 2472845 - RNA, 19 nt, Homo sapiens
  misc_RNA (1)...(19): siRNA sense strand
gcucauagucucaggaucc

SEQ ID NO: 2472846 - RNA, 19 nt, Homo sapiens
  misc_RNA (1)...(19): siRNA sense strand
aguaaggaacccagcacaa

SEQ ID NO: 2472847 - RNA, 19 nt, Homo sapiens
  misc_RNA (1)...(19): siRNA sense strand
ggcaaugucuccacggcaa

SEQ ID NO: 2472848 - RNA, 19 nt, Homo sapiens
  misc_RNA (1)...(19): siRNA sense strand
ccacaaugaaagagcucca

SEQ ID NO: 2472849 - RNA, 19 nt, Homo sapiens
  misc_RNA (1)...(19): siRNA sense strand
ccagaugaugguugaacau

SEQ ID NO: 2472850 - RNA, 19 nt, Homo sapiens
  misc_RNA (1)...(19): siRNA sense strand
ggcaacagcagcaaggaga

SEQ ID NO: 2472851 - RNA, 19 nt, Homo sapiens
  misc_RNA (1)...(19): siRNA sense strand
ccccagagauagaugaaga

SEQ ID NO: 2472852 - RNA, 19 nt, Homo sapiens
  misc_RNA (1)...(19): siRNA sense strand
acagcagcaaggagaggaa

SEQ ID NO: 2472853 - RNA, 19 nt, Homo sapiens
  misc_RNA (1)...(19): siRNA sense strand
agauagaugaagaccggau

SEQ ID NO: 2472854 - RNA, 19 nt, Homo sapiens
  misc_RNA (1)...(19): siRNA sense strand
ucgccaagaugaagggcua

SEQ ID NO: 2472855 - RNA, 19 nt, Homo sapiens
  misc_RNA (1)...(19): siRNA sense strand
ggcaaaagaaagaaugaaa

SEQ ID NO: 2472856 - RNA, 19 nt, Homo sapiens
  misc_RNA (1)...(19): siRNA sense strand
aguagaagaagauggaaaa

SEQ ID NO: 2472857 - RNA, 19 nt, Homo sapiens
  misc_RNA (1)...(19): siRNA sense strand
aggugauagaguagaagaa

SEQ ID NO: 2472858 - RNA, 19 nt, Homo sapiens
  misc_RNA (1)...(19): siRNA sense strand
gcagugaggaagaagguga

SEQ ID NO: 2472859 - RNA, 19 nt, Homo sapiens
  misc_RNA (1)...(19): siRNA sense strand
aggagaugaagaugacaaa

SEQ ID NO: 2472860 - RNA, 19 nt, Homo sapiens
  misc_RNA (1)...(19): siRNA sense strand
agaaaauaacccaggagua

SEQ ID NO: 2472861 - RNA, 19 nt, Homo sapiens
  misc_RNA (1)...(19): siRNA sense strand
agaugcaagcagugaggaa

SEQ ID NO: 2472862 - RNA, 19 nt, Homo sapiens
  misc_RNA (1)...(19): siRNA sense strand
caggagaugaagaugacaa

SEQ ID NO: 2472863 - RNA, 19 nt, Homo sapiens
  misc_RNA (1)...(19): siRNA sense strand
acugcaaagaagaggaaaa

SEQ ID NO: 2472864 - RNA, 19 nt, Homo sapiens
  misc_RNA (1)...(19): siRNA sense strand
cggaaaggauuuaacgaag

SEQ ID NO: 2472865 - RNA, 19 nt, Homo sapiens
  misc_RNA (1)...(19): siRNA sense strand
aggaagaaggugauagagu

SEQ ID NO: 2472866 - RNA, 19 nt, Homo sapiens
  misc_RNA (1)...(19): siRNA sense strand
agaagauggaaaaggcaaa

SEQ ID NO: 2472867 - RNA, 19 nt, Homo sapiens
  misc_RNA (1)...(19): siRNA sense strand
acgaaggauugugggaaau

SEQ ID NO: 2472868 - RNA, 19 nt, Homo sapiens
  misc_RNA (1)...(19): siRNA sense strand
augcaagcagugaggaaga

SEQ ID NO: 2472869 - RNA, 19 nt, Homo sapiens
  misc_RNA (1)...(19): siRNA sense strand
auggaaaaggcaaaagaaa

SEQ ID NO: 2472870 - RNA, 19 nt, Homo sapiens
  misc_RNA (1)...(19): siRNA sense strand
cgggcaacgacacaagaaa

SEQ ID NO: 2472871 - RNA, 19 nt, Homo sapiens
  misc_RNA (1)...(19): siRNA sense strand
auaaggaguacaaagacaa

SEQ ID NO: 2472872 - RNA, 19 nt, Homo sapiens
  misc_RNA (1)...(19): siRNA sense strand
cugugaagccuccagcaaa

SEQ ID NO: 2472873 - RNA, 19 nt, Homo sapiens
  misc_RNA (1)...(19): siRNA sense strand
cuaccaggcaauucagcaa

SEQ ID NO: 2472874 - RNA, 19 nt, Homo sapiens
  misc_RNA (1)...(19): siRNA sense strand
ccauauaaggaguacaaag

SEQ ID NO: 2472875 - RNA, 19 nt, Homo sapiens
  misc_RNA (1)...(19): siRNA sense strand
agacugcaaagaagaggaa

SEQ ID NO: 2472876 - RNA, 19 nt, Homo sapiens
  misc_RNA (1)...(19): siRNA sense strand
ccucuaaacagucccggaa

SEQ ID NO: 2472877 - RNA, 19 nt, Homo sapiens
  misc_RNA (1)...(19): siRNA sense strand
gcagaaagcugaaggacac

SEQ ID NO: 2472878 - RNA, 19 nt, Homo sapiens
  misc_RNA (1)...(19): siRNA sense strand
aagaaaagugggagaauga

SEQ ID NO: 2472879 - RNA, 19 nt, Homo sapiens
  misc_RNA (1)...(19): siRNA sense strand
agcagaaagcugaaggaca

SEQ ID NO: 2472880 - RNA, 19 nt, Homo sapiens
  misc_RNA (1)...(19): siRNA sense strand
ggaagaaacuaaaugucac

SEQ ID NO: 2472881 - RNA, 19 nt, Homo sapiens
  misc_RNA (1)...(19): siRNA sense strand
augaaagaaaagugggaga

SEQ ID NO: 2472882 - RNA, 19 nt, Homo sapiens
  misc_RNA (1)...(19): siRNA sense strand
augacaaggauguggccau

SEQ ID NO: 2472883 - RNA, 19 nt, Homo sapiens
  misc_RNA (1)...(19): siRNA sense strand
ggagccaagugcaggagca

SEQ ID NO: 2472884 - RNA, 19 nt, Homo sapiens
  misc_RNA (1)...(19): siRNA sense strand
ugguauaugacgugcgaaa

SEQ ID NO: 2472885 - RNA, 19 nt, Homo sapiens
  misc_RNA (1)...(19): siRNA sense strand
cguaacagcuacuuggcua

SEQ ID NO: 2472886 - RNA, 19 nt, Homo sapiens
  misc_RNA (1)...(19): siRNA sense strand
gcccagagaaugauggcaa

SEQ ID NO: 2472887 - RNA, 19 nt, Homo sapiens
  misc_RNA (1)...(19): siRNA sense strand
uuuccaaagcccagagaau

SEQ ID NO: 2472888 - RNA, 19 nt, Homo sapiens
  misc_RNA (1)...(19): siRNA sense strand
cugaaggaacagaugcuaa

SEQ ID NO: 2472889 - RNA, 19 nt, Homo sapiens
  misc_RNA (1)...(19): siRNA sense strand
agacaaauaccguggucca

SEQ ID NO: 2472890 - RNA, 19 nt, Homo sapiens
  misc_RNA (1)...(19): siRNA sense strand
aagucagaauuuacagcaa

SEQ ID NO: 2472891 - RNA, 19 nt, Homo sapiens
  misc_RNA (1)...(19): siRNA sense strand
cuaccuuaacagagaagau

SEQ ID NO: 2472892 - RNA, 19 nt, Homo sapiens
  misc_RNA (1)...(19): siRNA sense strand
ggaucauggcauacuguga

SEQ ID NO: 2472893 - RNA, 19 nt, Homo sapiens
  misc_RNA (1)...(19): siRNA sense strand
gagaacagcucccggcacu

SEQ ID NO: 2472894 - RNA, 19 nt, Homo sapiens
  misc_RNA (1)...(19): siRNA sense strand
gauaagugcacuaggcuuc

SEQ ID NO: 2472895 - RNA, 19 nt, Homo sapiens
  misc_RNA (1)...(19): siRNA sense strand
aggugaaccguaacagcua

SEQ ID NO: 2472896 - RNA, 19 nt, Homo sapiens
  misc_RNA (1)...(19): siRNA sense strand
uaacagagaagauggucca

SEQ ID NO: 2472897 - RNA, 19 nt, Homo sapiens
  misc_RNA (1)...(19): siRNA sense strand
ucagaaagccagaugccca

SEQ ID NO: 2472898 - RNA, 19 nt, Homo sapiens
  misc_RNA (1)...(19): siRNA sense strand
gggugaaggaggaagagau

SEQ ID NO: 2472899 - RNA, 19 nt, Homo sapiens
  misc_RNA (1)...(19): siRNA sense strand
ugauggagauggagcccaa

SEQ ID NO: 2472900 - RNA, 19 nt, Homo sapiens
  misc_RNA (1)...(19): siRNA sense strand
ugugagacguugacggaga

SEQ ID NO: 2472901 - RNA, 19 nt, Homo sapiens
  misc_RNA (1)...(19): siRNA sense strand
gagacaugcaggagcugaa

SEQ ID NO: 2472902 - RNA, 19 nt, Homo sapiens
  misc_RNA (1)...(19): siRNA sense strand
acucggaggaggaggacau

SEQ ID NO: 2472903 - RNA, 19 nt, Homo sapiens
  misc_RNA (1)...(19): siRNA sense strand
ucacagagcuggagacgcu

SEQ ID NO: 2472904 - RNA, 19 nt, Homo sapiens
  misc_RNA (1)...(19): siRNA sense strand
cugacuaggcuaaaggaga

SEQ ID NO: 2472905 - RNA, 19 nt, Homo sapiens
  misc_RNA (1)...(19): siRNA sense strand
ggcccaaguauguggugaa

SEQ ID NO: 2472906 - RNA, 19 nt, Homo sapiens
  misc_RNA (1)...(19): siRNA sense strand
ccccaagaucacagggaaa

SEQ ID NO: 2472907 - RNA, 19 nt, Homo sapiens
  misc_RNA (1)...(19): siRNA sense strand
ggagagacaugcaggagcu

SEQ ID NO: 2472908 - RNA, 19 nt, Homo sapiens
  misc_RNA (1)...(19): siRNA sense strand
ugaaggaggaagagaucca

SEQ ID NO: 2472909 - RNA, 19 nt, Homo sapiens
  misc_RNA (1)...(19): siRNA sense strand
acagugacuacgugaacaa

SEQ ID NO: 2472910 - RNA, 19 nt, Homo sapiens
  misc_RNA (1)...(19): siRNA sense strand
acgccaggacuaagagaga

SEQ ID NO: 2472911 - RNA, 19 nt, Homo sapiens
  misc_RNA (1)...(19): siRNA sense strand
cugagaagcugaacgagca

SEQ ID NO: 2472912 - RNA, 19 nt, Homo sapiens
  misc_RNA (1)...(19): siRNA sense strand
agcaagauuuccuggguca

SEQ ID NO: 2472913 - RNA, 19 nt, Homo sapiens
  misc_RNA (1)...(19): siRNA sense strand
cuaggcuaaaggagagaua

SEQ ID NO: 2472914 - RNA, 19 nt, Homo sapiens
  misc_RNA (1)...(19): siRNA sense strand
augaggacaagaagagcaa

SEQ ID NO: 2472915 - RNA, 19 nt, Homo sapiens
  misc_RNA (1)...(19): siRNA sense strand
gccaggacuaagagagaca

SEQ ID NO: 2472916 - RNA, 19 nt, Homo sapiens
  misc_RNA (1)...(19): siRNA sense strand
ggauggccgugaugcgcaa

SEQ ID NO: 2472917 - RNA, 19 nt, Homo sapiens
  misc_RNA (1)...(19): siRNA sense strand
aggacaagccagacgggca

SEQ ID NO: 2472918 - RNA, 19 nt, Homo sapiens
  misc_RNA (1)...(19): siRNA sense strand
aggcagugagcgugacaca

SEQ ID NO: 2472919 - RNA, 19 nt, Homo sapiens
  misc_RNA (1)...(19): siRNA sense strand
agcggauacuccaggacua

SEQ ID NO: 2472920 - RNA, 19 nt, Homo sapiens
  misc_RNA (1)...(19): siRNA sense strand
cugaggaggacaagccaga

SEQ ID NO: 2472921 - RNA, 19 nt, Homo sapiens
  misc_RNA (1)...(19): siRNA sense strand
ugaacaugacuguggcuca

SEQ ID NO: 2472922 - RNA, 19 nt, Homo sapiens
  misc_RNA (1)...(19): siRNA sense strand
caggacaugcugaagaaca

SEQ ID NO: 2472923 - RNA, 19 nt, Homo sapiens
  misc_RNA (1)...(19): siRNA sense strand
ccggaugaggacaagaaga

SEQ ID NO: 2472924 - RNA, 19 nt, Homo sapiens
  misc_RNA (1)...(19): siRNA sense strand
gugaccaggaggaggcuga

SEQ ID NO: 2472925 - RNA, 19 nt, Homo sapiens
  misc_RNA (1)...(19): siRNA sense strand
gaacuagauuugaggggua

SEQ ID NO: 2472926 - RNA, 19 nt, Homo sapiens
  misc_RNA (1)...(19): siRNA sense strand
guaagcaguuuguggagau

SEQ ID NO: 2472927 - RNA, 19 nt, Homo sapiens
  misc_RNA (1)...(19): siRNA sense strand
guuuauaaauggaacagca

SEQ ID NO: 2472928 - RNA, 19 nt, Homo sapiens
  misc_RNA (1)...(19): siRNA sense strand
caccagaguaucaggaaaa

SEQ ID NO: 2472929 - RNA, 19 nt, Homo sapiens
  misc_RNA (1)...(19): siRNA sense strand
cagaaaucaaggaccgaau

SEQ ID NO: 2472930 - RNA, 19 nt, Homo sapiens
  misc_RNA (1)...(19): siRNA sense strand
gcauggugcuggaguggga

SEQ ID NO: 2472931 - RNA, 19 nt, Homo sapiens
  misc_RNA (1)...(19): siRNA sense strand
ugguugaagaugacaaauu

SEQ ID NO: 2472932 - RNA, 19 nt, Homo sapiens
  misc_RNA (1)...(19): siRNA sense strand
cacgagugguucagggaca

SEQ ID NO: 2472933 - RNA, 19 nt, Homo sapiens
  misc_RNA (1)...(19): siRNA sense strand
gaaugugacugcaaagcca

SEQ ID NO: 2472934 - RNA, 19 nt, Homo sapiens
  misc_RNA (1)...(19): siRNA sense strand
uggcuauaccugugguuga

SEQ ID NO: 2472935 - RNA, 19 nt, Homo sapiens
  misc_RNA (1)...(19): siRNA sense strand
gggauaaagagaagcagcu

SEQ ID NO: 2472936 - RNA, 19 nt, Homo sapiens
  misc_RNA (1)...(19): siRNA sense strand
cauccaguuucaaagggaa

SEQ ID NO: 2472937 - RNA, 19 nt, Homo sapiens
  misc_RNA (1)...(19): siRNA sense strand
aggaaaagaagcuaaauga

SEQ ID NO: 2472938 - RNA, 19 nt, Homo sapiens
  misc_RNA (1)...(19): siRNA sense strand
augacaaauuccaccguuu

SEQ ID NO: 2472939 - RNA, 19 nt, Homo sapiens
  misc_RNA (1)...(19): siRNA sense strand
uggccaauaaccacauaaa

SEQ ID NO: 2472940 - RNA, 19 nt, Homo sapiens
  misc_RNA (1)...(19): siRNA sense strand
acuccaagaacgaugugua

SEQ ID NO: 2472941 - RNA, 19 nt, Homo sapiens
  misc_RNA (1)...(19): siRNA sense strand
ucaugagguggaacaguaa

SEQ ID NO: 2472942 - RNA, 19 nt, Homo sapiens
  misc_RNA (1)...(19): siRNA sense strand
ggaaguagcuuguggcuca

SEQ ID NO: 2472943 - RNA, 19 nt, Homo sapiens
  misc_RNA (1)...(19): siRNA sense strand
acaucaugguggagaaaga

SEQ ID NO: 2472944 - RNA, 19 nt, Homo sapiens
  misc_RNA (1)...(19): siRNA sense strand
gcgacaucuuacugugaaa

SEQ ID NO: 2472945 - RNA, 19 nt, Homo sapiens
  misc_RNA (1)...(19): siRNA sense strand
uggacaauggcgagguaua

SEQ ID NO: 2472946 - RNA, 19 nt, Homo sapiens
  misc_RNA (1)...(19): siRNA sense strand
aggaauuacuguggagaau

SEQ ID NO: 2472947 - RNA, 19 nt, Homo sapiens
  misc_RNA (1)...(19): siRNA sense strand
acaugaaggaagugauaga

SEQ ID NO: 2472948 - RNA, 19 nt, Homo sapiens
  misc_RNA (1)...(19): siRNA sense strand
augaaggaagugauagaaa

SEQ ID NO: 2472949 - RNA, 19 nt, Homo sapiens
  misc_RNA (1)...(19): siRNA sense strand
uugcagagucacugaagaa

SEQ ID NO: 2472950 - RNA, 19 nt, Homo sapiens
  misc_RNA (1)...(19): siRNA sense strand
cgcacauacucuagcacua

SEQ ID NO: 2472951 - RNA, 19 nt, Homo sapiens
  misc_RNA (1)...(19): siRNA sense strand
cacauuaucaagagaggaa

SEQ ID NO: 2472952 - RNA, 19 nt, Homo sapiens
  misc_RNA (1)...(19): siRNA sense strand
augaagacaugaaggaagu

SEQ ID NO: 2472953 - RNA, 19 nt, Homo sapiens
  misc_RNA (1)...(19): siRNA sense strand
cauuaucaagagaggaauu

SEQ ID NO: 2472954 - RNA, 19 nt, Homo sapiens
  misc_RNA (1)...(19): siRNA sense strand
augcagaggauuuagaaga

SEQ ID NO: 2472955 - RNA, 19 nt, Homo sapiens
  misc_RNA (1)...(19): siRNA sense strand
aggaagugauagaaaucga

SEQ ID NO: 2472956 - RNA, 19 nt, Homo sapiens
  misc_RNA (1)...(19): siRNA sense strand
ggauauagccagcuuggga

SEQ ID NO: 2472957 - RNA, 19 nt, Homo sapiens
  misc_RNA (1)...(19): siRNA sense strand
acauaugggcagcugggaa

SEQ ID NO: 2472958 - RNA, 19 nt, Homo sapiens
  misc_RNA (1)...(19): siRNA sense strand
cugacaaugaugaggucuu

SEQ ID NO: 2472959 - RNA, 19 nt, Homo sapiens
  misc_RNA (1)...(19): siRNA sense strand
gcuagaaggcuuaugugga

SEQ ID NO: 2472960 - RNA, 19 nt, Homo sapiens
  misc_RNA (1)...(19): siRNA sense strand
gcuuauguggaaagaagau

SEQ ID NO: 2472961 - RNA, 19 nt, Homo sapiens
  misc_RNA (1)...(19): siRNA sense strand
cacacaucaugguggagaa

SEQ ID NO: 2472962 - RNA, 19 nt, Homo sapiens
  misc_RNA (1)...(19): siRNA sense strand
agaaagaauuugauagucc

SEQ ID NO: 2472963 - RNA, 19 nt, Homo sapiens
  misc_RNA (1)...(19): siRNA sense strand
cguauuggaaugaagacau

SEQ ID NO: 2472964 - RNA, 19 nt, Homo sapiens
  misc_RNA (1)...(19): siRNA sense strand
aggcuuauguggaaagaag

SEQ ID NO: 2472965 - RNA, 19 nt, Homo sapiens
  misc_RNA (1)...(19): siRNA sense strand
uuauaacaacuguggccaa

SEQ ID NO: 2472966 - RNA, 19 nt, Homo sapiens
  misc_RNA (1)...(19): siRNA sense strand
gaaagaauuugauagucca

SEQ ID NO: 2472967 - RNA, 19 nt, Homo sapiens
  misc_RNA (1)...(19): siRNA sense strand
ugaucaagcaaguggugga

SEQ ID NO: 2472968 - RNA, 19 nt, Homo sapiens
  misc_RNA (1)...(19): siRNA sense strand
uuaagaggguaguuggcau

SEQ ID NO: 2472969 - RNA, 19 nt, Homo sapiens
  misc_RNA (1)...(19): siRNA sense strand
ccauggcuguucuggacaa

SEQ ID NO: 2472970 - RNA, 19 nt, Homo sapiens
  misc_RNA (1)...(19): siRNA sense strand
gaaaaucaggugugagcau

SEQ ID NO: 2472971 - RNA, 19 nt, Homo sapiens
  misc_RNA (1)...(19): siRNA sense strand
ugucuaggaacuggagaua

SEQ ID NO: 2472972 - RNA, 19 nt, Homo sapiens
  misc_RNA (1)...(19): siRNA sense strand
cuguggagcaugaagacuu

SEQ ID NO: 2472973 - RNA, 19 nt, Homo sapiens
  misc_RNA (1)...(19): siRNA sense strand
ggagaaugccuuuucgcua

SEQ ID NO: 2472974 - RNA, 19 nt, Homo sapiens
  misc_RNA (1)...(19): siRNA sense strand
uuacauauuaagaggguag

SEQ ID NO: 2472975 - RNA, 19 nt, Homo sapiens
  misc_RNA (1)...(19): siRNA sense strand
cacuaacagaugagggcuu

SEQ ID NO: 2472976 - RNA, 19 nt, Homo sapiens
  misc_RNA (1)...(19): siRNA sense strand
acacaucaugguggagaaa

SEQ ID NO: 2472977 - RNA, 19 nt, Homo sapiens
  misc_RNA (1)...(19): siRNA sense strand
cagaagaugcuauaggucu

SEQ ID NO: 2472978 - RNA, 19 nt, Homo sapiens
  misc_RNA (1)...(19): siRNA sense strand
uggcaaaggaagagugcua

SEQ ID NO: 2472979 - RNA, 19 nt, Homo sapiens
  misc_RNA (1)...(19): siRNA sense strand
cagcaguguaacagugaaa

SEQ ID NO: 2472980 - RNA, 19 nt, Homo sapiens
  misc_RNA (1)...(19): siRNA sense strand
aacuggaaauggagaguaa

SEQ ID NO: 2472981 - RNA, 19 nt, Homo sapiens
  misc_RNA (1)...(19): siRNA sense strand
auggagaagucuugugcaa

SEQ ID NO: 2472982 - RNA, 19 nt, Homo sapiens
  misc_RNA (1)...(19): siRNA sense strand
aaaccucggaagagagaaa

SEQ ID NO: 2472983 - RNA, 19 nt, Homo sapiens
  misc_RNA (1)...(19): siRNA sense strand
ggcagaagaagaugaacaa

SEQ ID NO: 2472984 - RNA, 19 nt, Homo sapiens
  misc_RNA (1)...(19): siRNA sense strand
uggcagaagaagaugaaca

SEQ ID NO: 2472985 - RNA, 19 nt, Homo sapiens
  misc_RNA (1)...(19): siRNA sense strand
aagacauacugcaggaaaa

SEQ ID NO: 2472986 - RNA, 19 nt, Homo sapiens
  misc_RNA (1)...(19): siRNA sense strand
acuucuaaauugccagaua

SEQ ID NO: 2472987 - RNA, 19 nt, Homo sapiens
  misc_RNA (1)...(19): siRNA sense strand
aauacagaaacgaggacaa

SEQ ID NO: 2472988 - RNA, 19 nt, Homo sapiens
  misc_RNA (1)...(19): siRNA sense strand
guguaacagugaaaaguaa

SEQ ID NO: 2472989 - RNA, 19 nt, Homo sapiens
  misc_RNA (1)...(19): siRNA sense strand
gcgaagacauacugcagga

SEQ ID NO: 2472990 - RNA, 19 nt, Homo sapiens
  misc_RNA (1)...(19): siRNA sense strand
cuacuaaauuugugagcac

SEQ ID NO: 2472991 - RNA, 19 nt, Homo sapiens
  misc_RNA (1)...(19): siRNA sense strand
gaacuugauuaaugaggga

SEQ ID NO: 2472992 - RNA, 19 nt, Homo sapiens
  misc_RNA (1)...(19): siRNA sense strand
caaagagcaaagaagacaa

SEQ ID NO: 2472993 - RNA, 19 nt, Homo sapiens
  misc_RNA (1)...(19): siRNA sense strand
ccuaaggauaguaaucaaa

SEQ ID NO: 2472994 - RNA, 19 nt, Homo sapiens
  misc_RNA (1)...(19): siRNA sense strand
acggaguugggaagagaaa

SEQ ID NO: 2472995 - RNA, 19 nt, Homo sapiens
  misc_RNA (1)...(19): siRNA sense strand
ggguguacuaugaggcuga

SEQ ID NO: 2472996 - RNA, 19 nt, Homo sapiens
  misc_RNA (1)...(19): siRNA sense strand
gagcaagacaacaaaacaa

SEQ ID NO: 2472997 - RNA, 19 nt, Homo sapiens
  misc_RNA (1)...(19): siRNA sense strand
acuaaauuugugagcacua

SEQ ID NO: 2472998 - RNA, 19 nt, Homo sapiens
  misc_RNA (1)...(19): siRNA sense strand
auucaaagagcaaagaaga

SEQ ID NO: 2472999 - RNA, 19 nt, Homo sapiens
  misc_RNA (1)...(19): siRNA sense strand
caacaaaacaaaagaucca

SEQ ID NO: 2473000 - RNA, 19 nt, Homo sapiens
  misc_RNA (1)...(19): siRNA sense strand
cauuuaaagagcugaaguu

SEQ ID NO: 2473001 - RNA, 19 nt, Homo sapiens
  misc_RNA (1)...(19): siRNA sense strand
cuaccauggcagaagaaga

SEQ ID NO: 2473002 - RNA, 19 nt, Homo sapiens
  misc_RNA (1)...(19): siRNA sense strand
cugaaugaccugauuaaaa

SEQ ID NO: 2473003 - RNA, 19 nt, Homo sapiens
  misc_RNA (1)...(19): siRNA sense strand
aaauauuccagaugccaaa

SEQ ID NO: 2473004 - RNA, 19 nt, Homo sapiens
  misc_RNA (1)...(19): siRNA sense strand
uugcauacaagcaggaaaa

SEQ ID NO: 2473005 - RNA, 19 nt, Homo sapiens
  misc_RNA (1)...(19): siRNA sense strand
caaugaagagucaagaaaa

SEQ ID NO: 2473006 - RNA, 19 nt, Homo sapiens
  misc_RNA (1)...(19): siRNA sense strand
ugacauuaagccaggcauu

SEQ ID NO: 2473007 - RNA, 19 nt, Homo sapiens
  misc_RNA (1)...(19): siRNA sense strand
gaaagcuggcaaaggaaga

SEQ ID NO: 2473008 - RNA, 19 nt, Homo sapiens
  misc_RNA (1)...(19): siRNA sense strand
ccgcauuuaaagagcugaa

SEQ ID NO: 2473009 - RNA, 19 nt, Homo sapiens
  misc_RNA (1)...(19): siRNA sense strand
cagaagaagaugaacaaag

SEQ ID NO: 2473010 - RNA, 19 nt, Homo sapiens
  misc_RNA (1)...(19): siRNA sense strand
cagcuaacggaguugggaa

SEQ ID NO: 2473011 - RNA, 19 nt, Homo sapiens
  misc_RNA (1)...(19): siRNA sense strand
agaagucaucacaguaaua

SEQ ID NO: 2473012 - RNA, 19 nt, Homo sapiens
  misc_RNA (1)...(19): siRNA sense strand
caauguuacaauccggaaa

SEQ ID NO: 2473013 - RNA, 19 nt, Homo sapiens
  misc_RNA (1)...(19): siRNA sense strand
cagagaagucaguauugaa

SEQ ID NO: 2473014 - RNA, 19 nt, Homo sapiens
  misc_RNA (1)...(19): siRNA sense strand
ccggaaagggccucaugaa

SEQ ID NO: 2473015 - RNA, 19 nt, Homo sapiens
  misc_RNA (1)...(19): siRNA sense strand
acagaaacgaggacaaguu

SEQ ID NO: 2473016 - RNA, 19 nt, Homo sapiens
  misc_RNA (1)...(19): siRNA sense strand
cuguaguaauugacacaca

SEQ ID NO: 2473017 - RNA, 19 nt, Homo sapiens
  misc_RNA (1)...(19): siRNA sense strand
agcuuuaucuagugucaaa

SEQ ID NO: 2473018 - RNA, 19 nt, Homo sapiens
  misc_RNA (1)...(19): siRNA sense strand
cuauugaagagaugcgaca

SEQ ID NO: 2473019 - RNA, 19 nt, Homo sapiens
  misc_RNA (1)...(19): siRNA sense strand
gaagagaccugcagagagc

SEQ ID NO: 2473020 - RNA, 19 nt, Homo sapiens
  misc_RNA (1)...(19): siRNA sense strand
caguucuucucaagguaua

SEQ ID NO: 2473021 - RNA, 19 nt, Homo sapiens
  misc_RNA (1)...(19): siRNA sense strand
accuaaggauaguaaucaa

SEQ ID NO: 2473022 - RNA, 19 nt, Homo sapiens
  misc_RNA (1)...(19): siRNA sense strand
aagucaaagaugagaguuc

SEQ ID NO: 2473023 - RNA, 19 nt, Homo sapiens
  misc_RNA (1)...(19): siRNA sense strand
cacuauaccuaaagccaca

SEQ ID NO: 2473024 - RNA, 19 nt, Homo sapiens
  misc_RNA (1)...(19): siRNA sense strand
cauacaagcaggaaaauga

SEQ ID NO: 2473025 - RNA, 19 nt, Homo sapiens
  misc_RNA (1)...(19): siRNA sense strand
gcuuguuaaguauuggaua

SEQ ID NO: 2473026 - RNA, 19 nt, Homo sapiens
  misc_RNA (1)...(19): siRNA sense strand
uauugaagauacagguguu

SEQ ID NO: 2473027 - RNA, 19 nt, Homo sapiens
  misc_RNA (1)...(19): siRNA sense strand
acgaggacaaguugcuuaa

SEQ ID NO: 2473028 - RNA, 19 nt, Homo sapiens
  misc_RNA (1)...(19): siRNA sense strand
gaucauuauccuugugugu

SEQ ID NO: 2473029 - RNA, 19 nt, Homo sapiens
  misc_RNA (1)...(19): siRNA sense strand
cugcaggacaaaaugaaaa

SEQ ID NO: 2473030 - RNA, 19 nt, Homo sapiens
  misc_RNA (1)...(19): siRNA sense strand
cacugaaugaccugauuaa

SEQ ID NO: 2473031 - RNA, 19 nt, Homo sapiens
  misc_RNA (1)...(19): siRNA sense strand
ggugcaguuugauggaaca

SEQ ID NO: 2473032 - RNA, 19 nt, Homo sapiens
  misc_RNA (1)...(19): siRNA sense strand
ccaguagagaucagagagu

SEQ ID NO: 2473033 - RNA, 19 nt, Homo sapiens
  misc_RNA (1)...(19): siRNA sense strand
uggaaagcuggcaaaggaa

SEQ ID NO: 2473034 - RNA, 19 nt, Homo sapiens
  misc_RNA (1)...(19): siRNA sense strand
agucagagaagucaguauu

SEQ ID NO: 2473035 - RNA, 19 nt, Homo sapiens
  misc_RNA (1)...(19): siRNA sense strand
ggagaguaaacuucauaga

SEQ ID NO: 2473036 - RNA, 19 nt, Homo sapiens
  misc_RNA (1)...(19): siRNA sense strand
gggaagagaaacugaugcu

SEQ ID NO: 2473037 - RNA, 19 nt, Homo sapiens
  misc_RNA (1)...(19): siRNA sense strand
ggcaagauuugaugggcua

SEQ ID NO: 2473038 - RNA, 19 nt, Homo sapiens
  misc_RNA (1)...(19): siRNA sense strand
auauaagaauggacaguca

SEQ ID NO: 2473039 - RNA, 19 nt, Homo sapiens
  misc_RNA (1)...(19): siRNA sense strand
guuuauuggacgugcguuu

SEQ ID NO: 2473040 - RNA, 19 nt, Homo sapiens
  misc_RNA (1)...(19): siRNA sense strand
gcugauaacuggaggaagc

SEQ ID NO: 2473041 - RNA, 19 nt, Homo sapiens
  misc_RNA (1)...(19): siRNA sense strand
guucagaaguuguuggauc

SEQ ID NO: 2473042 - RNA, 19 nt, Homo sapiens
  misc_RNA (1)...(19): siRNA sense strand
ggaauaucuuguaccggaa

SEQ ID NO: 2473043 - RNA, 19 nt, Homo sapiens
  misc_RNA (1)...(19): siRNA sense strand
caaccagacgagaaggauu

SEQ ID NO: 2473044 - RNA, 19 nt, Homo sapiens
  misc_RNA (1)...(19): siRNA sense strand
gcuucuuacaguagccaaa

SEQ ID NO: 2473045 - RNA, 19 nt, Homo sapiens
  misc_RNA (1)...(19): siRNA sense strand
ugucagaagagguggccuu

SEQ ID NO: 2473046 - RNA, 19 nt, Homo sapiens
  misc_RNA (1)...(19): siRNA sense strand
gauauagagaaaagaggaa

SEQ ID NO: 2473047 - RNA, 19 nt, Homo sapiens
  misc_RNA (1)...(19): siRNA sense strand
cuuaaaacaagcugaagaa

SEQ ID NO: 2473048 - RNA, 19 nt, Homo sapiens
  misc_RNA (1)...(19): siRNA sense strand
uguauuuggaccaguuaaa

SEQ ID NO: 2473049 - RNA, 19 nt, Homo sapiens
  misc_RNA (1)...(19): siRNA sense strand
aaugauguggugagaggaa

SEQ ID NO: 2473050 - RNA, 19 nt, Homo sapiens
  misc_RNA (1)...(19): siRNA sense strand
aguucaucaaagaggacaa

SEQ ID NO: 2473051 - RNA, 19 nt, Homo sapiens
  misc_RNA (1)...(19): siRNA sense strand
ggcuuuaggaucagauaca

SEQ ID NO: 2473052 - RNA, 19 nt, Homo sapiens
  misc_RNA (1)...(19): siRNA sense strand
ugauguggugagaggaaga

SEQ ID NO: 2473053 - RNA, 19 nt, Homo sapiens
  misc_RNA (1)...(19): siRNA sense strand
aggccaaauuacaccaaca

SEQ ID NO: 2473054 - RNA, 19 nt, Homo sapiens
  misc_RNA (1)...(19): siRNA sense strand
acaacaugugcaucaaaua

SEQ ID NO: 2473055 - RNA, 19 nt, Homo sapiens
  misc_RNA (1)...(19): siRNA sense strand
agagaaaagaggaagcaga

SEQ ID NO: 2473056 - RNA, 19 nt, Homo sapiens
  misc_RNA (1)...(19): siRNA sense strand
aaccagacgagaaggauuu

SEQ ID NO: 2473057 - RNA, 19 nt, Homo sapiens
  misc_RNA (1)...(19): siRNA sense strand
agagauauaagaauggaca

SEQ ID NO: 2473058 - RNA, 19 nt, Homo sapiens
  misc_RNA (1)...(19): siRNA sense strand
caggaggaucgaccagaaa

SEQ ID NO: 2473059 - RNA, 19 nt, Homo sapiens
  misc_RNA (1)...(19): siRNA sense strand
guuuggcagaugugagcaa

SEQ ID NO: 2473060 - RNA, 19 nt, Homo sapiens
  misc_RNA (1)...(19): siRNA sense strand
ccaaguuucuaaaugccua

SEQ ID NO: 2473061 - RNA, 19 nt, Homo sapiens
  misc_RNA (1)...(19): siRNA sense strand
uguggaugaugcagcaauu

SEQ ID NO: 2473062 - RNA, 19 nt, Homo sapiens
  misc_RNA (1)...(19): siRNA sense strand
aggaauaucuuguaccgga

SEQ ID NO: 2473063 - RNA, 19 nt, Homo sapiens
  misc_RNA (1)...(19): siRNA sense strand
acuuggaguucaucaaaga

SEQ ID NO: 2473064 - RNA, 19 nt, Homo sapiens
  misc_RNA (1)...(19): siRNA sense strand
ccuuaaaacaagcugaaga

SEQ ID NO: 2473065 - RNA, 19 nt, Homo sapiens
  misc_RNA (1)...(19): siRNA sense strand
uucagaaguuguuggauca

SEQ ID NO: 2473066 - RNA, 19 nt, Homo sapiens
  misc_RNA (1)...(19): siRNA sense strand
gucaaagcacagaaaguga

SEQ ID NO: 2473067 - RNA, 19 nt, Homo sapiens
  misc_RNA (1)...(19): siRNA sense strand
aggaucagauacaggagga

SEQ ID NO: 2473068 - RNA, 19 nt, Homo sapiens
  misc_RNA (1)...(19): siRNA sense strand
auaagaugguggugagcau

SEQ ID NO: 2473069 - RNA, 19 nt, Homo sapiens
  misc_RNA (1)...(19): siRNA sense strand
aagaauacgaagaagucua

SEQ ID NO: 2473070 - RNA, 19 nt, Homo sapiens
  misc_RNA (1)...(19): siRNA sense strand
gcuccaagcagcugggcau

SEQ ID NO: 2473071 - RNA, 19 nt, Homo sapiens
  misc_RNA (1)...(19): siRNA sense strand
cuuugauucuuuagaguca

SEQ ID NO: 2473072 - RNA, 19 nt, Homo sapiens
  misc_RNA (1)...(19): siRNA sense strand
gugauauugaagaagcuaa

SEQ ID NO: 2473073 - RNA, 19 nt, Homo sapiens
  misc_RNA (1)...(19): siRNA sense strand
ugagcaagugguagauaau

SEQ ID NO: 2473074 - RNA, 19 nt, Homo sapiens
  misc_RNA (1)...(19): siRNA sense strand
gcaaaauaaugaauggcca

SEQ ID NO: 2473075 - RNA, 19 nt, Homo sapiens
  misc_RNA (1)...(19): siRNA sense strand
ccuucaaagaggacuucua

SEQ ID NO: 2473076 - RNA, 19 nt, Homo sapiens
  misc_RNA (1)...(19): siRNA sense strand
caguguuggaaguggagau

SEQ ID NO: 2473077 - RNA, 19 nt, Homo sapiens
  misc_RNA (1)...(19): siRNA sense strand
ggaaaaucccagaggaaaa

SEQ ID NO: 2473078 - RNA, 19 nt, Homo sapiens
  misc_RNA (1)...(19): siRNA sense strand
cuauauguguagaaggaaa

SEQ ID NO: 2473079 - RNA, 19 nt, Homo sapiens
  misc_RNA (1)...(19): siRNA sense strand
ggugaaaagaacagggaaa

SEQ ID NO: 2473080 - RNA, 19 nt, Homo sapiens
  misc_RNA (1)...(19): siRNA sense strand
ccaaagaagcagugguuca

SEQ ID NO: 2473081 - RNA, 19 nt, Homo sapiens
  misc_RNA (1)...(19): siRNA sense strand
gggaaaagaccaaacaaaa

SEQ ID NO: 2473082 - RNA, 19 nt, Homo sapiens
  misc_RNA (1)...(19): siRNA sense strand
auuuggaacugaagaguaa

SEQ ID NO: 2473083 - RNA, 19 nt, Homo sapiens
  misc_RNA (1)...(19): siRNA sense strand
ccaugaaagaagcaggaua

SEQ ID NO: 2473084 - RNA, 19 nt, Homo sapiens
  misc_RNA (1)...(19): siRNA sense strand
cgagaaaaccaaacagaua

SEQ ID NO: 2473085 - RNA, 19 nt, Homo sapiens
  misc_RNA (1)...(19): siRNA sense strand
ucucagaugaagaaagaaa

SEQ ID NO: 2473086 - RNA, 19 nt, Homo sapiens
  misc_RNA (1)...(19): siRNA sense strand
caugaaagaagcaggauau

SEQ ID NO: 2473087 - RNA, 19 nt, Homo sapiens
  misc_RNA (1)...(19): siRNA sense strand
agaaaguuaaggaaggaaa

SEQ ID NO: 2473088 - RNA, 19 nt, Homo sapiens
  misc_RNA (1)...(19): siRNA sense strand
cugaagaaugccagaggaa

SEQ ID NO: 2473089 - RNA, 19 nt, Homo sapiens
  misc_RNA (1)...(19): siRNA sense strand
caacaaggauggauuaaaa

SEQ ID NO: 2473090 - RNA, 19 nt, Homo sapiens
  misc_RNA (1)...(19): siRNA sense strand
aagcaacagaugagggaau

SEQ ID NO: 2473091 - RNA, 19 nt, Homo sapiens
  misc_RNA (1)...(19): siRNA sense strand
ggaucugauaagacaaaua

SEQ ID NO: 2473092 - RNA, 19 nt, Homo sapiens
  misc_RNA (1)...(19): siRNA sense strand
uaggaaugacugugauaaa

SEQ ID NO: 2473093 - RNA, 19 nt, Homo sapiens
  misc_RNA (1)...(19): siRNA sense strand
gugaagaugaugaugauau

SEQ ID NO: 2473094 - RNA, 19 nt, Homo sapiens
  misc_RNA (1)...(19): siRNA sense strand
uagaugaagaagagaaaga

SEQ ID NO: 2473095 - RNA, 19 nt, Homo sapiens
  misc_RNA (1)...(19): siRNA sense strand
ucugauagugagaggacaa

SEQ ID NO: 2473096 - RNA, 19 nt, Homo sapiens
  misc_RNA (1)...(19): siRNA sense strand
uggaaagagcacauugaua

SEQ ID NO: 2473097 - RNA, 19 nt, Homo sapiens
  misc_RNA (1)...(19): siRNA sense strand
gaaacugaagaaagugaaa

SEQ ID NO: 2473098 - RNA, 19 nt, Homo sapiens
  misc_RNA (1)...(19): siRNA sense strand
gaacagccaucaagaaaca

SEQ ID NO: 2473099 - RNA, 19 nt, Homo sapiens
  misc_RNA (1)...(19): siRNA sense strand
cugguuuaauucaggauaa

SEQ ID NO: 2473100 - RNA, 19 nt, Homo sapiens
  misc_RNA (1)...(19): siRNA sense strand
ugagaaggaguuacagaaa

SEQ ID NO: 2473101 - RNA, 19 nt, Homo sapiens
  misc_RNA (1)...(19): siRNA sense strand
gaaaguuaaggaaggaaau

SEQ ID NO: 2473102 - RNA, 19 nt, Homo sapiens
  misc_RNA (1)...(19): siRNA sense strand
uagaaaagugauagagcaa

SEQ ID NO: 2473103 - RNA, 19 nt, Homo sapiens
  misc_RNA (1)...(19): siRNA sense strand
aagaacagccaucaagaaa

SEQ ID NO: 2473104 - RNA, 19 nt, Homo sapiens
  misc_RNA (1)...(19): siRNA sense strand
gugaagaaaaggaaaacaa

SEQ ID NO: 2473105 - RNA, 19 nt, Homo sapiens
  misc_RNA (1)...(19): siRNA sense strand
acuaagagccucaguccaa

SEQ ID NO: 2473106 - RNA, 19 nt, Homo sapiens
  misc_RNA (1)...(19): siRNA sense strand
cagcauuccuucaggcaca

SEQ ID NO: 2473107 - RNA, 19 nt, Homo sapiens
  misc_RNA (1)...(19): siRNA sense strand
uggaggaggagaugacuua

SEQ ID NO: 2473108 - RNA, 19 nt, Homo sapiens
  misc_RNA (1)...(19): siRNA sense strand
gaugaagaagagaaagauu

SEQ ID NO: 2473109 - RNA, 19 nt, Homo sapiens
  misc_RNA (1)...(19): siRNA sense strand
gcccgaaacaagacauuaa

SEQ ID NO: 2473110 - RNA, 19 nt, Homo sapiens
  misc_RNA (1)...(19): siRNA sense strand
aguaauaagcacagugagu

SEQ ID NO: 2473111 - RNA, 19 nt, Homo sapiens
  misc_RNA (1)...(19): siRNA sense strand
aagugaagaaagugaaaca

SEQ ID NO: 2473112 - RNA, 19 nt, Homo sapiens
  misc_RNA (1)...(19): siRNA sense strand
acauauauuggcacaguaa

SEQ ID NO: 2473113 - RNA, 19 nt, Homo sapiens
  misc_RNA (1)...(19): siRNA sense strand
gugaagaaagugaaacaga

SEQ ID NO: 2473114 - RNA, 19 nt, Homo sapiens
  misc_RNA (1)...(19): siRNA sense strand
aggaauggaaugagaagga

SEQ ID NO: 2473115 - RNA, 19 nt, Homo sapiens
  misc_RNA (1)...(19): siRNA sense strand
uaucagaacuccuccuuaa

SEQ ID NO: 2473116 - RNA, 19 nt, Homo sapiens
  misc_RNA (1)...(19): siRNA sense strand
cuuuagaugaagaagagaa

SEQ ID NO: 2473117 - RNA, 19 nt, Homo sapiens
  misc_RNA (1)...(19): siRNA sense strand
cuauaaagcccaacaagga

SEQ ID NO: 2473118 - RNA, 19 nt, Homo sapiens
  misc_RNA (1)...(19): siRNA sense strand
gcaacagaaaguuaaggaa

SEQ ID NO: 2473119 - RNA, 19 nt, Homo sapiens
  misc_RNA (1)...(19): siRNA sense strand
gugaaaagaacagggaaaa

SEQ ID NO: 2473120 - RNA, 19 nt, Homo sapiens
  misc_RNA (1)...(19): siRNA sense strand
aggaaaaggaucccagaaa

SEQ ID NO: 2473121 - RNA, 19 nt, Homo sapiens
  misc_RNA (1)...(19): siRNA sense strand
ccagguuccaugaaagaua

SEQ ID NO: 2473122 - RNA, 19 nt, Homo sapiens
  misc_RNA (1)...(19): siRNA sense strand
cacaacaaacuuaggacua

SEQ ID NO: 2473123 - RNA, 19 nt, Homo sapiens
  misc_RNA (1)...(19): siRNA sense strand
cagugaagaugaugaugau

SEQ ID NO: 2473124 - RNA, 19 nt, Homo sapiens
  misc_RNA (1)...(19): siRNA sense strand
cuaugaaucaccaggaaaa

SEQ ID NO: 2473125 - RNA, 19 nt, Homo sapiens
  misc_RNA (1)...(19): siRNA sense strand
cugagaaagagcacaagaa

SEQ ID NO: 2473126 - RNA, 19 nt, Homo sapiens
  misc_RNA (1)...(19): siRNA sense strand
gcucaguuggcuaaacaaa

SEQ ID NO: 2473127 - RNA, 19 nt, Homo sapiens
  misc_RNA (1)...(19): siRNA sense strand
caauuaagggcuggugaaa

SEQ ID NO: 2473128 - RNA, 19 nt, Homo sapiens
  misc_RNA (1)...(19): siRNA sense strand
gugauaauuuggaacugaa

SEQ ID NO: 2473129 - RNA, 19 nt, Homo sapiens
  misc_RNA (1)...(19): siRNA sense strand
ccaucaaagcaguaacaga

SEQ ID NO: 2473130 - RNA, 19 nt, Homo sapiens
  misc_RNA (1)...(19): siRNA sense strand
uaauaagcacagugaguca

SEQ ID NO: 2473131 - RNA, 19 nt, Homo sapiens
  misc_RNA (1)...(19): siRNA sense strand
gagcaaagaugcaugaggu

SEQ ID NO: 2473132 - RNA, 19 nt, Homo sapiens
  misc_RNA (1)...(19): siRNA sense strand
cuguaaaagauuuggugaa

SEQ ID NO: 2473133 - RNA, 19 nt, Homo sapiens
  misc_RNA (1)...(19): siRNA sense strand
gaaaaggaucccagaaaca

SEQ ID NO: 2473134 - RNA, 19 nt, Homo sapiens
  misc_RNA (1)...(19): siRNA sense strand
agaggaaauacauggaaaa

SEQ ID NO: 2473135 - RNA, 19 nt, Homo sapiens
  misc_RNA (1)...(19): siRNA sense strand
ggacagugaagaugaugau

SEQ ID NO: 2473136 - RNA, 19 nt, Homo sapiens
  misc_RNA (1)...(19): siRNA sense strand
auucagugccagcaggaaa

SEQ ID NO: 2473137 - RNA, 19 nt, Homo sapiens
  misc_RNA (1)...(19): siRNA sense strand
uuaaggaaggaaauggaaa

SEQ ID NO: 2473138 - RNA, 19 nt, Homo sapiens
  misc_RNA (1)...(19): siRNA sense strand
guuaaugguuucugauagu

SEQ ID NO: 2473139 - RNA, 19 nt, Homo sapiens
  misc_RNA (1)...(19): siRNA sense strand
acaauuaagggcuggugaa

SEQ ID NO: 2473140 - RNA, 19 nt, Homo sapiens
  misc_RNA (1)...(19): siRNA sense strand
ucaagugaagaaagugaaa

SEQ ID NO: 2473141 - RNA, 19 nt, Homo sapiens
  misc_RNA (1)...(19): siRNA sense strand
cagugguucaccugagaaa

SEQ ID NO: 2473142 - RNA, 19 nt, Homo sapiens
  misc_RNA (1)...(19): siRNA sense strand
gagaaagagcacaagaaac

SEQ ID NO: 2473143 - RNA, 19 nt, Homo sapiens
  misc_RNA (1)...(19): siRNA sense strand
caguaauggaagugaaauu

SEQ ID NO: 2473144 - RNA, 19 nt, Homo sapiens
  misc_RNA (1)...(19): siRNA sense strand
aauuaaaccucaauggcaa

SEQ ID NO: 2473145 - RNA, 19 nt, Homo sapiens
  misc_RNA (1)...(19): siRNA sense strand
acagaaacaaguugagcaa

SEQ ID NO: 2473146 - RNA, 19 nt, Homo sapiens
  misc_RNA (1)...(19): siRNA sense strand
ggcaaagagaccagagaga

SEQ ID NO: 2473147 - RNA, 19 nt, Homo sapiens
  misc_RNA (1)...(19): siRNA sense strand
cugaagauggaguagaaua

SEQ ID NO: 2473148 - RNA, 19 nt, Homo sapiens
  misc_RNA (1)...(19): siRNA sense strand
acggaggauaugugaaaua

SEQ ID NO: 2473149 - RNA, 19 nt, Homo sapiens
  misc_RNA (1)...(19): siRNA sense strand
ugaagauggaguagaauau

SEQ ID NO: 2473150 - RNA, 19 nt, Homo sapiens
  misc_RNA (1)...(19): siRNA sense strand
acacaguaauggaagugaa

SEQ ID NO: 2473151 - RNA, 19 nt, Homo sapiens
  misc_RNA (1)...(19): siRNA sense strand
aaacaauauuacaggcuca

SEQ ID NO: 2473152 - RNA, 19 nt, Homo sapiens
  misc_RNA (1)...(19): siRNA sense strand
ggagaacagaauauggcaa

SEQ ID NO: 2473153 - RNA, 19 nt, Homo sapiens
  misc_RNA (1)...(19): siRNA sense strand
uggaggaagugaugcaaaa

SEQ ID NO: 2473154 - RNA, 19 nt, Homo sapiens
  misc_RNA (1)...(19): siRNA sense strand
cagaaauugagcaagaaau

SEQ ID NO: 2473155 - RNA, 19 nt, Homo sapiens
  misc_RNA (1)...(19): siRNA sense strand
gggacaaaugggaccacaa

SEQ ID NO: 2473156 - RNA, 19 nt, Homo sapiens
  misc_RNA (1)...(19): siRNA sense strand
guuucaggaaguaaagaua

SEQ ID NO: 2473157 - RNA, 19 nt, Homo sapiens
  misc_RNA (1)...(19): siRNA sense strand
cagagagauaugcgggcaa

SEQ ID NO: 2473158 - RNA, 19 nt, Homo sapiens
  misc_RNA (1)...(19): siRNA sense strand
cagcagaccacggaggaua

SEQ ID NO: 2473159 - RNA, 19 nt, Homo sapiens
  misc_RNA (1)...(19): siRNA sense strand
auggaaaacgaaugagaaa

SEQ ID NO: 2473160 - RNA, 19 nt, Homo sapiens
  misc_RNA (1)...(19): siRNA sense strand
aagaauucuccgagggcau

SEQ ID NO: 2473161 - RNA, 19 nt, Homo sapiens
  misc_RNA (1)...(19): siRNA sense strand
cagcagaugccaaugaaca

SEQ ID NO: 2473162 - RNA, 19 nt, Homo sapiens
  misc_RNA (1)...(19): siRNA sense strand
acaagcagaaauugagcaa

SEQ ID NO: 2473163 - RNA, 19 nt, Homo sapiens
  misc_RNA (1)...(19): siRNA sense strand
aggaggaccuuuaccgcaa

SEQ ID NO: 2473164 - RNA, 19 nt, Homo sapiens
  misc_RNA (1)...(19): siRNA sense strand
ggauggaaacagagagccu

SEQ ID NO: 2473165 - RNA, 19 nt, Homo sapiens
  misc_RNA (1)...(19): siRNA sense strand
ugaagaccgaggaggcaaa

SEQ ID NO: 2473166 - RNA, 19 nt, Homo sapiens
  misc_RNA (1)...(19): siRNA sense strand
gaagagaaguggaggcgag

SEQ ID NO: 2473167 - RNA, 19 nt, Homo sapiens
  misc_RNA (1)...(19): siRNA sense strand
gaggaggaaggaaggguuu

SEQ ID NO: 2473168 - RNA, 19 nt, Homo sapiens
  misc_RNA (1)...(19): siRNA sense strand
cacaguaauggaagugaaa

SEQ ID NO: 2473169 - RNA, 19 nt, Homo sapiens
  misc_RNA (1)...(19): siRNA sense strand
aaauauuggcagucgaaca

SEQ ID NO: 2473170 - RNA, 19 nt, Homo sapiens
  misc_RNA (1)...(19): siRNA sense strand
aggaaugggaauaccagaa

SEQ ID NO: 2473171 - RNA, 19 nt, Homo sapiens
  misc_RNA (1)...(19): siRNA sense strand
ucaagauguuccaggcaca

SEQ ID NO: 2473172 - RNA, 19 nt, Homo sapiens
  misc_RNA (1)...(19): siRNA sense strand
gaauggaggaagugaugca

SEQ ID NO: 2473173 - RNA, 19 nt, Homo sapiens
  misc_RNA (1)...(19): siRNA sense strand
ugacagaaaagaagacauu

SEQ ID NO: 2473174 - RNA, 19 nt, Homo sapiens
  misc_RNA (1)...(19): siRNA sense strand
gaacccagcaagagggcca

SEQ ID NO: 2473175 - RNA, 19 nt, Homo sapiens
  misc_RNA (1)...(19): siRNA sense strand
ccaaucaaguucugggauc

SEQ ID NO: 2473176 - RNA, 19 nt, Homo sapiens
  misc_RNA (1)...(19): siRNA sense strand
guuaguuguuucaggaagu

SEQ ID NO: 2473177 - RNA, 19 nt, Homo sapiens
  misc_RNA (1)...(19): siRNA sense strand
aaacagagagccugggcca

SEQ ID NO: 2473178 - RNA, 19 nt, Homo sapiens
  misc_RNA (1)...(19): siRNA sense strand
gcugaaugacagaaaagaa

SEQ ID NO: 2473179 - RNA, 19 nt, Homo sapiens
  misc_RNA (1)...(19): siRNA sense strand
cagguggacuacugggaca

SEQ ID NO: 2473180 - RNA, 19 nt, Homo sapiens
  misc_RNA (1)...(19): siRNA sense strand
ucgagggcgcagagaagaa

SEQ ID NO: 2473181 - RNA, 19 nt, Homo sapiens
  misc_RNA (1)...(19): siRNA sense strand
cgaacaugaacaacgucaa

SEQ ID NO: 2473182 - RNA, 19 nt, Homo sapiens
  misc_RNA (1)...(19): siRNA sense strand
gccaauaccauuccagcaa

SEQ ID NO: 2473183 - RNA, 19 nt, Homo sapiens
  misc_RNA (1)...(19): siRNA sense strand
cgauuagagaggccaguuu

SEQ ID NO: 2473184 - RNA, 19 nt, Homo sapiens
  misc_RNA (1)...(19): siRNA sense strand
auaaaaugcgagaucgaua

SEQ ID NO: 2473185 - RNA, 19 nt, Homo sapiens
  misc_RNA (1)...(19): siRNA sense strand
aaugggaauaccagaacaa

SEQ ID NO: 2473186 - RNA, 19 nt, Homo sapiens
  misc_RNA (1)...(19): siRNA sense strand
ccagaggaagggaugguuu

SEQ ID NO: 2473187 - RNA, 19 nt, Homo sapiens
  misc_RNA (1)...(19): siRNA sense strand
aguauuuggagaacagaau

SEQ ID NO: 2473188 - RNA, 19 nt, Homo sapiens
  misc_RNA (1)...(19): siRNA sense strand
ugaaauauuggcagucgaa

SEQ ID NO: 2473189 - RNA, 19 nt, Homo sapiens
  misc_RNA (1)...(19): siRNA sense strand
gcaaauucuggacucgaaa

SEQ ID NO: 2473190 - RNA, 19 nt, Homo sapiens
  misc_RNA (1)...(19): siRNA sense strand
cauuaaauuggaagagaag

SEQ ID NO: 2473191 - RNA, 19 nt, Homo sapiens
  misc_RNA (1)...(19): siRNA sense strand
ccuuagacggagagcacca

SEQ ID NO: 2473192 - RNA, 19 nt, Homo sapiens
  misc_RNA (1)...(19): siRNA sense strand
gugaaauauuggcagucga

SEQ ID NO: 2473193 - RNA, 19 nt, Homo sapiens
  misc_RNA (1)...(19): siRNA sense strand
augcaaaaggaucagaaaa

SEQ ID NO: 2473194 - RNA, 19 nt, Homo sapiens
  misc_RNA (1)...(19): siRNA sense strand
agaaauugagcaagaaaug

SEQ ID NO: 2473195 - RNA, 19 nt, Homo sapiens
  misc_RNA (1)...(19): siRNA sense strand
caaauaaaguaaagugucc

SEQ ID NO: 2473196 - RNA, 19 nt, Homo sapiens
  misc_RNA (1)...(19): siRNA sense strand
gaaggaagacgcuugguca

SEQ ID NO: 2473197 - RNA, 19 nt, Homo sapiens
  misc_RNA (1)...(19): siRNA sense strand
aggcuuggaugcaaaauaa

SEQ ID NO: 2473198 - RNA, 19 nt, Homo sapiens
  misc_RNA (1)...(19): siRNA sense strand
cccaaggaaugcagaggca

SEQ ID NO: 2473199 - RNA, 19 nt, Homo sapiens
  misc_RNA (1)...(19): siRNA sense strand
ggaaaacgaaugagaaaag

SEQ ID NO: 2473200 - RNA, 19 nt, Homo sapiens
  misc_RNA (1)...(19): siRNA sense strand
acgaggagaccaagagcuu

SEQ ID NO: 2473201 - RNA, 19 nt, Homo sapiens
  misc_RNA (1)...(19): siRNA sense strand
ucuacuacgaggagaccaa

SEQ ID NO: 2473202 - RNA, 19 nt, Homo sapiens
  misc_RNA (1)...(19): siRNA sense strand
gcggcuugcacuagagaaa

SEQ ID NO: 2473203 - RNA, 19 nt, Homo sapiens
  misc_RNA (1)...(19): siRNA sense strand
ccaagaaugaagagcccua

SEQ ID NO: 2473204 - RNA, 19 nt, Homo sapiens
  misc_RNA (1)...(19): siRNA sense strand
aguucuagcucucgggaca

SEQ ID NO: 2473205 - RNA, 19 nt, Homo sapiens
  misc_RNA (1)...(19): siRNA sense strand
cuaacuucgucaaggacuu

SEQ ID NO: 2473206 - RNA, 19 nt, Homo sapiens
  misc_RNA (1)...(19): siRNA sense strand
acuuggaagaggaccuaua

SEQ ID NO: 2473207 - RNA, 19 nt, Homo sapiens
  misc_RNA (1)...(19): siRNA sense strand
uaccagggcuccagcggaa

SEQ ID NO: 2473208 - RNA, 19 nt, Homo sapiens
  misc_RNA (1)...(19): siRNA sense strand
guuuaaccgcaucgggcua

SEQ ID NO: 2473209 - RNA, 19 nt, Homo sapiens
  misc_RNA (1)...(19): siRNA sense strand
ggcaaugacaacuggcuga

SEQ ID NO: 2473210 - RNA, 19 nt, Homo sapiens
  misc_RNA (1)...(19): siRNA sense strand
gcaucuuucccgagcgcau

SEQ ID NO: 2473211 - RNA, 19 nt, Homo sapiens
  misc_RNA (1)...(19): siRNA sense strand
cuauagugccauugaccga

SEQ ID NO: 2473212 - RNA, 19 nt, Homo sapiens
  misc_RNA (1)...(19): siRNA sense strand
augacaacuggcugauuaa

SEQ ID NO: 2473213 - RNA, 19 nt, Homo sapiens
  misc_RNA (1)...(19): siRNA sense strand
aggccuugaaagacaacaa

SEQ ID NO: 2473214 - RNA, 19 nt, Homo sapiens
  misc_RNA (1)...(19): siRNA sense strand
ccaaagauguguaaggcuu

SEQ ID NO: 2473215 - RNA, 19 nt, Homo sapiens
  misc_RNA (1)...(19): siRNA sense strand
ccuucaugauggaggaaaa

SEQ ID NO: 2473216 - RNA, 19 nt, Homo sapiens
  misc_RNA (1)...(19): siRNA sense strand
gaagcaaagaagagcaaaa

SEQ ID NO: 2473217 - RNA, 19 nt, Homo sapiens
  misc_RNA (1)...(19): siRNA sense strand
gggagguguaugugggaga

SEQ ID NO: 2473218 - RNA, 19 nt, Homo sapiens
  misc_RNA (1)...(19): siRNA sense strand
agggaaaggccaugcuaau

SEQ ID NO: 2473219 - RNA, 19 nt, Homo sapiens
  misc_RNA (1)...(19): siRNA sense strand
gagagaugcccaagaggga

SEQ ID NO: 2473220 - RNA, 19 nt, Homo sapiens
  misc_RNA (1)...(19): siRNA sense strand
uggaagcaaagaagagcaa

SEQ ID NO: 2473221 - RNA, 19 nt, Homo sapiens
  misc_RNA (1)...(19): siRNA sense strand
aaguuggaaaucugaguaa

SEQ ID NO: 2473222 - RNA, 19 nt, Homo sapiens
  misc_RNA (1)...(19): siRNA sense strand
ugaaaagagcugcagcaaa

SEQ ID NO: 2473223 - RNA, 19 nt, Homo sapiens
  misc_RNA (1)...(19): siRNA sense strand
augggaaggaccaggauga

SEQ ID NO: 2473224 - RNA, 19 nt, Homo sapiens
  misc_RNA (1)...(19): siRNA sense strand
ggaaugaguaugaagcucu

SEQ ID NO: 2473225 - RNA, 19 nt, Homo sapiens
  misc_RNA (1)...(19): siRNA sense strand
gcuagugagagaugcccaa

SEQ ID NO: 2473226 - RNA, 19 nt, Homo sapiens
  misc_RNA (1)...(19): siRNA sense strand
gagucgugggaaugaguau

SEQ ID NO: 2473227 - RNA, 19 nt, Homo sapiens
  misc_RNA (1)...(19): siRNA sense strand
gcccaagagggaaguguca

SEQ ID NO: 2473228 - RNA, 19 nt, Homo sapiens
  misc_RNA (1)...(19): siRNA sense strand
cuuucuacaaugugaccaa

SEQ ID NO: 2473229 - RNA, 19 nt, Homo sapiens
  misc_RNA (1)...(19): siRNA sense strand
caguaagaaagaugaagaa

SEQ ID NO: 2473230 - RNA, 19 nt, Homo sapiens
  misc_RNA (1)...(19): siRNA sense strand
ugacaagggcagagaugau

SEQ ID NO: 2473231 - RNA, 19 nt, Homo sapiens
  misc_RNA (1)...(19): siRNA sense strand
cuuuguacgaagaaggaaa

SEQ ID NO: 2473232 - RNA, 19 nt, Homo sapiens
  misc_RNA (1)...(19): siRNA sense strand
gguuaaucgguuugaugaa

SEQ ID NO: 2473233 - RNA, 19 nt, Homo sapiens
  misc_RNA (1)...(19): siRNA sense strand
gggcagagaugauccagga

SEQ ID NO: 2473234 - RNA, 19 nt, Homo sapiens
  misc_RNA (1)...(19): siRNA sense strand
caggaagagauaagagacu

SEQ ID NO: 2473235 - RNA, 19 nt, Homo sapiens
  misc_RNA (1)...(19): siRNA sense strand
gcugauagggaaaggaaag

SEQ ID NO: 2473236 - RNA, 19 nt, Homo sapiens
  misc_RNA (1)...(19): siRNA sense strand
gagauaagagacuggcuga

SEQ ID NO: 2473237 - RNA, 19 nt, Homo sapiens
  misc_RNA (1)...(19): siRNA sense strand
acuccagcugauagggaaa

SEQ ID NO: 2473238 - RNA, 19 nt, Homo sapiens
  misc_RNA (1)...(19): siRNA sense strand
cagcagugaagaugaggau

SEQ ID NO: 2473239 - RNA, 19 nt, Homo sapiens
  misc_RNA (1)...(19): siRNA sense strand
acacaagaagcaaggaagu

SEQ ID NO: 2473240 - RNA, 19 nt, Homo sapiens
  misc_RNA (1)...(19): siRNA sense strand
cugcaagaaaacagaggaa

SEQ ID NO: 2473241 - RNA, 19 nt, Homo sapiens
  misc_RNA (1)...(19): siRNA sense strand
ugaccaaaggagaugauga

SEQ ID NO: 2473242 - RNA, 19 nt, Homo sapiens
  misc_RNA (1)...(19): siRNA sense strand
guuugaugaagcucagaaa

SEQ ID NO: 2473243 - RNA, 19 nt, Homo sapiens
  misc_RNA (1)...(19): siRNA sense strand
accauuugaccgugauaaa

SEQ ID NO: 2473244 - RNA, 19 nt, Homo sapiens
  misc_RNA (1)...(19): siRNA sense strand
acgaagaaggaaaucaaga

SEQ ID NO: 2473245 - RNA, 19 nt, Homo sapiens
  misc_RNA (1)...(19): siRNA sense strand
ggaugaugacgaugaugau

SEQ ID NO: 2473246 - RNA, 19 nt, Homo sapiens
  misc_RNA (1)...(19): siRNA sense strand
gagaauaccauuugaccgu

SEQ ID NO: 2473247 - RNA, 19 nt, Homo sapiens
  misc_RNA (1)...(19): siRNA sense strand
acccauuguaagagaguca

SEQ ID NO: 2473248 - RNA, 19 nt, Homo sapiens
  misc_RNA (1)...(19): siRNA sense strand
aucaagaaucugaagaaga

SEQ ID NO: 2473249 - RNA, 19 nt, Homo sapiens
  misc_RNA (1)...(19): siRNA sense strand
aaaggaaagcuaaggaaac

SEQ ID NO: 2473250 - RNA, 19 nt, Homo sapiens
  misc_RNA (1)...(19): siRNA sense strand
aggaugaugacgaugauga

SEQ ID NO: 2473251 - RNA, 19 nt, Homo sapiens
  misc_RNA (1)...(19): siRNA sense strand
gcagagaugauccaggaca

SEQ ID NO: 2473252 - RNA, 19 nt, Homo sapiens
  misc_RNA (1)...(19): siRNA sense strand
gggcccagagaaugaaaga

SEQ ID NO: 2473253 - RNA, 19 nt, Homo sapiens
  misc_RNA (1)...(19): siRNA sense strand
ccucaagagagaauaccau

SEQ ID NO: 2473254 - RNA, 19 nt, Homo sapiens
  misc_RNA (1)...(19): siRNA sense strand
agucaagagaacugaauaa

SEQ ID NO: 2473255 - RNA, 19 nt, Homo sapiens
  misc_RNA (1)...(19): siRNA sense strand
aagaagacaaagagagaca

SEQ ID NO: 2473256 - RNA, 19 nt, Homo sapiens
  misc_RNA (1)...(19): siRNA sense strand
auuuaaagcuucagaggca

SEQ ID NO: 2473257 - RNA, 19 nt, Homo sapiens
  misc_RNA (1)...(19): siRNA sense strand
ggguaaaguccgcauggaa

SEQ ID NO: 2473258 - RNA, 19 nt, Homo sapiens
  misc_RNA (1)...(19): siRNA sense strand
ccugaaauagcaugugaaa

SEQ ID NO: 2473259 - RNA, 19 nt, Homo sapiens
  misc_RNA (1)...(19): siRNA sense strand
gcuaugaguucuaucggua

SEQ ID NO: 2473260 - RNA, 19 nt, Homo sapiens
  misc_RNA (1)...(19): siRNA sense strand
gcagaaaggcagaagugga

SEQ ID NO: 2473261 - RNA, 19 nt, Homo sapiens
  misc_RNA (1)...(19): siRNA sense strand
aggcagaaguggaagcaac

SEQ ID NO: 2473262 - RNA, 19 nt, Homo sapiens
  misc_RNA (1)...(19): siRNA sense strand
ucauaagagcuuugagacu

SEQ ID NO: 2473263 - RNA, 19 nt, Homo sapiens
  misc_RNA (1)...(19): siRNA sense strand
cuucagaggcagaaaggca

SEQ ID NO: 2473264 - RNA, 19 nt, Homo sapiens
  misc_RNA (1)...(19): siRNA sense strand
agugauuuccagaggauuu

SEQ ID NO: 2473265 - RNA, 19 nt, Homo sapiens
  misc_RNA (1)...(19): siRNA sense strand
cuuccaagcagcaaggcua

SEQ ID NO: 2473266 - RNA, 19 nt, Homo sapiens
  misc_RNA (1)...(19): siRNA sense strand
auaagagcuuugagacuau

SEQ ID NO: 2473267 - RNA, 19 nt, Homo sapiens
  misc_RNA (1)...(19): siRNA sense strand
agucaguaccgcaguguuu

SEQ ID NO: 2473268 - RNA, 19 nt, Homo sapiens
  misc_RNA (1)...(19): siRNA sense strand
ucccagaggagcaggaauu

SEQ ID NO: 2473269 - RNA, 19 nt, Homo sapiens
  misc_RNA (1)...(19): siRNA sense strand
agacaaagagagacagaag

SEQ ID NO: 2473270 - RNA, 19 nt, Homo sapiens
  misc_RNA (1)...(19): siRNA sense strand
agcaggaauuagaagcuua

SEQ ID NO: 2473271 - RNA, 19 nt, Homo sapiens
  misc_RNA (1)...(19): siRNA sense strand
ugaaauagcaugugaaaac

SEQ ID NO: 2473272 - RNA, 19 nt, Homo sapiens
  misc_RNA (1)...(19): siRNA sense strand
ccuguuuggaagagcuuaa

SEQ ID NO: 2473273 - RNA, 19 nt, Homo sapiens
  misc_RNA (1)...(19): siRNA sense strand
cuaaagaaacacaagaacu

SEQ ID NO: 2473274 - RNA, 19 nt, Homo sapiens
  misc_RNA (1)...(19): siRNA sense strand
gagacagaagcgugagcau

SEQ ID NO: 2473275 - RNA, 19 nt, Homo sapiens
  misc_RNA (1)...(19): siRNA sense strand
ucuacacauugcagacaaa

SEQ ID NO: 2473276 - RNA, 19 nt, Homo sapiens
  misc_RNA (1)...(19): siRNA sense strand
agacaaagauccaauccca

SEQ ID NO: 2473277 - RNA, 19 nt, Homo sapiens
  misc_RNA (1)...(19): siRNA sense strand
gcguucauuuggaagauau

SEQ ID NO: 2473278 - RNA, 19 nt, Homo sapiens
  misc_RNA (1)...(19): siRNA sense strand
uggaagagcuuaagcgcag

SEQ ID NO: 2473279 - RNA, 19 nt, Homo sapiens
  misc_RNA (1)...(19): siRNA sense strand
caguaguaccuuugaagca

SEQ ID NO: 2473280 - RNA, 19 nt, Homo sapiens
  misc_RNA (1)...(19): siRNA sense strand
cuucagacgguuagcccua

SEQ ID NO: 2473281 - RNA, 19 nt, Homo sapiens
  misc_RNA (1)...(19): siRNA sense strand
ccgcaguguuuauccaaaa

SEQ ID NO: 2473282 - RNA, 19 nt, Homo sapiens
  misc_RNA (1)...(19): siRNA sense strand
caaacugcuacgaagaaau

SEQ ID NO: 2473283 - RNA, 19 nt, Homo sapiens
  misc_RNA (1)...(19): siRNA sense strand
aacuagugucagaggcuua

SEQ ID NO: 2473284 - RNA, 19 nt, Homo sapiens
  misc_RNA (1)...(19): siRNA sense strand
gcuccaucugaaagcauua

SEQ ID NO: 2473285 - RNA, 19 nt, Homo sapiens
  misc_RNA (1)...(19): siRNA sense strand
gcuuugagacuauggagga

SEQ ID NO: 2473286 - RNA, 19 nt, Homo sapiens
  misc_RNA (1)...(19): siRNA sense strand
uuucagaagaggaagcaca

SEQ ID NO: 2473287 - RNA, 19 nt, Homo sapiens
  misc_RNA (1)...(19): siRNA sense strand
gcuuguuuguacuaaagaa

SEQ ID NO: 2473288 - RNA, 19 nt, Homo sapiens
  misc_RNA (1)...(19): siRNA sense strand
aagagagacagaagcguga

SEQ ID NO: 2473289 - RNA, 19 nt, Homo sapiens
  misc_RNA (1)...(19): siRNA sense strand
gggcuauuaagcaagguau

SEQ ID NO: 2473290 - RNA, 19 nt, Homo sapiens
  misc_RNA (1)...(19): siRNA sense strand
cugccugcauugaagguuu

SEQ ID NO: 2473291 - RNA, 19 nt, Homo sapiens
  misc_RNA (1)...(19): siRNA sense strand
aagaggauguggagcugau

SEQ ID NO: 2473292 - RNA, 19 nt, Homo sapiens
  misc_RNA (1)...(19): siRNA sense strand
gggccuuggacuuagugaa

SEQ ID NO: 2473293 - RNA, 19 nt, Homo sapiens
  misc_RNA (1)...(19): siRNA sense strand
gcucaaggaaugggcuauu

SEQ ID NO: 2473294 - RNA, 19 nt, Homo sapiens
  misc_RNA (1)...(19): siRNA sense strand
agcaagguauccuguuaaa

SEQ ID NO: 2473295 - RNA, 19 nt, Homo sapiens
  misc_RNA (1)...(19): siRNA sense strand
ucugagagugacaauguaa

SEQ ID NO: 2473296 - RNA, 19 nt, Homo sapiens
  misc_RNA (1)...(19): siRNA sense strand
gcuugagagcagagaggaa

SEQ ID NO: 2473297 - RNA, 19 nt, Homo sapiens
  misc_RNA (1)...(19): siRNA sense strand
ggacggagaaagugggcuu

SEQ ID NO: 2473298 - RNA, 19 nt, Homo sapiens
  misc_RNA (1)...(19): siRNA sense strand
gggacuacauuauggccaa

SEQ ID NO: 2473299 - RNA, 19 nt, Homo sapiens
  misc_RNA (1)...(19): siRNA sense strand
aggcagaggacgagcacga

SEQ ID NO: 2473300 - RNA, 19 nt, Homo sapiens
  misc_RNA (1)...(19): siRNA sense strand
uggagaaugaagagcagua

SEQ ID NO: 2473301 - RNA, 19 nt, Homo sapiens
  misc_RNA (1)...(19): siRNA sense strand
ggaaggacuaugaagccaa

SEQ ID NO: 2473302 - RNA, 19 nt, Homo sapiens
  misc_RNA (1)...(19): siRNA sense strand
aagccauccugcagagaau

SEQ ID NO: 2473303 - RNA, 19 nt, Homo sapiens
  misc_RNA (1)...(19): siRNA sense strand
aggacgagcacgaguguga

SEQ ID NO: 2473304 - RNA, 19 nt, Homo sapiens
  misc_RNA (1)...(19): siRNA sense strand
uggccuugaacaugggaaa

SEQ ID NO: 2473305 - RNA, 19 nt, Homo sapiens
  misc_RNA (1)...(19): siRNA sense strand
gagaaggcauggaaggacu

SEQ ID NO: 2473306 - RNA, 19 nt, Homo sapiens
  misc_RNA (1)...(19): siRNA sense strand
ccguggaauccuuaggcaa

SEQ ID NO: 2473307 - RNA, 19 nt, Homo sapiens
  misc_RNA (1)...(19): siRNA sense strand
aggagaucuuggaaggaga

SEQ ID NO: 2473308 - RNA, 19 nt, Homo sapiens
  misc_RNA (1)...(19): siRNA sense strand
ggagauggcucaaggacug

SEQ ID NO: 2473309 - RNA, 19 nt, Homo sapiens
  misc_RNA (1)...(19): siRNA sense strand
aggaggaugaggaagagaa

SEQ ID NO: 2473310 - RNA, 19 nt, Homo sapiens
  misc_RNA (1)...(19): siRNA sense strand
augaagagcaguaccgaga

SEQ ID NO: 2473311 - RNA, 19 nt, Homo sapiens
  misc_RNA (1)...(19): siRNA sense strand
cagugaggaggaugaggaa

SEQ ID NO: 2473312 - RNA, 19 nt, Homo sapiens
  misc_RNA (1)...(19): siRNA sense strand
cugacagugaggaggauga

SEQ ID NO: 2473313 - RNA, 19 nt, Homo sapiens
  misc_RNA (1)...(19): siRNA sense strand
ccggaagaacucaggaugu

SEQ ID NO: 2473314 - RNA, 19 nt, Homo sapiens
  misc_RNA (1)...(19): siRNA sense strand
aagacaugccaguggagau

SEQ ID NO: 2473315 - RNA, 19 nt, Homo sapiens
  misc_RNA (1)...(19): siRNA sense strand
gcuucgaccuggugaccca

SEQ ID NO: 2473316 - RNA, 19 nt, Homo sapiens
  misc_RNA (1)...(19): siRNA sense strand
caguaaaugaagcaggcga

SEQ ID NO: 2473317 - RNA, 19 nt, Homo sapiens
  misc_RNA (1)...(19): siRNA sense strand
gguaauuuccacagagccu

SEQ ID NO: 2473318 - RNA, 19 nt, Homo sapiens
  misc_RNA (1)...(19): siRNA sense strand
gggaggagaucuuggaagg

SEQ ID NO: 2473319 - RNA, 19 nt, Homo sapiens
  misc_RNA (1)...(19): siRNA sense strand
acaagaaaagugacggaau

SEQ ID NO: 2473320 - RNA, 19 nt, Homo sapiens
  misc_RNA (1)...(19): siRNA sense strand
uggccaaguauguggagca

SEQ ID NO: 2473321 - RNA, 19 nt, Homo sapiens
  misc_RNA (1)...(19): siRNA sense strand
gcgagacagcucuggacau

SEQ ID NO: 2473322 - RNA, 19 nt, Homo sapiens
  misc_RNA (1)...(19): siRNA sense strand
ugucgguacuggaggccuu

SEQ ID NO: 2473323 - RNA, 19 nt, Homo sapiens
  misc_RNA (1)...(19): siRNA sense strand
gcucugacagugaggagga

SEQ ID NO: 2473324 - RNA, 19 nt, Homo sapiens
  misc_RNA (1)...(19): siRNA sense strand
aagaaggcugugcgggcaa

SEQ ID NO: 2473325 - RNA, 19 nt, Homo sapiens
  misc_RNA (1)...(19): siRNA sense strand
ccugauagcaaaugggaaa

SEQ ID NO: 2473326 - RNA, 19 nt, Homo sapiens
  misc_RNA (1)...(19): siRNA sense strand
gcaaagaagaagaaggagu

SEQ ID NO: 2473327 - RNA, 19 nt, Homo sapiens
  misc_RNA (1)...(19): siRNA sense strand
ccuuagaugcauucagaaa

SEQ ID NO: 2473328 - RNA, 19 nt, Homo sapiens
  misc_RNA (1)...(19): siRNA sense strand
cagaaagagauguugagaa

SEQ ID NO: 2473329 - RNA, 19 nt, Homo sapiens
  misc_RNA (1)...(19): siRNA sense strand
ccugggaauuagaggaaaa

SEQ ID NO: 2473330 - RNA, 19 nt, Homo sapiens
  misc_RNA (1)...(19): siRNA sense strand
guaaagaucuacugaggca

SEQ ID NO: 2473331 - RNA, 19 nt, Homo sapiens
  misc_RNA (1)...(19): siRNA sense strand
ggaauuuggcagagaggca

SEQ ID NO: 2473332 - RNA, 19 nt, Homo sapiens
  misc_RNA (1)...(19): siRNA sense strand
aggcaaagaagaagaagga

SEQ ID NO: 2473333 - RNA, 19 nt, Homo sapiens
  misc_RNA (1)...(19): siRNA sense strand
gguaaaucuacaacaacaa

SEQ ID NO: 2473334 - RNA, 19 nt, Homo sapiens
  misc_RNA (1)...(19): siRNA sense strand
gaaaagaaaacuaaggaga

SEQ ID NO: 2473335 - RNA, 19 nt, Homo sapiens
  misc_RNA (1)...(19): siRNA sense strand
aauaaaugcgggaguguuu

SEQ ID NO: 2473336 - RNA, 19 nt, Homo sapiens
  misc_RNA (1)...(19): siRNA sense strand
uggagaaaauucaggcuua

SEQ ID NO: 2473337 - RNA, 19 nt, Homo sapiens
  misc_RNA (1)...(19): siRNA sense strand
uuuacagguucaagcaaua

SEQ ID NO: 2473338 - RNA, 19 nt, Homo sapiens
  misc_RNA (1)...(19): siRNA sense strand
ugguaaaucuacaacaaca

SEQ ID NO: 2473339 - RNA, 19 nt, Homo sapiens
  misc_RNA (1)...(19): siRNA sense strand
uggaauuuauugagccuau

SEQ ID NO: 2473340 - RNA, 19 nt, Homo sapiens
  misc_RNA (1)...(19): siRNA sense strand
agaugauguuucagacuuu

SEQ ID NO: 2473341 - RNA, 19 nt, Homo sapiens
  misc_RNA (1)...(19): siRNA sense strand
guuuacagguucaagcaau

SEQ ID NO: 2473342 - RNA, 19 nt, Homo sapiens
  misc_RNA (1)...(19): siRNA sense strand
cuacaacaacaauggaaga

SEQ ID NO: 2473343 - RNA, 19 nt, Homo sapiens
  misc_RNA (1)...(19): siRNA sense strand
agguguacaauaugcaaua

SEQ ID NO: 2473344 - RNA, 19 nt, Homo sapiens
  misc_RNA (1)...(19): siRNA sense strand
cuacaauucaggagaguuc

SEQ ID NO: 2473345 - RNA, 19 nt, Homo sapiens
  misc_RNA (1)...(19): siRNA sense strand
gucauaaaccugagagucu

SEQ ID NO: 2473346 - RNA, 19 nt, Homo sapiens
  misc_RNA (1)...(19): siRNA sense strand
ucucagacuuauaacgaca

SEQ ID NO: 2473347 - RNA, 19 nt, Homo sapiens
  misc_RNA (1)...(19): siRNA sense strand
gaagauaucaggaaggaag

SEQ ID NO: 2473348 - RNA, 19 nt, Homo sapiens
  misc_RNA (1)...(19): siRNA sense strand
aagaagaagaaggaguuua

SEQ ID NO: 2473349 - RNA, 19 nt, Homo sapiens
  misc_RNA (1)...(19): siRNA sense strand
augcuguguuugcaagaaa

SEQ ID NO: 2473350 - RNA, 19 nt, Homo sapiens
  misc_RNA (1)...(19): siRNA sense strand
gcaccauuugcuuggaauu

SEQ ID NO: 2473351 - RNA, 19 nt, Homo sapiens
  misc_RNA (1)...(19): siRNA sense strand
ccugagagucuuucugcaa

SEQ ID NO: 2473352 - RNA, 19 nt, Homo sapiens
  misc_RNA (1)...(19): siRNA sense strand
gguccuugucaaagaacuu

SEQ ID NO: 2473353 - RNA, 19 nt, Homo sapiens
  misc_RNA (1)...(19): siRNA sense strand
uggaagagucaucaccuaa

SEQ ID NO: 2473354 - RNA, 19 nt, Homo sapiens
  misc_RNA (1)...(19): siRNA sense strand
agaaggaguuuaugguuuu

SEQ ID NO: 2473355 - RNA, 19 nt, Homo sapiens
  misc_RNA (1)...(19): siRNA sense strand
gcguugugauguucgaaga

SEQ ID NO: 2473356 - RNA, 19 nt, Homo sapiens
  misc_RNA (1)...(19): siRNA sense strand
uuacuaugaagcuggcaaa

SEQ ID NO: 2473357 - RNA, 19 nt, Homo sapiens
  misc_RNA (1)...(19): siRNA sense strand
aggcuguugaagaugguaa

SEQ ID NO: 2473358 - RNA, 19 nt, Homo sapiens
  misc_RNA (1)...(19): siRNA sense strand
agauguugagaaugggaau

SEQ ID NO: 2473359 - RNA, 19 nt, Homo sapiens
  misc_RNA (1)...(19): siRNA sense strand
cagaaaauacccagccaau

SEQ ID NO: 2473360 - RNA, 19 nt, Homo sapiens
  misc_RNA (1)...(19): siRNA sense strand
augcaauaauagugacauc

SEQ ID NO: 2473361 - RNA, 19 nt, Homo sapiens
  misc_RNA (1)...(19): siRNA sense strand
cuaugagcguugugauguu

SEQ ID NO: 2473362 - RNA, 19 nt, Homo sapiens
  misc_RNA (1)...(19): siRNA sense strand
agacauacuuggcuaccau

SEQ ID NO: 2473363 - RNA, 19 nt, Homo sapiens
  misc_RNA (1)...(19): siRNA sense strand
ggcuguugaagaugguaaa

SEQ ID NO: 2473364 - RNA, 19 nt, Homo sapiens
  misc_RNA (1)...(19): siRNA sense strand
ggaaggaagugaauagagc

SEQ ID NO: 2473365 - RNA, 19 nt, Homo sapiens
  misc_RNA (1)...(19): siRNA sense strand
aaggaagugaauagagcuu

SEQ ID NO: 2473366 - RNA, 19 nt, Homo sapiens
  misc_RNA (1)...(19): siRNA sense strand
aagcaauaaaugcgggagu

SEQ ID NO: 2473367 - RNA, 19 nt, Homo sapiens
  misc_RNA (1)...(19): siRNA sense strand
ugauagcaaaugggaaaua

SEQ ID NO: 2473368 - RNA, 19 nt, Homo sapiens
  misc_RNA (1)...(19): siRNA sense strand
guauaucaacaaagccaau

SEQ ID NO: 2473369 - RNA, 19 nt, Homo sapiens
  misc_RNA (1)...(19): siRNA sense strand
gcuuugggguuuuggaaca

SEQ ID NO: 2473370 - RNA, 19 nt, Homo sapiens
  misc_RNA (1)...(19): siRNA sense strand
ggaccaucgaccuguucaa

SEQ ID NO: 2473371 - RNA, 19 nt, Homo sapiens
  misc_RNA (1)...(19): siRNA sense strand
acgcuugguuucauagaga

SEQ ID NO: 2473372 - RNA, 19 nt, Homo sapiens
  misc_RNA (1)...(19): siRNA sense strand
ccgauguaaacgaaguuau

SEQ ID NO: 2473373 - RNA, 19 nt, Homo sapiens
  misc_RNA (1)...(19): siRNA sense strand
gcaauaaaugcgggagugu

SEQ ID NO: 2473374 - RNA, 19 nt, Homo sapiens
  misc_RNA (1)...(19): siRNA sense strand
uaaaagacauacuuggcua

SEQ ID NO: 2473375 - RNA, 19 nt, Homo sapiens
  misc_RNA (1)...(19): siRNA sense strand
uggacuucaccauaagaaa

SEQ ID NO: 2473376 - RNA, 19 nt, Homo sapiens
  misc_RNA (1)...(19): siRNA sense strand
ggagagaaauggaaggaga

SEQ ID NO: 2473377 - RNA, 19 nt, Homo sapiens
  misc_RNA (1)...(19): siRNA sense strand
gcgaaagaccggauggaga

SEQ ID NO: 2473378 - RNA, 19 nt, Homo sapiens
  misc_RNA (1)...(19): siRNA sense strand
ggguaucuguggaggacau

SEQ ID NO: 2473379 - RNA, 19 nt, Homo sapiens
  misc_RNA (1)...(19): siRNA sense strand
aauaaaagcaucagagaga

SEQ ID NO: 2473380 - RNA, 19 nt, Homo sapiens
  misc_RNA (1)...(19): siRNA sense strand
ucacaguggcugagggcuu

SEQ ID NO: 2473381 - RNA, 19 nt, Homo sapiens
  misc_RNA (1)...(19): siRNA sense strand
gccuaaaggucgacgagga

SEQ ID NO: 2473382 - RNA, 19 nt, Homo sapiens
  misc_RNA (1)...(19): siRNA sense strand
agaaauggaaggagaugau

SEQ ID NO: 2473383 - RNA, 19 nt, Homo sapiens
  misc_RNA (1)...(19): siRNA sense strand
gagagaaauggaaggagau

SEQ ID NO: 2473384 - RNA, 19 nt, Homo sapiens
  misc_RNA (1)...(19): siRNA sense strand
gaacacuucuugcgggaga

SEQ ID NO: 2473385 - RNA, 19 nt, Homo sapiens
  misc_RNA (1)...(19): siRNA sense strand
acgccaggccuguggagaa

SEQ ID NO: 2473386 - RNA, 19 nt, Homo sapiens
  misc_RNA (1)...(19): siRNA sense strand
caguaagaaggaauacaaa

SEQ ID NO: 2473387 - RNA, 19 nt, Homo sapiens
  misc_RNA (1)...(19): siRNA sense strand
agauggaagaggagaucau

SEQ ID NO: 2473388 - RNA, 19 nt, Homo sapiens
  misc_RNA (1)...(19): siRNA sense strand
gagaggauuaccaggaaaa

SEQ ID NO: 2473389 - RNA, 19 nt, Homo sapiens
  misc_RNA (1)...(19): siRNA sense strand
gauuugagcuggaggcuuc

SEQ ID NO: 2473390 - RNA, 19 nt, Homo sapiens
  misc_RNA (1)...(19): siRNA sense strand
cagcccaaguggagaagga

SEQ ID NO: 2473391 - RNA, 19 nt, Homo sapiens
  misc_RNA (1)...(19): siRNA sense strand
guggagaaggagagccaga

SEQ ID NO: 2473392 - RNA, 19 nt, Homo sapiens
  misc_RNA (1)...(19): siRNA sense strand
augaaggagucaaccacaa

SEQ ID NO: 2473393 - RNA, 19 nt, Homo sapiens
  misc_RNA (1)...(19): siRNA sense strand
gggacagauuugagcugga

SEQ ID NO: 2473394 - RNA, 19 nt, Homo sapiens
  misc_RNA (1)...(19): siRNA sense strand
ccgcagugagcuuggccua

SEQ ID NO: 2473395 - RNA, 19 nt, Homo sapiens
  misc_RNA (1)...(19): siRNA sense strand
accugagauuucugaauaa

SEQ ID NO: 2473396 - RNA, 19 nt, Homo sapiens
  misc_RNA (1)...(19): siRNA sense strand
cguaccagguccagaaacu

SEQ ID NO: 2473397 - RNA, 19 nt, Homo sapiens
  misc_RNA (1)...(19): siRNA sense strand
cugugaggagugucagaaa

SEQ ID NO: 2473398 - RNA, 19 nt, Homo sapiens
  misc_RNA (1)...(19): siRNA sense strand
aguuaauuccugugcugaa

SEQ ID NO: 2473399 - RNA, 19 nt, Homo sapiens
  misc_RNA (1)...(19): siRNA sense strand
ggagugucagaaagcgaaa

SEQ ID NO: 2473400 - RNA, 19 nt, Homo sapiens
  misc_RNA (1)...(19): siRNA sense strand
aggcagcccaaguggagaa

SEQ ID NO: 2473401 - RNA, 19 nt, Homo sapiens
  misc_RNA (1)...(19): siRNA sense strand
ggcccagagacaagagaca

SEQ ID NO: 2473402 - RNA, 19 nt, Homo sapiens
  misc_RNA (1)...(19): siRNA sense strand
gagaaauggaaggagauga

SEQ ID NO: 2473403 - RNA, 19 nt, Homo sapiens
  misc_RNA (1)...(19): siRNA sense strand
cuguggagaaggagagcca

SEQ ID NO: 2473404 - RNA, 19 nt, Homo sapiens
  misc_RNA (1)...(19): siRNA sense strand
ccacuauggugcuggacgu

SEQ ID NO: 2473405 - RNA, 19 nt, Homo sapiens
  misc_RNA (1)...(19): siRNA sense strand
gccagauggaagaggagau

SEQ ID NO: 2473406 - RNA, 19 nt, Homo sapiens
  misc_RNA (1)...(19): siRNA sense strand
uagcugaaaccaaggacau

SEQ ID NO: 2473407 - RNA, 19 nt, Homo sapiens
  misc_RNA (1)...(19): siRNA sense strand
agauggagaaacagggcga

SEQ ID NO: 2473408 - RNA, 19 nt, Homo sapiens
  misc_RNA (1)...(19): siRNA sense strand
aggagagccagauggaaga

SEQ ID NO: 2473409 - RNA, 19 nt, Homo sapiens
  misc_RNA (1)...(19): siRNA sense strand
ccguuauggagaugguaca

SEQ ID NO: 2473410 - RNA, 19 nt, Homo sapiens
  misc_RNA (1)...(19): siRNA sense strand
gaggagugucagaaagcga

SEQ ID NO: 2473411 - RNA, 19 nt, Homo sapiens
  misc_RNA (1)...(19): siRNA sense strand
cgacuggagagacggucaa

SEQ ID NO: 2473412 - RNA, 19 nt, Homo sapiens
  misc_RNA (1)...(19): siRNA sense strand
ugacaauaucaguaagaag

SEQ ID NO: 2473413 - RNA, 19 nt, Homo sapiens
  misc_RNA (1)...(19): siRNA sense strand
agagaugccuacucgaaaa

SEQ ID NO: 2473414 - RNA, 19 nt, Homo sapiens
  misc_RNA (1)...(19): siRNA sense strand
cgugggaagcgcaacacaa

SEQ ID NO: 2473415 - RNA, 19 nt, Homo sapiens
  misc_RNA (1)...(19): siRNA sense strand
aggacggguuacagaauaa

SEQ ID NO: 2473416 - RNA, 19 nt, Homo sapiens
  misc_RNA (1)...(19): siRNA sense strand
acucauaagaaguugggaa

SEQ ID NO: 2473417 - RNA, 19 nt, Homo sapiens
  misc_RNA (1)...(19): siRNA sense strand
cauuagugugcuuaggaaa

SEQ ID NO: 2473418 - RNA, 19 nt, Homo sapiens
  misc_RNA (1)...(19): siRNA sense strand
ucugaggagaugaaaguua

SEQ ID NO: 2473419 - RNA, 19 nt, Homo sapiens
  misc_RNA (1)...(19): siRNA sense strand
gaaucagcaaauugacaaa

SEQ ID NO: 2473420 - RNA, 19 nt, Homo sapiens
  misc_RNA (1)...(19): siRNA sense strand
agaugaacgugauaggaca

SEQ ID NO: 2473421 - RNA, 19 nt, Homo sapiens
  misc_RNA (1)...(19): siRNA sense strand
caacauuggagcagaccuu

SEQ ID NO: 2473422 - RNA, 19 nt, Homo sapiens
  misc_RNA (1)...(19): siRNA sense strand
gaugaacgugauaggacaa

SEQ ID NO: 2473423 - RNA, 19 nt, Homo sapiens
  misc_RNA (1)...(19): siRNA sense strand
cucauaagaaguugggaau

SEQ ID NO: 2473424 - RNA, 19 nt, Homo sapiens
  misc_RNA (1)...(19): siRNA sense strand
ggguuacagaauaaacaua

SEQ ID NO: 2473425 - RNA, 19 nt, Homo sapiens
  misc_RNA (1)...(19): siRNA sense strand
agcagaaaucuuuggauau

SEQ ID NO: 2473426 - RNA, 19 nt, Homo sapiens
  misc_RNA (1)...(19): siRNA sense strand
cugcgguccucaugggaau

SEQ ID NO: 2473427 - RNA, 19 nt, Homo sapiens
  misc_RNA (1)...(19): siRNA sense strand
aggagaugaaaguuacaaa

SEQ ID NO: 2473428 - RNA, 19 nt, Homo sapiens
  misc_RNA (1)...(19): siRNA sense strand
ccggaaaaguguugccuca

SEQ ID NO: 2473429 - RNA, 19 nt, Homo sapiens
  misc_RNA (1)...(19): siRNA sense strand
aaauauugggaaucagcaa

SEQ ID NO: 2473430 - RNA, 19 nt, Homo sapiens
  misc_RNA (1)...(19): siRNA sense strand
aagaacaagagcaggcaca

SEQ ID NO: 2473431 - RNA, 19 nt, Homo sapiens
  misc_RNA (1)...(19): siRNA sense strand
gggaaucagcaaauugaca

SEQ ID NO: 2473432 - RNA, 19 nt, Homo sapiens
  misc_RNA (1)...(19): siRNA sense strand
caauaugggcuuucagacu

SEQ ID NO: 2473433 - RNA, 19 nt, Homo sapiens
  misc_RNA (1)...(19): siRNA sense strand
ucucuuuggcccucagaaa

SEQ ID NO: 2473434 - RNA, 19 nt, Homo sapiens
  misc_RNA (1)...(19): siRNA sense strand
augcaagaacagcagaaau

SEQ ID NO: 2473435 - RNA, 19 nt, Homo sapiens
  misc_RNA (1)...(19): siRNA sense strand
ccaacugauaauacaaaga

SEQ ID NO: 2473436 - RNA, 19 nt, Homo sapiens
  misc_RNA (1)...(19): siRNA sense strand
ccaagaugacucugggaac

SEQ ID NO: 2473437 - RNA, 19 nt, Homo sapiens
  misc_RNA (1)...(19): siRNA sense strand
ucuuuaacccacagaacuu

SEQ ID NO: 2473438 - RNA, 19 nt, Homo sapiens
  misc_RNA (1)...(19): siRNA sense strand
caugggaauuuuagguauu

SEQ ID NO: 2473439 - RNA, 19 nt, Homo sapiens
  misc_RNA (1)...(19): siRNA sense strand
gagcaggcacagaagcuga

SEQ ID NO: 2473440 - RNA, 19 nt, Homo sapiens
  misc_RNA (1)...(19): siRNA sense strand
cugaagaaacaaaggaaaa

SEQ ID NO: 2473441 - RNA, 19 nt, Homo sapiens
  misc_RNA (1)...(19): siRNA sense strand
acaagaaacugaacgguca

SEQ ID NO: 2473442 - RNA, 19 nt, Homo sapiens
  misc_RNA (1)...(19): siRNA sense strand
ccucaaagccagagaagcu

SEQ ID NO: 2473443 - RNA, 19 nt, Homo sapiens
  misc_RNA (1)...(19): siRNA sense strand
agugaagccaagaaagaua

SEQ ID NO: 2473444 - RNA, 19 nt, Homo sapiens
  misc_RNA (1)...(19): siRNA sense strand
uggacagaaagcagaguaa

SEQ ID NO: 2473445 - RNA, 19 nt, Homo sapiens
  misc_RNA (1)...(19): siRNA sense strand
ugaucauagacgauggaaa

SEQ ID NO: 2473446 - RNA, 19 nt, Homo sapiens
  misc_RNA (1)...(19): siRNA sense strand
cagcuagaucgaagaguau

SEQ ID NO: 2473447 - RNA, 19 nt, Homo sapiens
  misc_RNA (1)...(19): siRNA sense strand
cggucagacaagaggucaa

SEQ ID NO: 2473448 - RNA, 19 nt, Homo sapiens
  misc_RNA (1)...(19): siRNA sense strand
acugaagaaacaaaggaaa

SEQ ID NO: 2473449 - RNA, 19 nt, Homo sapiens
  misc_RNA (1)...(19): siRNA sense strand
gcaaugaaguugugaggag

SEQ ID NO: 2473450 - RNA, 19 nt, Homo sapiens
  misc_RNA (1)...(19): siRNA sense strand
ucggagaagaauaggaaca

SEQ ID NO: 2473451 - RNA, 19 nt, Homo sapiens
  misc_RNA (1)...(19): siRNA sense strand
gcgucaaggcucaguucaa

SEQ ID NO: 2473452 - RNA, 19 nt, Homo sapiens
  misc_RNA (1)...(19): siRNA sense strand
cugaagaaacugcaggaga

SEQ ID NO: 2473453 - RNA, 19 nt, Homo sapiens
  misc_RNA (1)...(19): siRNA sense strand
gcaucaagucugggaagaa

SEQ ID NO: 2473454 - RNA, 19 nt, Homo sapiens
  misc_RNA (1)...(19): siRNA sense strand
ccaaaggagaggaagcuga

SEQ ID NO: 2473455 - RNA, 19 nt, Homo sapiens
  misc_RNA (1)...(19): siRNA sense strand
cggcauugaucaaguccau

SEQ ID NO: 2473456 - RNA, 19 nt, Homo sapiens
  misc_RNA (1)...(19): siRNA sense strand
gggaagaucaucagcggca

SEQ ID NO: 2473457 - RNA, 19 nt, Homo sapiens
  misc_RNA (1)...(19): siRNA sense strand
caugauaaagugaagccaa

SEQ ID NO: 2473458 - RNA, 19 nt, Homo sapiens
  misc_RNA (1)...(19): siRNA sense strand
agaaacugcaggagauuga

SEQ ID NO: 2473459 - RNA, 19 nt, Homo sapiens
  misc_RNA (1)...(19): siRNA sense strand
gggaagaaacccacccaga

SEQ ID NO: 2473460 - RNA, 19 nt, Homo sapiens
  misc_RNA (1)...(19): siRNA sense strand
ucguaaacuacaugagcau

SEQ ID NO: 2473461 - RNA, 19 nt, Homo sapiens
  misc_RNA (1)...(19): siRNA sense strand
gcaucuacaaggagcuuau

SEQ ID NO: 2473462 - RNA, 19 nt, Homo sapiens
  misc_RNA (1)...(19): siRNA sense strand
agacaagaggucaagcaau

SEQ ID NO: 2473463 - RNA, 19 nt, Homo sapiens
  misc_RNA (1)...(19): siRNA sense strand
acgccuggaacgagaguuu

SEQ ID NO: 2473464 - RNA, 19 nt, Homo sapiens
  misc_RNA (1)...(19): siRNA sense strand
ucgacaccgucaagugaaa

SEQ ID NO: 2473465 - RNA, 19 nt, Homo sapiens
  misc_RNA (1)...(19): siRNA sense strand
auaaagugaagccaagaaa

SEQ ID NO: 2473466 - RNA, 19 nt, Homo sapiens
  misc_RNA (1)...(19): siRNA sense strand
accaaaguacugaugaaua

SEQ ID NO: 2473467 - RNA, 19 nt, Homo sapiens
  misc_RNA (1)...(19): siRNA sense strand
ggcuggaggaacugaagaa

SEQ ID NO: 2473468 - RNA, 19 nt, Homo sapiens
  misc_RNA (1)...(19): siRNA sense strand
ucacagaugaaacgggaca

SEQ ID NO: 2473469 - RNA, 19 nt, Homo sapiens
  misc_RNA (1)...(19): siRNA sense strand
agacagagucauugagcac

SEQ ID NO: 2473470 - RNA, 19 nt, Homo sapiens
  misc_RNA (1)...(19): siRNA sense strand
aguaugacuaccaugauaa

SEQ ID NO: 2473471 - RNA, 19 nt, Homo sapiens
  misc_RNA (1)...(19): siRNA sense strand
cauuguucggagaagaaua

SEQ ID NO: 2473472 - RNA, 19 nt, Homo sapiens
  misc_RNA (1)...(19): siRNA sense strand
cagacaagaggucaagcaa

SEQ ID NO: 2473473 - RNA, 19 nt, Homo sapiens
  misc_RNA (1)...(19): siRNA sense strand
gacagaaagcagaguaagu

SEQ ID NO: 2473474 - RNA, 19 nt, Homo sapiens
  misc_RNA (1)...(19): siRNA sense strand
gucagaggcuggaggaacu

SEQ ID NO: 2473475 - RNA, 19 nt, Homo sapiens
  misc_RNA (1)...(19): siRNA sense strand
auuaugcagugaaggacaa

SEQ ID NO: 2473476 - RNA, 19 nt, Homo sapiens
  misc_RNA (1)...(19): siRNA sense strand
gaguauuggaacaugacuu

SEQ ID NO: 2473477 - RNA, 19 nt, Homo sapiens
  misc_RNA (1)...(19): siRNA sense strand
cguggaaguucaugaccca

SEQ ID NO: 2473478 - RNA, 19 nt, Homo sapiens
  misc_RNA (1)...(19): siRNA sense strand
aagcagaguaaguccaaaa

SEQ ID NO: 2473479 - RNA, 19 nt, Homo sapiens
  misc_RNA (1)...(19): siRNA sense strand
ggaucuuccaguaugacua

SEQ ID NO: 2473480 - RNA, 19 nt, Homo sapiens
  misc_RNA (1)...(19): siRNA sense strand
aggaagcucuggaggaaac

SEQ ID NO: 2473481 - RNA, 19 nt, Homo sapiens
  misc_RNA (1)...(19): siRNA sense strand
cagagaagcucgacaccgu

SEQ ID NO: 2473482 - RNA, 19 nt, Homo sapiens
  misc_RNA (1)...(19): siRNA sense strand
acuauuaugcagugaagga

SEQ ID NO: 2473483 - RNA, 19 nt, Homo sapiens
  misc_RNA (1)...(19): siRNA sense strand
ugaaggacaagcagggcau

SEQ ID NO: 2473484 - RNA, 19 nt, Homo sapiens
  misc_RNA (1)...(19): siRNA sense strand
cuggcagacuggagaagca

SEQ ID NO: 2473485 - RNA, 19 nt, Homo sapiens
  misc_RNA (1)...(19): siRNA sense strand
aucgaagaguauuggaaca

SEQ ID NO: 2473486 - RNA, 19 nt, Homo sapiens
  misc_RNA (1)...(19): siRNA sense strand
uggaggaacugaagaagcu

SEQ ID NO: 2473487 - RNA, 19 nt, Homo sapiens
  misc_RNA (1)...(19): siRNA sense strand
cccaaaauguggagugagu

SEQ ID NO: 2473488 - RNA, 19 nt, Homo sapiens
  misc_RNA (1)...(19): siRNA sense strand
gcagacuggagaagcaaca

SEQ ID NO: 2473489 - RNA, 19 nt, Homo sapiens
  misc_RNA (1)...(19): siRNA sense strand
agaucgaagaguauuggaa

SEQ ID NO: 2473490 - RNA, 19 nt, Homo sapiens
  misc_RNA (1)...(19): siRNA sense strand
ggccugagcuacaaaggga

SEQ ID NO: 2473491 - RNA, 19 nt, Homo sapiens
  misc_RNA (1)...(19): siRNA sense strand
agaugaacccuaugagaag

SEQ ID NO: 2473492 - RNA, 19 nt, Homo sapiens
  misc_RNA (1)...(19): siRNA sense strand
agguuugagcugaggaaga

SEQ ID NO: 2473493 - RNA, 19 nt, Homo sapiens
  misc_RNA (1)...(19): siRNA sense strand
uggaaacagccaagaagau

SEQ ID NO: 2473494 - RNA, 19 nt, Homo sapiens
  misc_RNA (1)...(19): siRNA sense strand
gcaccgaggacuucugcua

SEQ ID NO: 2473495 - RNA, 19 nt, Homo sapiens
  misc_RNA (1)...(19): siRNA sense strand
agagcaaacugaagcggca

SEQ ID NO: 2473496 - RNA, 19 nt, Homo sapiens
  misc_RNA (1)...(19): siRNA sense strand
gcuccagcaccgaggacuu

SEQ ID NO: 2473497 - RNA, 19 nt, Homo sapiens
  misc_RNA (1)...(19): siRNA sense strand
uggaggagcagcuggacau

SEQ ID NO: 2473498 - RNA, 19 nt, Homo sapiens
  misc_RNA (1)...(19): siRNA sense strand
ucccagagaggcagaggaa

SEQ ID NO: 2473499 - RNA, 19 nt, Homo sapiens
  misc_RNA (1)...(19): siRNA sense strand
ccagagaggcagaggaacg

SEQ ID NO: 2473500 - RNA, 19 nt, Homo sapiens
  misc_RNA (1)...(19): siRNA sense strand
cccucuugauccaggaauu

SEQ ID NO: 2473501 - RNA, 19 nt, Homo sapiens
  misc_RNA (1)...(19): siRNA sense strand
aucacaggcucgaaggaau

SEQ ID NO: 2473502 - RNA, 19 nt, Homo sapiens
  misc_RNA (1)...(19): siRNA sense strand
augaagaagcugaggcaaa

SEQ ID NO: 2473503 - RNA, 19 nt, Homo sapiens
  misc_RNA (1)...(19): siRNA sense strand
cuuuaaagagguugaagaa

SEQ ID NO: 2473504 - RNA, 19 nt, Homo sapiens
  misc_RNA (1)...(19): siRNA sense strand
gaguagugaagaagaggaa

SEQ ID NO: 2473505 - RNA, 19 nt, Homo sapiens
  misc_RNA (1)...(19): siRNA sense strand
acuugaaugaauugggaaa

SEQ ID NO: 2473506 - RNA, 19 nt, Homo sapiens
  misc_RNA (1)...(19): siRNA sense strand
cagccaaagugguggggaa

SEQ ID NO: 2473507 - RNA, 19 nt, Homo sapiens
  misc_RNA (1)...(19): siRNA sense strand
caguagauccagacagaau

SEQ ID NO: 2473508 - RNA, 19 nt, Homo sapiens
  misc_RNA (1)...(19): siRNA sense strand
ucauaaaggcggacggcau

SEQ ID NO: 2473509 - RNA, 19 nt, Homo sapiens
  misc_RNA (1)...(19): siRNA sense strand
cgcucaagcagcagaauaa

SEQ ID NO: 2473510 - RNA, 19 nt, Homo sapiens
  misc_RNA (1)...(19): siRNA sense strand
guagugaagaagaggaaga

SEQ ID NO: 2473511 - RNA, 19 nt, Homo sapiens
  misc_RNA (1)...(19): siRNA sense strand
cugugaaagccaaggaaga

SEQ ID NO: 2473512 - RNA, 19 nt, Homo sapiens
  misc_RNA (1)...(19): siRNA sense strand
uaaguaaagcaguggagaa

SEQ ID NO: 2473513 - RNA, 19 nt, Homo sapiens
  misc_RNA (1)...(19): siRNA sense strand
caaauagauaccaggaaga

SEQ ID NO: 2473514 - RNA, 19 nt, Homo sapiens
  misc_RNA (1)...(19): siRNA sense strand
ccucauugcuacaggccau

SEQ ID NO: 2473515 - RNA, 19 nt, Homo sapiens
  misc_RNA (1)...(19): siRNA sense strand
auauggaacaugaggauuu

SEQ ID NO: 2473516 - RNA, 19 nt, Homo sapiens
  misc_RNA (1)...(19): siRNA sense strand
gguugaaggagcugagguu

SEQ ID NO: 2473517 - RNA, 19 nt, Homo sapiens
  misc_RNA (1)...(19): siRNA sense strand
caggaagaagcuaaguaaa

SEQ ID NO: 2473518 - RNA, 19 nt, Homo sapiens
  misc_RNA (1)...(19): siRNA sense strand
ucucaguggucgagugcuu

SEQ ID NO: 2473519 - RNA, 19 nt, Homo sapiens
  misc_RNA (1)...(19): siRNA sense strand
cuguagaugauauggaaga

SEQ ID NO: 2473520 - RNA, 19 nt, Homo sapiens
  misc_RNA (1)...(19): siRNA sense strand
aggaggaaucucaggauga

SEQ ID NO: 2473521 - RNA, 19 nt, Homo sapiens
  misc_RNA (1)...(19): siRNA sense strand
agauagggacacuggaaca

SEQ ID NO: 2473522 - RNA, 19 nt, Homo sapiens
  misc_RNA (1)...(19): siRNA sense strand
aggcaaaggauuucuugaa

SEQ ID NO: 2473523 - RNA, 19 nt, Homo sapiens
  misc_RNA (1)...(19): siRNA sense strand
cagacagaauggucaucaa

SEQ ID NO: 2473524 - RNA, 19 nt, Homo sapiens
  misc_RNA (1)...(19): siRNA sense strand
gauaccaggaagaagcuaa

SEQ ID NO: 2473525 - RNA, 19 nt, Homo sapiens
  misc_RNA (1)...(19): siRNA sense strand
agacauggcaauggagauu

SEQ ID NO: 2473526 - RNA, 19 nt, Homo sapiens
  misc_RNA (1)...(19): siRNA sense strand
gagaauaacuuggugggca

SEQ ID NO: 2473527 - RNA, 19 nt, Homo sapiens
  misc_RNA (1)...(19): siRNA sense strand
aggaagaagcuaaguaaag

SEQ ID NO: 2473528 - RNA, 19 nt, Homo sapiens
  misc_RNA (1)...(19): siRNA sense strand
gcgcuuuccgcaugacaaa

SEQ ID NO: 2473529 - RNA, 19 nt, Homo sapiens
  misc_RNA (1)...(19): siRNA sense strand
ugagcgaggcaaaggauuu

SEQ ID NO: 2473530 - RNA, 19 nt, Homo sapiens
  misc_RNA (1)...(19): siRNA sense strand
ccgcucaagcagcagaaua

SEQ ID NO: 2473531 - RNA, 19 nt, Homo sapiens
  misc_RNA (1)...(19): siRNA sense strand
cugaaaacccuaagcaaga

SEQ ID NO: 2473532 - RNA, 19 nt, Homo sapiens
  misc_RNA (1)...(19): siRNA sense strand
agaauaacuuggugggcac

SEQ ID NO: 2473533 - RNA, 19 nt, Homo sapiens
  misc_RNA (1)...(19): siRNA sense strand
ugauauggaacaugaggau

SEQ ID NO: 2473534 - RNA, 19 nt, Homo sapiens
  misc_RNA (1)...(19): siRNA sense strand
cagaauggucaucaagaga

SEQ ID NO: 2473535 - RNA, 19 nt, Homo sapiens
  misc_RNA (1)...(19): siRNA sense strand
ccuugcaagcagagguuau

SEQ ID NO: 2473536 - RNA, 19 nt, Homo sapiens
  misc_RNA (1)...(19): siRNA sense strand
ccacuagaaggcugggaca

SEQ ID NO: 2473537 - RNA, 19 nt, Homo sapiens
  misc_RNA (1)...(19): siRNA sense strand
ucagaaauacagaggccuu

SEQ ID NO: 2473538 - RNA, 19 nt, Homo sapiens
  misc_RNA (1)...(19): siRNA sense strand
caagauuaugcucgaauau

SEQ ID NO: 2473539 - RNA, 19 nt, Homo sapiens
  misc_RNA (1)...(19): siRNA sense strand
agauggcaguaguacguua

SEQ ID NO: 2473540 - RNA, 19 nt, Homo sapiens
  misc_RNA (1)...(19): siRNA sense strand
uggcuaaccagaagcaaca

SEQ ID NO: 2473541 - RNA, 19 nt, Homo sapiens
  misc_RNA (1)...(19): siRNA sense strand
aagcagagguuaucccaga

SEQ ID NO: 2473542 - RNA, 19 nt, Homo sapiens
  misc_RNA (1)...(19): siRNA sense strand
cuaaaguagcugauaccau

SEQ ID NO: 2473543 - RNA, 19 nt, Homo sapiens
  misc_RNA (1)...(19): siRNA sense strand
acaaauagauaccaggaag

SEQ ID NO: 2473544 - RNA, 19 nt, Homo sapiens
  misc_RNA (1)...(19): siRNA sense strand
ccuuaagagcuuccggaca

SEQ ID NO: 2473545 - RNA, 19 nt, Homo sapiens
  misc_RNA (1)...(19): siRNA sense strand
ccucaugaacagaagaugu

SEQ ID NO: 2473546 - RNA, 19 nt, Homo sapiens
  misc_RNA (1)...(19): siRNA sense strand
cagacauggcaauggagau

SEQ ID NO: 2473547 - RNA, 19 nt, Homo sapiens
  misc_RNA (1)...(19): siRNA sense strand
agaugaagaagcugaggca

SEQ ID NO: 2473548 - RNA, 19 nt, Homo sapiens
  misc_RNA (1)...(19): siRNA sense strand
agaaagacuggaagagaug

SEQ ID NO: 2473549 - RNA, 19 nt, Homo sapiens
  misc_RNA (1)...(19): siRNA sense strand
acacaguacugaugaaccu

SEQ ID NO: 2473550 - RNA, 19 nt, Homo sapiens
  misc_RNA (1)...(19): siRNA sense strand
cagaaauacagaggccuua

SEQ ID NO: 2473551 - RNA, 19 nt, Homo sapiens
  misc_RNA (1)...(19): siRNA sense strand
uugaaugaauugggaaaca

SEQ ID NO: 2473552 - RNA, 19 nt, Homo sapiens
  misc_RNA (1)...(19): siRNA sense strand
cugaggaggagcugagcga

SEQ ID NO: 2473553 - RNA, 19 nt, Homo sapiens
  misc_RNA (1)...(19): siRNA sense strand
aagccaaggaagagcucau

SEQ ID NO: 2473554 - RNA, 19 nt, Homo sapiens
  misc_RNA (1)...(19): siRNA sense strand
cugcagcggacaaacauaa

SEQ ID NO: 2473555 - RNA, 19 nt, Homo sapiens
  misc_RNA (1)...(19): siRNA sense strand
ugggaaugauagugauuau

SEQ ID NO: 2473556 - RNA, 19 nt, Homo sapiens
  misc_RNA (1)...(19): siRNA sense strand
acuuggaagaagagaguau

SEQ ID NO: 2473557 - RNA, 19 nt, Homo sapiens
  misc_RNA (1)...(19): siRNA sense strand
augaagaagaggaggcaca

SEQ ID NO: 2473558 - RNA, 19 nt, Homo sapiens
  misc_RNA (1)...(19): siRNA sense strand
guggacaguggaagauaaa

SEQ ID NO: 2473559 - RNA, 19 nt, Homo sapiens
  misc_RNA (1)...(19): siRNA sense strand
aguggacaguggaagauaa

SEQ ID NO: 2473560 - RNA, 19 nt, Homo sapiens
  misc_RNA (1)...(19): siRNA sense strand
gguuuaacuuagaggaggu

SEQ ID NO: 2473561 - RNA, 19 nt, Homo sapiens
  misc_RNA (1)...(19): siRNA sense strand
cuuuaggggaggagacaaa

SEQ ID NO: 2473562 - RNA, 19 nt, Homo sapiens
  misc_RNA (1)...(19): siRNA sense strand
agggaagagcacugaugaa

SEQ ID NO: 2473563 - RNA, 19 nt, Homo sapiens
  misc_RNA (1)...(19): siRNA sense strand
cagugcacuuaaacagaaa

SEQ ID NO: 2473564 - RNA, 19 nt, Homo sapiens
  misc_RNA (1)...(19): siRNA sense strand
agaggguaauacugaacaa

SEQ ID NO: 2473565 - RNA, 19 nt, Homo sapiens
  misc_RNA (1)...(19): siRNA sense strand
guaucagaguuuacaacau

SEQ ID NO: 2473566 - RNA, 19 nt, Homo sapiens
  misc_RNA (1)...(19): siRNA sense strand
cgcaaauaugguaaagauu

SEQ ID NO: 2473567 - RNA, 19 nt, Homo sapiens
  misc_RNA (1)...(19): siRNA sense strand
aggacaaguuugauggauc

SEQ ID NO: 2473568 - RNA, 19 nt, Homo sapiens
  misc_RNA (1)...(19): siRNA sense strand
agacauaaucagggugaca

SEQ ID NO: 2473569 - RNA, 19 nt, Homo sapiens
  misc_RNA (1)...(19): siRNA sense strand
ggguaauacugaacaaccu

SEQ ID NO: 2473570 - RNA, 19 nt, Homo sapiens
  misc_RNA (1)...(19): siRNA sense strand
ugaugauguagaagaaaca

SEQ ID NO: 2473571 - RNA, 19 nt, Homo sapiens
  misc_RNA (1)...(19): siRNA sense strand
aggaagaugugguagcagu

SEQ ID NO: 2473572 - RNA, 19 nt, Homo sapiens
  misc_RNA (1)...(19): siRNA sense strand
ccacagaggagcagcuucu

SEQ ID NO: 2473573 - RNA, 19 nt, Homo sapiens
  misc_RNA (1)...(19): siRNA sense strand
gugaugaugauguagaaga

SEQ ID NO: 2473574 - RNA, 19 nt, Homo sapiens
  misc_RNA (1)...(19): siRNA sense strand
ggaagaugugguagcaguu

SEQ ID NO: 2473575 - RNA, 19 nt, Homo sapiens
  misc_RNA (1)...(19): siRNA sense strand
agugcaagguguccgcaaa

SEQ ID NO: 2473576 - RNA, 19 nt, Homo sapiens
  misc_RNA (1)...(19): siRNA sense strand
cgucagguucagaaugcua

SEQ ID NO: 2473577 - RNA, 19 nt, Homo sapiens
  misc_RNA (1)...(19): siRNA sense strand
guaaacuagcuaauagaca

SEQ ID NO: 2473578 - RNA, 19 nt, Homo sapiens
  misc_RNA (1)...(19): siRNA sense strand
uguauuuaacccaggaaga

SEQ ID NO: 2473579 - RNA, 19 nt, Homo sapiens
  misc_RNA (1)...(19): siRNA sense strand
agguauugcaggaguggga

SEQ ID NO: 2473580 - RNA, 19 nt, Homo sapiens
  misc_RNA (1)...(19): siRNA sense strand
ggaugaguggacaguggaa

SEQ ID NO: 2473581 - RNA, 19 nt, Homo sapiens
  misc_RNA (1)...(19): siRNA sense strand
gaugggaaugauagugauu

SEQ ID NO: 2473582 - RNA, 19 nt, Homo sapiens
  misc_RNA (1)...(19): siRNA sense strand
uuaacuuagaggagguauu

SEQ ID NO: 2473583 - RNA, 19 nt, Homo sapiens
  misc_RNA (1)...(19): siRNA sense strand
gaacaaggaacccaggcuu

SEQ ID NO: 2473584 - RNA, 19 nt, Homo sapiens
  misc_RNA (1)...(19): siRNA sense strand
gcacugaugaagaagagga

SEQ ID NO: 2473585 - RNA, 19 nt, Homo sapiens
  misc_RNA (1)...(19): siRNA sense strand
augaguggacaguggaaga

SEQ ID NO: 2473586 - RNA, 19 nt, Homo sapiens
  misc_RNA (1)...(19): siRNA sense strand
gggugacagugaugaugau

SEQ ID NO: 2473587 - RNA, 19 nt, Homo sapiens
  misc_RNA (1)...(19): siRNA sense strand
gugcaagguguccgcaaau

SEQ ID NO: 2473588 - RNA, 19 nt, Homo sapiens
  misc_RNA (1)...(19): siRNA sense strand
uagaggagguauugcagga

SEQ ID NO: 2473589 - RNA, 19 nt, Homo sapiens
  misc_RNA (1)...(19): siRNA sense strand
ccaccuaagggcauguauu

SEQ ID NO: 2473590 - RNA, 19 nt, Homo sapiens
  misc_RNA (1)...(19): siRNA sense strand
gauaaagacaauggaggga

SEQ ID NO: 2473591 - RNA, 19 nt, Homo sapiens
  misc_RNA (1)...(19): siRNA sense strand
acuuauuggaauucagaca

SEQ ID NO: 2473592 - RNA, 19 nt, Homo sapiens
  misc_RNA (1)...(19): siRNA sense strand
aaaacucgcucuaggacaa

SEQ ID NO: 2473593 - RNA, 19 nt, Homo sapiens
  misc_RNA (1)...(19): siRNA sense strand
caguaucccagaugccaaa

SEQ ID NO: 2473594 - RNA, 19 nt, Homo sapiens
  misc_RNA (1)...(19): siRNA sense strand
ggaaagacaugaaggccaa

SEQ ID NO: 2473595 - RNA, 19 nt, Homo sapiens
  misc_RNA (1)...(19): siRNA sense strand
agaaagaggaggaggagga

SEQ ID NO: 2473596 - RNA, 19 nt, Homo sapiens
  misc_RNA (1)...(19): siRNA sense strand
aagcagaggaggaaguuaa

SEQ ID NO: 2473597 - RNA, 19 nt, Homo sapiens
  misc_RNA (1)...(19): siRNA sense strand
gcgaaguagcaguggugaa

SEQ ID NO: 2473598 - RNA, 19 nt, Homo sapiens
  misc_RNA (1)...(19): siRNA sense strand
aggaggaggaagaggagaa

SEQ ID NO: 2473599 - RNA, 19 nt, Homo sapiens
  misc_RNA (1)...(19): siRNA sense strand
ccauaaagcaagaagagga

SEQ ID NO: 2473600 - RNA, 19 nt, Homo sapiens
  misc_RNA (1)...(19): siRNA sense strand
aggaggaagaggagaaaga

SEQ ID NO: 2473601 - RNA, 19 nt, Homo sapiens
  misc_RNA (1)...(19): siRNA sense strand
aggaggaggaggaggaaga

SEQ ID NO: 2473602 - RNA, 19 nt, Homo sapiens
  misc_RNA (1)...(19): siRNA sense strand
uggaagaagcagaggagga

SEQ ID NO: 2473603 - RNA, 19 nt, Homo sapiens
  misc_RNA (1)...(19): siRNA sense strand
caaagggaguugaaggaga

SEQ ID NO: 2473604 - RNA, 19 nt, Homo sapiens
  misc_RNA (1)...(19): siRNA sense strand
ggaacaagcuagcagcaga

SEQ ID NO: 2473605 - RNA, 19 nt, Homo sapiens
  misc_RNA (1)...(19): siRNA sense strand
ccauauacauagcugggaa

SEQ ID NO: 2473606 - RNA, 19 nt, Homo sapiens
  misc_RNA (1)...(19): siRNA sense strand
uaaugaaagaagugggaga

SEQ ID NO: 2473607 - RNA, 19 nt, Homo sapiens
  misc_RNA (1)...(19): siRNA sense strand
caguuuaaacgaacaguaa

SEQ ID NO: 2473608 - RNA, 19 nt, Homo sapiens
  misc_RNA (1)...(19): siRNA sense strand
cuacugauauagaaggcua

SEQ ID NO: 2473609 - RNA, 19 nt, Homo sapiens
  misc_RNA (1)...(19): siRNA sense strand
aagaagugggagaaauaaa

SEQ ID NO: 2473610 - RNA, 19 nt, Homo sapiens
  misc_RNA (1)...(19): siRNA sense strand
cacaucaaguucugggaaa

SEQ ID NO: 2473611 - RNA, 19 nt, Homo sapiens
  misc_RNA (1)...(19): siRNA sense strand
aggagaaagaggaggagga

SEQ ID NO: 2473612 - RNA, 19 nt, Homo sapiens
  misc_RNA (1)...(19): siRNA sense strand
aaaccaaggaacagaucua

SEQ ID NO: 2473613 - RNA, 19 nt, Homo sapiens
  misc_RNA (1)...(19): siRNA sense strand
agggaagaaaggaggaaca

SEQ ID NO: 2473614 - RNA, 19 nt, Homo sapiens
  misc_RNA (1)...(19): siRNA sense strand
ggaagagagagcaaaucaa

SEQ ID NO: 2473615 - RNA, 19 nt, Homo sapiens
  misc_RNA (1)...(19): siRNA sense strand
cuggauuguuggagauuga

SEQ ID NO: 2473616 - RNA, 19 nt, Homo sapiens
  misc_RNA (1)...(19): siRNA sense strand
gggaagaaaggaggaacaa

SEQ ID NO: 2473617 - RNA, 19 nt, Homo sapiens
  misc_RNA (1)...(19): siRNA sense strand
cagaggaggaaguuaagaa

SEQ ID NO: 2473618 - RNA, 19 nt, Homo sapiens
  misc_RNA (1)...(19): siRNA sense strand
gacuuuaacuacagcggua

SEQ ID NO: 2473619 - RNA, 19 nt, Homo sapiens
  misc_RNA (1)...(19): siRNA sense strand
aggaggaggaggaagaaga

SEQ ID NO: 2473620 - RNA, 19 nt, Homo sapiens
  misc_RNA (1)...(19): siRNA sense strand
agaaaauaucagagagcuu

SEQ ID NO: 2473621 - RNA, 19 nt, Homo sapiens
  misc_RNA (1)...(19): siRNA sense strand
aguuaucacuguuggguca

SEQ ID NO: 2473622 - RNA, 19 nt, Homo sapiens
  misc_RNA (1)...(19): siRNA sense strand
ccuaugaaaucaaagacau

SEQ ID NO: 2473623 - RNA, 19 nt, Homo sapiens
  misc_RNA (1)...(19): siRNA sense strand
ggaacuggaaagaagaaca

SEQ ID NO: 2473624 - RNA, 19 nt, Homo sapiens
  misc_RNA (1)...(19): siRNA sense strand
ggaaagaagaacaacccau

SEQ ID NO: 2473625 - RNA, 19 nt, Homo sapiens
  misc_RNA (1)...(19): siRNA sense strand
gagacuggauuguuggaga

SEQ ID NO: 2473626 - RNA, 19 nt, Homo sapiens
  misc_RNA (1)...(19): siRNA sense strand
aucaaagacaugugcauaa

SEQ ID NO: 2473627 - RNA, 19 nt, Homo sapiens
  misc_RNA (1)...(19): siRNA sense strand
aggaaagacaugaaggcca

SEQ ID NO: 2473628 - RNA, 19 nt, Homo sapiens
  misc_RNA (1)...(19): siRNA sense strand
agaagaugacacagaugaa

SEQ ID NO: 2473629 - RNA, 19 nt, Homo sapiens
  misc_RNA (1)...(19): siRNA sense strand
cauaaagcaagaagaggau

SEQ ID NO: 2473630 - RNA, 19 nt, Homo sapiens
  misc_RNA (1)...(19): siRNA sense strand
aagaagaggaugaucauga

SEQ ID NO: 2473631 - RNA, 19 nt, Homo sapiens
  misc_RNA (1)...(19): siRNA sense strand
gggaguugaaggagaaaau

SEQ ID NO: 2473632 - RNA, 19 nt, Homo sapiens
  misc_RNA (1)...(19): siRNA sense strand
ggugauuugcaaagcacua

SEQ ID NO: 2473633 - RNA, 19 nt, Homo sapiens
  misc_RNA (1)...(19): siRNA sense strand
gguuaugacuguagaaagc

SEQ ID NO: 2473634 - RNA, 19 nt, Homo sapiens
  misc_RNA (1)...(19): siRNA sense strand
cugagaagggauaugcuua

SEQ ID NO: 2473635 - RNA, 19 nt, Homo sapiens
  misc_RNA (1)...(19): siRNA sense strand
gggaagguggucugaucaa

SEQ ID NO: 2473636 - RNA, 19 nt, Homo sapiens
  misc_RNA (1)...(19): siRNA sense strand
aggaggaagaagagccauu

SEQ ID NO: 2473637 - RNA, 19 nt, Homo sapiens
  misc_RNA (1)...(19): siRNA sense strand
augaaagaagugggagaaa

SEQ ID NO: 2473638 - RNA, 19 nt, Homo sapiens
  misc_RNA (1)...(19): siRNA sense strand
gagaaauaaaggcacggaa

SEQ ID NO: 2473639 - RNA, 19 nt, Homo sapiens
  misc_RNA (1)...(19): siRNA sense strand
gaguugaaggagaaaauaa

SEQ ID NO: 2473640 - RNA, 19 nt, Homo sapiens
  misc_RNA (1)...(19): siRNA sense strand
cugaauuuaugcuaaggaa

SEQ ID NO: 2473641 - RNA, 19 nt, Homo sapiens
  misc_RNA (1)...(19): siRNA sense strand
cggaagagagagcaaauca

SEQ ID NO: 2473642 - RNA, 19 nt, Homo sapiens
  misc_RNA (1)...(19): siRNA sense strand
acaucaaguucugggaaau

SEQ ID NO: 2473643 - RNA, 19 nt, Homo sapiens
  misc_RNA (1)...(19): siRNA sense strand
gaaauugaaaagagggaga

SEQ ID NO: 2473644 - RNA, 19 nt, Homo sapiens
  misc_RNA (1)...(19): siRNA sense strand
uugaaaagagggagagaca

SEQ ID NO: 2473645 - RNA, 19 nt, Homo sapiens
  misc_RNA (1)...(19): siRNA sense strand
cgagaaugcuaggagaaaa

SEQ ID NO: 2473646 - RNA, 19 nt, Homo sapiens
  misc_RNA (1)...(19): siRNA sense strand
gaacagaucuaccugcgaa

SEQ ID NO: 2473647 - RNA, 19 nt, Homo sapiens
  misc_RNA (1)...(19): siRNA sense strand
uguuggagauugagccuau

SEQ ID NO: 2473648 - RNA, 19 nt, Homo sapiens
  misc_RNA (1)...(19): siRNA sense strand
ggauacugauggggagaaa

SEQ ID NO: 2473649 - RNA, 19 nt, Homo sapiens
  misc_RNA (1)...(19): siRNA sense strand
agggagagacaaagggagu

SEQ ID NO: 2473650 - RNA, 19 nt, Homo sapiens
  misc_RNA (1)...(19): siRNA sense strand
gaugggagaagauggagaa

SEQ ID NO: 2473651 - RNA, 19 nt, Homo sapiens
  misc_RNA (1)...(19): siRNA sense strand
aggaagaggagaaagagga

SEQ ID NO: 2473652 - RNA, 19 nt, Homo sapiens
  misc_RNA (1)...(19): siRNA sense strand
ccaacuaaucuuucugaau

SEQ ID NO: 2473653 - RNA, 19 nt, Homo sapiens
  misc_RNA (1)...(19): siRNA sense strand
ggagaaaauaagggaagaa

SEQ ID NO: 2473654 - RNA, 19 nt, Homo sapiens
  misc_RNA (1)...(19): siRNA sense strand
ggaggaggaagaggagaaa

SEQ ID NO: 2473655 - RNA, 19 nt, Homo sapiens
  misc_RNA (1)...(19): siRNA sense strand
gagaacaugacaaguuaau

SEQ ID NO: 2473656 - RNA, 19 nt, Homo sapiens
  misc_RNA (1)...(19): siRNA sense strand
gagaaaucaguuacaucaa

SEQ ID NO: 2473657 - RNA, 19 nt, Homo sapiens
  misc_RNA (1)...(19): siRNA sense strand
cuguugggucagauggaua

SEQ ID NO: 2473658 - RNA, 19 nt, Homo sapiens
  misc_RNA (1)...(19): siRNA sense strand
uaaagcaagaagaggauga

SEQ ID NO: 2473659 - RNA, 19 nt, Homo sapiens
  misc_RNA (1)...(19): siRNA sense strand
gagaaaauaagggaagaaa

SEQ ID NO: 2473660 - RNA, 19 nt, Homo sapiens
  misc_RNA (1)...(19): siRNA sense strand
aagaggaggaggaggagga

SEQ ID NO: 2473661 - RNA, 19 nt, Homo sapiens
  misc_RNA (1)...(19): siRNA sense strand
gagcaagucguaugggaga

SEQ ID NO: 2473662 - RNA, 19 nt, Homo sapiens
  misc_RNA (1)...(19): siRNA sense strand
ccaucaagccccaggagaa

SEQ ID NO: 2473663 - RNA, 19 nt, Homo sapiens
  misc_RNA (1)...(19): siRNA sense strand
guagagacaauaagggcau

SEQ ID NO: 2473664 - RNA, 19 nt, Homo sapiens
  misc_RNA (1)...(19): siRNA sense strand
ugugcgugcaguugggaaa

SEQ ID NO: 2473665 - RNA, 19 nt, Homo sapiens
  misc_RNA (1)...(19): siRNA sense strand
uuggaaaggagaacagaca

SEQ ID NO: 2473666 - RNA, 19 nt, Homo sapiens
  misc_RNA (1)...(19): siRNA sense strand
agaauguggaugaugcaau

SEQ ID NO: 2473667 - RNA, 19 nt, Homo sapiens
  misc_RNA (1)...(19): siRNA sense strand
cagaaggccugauugcaga

SEQ ID NO: 2473668 - RNA, 19 nt, Homo sapiens
  misc_RNA (1)...(19): siRNA sense strand
gugcuuaucuacuggguca

SEQ ID NO: 2473669 - RNA, 19 nt, Homo sapiens
  misc_RNA (1)...(19): siRNA sense strand
gcaaggaccugcaggacgu

SEQ ID NO: 2473670 - RNA, 19 nt, Homo sapiens
  misc_RNA (1)...(19): siRNA sense strand
gugaagacgacgcggcuga

SEQ ID NO: 2473671 - RNA, 19 nt, Homo sapiens
  misc_RNA (1)...(19): siRNA sense strand
gcaugaagagagaggaggu

SEQ ID NO: 2473672 - RNA, 19 nt, Homo sapiens
  misc_RNA (1)...(19): siRNA sense strand
aguuugaguuugaggcgca

SEQ ID NO: 2473673 - RNA, 19 nt, Homo sapiens
  misc_RNA (1)...(19): siRNA sense strand
ugaagagagaggaggugga

SEQ ID NO: 2473674 - RNA, 19 nt, Homo sapiens
  misc_RNA (1)...(19): siRNA sense strand
ccaucugagaacaaggaga

SEQ ID NO: 2473675 - RNA, 19 nt, Homo sapiens
  misc_RNA (1)...(19): siRNA sense strand
aagaaaucaaggagaaaga

SEQ ID NO: 2473676 - RNA, 19 nt, Homo sapiens
  misc_RNA (1)...(19): siRNA sense strand
aaagaauacugaaaggaga

SEQ ID NO: 2473677 - RNA, 19 nt, Homo sapiens
  misc_RNA (1)...(19): siRNA sense strand
ugaagaaaucaaggagaaa

SEQ ID NO: 2473678 - RNA, 19 nt, Homo sapiens
  misc_RNA (1)...(19): siRNA sense strand
gaucaaaugaggaagcuga

SEQ ID NO: 2473679 - RNA, 19 nt, Homo sapiens
  misc_RNA (1)...(19): siRNA sense strand
gcggaaacgucuaugcuca

SEQ ID NO: 2473680 - RNA, 19 nt, Homo sapiens
  misc_RNA (1)...(19): siRNA sense strand
augaagaagcauuagaaca

SEQ ID NO: 2473681 - RNA, 19 nt, Homo sapiens
  misc_RNA (1)...(19): siRNA sense strand
cacucuagacgcugagaaa

SEQ ID NO: 2473682 - RNA, 19 nt, Homo sapiens
  misc_RNA (1)...(19): siRNA sense strand
ggguggacuauaugaagaa

SEQ ID NO: 2473683 - RNA, 19 nt, Homo sapiens
  misc_RNA (1)...(19): siRNA sense strand
aggaaaagguguuaaacga

SEQ ID NO: 2473684 - RNA, 19 nt, Homo sapiens
  misc_RNA (1)...(19): siRNA sense strand
agacaauggaaaucccaaa

SEQ ID NO: 2473685 - RNA, 19 nt, Homo sapiens
  misc_RNA (1)...(19): siRNA sense strand
gagcccaaggaguuagaaa

SEQ ID NO: 2473686 - RNA, 19 nt, Homo sapiens
  misc_RNA (1)...(19): siRNA sense strand
cggaaacgucuaugcucaa

SEQ ID NO: 2473687 - RNA, 19 nt, Homo sapiens
  misc_RNA (1)...(19): siRNA sense strand
cugagaaagggguggacua

SEQ ID NO: 2473688 - RNA, 19 nt, Homo sapiens
  misc_RNA (1)...(19): siRNA sense strand
aagcauguggcaauggaaa

SEQ ID NO: 2473689 - RNA, 19 nt, Homo sapiens
  misc_RNA (1)...(19): siRNA sense strand
ucgcagcagacaauggaaa

SEQ ID NO: 2473690 - RNA, 19 nt, Homo sapiens
  misc_RNA (1)...(19): siRNA sense strand
ccgcauuggcagaugaacu

SEQ ID NO: 2473691 - RNA, 19 nt, Homo sapiens
  misc_RNA (1)...(19): siRNA sense strand
ucauguacuuguauggaca

SEQ ID NO: 2473692 - RNA, 19 nt, Homo sapiens
  misc_RNA (1)...(19): siRNA sense strand
cugacuaugaugagguuca

SEQ ID NO: 2473693 - RNA, 19 nt, Homo sapiens
  misc_RNA (1)...(19): siRNA sense strand
ugaaggaaaagguguuaaa

SEQ ID NO: 2473694 - RNA, 19 nt, Homo sapiens
  misc_RNA (1)...(19): siRNA sense strand
agcuaggagugauguacua

SEQ ID NO: 2473695 - RNA, 19 nt, Homo sapiens
  misc_RNA (1)...(19): siRNA sense strand
aauggaaaucccaaagcua

SEQ ID NO: 2473696 - RNA, 19 nt, Homo sapiens
  misc_RNA (1)...(19): siRNA sense strand
cuuacuuauucgucaaaga

SEQ ID NO: 2473697 - RNA, 19 nt, Homo sapiens
  misc_RNA (1)...(19): siRNA sense strand
augaugagguucacgacau

SEQ ID NO: 2473698 - RNA, 19 nt, Homo sapiens
  misc_RNA (1)...(19): siRNA sense strand
gagaaaaggaaaaggaaaa

SEQ ID NO: 2473699 - RNA, 19 nt, Homo sapiens
  misc_RNA (1)...(19): siRNA sense strand
auaaagaggaggaggaaga

SEQ ID NO: 2473700 - RNA, 19 nt, Homo sapiens
  misc_RNA (1)...(19): siRNA sense strand
gggaagauuugaaaagaaa

SEQ ID NO: 2473701 - RNA, 19 nt, Homo sapiens
  misc_RNA (1)...(19): siRNA sense strand
ccagauggaaggaaagaaa

SEQ ID NO: 2473702 - RNA, 19 nt, Homo sapiens
  misc_RNA (1)...(19): siRNA sense strand
cgacauacccggagggacu

SEQ ID NO: 2473703 - RNA, 19 nt, Homo sapiens
  misc_RNA (1)...(19): siRNA sense strand
aggcaaagaaaguaaacua

SEQ ID NO: 2473704 - RNA, 19 nt, Homo sapiens
  misc_RNA (1)...(19): siRNA sense strand
cgagaaagugccuuggaaa

SEQ ID NO: 2473705 - RNA, 19 nt, Homo sapiens
  misc_RNA (1)...(19): siRNA sense strand
gagaaagugccuuggaaaa

SEQ ID NO: 2473706 - RNA, 19 nt, Homo sapiens
  misc_RNA (1)...(19): siRNA sense strand
aggagaagguuuagcuaga

SEQ ID NO: 2473707 - RNA, 19 nt, Homo sapiens
  misc_RNA (1)...(19): siRNA sense strand
cgagaaaaggaaaaggaaa

SEQ ID NO: 2473708 - RNA, 19 nt, Homo sapiens
  misc_RNA (1)...(19): siRNA sense strand
gcacugacucugaggaaca

SEQ ID NO: 2473709 - RNA, 19 nt, Homo sapiens
  misc_RNA (1)...(19): siRNA sense strand
gccucgagguggagaagaa

SEQ ID NO: 2473710 - RNA, 19 nt, Homo sapiens
  misc_RNA (1)...(19): siRNA sense strand
gcaauuuggauaagggaca

SEQ ID NO: 2473711 - RNA, 19 nt, Homo sapiens
  misc_RNA (1)...(19): siRNA sense strand
gaucagagccagaagcaca

SEQ ID NO: 2473712 - RNA, 19 nt, Homo sapiens
  misc_RNA (1)...(19): siRNA sense strand
ggggagaagacuugagcaa

SEQ ID NO: 2473713 - RNA, 19 nt, Homo sapiens
  misc_RNA (1)...(19): siRNA sense strand
uuaaggacaaggaggguaa

SEQ ID NO: 2473714 - RNA, 19 nt, Homo sapiens
  misc_RNA (1)...(19): siRNA sense strand
cagauucacacuugggaaa

SEQ ID NO: 2473715 - RNA, 19 nt, Homo sapiens
  misc_RNA (1)...(19): siRNA sense strand
agcaagaacugaagcaaaa

SEQ ID NO: 2473716 - RNA, 19 nt, Homo sapiens
  misc_RNA (1)...(19): siRNA sense strand
aagaaguacaacagaagaa

SEQ ID NO: 2473717 - RNA, 19 nt, Homo sapiens
  misc_RNA (1)...(19): siRNA sense strand
gcugaugaauugagggaac

SEQ ID NO: 2473718 - RNA, 19 nt, Homo sapiens
  misc_RNA (1)...(19): siRNA sense strand
aacagaaguuggagucaaa

SEQ ID NO: 2473719 - RNA, 19 nt, Homo sapiens
  misc_RNA (1)...(19): siRNA sense strand
ugauguuguucuugggaau

SEQ ID NO: 2473720 - RNA, 19 nt, Homo sapiens
  misc_RNA (1)...(19): siRNA sense strand
gggaacgagaaaaggaaaa

SEQ ID NO: 2473721 - RNA, 19 nt, Homo sapiens
  misc_RNA (1)...(19): siRNA sense strand
agucagauuucuucaggaa

SEQ ID NO: 2473722 - RNA, 19 nt, Homo sapiens
  misc_RNA (1)...(19): siRNA sense strand
gauuuaggcaauuuggaua

SEQ ID NO: 2473723 - RNA, 19 nt, Homo sapiens
  misc_RNA (1)...(19): siRNA sense strand
cggauaagaguuaaggaca

SEQ ID NO: 2473724 - RNA, 19 nt, Homo sapiens
  misc_RNA (1)...(19): siRNA sense strand
gaguacaacgugauggcaa

SEQ ID NO: 2473725 - RNA, 19 nt, Homo sapiens
  misc_RNA (1)...(19): siRNA sense strand
gcaaacggucaucaagaaa

SEQ ID NO: 2473726 - RNA, 19 nt, Homo sapiens
  misc_RNA (1)...(19): siRNA sense strand
ccaagaagauaaaaggaga

SEQ ID NO: 2473727 - RNA, 19 nt, Homo sapiens
  misc_RNA (1)...(19): siRNA sense strand
uaauaauggccaaagagaa

SEQ ID NO: 2473728 - RNA, 19 nt, Homo sapiens
  misc_RNA (1)...(19): siRNA sense strand
uaucuuauguugggagaaa

SEQ ID NO: 2473729 - RNA, 19 nt, Homo sapiens
  misc_RNA (1)...(19): siRNA sense strand
aaauagguauccuggacaa

SEQ ID NO: 2473730 - RNA, 19 nt, Homo sapiens
  misc_RNA (1)...(19): siRNA sense strand
ucaagaagcaccuguggaa

SEQ ID NO: 2473731 - RNA, 19 nt, Homo sapiens
  misc_RNA (1)...(19): siRNA sense strand
gagacuugggaacgagaaa

SEQ ID NO: 2473732 - RNA, 19 nt, Homo sapiens
  misc_RNA (1)...(19): siRNA sense strand
agguggagaagaaggacaa

SEQ ID NO: 2473733 - RNA, 19 nt, Homo sapiens
  misc_RNA (1)...(19): siRNA sense strand
aauauaaagaggaggagga

SEQ ID NO: 2473734 - RNA, 19 nt, Homo sapiens
  misc_RNA (1)...(19): siRNA sense strand
uuacccagauggaaggaaa

SEQ ID NO: 2473735 - RNA, 19 nt, Homo sapiens
  misc_RNA (1)...(19): siRNA sense strand
aggaacaauugaagaggca

SEQ ID NO: 2473736 - RNA, 19 nt, Homo sapiens
  misc_RNA (1)...(19): siRNA sense strand
uggaagagcaagaacugaa

SEQ ID NO: 2473737 - RNA, 19 nt, Homo sapiens
  misc_RNA (1)...(19): siRNA sense strand
uggaauaagacacaaggua

SEQ ID NO: 2473738 - RNA, 19 nt, Homo sapiens
  misc_RNA (1)...(19): siRNA sense strand
cgggaagauuugaaaagaa

SEQ ID NO: 2473739 - RNA, 19 nt, Homo sapiens
  misc_RNA (1)...(19): siRNA sense strand
cugaauauaaagaggagga

SEQ ID NO: 2473740 - RNA, 19 nt, Homo sapiens
  misc_RNA (1)...(19): siRNA sense strand
gugacuaaccagagcacuu

SEQ ID NO: 2473741 - RNA, 19 nt, Homo sapiens
  misc_RNA (1)...(19): siRNA sense strand
gaaggaagcagaaggacca

SEQ ID NO: 2473742 - RNA, 19 nt, Homo sapiens
  misc_RNA (1)...(19): siRNA sense strand
uaaaauggauagacagcaa

SEQ ID NO: 2473743 - RNA, 19 nt, Homo sapiens
  misc_RNA (1)...(19): siRNA sense strand
accaagacauacagggaga

SEQ ID NO: 2473744 - RNA, 19 nt, Homo sapiens
  misc_RNA (1)...(19): siRNA sense strand
ugaaaagaaaggagaccaa

SEQ ID NO: 2473745 - RNA, 19 nt, Homo sapiens
  misc_RNA (1)...(19): siRNA sense strand
cuuauuuccugauggacaa

SEQ ID NO: 2473746 - RNA, 19 nt, Homo sapiens
  misc_RNA (1)...(19): siRNA sense strand
guuuaauaauggccaaaga

SEQ ID NO: 2473747 - RNA, 19 nt, Homo sapiens
  misc_RNA (1)...(19): siRNA sense strand
augcugaaguguaguaaca

SEQ ID NO: 2473748 - RNA, 19 nt, Homo sapiens
  misc_RNA (1)...(19): siRNA sense strand
ucaaguggacaaauagaaa

SEQ ID NO: 2473749 - RNA, 19 nt, Homo sapiens
  misc_RNA (1)...(19): siRNA sense strand
caucaagaaacgaaguaca

SEQ ID NO: 2473750 - RNA, 19 nt, Homo sapiens
  misc_RNA (1)...(19): siRNA sense strand
caacccaggaagaaacaua

SEQ ID NO: 2473751 - RNA, 19 nt, Homo sapiens
  misc_RNA (1)...(19): siRNA sense strand
ucgaacaacagaaagcaaa

SEQ ID NO: 2473752 - RNA, 19 nt, Homo sapiens
  misc_RNA (1)...(19): siRNA sense strand
agacauacagggagaaauc

SEQ ID NO: 2473753 - RNA, 19 nt, Homo sapiens
  misc_RNA (1)...(19): siRNA sense strand
caguaaagcuagaaccaag

SEQ ID NO: 2473754 - RNA, 19 nt, Homo sapiens
  misc_RNA (1)...(19): siRNA sense strand
ccgaaaaugcugaagugua

SEQ ID NO: 2473755 - RNA, 19 nt, Homo sapiens
  misc_RNA (1)...(19): siRNA sense strand
ggaagaaaugugaugggca

SEQ ID NO: 2473756 - RNA, 19 nt, Homo sapiens
  misc_RNA (1)...(19): siRNA sense strand
agaaggagagugaguguga

SEQ ID NO: 2473757 - RNA, 19 nt, Homo sapiens
  misc_RNA (1)...(19): siRNA sense strand
cucagaagccagauacaaa

SEQ ID NO: 2473758 - RNA, 19 nt, Homo sapiens
  misc_RNA (1)...(19): siRNA sense strand
ggaagagagcagaagccau

SEQ ID NO: 2473759 - RNA, 19 nt, Homo sapiens
  misc_RNA (1)...(19): siRNA sense strand
aagaagcaccuguggaaaa

SEQ ID NO: 2473760 - RNA, 19 nt, Homo sapiens
  misc_RNA (1)...(19): siRNA sense strand
gcgaggaggaggaggaaga

SEQ ID NO: 2473761 - RNA, 19 nt, Homo sapiens
  misc_RNA (1)...(19): siRNA sense strand
aggaagaggaggaggaguu

SEQ ID NO: 2473762 - RNA, 19 nt, Homo sapiens
  misc_RNA (1)...(19): siRNA sense strand
gguuggagaaauuggcaaa

SEQ ID NO: 2473763 - RNA, 19 nt, Homo sapiens
  misc_RNA (1)...(19): siRNA sense strand
gggagaacuggccgagaaa

SEQ ID NO: 2473764 - RNA, 19 nt, Homo sapiens
  misc_RNA (1)...(19): siRNA sense strand
acacaagaucucuggauau

SEQ ID NO: 2473765 - RNA, 19 nt, Homo sapiens
  misc_RNA (1)...(19): siRNA sense strand
gauuuaggccugaagacaa

SEQ ID NO: 2473766 - RNA, 19 nt, Homo sapiens
  misc_RNA (1)...(19): siRNA sense strand
cugaaauacugaagggaug

SEQ ID NO: 2473767 - RNA, 19 nt, Homo sapiens
  misc_RNA (1)...(19): siRNA sense strand
caaaugaaacucagcaaaa

SEQ ID NO: 2473768 - RNA, 19 nt, Homo sapiens
  misc_RNA (1)...(19): siRNA sense strand
gaggaggaguucagggagu

SEQ ID NO: 2473769 - RNA, 19 nt, Homo sapiens
  misc_RNA (1)...(19): siRNA sense strand
gcucacuguugaaguacaa

SEQ ID NO: 2473770 - RNA, 19 nt, Homo sapiens
  misc_RNA (1)...(19): siRNA sense strand
gggagcagucugaaggauu

SEQ ID NO: 2473771 - RNA, 19 nt, Homo sapiens
  misc_RNA (1)...(19): siRNA sense strand
caaacuagguaaagagccu

SEQ ID NO: 2473772 - RNA, 19 nt, Homo sapiens
  misc_RNA (1)...(19): siRNA sense strand
ccgaaacacagguggagau

SEQ ID NO: 2473773 - RNA, 19 nt, Homo sapiens
  misc_RNA (1)...(19): siRNA sense strand
gggagaguaaaguugauaa

SEQ ID NO: 2473774 - RNA, 19 nt, Homo sapiens
  misc_RNA (1)...(19): siRNA sense strand
cagugaagacguugggcuu

SEQ ID NO: 2473775 - RNA, 19 nt, Homo sapiens
  misc_RNA (1)...(19): siRNA sense strand
gcaauaacaacuacagcau

SEQ ID NO: 2473776 - RNA, 19 nt, Homo sapiens
  misc_RNA (1)...(19): siRNA sense strand
cuguaaagcuguuggaguc

SEQ ID NO: 2473777 - RNA, 19 nt, Homo sapiens
  misc_RNA (1)...(19): siRNA sense strand
ugcccgaaauggaggcuaa

SEQ ID NO: 2473778 - RNA, 19 nt, Homo sapiens
  misc_RNA (1)...(19): siRNA sense strand
uugaaugggcacuuggaaa

SEQ ID NO: 2473779 - RNA, 19 nt, Homo sapiens
  misc_RNA (1)...(19): siRNA sense strand
aggaaugguuuaggagauu

SEQ ID NO: 2473780 - RNA, 19 nt, Homo sapiens
  misc_RNA (1)...(19): siRNA sense strand
ugaccaaagcauuguaaca

SEQ ID NO: 2473781 - RNA, 19 nt, Homo sapiens
  misc_RNA (1)...(19): siRNA sense strand
agcuaaagucggaaaucaa

SEQ ID NO: 2473782 - RNA, 19 nt, Homo sapiens
  misc_RNA (1)...(19): siRNA sense strand
cguuggaggucaucgaaca

SEQ ID NO: 2473783 - RNA, 19 nt, Homo sapiens
  misc_RNA (1)...(19): siRNA sense strand
cgaacaaguaagauuauga

SEQ ID NO: 2473784 - RNA, 19 nt, Homo sapiens
  misc_RNA (1)...(19): siRNA sense strand
aggaggaggaagaggagga

SEQ ID NO: 2473785 - RNA, 19 nt, Homo sapiens
  misc_RNA (1)...(19): siRNA sense strand
aggaggaagaggaggagga

SEQ ID NO: 2473786 - RNA, 19 nt, Homo sapiens
  misc_RNA (1)...(19): siRNA sense strand
aguauuaaguacagugcca

SEQ ID NO: 2473787 - RNA, 19 nt, Homo sapiens
  misc_RNA (1)...(19): siRNA sense strand
ugauaagcucucagauauu

SEQ ID NO: 2473788 - RNA, 19 nt, Homo sapiens
  misc_RNA (1)...(19): siRNA sense strand
gggauggaugaaugagauu

SEQ ID NO: 2473789 - RNA, 19 nt, Homo sapiens
  misc_RNA (1)...(19): siRNA sense strand
ggguggaaccuuaagacuu

SEQ ID NO: 2473790 - RNA, 19 nt, Homo sapiens
  misc_RNA (1)...(19): siRNA sense strand
ugucacagccaaagcagaa

SEQ ID NO: 2473791 - RNA, 19 nt, Homo sapiens
  misc_RNA (1)...(19): siRNA sense strand
gggcacuuggaaagcaaua

SEQ ID NO: 2473792 - RNA, 19 nt, Homo sapiens
  misc_RNA (1)...(19): siRNA sense strand
ggaagaauauuuugggacu

SEQ ID NO: 2473793 - RNA, 19 nt, Homo sapiens
  misc_RNA (1)...(19): siRNA sense strand
gaguaaaguugauaagcuc

SEQ ID NO: 2473794 - RNA, 19 nt, Homo sapiens
  misc_RNA (1)...(19): siRNA sense strand
ccugaaauacugaagggau

SEQ ID NO: 2473795 - RNA, 19 nt, Homo sapiens
  misc_RNA (1)...(19): siRNA sense strand
cuucuuggcuccagggcuu

SEQ ID NO: 2473796 - RNA, 19 nt, Homo sapiens
  misc_RNA (1)...(19): siRNA sense strand
gugucuaagaagauccaaa

SEQ ID NO: 2473797 - RNA, 19 nt, Homo sapiens
  misc_RNA (1)...(19): siRNA sense strand
acuugaggguggaaccuua

SEQ ID NO: 2473798 - RNA, 19 nt, Homo sapiens
  misc_RNA (1)...(19): siRNA sense strand
caggagggaacaagaucua

SEQ ID NO: 2473799 - RNA, 19 nt, Homo sapiens
  misc_RNA (1)...(19): siRNA sense strand
ugaugaagacauuagucaa

SEQ ID NO: 2473800 - RNA, 19 nt, Homo sapiens
  misc_RNA (1)...(19): siRNA sense strand
acaaugaacccaagccaga

SEQ ID NO: 2473801 - RNA, 19 nt, Homo sapiens
  misc_RNA (1)...(19): siRNA sense strand
ucaucgaacaaguaagauu

SEQ ID NO: 2473802 - RNA, 19 nt, Homo sapiens
  misc_RNA (1)...(19): siRNA sense strand
cggaauugccagugaagac

SEQ ID NO: 2473803 - RNA, 19 nt, Homo sapiens
  misc_RNA (1)...(19): siRNA sense strand
caucuaagcuaaagucgga

SEQ ID NO: 2473804 - RNA, 19 nt, Homo sapiens
  misc_RNA (1)...(19): siRNA sense strand
agaucaugucacagccaaa

SEQ ID NO: 2473805 - RNA, 19 nt, Homo sapiens
  misc_RNA (1)...(19): siRNA sense strand
uggaaagcaauaacaacua

SEQ ID NO: 2473806 - RNA, 19 nt, Homo sapiens
  misc_RNA (1)...(19): siRNA sense strand
ccacaagagagauagaacu

SEQ ID NO: 2473807 - RNA, 19 nt, Homo sapiens
  misc_RNA (1)...(19): siRNA sense strand
ugagcaaagaagaugaaga

SEQ ID NO: 2473808 - RNA, 19 nt, Homo sapiens
  misc_RNA (1)...(19): siRNA sense strand
gcaaaggcaguguggagga

SEQ ID NO: 2473809 - RNA, 19 nt, Homo sapiens
  misc_RNA (1)...(19): siRNA sense strand
ugaugacucucgagaccaa

SEQ ID NO: 2473810 - RNA, 19 nt, Homo sapiens
  misc_RNA (1)...(19): siRNA sense strand
agaaauuggcaaagaaggu

SEQ ID NO: 2473811 - RNA, 19 nt, Homo sapiens
  misc_RNA (1)...(19): siRNA sense strand
ggcacuugaugaagacauu

SEQ ID NO: 2473812 - RNA, 19 nt, Homo sapiens
  misc_RNA (1)...(19): siRNA sense strand
cagcaaaggcaguguggag

SEQ ID NO: 2473813 - RNA, 19 nt, Homo sapiens
  misc_RNA (1)...(19): siRNA sense strand
cagcacaaguauuaaguac

SEQ ID NO: 2473814 - RNA, 19 nt, Homo sapiens
  misc_RNA (1)...(19): siRNA sense strand
uggaagaaugaaagagaaa

SEQ ID NO: 2473815 - RNA, 19 nt, Homo sapiens
  misc_RNA (1)...(19): siRNA sense strand
aaacaauagggaagggaaa

SEQ ID NO: 2473816 - RNA, 19 nt, Homo sapiens
  misc_RNA (1)...(19): siRNA sense strand
cagaaagaggagugggaca

SEQ ID NO: 2473817 - RNA, 19 nt, Homo sapiens
  misc_RNA (1)...(19): siRNA sense strand
aagaaagagacaaggaaga

SEQ ID NO: 2473818 - RNA, 19 nt, Homo sapiens
  misc_RNA (1)...(19): siRNA sense strand
ccaaaagaccucaggcuaa

SEQ ID NO: 2473819 - RNA, 19 nt, Homo sapiens
  misc_RNA (1)...(19): siRNA sense strand
gggcuuugcacgagaugaa

SEQ ID NO: 2473820 - RNA, 19 nt, Homo sapiens
  misc_RNA (1)...(19): siRNA sense strand
augaagaggaagaacuaaa

SEQ ID NO: 2473821 - RNA, 19 nt, Homo sapiens
  misc_RNA (1)...(19): siRNA sense strand
cugaagguccagagaagua

SEQ ID NO: 2473822 - RNA, 19 nt, Homo sapiens
  misc_RNA (1)...(19): siRNA sense strand
aaugacaugaugagagaaa

SEQ ID NO: 2473823 - RNA, 19 nt, Homo sapiens
  misc_RNA (1)...(19): siRNA sense strand
agaaagaggagugggacaa

SEQ ID NO: 2473824 - RNA, 19 nt, Homo sapiens
  misc_RNA (1)...(19): siRNA sense strand
uuguagggccagagaggaa

SEQ ID NO: 2473825 - RNA, 19 nt, Homo sapiens
  misc_RNA (1)...(19): siRNA sense strand
uagcauggcaagaaggaau

SEQ ID NO: 2473826 - RNA, 19 nt, Homo sapiens
  misc_RNA (1)...(19): siRNA sense strand
cgagggagcucaagccgaa

SEQ ID NO: 2473827 - RNA, 19 nt, Homo sapiens
  misc_RNA (1)...(19): siRNA sense strand
uggaaagugaacagaaaga

SEQ ID NO: 2473828 - RNA, 19 nt, Homo sapiens
  misc_RNA (1)...(19): siRNA sense strand
gagaaagaggcccgugcaa

SEQ ID NO: 2473829 - RNA, 19 nt, Homo sapiens
  misc_RNA (1)...(19): siRNA sense strand
auuuaaaggaacugcgaga

SEQ ID NO: 2473830 - RNA, 19 nt, Homo sapiens
  misc_RNA (1)...(19): siRNA sense strand
ggacaaagauguggcucga

SEQ ID NO: 2473831 - RNA, 19 nt, Homo sapiens
  misc_RNA (1)...(19): siRNA sense strand
gcacaugccagaaggggaa

SEQ ID NO: 2473832 - RNA, 19 nt, Homo sapiens
  misc_RNA (1)...(19): siRNA sense strand
gggaacgucaacugguaua

SEQ ID NO: 2473833 - RNA, 19 nt, Homo sapiens
  misc_RNA (1)...(19): siRNA sense strand
cauggaagaaugaaagaga

SEQ ID NO: 2473834 - RNA, 19 nt, Homo sapiens
  misc_RNA (1)...(19): siRNA sense strand
uggccagaauuuaaaggaa

SEQ ID NO: 2473835 - RNA, 19 nt, Homo sapiens
  misc_RNA (1)...(19): siRNA sense strand
agacaaggaagaggguaaa

SEQ ID NO: 2473836 - RNA, 19 nt, Homo sapiens
  misc_RNA (1)...(19): siRNA sense strand
gggagauggaagucugcaa

SEQ ID NO: 2473837 - RNA, 19 nt, Homo sapiens
  misc_RNA (1)...(19): siRNA sense strand
augaaagaucgauggauga

SEQ ID NO: 2473838 - RNA, 19 nt, Homo sapiens
  misc_RNA (1)...(19): siRNA sense strand
auggaagaaugaaagagaa

SEQ ID NO: 2473839 - RNA, 19 nt, Homo sapiens
  misc_RNA (1)...(19): siRNA sense strand
cggauuucaaugacacaaa

SEQ ID NO: 2473840 - RNA, 19 nt, Homo sapiens
  misc_RNA (1)...(19): siRNA sense strand
ggccagaauuuaaaggaac

SEQ ID NO: 2473841 - RNA, 19 nt, Homo sapiens
  misc_RNA (1)...(19): siRNA sense strand
ugaauuugaagguggugaa

SEQ ID NO: 2473842 - RNA, 19 nt, Homo sapiens
  misc_RNA (1)...(19): siRNA sense strand
uggcaagaaggaauacaua

SEQ ID NO: 2473843 - RNA, 19 nt, Homo sapiens
  misc_RNA (1)...(19): siRNA sense strand
aaugaaagaucgauggaug

SEQ ID NO: 2473844 - RNA, 19 nt, Homo sapiens
  misc_RNA (1)...(19): siRNA sense strand
gaaccaaaagaaagagaca

SEQ ID NO: 2473845 - RNA, 19 nt, Homo sapiens
  misc_RNA (1)...(19): siRNA sense strand
agaaagaggcccgugcaaa

SEQ ID NO: 2473846 - RNA, 19 nt, Homo sapiens
  misc_RNA (1)...(19): siRNA sense strand
ccugaauccaauaaagaga

SEQ ID NO: 2473847 - RNA, 19 nt, Homo sapiens
  misc_RNA (1)...(19): siRNA sense strand
aaggaagaggguaaagauu

SEQ ID NO: 2473848 - RNA, 19 nt, Homo sapiens
  misc_RNA (1)...(19): siRNA sense strand
cgguguagaaacuccauua

SEQ ID NO: 2473849 - RNA, 19 nt, Homo sapiens
  misc_RNA (1)...(19): siRNA sense strand
caacagaugaacagccuca

SEQ ID NO: 2473850 - RNA, 19 nt, Homo sapiens
  misc_RNA (1)...(19): siRNA sense strand
ccuugauggugauaugaau

SEQ ID NO: 2473851 - RNA, 19 nt, Homo sapiens
  misc_RNA (1)...(19): siRNA sense strand
agaauagacauuaugguca

SEQ ID NO: 2473852 - RNA, 19 nt, Homo sapiens
  misc_RNA (1)...(19): siRNA sense strand
gauacguagcauugcagaa

SEQ ID NO: 2473853 - RNA, 19 nt, Homo sapiens
  misc_RNA (1)...(19): siRNA sense strand
aagucaaauuggcaagaca

SEQ ID NO: 2473854 - RNA, 19 nt, Homo sapiens
  misc_RNA (1)...(19): siRNA sense strand
cuuaguugcccauggaaga

SEQ ID NO: 2473855 - RNA, 19 nt, Homo sapiens
  misc_RNA (1)...(19): siRNA sense strand
cuugauggugauaugaaua

SEQ ID NO: 2473856 - RNA, 19 nt, Homo sapiens
  misc_RNA (1)...(19): siRNA sense strand
ugaaaggaccacagaucga

SEQ ID NO: 2473857 - RNA, 19 nt, Homo sapiens
  misc_RNA (1)...(19): siRNA sense strand
cuuuaagaacauugcauca

SEQ ID NO: 2473858 - RNA, 19 nt, Homo sapiens
  misc_RNA (1)...(19): siRNA sense strand
ugacaugaugagagaaauc

SEQ ID NO: 2473859 - RNA, 19 nt, Homo sapiens
  misc_RNA (1)...(19): siRNA sense strand
gaugcaaauaacugugauu

SEQ ID NO: 2473860 - RNA, 19 nt, Homo sapiens
  misc_RNA (1)...(19): siRNA sense strand
gcaaaugagcuuaugcugu

SEQ ID NO: 2473861 - RNA, 19 nt, Homo sapiens
  misc_RNA (1)...(19): siRNA sense strand
cauuaaagacggcucugaa

SEQ ID NO: 2473862 - RNA, 19 nt, Homo sapiens
  misc_RNA (1)...(19): siRNA sense strand
cgguucacauggaguauga

SEQ ID NO: 2473863 - RNA, 19 nt, Homo sapiens
  misc_RNA (1)...(19): siRNA sense strand
gcuuggaacaaauaaugaa

SEQ ID NO: 2473864 - RNA, 19 nt, Homo sapiens
  misc_RNA (1)...(19): siRNA sense strand
ugaugagagaaauccgaaa

SEQ ID NO: 2473865 - RNA, 19 nt, Homo sapiens
  misc_RNA (1)...(19): siRNA sense strand
acaauagggaagggaaauu

SEQ ID NO: 2473866 - RNA, 19 nt, Homo sapiens
  misc_RNA (1)...(19): siRNA sense strand
cgugcaaaauuuaggcaga

SEQ ID NO: 2473867 - RNA, 19 nt, Homo sapiens
  misc_RNA (1)...(19): siRNA sense strand
gccagaauuuaaaggaacu

SEQ ID NO: 2473868 - RNA, 19 nt, Homo sapiens
  misc_RNA (1)...(19): siRNA sense strand
uguuggucaugaagaggaa

SEQ ID NO: 2473869 - RNA, 19 nt, Homo sapiens
  misc_RNA (1)...(19): siRNA sense strand
cuuugcacgagaugaaaua

SEQ ID NO: 2473870 - RNA, 19 nt, Homo sapiens
  misc_RNA (1)...(19): siRNA sense strand
ggcaagaaggaauacauau

SEQ ID NO: 2473871 - RNA, 19 nt, Homo sapiens
  misc_RNA (1)...(19): siRNA sense strand
cggagaugucugugaguag

SEQ ID NO: 2473872 - RNA, 19 nt, Homo sapiens
  misc_RNA (1)...(19): siRNA sense strand
ccaucugcucacaguauua

SEQ ID NO: 2473873 - RNA, 19 nt, Homo sapiens
  misc_RNA (1)...(19): siRNA sense strand
caagcgaauaucugggaca

SEQ ID NO: 2473874 - RNA, 19 nt, Homo sapiens
  misc_RNA (1)...(19): siRNA sense strand
cgucagcaacagaugaaca

SEQ ID NO: 2473875 - RNA, 19 nt, Homo sapiens
  misc_RNA (1)...(19): siRNA sense strand
cagccuaccaagucgagua

SEQ ID NO: 2473876 - RNA, 19 nt, Homo sapiens
  misc_RNA (1)...(19): siRNA sense strand
gaauagacauuauggucac

SEQ ID NO: 2473877 - RNA, 19 nt, Homo sapiens
  misc_RNA (1)...(19): siRNA sense strand
acgucaacugguauaauaa

SEQ ID NO: 2473878 - RNA, 19 nt, Homo sapiens
  misc_RNA (1)...(19): siRNA sense strand
augaagaggacaugaugaa

SEQ ID NO: 2473879 - RNA, 19 nt, Homo sapiens
  misc_RNA (1)...(19): siRNA sense strand
aggaaugucugaagccgaa

SEQ ID NO: 2473880 - RNA, 19 nt, Homo sapiens
  misc_RNA (1)...(19): siRNA sense strand
ccgugugcuuagaggugua

SEQ ID NO: 2473881 - RNA, 19 nt, Homo sapiens
  misc_RNA (1)...(19): siRNA sense strand
cuuacuguccugagaagaa

SEQ ID NO: 2473882 - RNA, 19 nt, Homo sapiens
  misc_RNA (1)...(19): siRNA sense strand
gaucgagagcacagagacu

SEQ ID NO: 2473883 - RNA, 19 nt, Homo sapiens
  misc_RNA (1)...(19): siRNA sense strand
gcaaauuauuccauagcac

SEQ ID NO: 2473884 - RNA, 19 nt, Homo sapiens
  misc_RNA (1)...(19): siRNA sense strand
agaagaacuuugaucagga

SEQ ID NO: 2473885 - RNA, 19 nt, Homo sapiens
  misc_RNA (1)...(19): siRNA sense strand
cugaauggccgcaggguca

SEQ ID NO: 2473886 - RNA, 19 nt, Homo sapiens
  misc_RNA (1)...(19): siRNA sense strand
cuauuaaagagguagucaa

SEQ ID NO: 2473887 - RNA, 19 nt, Homo sapiens
  misc_RNA (1)...(19): siRNA sense strand
cuguuggagcugugauuua

SEQ ID NO: 2473888 - RNA, 19 nt, Homo sapiens
  misc_RNA (1)...(19): siRNA sense strand
cuauuauugaaucggguaa

SEQ ID NO: 2473889 - RNA, 19 nt, Homo sapiens
  misc_RNA (1)...(19): siRNA sense strand
cgggauaugccaugggacu

SEQ ID NO: 2473890 - RNA, 19 nt, Homo sapiens
  misc_RNA (1)...(19): siRNA sense strand
aggcagaaauggaggaacg

SEQ ID NO: 2473891 - RNA, 19 nt, Homo sapiens
  misc_RNA (1)...(19): siRNA sense strand
caaagaggcugaagcucca

SEQ ID NO: 2473892 - RNA, 19 nt, Homo sapiens
  misc_RNA (1)...(19): siRNA sense strand
cgggaagaucauucauaau

SEQ ID NO: 2473893 - RNA, 19 nt, Homo sapiens
  misc_RNA (1)...(19): siRNA sense strand
gcaaauggaagaagggcug

SEQ ID NO: 2473894 - RNA, 19 nt, Homo sapiens
  misc_RNA (1)...(19): siRNA sense strand
gaacacagagauaggucca

SEQ ID NO: 2473895 - RNA, 19 nt, Homo sapiens
  misc_RNA (1)...(19): siRNA sense strand
gagaaguacuugaaagagg

SEQ ID NO: 2473896 - RNA, 19 nt, Homo sapiens
  misc_RNA (1)...(19): siRNA sense strand
aggauaagaaguaccucua

SEQ ID NO: 2473897 - RNA, 19 nt, Homo sapiens
  misc_RNA (1)...(19): siRNA sense strand
uuaaagaucuucugcagca

SEQ ID NO: 2473898 - RNA, 19 nt, Homo sapiens
  misc_RNA (1)...(19): siRNA sense strand
cugcaguuguaccggguca

SEQ ID NO: 2473899 - RNA, 19 nt, Homo sapiens
  misc_RNA (1)...(19): siRNA sense strand
gugauuuggcagcgagguu

SEQ ID NO: 2473900 - RNA, 19 nt, Homo sapiens
  misc_RNA (1)...(19): siRNA sense strand
ugaaagaggccauggagug

SEQ ID NO: 2473901 - RNA, 19 nt, Homo sapiens
  misc_RNA (1)...(19): siRNA sense strand
cuacagaagucaaggcagu

SEQ ID NO: 2473902 - RNA, 19 nt, Homo sapiens
  misc_RNA (1)...(19): siRNA sense strand
acuacaaauuccuguucaa

SEQ ID NO: 2473903 - RNA, 19 nt, Homo sapiens
  misc_RNA (1)...(19): siRNA sense strand
gggaacaagaauugcaacu

SEQ ID NO: 2473904 - RNA, 19 nt, Homo sapiens
  misc_RNA (1)...(19): siRNA sense strand
gcacucaaccugcagggaa

SEQ ID NO: 2473905 - RNA, 19 nt, Homo sapiens
  misc_RNA (1)...(19): siRNA sense strand
agggacgcuuauaagaaua

SEQ ID NO: 2473906 - RNA, 19 nt, Homo sapiens
  misc_RNA (1)...(19): siRNA sense strand
ggaacugcgaagaggaucu

SEQ ID NO: 2473907 - RNA, 19 nt, Homo sapiens
  misc_RNA (1)...(19): siRNA sense strand
cauuugugccuuuggaaca

SEQ ID NO: 2473908 - RNA, 19 nt, Homo sapiens
  misc_RNA (1)...(19): siRNA sense strand
uagagaugaccgaugacaa

SEQ ID NO: 2473909 - RNA, 19 nt, Homo sapiens
  misc_RNA (1)...(19): siRNA sense strand
ccgaaauacccucccaaca

SEQ ID NO: 2473910 - RNA, 19 nt, Homo sapiens
  misc_RNA (1)...(19): siRNA sense strand
ccaaaauacuucaguucca

SEQ ID NO: 2473911 - RNA, 19 nt, Homo sapiens
  misc_RNA (1)...(19): siRNA sense strand
gagauagaauugugguggu

SEQ ID NO: 2473912 - RNA, 19 nt, Homo sapiens
  misc_RNA (1)...(19): siRNA sense strand
acaaaagacuacaggaaaa

SEQ ID NO: 2473913 - RNA, 19 nt, Homo sapiens
  misc_RNA (1)...(19): siRNA sense strand
agacaacaguaaaggaaaa

SEQ ID NO: 2473914 - RNA, 19 nt, Homo sapiens
  misc_RNA (1)...(19): siRNA sense strand
acaacaacacagaagguua

SEQ ID NO: 2473915 - RNA, 19 nt, Homo sapiens
  misc_RNA (1)...(19): siRNA sense strand
ugaacaaacaagacagcua

SEQ ID NO: 2473916 - RNA, 19 nt, Homo sapiens
  misc_RNA (1)...(19): siRNA sense strand
guacaaaagacuacaggaa

SEQ ID NO: 2473917 - RNA, 19 nt, Homo sapiens
  misc_RNA (1)...(19): siRNA sense strand
cagcaauggagcaggacau

SEQ ID NO: 2473918 - RNA, 19 nt, Homo sapiens
  misc_RNA (1)...(19): siRNA sense strand
caucuauucaggaaggaaa

SEQ ID NO: 2473919 - RNA, 19 nt, Homo sapiens
  misc_RNA (1)...(19): siRNA sense strand
uagcaguaauggugcaauu

SEQ ID NO: 2473920 - RNA, 19 nt, Homo sapiens
  misc_RNA (1)...(19): siRNA sense strand
cagacaacaguaaaggaaa

SEQ ID NO: 2473921 - RNA, 19 nt, Homo sapiens
  misc_RNA (1)...(19): siRNA sense strand
cagaacuaguagcugaaua

SEQ ID NO: 2473922 - RNA, 19 nt, Homo sapiens
  misc_RNA (1)...(19): siRNA sense strand
ucagagaaacagacggcaa

SEQ ID NO: 2473923 - RNA, 19 nt, Homo sapiens
  misc_RNA (1)...(19): siRNA sense strand
caucaauugcugugguaga

SEQ ID NO: 2473924 - RNA, 19 nt, Homo sapiens
  misc_RNA (1)...(19): siRNA sense strand
ccaucaacacagacaacaa

SEQ ID NO: 2473925 - RNA, 19 nt, Homo sapiens
  misc_RNA (1)...(19): siRNA sense strand
uggugaagcaggaucauua

SEQ ID NO: 2473926 - RNA, 19 nt, Homo sapiens
  misc_RNA (1)...(19): siRNA sense strand
gugaaaacuacgaguggua

SEQ ID NO: 2473927 - RNA, 19 nt, Homo sapiens
  misc_RNA (1)...(19): siRNA sense strand
cagaccagcuccagcacaa

SEQ ID NO: 2473928 - RNA, 19 nt, Homo sapiens
  misc_RNA (1)...(19): siRNA sense strand
aguuauaucaagugcaaca

SEQ ID NO: 2473929 - RNA, 19 nt, Homo sapiens
  misc_RNA (1)...(19): siRNA sense strand
gaugaugaggagacagcaa

SEQ ID NO: 2473930 - RNA, 19 nt, Homo sapiens
  misc_RNA (1)...(19): siRNA sense strand
cagcuaaacagcagaaacu

SEQ ID NO: 2473931 - RNA, 19 nt, Homo sapiens
  misc_RNA (1)...(19): siRNA sense strand
agaaacaggaagcaaggaa

SEQ ID NO: 2473932 - RNA, 19 nt, Homo sapiens
  misc_RNA (1)...(19): siRNA sense strand
agaaaagacuauucagaca

SEQ ID NO: 2473933 - RNA, 19 nt, Homo sapiens
  misc_RNA (1)...(19): siRNA sense strand
gcucaaccuucgugcccaa

SEQ ID NO: 2473934 - RNA, 19 nt, Homo sapiens
  misc_RNA (1)...(19): siRNA sense strand
gggcgagguugaagagaug

SEQ ID NO: 2473935 - RNA, 19 nt, Homo sapiens
  misc_RNA (1)...(19): siRNA sense strand
agacuucggugguggugaa

SEQ ID NO: 2473936 - RNA, 19 nt, Homo sapiens
  misc_RNA (1)...(19): siRNA sense strand
gcaauggagacuagcccua

SEQ ID NO: 2473937 - RNA, 19 nt, Homo sapiens
  misc_RNA (1)...(19): siRNA sense strand
caguaaacgaugaacgguu

SEQ ID NO: 2473938 - RNA, 19 nt, Homo sapiens
  misc_RNA (1)...(19): siRNA sense strand
ccaaguggcagcauagcaa

SEQ ID NO: 2473939 - RNA, 19 nt, Homo sapiens
  misc_RNA (1)...(19): siRNA sense strand
aguaauagcagcaguggca

SEQ ID NO: 2473940 - RNA, 19 nt, Homo sapiens
  misc_RNA (1)...(19): siRNA sense strand
cuacaagacccaucaccaa

SEQ ID NO: 2473941 - RNA, 19 nt, Homo sapiens
  misc_RNA (1)...(19): siRNA sense strand
ggguagcagaggcugguaa

SEQ ID NO: 2473942 - RNA, 19 nt, Homo sapiens
  misc_RNA (1)...(19): siRNA sense strand
cagugggcuucuugagcua

SEQ ID NO: 2473943 - RNA, 19 nt, Homo sapiens
  misc_RNA (1)...(19): siRNA sense strand
aguucaaccagcagcuaaa

SEQ ID NO: 2473944 - RNA, 19 nt, Homo sapiens
  misc_RNA (1)...(19): siRNA sense strand
cugaggagggcgagguuga

SEQ ID NO: 2473945 - RNA, 19 nt, Homo sapiens
  misc_RNA (1)...(19): siRNA sense strand
ucccacaguuacaaagaua

SEQ ID NO: 2473946 - RNA, 19 nt, Homo sapiens
  misc_RNA (1)...(19): siRNA sense strand
agagaguccagcagaaauu

SEQ ID NO: 2473947 - RNA, 19 nt, Homo sapiens
  misc_RNA (1)...(19): siRNA sense strand
acacagacaacaaacacaa

SEQ ID NO: 2473948 - RNA, 19 nt, Homo sapiens
  misc_RNA (1)...(19): siRNA sense strand
acagacaacaguaaaggaa

SEQ ID NO: 2473949 - RNA, 19 nt, Homo sapiens
  misc_RNA (1)...(19): siRNA sense strand
agcuaaugcuguugcuaau

SEQ ID NO: 2473950 - RNA, 19 nt, Homo sapiens
  misc_RNA (1)...(19): siRNA sense strand
gcagcauagcaacgguuaa

SEQ ID NO: 2473951 - RNA, 19 nt, Homo sapiens
  misc_RNA (1)...(19): siRNA sense strand
cagcaagcauccaggguag

SEQ ID NO: 2473952 - RNA, 19 nt, Homo sapiens
  misc_RNA (1)...(19): siRNA sense strand
caaucaaagcucuguuaga

SEQ ID NO: 2473953 - RNA, 19 nt, Homo sapiens
  misc_RNA (1)...(19): siRNA sense strand
acaggugcuugcagugaaa

SEQ ID NO: 2473954 - RNA, 19 nt, Homo sapiens
  misc_RNA (1)...(19): siRNA sense strand
ugauggaagcucagauuga

SEQ ID NO: 2473955 - RNA, 19 nt, Homo sapiens
  misc_RNA (1)...(19): siRNA sense strand
ggugcaauuaugacaacua

SEQ ID NO: 2473956 - RNA, 19 nt, Homo sapiens
  misc_RNA (1)...(19): siRNA sense strand
gcucagucacagaccgcaa

SEQ ID NO: 2473957 - RNA, 19 nt, Homo sapiens
  misc_RNA (1)...(19): siRNA sense strand
gaaauuaucauccaggcua

SEQ ID NO: 2473958 - RNA, 19 nt, Homo sapiens
  misc_RNA (1)...(19): siRNA sense strand
guuaacaacaauugcacau

SEQ ID NO: 2473959 - RNA, 19 nt, Homo sapiens
  misc_RNA (1)...(19): siRNA sense strand
cagacaacaaacacaacaa

SEQ ID NO: 2473960 - RNA, 19 nt, Homo sapiens
  misc_RNA (1)...(19): siRNA sense strand
cgucaggauuggucagaac

SEQ ID NO: 2473961 - RNA, 19 nt, Homo sapiens
  misc_RNA (1)...(19): siRNA sense strand
ggucagaacaugagauugc

SEQ ID NO: 2473962 - RNA, 19 nt, Homo sapiens
  misc_RNA (1)...(19): siRNA sense strand
ccaaacacagcgaggaacu

SEQ ID NO: 2473963 - RNA, 19 nt, Homo sapiens
  misc_RNA (1)...(19): siRNA sense strand
aagaacaagcacagcccaa

SEQ ID NO: 2473964 - RNA, 19 nt, Homo sapiens
  misc_RNA (1)...(19): siRNA sense strand
cugcagaaacaggaagcaa

SEQ ID NO: 2473965 - RNA, 19 nt, Homo sapiens
  misc_RNA (1)...(19): siRNA sense strand
cuccuaagcagcaguuaua

SEQ ID NO: 2473966 - RNA, 19 nt, Homo sapiens
  misc_RNA (1)...(19): siRNA sense strand
ggaugaaugcaaaagaauu

SEQ ID NO: 2473967 - RNA, 19 nt, Homo sapiens
  misc_RNA (1)...(19): siRNA sense strand
agacagcaauggagcagga

SEQ ID NO: 2473968 - RNA, 19 nt, Homo sapiens
  misc_RNA (1)...(19): siRNA sense strand
guuagaacuccaacagaca

SEQ ID NO: 2473969 - RNA, 19 nt, Homo sapiens
  misc_RNA (1)...(19): siRNA sense strand
auucagaugacccaggaaa

SEQ ID NO: 2473970 - RNA, 19 nt, Homo sapiens
  misc_RNA (1)...(19): siRNA sense strand
gagcaaucacccacauuau

SEQ ID NO: 2473971 - RNA, 19 nt, Homo sapiens
  misc_RNA (1)...(19): siRNA sense strand
acagaaauguagagagucc

SEQ ID NO: 2473972 - RNA, 19 nt, Homo sapiens
  misc_RNA (1)...(19): siRNA sense strand
cuaaaugcuggaggagaaa

SEQ ID NO: 2473973 - RNA, 19 nt, Homo sapiens
  misc_RNA (1)...(19): siRNA sense strand
aacagaaacauuacagcaa

SEQ ID NO: 2473974 - RNA, 19 nt, Homo sapiens
  misc_RNA (1)...(19): siRNA sense strand
ccuacauguucgagugcau

SEQ ID NO: 2473975 - RNA, 19 nt, Homo sapiens
  misc_RNA (1)...(19): siRNA sense strand
auuacuauguggagagcau

SEQ ID NO: 2473976 - RNA, 19 nt, Homo sapiens
  misc_RNA (1)...(19): siRNA sense strand
gcacgcuuaugguggguga

SEQ ID NO: 2473977 - RNA, 19 nt, Homo sapiens
  misc_RNA (1)...(19): siRNA sense strand
agacgcaggaggaggacaa

SEQ ID NO: 2473978 - RNA, 19 nt, Homo sapiens
  misc_RNA (1)...(19): siRNA sense strand
cugagaaauccgugcgaga

SEQ ID NO: 2473979 - RNA, 19 nt, Homo sapiens
  misc_RNA (1)...(19): siRNA sense strand
ccgagaggaagguggccaa

SEQ ID NO: 2473980 - RNA, 19 nt, Homo sapiens
  misc_RNA (1)...(19): siRNA sense strand
guacauggcuuccuggaca

SEQ ID NO: 2473981 - RNA, 19 nt, Homo sapiens
  misc_RNA (1)...(19): siRNA sense strand
ggaauauaccucaaggcga

SEQ ID NO: 2473982 - RNA, 19 nt, Homo sapiens
  misc_RNA (1)...(19): siRNA sense strand
gaauauaccucaaggcgag

SEQ ID NO: 2473983 - RNA, 19 nt, Homo sapiens
  misc_RNA (1)...(19): siRNA sense strand
aggaaguggagaaggaugu

SEQ ID NO: 2473984 - RNA, 19 nt, Homo sapiens
  misc_RNA (1)...(19): siRNA sense strand
gcaagaagggccacaggca

SEQ ID NO: 2473985 - RNA, 19 nt, Homo sapiens
  misc_RNA (1)...(19): siRNA sense strand
guggcagaguggucagaga

SEQ ID NO: 2473986 - RNA, 19 nt, Homo sapiens
  misc_RNA (1)...(19): siRNA sense strand
aggaguaucagcagaagau

SEQ ID NO: 2473987 - RNA, 19 nt, Homo sapiens
  misc_RNA (1)...(19): siRNA sense strand
agcuggaggaaguggagaa

SEQ ID NO: 2473988 - RNA, 19 nt, Homo sapiens
  misc_RNA (1)...(19): siRNA sense strand
cagaguggucagagagaag

SEQ ID NO: 2473989 - RNA, 19 nt, Homo sapiens
  misc_RNA (1)...(19): siRNA sense strand
gaggauuucugucggcaca

SEQ ID NO: 2473990 - RNA, 19 nt, Homo sapiens
  misc_RNA (1)...(19): siRNA sense strand
caaagcugaacgaggccaa

SEQ ID NO: 2473991 - RNA, 19 nt, Homo sapiens
  misc_RNA (1)...(19): siRNA sense strand
cgacuggagcagcugggaa

SEQ ID NO: 2473992 - RNA, 19 nt, Homo sapiens
  misc_RNA (1)...(19): siRNA sense strand
uugcacggcuacaggccaa

SEQ ID NO: 2473993 - RNA, 19 nt, Homo sapiens
  misc_RNA (1)...(19): siRNA sense strand
auguaaagaaugcgggaaa

SEQ ID NO: 2473994 - RNA, 19 nt, Homo sapiens
  misc_RNA (1)...(19): siRNA sense strand
gcgggaaagucuucgguga

SEQ ID NO: 2473995 - RNA, 19 nt, Homo sapiens
  misc_RNA (1)...(19): siRNA sense strand
gugucacgacugugggaaa

SEQ ID NO: 2473996 - RNA, 19 nt, Homo sapiens
  misc_RNA (1)...(19): siRNA sense strand
gugcgaucucugcgggaaa

SEQ ID NO: 2473997 - RNA, 19 nt, Homo sapiens
  misc_RNA (1)...(19): siRNA sense strand
cguucaccuuguaaagaaa

SEQ ID NO: 2473998 - RNA, 19 nt, Homo sapiens
  misc_RNA (1)...(19): siRNA sense strand
cgggaaauccuuuggcgau

SEQ ID NO: 2473999 - RNA, 19 nt, Homo sapiens
  misc_RNA (1)...(19): siRNA sense strand
cgucaagaaacccguggaa

SEQ ID NO: 2474000 - RNA, 19 nt, Homo sapiens
  misc_RNA (1)...(19): siRNA sense strand
gaucagugcgggaaggcuu

SEQ ID NO: 2474001 - RNA, 19 nt, Homo sapiens
  misc_RNA (1)...(19): siRNA sense strand
cugcagucaguguggaaau

SEQ ID NO: 2474002 - RNA, 19 nt, Homo sapiens
  misc_RNA (1)...(19): siRNA sense strand
guggagaagaccuacgaau

SEQ ID NO: 2474003 - RNA, 19 nt, Homo sapiens
  misc_RNA (1)...(19): siRNA sense strand
guggcaaggccuucaggaa

SEQ ID NO: 2474004 - RNA, 19 nt, Homo sapiens
  misc_RNA (1)...(19): siRNA sense strand
gagcauguacgacgggaga

SEQ ID NO: 2474005 - RNA, 19 nt, Homo sapiens
  misc_RNA (1)...(19): siRNA sense strand
gcacacaagagaacgcaca

SEQ ID NO: 2474006 - RNA, 19 nt, Homo sapiens
  misc_RNA (1)...(19): siRNA sense strand
gaguguaggcaguguggca

SEQ ID NO: 2474007 - RNA, 19 nt, Homo sapiens
  misc_RNA (1)...(19): siRNA sense strand
acaaagauguaaugcugga

SEQ ID NO: 2474008 - RNA, 19 nt, Homo sapiens
  misc_RNA (1)...(19): siRNA sense strand
ggagagaggcccuacgagu

SEQ ID NO: 2474009 - RNA, 19 nt, Homo sapiens
  misc_RNA (1)...(19): siRNA sense strand
guucaaaccucaccgcaca

SEQ ID NO: 2474010 - RNA, 19 nt, Homo sapiens
  misc_RNA (1)...(19): siRNA sense strand
augccuugucugcgggaaa

SEQ ID NO: 2474011 - RNA, 19 nt, Homo sapiens
  misc_RNA (1)...(19): siRNA sense strand
cgaguugaguguaggcagu

SEQ ID NO: 2474012 - RNA, 19 nt, Homo sapiens
  misc_RNA (1)...(19): siRNA sense strand
ggggagaaaccguacgaau

SEQ ID NO: 2474013 - RNA, 19 nt, Homo sapiens
  misc_RNA (1)...(19): siRNA sense strand
acuuggagcaggaggagga

SEQ ID NO: 2474014 - RNA, 19 nt, Homo sapiens
  misc_RNA (1)...(19): siRNA sense strand
agucaacgcugaagacgca

SEQ ID NO: 2474015 - RNA, 19 nt, Homo sapiens
  misc_RNA (1)...(19): siRNA sense strand
aggaaacacauuaggauuc

SEQ ID NO: 2474016 - RNA, 19 nt, Homo sapiens
  misc_RNA (1)...(19): siRNA sense strand
gcgggaaagccuucagcga

SEQ ID NO: 2474017 - RNA, 19 nt, Homo sapiens
  misc_RNA (1)...(19): siRNA sense strand
gggaaagccuucagcgacc

SEQ ID NO: 2474018 - RNA, 19 nt, Homo sapiens
  misc_RNA (1)...(19): siRNA sense strand
ugggaaggcacgcuggcaa

SEQ ID NO: 2474019 - RNA, 19 nt, Homo sapiens
  misc_RNA (1)...(19): siRNA sense strand
ccuuaggagccacgcaaga

SEQ ID NO: 2474020 - RNA, 19 nt, Homo sapiens
  misc_RNA (1)...(19): siRNA sense strand
ccaacuuuaauuugcacaa

SEQ ID NO: 2474021 - RNA, 19 nt, Homo sapiens
  misc_RNA (1)...(19): siRNA sense strand
gcuuucagcgcgaguucaa

SEQ ID NO: 2474022 - RNA, 19 nt, Homo sapiens
  misc_RNA (1)...(19): siRNA sense strand
ggggagaagcccuacgaau

SEQ ID NO: 2474023 - RNA, 19 nt, Homo sapiens
  misc_RNA (1)...(19): siRNA sense strand
gggaaggacaggaaggaga

SEQ ID NO: 2474024 - RNA, 19 nt, Homo sapiens
  misc_RNA (1)...(19): siRNA sense strand
gcugaagguuuuaggacaa

SEQ ID NO: 2474025 - RNA, 19 nt, Homo sapiens
  misc_RNA (1)...(19): siRNA sense strand
ucgaagauggagagagaca

SEQ ID NO: 2474026 - RNA, 19 nt, Homo sapiens
  misc_RNA (1)...(19): siRNA sense strand
gcuacgagaucaaggagga

SEQ ID NO: 2474027 - RNA, 19 nt, Homo sapiens
  misc_RNA (1)...(19): siRNA sense strand
agagagacaucuuggcaga

SEQ ID NO: 2474028 - RNA, 19 nt, Homo sapiens
  misc_RNA (1)...(19): siRNA sense strand
uugacggaguggaggaaau

SEQ ID NO: 2474029 - RNA, 19 nt, Homo sapiens
  misc_RNA (1)...(19): siRNA sense strand
ccgaguaugccgugaagau

SEQ ID NO: 2474030 - RNA, 19 nt, Homo sapiens
  misc_RNA (1)...(19): siRNA sense strand
gauaagagcaagagagacc

SEQ ID NO: 2474031 - RNA, 19 nt, Homo sapiens
  misc_RNA (1)...(19): siRNA sense strand
ggaacacgcuguaccggaa

SEQ ID NO: 2474032 - RNA, 19 nt, Homo sapiens
  misc_RNA (1)...(19): siRNA sense strand
gcuccuacucagugugcaa

SEQ ID NO: 2474033 - RNA, 19 nt, Homo sapiens
  misc_RNA (1)...(19): siRNA sense strand
gugcauaaagccacagaca

SEQ ID NO: 2474034 - RNA, 19 nt, Homo sapiens
  misc_RNA (1)...(19): siRNA sense strand
cagauuucggccugaguaa

SEQ ID NO: 2474035 - RNA, 19 nt, Homo sapiens
  misc_RNA (1)...(19): siRNA sense strand
cggcgaugcaagugcucaa

SEQ ID NO: 2474036 - RNA, 19 nt, Homo sapiens
  misc_RNA (1)...(19): siRNA sense strand
acggaguggaggaaauuaa

SEQ ID NO: 2474037 - RNA, 19 nt, Homo sapiens
  misc_RNA (1)...(19): siRNA sense strand
uugauaagagcaagagaga

SEQ ID NO: 2474038 - RNA, 19 nt, Homo sapiens
  misc_RNA (1)...(19): siRNA sense strand
ccgauggcuacgagaucaa

SEQ ID NO: 2474039 - RNA, 19 nt, Homo sapiens
  misc_RNA (1)...(19): siRNA sense strand
cggagguccugaagcguca

SEQ ID NO: 2474040 - RNA, 19 nt, Homo sapiens
  misc_RNA (1)...(19): siRNA sense strand
ucacggaggaggaugucaa

SEQ ID NO: 2474041 - RNA, 19 nt, Homo sapiens
  misc_RNA (1)...(19): siRNA sense strand
gcauaaagccacagacacc

SEQ ID NO: 2474042 - RNA, 19 nt, Homo sapiens
  misc_RNA (1)...(19): siRNA sense strand
agacggaaggaaagcucua

SEQ ID NO: 2474043 - RNA, 19 nt, Homo sapiens
  misc_RNA (1)...(19): siRNA sense strand
uggaggaaauuaagcgcca

SEQ ID NO: 2474044 - RNA, 19 nt, Homo sapiens
  misc_RNA (1)...(19): siRNA sense strand
ggaaggagaccauggcucu

SEQ ID NO: 2474045 - RNA, 19 nt, Homo sapiens
  misc_RNA (1)...(19): siRNA sense strand
gcauugacggaguggagga

SEQ ID NO: 2474046 - RNA, 19 nt, Homo sapiens
  misc_RNA (1)...(19): siRNA sense strand
gugagaucgaagauggaga

SEQ ID NO: 2474047 - RNA, 19 nt, Homo sapiens
  misc_RNA (1)...(19): siRNA sense strand
ggagauagacaucagccau

SEQ ID NO: 2474048 - RNA, 19 nt, Homo sapiens
  misc_RNA (1)...(19): siRNA sense strand
uccaagagcuccagccuga

SEQ ID NO: 2474049 - RNA, 19 nt, Homo sapiens
  misc_RNA (1)...(19): siRNA sense strand
gcauccuccggcagagaua

SEQ ID NO: 2474050 - RNA, 19 nt, Homo sapiens
  misc_RNA (1)...(19): siRNA sense strand
cguggguggucaacagaga

SEQ ID NO: 2474051 - RNA, 19 nt, Homo sapiens
  misc_RNA (1)...(19): siRNA sense strand
acgcuguaccggaaggaga

SEQ ID NO: 2474052 - RNA, 19 nt, Homo sapiens
  misc_RNA (1)...(19): siRNA sense strand
agaagaagagaguggacau

SEQ ID NO: 2474053 - RNA, 19 nt, Homo sapiens
  misc_RNA (1)...(19): siRNA sense strand
ccucacacuaauagaacaa

SEQ ID NO: 2474054 - RNA, 19 nt, Homo sapiens
  misc_RNA (1)...(19): siRNA sense strand
ugaaagagcuggucgguuc

SEQ ID NO: 2474055 - RNA, 19 nt, Homo sapiens
  misc_RNA (1)...(19): siRNA sense strand
aguccaaaguaaagcaagu

SEQ ID NO: 2474056 - RNA, 19 nt, Homo sapiens
  misc_RNA (1)...(19): siRNA sense strand
aguacauugaagagaagaa

SEQ ID NO: 2474057 - RNA, 19 nt, Homo sapiens
  misc_RNA (1)...(19): siRNA sense strand
gaagaaugacucagggauc

SEQ ID NO: 2474058 - RNA, 19 nt, Homo sapiens
  misc_RNA (1)...(19): siRNA sense strand
cugucaaagccuaaaguca

SEQ ID NO: 2474059 - RNA, 19 nt, Homo sapiens
  misc_RNA (1)...(19): siRNA sense strand
uugaagagaagaagagagu

SEQ ID NO: 2474060 - RNA, 19 nt, Homo sapiens
  misc_RNA (1)...(19): siRNA sense strand
cccugaaguccaaaguaaa

SEQ ID NO: 2474061 - RNA, 19 nt, Homo sapiens
  misc_RNA (1)...(19): siRNA sense strand
caaaaucguaauagggaga

SEQ ID NO: 2474062 - RNA, 19 nt, Homo sapiens
  misc_RNA (1)...(19): siRNA sense strand
agagacaagaagaguacau

SEQ ID NO: 2474063 - RNA, 19 nt, Homo sapiens
  misc_RNA (1)...(19): siRNA sense strand
gaagagaagaagagagugg

SEQ ID NO: 2474064 - RNA, 19 nt, Homo sapiens
  misc_RNA (1)...(19): siRNA sense strand
cugaagagagagagacaag

SEQ ID NO: 2474065 - RNA, 19 nt, Homo sapiens
  misc_RNA (1)...(19): siRNA sense strand
ggagauggggagaaaguga

SEQ ID NO: 2474066 - RNA, 19 nt, Homo sapiens
  misc_RNA (1)...(19): siRNA sense strand
cugugaaggugcugcugau

SEQ ID NO: 2474067 - RNA, 19 nt, Homo sapiens
  misc_RNA (1)...(19): siRNA sense strand
gagaagaagagaguggaca

SEQ ID NO: 2474068 - RNA, 19 nt, Homo sapiens
  misc_RNA (1)...(19): siRNA sense strand
gcucagaaggaguguggga

SEQ ID NO: 2474069 - RNA, 19 nt, Homo sapiens
  misc_RNA (1)...(19): siRNA sense strand
agugggagccauugggaau

SEQ ID NO: 2474070 - RNA, 19 nt, Homo sapiens
  misc_RNA (1)...(19): siRNA sense strand
ggcaaggccuuuagccgaa

SEQ ID NO: 2474071 - RNA, 19 nt, Homo sapiens
  misc_RNA (1)...(19): siRNA sense strand
ugucaugaacugaaggcau

SEQ ID NO: 2474072 - RNA, 19 nt, Homo sapiens
  misc_RNA (1)...(19): siRNA sense strand
ggcaaggccuucagccaga

SEQ ID NO: 2474073 - RNA, 19 nt, Homo sapiens
  misc_RNA (1)...(19): siRNA sense strand
ggcaaggccuucagccaga

SEQ ID NO: 2474074 - RNA, 19 nt, Homo sapiens
  misc_RNA (1)...(19): siRNA sense strand
ggcaaggccuucagccaga

SEQ ID NO: 2474075 - RNA, 19 nt, Homo sapiens
  misc_RNA (1)...(19): siRNA sense strand
gcgagaagcccuaccgaug

SEQ ID NO: 2474076 - RNA, 19 nt, Homo sapiens
  misc_RNA (1)...(19): siRNA sense strand
ggaagaaggccaaggagga

SEQ ID NO: 2474077 - RNA, 19 nt, Homo sapiens
  misc_RNA (1)...(19): siRNA sense strand
gguuaaaugaauuggaaac

SEQ ID NO: 2474078 - RNA, 19 nt, Homo sapiens
  misc_RNA (1)...(19): siRNA sense strand
gguguugacuuuaagguga

SEQ ID NO: 2474079 - RNA, 19 nt, Homo sapiens
  misc_RNA (1)...(19): siRNA sense strand
ugucacaagaagagauaca

SEQ ID NO: 2474080 - RNA, 19 nt, Homo sapiens
  misc_RNA (1)...(19): siRNA sense strand
acacagggaagaaggccaa

SEQ ID NO: 2474081 - RNA, 19 nt, Homo sapiens
  misc_RNA (1)...(19): siRNA sense strand
guggauggaaauaaggcua

SEQ ID NO: 2474082 - RNA, 19 nt, Homo sapiens
  misc_RNA (1)...(19): siRNA sense strand
cgauagaaaugaaggccug

SEQ ID NO: 2474083 - RNA, 19 nt, Homo sapiens
  misc_RNA (1)...(19): siRNA sense strand
uggauggaaauaaggcuaa

SEQ ID NO: 2474084 - RNA, 19 nt, Homo sapiens
  misc_RNA (1)...(19): siRNA sense strand
ucgugaagucgauagaaau

SEQ ID NO: 2474085 - RNA, 19 nt, Homo sapiens
  misc_RNA (1)...(19): siRNA sense strand
agaauaaaggagucaaacu

SEQ ID NO: 2474086 - RNA, 19 nt, Homo sapiens
  misc_RNA (1)...(19): siRNA sense strand
cauguuauuuauagaggca

SEQ ID NO: 2474087 - RNA, 19 nt, Homo sapiens
  misc_RNA (1)...(19): siRNA sense strand
acauuaacucccagcuauu

SEQ ID NO: 2474088 - RNA, 19 nt, Homo sapiens
  misc_RNA (1)...(19): siRNA sense strand
cuuugaagaacuuguugaa

SEQ ID NO: 2474089 - RNA, 19 nt, Homo sapiens
  misc_RNA (1)...(19): siRNA sense strand
uauagaggcaagugcaaaa

SEQ ID NO: 2474090 - RNA, 19 nt, Homo sapiens
  misc_RNA (1)...(19): siRNA sense strand
guuuaugaugucacaagaa

SEQ ID NO: 2474091 - RNA, 19 nt, Homo sapiens
  misc_RNA (1)...(19): siRNA sense strand
ugguuauugcucuguguua

SEQ ID NO: 2474092 - RNA, 19 nt, Homo sapiens
  misc_RNA (1)...(19): siRNA sense strand
ggacagugaucuaggugag

SEQ ID NO: 2474093 - RNA, 19 nt, Homo sapiens
  misc_RNA (1)...(19): siRNA sense strand
gcaaauauguaacugguuc

SEQ ID NO: 2474094 - RNA, 19 nt, Homo sapiens
  misc_RNA (1)...(19): siRNA sense strand
caaauauguaacugguuca

SEQ ID NO: 2474095 - RNA, 19 nt, Homo sapiens
  misc_RNA (1)...(19): siRNA sense strand
gugaagauccuccgggacu

SEQ ID NO: 2474096 - RNA, 19 nt, Homo sapiens
  misc_RNA (1)...(19): siRNA sense strand
agggaaagcaagaggacau

SEQ ID NO: 2474097 - RNA, 19 nt, Homo sapiens
  misc_RNA (1)...(19): siRNA sense strand
ccgcaaaguaccuagguuu

SEQ ID NO: 2474098 - RNA, 19 nt, Homo sapiens
  misc_RNA (1)...(19): siRNA sense strand
gaguuauccuacugggaau

SEQ ID NO: 2474099 - RNA, 19 nt, Homo sapiens
  misc_RNA (1)...(19): siRNA sense strand
gaggacauuuccagggcaa

SEQ ID NO: 2474100 - RNA, 19 nt, Homo sapiens
  misc_RNA (1)...(19): siRNA sense strand
uugcaauguagcagauaaa

SEQ ID NO: 2474101 - RNA, 19 nt, Homo sapiens
  misc_RNA (1)...(19): siRNA sense strand
agguaugggagaugaauau

SEQ ID NO: 2474102 - RNA, 19 nt, Homo sapiens
  misc_RNA (1)...(19): siRNA sense strand
cugaauuugucaugcggaa

SEQ ID NO: 2474103 - RNA, 19 nt, Homo sapiens
  misc_RNA (1)...(19): siRNA sense strand
acuuagagguccagcuuga

SEQ ID NO: 2474104 - RNA, 19 nt, Homo sapiens
  misc_RNA (1)...(19): siRNA sense strand
gguauuuagcagagaagga

SEQ ID NO: 2474105 - RNA, 19 nt, Homo sapiens
  misc_RNA (1)...(19): siRNA sense strand
auucaaugcuagaugugua

SEQ ID NO: 2474106 - RNA, 19 nt, Homo sapiens
  misc_RNA (1)...(19): siRNA sense strand
gggagaugaauauggauca

SEQ ID NO: 2474107 - RNA, 19 nt, Homo sapiens
  misc_RNA (1)...(19): siRNA sense strand
agagauagcuccucagcga

SEQ ID NO: 2474108 - RNA, 19 nt, Homo sapiens
  misc_RNA (1)...(19): siRNA sense strand
gaaguaaagauguugccaa

SEQ ID NO: 2474109 - RNA, 19 nt, Homo sapiens
  misc_RNA (1)...(19): siRNA sense strand
cagccugauaagugagauu

SEQ ID NO: 2474110 - RNA, 19 nt, Homo sapiens
  misc_RNA (1)...(19): siRNA sense strand
uugcacaaagucagaguua

SEQ ID NO: 2474111 - RNA, 19 nt, Homo sapiens
  misc_RNA (1)...(19): siRNA sense strand
gagaaggauaugaauucaa

SEQ ID NO: 2474112 - RNA, 19 nt, Homo sapiens
  misc_RNA (1)...(19): siRNA sense strand
cagguaugggagaugaaua

SEQ ID NO: 2474113 - RNA, 19 nt, Homo sapiens
  misc_RNA (1)...(19): siRNA sense strand
cuauaaugcaucugagacu

SEQ ID NO: 2474114 - RNA, 19 nt, Homo sapiens
  misc_RNA (1)...(19): siRNA sense strand
agguccagcuugauguuaa

SEQ ID NO: 2474115 - RNA, 19 nt, Homo sapiens
  misc_RNA (1)...(19): siRNA sense strand
ggccacaggaguugaugaa

SEQ ID NO: 2474116 - RNA, 19 nt, Homo sapiens
  misc_RNA (1)...(19): siRNA sense strand
gauuauuuguguaagcuga

SEQ ID NO: 2474117 - RNA, 19 nt, Homo sapiens
  misc_RNA (1)...(19): siRNA sense strand
acccaaugcagaagaauuu

SEQ ID NO: 2474118 - RNA, 19 nt, Homo sapiens
  misc_RNA (1)...(19): siRNA sense strand
ggauaugaauucaaagccu

SEQ ID NO: 2474119 - RNA, 19 nt, Homo sapiens
  misc_RNA (1)...(19): siRNA sense strand
cagcugagugugaagaaga

SEQ ID NO: 2474120 - RNA, 19 nt, Homo sapiens
  misc_RNA (1)...(19): siRNA sense strand
cugaaaauguagccaaauu

SEQ ID NO: 2474121 - RNA, 19 nt, Homo sapiens
  misc_RNA (1)...(19): siRNA sense strand
cggagaauccugacaacca

SEQ ID NO: 2474122 - RNA, 19 nt, Homo sapiens
  misc_RNA (1)...(19): siRNA sense strand
ccaguagaguuaauugauu

SEQ ID NO: 2474123 - RNA, 19 nt, Homo sapiens
  misc_RNA (1)...(19): siRNA sense strand
acuaaaagggaaagcaaga

SEQ ID NO: 2474124 - RNA, 19 nt, Homo sapiens
  misc_RNA (1)...(19): siRNA sense strand
guguuugauuccuuugaaa

SEQ ID NO: 2474125 - RNA, 19 nt, Homo sapiens
  misc_RNA (1)...(19): siRNA sense strand
cgaugguacaguuggcauu

SEQ ID NO: 2474126 - RNA, 19 nt, Homo sapiens
  misc_RNA (1)...(19): siRNA sense strand
ugaaugaaggaguaaugaa

SEQ ID NO: 2474127 - RNA, 19 nt, Homo sapiens
  misc_RNA (1)...(19): siRNA sense strand
gugucauacuggaauguga

SEQ ID NO: 2474128 - RNA, 19 nt, Homo sapiens
  misc_RNA (1)...(19): siRNA sense strand
augaagaggacguagaagu

SEQ ID NO: 2474129 - RNA, 19 nt, Homo sapiens
  misc_RNA (1)...(19): siRNA sense strand
aggugaaaaucgucaggua

SEQ ID NO: 2474130 - RNA, 19 nt, Homo sapiens
  misc_RNA (1)...(19): siRNA sense strand
cugucgaaguaaagauguu

SEQ ID NO: 2474131 - RNA, 19 nt, Homo sapiens
  misc_RNA (1)...(19): siRNA sense strand
ggcacacugucgaaguaaa

SEQ ID NO: 2474132 - RNA, 19 nt, Homo sapiens
  misc_RNA (1)...(19): siRNA sense strand
aaguaaagauguugccaag

SEQ ID NO: 2474133 - RNA, 19 nt, Homo sapiens
  misc_RNA (1)...(19): siRNA sense strand
auguuaaccugaagccauu

SEQ ID NO: 2474134 - RNA, 19 nt, Homo sapiens
  misc_RNA (1)...(19): siRNA sense strand
gcggaaaauuggagacuug

SEQ ID NO: 2474135 - RNA, 19 nt, Homo sapiens
  misc_RNA (1)...(19): siRNA sense strand
ucaugaagcagauuggaga

SEQ ID NO: 2474136 - RNA, 19 nt, Homo sapiens
  misc_RNA (1)...(19): siRNA sense strand
gccaagauucuguggucau

SEQ ID NO: 2474137 - RNA, 19 nt, Homo sapiens
  misc_RNA (1)...(19): siRNA sense strand
ggacauuuccagggcaaaa

SEQ ID NO: 2474138 - RNA, 19 nt, Homo sapiens
  misc_RNA (1)...(19): siRNA sense strand
gaauuugucaugcggaaaa

SEQ ID NO: 2474139 - RNA, 19 nt, Homo sapiens
  misc_RNA (1)...(19): siRNA sense strand
ucugaauugcugugguauu

SEQ ID NO: 2474140 - RNA, 19 nt, Homo sapiens
  misc_RNA (1)...(19): siRNA sense strand
acguagaaguguuugauuc

SEQ ID NO: 2474141 - RNA, 19 nt, Homo sapiens
  misc_RNA (1)...(19): siRNA sense strand
uagauguguaugagaccaa

SEQ ID NO: 2474142 - RNA, 19 nt, Homo sapiens
  misc_RNA (1)...(19): siRNA sense strand
ggugaaaaucgucagguau

SEQ ID NO: 2474143 - RNA, 19 nt, Homo sapiens
  misc_RNA (1)...(19): siRNA sense strand
cuuguaagauaccgagcau

SEQ ID NO: 2474144 - RNA, 19 nt, Homo sapiens
  misc_RNA (1)...(19): siRNA sense strand
ggcuugagcaugugggagu

SEQ ID NO: 2474145 - RNA, 19 nt, Homo sapiens
  misc_RNA (1)...(19): siRNA sense strand
acugaaacgaacucgcuua

SEQ ID NO: 2474146 - RNA, 19 nt, Homo sapiens
  misc_RNA (1)...(19): siRNA sense strand
acaucaauuucaugaagca

SEQ ID NO: 2474147 - RNA, 19 nt, Homo sapiens
  misc_RNA (1)...(19): siRNA sense strand
gauguuaaccugaagccau

SEQ ID NO: 2474148 - RNA, 19 nt, Homo sapiens
  misc_RNA (1)...(19): siRNA sense strand
cacccaaugcagaagaauu

SEQ ID NO: 2474149 - RNA, 19 nt, Homo sapiens
  misc_RNA (1)...(19): siRNA sense strand
cuucugacuuagaggucca

SEQ ID NO: 2474150 - RNA, 19 nt, Homo sapiens
  misc_RNA (1)...(19): siRNA sense strand
ugucaugguaaucgggaaa

SEQ ID NO: 2474151 - RNA, 19 nt, Homo sapiens
  misc_RNA (1)...(19): siRNA sense strand
acaugaacaagcagagcaa

SEQ ID NO: 2474152 - RNA, 19 nt, Homo sapiens
  misc_RNA (1)...(19): siRNA sense strand
acgcaacagccgaggccua

SEQ ID NO: 2474153 - RNA, 19 nt, Homo sapiens
  misc_RNA (1)...(19): siRNA sense strand
gagacaaaccagaggcugu

SEQ ID NO: 2474154 - RNA, 19 nt, Homo sapiens
  misc_RNA (1)...(19): siRNA sense strand
cuucuuaagcaguagagua

SEQ ID NO: 2474155 - RNA, 19 nt, Homo sapiens
  misc_RNA (1)...(19): siRNA sense strand
gcugcuucauguacggaaa

SEQ ID NO: 2474156 - RNA, 19 nt, Homo sapiens
  misc_RNA (1)...(19): siRNA sense strand
cucaacaguguguggauua

SEQ ID NO: 2474157 - RNA, 19 nt, Homo sapiens
  misc_RNA (1)...(19): siRNA sense strand
cuacaacacuggacgcuca

SEQ ID NO: 2474158 - RNA, 19 nt, Homo sapiens
  misc_RNA (1)...(19): siRNA sense strand
gagugaaucugaaccguca

SEQ ID NO: 2474159 - RNA, 19 nt, Homo sapiens
  misc_RNA (1)...(19): siRNA sense strand
gggaaaggucugcuaggga

SEQ ID NO: 2474160 - RNA, 19 nt, Homo sapiens
  misc_RNA (1)...(19): siRNA sense strand
cuggaaacaaacagagcca

SEQ ID NO: 2474161 - RNA, 19 nt, Homo sapiens
  misc_RNA (1)...(19): siRNA sense strand
cugucaugguaaucgggaa

SEQ ID NO: 2474162 - RNA, 19 nt, Homo sapiens
  misc_RNA (1)...(19): siRNA sense strand
ccagaggcugucaugguaa

SEQ ID NO: 2474163 - RNA, 19 nt, Homo sapiens
  misc_RNA (1)...(19): siRNA sense strand
gcugaaacauguacgcaac

SEQ ID NO: 2474164 - RNA, 19 nt, Homo sapiens
  misc_RNA (1)...(19): siRNA sense strand
ugaaugugggugucaacaa

SEQ ID NO: 2474165 - RNA, 19 nt, Homo sapiens
  misc_RNA (1)...(19): siRNA sense strand
cagugaagguacagauaau

SEQ ID NO: 2474166 - RNA, 19 nt, Homo sapiens
  misc_RNA (1)...(19): siRNA sense strand
cagaagaaucaaagcaauu

SEQ ID NO: 2474167 - RNA, 19 nt, Homo sapiens
  misc_RNA (1)...(19): siRNA sense strand
aguuaaagaugcugcaaaa

SEQ ID NO: 2474168 - RNA, 19 nt, Homo sapiens
  misc_RNA (1)...(19): siRNA sense strand
gcauauucuaucagaggaa

SEQ ID NO: 2474169 - RNA, 19 nt, Homo sapiens
  misc_RNA (1)...(19): siRNA sense strand
uagaaaaggaaguuggaaa

SEQ ID NO: 2474170 - RNA, 19 nt, Homo sapiens
  misc_RNA (1)...(19): siRNA sense strand
gccuaauacuggaaaauaa

SEQ ID NO: 2474171 - RNA, 19 nt, Homo sapiens
  misc_RNA (1)...(19): siRNA sense strand
agguguuugcagagaauaa

SEQ ID NO: 2474172 - RNA, 19 nt, Homo sapiens
  misc_RNA (1)...(19): siRNA sense strand
gauuaacacaagugaugaa

SEQ ID NO: 2474173 - RNA, 19 nt, Homo sapiens
  misc_RNA (1)...(19): siRNA sense strand
caguuaaauucuggcauaa

SEQ ID NO: 2474174 - RNA, 19 nt, Homo sapiens
  misc_RNA (1)...(19): siRNA sense strand
acuacaaaccucagaugaa

SEQ ID NO: 2474175 - RNA, 19 nt, Homo sapiens
  misc_RNA (1)...(19): siRNA sense strand
agaaaaggaaguuggaaau

SEQ ID NO: 2474176 - RNA, 19 nt, Homo sapiens
  misc_RNA (1)...(19): siRNA sense strand
agcaauaucugaugaccaa

SEQ ID NO: 2474177 - RNA, 19 nt, Homo sapiens
  misc_RNA (1)...(19): siRNA sense strand
aaagaagagacuagagcuu

SEQ ID NO: 2474178 - RNA, 19 nt, Homo sapiens
  misc_RNA (1)...(19): siRNA sense strand
uugaagagaucgaacguca

SEQ ID NO: 2474179 - RNA, 19 nt, Homo sapiens
  misc_RNA (1)...(19): siRNA sense strand
cuuagaacguuuaaagcau

SEQ ID NO: 2474180 - RNA, 19 nt, Homo sapiens
  misc_RNA (1)...(19): siRNA sense strand
guaaauugcagcuaggaca

SEQ ID NO: 2474181 - RNA, 19 nt, Homo sapiens
  misc_RNA (1)...(19): siRNA sense strand
acagaggacaguaaguaaa

SEQ ID NO: 2474182 - RNA, 19 nt, Homo sapiens
  misc_RNA (1)...(19): siRNA sense strand
aucacaaacuguuggcuua

SEQ ID NO: 2474183 - RNA, 19 nt, Homo sapiens
  misc_RNA (1)...(19): siRNA sense strand
augagaagauucagccaau

SEQ ID NO: 2474184 - RNA, 19 nt, Homo sapiens
  misc_RNA (1)...(19): siRNA sense strand
cucugaaaguggugacgaa

SEQ ID NO: 2474185 - RNA, 19 nt, Homo sapiens
  misc_RNA (1)...(19): siRNA sense strand
aggacuuaguagaugauuu

SEQ ID NO: 2474186 - RNA, 19 nt, Homo sapiens
  misc_RNA (1)...(19): siRNA sense strand
aagaauucgaagugccuua

SEQ ID NO: 2474187 - RNA, 19 nt, Homo sapiens
  misc_RNA (1)...(19): siRNA sense strand
aaguaggcucuuugguaaa

SEQ ID NO: 2474188 - RNA, 19 nt, Homo sapiens
  misc_RNA (1)...(19): siRNA sense strand
auagaacagaggacaguaa

SEQ ID NO: 2474189 - RNA, 19 nt, Homo sapiens
  misc_RNA (1)...(19): siRNA sense strand
ugacauuaaacuucaggaa

SEQ ID NO: 2474190 - RNA, 19 nt, Homo sapiens
  misc_RNA (1)...(19): siRNA sense strand
guguuaagcaagccagaau

SEQ ID NO: 2474191 - RNA, 19 nt, Homo sapiens
  misc_RNA (1)...(19): siRNA sense strand
cugcacuacugcugaaaga

SEQ ID NO: 2474192 - RNA, 19 nt, Homo sapiens
  misc_RNA (1)...(19): siRNA sense strand
cagcuagccucuauggaga

SEQ ID NO: 2474193 - RNA, 19 nt, Homo sapiens
  misc_RNA (1)...(19): siRNA sense strand
cagaaugguacuuggcuca

SEQ ID NO: 2474194 - RNA, 19 nt, Homo sapiens
  misc_RNA (1)...(19): siRNA sense strand
cauuaaacuucaggaauca

SEQ ID NO: 2474195 - RNA, 19 nt, Homo sapiens
  misc_RNA (1)...(19): siRNA sense strand
gugucugcauucauagaaa

SEQ ID NO: 2474196 - RNA, 19 nt, Homo sapiens
  misc_RNA (1)...(19): siRNA sense strand
ugaauuacuuacugagcca

SEQ ID NO: 2474197 - RNA, 19 nt, Homo sapiens
  misc_RNA (1)...(19): siRNA sense strand
agguaucacuucagaggga

SEQ ID NO: 2474198 - RNA, 19 nt, Homo sapiens
  misc_RNA (1)...(19): siRNA sense strand
guaaaaugcaguuagaaga

SEQ ID NO: 2474199 - RNA, 19 nt, Homo sapiens
  misc_RNA (1)...(19): siRNA sense strand
cagcaauaucugaugacca

SEQ ID NO: 2474200 - RNA, 19 nt, Homo sapiens
  misc_RNA (1)...(19): siRNA sense strand
aaguuaaagaugcugcaaa

SEQ ID NO: 2474201 - RNA, 19 nt, Homo sapiens
  misc_RNA (1)...(19): siRNA sense strand
ggaaguuggaaaugaccuu

SEQ ID NO: 2474202 - RNA, 19 nt, Homo sapiens
  misc_RNA (1)...(19): siRNA sense strand
aagaacagguacuuacaau

SEQ ID NO: 2474203 - RNA, 19 nt, Homo sapiens
  misc_RNA (1)...(19): siRNA sense strand
ggacuuaguagaugauuuu

SEQ ID NO: 2474204 - RNA, 19 nt, Homo sapiens
  misc_RNA (1)...(19): siRNA sense strand
augaaguacucuuguuuga

SEQ ID NO: 2474205 - RNA, 19 nt, Homo sapiens
  misc_RNA (1)...(19): siRNA sense strand
aguuagaagaacagguacu

SEQ ID NO: 2474206 - RNA, 19 nt, Homo sapiens
  misc_RNA (1)...(19): siRNA sense strand
aggagaaaagugacauaaa

SEQ ID NO: 2474207 - RNA, 19 nt, Homo sapiens
  misc_RNA (1)...(19): siRNA sense strand
acaagucagugaagguaca

SEQ ID NO: 2474208 - RNA, 19 nt, Homo sapiens
  misc_RNA (1)...(19): siRNA sense strand
aaaugcaguuagaagaaca

SEQ ID NO: 2474209 - RNA, 19 nt, Homo sapiens
  misc_RNA (1)...(19): siRNA sense strand
gaugagaagauucagccaa

SEQ ID NO: 2474210 - RNA, 19 nt, Homo sapiens
  misc_RNA (1)...(19): siRNA sense strand
cgaggagaaaagugacaua

SEQ ID NO: 2474211 - RNA, 19 nt, Homo sapiens
  misc_RNA (1)...(19): siRNA sense strand
aguuccagauugugcagaa

SEQ ID NO: 2474212 - RNA, 19 nt, Homo sapiens
  misc_RNA (1)...(19): siRNA sense strand
agguacagauaauggugau

SEQ ID NO: 2474213 - RNA, 19 nt, Homo sapiens
  misc_RNA (1)...(19): siRNA sense strand
ugguuauaacugacaggua

SEQ ID NO: 2474214 - RNA, 19 nt, Homo sapiens
  misc_RNA (1)...(19): siRNA sense strand
acagaaggacuuaguagau

SEQ ID NO: 2474215 - RNA, 19 nt, Homo sapiens
  misc_RNA (1)...(19): siRNA sense strand
cuacagaaaucaaagguaa

SEQ ID NO: 2474216 - RNA, 19 nt, Homo sapiens
  misc_RNA (1)...(19): siRNA sense strand
ggaggaagucagagggauu

SEQ ID NO: 2474217 - RNA, 19 nt, Homo sapiens
  misc_RNA (1)...(19): siRNA sense strand
guguaaagaagaagaaaga

SEQ ID NO: 2474218 - RNA, 19 nt, Homo sapiens
  misc_RNA (1)...(19): siRNA sense strand
auaaauuggagcagaguaa

SEQ ID NO: 2474219 - RNA, 19 nt, Homo sapiens
  misc_RNA (1)...(19): siRNA sense strand
caggaaaguuacugacaau

SEQ ID NO: 2474220 - RNA, 19 nt, Homo sapiens
  misc_RNA (1)...(19): siRNA sense strand
gcauaggaguugaacauau

SEQ ID NO: 2474221 - RNA, 19 nt, Homo sapiens
  misc_RNA (1)...(19): siRNA sense strand
ggguagagcaaguguuaau

SEQ ID NO: 2474222 - RNA, 19 nt, Homo sapiens
  misc_RNA (1)...(19): siRNA sense strand
ucuuagaggugaugggaga

SEQ ID NO: 2474223 - RNA, 19 nt, Homo sapiens
  misc_RNA (1)...(19): siRNA sense strand
gugcauaggaguugaacau

SEQ ID NO: 2474224 - RNA, 19 nt, Homo sapiens
  misc_RNA (1)...(19): siRNA sense strand
guauguuguuggagaagua

SEQ ID NO: 2474225 - RNA, 19 nt, Homo sapiens
  misc_RNA (1)...(19): siRNA sense strand
guggaaaggaacacauuaa

SEQ ID NO: 2474226 - RNA, 19 nt, Homo sapiens
  misc_RNA (1)...(19): siRNA sense strand
gguaaaagaaauaggagau

SEQ ID NO: 2474227 - RNA, 19 nt, Homo sapiens
  misc_RNA (1)...(19): siRNA sense strand
agagcauuguucagagaua

SEQ ID NO: 2474228 - RNA, 19 nt, Homo sapiens
  misc_RNA (1)...(19): siRNA sense strand
gggagaaccucgugucuga

SEQ ID NO: 2474229 - RNA, 19 nt, Homo sapiens
  misc_RNA (1)...(19): siRNA sense strand
ugaaagaacaugauagcuu

SEQ ID NO: 2474230 - RNA, 19 nt, Homo sapiens
  misc_RNA (1)...(19): siRNA sense strand
gagcauuugaauuggcuua

SEQ ID NO: 2474231 - RNA, 19 nt, Homo sapiens
  misc_RNA (1)...(19): siRNA sense strand
guacuaaacaggugcccaa

SEQ ID NO: 2474232 - RNA, 19 nt, Homo sapiens
  misc_RNA (1)...(19): siRNA sense strand
ggaaaguuacugacaauau

SEQ ID NO: 2474233 - RNA, 19 nt, Homo sapiens
  misc_RNA (1)...(19): siRNA sense strand
gcagaagaguuuaauugaa

SEQ ID NO: 2474234 - RNA, 19 nt, Homo sapiens
  misc_RNA (1)...(19): siRNA sense strand
ugggauggcuguugggaga

SEQ ID NO: 2474235 - RNA, 19 nt, Homo sapiens
  misc_RNA (1)...(19): siRNA sense strand
ccaaguaaggauagauaca

SEQ ID NO: 2474236 - RNA, 19 nt, Homo sapiens
  misc_RNA (1)...(19): siRNA sense strand
aggaacacauuaaugguua

SEQ ID NO: 2474237 - RNA, 19 nt, Homo sapiens
  misc_RNA (1)...(19): siRNA sense strand
uaaagaaucccuugaagaa

SEQ ID NO: 2474238 - RNA, 19 nt, Homo sapiens
  misc_RNA (1)...(19): siRNA sense strand
caggaagaauugaauacua

SEQ ID NO: 2474239 - RNA, 19 nt, Homo sapiens
  misc_RNA (1)...(19): siRNA sense strand
aaacacaguugaugaauga

SEQ ID NO: 2474240 - RNA, 19 nt, Homo sapiens
  misc_RNA (1)...(19): siRNA sense strand
uggcaugagacuuggguuu

SEQ ID NO: 2474241 - RNA, 19 nt, Homo sapiens
  misc_RNA (1)...(19): siRNA sense strand
uggaagaaaugcaguggau

SEQ ID NO: 2474242 - RNA, 19 nt, Homo sapiens
  misc_RNA (1)...(19): siRNA sense strand
gaccagagcuguauauauu

SEQ ID NO: 2474243 - RNA, 19 nt, Homo sapiens
  misc_RNA (1)...(19): siRNA sense strand
guggagagcgggagacgaa

SEQ ID NO: 2474244 - RNA, 19 nt, Homo sapiens
  misc_RNA (1)...(19): siRNA sense strand
gcuguuacauugugugcaa

SEQ ID NO: 2474245 - RNA, 19 nt, Homo sapiens
  misc_RNA (1)...(19): siRNA sense strand
ggagaaguaugaaggaagu

SEQ ID NO: 2474246 - RNA, 19 nt, Homo sapiens
  misc_RNA (1)...(19): siRNA sense strand
uagaaaaugugcuggaaau

SEQ ID NO: 2474247 - RNA, 19 nt, Homo sapiens
  misc_RNA (1)...(19): siRNA sense strand
aggcagaauuuauacagua

SEQ ID NO: 2474248 - RNA, 19 nt, Homo sapiens
  misc_RNA (1)...(19): siRNA sense strand
gaacaugauagcuuugaua

SEQ ID NO: 2474249 - RNA, 19 nt, Homo sapiens
  misc_RNA (1)...(19): siRNA sense strand
ggagcaagcuguuagagau

SEQ ID NO: 2474250 - RNA, 19 nt, Homo sapiens
  misc_RNA (1)...(19): siRNA sense strand
gaguaaauccaaacgugaa

SEQ ID NO: 2474251 - RNA, 19 nt, Homo sapiens
  misc_RNA (1)...(19): siRNA sense strand
caguauaucagcugaguca

SEQ ID NO: 2474252 - RNA, 19 nt, Homo sapiens
  misc_RNA (1)...(19): siRNA sense strand
gcacaagcaccaaaccaua

SEQ ID NO: 2474253 - RNA, 19 nt, Homo sapiens
  misc_RNA (1)...(19): siRNA sense strand
gagauucagccucgagaua

SEQ ID NO: 2474254 - RNA, 19 nt, Homo sapiens
  misc_RNA (1)...(19): siRNA sense strand
cuaaauagccugccugauu

SEQ ID NO: 2474255 - RNA, 19 nt, Homo sapiens
  misc_RNA (1)...(19): siRNA sense strand
augaaggacuugaaugcua

SEQ ID NO: 2474256 - RNA, 19 nt, Homo sapiens
  misc_RNA (1)...(19): siRNA sense strand
gaaauuaaaugcagugauc

SEQ ID NO: 2474257 - RNA, 19 nt, Homo sapiens
  misc_RNA (1)...(19): siRNA sense strand
gauggaaaaucuugaggaa

SEQ ID NO: 2474258 - RNA, 19 nt, Homo sapiens
  misc_RNA (1)...(19): siRNA sense strand
gcagaauggauuuguugaa

SEQ ID NO: 2474259 - RNA, 19 nt, Homo sapiens
  misc_RNA (1)...(19): siRNA sense strand
uaauugaaauccuggaaga

SEQ ID NO: 2474260 - RNA, 19 nt, Homo sapiens
  misc_RNA (1)...(19): siRNA sense strand
uugaaauccuggaagaaaa

SEQ ID NO: 2474261 - RNA, 19 nt, Homo sapiens
  misc_RNA (1)...(19): siRNA sense strand
aguaaucggagcacagaaa

SEQ ID NO: 2474262 - RNA, 19 nt, Homo sapiens
  misc_RNA (1)...(19): siRNA sense strand
gaagaaaugcaguggauuc

SEQ ID NO: 2474263 - RNA, 19 nt, Homo sapiens
  misc_RNA (1)...(19): siRNA sense strand
cugcugugguggaaaggaa

SEQ ID NO: 2474264 - RNA, 19 nt, Homo sapiens
  misc_RNA (1)...(19): siRNA sense strand
aagaaaggcagaauggauu

SEQ ID NO: 2474265 - RNA, 19 nt, Homo sapiens
  misc_RNA (1)...(19): siRNA sense strand
gcaacaugggagagaaguu

SEQ ID NO: 2474266 - RNA, 19 nt, Homo sapiens
  misc_RNA (1)...(19): siRNA sense strand
cccugaucuuugugaaaua

SEQ ID NO: 2474267 - RNA, 19 nt, Homo sapiens
  misc_RNA (1)...(19): siRNA sense strand
gcuggagaaagcagauaaa

SEQ ID NO: 2474268 - RNA, 19 nt, Homo sapiens
  misc_RNA (1)...(19): siRNA sense strand
gaaacucacugaaguacua

SEQ ID NO: 2474269 - RNA, 19 nt, Homo sapiens
  misc_RNA (1)...(19): siRNA sense strand
cuaaagaaucccuugaaga

SEQ ID NO: 2474270 - RNA, 19 nt, Homo sapiens
  misc_RNA (1)...(19): siRNA sense strand
gugaaggaaacuuggauca

SEQ ID NO: 2474271 - RNA, 19 nt, Homo sapiens
  misc_RNA (1)...(19): siRNA sense strand
gcacagaggagcauuugaa

SEQ ID NO: 2474272 - RNA, 19 nt, Homo sapiens
  misc_RNA (1)...(19): siRNA sense strand
ggauagauacauuaggcuu

SEQ ID NO: 2474273 - RNA, 19 nt, Homo sapiens
  misc_RNA (1)...(19): siRNA sense strand
caaacgugaaccagagaau

SEQ ID NO: 2474274 - RNA, 19 nt, Homo sapiens
  misc_RNA (1)...(19): siRNA sense strand
ggaacacauuaaugguuau

SEQ ID NO: 2474275 - RNA, 19 nt, Homo sapiens
  misc_RNA (1)...(19): siRNA sense strand
gggcgaguccacuguauaa

SEQ ID NO: 2474276 - RNA, 19 nt, Homo sapiens
  misc_RNA (1)...(19): siRNA sense strand
gcauuggagcucagcacaa

SEQ ID NO: 2474277 - RNA, 19 nt, Homo sapiens
  misc_RNA (1)...(19): siRNA sense strand
ugacgguggagcagguaaa

SEQ ID NO: 2474278 - RNA, 19 nt, Homo sapiens
  misc_RNA (1)...(19): siRNA sense strand
gaagaagaaagaaaugcaa

SEQ ID NO: 2474279 - RNA, 19 nt, Homo sapiens
  misc_RNA (1)...(19): siRNA sense strand
gcugagaguucuuggauug

SEQ ID NO: 2474280 - RNA, 19 nt, Homo sapiens
  misc_RNA (1)...(19): siRNA sense strand
acaggaaaguucucaggua

SEQ ID NO: 2474281 - RNA, 19 nt, Homo sapiens
  misc_RNA (1)...(19): siRNA sense strand
ggagcagaguaaauccaaa

SEQ ID NO: 2474282 - RNA, 19 nt, Homo sapiens
  misc_RNA (1)...(19): siRNA sense strand
uaacaggagcuuugcagaa

SEQ ID NO: 2474283 - RNA, 19 nt, Homo sapiens
  misc_RNA (1)...(19): siRNA sense strand
cauaggaguugaacauauu

SEQ ID NO: 2474284 - RNA, 19 nt, Homo sapiens
  misc_RNA (1)...(19): siRNA sense strand
gcuuugauaugaaggacuu

SEQ ID NO: 2474285 - RNA, 19 nt, Homo sapiens
  misc_RNA (1)...(19): siRNA sense strand
ggaaggaaaggaaggggaa

SEQ ID NO: 2474286 - RNA, 19 nt, Homo sapiens
  misc_RNA (1)...(19): siRNA sense strand
acuuauacucuuacaggaa

SEQ ID NO: 2474287 - RNA, 19 nt, Homo sapiens
  misc_RNA (1)...(19): siRNA sense strand
caaugauguuaguacagaa

SEQ ID NO: 2474288 - RNA, 19 nt, Homo sapiens
  misc_RNA (1)...(19): siRNA sense strand
cggacagccugaaugggaa

SEQ ID NO: 2474289 - RNA, 19 nt, Homo sapiens
  misc_RNA (1)...(19): siRNA sense strand
ccugaaagcuuacaguaca

SEQ ID NO: 2474290 - RNA, 19 nt, Homo sapiens
  misc_RNA (1)...(19): siRNA sense strand
gcaacugauaccugggaga

SEQ ID NO: 2474291 - RNA, 19 nt, Homo sapiens
  misc_RNA (1)...(19): siRNA sense strand
ccagaaggcagaauuuaua

SEQ ID NO: 2474292 - RNA, 19 nt, Homo sapiens
  misc_RNA (1)...(19): siRNA sense strand
cauuugaucuucugaugaa

SEQ ID NO: 2474293 - RNA, 19 nt, Homo sapiens
  misc_RNA (1)...(19): siRNA sense strand
augcuaguguggugaauau

SEQ ID NO: 2474294 - RNA, 19 nt, Homo sapiens
  misc_RNA (1)...(19): siRNA sense strand
cugguauguuguuggagaa

SEQ ID NO: 2474295 - RNA, 19 nt, Homo sapiens
  misc_RNA (1)...(19): siRNA sense strand
aaagaaaggcagaauggau

SEQ ID NO: 2474296 - RNA, 19 nt, Homo sapiens
  misc_RNA (1)...(19): siRNA sense strand
gcagaaucgaggcaguuaa

SEQ ID NO: 2474297 - RNA, 19 nt, Homo sapiens
  misc_RNA (1)...(19): siRNA sense strand
ugaagaaaguauuggcaag

SEQ ID NO: 2474298 - RNA, 19 nt, Homo sapiens
  misc_RNA (1)...(19): siRNA sense strand
gugucugaugcaagaauaa

SEQ ID NO: 2474299 - RNA, 19 nt, Homo sapiens
  misc_RNA (1)...(19): siRNA sense strand
gauuauugacgguggagca

SEQ ID NO: 2474300 - RNA, 19 nt, Homo sapiens
  misc_RNA (1)...(19): siRNA sense strand
ggagcagguaaaagaaaua

SEQ ID NO: 2474301 - RNA, 19 nt, Homo sapiens
  misc_RNA (1)...(19): siRNA sense strand
ggagaacagggaauugaua

SEQ ID NO: 2474302 - RNA, 19 nt, Homo sapiens
  misc_RNA (1)...(19): siRNA sense strand
gggaauugauagcugcuga

SEQ ID NO: 2474303 - RNA, 19 nt, Homo sapiens
  misc_RNA (1)...(19): siRNA sense strand
gcugguauguuguuggaga

SEQ ID NO: 2474304 - RNA, 19 nt, Homo sapiens
  misc_RNA (1)...(19): siRNA sense strand
gaccaguguuuccggcaaa

SEQ ID NO: 2474305 - RNA, 19 nt, Homo sapiens
  misc_RNA (1)...(19): siRNA sense strand
auucuugaguugcaggaua

SEQ ID NO: 2474306 - RNA, 19 nt, Homo sapiens
  misc_RNA (1)...(19): siRNA sense strand
gaauaugucuauacccauu

SEQ ID NO: 2474307 - RNA, 19 nt, Homo sapiens
  misc_RNA (1)...(19): siRNA sense strand
aaggaaacuuggaucaaaa

SEQ ID NO: 2474308 - RNA, 19 nt, Homo sapiens
  misc_RNA (1)...(19): siRNA sense strand
ggggaaacugcaaggcuua

SEQ ID NO: 2474309 - RNA, 19 nt, Homo sapiens
  misc_RNA (1)...(19): siRNA sense strand
cagaauggauuuguugaaa

SEQ ID NO: 2474310 - RNA, 19 nt, Homo sapiens
  misc_RNA (1)...(19): siRNA sense strand
uggaagcccucuuggaaaa

SEQ ID NO: 2474311 - RNA, 19 nt, Homo sapiens
  misc_RNA (1)...(19): siRNA sense strand
gagcugaagcaguggguuc

SEQ ID NO: 2474312 - RNA, 19 nt, Homo sapiens
  misc_RNA (1)...(19): siRNA sense strand
cgauuggaauggcauauua

SEQ ID NO: 2474313 - RNA, 19 nt, Homo sapiens
  misc_RNA (1)...(19): siRNA sense strand
gguagagugcauaggaguu

SEQ ID NO: 2474314 - RNA, 19 nt, Homo sapiens
  misc_RNA (1)...(19): siRNA sense strand
cugaaagcuuacaguacau

SEQ ID NO: 2474315 - RNA, 19 nt, Homo sapiens
  misc_RNA (1)...(19): siRNA sense strand
cuacagaaaucaaagguaa

SEQ ID NO: 2474316 - RNA, 19 nt, Homo sapiens
  misc_RNA (1)...(19): siRNA sense strand
auaaauuggagcagaguaa

SEQ ID NO: 2474317 - RNA, 19 nt, Homo sapiens
  misc_RNA (1)...(19): siRNA sense strand
gcauaggaguugaacauau

SEQ ID NO: 2474318 - RNA, 19 nt, Homo sapiens
  misc_RNA (1)...(19): siRNA sense strand
ucuuagaggugaugggaga

SEQ ID NO: 2474319 - RNA, 19 nt, Homo sapiens
  misc_RNA (1)...(19): siRNA sense strand
gugcauaggaguugaacau

SEQ ID NO: 2474320 - RNA, 19 nt, Homo sapiens
  misc_RNA (1)...(19): siRNA sense strand
guauguuguuggagaagua

SEQ ID NO: 2474321 - RNA, 19 nt, Homo sapiens
  misc_RNA (1)...(19): siRNA sense strand
guggaaaggaacacauuaa

SEQ ID NO: 2474322 - RNA, 19 nt, Homo sapiens
  misc_RNA (1)...(19): siRNA sense strand
gguaaaagaaauaggagau

SEQ ID NO: 2474323 - RNA, 19 nt, Homo sapiens
  misc_RNA (1)...(19): siRNA sense strand
agagcauuguucagagaua

SEQ ID NO: 2474324 - RNA, 19 nt, Homo sapiens
  misc_RNA (1)...(19): siRNA sense strand
gggagaaccucgugucuga

SEQ ID NO: 2474325 - RNA, 19 nt, Homo sapiens
  misc_RNA (1)...(19): siRNA sense strand
ugaaagaacaugauagcuu

SEQ ID NO: 2474326 - RNA, 19 nt, Homo sapiens
  misc_RNA (1)...(19): siRNA sense strand
gagcauuugaauuggcuua

SEQ ID NO: 2474327 - RNA, 19 nt, Homo sapiens
  misc_RNA (1)...(19): siRNA sense strand
guacuaaacaggugcccaa

SEQ ID NO: 2474328 - RNA, 19 nt, Homo sapiens
  misc_RNA (1)...(19): siRNA sense strand
ccaaguaaggauagauaca

SEQ ID NO: 2474329 - RNA, 19 nt, Homo sapiens
  misc_RNA (1)...(19): siRNA sense strand
aggaacacauuaaugguua

SEQ ID NO: 2474330 - RNA, 19 nt, Homo sapiens
  misc_RNA (1)...(19): siRNA sense strand
uggcaugagacuuggguuu

SEQ ID NO: 2474331 - RNA, 19 nt, Homo sapiens
  misc_RNA (1)...(19): siRNA sense strand
uggaagaaaugcaguggau

SEQ ID NO: 2474332 - RNA, 19 nt, Homo sapiens
  misc_RNA (1)...(19): siRNA sense strand
ggagaaguaugaaggaagu

SEQ ID NO: 2474333 - RNA, 19 nt, Homo sapiens
  misc_RNA (1)...(19): siRNA sense strand
aggcagaauuuauacagua

SEQ ID NO: 2474334 - RNA, 19 nt, Homo sapiens
  misc_RNA (1)...(19): siRNA sense strand
gaacaugauagcuuugaua

SEQ ID NO: 2474335 - RNA, 19 nt, Homo sapiens
  misc_RNA (1)...(19): siRNA sense strand
gaguaaauccaaacgugaa

SEQ ID NO: 2474336 - RNA, 19 nt, Homo sapiens
  misc_RNA (1)...(19): siRNA sense strand
caguauaucagcugaguca

SEQ ID NO: 2474337 - RNA, 19 nt, Homo sapiens
  misc_RNA (1)...(19): siRNA sense strand
gcacaagcaccaaaccaua

SEQ ID NO: 2474338 - RNA, 19 nt, Homo sapiens
  misc_RNA (1)...(19): siRNA sense strand
gagauucagccucgagaua

SEQ ID NO: 2474339 - RNA, 19 nt, Homo sapiens
  misc_RNA (1)...(19): siRNA sense strand
augaaggacuugaaugcua

SEQ ID NO: 2474340 - RNA, 19 nt, Homo sapiens
  misc_RNA (1)...(19): siRNA sense strand
gaaauuaaaugcagugauc

SEQ ID NO: 2474341 - RNA, 19 nt, Homo sapiens
  misc_RNA (1)...(19): siRNA sense strand
gauggaaaaucuugaggaa

SEQ ID NO: 2474342 - RNA, 19 nt, Homo sapiens
  misc_RNA (1)...(19): siRNA sense strand
gcagaauggauuuguugaa

SEQ ID NO: 2474343 - RNA, 19 nt, Homo sapiens
  misc_RNA (1)...(19): siRNA sense strand
aguaaucggagcacagaaa

SEQ ID NO: 2474344 - RNA, 19 nt, Homo sapiens
  misc_RNA (1)...(19): siRNA sense strand
gaagaaaugcaguggauuc

SEQ ID NO: 2474345 - RNA, 19 nt, Homo sapiens
  misc_RNA (1)...(19): siRNA sense strand
cugcugugguggaaaggaa

SEQ ID NO: 2474346 - RNA, 19 nt, Homo sapiens
  misc_RNA (1)...(19): siRNA sense strand
aagaaaggcagaauggauu

SEQ ID NO: 2474347 - RNA, 19 nt, Homo sapiens
  misc_RNA (1)...(19): siRNA sense strand
gaaacucacugaaguacua

SEQ ID NO: 2474348 - RNA, 19 nt, Homo sapiens
  misc_RNA (1)...(19): siRNA sense strand
gugaaggaaacuuggauca

SEQ ID NO: 2474349 - RNA, 19 nt, Homo sapiens
  misc_RNA (1)...(19): siRNA sense strand
gcacagaggagcauuugaa

SEQ ID NO: 2474350 - RNA, 19 nt, Homo sapiens
  misc_RNA (1)...(19): siRNA sense strand
ggauagauacauuaggcuu

SEQ ID NO: 2474351 - RNA, 19 nt, Homo sapiens
  misc_RNA (1)...(19): siRNA sense strand
caaacgugaaccagagaau

SEQ ID NO: 2474352 - RNA, 19 nt, Homo sapiens
  misc_RNA (1)...(19): siRNA sense strand
ggaacacauuaaugguuau

SEQ ID NO: 2474353 - RNA, 19 nt, Homo sapiens
  misc_RNA (1)...(19): siRNA sense strand
gggcgaguccacuguauaa

SEQ ID NO: 2474354 - RNA, 19 nt, Homo sapiens
  misc_RNA (1)...(19): siRNA sense strand
gcauuggagcucagcacaa

SEQ ID NO: 2474355 - RNA, 19 nt, Homo sapiens
  misc_RNA (1)...(19): siRNA sense strand
ugacgguggagcagguaaa

SEQ ID NO: 2474356 - RNA, 19 nt, Homo sapiens
  misc_RNA (1)...(19): siRNA sense strand
gcugagaguucuuggauug

SEQ ID NO: 2474357 - RNA, 19 nt, Homo sapiens
  misc_RNA (1)...(19): siRNA sense strand
acaggaaaguucucaggua

SEQ ID NO: 2474358 - RNA, 19 nt, Homo sapiens
  misc_RNA (1)...(19): siRNA sense strand
ggagcagaguaaauccaaa

SEQ ID NO: 2474359 - RNA, 19 nt, Homo sapiens
  misc_RNA (1)...(19): siRNA sense strand
uaacaggagcuuugcagaa

SEQ ID NO: 2474360 - RNA, 19 nt, Homo sapiens
  misc_RNA (1)...(19): siRNA sense strand
cauaggaguugaacauauu

SEQ ID NO: 2474361 - RNA, 19 nt, Homo sapiens
  misc_RNA (1)...(19): siRNA sense strand
gcuuugauaugaaggacuu

SEQ ID NO: 2474362 - RNA, 19 nt, Homo sapiens
  misc_RNA (1)...(19): siRNA sense strand
cggacagccugaaugggaa

SEQ ID NO: 2474363 - RNA, 19 nt, Homo sapiens
  misc_RNA (1)...(19): siRNA sense strand
ccugaaagcuuacaguaca

SEQ ID NO: 2474364 - RNA, 19 nt, Homo sapiens
  misc_RNA (1)...(19): siRNA sense strand
gcaacugauaccugggaga

SEQ ID NO: 2474365 - RNA, 19 nt, Homo sapiens
  misc_RNA (1)...(19): siRNA sense strand
ccagaaggcagaauuuaua

SEQ ID NO: 2474366 - RNA, 19 nt, Homo sapiens
  misc_RNA (1)...(19): siRNA sense strand
cauuugaucuucugaugaa

SEQ ID NO: 2474367 - RNA, 19 nt, Homo sapiens
  misc_RNA (1)...(19): siRNA sense strand
augcuaguguggugaauau

SEQ ID NO: 2474368 - RNA, 19 nt, Homo sapiens
  misc_RNA (1)...(19): siRNA sense strand
cugguauguuguuggagaa

SEQ ID NO: 2474369 - RNA, 19 nt, Homo sapiens
  misc_RNA (1)...(19): siRNA sense strand
aaagaaaggcagaauggau

SEQ ID NO: 2474370 - RNA, 19 nt, Homo sapiens
  misc_RNA (1)...(19): siRNA sense strand
gugucugaugcaagaauaa

SEQ ID NO: 2474371 - RNA, 19 nt, Homo sapiens
  misc_RNA (1)...(19): siRNA sense strand
gauuauugacgguggagca

SEQ ID NO: 2474372 - RNA, 19 nt, Homo sapiens
  misc_RNA (1)...(19): siRNA sense strand
ggagcagguaaaagaaaua

SEQ ID NO: 2474373 - RNA, 19 nt, Homo sapiens
  misc_RNA (1)...(19): siRNA sense strand
gcugguauguuguuggaga

SEQ ID NO: 2474374 - RNA, 19 nt, Homo sapiens
  misc_RNA (1)...(19): siRNA sense strand
gaauaugucuauacccauu

SEQ ID NO: 2474375 - RNA, 19 nt, Homo sapiens
  misc_RNA (1)...(19): siRNA sense strand
aaggaaacuuggaucaaaa

SEQ ID NO: 2474376 - RNA, 19 nt, Homo sapiens
  misc_RNA (1)...(19): siRNA sense strand
ggggaaacugcaaggcuua

SEQ ID NO: 2474377 - RNA, 19 nt, Homo sapiens
  misc_RNA (1)...(19): siRNA sense strand
cagaauggauuuguugaaa

SEQ ID NO: 2474378 - RNA, 19 nt, Homo sapiens
  misc_RNA (1)...(19): siRNA sense strand
cgauuggaauggcauauua

SEQ ID NO: 2474379 - RNA, 19 nt, Homo sapiens
  misc_RNA (1)...(19): siRNA sense strand
gguagagugcauaggaguu

SEQ ID NO: 2474380 - RNA, 19 nt, Homo sapiens
  misc_RNA (1)...(19): siRNA sense strand
cugaaagcuuacaguacau

SEQ ID NO: 2474381 - RNA, 19 nt, Homo sapiens
  misc_RNA (1)...(19): siRNA sense strand
gcaugugauaauggagaua

SEQ ID NO: 2474382 - RNA, 19 nt, Homo sapiens
  misc_RNA (1)...(19): siRNA sense strand
uugcagaaguuaucucuaa

SEQ ID NO: 2474383 - RNA, 19 nt, Homo sapiens
  misc_RNA (1)...(19): siRNA sense strand
ggagauuacuuuaaacaac

SEQ ID NO: 2474384 - RNA, 19 nt, Homo sapiens
  misc_RNA (1)...(19): siRNA sense strand
uggaauuccuuucuacaua

SEQ ID NO: 2474385 - RNA, 19 nt, Homo sapiens
  misc_RNA (1)...(19): siRNA sense strand
gaaggaaacuuggaucaaa

SEQ ID NO: 2474386 - RNA, 19 nt, Homo sapiens
  misc_RNA (1)...(19): siRNA sense strand
gcauauuaaaggaaaguac

SEQ ID NO: 2474387 - RNA, 19 nt, Homo sapiens
  misc_RNA (1)...(19): siRNA sense strand
caucagcauugccaaguaa

SEQ ID NO: 2474388 - RNA, 19 nt, Homo sapiens
  misc_RNA (1)...(19): siRNA sense strand
aaauuggagcagaguaaau

SEQ ID NO: 2474389 - RNA, 19 nt, Homo sapiens
  misc_RNA (1)...(19): siRNA sense strand
guaugaaggaaguugcuuu

SEQ ID NO: 2474390 - RNA, 19 nt, Homo sapiens
  misc_RNA (1)...(19): siRNA sense strand
ggacagccugaaugggaau

SEQ ID NO: 2474391 - RNA, 19 nt, Homo sapiens
  misc_RNA (1)...(19): siRNA sense strand
ugaaccagagaaugaguua

SEQ ID NO: 2474392 - RNA, 19 nt, Homo sapiens
  misc_RNA (1)...(19): siRNA sense strand
ccaaaugugagucugcaaa

SEQ ID NO: 2474393 - RNA, 19 nt, Homo sapiens
  misc_RNA (1)...(19): siRNA sense strand
ccuugaguucacagauuaa

SEQ ID NO: 2474394 - RNA, 19 nt, Homo sapiens
  misc_RNA (1)...(19): siRNA sense strand
gagaaugaguuaaccaaac

SEQ ID NO: 2474395 - RNA, 19 nt, Homo sapiens
  misc_RNA (1)...(19): siRNA sense strand
gcgcagauggugcugguau

SEQ ID NO: 2474396 - RNA, 19 nt, Homo sapiens
  misc_RNA (1)...(19): siRNA sense strand
uccuuagggucuuguaaua

SEQ ID NO: 2474397 - RNA, 19 nt, Homo sapiens
  misc_RNA (1)...(19): siRNA sense strand
aggcuuaauucaucagcau

SEQ ID NO: 2474398 - RNA, 19 nt, Homo sapiens
  misc_RNA (1)...(19): siRNA sense strand
cagagaaugaguuaaccaa

SEQ ID NO: 2474399 - RNA, 19 nt, Homo sapiens
  misc_RNA (1)...(19): siRNA sense strand
agagaaugaguuaaccaaa

SEQ ID NO: 2474400 - RNA, 19 nt, Homo sapiens
  misc_RNA (1)...(19): siRNA sense strand
cuuuacagcaguauaagaa

SEQ ID NO: 2474401 - RNA, 19 nt, Homo sapiens
  misc_RNA (1)...(19): siRNA sense strand
ggaucuuccuacucgacua

SEQ ID NO: 2474402 - RNA, 19 nt, Homo sapiens
  misc_RNA (1)...(19): siRNA sense strand
gcaggaugcucuaccguca

SEQ ID NO: 2474403 - RNA, 19 nt, Homo sapiens
  misc_RNA (1)...(19): siRNA sense strand
agaaaggcagaauggauuu

SEQ ID NO: 2474404 - RNA, 19 nt, Homo sapiens
  misc_RNA (1)...(19): siRNA sense strand
agguaaaagaaauaggaga

SEQ ID NO: 2474405 - RNA, 19 nt, Homo sapiens
  misc_RNA (1)...(19): siRNA sense strand
cagaugacauacagaguac

SEQ ID NO: 2474406 - RNA, 19 nt, Homo sapiens
  misc_RNA (1)...(19): siRNA sense strand
uggaauaugucuauaccca

SEQ ID NO: 2474407 - RNA, 19 nt, Homo sapiens
  misc_RNA (1)...(19): siRNA sense strand
guuguuugguagagugcau

SEQ ID NO: 2474408 - RNA, 19 nt, Homo sapiens
  misc_RNA (1)...(19): siRNA sense strand
ugccaaguaaggauagaua

SEQ ID NO: 2474409 - RNA, 19 nt, Homo sapiens
  misc_RNA (1)...(19): siRNA sense strand
agaaugaguuaaccaaaca

SEQ ID NO: 2474410 - RNA, 19 nt, Homo sapiens
  misc_RNA (1)...(19): siRNA sense strand
gagucaugauauugauguu

SEQ ID NO: 2474411 - RNA, 19 nt, Homo sapiens
  misc_RNA (1)...(19): siRNA sense strand
cuuccuaccugcugaacuu

SEQ ID NO: 2474412 - RNA, 19 nt, Homo sapiens
  misc_RNA (1)...(19): siRNA sense strand
cauuggaugcucugagaca

SEQ ID NO: 2474413 - RNA, 19 nt, Homo sapiens
  misc_RNA (1)...(19): siRNA sense strand
cauacaaucuuaacagcca

SEQ ID NO: 2474414 - RNA, 19 nt, Homo sapiens
  misc_RNA (1)...(19): siRNA sense strand
ggaguguuuuagaggaaau

SEQ ID NO: 2474415 - RNA, 19 nt, Homo sapiens
  misc_RNA (1)...(19): siRNA sense strand
gggacagagagguggacaa

SEQ ID NO: 2474416 - RNA, 19 nt, Homo sapiens
  misc_RNA (1)...(19): siRNA sense strand
gcugauuggagaagaggaa

SEQ ID NO: 2474417 - RNA, 19 nt, Homo sapiens
  misc_RNA (1)...(19): siRNA sense strand
ucaagaacuuaaagcgcaa

SEQ ID NO: 2474418 - RNA, 19 nt, Homo sapiens
  misc_RNA (1)...(19): siRNA sense strand
ccauuguagaggaggagaa

SEQ ID NO: 2474419 - RNA, 19 nt, Homo sapiens
  misc_RNA (1)...(19): siRNA sense strand
cggagugcacagaggacaa

SEQ ID NO: 2474420 - RNA, 19 nt, Homo sapiens
  misc_RNA (1)...(19): siRNA sense strand
aaaccaaagaagcggagaa

SEQ ID NO: 2474421 - RNA, 19 nt, Homo sapiens
  misc_RNA (1)...(19): siRNA sense strand
ccaacaagaaccugaggau

SEQ ID NO: 2474422 - RNA, 19 nt, Homo sapiens
  misc_RNA (1)...(19): siRNA sense strand
cuggagacuucgugguaga

SEQ ID NO: 2474423 - RNA, 19 nt, Homo sapiens
  misc_RNA (1)...(19): siRNA sense strand
ccaagaaggugaagcgccu

SEQ ID NO: 2474424 - RNA, 19 nt, Homo sapiens
  misc_RNA (1)...(19): siRNA sense strand
cgcaaacacaagaggaaga

SEQ ID NO: 2474425 - RNA, 19 nt, Homo sapiens
  misc_RNA (1)...(19): siRNA sense strand
uuguagaggaggagaagau

SEQ ID NO: 2474426 - RNA, 19 nt, Homo sapiens
  misc_RNA (1)...(19): siRNA sense strand
acuuaaagcgcaaacacaa

SEQ ID NO: 2474427 - RNA, 19 nt, Homo sapiens
  misc_RNA (1)...(19): siRNA sense strand
gggacgacguggagcugau

SEQ ID NO: 2474428 - RNA, 19 nt, Homo sapiens
  misc_RNA (1)...(19): siRNA sense strand
caguggagaugcaggacga

SEQ ID NO: 2474429 - RNA, 19 nt, Homo sapiens
  misc_RNA (1)...(19): siRNA sense strand
gauagugacagcugggaga

SEQ ID NO: 2474430 - RNA, 19 nt, Homo sapiens
  misc_RNA (1)...(19): siRNA sense strand
ugauuggagaagaggaaga

SEQ ID NO: 2474431 - RNA, 19 nt, Homo sapiens
  misc_RNA (1)...(19): siRNA sense strand
cggaugaaugggaagauga

SEQ ID NO: 2474432 - RNA, 19 nt, Homo sapiens
  misc_RNA (1)...(19): siRNA sense strand
ggugaucagugaagaggca

SEQ ID NO: 2474433 - RNA, 19 nt, Homo sapiens
  misc_RNA (1)...(19): siRNA sense strand
aggucuacgacuugaagaa

SEQ ID NO: 2474434 - RNA, 19 nt, Homo sapiens
  misc_RNA (1)...(19): siRNA sense strand
agaagcagguugugcggau

SEQ ID NO: 2474435 - RNA, 19 nt, Homo sapiens
  misc_RNA (1)...(19): siRNA sense strand
gcagcaagguggagguggu

SEQ ID NO: 2474436 - RNA, 19 nt, Homo sapiens
  misc_RNA (1)...(19): siRNA sense strand
acaaugggcugguggagga

SEQ ID NO: 2474437 - RNA, 19 nt, Homo sapiens
  misc_RNA (1)...(19): siRNA sense strand
aggagaagauggaagcagu

SEQ ID NO: 2474438 - RNA, 19 nt, Homo sapiens
  misc_RNA (1)...(19): siRNA sense strand
cuggagagccucaagaaca

SEQ ID NO: 2474439 - RNA, 19 nt, Homo sapiens
  misc_RNA (1)...(19): siRNA sense strand
gggaguugaaagaggccau

SEQ ID NO: 2474440 - RNA, 19 nt, Homo sapiens
  misc_RNA (1)...(19): siRNA sense strand
gccaagauugccugggaau

SEQ ID NO: 2474441 - RNA, 19 nt, Homo sapiens
  misc_RNA (1)...(19): siRNA sense strand
ggaugaaugggaagaugau

SEQ ID NO: 2474442 - RNA, 19 nt, Homo sapiens
  misc_RNA (1)...(19): siRNA sense strand
cccaagagcuuccgggagu

SEQ ID NO: 2474443 - RNA, 19 nt, Homo sapiens
  misc_RNA (1)...(19): siRNA sense strand
gcgucaagcagcaugugaa

SEQ ID NO: 2474444 - RNA, 19 nt, Homo sapiens
  misc_RNA (1)...(19): siRNA sense strand
acguagagcgcaaggagga

SEQ ID NO: 2474445 - RNA, 19 nt, Homo sapiens
  misc_RNA (1)...(19): siRNA sense strand
aaccaaagaagcggagaaa

SEQ ID NO: 2474446 - RNA, 19 nt, Homo sapiens
  misc_RNA (1)...(19): siRNA sense strand
gcgccaagcucuacgacgu

SEQ ID NO: 2474447 - RNA, 19 nt, Homo sapiens
  misc_RNA (1)...(19): siRNA sense strand
acguggagcugauuggaga

SEQ ID NO: 2474448 - RNA, 19 nt, Homo sapiens
  misc_RNA (1)...(19): siRNA sense strand
aagaggaagaugugagugu

SEQ ID NO: 2474449 - RNA, 19 nt, Homo sapiens
  misc_RNA (1)...(19): siRNA sense strand
caggaaaaccucaagaaga

SEQ ID NO: 2474450 - RNA, 19 nt, Homo sapiens
  misc_RNA (1)...(19): siRNA sense strand
cuccagaagccaagaaguu

SEQ ID NO: 2474451 - RNA, 19 nt, Homo sapiens
  misc_RNA (1)...(19): siRNA sense strand
aucaagaagcuacaggaaa

SEQ ID NO: 2474452 - RNA, 19 nt, Homo sapiens
  misc_RNA (1)...(19): siRNA sense strand
gcugacaacucaaagacca

SEQ ID NO: 2474453 - RNA, 19 nt, Homo sapiens
  misc_RNA (1)...(19): siRNA sense strand
aggacaagggaguggugau

SEQ ID NO: 2474454 - RNA, 19 nt, Homo sapiens
  misc_RNA (1)...(19): siRNA sense strand
gcaaggaggacaagcccga

SEQ ID NO: 2474455 - RNA, 19 nt, Homo sapiens
  misc_RNA (1)...(19): siRNA sense strand
ccauggaagacccagacaa

SEQ ID NO: 2474456 - RNA, 19 nt, Homo sapiens
  misc_RNA (1)...(19): siRNA sense strand
agggaguggugaucaguga

SEQ ID NO: 2474457 - RNA, 19 nt, Homo sapiens
  misc_RNA (1)...(19): siRNA sense strand
aagcagugcccgacguaga

SEQ ID NO: 2474458 - RNA, 19 nt, Homo sapiens
  misc_RNA (1)...(19): siRNA sense strand
ugcccgacguagagcgcaa

SEQ ID NO: 2474459 - RNA, 19 nt, Homo sapiens
  misc_RNA (1)...(19): siRNA sense strand
uccgaguggugguggaaga

SEQ ID NO: 2474460 - RNA, 19 nt, Homo sapiens
  misc_RNA (1)...(19): siRNA sense strand
agcgcaaacacaagaggaa

SEQ ID NO: 2474461 - RNA, 19 nt, Homo sapiens
  misc_RNA (1)...(19): siRNA sense strand
agaacaugacuguggagca

SEQ ID NO: 2474462 - RNA, 19 nt, Homo sapiens
  misc_RNA (1)...(19): siRNA sense strand
agguagagccagccaagau

SEQ ID NO: 2474463 - RNA, 19 nt, Homo sapiens
  misc_RNA (1)...(19): siRNA sense strand
ucacaaggaggaugagcca

SEQ ID NO: 2474464 - RNA, 19 nt, Homo sapiens
  misc_RNA (1)...(19): siRNA sense strand
cugcaggaaggcuaugaaa

SEQ ID NO: 2474465 - RNA, 19 nt, Homo sapiens
  misc_RNA (1)...(19): siRNA sense strand
uggagaaggcccaggcacu

SEQ ID NO: 2474466 - RNA, 19 nt, Homo sapiens
  misc_RNA (1)...(19): siRNA sense strand
gcuaaaagaaggcagagau

SEQ ID NO: 2474467 - RNA, 19 nt, Homo sapiens
  misc_RNA (1)...(19): siRNA sense strand
ggccguaccugcaugguga

SEQ ID NO: 2474468 - RNA, 19 nt, Homo sapiens
  misc_RNA (1)...(19): siRNA sense strand
uggccauuguagaggagga

SEQ ID NO: 2474469 - RNA, 19 nt, Homo sapiens
  misc_RNA (1)...(19): siRNA sense strand
acuugaagaaccagaucau

SEQ ID NO: 2474470 - RNA, 19 nt, Homo sapiens
  misc_RNA (1)...(19): siRNA sense strand
gggagggcucuauggccaa

SEQ ID NO: 2474471 - RNA, 19 nt, Homo sapiens
  misc_RNA (1)...(19): siRNA sense strand
gugaaggagaccaagcuga

SEQ ID NO: 2474472 - RNA, 19 nt, Homo sapiens
  misc_RNA (1)...(19): siRNA sense strand
agucugagauugaggaguc

SEQ ID NO: 2474473 - RNA, 19 nt, Homo sapiens
  misc_RNA (1)...(19): siRNA sense strand
ucaagauccuggagagccu

SEQ ID NO: 2474474 - RNA, 19 nt, Homo sapiens
  misc_RNA (1)...(19): siRNA sense strand
cugagggcaucauggucaa

SEQ ID NO: 2474475 - RNA, 19 nt, Homo sapiens
  misc_RNA (1)...(19): siRNA sense strand
gcuaauaccuccagaaaua

SEQ ID NO: 2474476 - RNA, 19 nt, Homo sapiens
  misc_RNA (1)...(19): siRNA sense strand
cagcagaagaagagcaaua

SEQ ID NO: 2474477 - RNA, 19 nt, Homo sapiens
  misc_RNA (1)...(19): siRNA sense strand
ggaagaagugcuugauaaa

SEQ ID NO: 2474478 - RNA, 19 nt, Homo sapiens
  misc_RNA (1)...(19): siRNA sense strand
aguugaaucucgagcaaua

SEQ ID NO: 2474479 - RNA, 19 nt, Homo sapiens
  misc_RNA (1)...(19): siRNA sense strand
uggaagaagugcuugauaa

SEQ ID NO: 2474480 - RNA, 19 nt, Homo sapiens
  misc_RNA (1)...(19): siRNA sense strand
gaaagaagagaaagggcaa

SEQ ID NO: 2474481 - RNA, 19 nt, Homo sapiens
  misc_RNA (1)...(19): siRNA sense strand
gcacauauggacacagaaa

SEQ ID NO: 2474482 - RNA, 19 nt, Homo sapiens
  misc_RNA (1)...(19): siRNA sense strand
ugugagaacugguggaauu

SEQ ID NO: 2474483 - RNA, 19 nt, Homo sapiens
  misc_RNA (1)...(19): siRNA sense strand
gaugaaggcucuagucuua

SEQ ID NO: 2474484 - RNA, 19 nt, Homo sapiens
  misc_RNA (1)...(19): siRNA sense strand
caucugaaguugacauuaa

SEQ ID NO: 2474485 - RNA, 19 nt, Homo sapiens
  misc_RNA (1)...(19): siRNA sense strand
ugguauacauggaagcaua

SEQ ID NO: 2474486 - RNA, 19 nt, Homo sapiens
  misc_RNA (1)...(19): siRNA sense strand
cgucagaucuucauguuaa

SEQ ID NO: 2474487 - RNA, 19 nt, Homo sapiens
  misc_RNA (1)...(19): siRNA sense strand
aggaagaauugcugcagaa

SEQ ID NO: 2474488 - RNA, 19 nt, Homo sapiens
  misc_RNA (1)...(19): siRNA sense strand
gggcaaacuuaguaauuca

SEQ ID NO: 2474489 - RNA, 19 nt, Homo sapiens
  misc_RNA (1)...(19): siRNA sense strand
gcucagaugucuucaguau

SEQ ID NO: 2474490 - RNA, 19 nt, Homo sapiens
  misc_RNA (1)...(19): siRNA sense strand
cuucaguauuucagcguua

SEQ ID NO: 2474491 - RNA, 19 nt, Homo sapiens
  misc_RNA (1)...(19): siRNA sense strand
ccagauggcacaagaaauu

SEQ ID NO: 2474492 - RNA, 19 nt, Homo sapiens
  misc_RNA (1)...(19): siRNA sense strand
cauggaagcauaugauaaa

SEQ ID NO: 2474493 - RNA, 19 nt, Homo sapiens
  misc_RNA (1)...(19): siRNA sense strand
ggaaagaagagaaagggca

SEQ ID NO: 2474494 - RNA, 19 nt, Homo sapiens
  misc_RNA (1)...(19): siRNA sense strand
guugauuaguaguggcaau

SEQ ID NO: 2474495 - RNA, 19 nt, Homo sapiens
  misc_RNA (1)...(19): siRNA sense strand
aagaagugcuugauaaaga

SEQ ID NO: 2474496 - RNA, 19 nt, Homo sapiens
  misc_RNA (1)...(19): siRNA sense strand
gaagauauucacuggcuua

SEQ ID NO: 2474497 - RNA, 19 nt, Homo sapiens
  misc_RNA (1)...(19): siRNA sense strand
ccagaugggcaaagauauu

SEQ ID NO: 2474498 - RNA, 19 nt, Homo sapiens
  misc_RNA (1)...(19): siRNA sense strand
gaguucagcaggcgggaaa

SEQ ID NO: 2474499 - RNA, 19 nt, Homo sapiens
  misc_RNA (1)...(19): siRNA sense strand
gcgaagugcugcauuggaa

SEQ ID NO: 2474500 - RNA, 19 nt, Homo sapiens
  misc_RNA (1)...(19): siRNA sense strand
ucucagaguuucagaaguu

SEQ ID NO: 2474501 - RNA, 19 nt, Homo sapiens
  misc_RNA (1)...(19): siRNA sense strand
ugauggaaguuuacaagaa

SEQ ID NO: 2474502 - RNA, 19 nt, Homo sapiens
  misc_RNA (1)...(19): siRNA sense strand
gcaaagaauagauguuaca

SEQ ID NO: 2474503 - RNA, 19 nt, Homo sapiens
  misc_RNA (1)...(19): siRNA sense strand
acauggaagcauaugauaa

SEQ ID NO: 2474504 - RNA, 19 nt, Homo sapiens
  misc_RNA (1)...(19): siRNA sense strand
uguugaaguugcacauaaa

SEQ ID NO: 2474505 - RNA, 19 nt, Homo sapiens
  misc_RNA (1)...(19): siRNA sense strand
ggacauugaugaaggcucu

SEQ ID NO: 2474506 - RNA, 19 nt, Homo sapiens
  misc_RNA (1)...(19): siRNA sense strand
ggguacaacagaacagauu

SEQ ID NO: 2474507 - RNA, 19 nt, Homo sapiens
  misc_RNA (1)...(19): siRNA sense strand
ugauacagaugaaguguuu

SEQ ID NO: 2474508 - RNA, 19 nt, Homo sapiens
  misc_RNA (1)...(19): siRNA sense strand
gaaguugaaucucgagcaa

SEQ ID NO: 2474509 - RNA, 19 nt, Homo sapiens
  misc_RNA (1)...(19): siRNA sense strand
uaacaagacuccaugguca

SEQ ID NO: 2474510 - RNA, 19 nt, Homo sapiens
  misc_RNA (1)...(19): siRNA sense strand
cagcgauucuuaagaguga

SEQ ID NO: 2474511 - RNA, 19 nt, Homo sapiens
  misc_RNA (1)...(19): siRNA sense strand
ugauaaagaugacauggua

SEQ ID NO: 2474512 - RNA, 19 nt, Homo sapiens
  misc_RNA (1)...(19): siRNA sense strand
agaagaaagaguaacaaga

SEQ ID NO: 2474513 - RNA, 19 nt, Homo sapiens
  misc_RNA (1)...(19): siRNA sense strand
gaggaagucaagcaggaaa

SEQ ID NO: 2474514 - RNA, 19 nt, Homo sapiens
  misc_RNA (1)...(19): siRNA sense strand
ggaggaagaaauaagugaa

SEQ ID NO: 2474515 - RNA, 19 nt, Homo sapiens
  misc_RNA (1)...(19): siRNA sense strand
guuuagaggacaugagcca

SEQ ID NO: 2474516 - RNA, 19 nt, Homo sapiens
  misc_RNA (1)...(19): siRNA sense strand
gagcagauacagaggguuc

SEQ ID NO: 2474517 - RNA, 19 nt, Homo sapiens
  misc_RNA (1)...(19): siRNA sense strand
uuacuaaccugcugucaaa

SEQ ID NO: 2474518 - RNA, 19 nt, Homo sapiens
  misc_RNA (1)...(19): siRNA sense strand
cagcagaguuauggagcuu

SEQ ID NO: 2474519 - RNA, 19 nt, Homo sapiens
  misc_RNA (1)...(19): siRNA sense strand
gauaaagaugacaugguau

SEQ ID NO: 2474520 - RNA, 19 nt, Homo sapiens
  misc_RNA (1)...(19): siRNA sense strand
ccgcuaauaccuccagaaa

SEQ ID NO: 2474521 - RNA, 19 nt, Homo sapiens
  misc_RNA (1)...(19): siRNA sense strand
gugcagaggacauugauga

SEQ ID NO: 2474522 - RNA, 19 nt, Homo sapiens
  misc_RNA (1)...(19): siRNA sense strand
aggaagucaagcaggaaau

SEQ ID NO: 2474523 - RNA, 19 nt, Homo sapiens
  misc_RNA (1)...(19): siRNA sense strand
gauggaaguuuacaagaau

SEQ ID NO: 2474524 - RNA, 19 nt, Homo sapiens
  misc_RNA (1)...(19): siRNA sense strand
caguagcaguaauuguaaa

SEQ ID NO: 2474525 - RNA, 19 nt, Homo sapiens
  misc_RNA (1)...(19): siRNA sense strand
aggaaugcuaggaagaauu

SEQ ID NO: 2474526 - RNA, 19 nt, Homo sapiens
  misc_RNA (1)...(19): siRNA sense strand
gaggguucucaguggauaa

SEQ ID NO: 2474527 - RNA, 19 nt, Homo sapiens
  misc_RNA (1)...(19): siRNA sense strand
ggaaaucacugccacacua

SEQ ID NO: 2474528 - RNA, 19 nt, Homo sapiens
  misc_RNA (1)...(19): siRNA sense strand
agauguuacagcagaagaa

SEQ ID NO: 2474529 - RNA, 19 nt, Homo sapiens
  misc_RNA (1)...(19): siRNA sense strand
ggaaugacaucaaugaguu

SEQ ID NO: 2474530 - RNA, 19 nt, Homo sapiens
  misc_RNA (1)...(19): siRNA sense strand
cagagaagauucagauaug

SEQ ID NO: 2474531 - RNA, 19 nt, Homo sapiens
  misc_RNA (1)...(19): siRNA sense strand
ucgugaggaggaagaaaua

SEQ ID NO: 2474532 - RNA, 19 nt, Homo sapiens
  misc_RNA (1)...(19): siRNA sense strand
ccucuuagcugaugauacu

SEQ ID NO: 2474533 - RNA, 19 nt, Homo sapiens
  misc_RNA (1)...(19): siRNA sense strand
ggaauuuagcuaagcaguu

SEQ ID NO: 2474534 - RNA, 19 nt, Homo sapiens
  misc_RNA (1)...(19): siRNA sense strand
uuggauugauggaaguuua

SEQ ID NO: 2474535 - RNA, 19 nt, Homo sapiens
  misc_RNA (1)...(19): siRNA sense strand
cggcaaagaauagauguua

SEQ ID NO: 2474536 - RNA, 19 nt, Homo sapiens
  misc_RNA (1)...(19): siRNA sense strand
aagaagagcaauaccaaga

SEQ ID NO: 2474537 - RNA, 19 nt, Homo sapiens
  misc_RNA (1)...(19): siRNA sense strand
gaauuaggaaugacaucaa

SEQ ID NO: 2474538 - RNA, 19 nt, Homo sapiens
  misc_RNA (1)...(19): siRNA sense strand
gaagucagccaguugauua

SEQ ID NO: 2474539 - RNA, 19 nt, Homo sapiens
  misc_RNA (1)...(19): siRNA sense strand
gggaaaaccucaaugcuca

SEQ ID NO: 2474540 - RNA, 19 nt, Homo sapiens
  misc_RNA (1)...(19): siRNA sense strand
cuuaagagugauaaaccaa

SEQ ID NO: 2474541 - RNA, 19 nt, Homo sapiens
  misc_RNA (1)...(19): siRNA sense strand
aguccaaagcuaugaacuu

SEQ ID NO: 2474542 - RNA, 19 nt, Homo sapiens
  misc_RNA (1)...(19): siRNA sense strand
aauagauguuacagcagaa

SEQ ID NO: 2474543 - RNA, 19 nt, Homo sapiens
  misc_RNA (1)...(19): siRNA sense strand
cagcggauguuguguugua

SEQ ID NO: 2474544 - RNA, 19 nt, Homo sapiens
  misc_RNA (1)...(19): siRNA sense strand
aagagaaagggcaaacuua

SEQ ID NO: 2474545 - RNA, 19 nt, Homo sapiens
  misc_RNA (1)...(19): siRNA sense strand
ccucuuaauuucuugucaa

SEQ ID NO: 2474546 - RNA, 19 nt, Homo sapiens
  misc_RNA (1)...(19): siRNA sense strand
gaauagauguuacagcaga

SEQ ID NO: 2474547 - RNA, 19 nt, Homo sapiens
  misc_RNA (1)...(19): siRNA sense strand
cugaacuggucgaaacauu

SEQ ID NO: 2474548 - RNA, 19 nt, Homo sapiens
  misc_RNA (1)...(19): siRNA sense strand
cuguauaccucuucugaca

SEQ ID NO: 2474549 - RNA, 19 nt, Homo sapiens
  misc_RNA (1)...(19): siRNA sense strand
gcgauucuuaagagugaua

SEQ ID NO: 2474550 - RNA, 19 nt, Homo sapiens
  misc_RNA (1)...(19): siRNA sense strand
ugaaguguuuagaggacau

SEQ ID NO: 2474551 - RNA, 19 nt, Homo sapiens
  misc_RNA (1)...(19): siRNA sense strand
ggucgaaacauuacuauca

SEQ ID NO: 2474552 - RNA, 19 nt, Homo sapiens
  misc_RNA (1)...(19): siRNA sense strand
acagaguccuggcgggaga

SEQ ID NO: 2474553 - RNA, 19 nt, Homo sapiens
  misc_RNA (1)...(19): siRNA sense strand
uguaggaaugcuaggaaga

SEQ ID NO: 2474554 - RNA, 19 nt, Homo sapiens
  misc_RNA (1)...(19): siRNA sense strand
gauguacucccuagaauua

SEQ ID NO: 2474555 - RNA, 19 nt, Homo sapiens
  misc_RNA (1)...(19): siRNA sense strand
uggcaaucccacugugcaa

SEQ ID NO: 2474556 - RNA, 19 nt, Homo sapiens
  misc_RNA (1)...(19): siRNA sense strand
gaguggauucucuuggaaa

SEQ ID NO: 2474557 - RNA, 19 nt, Homo sapiens
  misc_RNA (1)...(19): siRNA sense strand
uagcagaugccuucaacaa

SEQ ID NO: 2474558 - RNA, 19 nt, Homo sapiens
  misc_RNA (1)...(19): siRNA sense strand
acaagaaauuugacugcca

SEQ ID NO: 2474559 - RNA, 19 nt, Homo sapiens
  misc_RNA (1)...(19): siRNA sense strand
guccaaagcuaugaacuua

SEQ ID NO: 2474560 - RNA, 19 nt, Homo sapiens
  misc_RNA (1)...(19): siRNA sense strand
cugaauacuaucaauggaa

SEQ ID NO: 2474561 - RNA, 19 nt, Homo sapiens
  misc_RNA (1)...(19): siRNA sense strand
gguucaagaugacaaacau

SEQ ID NO: 2474562 - RNA, 19 nt, Homo sapiens
  misc_RNA (1)...(19): siRNA sense strand
guuacaacgacaucagcaa

SEQ ID NO: 2474563 - RNA, 19 nt, Homo sapiens
  misc_RNA (1)...(19): siRNA sense strand
gcauuggauugauggaagu

SEQ ID NO: 2474564 - RNA, 19 nt, Homo sapiens
  misc_RNA (1)...(19): siRNA sense strand
gcggcaaagaauagauguu

SEQ ID NO: 2474565 - RNA, 19 nt, Homo sapiens
  misc_RNA (1)...(19): siRNA sense strand
aagaauagauguuacagca

SEQ ID NO: 2474566 - RNA, 19 nt, Homo sapiens
  misc_RNA (1)...(19): siRNA sense strand
cacacuucauugagggauu

SEQ ID NO: 2474567 - RNA, 19 nt, Homo sapiens
  misc_RNA (1)...(19): siRNA sense strand
aagaggaagucaagcagga

SEQ ID NO: 2474568 - RNA, 19 nt, Homo sapiens
  misc_RNA (1)...(19): siRNA sense strand
agaagaagagcaauaccaa

SEQ ID NO: 2474569 - RNA, 19 nt, Homo sapiens
  misc_RNA (1)...(19): siRNA sense strand
agcaagacccaguuauuua

SEQ ID NO: 2474570 - RNA, 19 nt, Homo sapiens
  misc_RNA (1)...(19): siRNA sense strand
ugacugcgcuauugaguga

SEQ ID NO: 2474571 - RNA, 19 nt, Homo sapiens
  misc_RNA (1)...(19): siRNA sense strand
gaauuuagcuaagcaguuu

SEQ ID NO: 2474572 - RNA, 19 nt, Homo sapiens
  misc_RNA (1)...(19): siRNA sense strand
gaacauuccuuuuaaccua

SEQ ID NO: 2474573 - RNA, 19 nt, Homo sapiens
  misc_RNA (1)...(19): siRNA sense strand
ucagaugucuucaguauuu

SEQ ID NO: 2474574 - RNA, 19 nt, Homo sapiens
  misc_RNA (1)...(19): siRNA sense strand
caguuauuuaccagagauu

SEQ ID NO: 2474575 - RNA, 19 nt, Homo sapiens
  misc_RNA (1)...(19): siRNA sense strand
ccgagaagcaggugaggga

SEQ ID NO: 2474576 - RNA, 19 nt, Homo sapiens
  misc_RNA (1)...(19): siRNA sense strand
ccagaaguuuguaggcgaa

SEQ ID NO: 2474577 - RNA, 19 nt, Homo sapiens
  misc_RNA (1)...(19): siRNA sense strand
gggagcauaaggugggcua

SEQ ID NO: 2474578 - RNA, 19 nt, Homo sapiens
  misc_RNA (1)...(19): siRNA sense strand
augaaaaggauguggaguu

SEQ ID NO: 2474579 - RNA, 19 nt, Homo sapiens
  misc_RNA (1)...(19): siRNA sense strand
cuuugugggugcagagcau

SEQ ID NO: 2474580 - RNA, 19 nt, Homo sapiens
  misc_RNA (1)...(19): siRNA sense strand
uggccaaccaggugacgaa

SEQ ID NO: 2474581 - RNA, 19 nt, Homo sapiens
  misc_RNA (1)...(19): siRNA sense strand
guagauaucuccagcucca

SEQ ID NO: 2474582 - RNA, 19 nt, Homo sapiens
  misc_RNA (1)...(19): siRNA sense strand
cccagaaguuuguaggcga

SEQ ID NO: 2474583 - RNA, 19 nt, Homo sapiens
  misc_RNA (1)...(19): siRNA sense strand
ggccaauagccucaccaaa

SEQ ID NO: 2474584 - RNA, 19 nt, Homo sapiens
  misc_RNA (1)...(19): siRNA sense strand
agguggagauguacagcga

SEQ ID NO: 2474585 - RNA, 19 nt, Homo sapiens
  misc_RNA (1)...(19): siRNA sense strand
gugcacaagcgcagucaca

SEQ ID NO: 2474586 - RNA, 19 nt, Homo sapiens
  misc_RNA (1)...(19): siRNA sense strand
gaaaaggacgacagcguga

SEQ ID NO: 2474587 - RNA, 19 nt, Homo sapiens
  misc_RNA (1)...(19): siRNA sense strand
gggcuacugugaugggagu

SEQ ID NO: 2474588 - RNA, 19 nt, Homo sapiens
  misc_RNA (1)...(19): siRNA sense strand
guauuuaacaggaaccaga

SEQ ID NO: 2474589 - RNA, 19 nt, Homo sapiens
  misc_RNA (1)...(19): siRNA sense strand
gcaaggacgugguggccau

SEQ ID NO: 2474590 - RNA, 19 nt, Homo sapiens
  misc_RNA (1)...(19): siRNA sense strand
agucaggacaggaagacaa

SEQ ID NO: 2474591 - RNA, 19 nt, Homo sapiens
  misc_RNA (1)...(19): siRNA sense strand
cugagaaggaggaggagga

SEQ ID NO: 2474592 - RNA, 19 nt, Homo sapiens
  misc_RNA (1)...(19): siRNA sense strand
agaaggaggaggaggagga

SEQ ID NO: 2474593 - RNA, 19 nt, Homo sapiens
  misc_RNA (1)...(19): siRNA sense strand
cggugaucuuggauggcaa

SEQ ID NO: 2474594 - RNA, 19 nt, Homo sapiens
  misc_RNA (1)...(19): siRNA sense strand
gcgaagaggugggaagcga

SEQ ID NO: 2474595 - RNA, 19 nt, Homo sapiens
  misc_RNA (1)...(19): siRNA sense strand
ucacuaaggagcuaggcaa

SEQ ID NO: 2474596 - RNA, 19 nt, Homo sapiens
  misc_RNA (1)...(19): siRNA sense strand
aggaagacaagaagaagau

SEQ ID NO: 2474597 - RNA, 19 nt, Homo sapiens
  misc_RNA (1)...(19): siRNA sense strand
gaagcgagaccguggccaa

SEQ ID NO: 2474598 - RNA, 19 nt, Homo sapiens
  misc_RNA (1)...(19): siRNA sense strand
aagaagauuaagacagaga

SEQ ID NO: 2474599 - RNA, 19 nt, Homo sapiens
  misc_RNA (1)...(19): siRNA sense strand
ccaaggacuuugacagcga

SEQ ID NO: 2474600 - RNA, 19 nt, Homo sapiens
  misc_RNA (1)...(19): siRNA sense strand
gagacaggauggaagacca

SEQ ID NO: 2474601 - RNA, 19 nt, Homo sapiens
  misc_RNA (1)...(19): siRNA sense strand
cgggagagaguguggagga

SEQ ID NO: 2474602 - RNA, 19 nt, Homo sapiens
  misc_RNA (1)...(19): siRNA sense strand
agaaguggaaacagaaaca

SEQ ID NO: 2474603 - RNA, 19 nt, Homo sapiens
  misc_RNA (1)...(19): siRNA sense strand
agaagcgguuugugggaca

SEQ ID NO: 2474604 - RNA, 19 nt, Homo sapiens
  misc_RNA (1)...(19): siRNA sense strand
gggaugaagcccagaaccu

SEQ ID NO: 2474605 - RNA, 19 nt, Homo sapiens
  misc_RNA (1)...(19): siRNA sense strand
gcccaguggaggaagaaga

SEQ ID NO: 2474606 - RNA, 19 nt, Homo sapiens
  misc_RNA (1)...(19): siRNA sense strand
acgaaaaucccgacauaau

SEQ ID NO: 2474607 - RNA, 19 nt, Homo sapiens
  misc_RNA (1)...(19): siRNA sense strand
aguccaugggccugagcua

SEQ ID NO: 2474608 - RNA, 19 nt, Homo sapiens
  misc_RNA (1)...(19): siRNA sense strand
cguaagaagaagcgguuug

SEQ ID NO: 2474609 - RNA, 19 nt, Homo sapiens
  misc_RNA (1)...(19): siRNA sense strand
ggcaagaugcggaagagga

SEQ ID NO: 2474610 - RNA, 19 nt, Homo sapiens
  misc_RNA (1)...(19): siRNA sense strand
agaagaaagggcuccggaa

SEQ ID NO: 2474611 - RNA, 19 nt, Homo sapiens
  misc_RNA (1)...(19): siRNA sense strand
gggccaaggagauggaccu

SEQ ID NO: 2474612 - RNA, 19 nt, Homo sapiens
  misc_RNA (1)...(19): siRNA sense strand
cagaaggaccgcaaggcca

SEQ ID NO: 2474613 - RNA, 19 nt, Homo sapiens
  misc_RNA (1)...(19): siRNA sense strand
gcaucaugaagaaggggua

SEQ ID NO: 2474614 - RNA, 19 nt, Homo sapiens
  misc_RNA (1)...(19): siRNA sense strand
acacccauccagaggaaga

SEQ ID NO: 2474615 - RNA, 19 nt, Homo sapiens
  misc_RNA (1)...(19): siRNA sense strand
cagcacugcaggagaagca

SEQ ID NO: 2474616 - RNA, 19 nt, Homo sapiens
  misc_RNA (1)...(19): siRNA sense strand
cggaggacggcgaguuuga

SEQ ID NO: 2474617 - RNA, 19 nt, Homo sapiens
  misc_RNA (1)...(19): siRNA sense strand
gaagaggugggaagcgaga

SEQ ID NO: 2474618 - RNA, 19 nt, Homo sapiens
  misc_RNA (1)...(19): siRNA sense strand
gggucaaagaggagaagaa

SEQ ID NO: 2474619 - RNA, 19 nt, Homo sapiens
  misc_RNA (1)...(19): siRNA sense strand
uguccaaauugaagcgaaa

SEQ ID NO: 2474620 - RNA, 19 nt, Homo sapiens
  misc_RNA (1)...(19): siRNA sense strand
acgaacugauacagggaaa

SEQ ID NO: 2474621 - RNA, 19 nt, Homo sapiens
  misc_RNA (1)...(19): siRNA sense strand
augaggaaggugugagaua

SEQ ID NO: 2474622 - RNA, 19 nt, Homo sapiens
  misc_RNA (1)...(19): siRNA sense strand
aaauugaagcgaaaggaaa

SEQ ID NO: 2474623 - RNA, 19 nt, Homo sapiens
  misc_RNA (1)...(19): siRNA sense strand
aaguagaaccaauggauau

SEQ ID NO: 2474624 - RNA, 19 nt, Homo sapiens
  misc_RNA (1)...(19): siRNA sense strand
cagcagugguguuggcaga

SEQ ID NO: 2474625 - RNA, 19 nt, Homo sapiens
  misc_RNA (1)...(19): siRNA sense strand
ggcaacaaucaguggacaa

SEQ ID NO: 2474626 - RNA, 19 nt, Homo sapiens
  misc_RNA (1)...(19): siRNA sense strand
agugaaagaagaaguagaa

SEQ ID NO: 2474627 - RNA, 19 nt, Homo sapiens
  misc_RNA (1)...(19): siRNA sense strand
aaagaggagaagaaagcua

SEQ ID NO: 2474628 - RNA, 19 nt, Homo sapiens
  misc_RNA (1)...(19): siRNA sense strand
aggaaauagcuaaucagaa

SEQ ID NO: 2474629 - RNA, 19 nt, Homo sapiens
  misc_RNA (1)...(19): siRNA sense strand
gcuuaagguuuuagaucau

SEQ ID NO: 2474630 - RNA, 19 nt, Homo sapiens
  misc_RNA (1)...(19): siRNA sense strand
aauugaagcgaaaggaaaa

SEQ ID NO: 2474631 - RNA, 19 nt, Homo sapiens
  misc_RNA (1)...(19): siRNA sense strand
aagcauacuccggaagaaa

SEQ ID NO: 2474632 - RNA, 19 nt, Homo sapiens
  misc_RNA (1)...(19): siRNA sense strand
cagaagaaggugacaugau

SEQ ID NO: 2474633 - RNA, 19 nt, Homo sapiens
  misc_RNA (1)...(19): siRNA sense strand
gugcagacccacagccaga

SEQ ID NO: 2474634 - RNA, 19 nt, Homo sapiens
  misc_RNA (1)...(19): siRNA sense strand
ucaaaucagugaagccaga

SEQ ID NO: 2474635 - RNA, 19 nt, Homo sapiens
  misc_RNA (1)...(19): siRNA sense strand
aagugaaagaagaaguaga

SEQ ID NO: 2474636 - RNA, 19 nt, Homo sapiens
  misc_RNA (1)...(19): siRNA sense strand
auguccaguucuaaaguaa

SEQ ID NO: 2474637 - RNA, 19 nt, Homo sapiens
  misc_RNA (1)...(19): siRNA sense strand
gcacauaccuacaccccaa

SEQ ID NO: 2474638 - RNA, 19 nt, Homo sapiens
  misc_RNA (1)...(19): siRNA sense strand
cugaaauccacgugucuau

SEQ ID NO: 2474639 - RNA, 19 nt, Homo sapiens
  misc_RNA (1)...(19): siRNA sense strand
auggaaacccgaagugaca

SEQ ID NO: 2474640 - RNA, 19 nt, Homo sapiens
  misc_RNA (1)...(19): siRNA sense strand
gaaggugacaugauggaga

SEQ ID NO: 2474641 - RNA, 19 nt, Homo sapiens
  misc_RNA (1)...(19): siRNA sense strand
gcucaaggcuggaaagucc

SEQ ID NO: 2474642 - RNA, 19 nt, Homo sapiens
  misc_RNA (1)...(19): siRNA sense strand
ucauacaauggcucagaaa

SEQ ID NO: 2474643 - RNA, 19 nt, Homo sapiens
  misc_RNA (1)...(19): siRNA sense strand
aaucaacacacaagggcuu

SEQ ID NO: 2474644 - RNA, 19 nt, Homo sapiens
  misc_RNA (1)...(19): siRNA sense strand
gaugagaaguccacugcca

SEQ ID NO: 2474645 - RNA, 19 nt, Homo sapiens
  misc_RNA (1)...(19): siRNA sense strand
cccucaagcuucagccauu

SEQ ID NO: 2474646 - RNA, 19 nt, Homo sapiens
  misc_RNA (1)...(19): siRNA sense strand
acccacagccagagugcua

SEQ ID NO: 2474647 - RNA, 19 nt, Homo sapiens
  misc_RNA (1)...(19): siRNA sense strand
aaagcuaugcugcaggaaa

SEQ ID NO: 2474648 - RNA, 19 nt, Homo sapiens
  misc_RNA (1)...(19): siRNA sense strand
acaaaugugcaaaugucua

SEQ ID NO: 2474649 - RNA, 19 nt, Homo sapiens
  misc_RNA (1)...(19): siRNA sense strand
ucucaacagaagaagguga

SEQ ID NO: 2474650 - RNA, 19 nt, Homo sapiens
  misc_RNA (1)...(19): siRNA sense strand
ugaugaggaaggugugaga

SEQ ID NO: 2474651 - RNA, 19 nt, Homo sapiens
  misc_RNA (1)...(19): siRNA sense strand
cugcauuagggacgccaaa

SEQ ID NO: 2474652 - RNA, 19 nt, Homo sapiens
  misc_RNA (1)...(19): siRNA sense strand
uggccaacccuauuagcaa

SEQ ID NO: 2474653 - RNA, 19 nt, Homo sapiens
  misc_RNA (1)...(19): siRNA sense strand
aggagaagcaagagccugu

SEQ ID NO: 2474654 - RNA, 19 nt, Homo sapiens
  misc_RNA (1)...(19): siRNA sense strand
acgcaagcucccacaagua

SEQ ID NO: 2474655 - RNA, 19 nt, Homo sapiens
  misc_RNA (1)...(19): siRNA sense strand
aggaguauauugaugagga

SEQ ID NO: 2474656 - RNA, 19 nt, Homo sapiens
  misc_RNA (1)...(19): siRNA sense strand
ucaaagaggagaagaaagc

SEQ ID NO: 2474657 - RNA, 19 nt, Homo sapiens
  misc_RNA (1)...(19): siRNA sense strand
ugacuacaaaugugcaaau

SEQ ID NO: 2474658 - RNA, 19 nt, Homo sapiens
  misc_RNA (1)...(19): siRNA sense strand
ggauaauaugacugcgaaa

SEQ ID NO: 2474659 - RNA, 19 nt, Homo sapiens
  misc_RNA (1)...(19): siRNA sense strand
uggcauggauggaacacaa

SEQ ID NO: 2474660 - RNA, 19 nt, Homo sapiens
  misc_RNA (1)...(19): siRNA sense strand
aggaaaaucugcuaugaaa

SEQ ID NO: 2474661 - RNA, 19 nt, Homo sapiens
  misc_RNA (1)...(19): siRNA sense strand
caucaaauucuuagcuaga

SEQ ID NO: 2474662 - RNA, 19 nt, Homo sapiens
  misc_RNA (1)...(19): siRNA sense strand
gagaauguauauuuggaga

SEQ ID NO: 2474663 - RNA, 19 nt, Homo sapiens
  misc_RNA (1)...(19): siRNA sense strand
ggaaaaucugcuaugaaaa

SEQ ID NO: 2474664 - RNA, 19 nt, Homo sapiens
  misc_RNA (1)...(19): siRNA sense strand
ggauggacuaccugagaga

SEQ ID NO: 2474665 - RNA, 19 nt, Homo sapiens
  misc_RNA (1)...(19): siRNA sense strand
uaauauagcauugggacaa

SEQ ID NO: 2474666 - RNA, 19 nt, Homo sapiens
  misc_RNA (1)...(19): siRNA sense strand
auaaacauuuggauggcua

SEQ ID NO: 2474667 - RNA, 19 nt, Homo sapiens
  misc_RNA (1)...(19): siRNA sense strand
gguacuaggaggaaucaau

SEQ ID NO: 2474668 - RNA, 19 nt, Homo sapiens
  misc_RNA (1)...(19): siRNA sense strand
augaauaaguguacagaug

SEQ ID NO: 2474669 - RNA, 19 nt, Homo sapiens
  misc_RNA (1)...(19): siRNA sense strand
auaauauagcauugggaca

SEQ ID NO: 2474670 - RNA, 19 nt, Homo sapiens
  misc_RNA (1)...(19): siRNA sense strand
cagaaaagcaagugggaug

SEQ ID NO: 2474671 - RNA, 19 nt, Homo sapiens
  misc_RNA (1)...(19): siRNA sense strand
caacaaaggaugcucggau

SEQ ID NO: 2474672 - RNA, 19 nt, Homo sapiens
  misc_RNA (1)...(19): siRNA sense strand
cuuaaaucucucaaaggaa

SEQ ID NO: 2474673 - RNA, 19 nt, Homo sapiens
  misc_RNA (1)...(19): siRNA sense strand
gggaaucaaauaucgaaau

SEQ ID NO: 2474674 - RNA, 19 nt, Homo sapiens
  misc_RNA (1)...(19): siRNA sense strand
guguacagaugaggagcaa

SEQ ID NO: 2474675 - RNA, 19 nt, Homo sapiens
  misc_RNA (1)...(19): siRNA sense strand
gagaaggcuagaaagguuu

SEQ ID NO: 2474676 - RNA, 19 nt, Homo sapiens
  misc_RNA (1)...(19): siRNA sense strand
cauaaauguuggggagauu

SEQ ID NO: 2474677 - RNA, 19 nt, Homo sapiens
  misc_RNA (1)...(19): siRNA sense strand
aguugaagcacuaguuaca

SEQ ID NO: 2474678 - RNA, 19 nt, Homo sapiens
  misc_RNA (1)...(19): siRNA sense strand
cugauauuguucauaggaa

SEQ ID NO: 2474679 - RNA, 19 nt, Homo sapiens
  misc_RNA (1)...(19): siRNA sense strand
uaucgaaauaguuggauca

SEQ ID NO: 2474680 - RNA, 19 nt, Homo sapiens
  misc_RNA (1)...(19): siRNA sense strand
guauauuuggagaagucaa

SEQ ID NO: 2474681 - RNA, 19 nt, Homo sapiens
  misc_RNA (1)...(19): siRNA sense strand
gagucauugguuacaaaua

SEQ ID NO: 2474682 - RNA, 19 nt, Homo sapiens
  misc_RNA (1)...(19): siRNA sense strand
aggcuagaaagguuugaua

SEQ ID NO: 2474683 - RNA, 19 nt, Homo sapiens
  misc_RNA (1)...(19): siRNA sense strand
cgaaauaguuggaucaagg

SEQ ID NO: 2474684 - RNA, 19 nt, Homo sapiens
  misc_RNA (1)...(19): siRNA sense strand
gugaauguguuauacguca

SEQ ID NO: 2474685 - RNA, 19 nt, Homo sapiens
  misc_RNA (1)...(19): siRNA sense strand
aaaugauuccucuguguaa

SEQ ID NO: 2474686 - RNA, 19 nt, Homo sapiens
  misc_RNA (1)...(19): siRNA sense strand
auggacuaccugagagaau

SEQ ID NO: 2474687 - RNA, 19 nt, Homo sapiens
  misc_RNA (1)...(19): siRNA sense strand
guuacagaagcauggagaa

SEQ ID NO: 2474688 - RNA, 19 nt, Homo sapiens
  misc_RNA (1)...(19): siRNA sense strand
cugcgaaacaacugaaacu

SEQ ID NO: 2474689 - RNA, 19 nt, Homo sapiens
  misc_RNA (1)...(19): siRNA sense strand
gaagaucugcuaaaggcaa

SEQ ID NO: 2474690 - RNA, 19 nt, Homo sapiens
  misc_RNA (1)...(19): siRNA sense strand
gagauauggaaagcagaaa

SEQ ID NO: 2474691 - RNA, 19 nt, Homo sapiens
  misc_RNA (1)...(19): siRNA sense strand
auaauaugacugcgaaaca

SEQ ID NO: 2474692 - RNA, 19 nt, Homo sapiens
  misc_RNA (1)...(19): siRNA sense strand
ucuaagagcuauuugucca

SEQ ID NO: 2474693 - RNA, 19 nt, Homo sapiens
  misc_RNA (1)...(19): siRNA sense strand
gggacaacuaccagaaaug

SEQ ID NO: 2474694 - RNA, 19 nt, Homo sapiens
  misc_RNA (1)...(19): siRNA sense strand
caacaacugaugaacaaaa

SEQ ID NO: 2474695 - RNA, 19 nt, Homo sapiens
  misc_RNA (1)...(19): siRNA sense strand
guuuggaucuguuacggaa

SEQ ID NO: 2474696 - RNA, 19 nt, Homo sapiens
  misc_RNA (1)...(19): siRNA sense strand
cuuggaaugcccugaguuu

SEQ ID NO: 2474697 - RNA, 19 nt, Homo sapiens
  misc_RNA (1)...(19): siRNA sense strand
uggaaugcccugaguuuca

SEQ ID NO: 2474698 - RNA, 19 nt, Homo sapiens
  misc_RNA (1)...(19): siRNA sense strand
ugggaaucaaauaucgaaa

SEQ ID NO: 2474699 - RNA, 19 nt, Homo sapiens
  misc_RNA (1)...(19): siRNA sense strand
cuaccugagagaauguaua

SEQ ID NO: 2474700 - RNA, 19 nt, Homo sapiens
  misc_RNA (1)...(19): siRNA sense strand
cuucaguucugcauaaaca

SEQ ID NO: 2474701 - RNA, 19 nt, Homo sapiens
  misc_RNA (1)...(19): siRNA sense strand
cgucagagacuacaacaca

SEQ ID NO: 2474702 - RNA, 19 nt, Homo sapiens
  misc_RNA (1)...(19): siRNA sense strand
guuucagauuccaugguuu

SEQ ID NO: 2474703 - RNA, 19 nt, Homo sapiens
  misc_RNA (1)...(19): siRNA sense strand
ggcuagaaagguuugauau

SEQ ID NO: 2474704 - RNA, 19 nt, Homo sapiens
  misc_RNA (1)...(19): siRNA sense strand
gagcaaugggagauaugga

SEQ ID NO: 2474705 - RNA, 19 nt, Homo sapiens
  misc_RNA (1)...(19): siRNA sense strand
agaaaugcccugggaauca

SEQ ID NO: 2474706 - RNA, 19 nt, Homo sapiens
  misc_RNA (1)...(19): siRNA sense strand
uuugcgaaacuuagagaau

SEQ ID NO: 2474707 - RNA, 19 nt, Homo sapiens
  misc_RNA (1)...(19): siRNA sense strand
cuugaagaaaugauugcua

SEQ ID NO: 2474708 - RNA, 19 nt, Homo sapiens
  misc_RNA (1)...(19): siRNA sense strand
gaauggaacucuauggcac

SEQ ID NO: 2474709 - RNA, 19 nt, Homo sapiens
  misc_RNA (1)...(19): siRNA sense strand
uuacaggaaaccagagaaa

SEQ ID NO: 2474710 - RNA, 19 nt, Homo sapiens
  misc_RNA (1)...(19): siRNA sense strand
gcaagagccuggaagguca

SEQ ID NO: 2474711 - RNA, 19 nt, Homo sapiens
  misc_RNA (1)...(19): siRNA sense strand
gugagaaaucagaggaugu

SEQ ID NO: 2474712 - RNA, 19 nt, Homo sapiens
  misc_RNA (1)...(19): siRNA sense strand
gggacgacgacgugcagua

SEQ ID NO: 2474713 - RNA, 19 nt, Homo sapiens
  misc_RNA (1)...(19): siRNA sense strand
gugcaguaccugacggaca

SEQ ID NO: 2474714 - RNA, 19 nt, Homo sapiens
  misc_RNA (1)...(19): siRNA sense strand
gagaaaucgcuguagcaca

SEQ ID NO: 2474715 - RNA, 19 nt, Homo sapiens
  misc_RNA (1)...(19): siRNA sense strand
uggcaaagguuuauagcac

SEQ ID NO: 2474716 - RNA, 19 nt, Homo sapiens
  misc_RNA (1)...(19): siRNA sense strand
ccgacaggucugagcauga

SEQ ID NO: 2474717 - RNA, 19 nt, Homo sapiens
  misc_RNA (1)...(19): siRNA sense strand
uggauuuaauugaagccaa

SEQ ID NO: 2474718 - RNA, 19 nt, Homo sapiens
  misc_RNA (1)...(19): siRNA sense strand
ccaccgaggaccagaaaau

SEQ ID NO: 2474719 - RNA, 19 nt, Homo sapiens
  misc_RNA (1)...(19): siRNA sense strand
aggccauggagguggucaa

SEQ ID NO: 2474720 - RNA, 19 nt, Homo sapiens
  misc_RNA (1)...(19): siRNA sense strand
acaggaaaccagagaaauc

SEQ ID NO: 2474721 - RNA, 19 nt, Homo sapiens
  misc_RNA (1)...(19): siRNA sense strand
gcaugaaggacgugggcag

SEQ ID NO: 2474722 - RNA, 19 nt, Homo sapiens
  misc_RNA (1)...(19): siRNA sense strand
ggguauuuaagaugagcuu

SEQ ID NO: 2474723 - RNA, 19 nt, Homo sapiens
  misc_RNA (1)...(19): siRNA sense strand
gcauuguauaugaugagaa

SEQ ID NO: 2474724 - RNA, 19 nt, Homo sapiens
  misc_RNA (1)...(19): siRNA sense strand
ggauuuaauugaagccaag

SEQ ID NO: 2474725 - RNA, 19 nt, Homo sapiens
  misc_RNA (1)...(19): siRNA sense strand
augauggagugcugggaca

SEQ ID NO: 2474726 - RNA, 19 nt, Homo sapiens
  misc_RNA (1)...(19): siRNA sense strand
agaugaaggacccgacuuu

SEQ ID NO: 2474727 - RNA, 19 nt, Homo sapiens
  misc_RNA (1)...(19): siRNA sense strand
ugcucaacaucgaggccaa

SEQ ID NO: 2474728 - RNA, 19 nt, Homo sapiens
  misc_RNA (1)...(19): siRNA sense strand
agacggaagagcaguacuu

SEQ ID NO: 2474729 - RNA, 19 nt, Homo sapiens
  misc_RNA (1)...(19): siRNA sense strand
ccgaugggcuuguggcugu

SEQ ID NO: 2474730 - RNA, 19 nt, Homo sapiens
  misc_RNA (1)...(19): siRNA sense strand
uggagcagcugguggagca

SEQ ID NO: 2474731 - RNA, 19 nt, Homo sapiens
  misc_RNA (1)...(19): siRNA sense strand
augaugagaagguagauau

SEQ ID NO: 2474732 - RNA, 19 nt, Homo sapiens
  misc_RNA (1)...(19): siRNA sense strand
cagugagaaaucagaggau

SEQ ID NO: 2474733 - RNA, 19 nt, Homo sapiens
  misc_RNA (1)...(19): siRNA sense strand
cuuaaaagcccgagagcug

SEQ ID NO: 2474734 - RNA, 19 nt, Homo sapiens
  misc_RNA (1)...(19): siRNA sense strand
ccuucaaacacuuacauga

SEQ ID NO: 2474735 - RNA, 19 nt, Homo sapiens
  misc_RNA (1)...(19): siRNA sense strand
gaucagagcagaagaccuc

SEQ ID NO: 2474736 - RNA, 19 nt, Homo sapiens
  misc_RNA (1)...(19): siRNA sense strand
gggcuaccucaguguggaa

SEQ ID NO: 2474737 - RNA, 19 nt, Homo sapiens
  misc_RNA (1)...(19): siRNA sense strand
caaucagaagugagggacu

SEQ ID NO: 2474738 - RNA, 19 nt, Homo sapiens
  misc_RNA (1)...(19): siRNA sense strand
augaaaaggccaagagaaa

SEQ ID NO: 2474739 - RNA, 19 nt, Homo sapiens
  misc_RNA (1)...(19): siRNA sense strand
cgauauacaagauggcaaa

SEQ ID NO: 2474740 - RNA, 19 nt, Homo sapiens
  misc_RNA (1)...(19): siRNA sense strand
cagaaauagcagauggcaa

SEQ ID NO: 2474741 - RNA, 19 nt, Homo sapiens
  misc_RNA (1)...(19): siRNA sense strand
cggugaaagaccagaggaa

SEQ ID NO: 2474742 - RNA, 19 nt, Homo sapiens
  misc_RNA (1)...(19): siRNA sense strand
cugcaaguugagagggaaa

SEQ ID NO: 2474743 - RNA, 19 nt, Homo sapiens
  misc_RNA (1)...(19): siRNA sense strand
gugacaagcccgagagcau

SEQ ID NO: 2474744 - RNA, 19 nt, Homo sapiens
  misc_RNA (1)...(19): siRNA sense strand
cuucugaacaggagagcaa

SEQ ID NO: 2474745 - RNA, 19 nt, Homo sapiens
  misc_RNA (1)...(19): siRNA sense strand
uggcaauaucggugaaaga

SEQ ID NO: 2474746 - RNA, 19 nt, Homo sapiens
  misc_RNA (1)...(19): siRNA sense strand
cgacauacucauaggucuu

SEQ ID NO: 2474747 - RNA, 19 nt, Homo sapiens
  misc_RNA (1)...(19): siRNA sense strand
aggaaaaggaacagaaaca

SEQ ID NO: 2474748 - RNA, 19 nt, Homo sapiens
  misc_RNA (1)...(19): siRNA sense strand
uggcgugggugcagaggaa

SEQ ID NO: 2474749 - RNA, 19 nt, Homo sapiens
  misc_RNA (1)...(19): siRNA sense strand
ggaagauagcaauguaaaa

SEQ ID NO: 2474750 - RNA, 19 nt, Homo sapiens
  misc_RNA (1)...(19): siRNA sense strand
agaagaagcugaaggcugu

SEQ ID NO: 2474751 - RNA, 19 nt, Homo sapiens
  misc_RNA (1)...(19): siRNA sense strand
aagagacaccaguggauaa

SEQ ID NO: 2474752 - RNA, 19 nt, Homo sapiens
  misc_RNA (1)...(19): siRNA sense strand
auuaugaggaagagggaga

SEQ ID NO: 2474753 - RNA, 19 nt, Homo sapiens
  misc_RNA (1)...(19): siRNA sense strand
aguugagguugcugaggaa

SEQ ID NO: 2474754 - RNA, 19 nt, Homo sapiens
  misc_RNA (1)...(19): siRNA sense strand
gaggaaaacgagaaaguau

SEQ ID NO: 2474755 - RNA, 19 nt, Homo sapiens
  misc_RNA (1)...(19): siRNA sense strand
ggccaacagcucaggagaa

SEQ ID NO: 2474756 - RNA, 19 nt, Homo sapiens
  misc_RNA (1)...(19): siRNA sense strand
aguuggaagccgaagauau

SEQ ID NO: 2474757 - RNA, 19 nt, Homo sapiens
  misc_RNA (1)...(19): siRNA sense strand
aagcuuuagaggagggaga

SEQ ID NO: 2474758 - RNA, 19 nt, Homo sapiens
  misc_RNA (1)...(19): siRNA sense strand
aggaagagggagaagacga

SEQ ID NO: 2474759 - RNA, 19 nt, Homo sapiens
  misc_RNA (1)...(19): siRNA sense strand
agaaauagcagauggcaac

SEQ ID NO: 2474760 - RNA, 19 nt, Homo sapiens
  misc_RNA (1)...(19): siRNA sense strand
cccgagagcaugaaggaau

SEQ ID NO: 2474761 - RNA, 19 nt, Homo sapiens
  misc_RNA (1)...(19): siRNA sense strand
gaagaagacaguagcgacu

SEQ ID NO: 2474762 - RNA, 19 nt, Homo sapiens
  misc_RNA (1)...(19): siRNA sense strand
cugacaaggucgcugguga

SEQ ID NO: 2474763 - RNA, 19 nt, Homo sapiens
  misc_RNA (1)...(19): siRNA sense strand
ccagguaagaccagcgaca

SEQ ID NO: 2474764 - RNA, 19 nt, Homo sapiens
  misc_RNA (1)...(19): siRNA sense strand
caaaggaaucauugaggca

SEQ ID NO: 2474765 - RNA, 19 nt, Homo sapiens
  misc_RNA (1)...(19): siRNA sense strand
uagaagacccggaggaucu

SEQ ID NO: 2474766 - RNA, 19 nt, Homo sapiens
  misc_RNA (1)...(19): siRNA sense strand
gaccuuuacacgauggaua

SEQ ID NO: 2474767 - RNA, 19 nt, Homo sapiens
  misc_RNA (1)...(19): siRNA sense strand
agccagaggugcaugaaaa

SEQ ID NO: 2474768 - RNA, 19 nt, Homo sapiens
  misc_RNA (1)...(19): siRNA sense strand
uggaagauagcaauguaaa

SEQ ID NO: 2474769 - RNA, 19 nt, Homo sapiens
  misc_RNA (1)...(19): siRNA sense strand
gagaagaagcugaaggcug

SEQ ID NO: 2474770 - RNA, 19 nt, Homo sapiens
  misc_RNA (1)...(19): siRNA sense strand
ucgauauacaagauggcaa

SEQ ID NO: 2474771 - RNA, 19 nt, Homo sapiens
  misc_RNA (1)...(19): siRNA sense strand
ccucaaaauuuaacagcga

SEQ ID NO: 2474772 - RNA, 19 nt, Homo sapiens
  misc_RNA (1)...(19): siRNA sense strand
ccucagaugaccuagaaga

SEQ ID NO: 2474773 - RNA, 19 nt, Homo sapiens
  misc_RNA (1)...(19): siRNA sense strand
gcgugggugcagaggaaaa

SEQ ID NO: 2474774 - RNA, 19 nt, Homo sapiens
  misc_RNA (1)...(19): siRNA sense strand
aagggagaccaaagagaau

SEQ ID NO: 2474775 - RNA, 19 nt, Homo sapiens
  misc_RNA (1)...(19): siRNA sense strand
cagagaggagcguggcaau

SEQ ID NO: 2474776 - RNA, 19 nt, Homo sapiens
  misc_RNA (1)...(19): siRNA sense strand
uguagaagcuuuagaggag

SEQ ID NO: 2474777 - RNA, 19 nt, Homo sapiens
  misc_RNA (1)...(19): siRNA sense strand
ccucaaguuaagauggaca

SEQ ID NO: 2474778 - RNA, 19 nt, Homo sapiens
  misc_RNA (1)...(19): siRNA sense strand
cugcaguuuuggaggcuua

SEQ ID NO: 2474779 - RNA, 19 nt, Homo sapiens
  misc_RNA (1)...(19): siRNA sense strand
gggagaccaaagagaauga

SEQ ID NO: 2474780 - RNA, 19 nt, Homo sapiens
  misc_RNA (1)...(19): siRNA sense strand
uuaaggagcucacaggcaa

SEQ ID NO: 2474781 - RNA, 19 nt, Homo sapiens
  misc_RNA (1)...(19): siRNA sense strand
acgaggaugcugaggcuuu

SEQ ID NO: 2474782 - RNA, 19 nt, Homo sapiens
  misc_RNA (1)...(19): siRNA sense strand
agacaaaaccugacgagga

SEQ ID NO: 2474783 - RNA, 19 nt, Homo sapiens
  misc_RNA (1)...(19): siRNA sense strand
gggugugggcgaggaauua

SEQ ID NO: 2474784 - RNA, 19 nt, Homo sapiens
  misc_RNA (1)...(19): siRNA sense strand
aagaaauggaucucgaaga

SEQ ID NO: 2474785 - RNA, 19 nt, Homo sapiens
  misc_RNA (1)...(19): siRNA sense strand
ccucuagaaguuaaagauu

SEQ ID NO: 2474786 - RNA, 19 nt, Homo sapiens
  misc_RNA (1)...(19): siRNA sense strand
acgaugaccuccagggugu

SEQ ID NO: 2474787 - RNA, 19 nt, Homo sapiens
  misc_RNA (1)...(19): siRNA sense strand
aaaggaaacauguggacca

SEQ ID NO: 2474788 - RNA, 19 nt, Homo sapiens
  misc_RNA (1)...(19): siRNA sense strand
agcgaaagcacuuaaguuu

SEQ ID NO: 2474789 - RNA, 19 nt, Homo sapiens
  misc_RNA (1)...(19): siRNA sense strand
auguaaaacugguuagcau

SEQ ID NO: 2474790 - RNA, 19 nt, Homo sapiens
  misc_RNA (1)...(19): siRNA sense strand
ccaccgaguucaugcacca

SEQ ID NO: 2474791 - RNA, 19 nt, Homo sapiens
  misc_RNA (1)...(19): siRNA sense strand
cccaagaguggcaaaggaa

SEQ ID NO: 2474792 - RNA, 19 nt, Homo sapiens
  misc_RNA (1)...(19): siRNA sense strand
caauaucggugaaagacca

SEQ ID NO: 2474793 - RNA, 19 nt, Homo sapiens
  misc_RNA (1)...(19): siRNA sense strand
gugcagaggaaaacgagaa

SEQ ID NO: 2474794 - RNA, 19 nt, Homo sapiens
  misc_RNA (1)...(19): siRNA sense strand
cagauaaagaaguuccuau

SEQ ID NO: 2474795 - RNA, 19 nt, Homo sapiens
  misc_RNA (1)...(19): siRNA sense strand
ccaagaguggcaaaggaau

SEQ ID NO: 2474796 - RNA, 19 nt, Homo sapiens
  misc_RNA (1)...(19): siRNA sense strand
guauuaaaucugcucacaa

SEQ ID NO: 2474797 - RNA, 19 nt, Homo sapiens
  misc_RNA (1)...(19): siRNA sense strand
gugaaagaccagaggaagg

SEQ ID NO: 2474798 - RNA, 19 nt, Homo sapiens
  misc_RNA (1)...(19): siRNA sense strand
gcgacauccgagugcagaa

SEQ ID NO: 2474799 - RNA, 19 nt, Homo sapiens
  misc_RNA (1)...(19): siRNA sense strand
ccugaugacuguagaagcu

SEQ ID NO: 2474800 - RNA, 19 nt, Homo sapiens
  misc_RNA (1)...(19): siRNA sense strand
gggaaaaugugcagaagag

SEQ ID NO: 2474801 - RNA, 19 nt, Homo sapiens
  misc_RNA (1)...(19): siRNA sense strand
cauugaggcaggauggaca

SEQ ID NO: 2474802 - RNA, 19 nt, Homo sapiens
  misc_RNA (1)...(19): siRNA sense strand
cuguagaagcuuuagagga

SEQ ID NO: 2474803 - RNA, 19 nt, Homo sapiens
  misc_RNA (1)...(19): siRNA sense strand
cuagguaaaaggaguauua

SEQ ID NO: 2474804 - RNA, 19 nt, Homo sapiens
  misc_RNA (1)...(19): siRNA sense strand
gaaaaggccaagagaaagu

SEQ ID NO: 2474805 - RNA, 19 nt, Homo sapiens
  misc_RNA (1)...(19): siRNA sense strand
ggaacagccugaaccgcaa

SEQ ID NO: 2474806 - RNA, 19 nt, Homo sapiens
  misc_RNA (1)...(19): siRNA sense strand
gcacugaggucuugcugga

SEQ ID NO: 2474807 - RNA, 19 nt, Homo sapiens
  misc_RNA (1)...(19): siRNA sense strand
agaccaagaaguugcucaa

SEQ ID NO: 2474808 - RNA, 19 nt, Homo sapiens
  misc_RNA (1)...(19): siRNA sense strand
cgacauaaaucgcaagguc

SEQ ID NO: 2474809 - RNA, 19 nt, Homo sapiens
  misc_RNA (1)...(19): siRNA sense strand
aaggagaugaugaaggaga

SEQ ID NO: 2474810 - RNA, 19 nt, Homo sapiens
  misc_RNA (1)...(19): siRNA sense strand
cugaggucuugcuggagaa

SEQ ID NO: 2474811 - RNA, 19 nt, Homo sapiens
  misc_RNA (1)...(19): siRNA sense strand
aggcaagagcucagugauc

SEQ ID NO: 2474812 - RNA, 19 nt, Homo sapiens
  misc_RNA (1)...(19): siRNA sense strand
gcaagagcucagugaucca

SEQ ID NO: 2474813 - RNA, 19 nt, Homo sapiens
  misc_RNA (1)...(19): siRNA sense strand
caucuuuggaacagugauu

SEQ ID NO: 2474814 - RNA, 19 nt, Homo sapiens
  misc_RNA (1)...(19): siRNA sense strand
ccgcaauggaaacguccua

SEQ ID NO: 2474815 - RNA, 19 nt, Homo sapiens
  misc_RNA (1)...(19): siRNA sense strand
ugggauugacagagaaacu

SEQ ID NO: 2474816 - RNA, 19 nt, Homo sapiens
  misc_RNA (1)...(19): siRNA sense strand
uggccguguuugagaacca

SEQ ID NO: 2474817 - RNA, 19 nt, Homo sapiens
  misc_RNA (1)...(19): siRNA sense strand
cuggcaacaacauggacaa

SEQ ID NO: 2474818 - RNA, 19 nt, Homo sapiens
  misc_RNA (1)...(19): siRNA sense strand
aagcaaagccagagacaaa

SEQ ID NO: 2474819 - RNA, 19 nt, Homo sapiens
  misc_RNA (1)...(19): siRNA sense strand
gcuaaaagaacaaggaaaa

SEQ ID NO: 2474820 - RNA, 19 nt, Homo sapiens
  misc_RNA (1)...(19): siRNA sense strand
aagaaaagaaagaggguua

SEQ ID NO: 2474821 - RNA, 19 nt, Homo sapiens
  misc_RNA (1)...(19): siRNA sense strand
aguuuagucuugagaguaa

SEQ ID NO: 2474822 - RNA, 19 nt, Homo sapiens
  misc_RNA (1)...(19): siRNA sense strand
gaguuuaagacaaaggaaa

SEQ ID NO: 2474823 - RNA, 19 nt, Homo sapiens
  misc_RNA (1)...(19): siRNA sense strand
uuuaaagcauccagagaaa

SEQ ID NO: 2474824 - RNA, 19 nt, Homo sapiens
  misc_RNA (1)...(19): siRNA sense strand
gggaaacacucaaaagaaa

SEQ ID NO: 2474825 - RNA, 19 nt, Homo sapiens
  misc_RNA (1)...(19): siRNA sense strand
cagugaacuuauaggaaau

SEQ ID NO: 2474826 - RNA, 19 nt, Homo sapiens
  misc_RNA (1)...(19): siRNA sense strand
gauuagaaguggaggugga

SEQ ID NO: 2474827 - RNA, 19 nt, Homo sapiens
  misc_RNA (1)...(19): siRNA sense strand
gaagacacaauuagggaaa

SEQ ID NO: 2474828 - RNA, 19 nt, Homo sapiens
  misc_RNA (1)...(19): siRNA sense strand
acagaaaccauuagaggua

SEQ ID NO: 2474829 - RNA, 19 nt, Homo sapiens
  misc_RNA (1)...(19): siRNA sense strand
caacaaagacuguacgaca

SEQ ID NO: 2474830 - RNA, 19 nt, Homo sapiens
  misc_RNA (1)...(19): siRNA sense strand
ccacaaaugagaagacaca

SEQ ID NO: 2474831 - RNA, 19 nt, Homo sapiens
  misc_RNA (1)...(19): siRNA sense strand
aggaaacaauccagagaca

SEQ ID NO: 2474832 - RNA, 19 nt, Homo sapiens
  misc_RNA (1)...(19): siRNA sense strand
aggaaaugaguuagcuaua

SEQ ID NO: 2474833 - RNA, 19 nt, Homo sapiens
  misc_RNA (1)...(19): siRNA sense strand
ggccaacaggagugggaaa

SEQ ID NO: 2474834 - RNA, 19 nt, Homo sapiens
  misc_RNA (1)...(19): siRNA sense strand
gaggaaauuagguggucaa

SEQ ID NO: 2474835 - RNA, 19 nt, Homo sapiens
  misc_RNA (1)...(19): siRNA sense strand
gagaagaccaauaggaagu

SEQ ID NO: 2474836 - RNA, 19 nt, Homo sapiens
  misc_RNA (1)...(19): siRNA sense strand
cgaagaaagcaaagccaga

SEQ ID NO: 2474837 - RNA, 19 nt, Homo sapiens
  misc_RNA (1)...(19): siRNA sense strand
gaaauuaggaagagaucca

SEQ ID NO: 2474838 - RNA, 19 nt, Homo sapiens
  misc_RNA (1)...(19): siRNA sense strand
agggaaagagugcaagaua

SEQ ID NO: 2474839 - RNA, 19 nt, Homo sapiens
  misc_RNA (1)...(19): siRNA sense strand
gacugaagaaauagcgaua

SEQ ID NO: 2474840 - RNA, 19 nt, Homo sapiens
  misc_RNA (1)...(19): siRNA sense strand
ccggagacgaagaaagcaa

SEQ ID NO: 2474841 - RNA, 19 nt, Homo sapiens
  misc_RNA (1)...(19): siRNA sense strand
ccaccaaaaccuaguaaua

SEQ ID NO: 2474842 - RNA, 19 nt, Homo sapiens
  misc_RNA (1)...(19): siRNA sense strand
aaggaaaugcagagaugua

SEQ ID NO: 2474843 - RNA, 19 nt, Homo sapiens
  misc_RNA (1)...(19): siRNA sense strand
cgugaaggacugcgagauu

SEQ ID NO: 2474844 - RNA, 19 nt, Homo sapiens
  misc_RNA (1)...(19): siRNA sense strand
ggguguuguuuguggcauu

SEQ ID NO: 2474845 - RNA, 19 nt, Homo sapiens
  misc_RNA (1)...(19): siRNA sense strand
cagaauuaguacucccaaa

SEQ ID NO: 2474846 - RNA, 19 nt, Homo sapiens
  misc_RNA (1)...(19): siRNA sense strand
auuagaaaggcaagcaaua

SEQ ID NO: 2474847 - RNA, 19 nt, Homo sapiens
  misc_RNA (1)...(19): siRNA sense strand
aagcaaaaccggagacgaa

SEQ ID NO: 2474848 - RNA, 19 nt, Homo sapiens
  misc_RNA (1)...(19): siRNA sense strand
gguaaagauacuaaacaga

SEQ ID NO: 2474849 - RNA, 19 nt, Homo sapiens
  misc_RNA (1)...(19): siRNA sense strand
auacuaaacagauggagaa

SEQ ID NO: 2474850 - RNA, 19 nt, Homo sapiens
  misc_RNA (1)...(19): siRNA sense strand
aacaagaacuggaggcuga

SEQ ID NO: 2474851 - RNA, 19 nt, Homo sapiens
  misc_RNA (1)...(19): siRNA sense strand
uggaaauagcagaaaugua

SEQ ID NO: 2474852 - RNA, 19 nt, Homo sapiens
  misc_RNA (1)...(19): siRNA sense strand
gcaagaaauuaggaagaga

SEQ ID NO: 2474853 - RNA, 19 nt, Homo sapiens
  misc_RNA (1)...(19): siRNA sense strand
aggaauucaucuugacauu

SEQ ID NO: 2474854 - RNA, 19 nt, Homo sapiens
  misc_RNA (1)...(19): siRNA sense strand
gaguaaugauggauggacu

SEQ ID NO: 2474855 - RNA, 19 nt, Homo sapiens
  misc_RNA (1)...(19): siRNA sense strand
cauuagagguauugauucu

SEQ ID NO: 2474856 - RNA, 19 nt, Homo sapiens
  misc_RNA (1)...(19): siRNA sense strand
cugacgauguacaagauaa

SEQ ID NO: 2474857 - RNA, 19 nt, Homo sapiens
  misc_RNA (1)...(19): siRNA sense strand
caauaggaagucagaagaa

SEQ ID NO: 2474858 - RNA, 19 nt, Homo sapiens
  misc_RNA (1)...(19): siRNA sense strand
ggagcuuggauuuaagaua

SEQ ID NO: 2474859 - RNA, 19 nt, Homo sapiens
  misc_RNA (1)...(19): siRNA sense strand
gauacuaaacagauggaga

SEQ ID NO: 2474860 - RNA, 19 nt, Homo sapiens
  misc_RNA (1)...(19): siRNA sense strand
agucagaagaacuuagcaa

SEQ ID NO: 2474861 - RNA, 19 nt, Homo sapiens
  misc_RNA (1)...(19): siRNA sense strand
aaagaagauuccugcacua

SEQ ID NO: 2474862 - RNA, 19 nt, Homo sapiens
  misc_RNA (1)...(19): siRNA sense strand
cagcuuauauacagcagaa

SEQ ID NO: 2474863 - RNA, 19 nt, Homo sapiens
  misc_RNA (1)...(19): siRNA sense strand
ugaaagcagucaagauaca

SEQ ID NO: 2474864 - RNA, 19 nt, Homo sapiens
  misc_RNA (1)...(19): siRNA sense strand
uaggaaugcuucuggaaaa

SEQ ID NO: 2474865 - RNA, 19 nt, Homo sapiens
  misc_RNA (1)...(19): siRNA sense strand
ggagaauacuacaagccau

SEQ ID NO: 2474866 - RNA, 19 nt, Homo sapiens
  misc_RNA (1)...(19): siRNA sense strand
cugaaacugucgacgaaau

SEQ ID NO: 2474867 - RNA, 19 nt, Homo sapiens
  misc_RNA (1)...(19): siRNA sense strand
ucuagaagaaagacagcaa

SEQ ID NO: 2474868 - RNA, 19 nt, Homo sapiens
  misc_RNA (1)...(19): siRNA sense strand
gaauugucuugcuaggaaa

SEQ ID NO: 2474869 - RNA, 19 nt, Homo sapiens
  misc_RNA (1)...(19): siRNA sense strand
ugaaguaggaagagaugau

SEQ ID NO: 2474870 - RNA, 19 nt, Homo sapiens
  misc_RNA (1)...(19): siRNA sense strand
agaagaucuggaagaauua

SEQ ID NO: 2474871 - RNA, 19 nt, Homo sapiens
  misc_RNA (1)...(19): siRNA sense strand
gaugucagccauaaagaaa

SEQ ID NO: 2474872 - RNA, 19 nt, Homo sapiens
  misc_RNA (1)...(19): siRNA sense strand
acaaaugagaagacacaau

SEQ ID NO: 2474873 - RNA, 19 nt, Homo sapiens
  misc_RNA (1)...(19): siRNA sense strand
augcagagauguaguagau

SEQ ID NO: 2474874 - RNA, 19 nt, Homo sapiens
  misc_RNA (1)...(19): siRNA sense strand
agaaauugucagaaacaga

SEQ ID NO: 2474875 - RNA, 19 nt, Homo sapiens
  misc_RNA (1)...(19): siRNA sense strand
gcaccaacguccugggcau

SEQ ID NO: 2474876 - RNA, 19 nt, Homo sapiens
  misc_RNA (1)...(19): siRNA sense strand
agaccaaguacgaugcaaa

SEQ ID NO: 2474877 - RNA, 19 nt, Homo sapiens
  misc_RNA (1)...(19): siRNA sense strand
ccaaaagaaucauggucau

SEQ ID NO: 2474878 - RNA, 19 nt, Homo sapiens
  misc_RNA (1)...(19): siRNA sense strand
aaggagaagcagagcacca

SEQ ID NO: 2474879 - RNA, 19 nt, Homo sapiens
  misc_RNA (1)...(19): siRNA sense strand
gcgacuugaccuacgucua

SEQ ID NO: 2474880 - RNA, 19 nt, Homo sapiens
  misc_RNA (1)...(19): siRNA sense strand
agaaagaugaagaggacaa

SEQ ID NO: 2474881 - RNA, 19 nt, Homo sapiens
  misc_RNA (1)...(19): siRNA sense strand
gaauuuaaggagaugggaa

SEQ ID NO: 2474882 - RNA, 19 nt, Homo sapiens
  misc_RNA (1)...(19): siRNA sense strand
aauuuaaggagaugggaau

SEQ ID NO: 2474883 - RNA, 19 nt, Homo sapiens
  misc_RNA (1)...(19): siRNA sense strand
ccaucuuagcagagaauga

SEQ ID NO: 2474884 - RNA, 19 nt, Homo sapiens
  misc_RNA (1)...(19): siRNA sense strand
caaagaaagaugaagagga

SEQ ID NO: 2474885 - RNA, 19 nt, Homo sapiens
  misc_RNA (1)...(19): siRNA sense strand
gagacaggaaugggagaaa

SEQ ID NO: 2474886 - RNA, 19 nt, Homo sapiens
  misc_RNA (1)...(19): siRNA sense strand
ccgaagaaggguggagcua

SEQ ID NO: 2474887 - RNA, 19 nt, Homo sapiens
  misc_RNA (1)...(19): siRNA sense strand
ggaucgaauaugaugaaga

SEQ ID NO: 2474888 - RNA, 19 nt, Homo sapiens
  misc_RNA (1)...(19): siRNA sense strand
cagagaaugaugaagucaa

SEQ ID NO: 2474889 - RNA, 19 nt, Homo sapiens
  misc_RNA (1)...(19): siRNA sense strand
ccagacaugaagaucgaaa

SEQ ID NO: 2474890 - RNA, 19 nt, Homo sapiens
  misc_RNA (1)...(19): siRNA sense strand
gaaucaugccauagagacu

SEQ ID NO: 2474891 - RNA, 19 nt, Homo sapiens
  misc_RNA (1)...(19): siRNA sense strand
ggguugugucugaagagaa

SEQ ID NO: 2474892 - RNA, 19 nt, Homo sapiens
  misc_RNA (1)...(19): siRNA sense strand
aaagaaagaugaagaggac

SEQ ID NO: 2474893 - RNA, 19 nt, Homo sapiens
  misc_RNA (1)...(19): siRNA sense strand
aguacuauguguuggcaga

SEQ ID NO: 2474894 - RNA, 19 nt, Homo sapiens
  misc_RNA (1)...(19): siRNA sense strand
gaugaauacaccauggaga

SEQ ID NO: 2474895 - RNA, 19 nt, Homo sapiens
  misc_RNA (1)...(19): siRNA sense strand
aagucaaguucaaguccua

SEQ ID NO: 2474896 - RNA, 19 nt, Homo sapiens
  misc_RNA (1)...(19): siRNA sense strand
gugaggauucugacgacaa

SEQ ID NO: 2474897 - RNA, 19 nt, Homo sapiens
  misc_RNA (1)...(19): siRNA sense strand
aguuggaggaugaguucua

SEQ ID NO: 2474898 - RNA, 19 nt, Homo sapiens
  misc_RNA (1)...(19): siRNA sense strand
ccauagagacugaggaagg

SEQ ID NO: 2474899 - RNA, 19 nt, Homo sapiens
  misc_RNA (1)...(19): siRNA sense strand
ugccauagagacugaggaa

SEQ ID NO: 2474900 - RNA, 19 nt, Homo sapiens
  misc_RNA (1)...(19): siRNA sense strand
acaugaagaucgaaagccu

SEQ ID NO: 2474901 - RNA, 19 nt, Homo sapiens
  misc_RNA (1)...(19): siRNA sense strand
aaguugaagaggaagguca

SEQ ID NO: 2474902 - RNA, 19 nt, Homo sapiens
  misc_RNA (1)...(19): siRNA sense strand
uugccagccuugagcagaa

SEQ ID NO: 2474903 - RNA, 19 nt, Homo sapiens
  misc_RNA (1)...(19): siRNA sense strand
ccgaggagagucuuggcaa

SEQ ID NO: 2474904 - RNA, 19 nt, Homo sapiens
  misc_RNA (1)...(19): siRNA sense strand
agaaagaugaagaggacaa

SEQ ID NO: 2474905 - RNA, 19 nt, Homo sapiens
  misc_RNA (1)...(19): siRNA sense strand
gaauuuaaggagaugggaa

SEQ ID NO: 2474906 - RNA, 19 nt, Homo sapiens
  misc_RNA (1)...(19): siRNA sense strand
aauuuaaggagaugggaau

SEQ ID NO: 2474907 - RNA, 19 nt, Homo sapiens
  misc_RNA (1)...(19): siRNA sense strand
ccaucuuagcagagaauga

SEQ ID NO: 2474908 - RNA, 19 nt, Homo sapiens
  misc_RNA (1)...(19): siRNA sense strand
caaagaaagaugaagagga

SEQ ID NO: 2474909 - RNA, 19 nt, Homo sapiens
  misc_RNA (1)...(19): siRNA sense strand
gagacaggaaugggagaaa

SEQ ID NO: 2474910 - RNA, 19 nt, Homo sapiens
  misc_RNA (1)...(19): siRNA sense strand
ccgaagaaggguggagcua

SEQ ID NO: 2474911 - RNA, 19 nt, Homo sapiens
  misc_RNA (1)...(19): siRNA sense strand
ggaucgaauaugaugaaga

SEQ ID NO: 2474912 - RNA, 19 nt, Homo sapiens
  misc_RNA (1)...(19): siRNA sense strand
cagagaaugaugaagucaa

SEQ ID NO: 2474913 - RNA, 19 nt, Homo sapiens
  misc_RNA (1)...(19): siRNA sense strand
ccagacaugaagaucgaaa

SEQ ID NO: 2474914 - RNA, 19 nt, Homo sapiens
  misc_RNA (1)...(19): siRNA sense strand
gaaucaugccauagagacu

SEQ ID NO: 2474915 - RNA, 19 nt, Homo sapiens
  misc_RNA (1)...(19): siRNA sense strand
ggguugugucugaagagaa

SEQ ID NO: 2474916 - RNA, 19 nt, Homo sapiens
  misc_RNA (1)...(19): siRNA sense strand
aaagaaagaugaagaggac

SEQ ID NO: 2474917 - RNA, 19 nt, Homo sapiens
  misc_RNA (1)...(19): siRNA sense strand
aguacuauguguuggcaga

SEQ ID NO: 2474918 - RNA, 19 nt, Homo sapiens
  misc_RNA (1)...(19): siRNA sense strand
gaugaauacaccauggaga

SEQ ID NO: 2474919 - RNA, 19 nt, Homo sapiens
  misc_RNA (1)...(19): siRNA sense strand
aagucaaguucaaguccua

SEQ ID NO: 2474920 - RNA, 19 nt, Homo sapiens
  misc_RNA (1)...(19): siRNA sense strand
gugaggauucugacgacaa

SEQ ID NO: 2474921 - RNA, 19 nt, Homo sapiens
  misc_RNA (1)...(19): siRNA sense strand
aguuggaggaugaguucua

SEQ ID NO: 2474922 - RNA, 19 nt, Homo sapiens
  misc_RNA (1)...(19): siRNA sense strand
ccauagagacugaggaagg

SEQ ID NO: 2474923 - RNA, 19 nt, Homo sapiens
  misc_RNA (1)...(19): siRNA sense strand
ugccauagagacugaggaa

SEQ ID NO: 2474924 - RNA, 19 nt, Homo sapiens
  misc_RNA (1)...(19): siRNA sense strand
acaugaagaucgaaagccu

SEQ ID NO: 2474925 - RNA, 19 nt, Homo sapiens
  misc_RNA (1)...(19): siRNA sense strand
aaguugaagaggaagguca

SEQ ID NO: 2474926 - RNA, 19 nt, Homo sapiens
  misc_RNA (1)...(19): siRNA sense strand
uugccagccuugagcagaa

SEQ ID NO: 2474927 - RNA, 19 nt, Homo sapiens
  misc_RNA (1)...(19): siRNA sense strand
ccgaggagagucuuggcaa

SEQ ID NO: 2474928 - RNA, 19 nt, Homo sapiens
  misc_RNA (1)...(19): siRNA sense strand
cggcauagacccagggaac

SEQ ID NO: 2474929 - RNA, 19 nt, Homo sapiens
  misc_RNA (1)...(19): siRNA sense strand
aggacaagcuggaagggcu

SEQ ID NO: 2474930 - RNA, 19 nt, Homo sapiens
  misc_RNA (1)...(19): siRNA sense strand
agagagaauuccagagguc

SEQ ID NO: 2474931 - RNA, 19 nt, Homo sapiens
  misc_RNA (1)...(19): siRNA sense strand
augcaaggaagaugaacau

SEQ ID NO: 2474932 - RNA, 19 nt, Homo sapiens
  misc_RNA (1)...(19): siRNA sense strand
gcauggagguggaugggcu

SEQ ID NO: 2474933 - RNA, 19 nt, Homo sapiens
  misc_RNA (1)...(19): siRNA sense strand
gaagagcugcugauggcaa

SEQ ID NO: 2474934 - RNA, 19 nt, Homo sapiens
  misc_RNA (1)...(19): siRNA sense strand
ggcccauucccaaggacaa

SEQ ID NO: 2474935 - RNA, 19 nt, Homo sapiens
  misc_RNA (1)...(19): siRNA sense strand
cagaagagacccagcaggu

SEQ ID NO: 2474936 - RNA, 19 nt, Homo sapiens
  misc_RNA (1)...(19): siRNA sense strand
guugggaaucaaagagcuu

SEQ ID NO: 2474937 - RNA, 19 nt, Homo sapiens
  misc_RNA (1)...(19): siRNA sense strand
agagaauuccagaggucca

SEQ ID NO: 2474938 - RNA, 19 nt, Homo sapiens
  misc_RNA (1)...(19): siRNA sense strand
gaaagauucugccagguca

SEQ ID NO: 2474939 - RNA, 19 nt, Homo sapiens
  misc_RNA (1)...(19): siRNA sense strand
guguaaugaaugugggaaa

SEQ ID NO: 2474940 - RNA, 19 nt, Homo sapiens
  misc_RNA (1)...(19): siRNA sense strand
aaugcauacuggagagaaa

SEQ ID NO: 2474941 - RNA, 19 nt, Homo sapiens
  misc_RNA (1)...(19): siRNA sense strand
aaugcauaguggagagaaa

SEQ ID NO: 2474942 - RNA, 19 nt, Homo sapiens
  misc_RNA (1)...(19): siRNA sense strand
aauugguacuguagagaaa

SEQ ID NO: 2474943 - RNA, 19 nt, Homo sapiens
  misc_RNA (1)...(19): siRNA sense strand
guccagaaugggugagaaa

SEQ ID NO: 2474944 - RNA, 19 nt, Homo sapiens
  misc_RNA (1)...(19): siRNA sense strand
ggaaagauauauaugggau

SEQ ID NO: 2474945 - RNA, 19 nt, Homo sapiens
  misc_RNA (1)...(19): siRNA sense strand
uuguaaugagugugggaaa

SEQ ID NO: 2474946 - RNA, 19 nt, Homo sapiens
  misc_RNA (1)...(19): siRNA sense strand
aacucauacuggagagaaa

SEQ ID NO: 2474947 - RNA, 19 nt, Homo sapiens
  misc_RNA (1)...(19): siRNA sense strand
gacucauacaggagagaaa

SEQ ID NO: 2474948 - RNA, 19 nt, Homo sapiens
  misc_RNA (1)...(19): siRNA sense strand
cuguagagaaagcguauaa

SEQ ID NO: 2474949 - RNA, 19 nt, Homo sapiens
  misc_RNA (1)...(19): siRNA sense strand
caucaaaucuuuaaccaga

SEQ ID NO: 2474950 - RNA, 19 nt, Homo sapiens
  misc_RNA (1)...(19): siRNA sense strand
auacaaugaaugggagaaa

SEQ ID NO: 2474951 - RNA, 19 nt, Homo sapiens
  misc_RNA (1)...(19): siRNA sense strand
ggaaaauccuguagccaga

SEQ ID NO: 2474952 - RNA, 19 nt, Homo sapiens
  misc_RNA (1)...(19): siRNA sense strand
aggaauucacacaggagaa

SEQ ID NO: 2474953 - RNA, 19 nt, Homo sapiens
  misc_RNA (1)...(19): siRNA sense strand
cacuuacacugcagagaaa

SEQ ID NO: 2474954 - RNA, 19 nt, Homo sapiens
  misc_RNA (1)...(19): siRNA sense strand
ccuuauuauucaucagaga

SEQ ID NO: 2474955 - RNA, 19 nt, Homo sapiens
  misc_RNA (1)...(19): siRNA sense strand
augugaugcuggagaccua

SEQ ID NO: 2474956 - RNA, 19 nt, Homo sapiens
  misc_RNA (1)...(19): siRNA sense strand
gguuagaaguuuugggaug

SEQ ID NO: 2474957 - RNA, 19 nt, Homo sapiens
  misc_RNA (1)...(19): siRNA sense strand
ccuuaguaaacaugaaaga

SEQ ID NO: 2474958 - RNA, 19 nt, Homo sapiens
  misc_RNA (1)...(19): siRNA sense strand
auguacugaaugugggaaa

SEQ ID NO: 2474959 - RNA, 19 nt, Homo sapiens
  misc_RNA (1)...(19): siRNA sense strand
ccagaaugggugagaaauc

SEQ ID NO: 2474960 - RNA, 19 nt, Homo sapiens
  misc_RNA (1)...(19): siRNA sense strand
cugucaggaauguggcaaa

SEQ ID NO: 2474961 - RNA, 19 nt, Homo sapiens
  misc_RNA (1)...(19): siRNA sense strand
aagaaaccauacuggagaa

SEQ ID NO: 2474962 - RNA, 19 nt, Homo sapiens
  misc_RNA (1)...(19): siRNA sense strand
ggagaaaagcccuacaaau

SEQ ID NO: 2474963 - RNA, 19 nt, Homo sapiens
  misc_RNA (1)...(19): siRNA sense strand
gggaaaucauucagcugga

SEQ ID NO: 2474964 - RNA, 19 nt, Homo sapiens
  misc_RNA (1)...(19): siRNA sense strand
uggugaucauaaaggaauu

SEQ ID NO: 2474965 - RNA, 19 nt, Homo sapiens
  misc_RNA (1)...(19): siRNA sense strand
ucauaaaggaauucacaca

SEQ ID NO: 2474966 - RNA, 19 nt, Homo sapiens
  misc_RNA (1)...(19): siRNA sense strand
cuuuauaugcagugaaugu

SEQ ID NO: 2474967 - RNA, 19 nt, Homo sapiens
  misc_RNA (1)...(19): siRNA sense strand
ggcaaagcauucagagaac

SEQ ID NO: 2474968 - RNA, 19 nt, Homo sapiens
  misc_RNA (1)...(19): siRNA sense strand
augcagugaauguggaaaa

SEQ ID NO: 2474969 - RNA, 19 nt, Homo sapiens
  misc_RNA (1)...(19): siRNA sense strand
acaaugaaugggagaaagu

SEQ ID NO: 2474970 - RNA, 19 nt, Homo sapiens
  misc_RNA (1)...(19): siRNA sense strand
aagaauacaaacuggagau

SEQ ID NO: 2474971 - RNA, 19 nt, Homo sapiens
  misc_RNA (1)...(19): siRNA sense strand
gcuaugaggcagauggucu

SEQ ID NO: 2474972 - RNA, 19 nt, Homo sapiens
  misc_RNA (1)...(19): siRNA sense strand
ucuauaagccugauacaca

SEQ ID NO: 2474973 - RNA, 19 nt, Homo sapiens
  misc_RNA (1)...(19): siRNA sense strand
cuauuuacccugcaagaau

SEQ ID NO: 2474974 - RNA, 19 nt, Homo sapiens
  misc_RNA (1)...(19): siRNA sense strand
gaugacagcuguugaccca

SEQ ID NO: 2474975 - RNA, 19 nt, Homo sapiens
  misc_RNA (1)...(19): siRNA sense strand
aaauacaaugaaugggaga

SEQ ID NO: 2474976 - RNA, 19 nt, Homo sapiens
  misc_RNA (1)...(19): siRNA sense strand
gaaugugauaaauguggaa

SEQ ID NO: 2474977 - RNA, 19 nt, Homo sapiens
  misc_RNA (1)...(19): siRNA sense strand
gcccuaugaauguaauaaa

SEQ ID NO: 2474978 - RNA, 19 nt, Homo sapiens
  misc_RNA (1)...(19): siRNA sense strand
uugccaagccugaggucau

SEQ ID NO: 2474979 - RNA, 19 nt, Homo sapiens
  misc_RNA (1)...(19): siRNA sense strand
cccuaugacuacaaugaau

SEQ ID NO: 2474980 - RNA, 19 nt, Homo sapiens
  misc_RNA (1)...(19): siRNA sense strand
acccuaugaaugugauaaa

SEQ ID NO: 2474981 - RNA, 19 nt, Homo sapiens
  misc_RNA (1)...(19): siRNA sense strand
cuucaacaccagagaaauc

SEQ ID NO: 2474982 - RNA, 19 nt, Homo sapiens
  misc_RNA (1)...(19): siRNA sense strand
guggcaaagcauucagaga

SEQ ID NO: 2474983 - RNA, 19 nt, Homo sapiens
  misc_RNA (1)...(19): siRNA sense strand
ccuuguugcucaucggaga

SEQ ID NO: 2474984 - RNA, 19 nt, Homo sapiens
  misc_RNA (1)...(19): siRNA sense strand
cgcuuuauaugcagugaau

SEQ ID NO: 2474985 - RNA, 19 nt, Homo sapiens
  misc_RNA (1)...(19): siRNA sense strand
ucaccuuguuagacaucaa

SEQ ID NO: 2474986 - RNA, 19 nt, Homo sapiens
  misc_RNA (1)...(19): siRNA sense strand
auguaaucagugugaaaga

SEQ ID NO: 2474987 - RNA, 19 nt, Homo sapiens
  misc_RNA (1)...(19): siRNA sense strand
gagaaugcauaguggagag

SEQ ID NO: 2474988 - RNA, 19 nt, Homo sapiens
  misc_RNA (1)...(19): siRNA sense strand
agaauacaaacuggagaua

SEQ ID NO: 2474989 - RNA, 19 nt, Homo sapiens
  misc_RNA (1)...(19): siRNA sense strand
uguuagacaucaaaggacu

SEQ ID NO: 2474990 - RNA, 19 nt, Homo sapiens
  misc_RNA (1)...(19): siRNA sense strand
cuauaagccugauacacau

SEQ ID NO: 2474991 - RNA, 19 nt, Homo sapiens
  misc_RNA (1)...(19): siRNA sense strand
ggaaaagccuucagcugga

SEQ ID NO: 2474992 - RNA, 19 nt, Homo sapiens
  misc_RNA (1)...(19): siRNA sense strand
ggagagaaaccuuuugaau

SEQ ID NO: 2474993 - RNA, 19 nt, Homo sapiens
  misc_RNA (1)...(19): siRNA sense strand
ggaaaauccuucagcugga

SEQ ID NO: 2474994 - RNA, 19 nt, Homo sapiens
  misc_RNA (1)...(19): siRNA sense strand
ggagaagagccguggucag

SEQ ID NO: 2474995 - RNA, 19 nt, Homo sapiens
  misc_RNA (1)...(19): siRNA sense strand
ggacagaugugaagagcca

SEQ ID NO: 2474996 - RNA, 19 nt, Homo sapiens
  misc_RNA (1)...(19): siRNA sense strand
cagcaagacccaaggccaa

SEQ ID NO: 2474997 - RNA, 19 nt, Homo sapiens
  misc_RNA (1)...(19): siRNA sense strand
caacaagugucuagccuca

SEQ ID NO: 2474998 - RNA, 19 nt, Homo sapiens
  misc_RNA (1)...(19): siRNA sense strand
cagaauaucccuaagagga

SEQ ID NO: 2474999 - RNA, 19 nt, Homo sapiens
  misc_RNA (1)...(19): siRNA sense strand
auaaagaugacgagugcuu

SEQ ID NO: 2475000 - RNA, 19 nt, Homo sapiens
  misc_RNA (1)...(19): siRNA sense strand
gugacauuacggaguuaaa

SEQ ID NO: 2475001 - RNA, 19 nt, Homo sapiens
  misc_RNA (1)...(19): siRNA sense strand
acauggaauccuugaguca

SEQ ID NO: 2475002 - RNA, 19 nt, Homo sapiens
  misc_RNA (1)...(19): siRNA sense strand
ccuucaucaaacagaauua

SEQ ID NO: 2475003 - RNA, 19 nt, Homo sapiens
  misc_RNA (1)...(19): siRNA sense strand
gaauaaagaugacgagugc

SEQ ID NO: 2475004 - RNA, 19 nt, Homo sapiens
  misc_RNA (1)...(19): siRNA sense strand
gcuacagauuggcugggaa

SEQ ID NO: 2475005 - RNA, 19 nt, Homo sapiens
  misc_RNA (1)...(19): siRNA sense strand
guguuugaggagauugaua

SEQ ID NO: 2475006 - RNA, 19 nt, Homo sapiens
  misc_RNA (1)...(19): siRNA sense strand
cuaucagggaagaguguca

SEQ ID NO: 2475007 - RNA, 19 nt, Homo sapiens
  misc_RNA (1)...(19): siRNA sense strand
cguaucuauuugugcgaca

SEQ ID NO: 2475008 - RNA, 19 nt, Homo sapiens
  misc_RNA (1)...(19): siRNA sense strand
ccaaauggucacuggcacu

SEQ ID NO: 2475009 - RNA, 19 nt, Homo sapiens
  misc_RNA (1)...(19): siRNA sense strand
gagugucagcuguggauca

SEQ ID NO: 2475010 - RNA, 19 nt, Homo sapiens
  misc_RNA (1)...(19): siRNA sense strand
ccuaacagguugaauccca

SEQ ID NO: 2475011 - RNA, 19 nt, Homo sapiens
  misc_RNA (1)...(19): siRNA sense strand
guggaaggcaccuagccaa

SEQ ID NO: 2475012 - RNA, 19 nt, Homo sapiens
  misc_RNA (1)...(19): siRNA sense strand
cuaaagagcuggauggugu

SEQ ID NO: 2475013 - RNA, 19 nt, Homo sapiens
  misc_RNA (1)...(19): siRNA sense strand
gcaaaugacuggagccgca

SEQ ID NO: 2475014 - RNA, 19 nt, Homo sapiens
  misc_RNA (1)...(19): siRNA sense strand
cuggaaagacacaggcuga

SEQ ID NO: 2475015 - RNA, 19 nt, Homo sapiens
  misc_RNA (1)...(19): siRNA sense strand
gguacauggcagacacauu

SEQ ID NO: 2475016 - RNA, 19 nt, Homo sapiens
  misc_RNA (1)...(19): siRNA sense strand
ugaacagggcucagcaaau

SEQ ID NO: 2475017 - RNA, 19 nt, Homo sapiens
  misc_RNA (1)...(19): siRNA sense strand
ggaaacacauccagaggcu

SEQ ID NO: 2475018 - RNA, 19 nt, Homo sapiens
  misc_RNA (1)...(19): siRNA sense strand
gcauggcagaaguggagaa

SEQ ID NO: 2475019 - RNA, 19 nt, Homo sapiens
  misc_RNA (1)...(19): siRNA sense strand
acaagauugcagagaggau

SEQ ID NO: 2475020 - RNA, 19 nt, Homo sapiens
  misc_RNA (1)...(19): siRNA sense strand
ccacaagauugcagagagg

SEQ ID NO: 2475021 - RNA, 19 nt, Homo sapiens
  misc_RNA (1)...(19): siRNA sense strand
cuggaacaguugugcauca

SEQ ID NO: 2475022 - RNA, 19 nt, Homo sapiens
  misc_RNA (1)...(19): siRNA sense strand
cagaaguggagaaucagaa

SEQ ID NO: 2475023 - RNA, 19 nt, Homo sapiens
  misc_RNA (1)...(19): siRNA sense strand
gggugaauccugugacacu

SEQ ID NO: 2475024 - RNA, 19 nt, Homo sapiens
  misc_RNA (1)...(19): siRNA sense strand
ucaccugcaucuugggaga

SEQ ID NO: 2475025 - RNA, 19 nt, Homo sapiens
  misc_RNA (1)...(19): siRNA sense strand
caaaggagccagugaggac

SEQ ID NO: 2475026 - RNA, 19 nt, Homo sapiens
  misc_RNA (1)...(19): siRNA sense strand
uggaugguguggaagaaaa

SEQ ID NO: 2475027 - RNA, 19 nt, Homo sapiens
  misc_RNA (1)...(19): siRNA sense strand
agauucugcuggaaagaca
